(19) United States
(12) Patent Application Publication
(10) Pub. No.: US 2024/0209332 A1
(43) Pub. Date: Jun. 27, 2024

(54) ENZYMES WITH RUVC DOMAINS

(71) Applicant: Metagenomi, Inc., Emeryville, CA (US)

(72) Inventors: Brian THOMAS, Emeryville, CA (US); Christopher BROWN, Emeryville, CA (US); Rose KANTOR, Emeryville, CA (US); Audra DEVOTO, Emeryville, CA (US); Cristina BUTTERFIELD, Emeryville, CA (US); Lisa ALEXANDER, Emeryville, CA (US); Daniela S.A. GOLTSMAN, Emeryville, CA (US); Jason LIU, Emeryville, CA (US); Rebecca LAMOTHE, Emeryville, CA (US); Diego ESPINOSA, Emeryville, CA (US); Meghan STORLIE, Emeryville, CA (US); Greg COST, Emeryville, CA (US)

(21) Appl. No.: 18/053,232

(22) Filed: Nov. 7, 2022

Related U.S. Application Data
(63) Continuation of application No. PCT/US2021/031136, filed on May 6, 2021.
(60) Provisional application No. 63/022,320, filed on May 8, 2020.
(60) Provisional application No. 63/032,464, filed on May 29, 2020.
(60) Provisional application No. 63/116,155, filed on Nov. 19, 2020.
(60) Provisional application No. 63/180,570, filed on Apr. 27, 2021.

(51) Int. Cl. C12N 9/22; C12N 15/11; C12N 15/90

(52) U.S. Cl. CPC C12N 9/22; C12N 15/11; C12N 15/907; C12N 2310/20; C12N 2800/80

(57) ABSTRACT

The present disclosure provides for endonuclease enzymes having distinguishing domain features, as well as methods of using such enzymes or variants thereof.

### RELATED APPLICATIONS

[0001] This application is a continuation of International Application No. PCT/US2021/031136, filed on May 6, 2021, entitled “ENZYMES WITH RUVC DOMAINS”, which claims the benefit of U.S. Provisional Application No. 63/022,320, filed on May 8, 2020, entitled “ENZYMES WITH RUVC DOMAINS”, U.S. Provisional Application No. 63/032,464, filed May 29, 2020, entitled “ENZYMES WITH RUVC DOMAINS”, and U.S. Provisional Application No. 63/116,155, filed on Nov. 19, 2020, entitled “ENZYMES WITH RUVC DOMAINS”, and U.S. Provisional Application No. 63/180,570, filed on Apr. 27, 2021, entitled “ENZYMES WITH RUVC DOMAINS”, all of which are incorporated by reference herein in their entireties.

### BACKGROUND

[0002] Cas enzymes along with their associated Clustered Regularly Interspaced Short Palindromic Repeats (CRISPR) guide ribonucleic acids (RNAs) appear to be a pervasive (˜45% of bacteria, ˜84% of archaea) component of prokaryotic immune systems, serving to protect such microorganisms against non-self nucleic acids, such as infectious viruses and plasmids by CRISPR-RNA guided nucleic acid cleavage. While the deoxyribonucleic acid (DNA) elements encoding CRISPR RNA elements may be relatively conserved in structure and length, their CRISPR-associated (Cas) proteins are highly diverse, containing a wide variety of nucleic acid-interacting domains. While CRISPR DNA elements have been observed as early as 1987, the programmable endonuclease cleavage ability of CRISPR/Cas complexes has only been recognized relatively recently, leading to the use of recombinant CRISPR/Cas systems in diverse DNA manipulation and gene editing applications.

### SEQUENCE LISTING

[0003] The instant application contains a Sequence Listing which has been submitted electronically in XML format and is hereby incorporated by reference in its entirety. Said XML copy, created on Feb. 3, 2023, is named 55921_712_301_SL.xml and is 12.6 KB in size.

### SUMMARY

[0004] In some aspects, the present disclosure provides for an engineered nuclease system, comprising: (a) an endonuclease comprising a RuvC_III domain and an HNH domain, wherein the endonuclease is derived from an uncultivated microorganism, wherein the endonuclease is a class 2, type II Cas endonuclease; and (b) an engineered guide ribonucleic acid structure configured to form a complex with the endonuclease comprising: (i) a guide ribonucleic acid sequence configured to hybridize to a target deoxyribonucleic acid sequence; and (ii) a tracr ribonucleic acid sequence configured to bind to the endonuclease. In some embodiments, the RuvC_III domain comprises a sequence with at least 70%, at least 75%, at least 80%, at least 85%, at least 88%, at least 90%, at least 92%, at least 95%, or at least 98% sequence identity to any one of SEQ ID NOs: 1827-3637.

[0005] In some aspects, the present disclosure provides for an engineered nuclease system comprising: (a) an endonuclease comprising a RuvC_III domain having at least 70%, at least 75%, at least 80%, at least 85%, at least 88%, at least 90%, at least 92%, at least 95%, or at least 98% sequence identity to any one of SEQ ID NOs: 1827-3637; and (b) an engineered guide ribonucleic acid structure configured to form a complex with the endonuclease comprising: (i) a guide ribonucleic acid sequence configured to hybridize to a target deoxyribonucleic acid sequence; and (ii) a tracr ribonucleic acid sequence configured to bind to the endonuclease.

[0006] In some aspects, the present disclosure provides for an engineered nuclease system comprising: (a) an endonuclease configured to bind to a protospacer adjacent motif (PAM) sequence comprising SEQ ID NOs: 5512-5537, wherein the endonuclease is a class 2, type II Cas endonuclease; and (b) an engineered guide ribonucleic acid structure configured to form a complex with the endonuclease comprising: (i) a guide ribonucleic acid sequence configured to hybridize to a target deoxyribonucleic acid sequence; and (ii) a tracr ribonucleic acid sequence configured to bind to the endonuclease.

[0007] In some embodiments, the endonuclease is derived from an uncultivated microorganism. In some embodiments, the endonuclease has not been engineered to bind to a different PAM sequence. In some embodiments, the endonuclease is not a Cas9 endonuclease, a Cas14 endonuclease, a Cas12a endonuclease, a Cas12b endonuclease, a Cas12c endonuclease, a Cas12d endonuclease, a Cas12e endonuclease, a Cas13a endonuclease, a Cas13b endonuclease, a Cas13c endonuclease, or a Cas13d endonuclease. In some embodiments, the endonuclease has less than 80% identity to a Cas9 endonuclease. In some embodiments, the endonuclease further comprises an HNH domain. In some embodiments, the tracr ribonucleic acid sequence comprises a sequence with at least 80% sequence identity to about 60 to 90 consecutive nucleotides selected from any one of SEQ ID NOs: 5476-5511 and SEQ ID NO: 5538.

[0008] In some aspects, the present disclosure provides for an engineered nuclease system comprising, (a) an engineered guide ribonucleic acid structure comprising: (i) a guide ribonucleic acid sequence configured to hybridize to a target deoxyribonucleic acid sequence; and (ii) a tracr ribonucleic acid sequence configured to bind to an endonuclease, wherein the tracr ribonucleic acid sequence comprises a sequence with at least 80% sequence identity to about 60 to 90 consecutive nucleotides selected from any one of SEQ ID NOs: 5476-5511 and SEQ ID NO: 5538; and (b) a class 2, type II Cas endonuclease configured to bind to the engineered guide ribonucleic acid. In some embodiments, the endonuclease is configured to bind to a protospacer adjacent motif (PAM) sequence selected from the group comprising SEQ ID NOs: 5512-5537.

[0009] In some embodiments, the engineered guide ribonucleic acid structure comprises at least two ribonucleic acid polynucleotides. In some embodiments, the engineered guide ribonucleic acid structure comprises one ribonucleic acid polynucleotide comprising the guide ribonucleic acid sequence and the tracr ribonucleic acid sequence.

[0010] In some embodiments, the guide ribonucleic acid sequence is complementary to a prokaryotic, bacterial, archaeal, eukaryotic, fungal, plant, mammalian, or human genomic sequence. In some embodiments, the guide ribonucleic acid sequence is 15-24 nucleotides in length. In some embodiments, the endonuclease comprises one or more nuclear localization sequences (NLSs) proximal to an N- or C-terminus of the endonuclease. In some embodiments, the NLS comprises a sequence selected from SEQ ID NOs: 5597-5612.

[0011] In some embodiments, the engineered nuclease system further comprises a single- or double-stranded DNA repair template comprising from 5′ to 3′: a first homology arm comprising a sequence of at least 20 nucleotides 5′ to the target deoxyribonucleic acid sequence, a synthetic DNA sequence of at least 10 nucleotides, and a second homology arm comprising a sequence of at least 20 nucleotides 3′ to the target sequence. In some embodiments, the first or second homology arm comprises a sequence of at least 40, 80, 120, 150, 200, 300, 500, or 1,000 nucleotides.

[0012] In some embodiments, the system further comprises a source of Mg2+.

[0013] In some embodiments, the endonuclease and the tracr ribonucleic acid sequence are derived from distinct bacterial species within a same phylum. In some embodiments, the endonuclease is derived from a bacterium belonging to a genus Dermabacter. In some embodiments, the endonuclease is derived from a bacterium belonging to Phylum Verrucomicrobia, Phylum Candidatus Peregrinibacteria, or Phylum Candidatus Melainabacteria. In some embodiments, the endonuclease is derived from a bacterium comprising a 16S rRNA gene having at least 90% identity to any one of SEQ ID NOs: 5592-5595.

[0014] In some embodiments, the HNH domain comprises a sequence with at least 70% or at least 80% identity to any one of SEQ ID NOs: 5638-5460. In some embodiments, the endonuclease comprises SEQ ID NOs: 1-1826 or a variant thereof having at least 55% identity thereto. In some embodiments, the endonuclease comprises a sequence at least 70%, 80%, or 90% identical to a sequence selected from the group consisting of SEQ ID NOs: 1827-1830 or SEQ ID NOs: 1827-2140.

[0015] In some embodiments, the endonuclease comprises a sequence at least 70%, 80%, or 90% identical to a sequence selected from the group consisting of SEQ ID NOs: 3638-3641 or SEQ ID NOs: 3638-3954. In some embodiments, the endonuclease comprises at least 1, at least 2, at least 3, at least 4, or at least 5 peptide motifs selected from the group consisting of SEQ ID NOs: 5615-5632. In some embodiments, the endonuclease comprises a sequence at least 70%, 80%, or 90% identical to a sequence selected from the group consisting of SEQ ID NOs: 1-4 or SEQ ID NOs: 1-319.

[0016] In some embodiments, the guide RNA structure comprises a sequence at least 70%, 80%, or 90% identical to a sequence selected from the group consisting of SEQ ID NOs: 5461-5464, SEQ ID NOs: 5476-5479, or SEQ ID NOs: 5476-5489. In some embodiments, the guide RNA structure comprises an RNA sequence predicted to comprise a hairpin consisting of a stem and a loop, wherein the stem comprises at least 10, at least 12 or at least 14 base-paired ribonucleotides, and an asymmetric bulge within 4 base pairs of the loop.

[0017] In some embodiments, the endonuclease is configured to bind to a PAM comprising a sequence selected from the group consisting of SEQ ID NOs: 5512-5515 or SEQ ID NOs: 5527-5530.

[0018] In some embodiments: (a) the endonuclease comprises a sequence at least 70%, at least 80%, or at least 90% identical to SEQ ID NO: 1827; (b) the guide RNA structure comprises a sequence at least 70%, at least 80%, or at least 90% identical to at least one of SEQ ID NO: 5461 or SEQ ID NO: 5476; and (c) the endonuclease is configured to bind to a PAM comprising SEQ ID NO: 5512 or SEQ ID NO: 5527. In some embodiments: (a) the endonuclease comprises a sequence at least 70%, at least 80%, or at least 90% identical to SEQ ID NO: 1828; (b) the guide RNA structure comprises a sequence at least 70%, at least 80%, or at least 90% identical to at least one of SEQ ID NO: 5462 or SEQ ID NO: 5477; and (c) the endonuclease is configured to bind to a PAM comprising SEQ ID NO: 5513 or SEQ ID NO: 5528. In some embodiments: (a) the endonuclease comprises a sequence at least 70%, at least 80%, or at least 90% identical to SEQ ID NO: 1829; (b) the guide RNA structure comprises a sequence at least 70%, at least 80%, or at least 90% identical to at least one of SEQ ID NO: 5463 or SEQ ID NO: 5478; and (c) the endonuclease is configured to bind to a PAM comprising SEQ ID NO: 5514 or SEQ ID NO: 5529. In some embodiments: (a) the endonuclease comprises a sequence at least 70%, at least 80%, or at least 90% identical to SEQ ID NO: 1830; (b) the guide RNA structure comprises a sequence at least 70%, at least 80%, or at least 90% identical to at least one of SEQ ID NO: 5464 or SEQ ID NO: 5479; and (c) the endonuclease is configured to bind to a PAM comprising SEQ ID NO: 5515 or SEQ ID NO: 5530.

[0019] In some embodiments, the endonuclease comprises a sequence at least 70%, 80%, or 90% identical to a sequence selected from the group consisting of SEQ ID NOs: 2141-2142 or SEQ ID NOs: 2141-2241. In some embodiments, the endonuclease comprises a sequence at least 70%, 80%, or 90% identical to a sequence selected from the group consisting of SEQ ID NOs: 3955-3956 or SEQ ID NOs: 3955-4055. In some embodiments, the endonuclease comprises at least 1, at least 2, at least 3, at least 4, or at least 5 peptide motifs selected from the group consisting of SEQ ID NOs: 5632-5638. In some embodiments, the endonuclease comprises a sequence at least 70%, 80%, or 90% identical to a sequence selected from the group consisting of SEQ ID NOs: 320-321 or SEQ ID NOs: 320-420. In some embodiments, the guide RNA structure comprises a sequence at least 70%, 80%, or 90% identical to a sequence selected from the group consisting of SEQ ID NO: 5465, SEQ ID NOs: 5490-5491 or SEQ ID NOs: 5490-5494. In some embodiments, the guide RNA structure comprises a tracr ribonucleic acid sequence comprising a hairpin comprising at least 8, at least 10, or at least 12 base-paired ribonucleotides. In some embodiments, the endonuclease is configured to bind to a PAM comprising a sequence selected from the group consisting of SEQ ID NOs: 5516 and SEQ ID NOs: 5531. In some embodiments: (a) the endonuclease comprises a sequence at least 70%, 80%, or 90% identical to SEQ ID NO: 2141; (b) the guide RNA structure comprises a sequence at least 70%, 80%, or 90% identical to SEQ ID NO: 5490; and (c) the endonuclease is configured to binding to a PAM comprising SEQ ID NO: 5531. In some embodiments: (a) the endonuclease comprises a sequence at least 70%, 80%, or 90% identical to SEQ ID NO: 2142; (b) the guide RNA structure comprises a sequence at least 70%, 80%, or 90% identical to SEQ ID NO: 5465 or SEQ ID NO: 5491; and (c) the endonuclease is configured to binding to a PAM comprising SEQ ID NO: 5516.

[0020] In some embodiments, the endonuclease comprises a sequence at least 70%, 80%, or 90% identical to a sequence selected from the group consisting of SEQ ID NOs: 2245-2246. In some embodiments, the endonuclease comprises a sequence at least 70%, 80%, or 90% identical to a sequence selected from the group consisting of SEQ ID NOs: 4059-4060. In some embodiments, the endonuclease comprises at least 1, at least 2, at least 3, at least 4, or at least 5 peptide motifs selected from the group consisting of SEQ ID NOs: 5639-5648. In some embodiments, the endonuclease comprises a sequence at least 70%, 80%, or 90% identical to a sequence selected from the group consisting of SEQ ID NOs: 424-425. In some embodiments, the guide RNA structure comprises a sequence at least 70%, 80%, or 90% identical to a sequence selected from the group consisting of SEQ ID NOs: 5498-5499 and SEQ ID NO: 5539. In some embodiments, the guide RNA structure comprises a guide ribonucleic acid sequence predicted to comprise a hairpin with an uninterrupted base-paired region comprising at least 8 nucleotides of a guide ribonucleic acid sequence and at least 8 nucleotides of a tracr ribonucleic acid sequence, and wherein the tracr ribonucleic acid sequence comprises, from 5′ to 3′, a first hairpin and a second hairpin, wherein the first hairpin has a longer stem than the second hairpin.

[0021] In some embodiments, the endonuclease comprises a sequence at least 70%, 80%, or 90% identical to a sequence selected from the group consisting of SEQ ID NOs: 2242-2244 or SEQ ID NOs: 2247-2249. In some embodiments, the endonuclease comprises a sequence at least 70%, 80%, or 90% identical to a sequence selected from the group consisting of SEQ ID NOs: 4056-4058 and SEQ ID NOs 4061-4063. In some embodiments, the endonuclease comprises at least 1, at least 2, at least 3, at least 4, or at least 5 peptide motifs selected from the group consisting of SEQ ID NOs: 5639-5648. In some embodiments, the endonuclease comprises a sequence at least 70%, 80%, or 90% identical to a sequence selected from the group consisting of SEQ ID NOs: 421-423 or SEQ ID NOs: 426-428. In some embodiments, the guide RNA structure comprises a sequence at least 70%, 80%, or 90% identical to a sequence selected from the group consisting of SEQ ID NOs: 5466-5467, SEQ ID NOs: 5495-5497, SEQ ID NO: 5500-5502, and SEQ ID NO: 5539. In some embodiments, the guide RNA structure comprises a guide ribonucleic acid sequence predicted to comprise a hairpin with an uninterrupted base-paired region comprising at least 8 nucleotides of a guide ribonucleic acid sequence and at least 8 nucleotides of a tracr ribonucleic acid sequence, and wherein the tracr ribonucleic acid sequence comprises, from 5′ to 3′, a first hairpin and a second hairpin, wherein the first hairpin has a longer stem than the second hairpin. In some embodiments, the endonuclease is configured to binding to a PAM comprising a sequence selected from the group consisting of SEQ ID NOs: 5517-5518 or SEQ ID NOs: 5532-5534. In some embodiments: (a) the endonuclease comprises a sequence at least 70%, 80%, or 90% identical to SEQ ID NO: 2247; (b) the guide RNA structure comprises a sequence at least 70%, 80%, or 90% identical to SEQ ID NO: 5500; and (c) the endonuclease is configured to binding to a PAM comprising SEQ ID NO: 5517 or SEQ ID NO: 5532. In some embodiments: (a) the endonuclease comprises a sequence at least 70%, 80%, or 90% identical to SEQ ID NO: 2248; (b) the guide RNA structure comprises a sequence at least 70%, 80%, or 90% identical to SEQ ID NO: 5501; and (c) the endonuclease is configured to binding to a PAM comprising SEQ ID NO: 5518 or SEQ ID NOs: 5533. In some embodiments: (a) the endonuclease comprises a sequence at least 70%, 80%, or 90% identical to SEQ ID NO: 2249; (b) the guide RNA structure comprises a sequence at least 70%, 80%, or 90% identical to SEQ ID NO: 5502; and (c) the endonuclease is configured to binding to a PAM comprising SEQ ID NO: 5534.

[0022] In some embodiments, the endonuclease comprises a sequence at least 70%, 80%, or 90% identical to a sequence selected from the group consisting of SEQ ID NO: 2253 or SEQ ID NOs: 2253-2481. In some embodiments, the endonuclease comprises a sequence at least 70%, 80%, or 90% identical to a sequence selected from the group consisting of SEQ ID NO: 4067 or SEQ ID NOs: 4067-4295. In some embodiments, the endonuclease comprises a peptide motif according to SEQ ID NO: 5649. In some embodiments, the endonuclease comprises a sequence at least 70%, 80%, or 90% identical to a sequence selected from the group consisting of SEQ ID NO: 432 or SEQ ID NOs: 432-660. In some embodiments, the guide RNA structure comprises a sequence at least 70%, 80%, or 90% identical to a sequence selected from the group consisting of SEQ ID NO: 5468 or SEQ ID NO: 5503. In some embodiments, the endonuclease is configured to binding to a PAM comprising a sequence selected from the group consisting of SEQ ID NOs: 5519. In some embodiments: (a) the endonuclease comprises a sequence at least 70%, 80%, or 90% identical to SEQ ID NO: 2253; (b) the guide RNA structure comprises a sequence at least 70%, 80%, or 90% identical to SEQ ID NO: 5468 or SEQ ID NO: 5503; and (c) the endonuclease is configured to binding to a PAM comprising SEQ ID NO: 5519.

[0023] In some embodiments, the endonuclease comprises a sequence at least 70%, 80%, or 90% identical to a sequence selected from the group consisting of SEQ ID NOs: 2482-2489. In some embodiments, the endonuclease comprises a sequence at least 70%, 80%, or 90% identical to a sequence selected from the group consisting of SEQ ID NOs: 4296-4303. In some embodiments, the endonuclease comprises a sequence at least 70%, 80%, or 90% identical to a sequence selected from the group consisting of or SEQ ID NOs: 661-668. In some embodiments, the endonuclease comprises a sequence at least 70%, 80%, or 90% identical to a sequence selected from the group consisting of or SEQ ID NOs: 2490-2498. In some embodiments, the endonuclease comprises a sequence at least 70%, 80%, or 90% identical to a sequence selected from the group consisting of SEQ ID NOs: 4304-4312. In some embodiments, the endonuclease comprises a sequence at least 70%, 80%, or 90% identical to a sequence selected from the group consisting of SEQ ID NOs: 669-677. In some embodiments, the guide RNA structure comprises a sequence at least 70%, 80%, or 90% identical to a sequence selected from the group consisting of SEQ ID NO: 5504.

[0024] In some embodiments, the endonuclease comprises a sequence at least 70%, 80%, or 90% identical to a sequence selected from the group consisting of SEQ ID NO: 2499 or SEQ ID NOs: 2499-2750. In some embodiments, the endonuclease comprises a sequence at least 70%, 80%, or 90% identical to a sequence selected from the group consisting of SEQ ID NO: 4313 or SEQ ID NOs: 4313-4564. In some embodiments, the endonuclease comprises at least 1, at least 2, at least 3, at least 4, or at least 5 peptide motifs selected from the group consisting of SEQ ID NOs: 5650-5667. In some embodiments, the endonuclease comprises a sequence at least 70%, 80%, or 90% identical to a sequence selected from the group consisting of SEQ ID NO: 678 or SEQ ID NOs: 678-929. In some embodiments, the guide RNA structure comprises a sequence at least 70%, 80%, or 90% identical to SEQ ID NO: 5469 or SEQ ID NO: 5505. In some embodiments, the endonuclease is configured to binding to a PAM comprising SEQ ID NOs: 5520 or SEQ ID NOs: 5535. In some embodiments: (a) the endonuclease comprises a sequence at least 70%, 80%, or 90% identical to SEQ ID NO: 2499; (b) the guide RNA structure comprises a sequence at least 70%, 80%, or 90% identical to SEQ ID NO: 5469 or SEQ ID NO: 5505; and (c) the endonuclease is configured to binding to a PAM comprising SEQ ID NO: 5520 or SEQ ID NO: 5535.

[0025] In some embodiments, the endonuclease comprises a sequence at least 70%, 80%, or 90% identical to a sequence selected from the group consisting of SEQ ID NO: 2751 or SEQ ID NOs: 2751-2913. In some embodiments, the endonuclease comprises a sequence at least 70%, 80%, or 90% identical to a sequence selected from the group consisting of SEQ ID NO: 4565 or SEQ ID NOs: 4565-4727. In some embodiments, the endonuclease comprises at least 1, at least 2, at least 3, at least 4, or at least 5 peptide motifs selected from the group consisting of SEQ ID NOs: 5668-5678. In some embodiments, the endonuclease comprises a sequence at least 70%, 80%, or 90% identical to a sequence selected from the group consisting of SEQ ID NO: 930 or SEQ ID NOs: 930-1092. In some embodiments, the guide RNA structure comprises a sequence at least 70%, 80%, or 90% identical to SEQ ID NO: 5470 or SEQ ID NOs: 5506. In some embodiments, the endonuclease is configured to binding to a PAM comprising a sequence selected from the group consisting of SEQ ID NOs: 5521 or SEQ ID NOs: 5536. In some embodiments: (a) the endonuclease comprises a sequence at least 70%, 80%, or 90% identical to SEQ ID NO: 2751; (b) the guide RNA structure comprises a sequence at least 70%, 80%, or 90% identical to SEQ ID NO: 5470 or SEQ ID NO: 5506; and (c) the endonuclease is configured to binding to a PAM comprising SEQ ID NO: 5521 or SEQ ID NO: 5536.

[0026] In some embodiments, the endonuclease comprises a sequence at least 70%, 80%, or 90% identical to a sequence selected from the group consisting of SEQ ID NO: 2914 or SEQ ID NOs: 2914-3174. In some embodiments, the endonuclease comprises a sequence at least 70%, 80%, or 90% identical to a sequence selected from the group consisting of SEQ ID NO: 4728 or SEQ ID NOs: 4728-4988. In some embodiments, the endonuclease comprises at least 1, at least 2, or at least 3 peptide motifs selected from the group consisting of SEQ ID NOs: 5676-5678. In some embodiments, the endonuclease comprises a sequence at least 70%, 80%, or 90% identical to a sequence selected from the group consisting of SEQ ID NO: 1093 or SEQ ID NOs: 1093-1353. In some embodiments, the guide RNA structure comprises a sequence at least 70%, 80%, or 90% identical to a sequence selected from the group consisting of SEQ ID NO: 5471, SEQ ID NO: 5507, and SEQ ID NOs: 5540-5542. In some embodiments, the guide RNA structure comprises a tracr ribonucleic acid sequence predicted to comprise at least two hairpins comprising less than 5 base-paired ribonucleotides. In some embodiments, the endonuclease is configured to binding to a PAM comprising SEQ ID NO: 5522. In some embodiments: (a) the endonuclease comprises a sequence at least 70%, 80%, or 90% identical to SEQ ID NO: 2914; (b) the guide RNA structure comprises a sequence at least 70%, 80%, or 90% identical to SEQ ID NO: 5471 or SEQ ID NO: 5507; and (c) the endonuclease is configured to binding to a PAM comprising SEQ ID NO: 5522.

[0027] In some embodiments, the endonuclease comprises a sequence at least 70%, 80%, or 90% identical to a sequence selected from the group consisting of SEQ ID NO: 3175 or SEQ ID NOs: 3175-3330. In some embodiments, the endonuclease comprises a sequence at least 70%, 80%, or 90% identical to a sequence selected from the group consisting of SEQ ID NO: 4989 or SEQ ID NOs: 4989-5146. In some embodiments, the endonuclease comprises at least 1, at least 2, at least 3, at least 4, or at least 5 peptide motifs selected from the group consisting of SEQ ID NOs: 5679-5686. In some embodiments, the endonuclease comprises a sequence at least 70%, 80%, or 90% identical to a sequence selected from the group consisting of SEQ ID NO: 1354 or SEQ ID NOs: 1354-1511. In some embodiments, the guide RNA structure comprises a sequence at least 70%, 80%, or 90% identical to a sequence selected from the group consisting of SEQ ID NOs: 5472 or SEQ ID NOs: 5508. In some embodiments, the endonuclease is configured to binding to a PAM comprising a sequence selected from the group consisting of SEQ ID NO: 5523 or SEQ ID NO: 5537. In some embodiments: (a) the endonuclease comprises a sequence at least 70%, 80%, or 90% identical to SEQ ID NO: 3175; (b) the guide RNA structure comprises a sequence at least 70%, 80%, or 90% identical to SEQ ID NO: 5472 or SEQ ID NO: 5508; and (c) the endonuclease is configured to binding to a PAM comprising SEQ ID NO: 5523 or SEQ ID NO: 5537.

[0028] In some embodiments, the endonuclease comprises a sequence at least 70%, 80%, or 90% identical to a sequence selected from the group consisting of SEQ ID NOs: 3331 or SEQ ID NOs: 3331-3474. In some embodiments, the endonuclease comprises a sequence at least 70%, 80%, or 90% identical to a sequence selected from the group consisting of SEQ ID NOs: 5147 or SEQ ID NOs: 5147-5290. In some embodiments, the endonuclease comprises at least 1, at least 2, at least 3, at least 4, or at least 5 peptide motifs selected from the group consisting of SEQ ID NOs: 5674-5675 and SEQ ID NOs: 5687-5693. In some embodiments, the endonuclease comprises a sequence at least 70%, 80%, or 90% identical to a sequence selected from the group consisting of SEQ ID NO: 1512 or SEQ ID NOs: 1512-1655. In some embodiments, the guide RNA structure comprises a sequence at least 70%, 80%, or 90% identical to a sequence selected from the group consisting of SEQ ID NO: 5473 or SEQ ID NO: 5509. In some embodiments, the endonuclease is configured to binding to a PAM comprising SEQ ID NO: 5524. In some embodiments: (a) the endonuclease comprises a sequence at least 70%, 80%, or 90% identical to SEQ ID NO: 3331; (b) the guide RNA structure comprises a sequence at least 70%, 80%, or 90% identical to SEQ ID NO: 5473 or SEQ ID NO: 5509; and (c) the endonuclease is configured to binding to a PAM comprising SEQ ID NO: 5524.

[0029] In some embodiments, the endonuclease comprises a sequence at least 70%, 80%, or 90% identical to a sequence selected from the group consisting of SEQ ID NO: 3475 or SEQ ID NOs: 3475-3568. In some embodiments, the endonuclease comprises a sequence at least 70%, 80%, or 90% identical to a sequence selected from the group consisting of SEQ ID NO: 5291 or SEQ ID NOs: 5291-5389. In some embodiments, the endonuclease comprises at least 1, at least 2, at least 3, at least 4, or at least 5 peptide motifs selected from the group consisting of SEQ ID NOs: 5694-5699. In some embodiments, the endonuclease comprises a sequence at least 70%, 80%, or 90% identical to a sequence selected from the group consisting of SEQ ID NO: 1656 or SEQ ID NOs: 1656-1755. In some embodiments, the guide RNA structure comprises a sequence at least 70%, 80%, or 90% identical to SEQ ID NO: 5474 or SEQ ID NO: 5510. In some embodiments, the endonuclease is configured to binding to a PAM comprising SEQ ID NOs: 5525. In some embodiments: (a) the endonuclease comprises a sequence at least 70%, 80%, or 90% identical to SEQ ID NO: 3475; (b) the guide RNA structure comprises a sequence at least 70%, 80%, or 90% identical to SEQ ID NO: 5474 or SEQ ID NO: 5510; and (c) the endonuclease is configured to binding to a PAM comprising SEQ ID NO: 5525.

[0030] In some embodiments, the endonuclease comprises a sequence at least 70%, 80%, or 90% identical to a sequence selected from the group consisting of SEQ ID NO: 3569 or SEQ ID NOs: 3569-3637. In some embodiments, the endonuclease comprises a sequence at least 70%, 80%, or 90% identical to a sequence selected from the group consisting of SEQ ID NO: 5390 or SEQ ID NOs: 5390-5460. In some embodiments, the endonuclease comprises at least 1, at least 2, at least 3, at least 4, or at least 5 peptide motifs selected from the group consisting of SEQ ID NOs: 5700-5717. In some embodiments, the endonuclease comprises a sequence at least 70%, 80%, or 90% identical to a sequence selected from the group consisting of SEQ ID NO: 1756 or SEQ ID NOs: 1756-1826. In some embodiments, the guide RNA structure comprises a sequence at least 70%, 80%, or 90% identical to SEQ ID NO: 5475 or SEQ ID NOs: 5511. In some embodiments, the endonuclease is configured to binding to a PAM comprising SEQ ID NO: 5526. In some embodiments: (a) the endonuclease comprises a sequence at least 70%, 80%, or 90% identical to SEQ ID NO: 3569; (b) the guide RNA structure comprises a sequence at least 70%, 80%, or 90% identical to SEQ ID NO: 5475 or SEQ ID NO: 5511; and (c) the endonuclease is configured to binding to a PAM comprising SEQ ID NO: 5526. In some embodiments, the sequence identity is determined by a BLASTP, CLUSTALW, MUSCLE, MAFFT, or CLUSTALW with the parameters of the Smith-Waterman homology search algorithm. In some embodiments, the sequence identity is determined by the BLASTP homology search algorithm using parameters of a wordlength (W) of 3, an expectation (E) of 10, and a BLOSUM62 scoring matrix setting gap costs at existence of 11, extension of 1, and using a conditional compositional score matrix adjustment.

[0031] In some aspects, the present disclosure provides for an engineered guide ribonucleic acid polynucleotide comprising: (a) a DNA-targeting segment comprising a nucleotide sequence that is complementary to a target sequence in a target DNA molecule; and (b) a protein-binding segment comprising two complementary stretches of nucleotides that hybridize to form a double-stranded RNA (dsRNA) duplex, wherein the two complementary stretches of nucleotides are covalently linked to one another with intervening nucleotides, and wherein the engineered guide ribonucleic acid polynucleotide is configured to forming a complex with an endonuclease comprising a RuvC_III domain having at least 70%, at least 75%, at least 80%, at least 85%, at least 88%, at least 90%, at least 92%, at least 95%, or at least 98% sequence identity to any one of SEQ ID NOs: 1827-3637 and targeting the complex to the target sequence of the target DNA molecule. In some embodiments, the DNA-targeting segment is positioned 5′ of both of the two complementary stretches of nucleotides.

[0032] In some embodiments: (a) the protein binding segment comprises a sequence having at least 70%, at least 75%, at least 80%, at least 85%, at least 88%, at least 90%, at least 92%, at least 95%, or at least 98% identity to a sequence selected from the group consisting of SEQ ID NOs: 5476-5479 or SEQ ID NOs: 5476-5489; (b) the protein binding segment comprises a sequence having at least 70%, at least 80%, or at least 90% identity to a sequence selected from the group consisting of (SEQ ID NOs: 5490-5491 or SEQ ID NOs: 5490-5494) and SEQ ID NO: 5538; (c) the protein binding segment comprises a sequence having at least 70%, at least 80%, or at least 90% identity to a sequence selected from the group consisting of SEQ ID NOs: 5498-5499; (d) the protein binding segment comprises a sequence having at least 70%, at least 80%, or at least 90% identity to a sequence selected from the group consisting of SEQ ID NOs: 5495-5497 and SEQ ID NOs: 5500-5502; (e) the protein binding segment comprises a sequence having at least 70%, at least 80%, or at least 90% identity to SEQ ID NO: 5503; (f) the protein binding segment comprises a sequence having at least 70%, at least 80%, or at least 90% identity to SEQ ID NO: 5504; (g) the protein binding segment comprises a sequence having at least 70%, at least 80%, or at least 90% identity to SEQ ID NOs: 5505; (h) protein binding segment comprises a sequence having at least 70%, at least 80%, or at least 90% identity to SEQ ID NO: 5506; (i) protein binding segment comprises a sequence having at least 70%, at least 80%, or at least 90% identity to SEQ ID NO: 5507; ( ) the protein binding segment comprises a sequence having at least 70%, at least 80%, or at least 90% identity to SEQ ID NO: 5508; (k) the protein binding segment comprises a sequence having at least 70%, at least 80%, or at least 90% identity to SEQ ID NO: 5509; (1) the protein binding segment comprises a sequence having at least 70%, at least 80%, or at least 90% identity to SEQ ID NO: 5510; or (m) the protein binding segment comprises a sequence having at least 70%, at least 80%, or at least 90% identity to SEQ ID NO: 5511.

[0033] In some embodiments: (a) the guide ribonucleic acid polynucleotide comprises an RNA sequence comprising a hairpin comprising a stem and a loop, wherein the stem comprises at least 10, at least 12, or at least 14 base-paired ribonucleotides, and an asymmetric bulge within 4 base pairs of the loop; (b) the guide ribonucleic acid polynucleotide comprises a tracr ribonucleic acid sequence predicted to comprise a hairpin comprising at least 8, at least 10, or at least 12 base-paired ribonucleotides; (c) the guide ribonucleic acid polynucleotide comprises a guide ribonucleic acid sequence predicted to comprise a hairpin with an uninterrupted base-paired region comprising at least 8 nucleotides of a guide ribonucleic acid sequence and at least 8 nucleotides of a tracr ribonucleic acid sequence, and wherein the tracr ribonucleic acid sequence comprises, from 5′ to 3′, a first hairpin and a second hairpin, wherein the first hairpin has a longer stem than the second hairpin; or (d) the guide ribonucleic acid polynucleotide comprises a tracr ribonucleic acid sequence predicted to comprise at least two hairpins comprising less than 5 base-paired ribonucleotides.

[0034] In some aspects, the present disclosure provides for a deoxyribonucleic acid polynucleotide encoding any of the engineered guide ribonucleic acid polynucleotides described herein.

[0035] In some aspects, the present disclosure provides for a nucleic acid comprising an engineered nucleic acid sequence optimized for expression in an organism, wherein the nucleic acid encodes a class 2, type II Cas endonuclease comprising a RuvC_III domain and an HNH domain, and wherein the endonuclease is derived from an uncultivated microorganism.

[0036] In some aspects, the present disclosure provides for a nucleic acid comprising an engineered nucleic acid sequence optimized for expression in an organism, wherein the nucleic acid encodes an endonuclease comprising a RuvC_III domain having at least 70% sequence identity to any one of SEQ ID NOs: 1827-3637. In some embodiments, the endonuclease comprises an HNH domain having at least 70% or at least 80% sequence identity to any one of SEQ ID NOs: 3638-5460. In some embodiments, the endonuclease comprises SEQ ID NOs: 5572-5591 or a variant thereof having at least 70% sequence identity thereto. In some embodiments, the endonuclease comprises a sequence encoding one or more nuclear localization sequences (NLSs) proximal to an N- or C-terminus of the endonuclease. In some embodiments, the NLS comprises a sequence selected from SEQ ID NOs: 5597-5612.

[0037] In some embodiments, the organism is prokaryotic, bacterial, eukaryotic, fungal, plant, mammalian, rodent, or human. In some embodiments, the organism is E. coli, and: (a) the nucleic acid sequence has at least 70%, 80%, or 90% identity to a sequence selected from the group consisting of SEQ ID NOs: 5572-5575; (b) the nucleic acid sequence has at least 70%, 80%, or 90% identity to a sequence selected from the group consisting of SEQ ID NOs: 5576-5577; (c) the nucleic acid sequence has at least 70%, 80%, or 90% identity to a sequence selected from the group consisting of SEQ ID NOs: 5578-5580; (d) the nucleic acid sequence has at least 70%, 80%, or 90% identity to SEQ ID NO: 5581; (e) the nucleic acid sequence has at least 70%, 80%, or 90% identity to SEQ ID NO: 5582; (f) the nucleic acid sequence has at least 70%, 80%, or 90% identity to SEQ ID NO: 5583; (g) the nucleic acid sequence has at least 70%, 80%, or 90% identity to SEQ ID NO: 5584; (h) the nucleic acid sequence has at least 70%, 80%, or 90% identity to SEQ ID NO: 5585; (i) the nucleic acid sequence has at least 70%, 80%, or 90% identity to SEQ ID NO: 5586; or ( ) the nucleic acid sequence has at least 70%, 80%, or 90% identity to SEQ ID NO: 5587. In some embodiments, the organism is human, and: (a) the nucleic acid sequence has at least 70%, 80%, or 90% identity to SEQ ID NO: 5588 or SEQ ID NO: 5589; or (b) the nucleic acid sequence has at least 70%, 80%, or 90% identity to SEQ ID NO: 5590 or SEQ ID NO: 5591.

[0038] In some aspects, the present disclosure provides for a vector comprising a nucleic acid sequence encoding a class 2, type II Cas endonuclease comprising a RuvC_III domain and an HNH domain, wherein the endonuclease is derived from an uncultivated microorganism.

[0039] In some aspects, the present disclosure provides for a vector comprising the any of the nucleic acids described herein. In some embodiments, the vector further comprises a nucleic acid encoding an engineered guide ribonucleic acid structure configured to form a complex with the endonuclease comprising: (a) a guide ribonucleic acid sequence configured to hybridize to a target deoxyribonucleic acid sequence; and (b) a tracr ribonucleic acid sequence configured to binding to the endonuclease. In some embodiments, the vector is a plasmid, a minicircle, a CELiD, an adeno-associated virus (AAV) derived virion, or a lentivirus.

[0040] In some aspects, the present disclosure provides for a cell comprising any of the vectors described herein.

[0041] In some aspects, the present disclosure provides for a method of manufacturing an endonuclease, comprising cultivating any of the cells described herein.

[0042] In some aspects, the present disclosure provides for a method for binding, cleaving, marking, or modifying a double-stranded deoxyribonucleic acid polynucleotide, comprising: (a) contacting the double-stranded deoxyribonucleic acid polynucleotide with a class 2, type II Cas endonuclease in complex with an engineered guide ribonucleic acid structure configured to bind to the endonuclease and the double-stranded deoxyribonucleic acid polynucleotide; (b) wherein the double-stranded deoxyribonucleic acid polynucleotide comprises a protospacer adjacent motif (PAM); and (c) wherein the PAM comprises a sequence selected from the group consisting of SEQ ID NOs: 5512-5526 or SEQ ID NOs: 5527-5537. In some embodiments, the double-stranded deoxyribonucleic acid polynucleotide comprises a first strand comprising a sequence complementary to a sequence of the engineered guide ribonucleic acid structure and a second strand comprising the PAM. In some embodiments, the PAM is directly adjacent to the 3′ end of the sequence complementary to the sequence of the engineered guide ribonucleic acid structure.

[0043] In some embodiments, the class 2, type II Cas endonuclease is not a Cas9 endonuclease, a Cas14 endonuclease, a Cas12a endonuclease, a Cas12b endonuclease, a Cas 12c endonuclease, a Cas12d endonuclease, a Cas12e endonuclease, a Cas13a endonuclease, a Cas13b endonuclease, a Cas13c endonuclease, or a Cas 13d endonuclease. In some embodiments, the class 2, type II Cas endonuclease is derived from an uncultivated microorganism. In some embodiments, the double-stranded deoxyribonucleic acid polynucleotide is a eukaryotic, plant, fungal, mammalian, rodent, or human double-stranded deoxyribonucleic acid polynucleotide.

[0044] In some embodiments: (a) the PAM comprises a sequence selected from the group consisting of SEQ ID NOs: 5512-5515 and SEQ ID NOs: 5527-5530; (b) the PAM comprises SEQ ID NO: 5516 or SEQ ID NO: 5531; (c) the PAM comprises SEQ ID NO: 5539; (d) the PAM comprises SEQ ID NO: 5517 or SEQ ID NO: 5518; (e) the PAM comprises SEQ ID NO: 5519; (f) the PAM comprises SEQ ID NO: 5520 or SEQ ID NO: 5535; (g) the PAM comprises SEQ ID NO: 5521 or SEQ ID NO: 5536; (h) the PAM comprises SEQ ID NO: 5522; (i) the PAM comprises SEQ ID NO: 5523 or SEQ ID NO: 5537; ( ) the PAM comprises SEQ ID NO: 5524; (k) the PAM comprises SEQ ID NO: 5525; or (1) the PAM comprises SEQ ID NO: 5526.

[0045] In some aspects, the present disclosure provides for a method of modifying a target nucleic acid locus, the method comprising delivering to the target nucleic acid locus any of the engineered nuclease systems described herein, wherein the endonuclease is configured to form a complex with the engineered guide ribonucleic acid structure, and wherein the complex is configured such that upon binding of the complex to the target nucleic acid locus, the complex modifies the target nucleic locus. In some embodiments, modifying the target nucleic acid locus comprises binding, nicking, cleaving, or marking the target nucleic acid locus. In some embodiments, the target nucleic acid locus comprises deoxyribonucleic acid (DNA) or ribonucleic acid (RNA). In some embodiments, the target nucleic acid comprises genomic DNA, viral DNA, viral RNA, or bacterial DNA. In some embodiments, the target nucleic acid locus is in vitro. In some embodiments, the target nucleic acid locus is within a cell. In some embodiments, the cell is a prokaryotic cell, a bacterial cell, a eukaryotic cell, a fungal cell, a plant cell, an animal cell, a mammalian cell, a rodent cell, a primate cell, or a human cell.

[0046] In some embodiments, delivering the engineered nuclease system to the target nucleic acid locus comprises delivering any of the nucleic acids described herein or any of the vectors described herein. In some embodiments, delivering the engineered nuclease system to the target nucleic acid locus comprises delivering a nucleic acid comprising an open reading frame encoding the endonuclease. In some embodiments, the nucleic acid comprises a promoter to which the open reading frame encoding the endonuclease is operably linked. In some embodiments, the engineered nuclease system to the target nucleic acid locus comprises delivering a capped mRNA containing the open reading frame encoding the endonuclease. In some embodiments, the engineered nuclease system to the target nucleic acid locus comprises delivering a translated polypeptide. In some embodiments, the engineered nuclease system to the target nucleic acid locus comprises delivering a deoxyribonucleic acid (DNA) encoding the engineered guide ribonucleic acid structure operably linked to a ribonucleic acid (RNA) pol III promoter. In some embodiments, the endonuclease induces a single-stranded break or a double-stranded break at or proximal to the target locus.

[0047] In some aspects, the present disclosure provides for an engineered nuclease system comprising: (a) an endonuclease comprising a sequence having at least 75% sequence identity to any one of SEQ ID NOs: 5718-5846 or 6257; and (b) an engineered guide ribonucleic acid structure configured to form a complex with said endonuclease comprising: (i) a ribonucleic acid sequence configured to hybridize to a target deoxyribonucleic acid sequence; and (ii) a ribonucleic acid sequence configured to bind to said endonuclease. In some aspects, the present disclosure provides for an engineered nuclease system comprising: (a) an endonuclease configured to bind to a protospacer adjacent motif (PAM) sequence comprising SEQ ID NOs: 5847-5861 or 6258-6278, wherein said endonuclease is a class 2, type II Cas endonuclease; and (b) an engineered guide ribonucleic acid structure configured to form a complex with said endonuclease comprising: (i) a ribonucleic acid sequence configured to hybridize to a target deoxyribonucleic acid sequence; and (ii) a ribonucleic acid sequence configured to bind to said endonuclease. In some embodiments, said endonuclease is derived from an uncultivated microorganism. In some embodiments, said endonuclease has not been engineered to bind to a different PAM sequence. In some embodiments, said endonuclease is not a Cas9 endonuclease, a Cas14 endonuclease, a Cas12a endonuclease, a Cas12b endonuclease, a Cas 12c endonuclease, a Cas12d endonuclease, a Cas12e endonuclease, a Cas13a endonuclease, a Cas13b endonuclease, a Cas13c endonuclease, or a Cas 13d endonuclease. In some embodiments, said endonuclease has less than 80% identity to a Cas9 endonuclease. In some embodiments, said ribonucleic acid sequence comprises a sequence with at least 80% sequence identity to (a) any one of SEQ ID NOs: 5886-5887, 5891, 5893, or 5894; or (b) the non-degenerate nucleotides of any one of SEQ ID NOs: 5862-5885, 5888-5890, 5892, 5895-5896, or 6279-6301. In some aspects, the present disclosure provides for an engineered nuclease system comprising, (a) an engineered guide ribonucleic acid structure comprising: (i) a ribonucleic acid sequence configured to hybridize to a target deoxyribonucleic acid sequence; and (ii) a ribonucleic acid sequence configured to bind to an endonuclease, wherein said ribonucleic acid sequence comprises a sequence with at least 80% sequence identity (a) any one of SEQ ID NOs: 5886-5887, 5891, 5893, or 5894; or (b) the non-degenerate nucleotides of any one of SEQ ID NOs: 5862-5885, 5888-5890, 5892, 5895-5896, or 6279-6301; and a class 2, type II Cas endonuclease configured to bind to said engineered guide ribonucleic acid. In some embodiments, endonuclease is configured to bind to a protospacer adjacent motif (PAM) sequence selected from the group comprising SEQ ID NOs: 5847-5861 or 6258-6278. In some embodiments, said guide ribonucleic acid sequence is 15-24 nucleotides in length or 19-24 nucleotides in length. In some embodiments, said endonuclease comprises one or more nuclear localization sequences (NLSs) proximal to an N- or C-terminus of said endonuclease. In some embodiments, said NLS comprises a sequence selected from SEQ ID NOs: 5597-5612. In some embodiments, the system further comprises a single- or double-stranded DNA repair template comprising from 5′ to 3′: a first homology arm comprising a sequence of at least 20 nucleotides 5′ to said target deoxyribonucleic acid sequence, a synthetic DNA sequence of at least 10 nucleotides, and a second homology arm comprising a sequence of at least 20 nucleotides 3′ to said target sequence. In some embodiments, said first or second homology arm comprises a sequence of at least 40, 80, 120, 150, 200, 300, 500, or 1,000 nucleotides. In some embodiments, said sequence identity is determined by a BLASTP, CLUSTALW, MUSCLE, MAFFT, or CLUSTALW with the parameters of the Smith-Waterman homology search algorithm. In some embodiments, said sequence identity is determined by said BLASTP homology search algorithm using parameters of a wordlength (W) of 3, an expectation (E) of 10, and a BLOSUM62 scoring matrix setting gap costs at existence of 11, extension of 1, and using a conditional compositional score matrix adjustment.

[0048] In some aspects, the present disclosure provides for an engineered guide ribonucleic acid polynucleotide comprising: (a) a DNA-targeting segment comprising a nucleotide sequence that is complementary to a target sequence in a target DNA molecule; and (b) a protein-binding segment comprising two complementary stretches of nucleotides that hybridize to form a double-stranded RNA (dsRNA) duplex, wherein said two complementary stretches of nucleotides are covalently linked to one another with intervening nucleotides, and wherein said engineered guide ribonucleic acid polynucleotide is configured to form a complex with an endonuclease comprising sequence having at least 75% sequence identity to any one of SEQ ID NOs: 5718-5846 or 6257 and target said complex to said target sequence of said target DNA molecule. In some embodiments, said DNA-targeting segment is positioned 5′ of both of said two complementary stretches of nucleotides.

[0049] In some aspects, the present disclosure provides for a deoxyribonucleic acid polynucleotide encoding any of the engineered guide ribonucleic acid polynucleotides described herein.

[0050] In some aspects, the present disclosure provides for a nucleic acid comprising an engineered nucleic acid sequence optimized for expression in an organism, wherein said nucleic acid encodes an endonuclease comprising a sequence having at least 75% sequence identity to any one of SEQ ID NOs: 5718-5846 or 6257. In some embodiments, said endonuclease comprises a sequence encoding one or more nuclear localization sequences (NLSs) proximal to an N- or C-terminus of said endonuclease. In some embodiments, said NLS comprises a sequence selected from SEQ ID NOs: 5597-5612. In some embodiments, said organism is prokaryotic, bacterial, eukaryotic, fungal, plant, mammalian, rodent, or human.

[0051] In some aspects, the present disclosure provides for a vector comprising any of the nucleic acids described herein. In some embodiments, the vector further comprises a nucleic acid encoding an engineered guide ribonucleic acid structure configured to form a complex with said endonuclease comprising: (a) a ribonucleic acid sequence configured to hybridize to a target deoxyribonucleic acid sequence; and (b) a ribonucleic acid sequence configured to bind to said endonuclease. In some embodiments, the vector is a plasmid, a minicircle, a CELiD, an adeno-associated virus (AAV) derived virion, or a lentivirus.

[0052] In some aspects, the present disclosure provides for a cell comprising any of the vectors described herein

[0053] In some aspects, the present disclosure provides for a method of manufacturing an endonuclease, comprising cultivating any of the cells described herein.

[0054] In some aspects, the present disclosure provides for a method for binding, cleaving, marking, or modifying a double-stranded deoxyribonucleic acid polynucleotide, comprising: contacting said double-stranded deoxyribonucleic acid polynucleotide with a class 2, type II Cas endonuclease in complex with an engineered guide ribonucleic acid structure configured to bind to said endonuclease and said double-stranded deoxyribonucleic acid polynucleotide; wherein said double-stranded deoxyribonucleic acid polynucleotide comprises a protospacer adjacent motif (PAM); and wherein said PAM comprises a sequence selected from the group consisting of SEQ ID NOs: 5847-5861 or 6258-6278. In some embodiments, said double-stranded deoxyribonucleic acid polynucleotide comprises a first strand comprising a sequence complementary to a sequence of said engineered guide ribonucleic acid structure and a second strand comprising said PAM. In some embodiments, said PAM is directly adjacent to the 3′ end of said sequence complementary to said sequence of said engineered guide ribonucleic acid structure. In some embodiments, said class 2, type II Cas endonuclease is not a Cas9 endonuclease, a Cas14 endonuclease, a Cas12a endonuclease, a Cas12b endonuclease, a Cas 12c endonuclease, a Cas12d endonuclease, a Cas12e endonuclease, a Cas13a endonuclease, a Cas13b endonuclease, a Cas13c endonuclease, or a Cas 13d endonuclease. In some embodiments, said double-stranded deoxyribonucleic acid polynucleotide is a eukaryotic, plant, fungal, mammalian, rodent, or human double-stranded deoxyribonucleic acid polynucleotide.

[0055] In some aspects, the present disclosure provides for a method of modifying a target nucleic acid locus, said method comprising delivering to said target nucleic acid locus any of the engineered nuclease systems described herein, wherein said endonuclease is configured to form a complex with said engineered guide ribonucleic acid structure, and wherein said complex is configured such that upon binding of said complex to said target nucleic acid locus, said complex modifies said target nucleic locus. In some embodiments, said target nucleic acid locus comprises binding, nicking, cleaving, or marking said target nucleic acid locus. In some embodiments, said target nucleic acid locus comprises deoxyribonucleic acid (DNA) or ribonucleic acid (RNA). In some embodiments, said target nucleic acid comprises genomic DNA, viral DNA, viral RNA, or bacterial DNA. In some embodiments, said target nucleic acid locus is in vitro. In some embodiments, said target nucleic acid locus is within a cell. In some embodiments, said cell is a prokaryotic cell, a bacterial cell, a eukaryotic cell, a fungal cell, a plant cell, an animal cell, a mammalian cell, a rodent cell, a primate cell, or a human cell. In some embodiments, said engineered nuclease system to said target nucleic acid locus comprises delivering any of the nucleic acids described herein or any of the vectors described herein. In some embodiments, delivering said engineered nuclease system to said target nucleic acid locus comprises delivering a nucleic acid comprising an open reading frame encoding said endonuclease. In some embodiments, said nucleic acid comprises a promoter to which said open reading frame encoding said endonuclease is operably linked. In some embodiments, delivering said engineered nuclease system to said target nucleic acid locus comprises delivering a capped mRNA containing said open reading frame encoding said endonuclease. In some embodiments, delivering said engineered nuclease system to said target nucleic acid locus comprises delivering a translated polypeptide. In some embodiments, delivering said engineered nuclease system to said target nucleic acid locus comprises delivering a deoxyribonucleic acid (DNA) encoding said engineered guide ribonucleic acid structure operably linked to a ribonucleic acid (RNA) pol III promoter. In some embodiments, said endonuclease induces a single-stranded break or a double-stranded break at or proximal to said target locus.

[0056] In some aspects, the present disclosure provides for a method of editing a TRAC locus in a cell, comprising contacting to said cell (a) an RNA-guided endonuclease; and (b) an engineered guide RNA, wherein said engineered guide RNA is configured to form a complex with said endonuclease and said engineered guide RNA comprises a spacer sequence configured to hybridize to a region of said TRAC locus, wherein said engineered guide RNA comprises a targeting sequence having at least 80% identity, at least 82% identity, at least 84% identity, at least 86% identity, at least 88% identity, at least 90% identity, at least 91% identity, at least 92% identity, at least 93% identity, at least 94% identity, at least 95% identity, at least 96% identity, at least 97% identity, at least 98% identity, at least 99% identity, or at least 100% identity to at least 19, at least 20, at least 21, at least 22, at least 23, or at least 24 consecutive nucleotides of any one of SEQ ID NOs: 5950-5958 or 5959-5965. In some embodiments, said RNA-guided endonuclease is a class II, type II Cas endonuclease. In some embodiments, said RNA-guided endonuclease comprises a RuvCIII domain comprising a sequence having at least 75% identity, at least 80% identity, at least 82% identity, at least 84% identity, at least 86% identity, at least 88% identity, at least 90% identity, at least 91% identity, at least 92% identity, at least 93% identity, at least 94% identity, at least 95% identity, at least 96% identity, at least 97% identity, at least 98% identity, at least 99% identity, or at least 100% identity to SEQ ID NO: 2242 or SEQ ID NO: 2244. In some embodiments, said RNA-guided endonuclease further comprises an HNH domain. In some embodiments, said RNA-guided endonuclease comprises a sequence having at least 75% identity, at least 80% identity, at least 82% identity, at least 84% identity, at least 86% identity, at least 88% identity, at least 90% identity, at least 91% identity, at least 92% identity, at least 93% identity, at least 94% identity, at least 95% identity, at least 96% identity, at least 97% identity, at least 98% identity, at least 99% identity, or at least 100% identity to SEQ ID NO: 421 or SEQ ID NO: 423. In some embodiments, said engineered guide RNA comprises a targeting sequence having at least 85% identity to at least 18 consecutive nucleotides of any one of SEQ ID NOs: 5950-5958 and said endonuclease comprises a sequence having at least 75% identity to SEQ ID NO:421. In some embodiments, said engineered guide RNA comprises a targeting sequence having at least 85% identity to at least 18 consecutive nucleotides of any one of SEQ ID NOs: 5959-5965 and said endonuclease comprises a sequence having at least 75% identity to SEQ ID NO: 423. In some embodiments, said engineered guide RNA comprises a targeting sequence having at least 85% identity to at least 18 consecutive nucleotides of any one of SEQ ID NOs: 5953-5957. In some embodiments, said engineered guide RNA comprises a targeting sequence having at least 85% identity to at least 18 consecutive nucleotides of any one of SEQ ID NOs: 5960-5961 or 5963-5964.

[0057] In some aspects, the present disclosure provides for a method of editing a TRBC locus in a cell, comprising contacting to said cell (a) an RNA-guided endonuclease; and (b) an engineered guide RNA, wherein said engineered guide RNA is configured to form a complex with said endonuclease and said engineered guide RNA comprises a spacer sequence configured to hybridize to a region of said TRBC locus, wherein said engineered guide RNA comprises a targeting sequence having at least 80% identity, at least 82% identity, at least 84% identity, at least 86% identity, at least 88% identity, at least 90% identity, at least 91% identity, at least 92% identity, at least 93% identity, at least 94% identity, at least 95% identity, at least 96% identity, at least 97% identity, at least 98% identity, at least 99% identity, or at least 100% identity to at least 19, at least 20, at least 21, at least 22, at least 23, or at least 24 consecutive nucleotides of any one of SEQ ID NOs: 5966-6004 or 6005-6025. In some embodiments, said RNA-guided endonuclease is a class II, type II Cas endonuclease. In some embodiments, said RNA-guided endonuclease comprises a RuvCIII domain comprising a sequence having at least 75% identity, at least 80% identity, at least 82% identity, at least 84% identity, at least 86% identity, at least 88% identity, at least 90% identity, at least 91% identity, at least 92% identity, at least 93% identity, at least 94% identity, at least 95% identity, at least 96% identity, at least 97% identity, at least 98% identity, at least 99% identity, or at least 100% identity to SEQ ID NO: 2242 or SEQ ID NO: 2244. In some embodiments, said RNA-guided endonuclease further comprises an HNH domain. In some embodiments, said RNA-guided endonuclease comprises a sequence having at least 75% identity, at least 80% identity, at least 82% identity, at least 84% identity, at least 86% identity, at least 88% identity, at least 90% identity, at least 91% identity, at least 92% identity, at least 93% identity, at least 94% identity, at least 95% identity, at least 96% identity, at least 97% identity, at least 98% identity, at least 99% identity, or at least 100% identity to SEQ ID NO: 421 or SEQ ID NO: 423. In some embodiments, said engineered guide RNA comprises a targeting sequence having at least 85% identity to at least 18 consecutive nucleotides of any one of SEQ ID NOs: 5966-6004 and said endonuclease comprises a sequence having at least 75% identity to SEQ ID NO: 421. In some embodiments, said engineered guide RNA comprises a targeting sequence having at least 85% identity to at least 18 consecutive nucleotides of any one of SEQ ID NOs: 6005-6025 and said endonuclease comprises a sequence having at least 75% identity to SEQ ID NO: 423. In some embodiments, said engineered guide RNA comprises a targeting sequence having at least 85% identity to at least 18 consecutive nucleotides of any one of SEQ ID NOs: 5970, 5971, 5983, or 5984. In some embodiments, said engineered guide RNA comprises a targeting sequence having at least 85% identity to at least 18 consecutive nucleotides of any one of SEQ ID NOs: 6006, 6010, 6011, or 6012.

[0058] In some aspects, the present disclosure provides for a method of editing a GR (NR3C1) locus in a cell, comprising contacting to said cell (a) an RNA-guided endonuclease; and (b) an engineered guide RNA, wherein said engineered guide RNA is configured to form a complex with said endonuclease and said engineered guide RNA comprises a spacer sequence configured to hybridize to a region of said GR (NR3C1) locus, wherein said engineered guide RNA comprises a targeting sequence having at least 80% identity, at least 82% identity, at least 84% identity, at least 86% identity, at least 88% identity, at least 90% identity, at least 91% identity, at least 92% identity, at least 93% identity, at least 94% identity, at least 95% identity, at least 96% identity, at least 97% identity, at least 98% identity, at least 99% identity, or at least 100% identity to at least 19, at least 20, at least 21, at least 22, at least 23, or at least 24 consecutive nucleotides consecutive nucleotides of any one of SEQ ID NOs: 6026-6090 or 6091-6121. In some embodiments, said RNA-guided endonuclease is a class II, type II Cas endonuclease. In some embodiments, said RNA-guided endonuclease comprises a RuvCIII domain comprising a sequence having at least 75% identity, at least 80% identity, at least 82% identity, at least 84% identity, at least 86% identity, at least 88% identity, at least 90% identity, at least 91% identity, at least 92% identity, at least 93% identity, at least 94% identity, at least 95% identity, at least 96% identity, at least 97% identity, at least 98% identity, at least 99% identity, or at least 100% identity to SEQ ID NO: 2242 or SEQ ID NO: 2244.

[0059] In some embodiments, said RNA-guided endonuclease further comprises an HNH domain. In some embodiments, said RNA-guided endonuclease comprises a sequence having at least 75% identity to SEQ ID NO: 421 or SEQ ID NO: 423. In some embodiments, said engineered guide RNA comprises a targeting sequence having at least 85% identity to at least 18 consecutive nucleotides of any one of SEQ ID NOs: 6026-6090 and said endonuclease comprises a sequence having at least 75% identity to SEQ ID NO: 421. In some embodiments, said engineered guide RNA comprises a targeting sequence having at least 85% identity to at least 18 consecutive nucleotides of any one of SEQ ID NOs: 6091-6121 and said endonuclease comprises a sequence having at least 75% identity to SEQ ID NO: 423. In some embodiments, said engineered guide RNA comprises a targeting sequence having at least 85% identity to at least 18 consecutive nucleotides of any one of SEQ ID NOs: 6027-6028, 6029, 6038, 6043, 6049, 6076, 6080, 6081, or 6086. In some embodiments, said engineered guide RNA comprises a targeting sequence having at least 85% identity to at least 18 consecutive nucleotides of any one of SEQ ID NOs: 6092, 6115, or 6119.

[0060] In some aspects, the present disclosure provides for a method of editing an AAVS1 locus in a cell, comprising contacting to said cell (a) an RNA-guided endonuclease; and (b) an engineered guide RNA, wherein said engineered guide RNA is configured to form a complex with said endonuclease and said engineered guide RNA comprises a spacer sequence configured to hybridize to a region of said AAVS1 locus, wherein said engineered guide RNA comprises a targeting sequence having at least 80% identity, at least 82% identity, at least 84% identity, at least 86% identity, at least 88% identity, at least 90% identity, at least 91% identity, at least 92% identity, at least 93% identity, at least 94% identity, at least 95% identity, at least 96% identity, at least 97% identity, at least 98% identity, at least 99% identity, or at least 100% identity to at least 19, at least 20, at least 21, at least 22, at least 23, or at least 24 consecutive nucleotides of any one of SEQ ID NOs: 6122-6152. In some embodiments, said RNA-guided endonuclease is a class II, type II Cas endonuclease. In some embodiments, said RNA-guided endonuclease comprises a RuvCIII domain comprising a sequence having at least 75% identity, at least 80% identity, at least 82% identity, at least 84% identity, at least 86% identity, at least 88% identity, at least 90% identity, at least 91% identity, at least 92% identity, at least 93% identity, at least 94% identity, at least 95% identity, at least 96% identity, at least 97% identity, at least 98% identity, at least 99% identity, or at least 100% identity to SEQ ID NO: 2242 or SEQ ID NO: 2244. In some embodiments, said RNA-guided endonuclease further comprises an HNH domain. In some embodiments, said RNA-guided endonuclease comprises a sequence having at least 75% identity, at least 80% identity, at least 82% identity, at least 84% identity, at least 86% identity, at least 88% identity, at least 90% identity, at least 91% identity, at least 92% identity, at least 93% identity, at least 94% identity, at least 95% identity, at least 96% identity, at least 97% identity, at least 98% identity, at least 99% identity, or at least 100% identity to SEQ ID NO: 421 or SEQ ID NO: 423. In some embodiments, said engineered guide RNA comprises a targeting sequence having at least 85% identity to at least 18 consecutive nucleotides of any one of SEQ ID NOs: 6122, 6125-6126, 6128, 6131, 6133, 6136, 6141, 6143, or 6148.

[0061] In some aspects, the present disclosure provides for a method of editing an TIGIT locus in a cell, comprising contacting to said cell (a) an RNA-guided endonuclease; and (b) an engineered guide RNA, wherein said engineered guide RNA is configured to form a complex with said endonuclease and said engineered guide RNA comprises a spacer sequence configured to hybridize to a region of said TIGIT locus, wherein said engineered guide RNA comprises a targeting sequence having at least 80% identity, at least 82% identity, at least 84% identity, at least 86% identity, at least 88% identity, at least 90% identity, at least 91% identity, at least 92% identity, at least 93% identity, at least 94% identity, at least 95% identity, at least 96% identity, at least 97% identity, at least 98% identity, at least 99% identity, or at least 100% identity to at least 19, at least 20, at least 21, at least 22, at least 23, or at least 24 consecutive nucleotides of any one of SEQ ID NOs: 6153-6181. In some embodiments, said RNA-guided endonuclease is a class II, type II Cas endonuclease. In some embodiments, said RNA-guided endonuclease comprises a sequence having at least 75% identity, at least 80% identity, at least 82% identity, at least 84% identity, at least 86% identity, at least 88% identity, at least 90% identity, at least 91% identity, at least 92% identity, at least 93% identity, at least 94% identity, at least 95% identity, at least 96% identity, at least 97% identity, at least 98% identity, at least 99% identity, or at least 100% identity to SEQ ID NO: 421 or SEQ ID NO: 423. In some embodiments, said RNA-guided endonuclease comprises a RuvCIII domain comprising a sequence having at least 75% identity, at least 80% identity, at least 82% identity, at least 84% identity, at least 86% identity, at least 88% identity, at least 90% identity, at least 91% identity, at least 92% identity, at least 93% identity, at least 94% identity, at least 95% identity, at least 96% identity, at least 97% identity, at least 98% identity, at least 99% identity, or at least 100% identity to SEQ ID NO: 2242 or SEQ ID NO: 2244. In some embodiments, said RNA-guided endonuclease further comprises an HNH domain. In some embodiments, said engineered guide RNA comprises a targeting sequence having at least 85% identity to at least 18 consecutive nucleotides of any one of SEQ ID NOs: 66155, 6159, 616, or 6172.

[0062] In some aspects, the present disclosure provides for a method of editing an CD38 locus in a cell, comprising contacting to said cell (a) an RNA-guided endonuclease; and (b) an engineered guide RNA, wherein said engineered guide RNA is configured to form a complex with said endonuclease and said engineered guide RNA comprises a spacer sequence configured to hybridize to a region of said CD38 locus, wherein said engineered guide RNA comprises a targeting sequence having at least 80% identity, at least 82% identity, at least 84% identity, at least 86% identity, at least 88% identity, at least 90% identity, at least 91% identity, at least 92% identity, at least 93% identity, at least 94% identity, at least 95% identity, at least 96% identity, at least 97% identity, at least 98% identity, at least 99% identity, or at least 100% identity to at least 19, at least 20, at least 21, at least 22, at least 23, or at least 24 consecutive nucleotides of any one of SEQ ID NOs: 6182-6248 or 6249-6256. In some embodiments, said RNA-guided endonuclease is a class II, type II Cas endonuclease. In some embodiments, said RNA-guided endonuclease comprises a RuvCIII domain comprising a sequence having at least 75% identity, at least 80% identity, at least 82% identity, at least 84% identity, at least 86% identity, at least 88% identity, at least 90% identity, at least 91% identity, at least 92% identity, at least 93% identity, at least 94% identity, at least 95% identity, at least 96% identity, at least 97% identity, at least 98% identity, at least 99% identity, or at least 100% identity to SEQ ID NO: 2242 or SEQ ID NO: 2244. In some embodiments, said RNA-guided endonuclease further comprises an HNH domain. In some embodiments, said RNA-guided endonuclease comprises a sequence having at least 75% identity, at least 80% identity, at least 82% identity, at least 84% identity, at least 86% identity, at least 88% identity, at least 90% identity, at least 91% identity, at least 92% identity, at least 93% identity, at least 94% identity, at least 95% identity, at least 96% identity, at least 97% identity, at least 98% identity, at least 99% identity, or at least 100% identity to SEQ ID NO: 421 or SEQ ID NO: 423. In some embodiments, said engineered guide RNA comprises a targeting sequence having at least 85% identity to at least 18 consecutive nucleotides of any one of SEQ ID NOs: 6182-6248 and said endonuclease comprises a sequence having at least 75% identity to SEQ ID NO: 421. In some embodiments, said engineered guide RNA comprises a targeting sequence having at least 85% identity to at least 18 consecutive nucleotides of any one of SEQ ID NOs: 6249-6256 and said endonuclease comprises a sequence having at least 75% identity to SEQ ID NO: 423. In some embodiments, said engineered guide RNA comprises a targeting sequence having at least 85% identity to at least 18 consecutive nucleotides of any one of SEQ ID NOs: 6182-6183, 6189, 6191, 6208, 6210, 6211, or 6215. In some embodiments, said engineered guide RNA comprises a targeting sequence having at least 85% identity to at least 18 consecutive nucleotides of SEQ ID NO: 6251.

[0063] In some embodiments of any of the methods for editing particular loci in cells above, said cell is a peripheral blood mononuclear cell, a T-cell, an NK cell, a hematopoietic stem cell (HSCT), or a B-cell, or any combination thereof.

[0064] In some aspects, the present disclosure provides for an engineered guide ribonucleic acid polynucleotide comprising: (a) a DNA-targeting segment comprising a nucleotide sequence that is complementary to a target sequence in a target DNA molecule; and (b) a protein-binding segment comprising two complementary stretches of nucleotides that hybridize to form a double-stranded RNA (dsRNA) duplex, wherein said two complementary stretches of nucleotides are covalently linked to one another with intervening nucleotides, and wherein said engineered guide ribonucleic acid polynucleotide is configured to form a complex with a class 2, type II Cas endonuclease and target said complex to said target sequence of said target DNA molecule, wherein said DNA-targeting segment comprises a sequence having at least 80% identity, at least 82% identity, at least 84% identity, at least 86% identity, at least 88% identity, at least 90% identity, at least 91% identity, at least 92% identity, at least 93% identity, at least 94% identity, at least 95% identity, at least 96% identity, at least 97% identity, at least 98% identity, at least 99% identity, or at least 100% identity to at least 19, at least 20, at least 21, at least 22, at least 23, or at least 24 consecutive nucleotides of any one of SEQ ID NOs: 5950-5965, 5966-6025, 6026-6121, 6122-6152, 6153-6181, or 6182-6256. In some embodiments, said protein-binding segment comprises a sequence having at least 85% identity to any one of SEQ ID NOs: 5466 or 6304.

[0065] In some aspects, the present disclosure provides for a system for generating an edited immune cell, comprising: (a) an RNA-guided endonuclease; (b) an engineered guide ribonucleic acid polynucleotide according to claim 97 configured to bind said RNA-guided endonuclease; and (c) a single- or double-stranded DNA repair template comprising first and second homology arms flanking a sequence encoding a chimeric antigen receptor (CAR). In some embodiments, said cell is a peripheral blood mononuclear cell, a T-cell, an NK cell, a hematopoietic stem cell (HSCT), or a B-cell, or any combination thereof. In some aspects, said RNA-guided endonuclease is a class II, type II Cas endonuclease. In some aspects, said RNA-guided endonuclease comprises a RuvCIII domain comprising a sequence having at least 75% identity, at least 80% identity, at least 82% identity, at least 84% identity, at least 86% identity, at least 88% identity, at least 90% identity, at least 91% identity, at least 92% identity, at least 93% identity, at least 94% identity, at least 95% identity, at least 96% identity, at least 97% identity, at least 98% identity, at least 99% identity, or at least 100% identity to SEQ ID NO: 2242 or SEQ ID NO: 2244. In some aspects, said RNA-guided endonuclease further comprises an HNH domain. In some aspects, said RNA-guided endonuclease comprises a sequence having at least 75% identity, at least 80% identity, at least 82% identity, at least 84% identity, at least 86% identity, at least 88% identity, at least 90% identity, at least 91% identity, at least 92% identity, at least 93% identity, at least 94% identity, at least 95% identity, at least 96% identity, at least 97% identity, at least 98% identity, at least 99% identity, or at least 100% identity to SEQ ID NO: 421 or SEQ ID NO: 423.

[0066] Additional aspects and advantages of the present disclosure will become readily apparent to those skilled in this art from the following detailed description, wherein only illustrative embodiments of the present disclosure are shown and described. As will be realized, the present disclosure is capable of other and different embodiments, and its several details are capable of modifications in various obvious respects, all without departing from the disclosure. Accordingly, the drawings and description are to be regarded as illustrative in nature, and not as restrictive.

### INCORPORATION BY REFERENCE

[0067] All publications, patents, and patent applications mentioned in this specification are herein incorporated by reference to the same extent as if each individual publication, patent, or patent application was specifically and individually indicated to be incorporated by reference.

### BRIEF DESCRIPTION OF THE DRAWINGS

[0068] The novel features of the invention are set forth with particularity in the appended claims. A better understanding of the features and advantages of the present invention will be obtained by reference to the following detailed description that sets forth illustrative embodiments, in which the principles of the invention are utilized, and the accompanying drawings (also “Figure” and “FIG.” herein), of which:

[0069] FIG. 1 depicts typical organizations of CRISPR/Cas loci of different classes and types.

[0070] FIG. 2 depicts the architecture of a natural Class2/Type II crRNA/tracrRNA pair, compared to a hybrid sgRNA wherein both are joined.

[0071] FIG. 3 depicts schematics showing organization of CRISPR loci encoding enzymes from the MG1 family.

[0072] FIG. 4 depicts schematics showing organization of CRISPR loci encoding enzymes from the MG2 family.

[0073] FIG. 5 depicts schematics showing organization of CRISPR loci encoding enzymes from the MG3 family.

[0074] FIG. 6 depicts a structure-based alignment of an enzyme of the present disclosure (MG1-1) versus Cas9 from Staphylococcus aureus (SEQ ID NO:5613). Predicted essential residues for function are called out below the sequence; conserved residues are highlighted in black.

[0075] FIG. 7 depicts a structure-based alignment of an enzyme of the present disclosure (MG2-1) versus Cas9 from Staphylococcus aureus (SEQ ID NO:5613). Predicted essential residues for function are called out below the sequence; conserved residues are highlighted in black.

[0076] FIG. 8 depicts a structure-based alignment of an enzyme of the present disclosure (MG3-1) versus Cas9 from Actinomyces naeslundii (SEQ ID NO: 5614). Predicted essential residues for function are called out below the sequence; conserved residues are highlighted in black.

[0077] FIGS. 9A, 9B, 9C, 9D, 9E, 9F, 9G, and 9H depicts a structure-based alignment of MG1 family enzymes MG1-1 through MG1-6 (SEQ ID NOs: 5, 6, 9, 1, 2, and 3). Predicted essential residues for function are called out below the sequence; conserved residues are highlighted in black.

[0078] FIG. 10 depicts in vitro cleavage of DNA by MG1-4 in complex with its corresponding sgRNA containing targeting sequences of varying lengths.

[0079] FIG. 11 depicts in cell cleavage of E. coli genomic DNA using MG1-4 along with its corresponding sgRNA. Shown are dilution series of cells transformed with MG1-4 along with target or non-target spacer (top); bottom panel shows the data quantitated, where the left bar represents non-target sgRNA and the right bar represents target sgRNA.

[0080] FIG. 12 depicts in cell indel formation generated by transfection of HEK cells with MG1-4 or MG1-6 constructs described in Example 11 alongside their corresponding sgRNAs containing various different targeting sequences targeting various locations in the human genome.

[0081] FIG. 13 depicts vitro cleavage of DNA by MG3-6 in complex with its corresponding sgRNA containing targeting sequences of varying lengths.

[0082] FIG. 14 depicts in cell cleavage of E. coli genomic DNA using MG3-7 along with its corresponding sgRNA. Shown are dilution series of cells transformed with MG3-7 along with target or non-target spacer (top); bottom panel shows the data quantitated, where the left bar represents non-target sgRNA and the right bar represents target sgRNA.

[0083] FIG. 15 depicts in cell indel formation generated by transfection of HEK cells with MG3-7 constructs described in Example 13 alongside their corresponding sgRNAs containing various different targeting sequences targeting various locations in the human genome.

[0084] FIG. 16 depicts in vitro cleavage of DNA by MG15-1 in complex with its corresponding sgRNA containing targeting sequences of varying lengths.

[0085] FIGS. 17, 18, 19, and 20 depict agarose gels showing the results of PAM vector library cleavage in the presence of TXTL extracts containing various MG family nucleases and their corresponding tracrRNAs or sgRNAs.

[0086] FIGS. 21, 22, 23, 24, 25 and 26 depict predicted structures (predicted e.g., as in Example 7) of corresponding sgRNAs of MG enzymes described herein.

[0087] FIGS. 27, 28, 29, 30, 31, 32 and 33 depict seqLogo representations of PAM sequences derived via NGS as described herein (e.g. as described in Example 6).

[0088] FIG. 34 depicts in cell cleavage of E. coli genomic DNA using MG2-7 along with its corresponding sgRNA. Shown are dilution series of cells transformed with MG2-7 along with target or non-target spacer (top); bottom panel shows the data quantitated, where the right bar represents non-target sgRNA and the left bar represents target sgRNA.

[0089] FIG. 35 depicts in cell cleavage of E. coli genomic DNA using MG14-1 along with its corresponding sgRNA. Shown are dilution series of cells transformed with MG14-1 along with target or non-target spacer (top); bottom panel shows the data quantitated, where the right bar represents non-target sgRNA and the left bar represents target sgRNA.

[0090] FIG. 36 depicts in cell cleavage of E. coli genomic DNA using MG15-1 along with its corresponding sgRNA. Shown are dilution series of cells transformed with MG15-1 along with target or non-target spacer (top); bottom panel shows the data quantitated, where the right bar represents non-target sgRNA and the left bar represents target sgRNA.

[0091] FIG. 37-39 depicts in cell indel formation generated by transfection of HEK cells with MG1-4, MG1-6 and MG1-7 constructs described in Example 11 alongside their corresponding sgRNAs containing various different targeting sequences targeting various locations in the human genome.

[0092] FIG. 40-42 depicts in cell indel formation generated by transfection of HEK cells with MG3-6, MG3-7 and MG3-8 constructs described in Example 13 alongside their corresponding sgRNAs containing various different targeting sequences targeting various locations in the human genome.

[0093] FIG. 43 depicts in cell indel formation generated by transfection of HEK cells with MG14-1 constructs described in Example 14 alongside their corresponding sgRNAs containing various different targeting sequences targeting various locations in the human genome.

[0094] FIG. 44 depicts in cell indel formation generated by transfection of HEK cells with MG18-1 constructs described in Example 17 alongside their corresponding sgRNAs containing various different targeting sequences targeting various locations in the human genome.

[0095] FIG. 45 depicts environmental distribution of nucleases described herein. Protein length is shown for representatives of selected protein families. Colors indicate the environment or environment type from which each protein was identified.

[0096] FIG. 46 depicts predicted catalytic residues of nucleases described herein. Protein length is shown for representatives of selected protein families. Colors indicate the number of catalytic residues that were predicted for each protein. For the effector enzymes described herein, six catalytic residues were searched that correspond with the HNH and RuvC domains.

[0097] FIG. 47 depicts candidate activity of nucleases described herein versus protein length.

[0098] FIG. 48 depicts the number of catalytic residues predicted for nucleases described herein.

[0099] FIG. 49 shows a table of various characteristic information of select nucleases described herein.

[0100] FIGS. 50-54 depict seqLogo representations of PAM sequences derived via NGS as described herein (e.g., as described in Example 6).

[0101] FIG. 55 shows a guide RNA screen at TRAC with MG3-6 and MG3-8. For the top panel (MG3-6) the x-axis numbers refer to the spacers corresponding to SEQ ID NOs: 5950-5958; for the bottom panel (MG3-8) the x-axis numbers refer to the spacers corresponding to SEQ ID NOs: 5959-5965.

[0102] FIG. 56 shows the activity (% indels) of MG3-6 with guide RNAs of various core sequences, lengths and doses.

[0103] FIG. 57 shows the activity (% indels) of MG3-8 with guide RNAs of various sequences and lengths.

[0104] FIG. 58 shows the activity (% indels) of MG3-6 with TRAC Guide 6 and MG3-8 with TRAC guide 8.

[0105] FIG. 59 show the effect of MG3-6 with a TRAC6 guide RNA on T-cell receptor expression by flow cytometry. There were no changes in viability post-editing.

[0106] FIG. 60 shows increased TRAC editing efficiency with higher amounts of gRNA.

[0107] FIG. 61 shows how TCR expression may be eliminated and replaced with CAR expression.

[0108] FIG. 62 shows targeted CAR integration with MG3-6.

[0109] FIG. 63 shows GR (NR3Cl) editing by MG3-6 with various guide RNAs targeting various exons of the NR3C1 gene.

[0110] FIG. 64 shows GR (NR3Cl) editing by MG3-8 with various guide RNAs targeting various exons of the NR3C1 gene.

[0111] FIG. 65 compares GR editing with two MG3-6 batches and various guide RNAs.

[0112] FIG. 66 shows the process of how gene editing may be used to create an allogeneic CAR-NK cell.

[0113] FIG. 67 shows TRAC editing using MG3-6 with a TRAC 6 guide RNA.

[0114] FIG. 68 shows CAR expression (Y-axis) by MG3-6 in CD56+NK cells by flow cytometry.

[0115] FIG. 69 shows CD38 editing in primary NK cells using MG3-6 and MG3-8 with various guide RNAs.

[0116] FIG. 70 shows TRAC editing in hematopoietic stem cells by MG3-6 and MG3-8 with various guide RNAs.

[0117] FIG. 71 shows TRAC editing in B-cells by MG3-6 with TRAC guide 6 using two different buffers.

[0118] FIG. 72A shows consensus PAM sequences for MG48-1 and FIG. 72B shows consensus PAM sequences for MG48-3 determined by the method of Example 25.

[0119] FIG. 73A illustrates RNAseq mapping with the sequenced tracr region highlighted, as performed by the method of Example 25 for MG48-1 and FIG. 73B illustrates RNAseq mapping with the sequenced tracr region highlighted as performed by the method of Example 25 for MG48-3.

### BRIEF DESCRIPTION OF THE SEQUENCE LISTING

[0120] The Sequence Listing filed herewith provides exemplary polynucleotide and polypeptide sequences for use in methods, compositions and systems according to the disclosure. Below are exemplary descriptions of sequences therein.

### MG1

[0121] SEQ ID NOs: 1-319 show the full-length peptide sequences of MG1 nucleases.

[0122] SEQ ID NOs: 1827-2140 show the peptide sequences of RuvC_III domains of MG1 nucleases above.

[0123] SEQ ID NOs: 3638-3955 show the peptide of HNH domains of MG1 nucleases above.

[0124] SEQ ID NOs: 5476-5479 show the nucleotide sequences of MG1 tracrRNAs derived from the same loci as MG1 nucleases above (e.g., same loci as SEQ ID NO:1-4, respectively).

[0125] SEQ ID NOs: 5461-5464 show the nucleotide sequences of sgRNAs engineered to function with an MG1 nuclease (e.g., SEQ ID NO:1-4, respectively), where Ns denote nucleotides of a targeting sequence.

[0126] SEQ ID NOs: 5572-5575 show nucleotide sequences for E. coli codon-optimized coding sequences for MG1 family enzymes (SEQ ID NOs: 1-4).

[0127] SEQ ID NOs: 5588-5589 show nucleotide sequences for human codon-optimized coding sequences for MG1 family enzymes (SEQ ID NOs: 1 and 3).

[0128] SEQ ID NOs: 5616-5632 show peptide motifs characteristic of MG1 family enzymes.

### MG2

[0129] SEQ ID NOs: 320-420 show the full-length peptide sequences of MG2 nucleases.

[0130] SEQ ID NOs: 2141-2241 show the peptide sequences of RuvC_III domains of MG2 nucleases above.

[0131] SEQ ID NOs: 3955-4055 show the peptide of HNH domains of MG2 nucleases above.

[0132] SEQ ID NOs: 5490-5494 show the nucleotide sequences of MG2 tracrRNAs derived from the same loci as MG2 nucleases above (e.g., same loci as SEQ ID NOs: 320, 321, 323, 325, and 326, respectively).

[0133] SEQ ID NO: 5465 shows the nucleotide sequence of an sgRNA engineered to function with an MG2 nuclease (e.g., SEQ ID NO: 321 above).

[0134] SEQ ID NOs: 5572-5575 show nucleotide sequences for E. coli codon-optimized coding sequences for MG2 family enzymes.

[0135] SEQ ID NOs: 5631-5638 show peptide sequences characteristic of MG2 family enzymes.

### MG3

[0136] SEQ ID NOs: 421-431 show the full-length peptide sequences of MG3 nucleases.

[0137] SEQ ID NOs: 2242-2252 show the peptide sequences of RuvC_III domains of MG3 nucleases above.

[0138] SEQ ID NOs: 4056-4066 show the peptide of HNH domains of MG3 nucleases above.

[0139] SEQ ID NOs: 5495-5502 show the nucleotide sequences of MG3 tracrRNAs derived from the same loci as MG3 nucleases above (e.g., same loci as SEQ ID NOs: 421-428, respectively).

[0140] SEQ ID NOs: 5466-5467 show the nucleotide sequence of sgRNAs engineered to function with an MG3 nuclease (e.g., SEQ ID NOs: 421-423).

[0141] SEQ ID NOs: 5578-5580 show nucleotide sequences for E. coli codon-optimized coding sequences for MG3 family enzymes.

[0142] SEQ ID NOs: 5639-5648 show peptide sequences characteristic of MG3 family enzymes.

### MG4

[0143] SEQ ID NOs: 432-660 show the full-length peptide sequences of MG4 nucleases.

[0144] SEQ ID NOs: 2253-2481 show the peptide sequences of RuvC_III domains of MG4 nucleases above.

[0145] SEQ ID NOs: 4067-4295 show the peptide of HNH domains of MG4 nucleases above.

[0146] SEQ ID NO: 5503 shows the nucleotide sequences of an MG4 tracrRNA derived from the same loci as MG4 nucleases above.

[0147] SEQ ID NO: 5468 shows the nucleotide sequence of sgRNAs engineered to function with an MG4 nuclease.

[0148] SEQ ID NO: 5649 shows a peptide sequence characteristic of MG4 family enzymes.

### MG6

[0149] SEQ ID NOs: 661-668 show the full-length peptide sequences of MG6 nucleases.

[0150] SEQ ID NOs: 2482-2489 show the peptide sequences of RuvC_III domains of MG6 nucleases above.

[0151] SEQ ID NOs: 4296-4303 show the peptide of HNH domains of MG3 nucleases above.

### MG7

[0152] SEQ ID NOs: 669-677 show the full-length peptide sequences of MG7 nucleases.

[0153] SEQ ID NOs: 2490-2498 show the peptide sequences of RuvC_III domains of MG7 nucleases above.

[0154] SEQ ID NOs: 4304-4312 show the peptide of HNH domains of MG3 nucleases above.

[0155] SEQ ID NO: 5504 shows the nucleotide sequence of an MG7 tracrRNA derived from the same loci as MG7 nucleases above.

### MG14

[0156] SEQ ID NOs: 678-929 show the full-length peptide sequences of MG14 nucleases.

[0157] SEQ ID NOs: 2499-2750 show the peptide sequences of RuvC_III domains of MG14 nucleases above.

[0158] SEQ ID NOs: 4313-4564 show the peptide of HNH domains of MG14 nucleases above.

[0159] SEQ ID NO: 5505 shows the nucleotide sequences of MG14 tracrRNA derived from the same loci as MG14 nucleases above.

[0160] SEQ ID NO: 5581 shows a nucleotide sequence for an E. coli codon-optimized coding sequences for an MG14 family enzyme.

[0161] SEQ ID NOs: 5650-5667 show peptide sequences characteristic of MG14 family enzymes.

### MG15

[0162] SEQ ID NOs: 930-1092 show the full-length peptide sequences of MG15 nucleases.

[0163] SEQ ID NOs: 2751-2913 show the peptide sequences of RuvC_III domains of MG15 nucleases above.

[0164] SEQ ID NOs: 4565-4727 show the peptide of HNH domains of MG15 nucleases above.

[0165] SEQ ID NO: 5506 shows the nucleotide sequences of MG15 tracrRNA derived from the same loci as MG15 nucleases above.

[0166] SEQ ID NOs: 5470 shows the nucleotide sequence of an sgRNA engineered to function with an MG15 nuclease.

[0167] SEQ ID NO: 5582 shows a nucleotide sequence for an E. coli codon-optimized coding sequences for an MG15 family enzyme.

[0168] SEQ ID NOs: 5668-5675 show peptide sequences characteristic of MG15 family enzymes.

### MG16

[0169] SEQ ID NOs: 1093-1353 show the full-length peptide sequences of MG16 nucleases.

[0170] SEQ ID NOs: 2914-3174 show the peptide sequences of RuvC_III domains of MG16 nucleases above.

[0171] SEQ ID NOs: 4728-4988 show the peptide of HNH domains of MG16 nucleases above.

[0172] SEQ ID NOs: 5507 show the nucleotide sequences of an MG16 tracrRNA derived from the same loci as MG3 nucleases above.

[0173] SEQ ID NOs: 5471 shows the nucleotide sequence of sgRNAs engineered to function with an MG16 nuclease.

[0174] SEQ ID NO: 5583 shows a nucleotide sequence for an E. coli codon-optimized coding sequences for an MG16 family enzyme.

[0175] SEQ ID NOs: 5676-5678 show peptide sequences characteristic of MG16 family enzymes.

### MG18

[0176] SEQ ID NOs: 1354-1511 show the full-length peptide sequences of MG18 nucleases.

[0177] SEQ ID NOs: 3175-3330 show the peptide sequences of RuvC_III domains of MG18 nucleases above.

[0178] SEQ ID NOs: 4989-5146 show the peptide of HNH domains of MG18 nucleases above.

[0179] SEQ ID NO: 5508 shows the nucleotide sequences of MG18 tracrRNA derived from the same loci as MG18 nucleases above.

[0180] SEQ ID NOs: 5472 shows the nucleotide sequence of an sgRNA engineered to function with an MG18 nuclease.

[0181] SEQ ID NO: 5584 shows a nucleotide sequence for an E. coli codon-optimized coding sequences for an MG18 family enzyme.

[0182] SEQ ID NOs: 5679-5686 show peptide sequences characteristic of MG18 family enzymes.

### MG21

[0183] SEQ ID NOs: 1512-1655 show the full-length peptide sequences of MG21 nucleases.

[0184] SEQ ID NOs: 3331-3474 show the peptide sequences of RuvC_III domains of MG21 nucleases above.

[0185] SEQ ID NOs: 5147-5290 show the peptide of HNH domains of MG21 nucleases above.

[0186] SEQ ID NOs: 5509 show the nucleotide sequence of an MG21 tracrRNA derived from the same loci as MG21 nucleases above.

[0187] SEQ ID NOs: 5473 shows the nucleotide sequence of an sgRNA engineered to function with an MG21 nuclease.

[0188] SEQ ID NO: 5585 shows a nucleotide sequence for an E. coli codon-optimized coding sequences for an MG21 family enzyme.

[0189] SEQ ID NOs: 5687-5692 and 5674-5675 show peptide sequences characteristic of MG21 family enzymes.

### MG22

[0190] SEQ ID NOs: 1656-1755 show the full-length peptide sequences of MG22 nucleases.

[0191] SEQ ID NOs: 3475-3568 show the peptide sequences of RuvC_III domains of MG22 nucleases above.

[0192] SEQ ID NOs: 5291-5389 show the peptide of HNH domains of MG22 nucleases above.

[0193] SEQ ID NO: 5510 show the nucleotide sequence of an MG22 tracrRNA derived from the same loci as MG22 nucleases above.

[0194] SEQ ID NOs: 5474 shows the nucleotide sequence of an sgRNAs engineered to function with an MG22 nuclease.

[0195] SEQ ID NO: 5586 shows a nucleotide sequence for an E. coli codon-optimized coding sequences for an MG22 family enzyme.

[0196] SEQ ID NOs: 5694-5699 show peptide sequences characteristic of MG22 family enzymes.

### MG23

[0197] SEQ ID NOs: 1756-1826 show the full-length peptide sequences of MG23 nucleases.

[0198] SEQ ID NOs: 3569-3637 show the peptide sequences of RuvC_III domains of MG23 nucleases above.

[0199] SEQ ID NOs: 5390-5460 show the peptide of HNH domains of MG23 nucleases above.

[0200] SEQ ID NO: 5511 shows the nucleotide sequences of an MG23 tracrRNA derived from the same loci as MG23 nucleases above.

[0201] SEQ ID NOs: 5475 shows the nucleotide sequence of an sgRNA engineered to function with an MG23 nuclease.

[0202] SEQ ID NO: 5587 shows a nucleotide sequence for an E. coli codon-optimized coding sequences for an MG23 family enzyme.

[0203] SEQ ID NOs: 5700-5717 show peptide sequences characteristic of MG23 family enzymes.

### MG40

[0204] SEQ ID NOs: 5718-5750 show the full-length peptide sequences of MG40 nucleases.

[0205] SEQ ID NOs: 5847-5852 show protospacer adjacent motifs associated with MG 40 nucleases.

[0206] SEQ ID NOs: 5862-5873 show the nucleotide sequence of an sgRNA engineered to function with an MG40 nuclease.

### MG47

[0207] SEQ ID NOs: 5751-5768 show the full-length peptide sequences of MG47 nucleases.

[0208] SEQ ID NOs: 5853-5854 show protospacer adjacent motifs associated with MG47 nucleases.

[0209] SEQ ID NOs: 5878-5881 show the nucleotide sequence of an sgRNA engineered to function with an MG47 nuclease.

### MG48

[0210] SEQ ID NOs: 5769-5804 show the full-length peptide sequences of MG48 nucleases.

[0211] SEQ ID NOs: 5855-5856 show protospacer adjacent motifs associated with MG48 nucleases.

[0212] SEQ ID NOs: 5886, 5890 and 5893 show the nucleotide sequences of MG48 tracrRNA derived from the same loci as MG48 nucleases above

[0213] SEQ ID NOs: 5887, 5891 and 5894 show CRISPR repeats associated with MG48 nucleases described herein.

[0214] SEQ ID NOs: 5888-5889, 5892 and 5895-5896 show putative sgRNA designed to function with an MG48 nuclease.

### MG49

[0215] SEQ ID NOs: 5805-5823 show the full-length peptide sequences of MG49 nucleases.

[0216] SEQ ID NOs: 5857-5858 show protospacer adjacent motifs associated with MG49 nucleases.

[0217] SEQ ID NOs: 5862-5873 show the nucleotide sequence of an sgRNA engineered to function with an MG40 nuclease.

[0218] SEQ ID NOs: 5876-5877 show the nucleotide sequence of an sgRNA engineered to function with an MG49 nuclease.

### MG50

[0219] SEQ ID NOs: 5824-5826 show the full-length peptide sequences of MG50 nucleases.

[0220] SEQ ID NO: 5859 shows a protospacer adjacent motif associated with MG50 nucleases.

[0221] SEQ ID NOs: 5884-5885 show the nucleotide sequence of an sgRNA engineered to function with an MG50 nuclease.

### MG51

[0222] SEQ ID NOs: 5827-5830 show the full-length peptide sequences of MG51 nucleases.

[0223] SEQ ID NO: 5860 shows a protospacer adjacent motif associated with MG51 nucleases.

[0224] SEQ ID NOs: 5882-5883 show the nucleotide sequence of an sgRNA engineered to function with an MG51 nuclease.

### MG52

[0225] SEQ ID NOs: 5831-5846 show the full-length peptide sequences of MG52 nucleases.

[0226] SEQ ID NO: 5861 shows a protospacer adjacent motif associated with MG52 nucleases.

[0227] SEQ ID NOs: 5874-5875 show the nucleotide sequence of an sgRNA engineered to function with an MG42 nuclease.

### DETAILED DESCRIPTION

[0228] While various embodiments of the invention have been shown and described herein, it will be obvious to those skilled in the art that such embodiments are provided by way of example only. Numerous variations, changes, and substitutions may occur to those skilled in the art without departing from the invention. It should be understood that various alternatives to the embodiments of the invention described herein may be employed.

[0229] The practice of some methods disclosed herein employ, unless otherwise indicated, techniques of immunology, biochemistry, chemistry, molecular biology, microbiology, cell biology, genomics and recombinant DNA. See for example Sambrook and Green, Molecular Cloning: A Laboratory Manual, 4^{th} Edition (2012); the series Current Protocols in Molecular Biology (F. M. Ausubel, et al. eds.); the series Methods In Enzymology (Academic Press, Inc.), PCR 2: A Practical Approach (M. J. MacPherson, B. D. Hames and G. R. Taylor eds. (1995)), Harlow and Lane, eds. (1988) Antibodies, A Laboratory Manual, and Culture of Animal Cells: A Manual of Basic Technique and Specialized Applications, 6^{th} Edition (R. I. Freshney, ed. (2010)) (which is entirely incorporated by reference herein).

[0230] As used herein, the singular forms “a”, “an” and “the” are intended to include the plural forms as well, unless the context clearly indicates otherwise. Furthermore, to the extent that the terms “including”, “includes”, “having”, “has”, “with”, or variants thereof are used in either the detailed description and/or the claims, such terms are intended to be inclusive in a manner similar to the term “comprising”.

[0231] The term “about” or “approximately” means within an acceptable error range for the particular value as determined by one of ordinary skill in the art, which will depend in part on how the value is measured or determined, i.e., the limitations of the measurement system. For example, “about” can mean within one or more than one standard deviation, per the practice in the art. Alternatively, “about” can mean a range of up to 20%, up to 15%, up to 10%, up to 5%, or up to 1% of a given value.

[0232] As used herein, a “cell” generally refers to a biological cell. A cell may be the basic structural, functional and/or biological unit of a living organism. A cell may originate from any organism having one or more cells. Some non-limiting examples include: a prokaryotic cell, eukaryotic cell, a bacterial cell, an archaeal cell, a cell of a single-cell eukaryotic organism, a protozoa cell, a cell from a plant (e.g., cells from plant crops, fruits, vegetables, grains, soy bean, corn, maize, wheat, seeds, tomatoes, rice, cassava, sugarcane, pumpkin, hay, potatoes, cotton, cannabis, tobacco, flowering plants, conifers, gymnosperms, ferns, clubmosses, hornworts, liverworts, mosses), an algal cell, (e.g., Botryococcus braunii, Chlamydomonas reinhardtii, Nannochloropsis gaditana, Chlorella pyrenoidosa, Sargassum patens C. agardh, and the like), seaweeds (e.g., kelp), a fungal cell (e.g., a yeast cell, a cell from a mushroom), an animal cell, a cell from an invertebrate animal (e.g., fruit fly, cnidarian, echinoderm, nematode, etc.), a cell from a vertebrate animal (e.g., fish, amphibian, reptile, bird, mammal), a cell from a mammal (e.g., a pig, a cow, a goat, a sheep, a rodent, a rat, a mouse, a non-human primate, a human, etc.), and etcetera. Sometimes a cell is not originating from a natural organism (e.g., a cell can be a synthetically made, sometimes termed an artificial cell).

[0233] The term “nucleotide,” as used herein, generally refers to a base-sugar-phosphate combination. A nucleotide may comprise a synthetic nucleotide. A nucleotide may comprise a synthetic nucleotide analog. Nucleotides may be monomeric units of a nucleic acid sequence (e.g., deoxyribonucleic acid (DNA) and ribonucleic acid (RNA)). The term nucleotide may include ribonucleoside triphosphates adenosine triphosphate (ATP), uridine triphosphate (UTP), cytosine triphosphate (CTP), guanosine triphosphate (GTP) and deoxyribonucleoside triphosphates such as dATP, dCTP, dITP, dUTP, dGTP, dTTP, or derivatives thereof. Such derivatives may include, for example, [αS]dATP, 7-deaza-dGTP and 7-deaza-dATP, and nucleotide derivatives that confer nuclease resistance on the nucleic acid molecule containing them. The term nucleotide as used herein may refer to dideoxyribonucleoside triphosphates (ddNTPs) and their derivatives. Illustrative examples of dideoxyribonucleoside triphosphates may include, but are not limited to, ddATP, ddCTP, ddGTP, ddITP, and ddTTP. A nucleotide may be unlabeled or detectably labeled, such as using moieties comprising optically detectable moieties (e.g., fluorophores). Labeling may also be carried out with quantum dots. Detectable labels may include, for example, radioactive isotopes, fluorescent labels, chemiluminescent labels, bioluminescent labels and enzyme labels. Fluorescent labels of nucleotides may include but are not limited fluorescein, 5-carboxyfluorescein (FAM), 2′7′-dimethoxy-4′5-dichloro-6-carboxyfluorescein (JOE), rhodamine, 6-carboxyrhodamine (R6G), N,N,N′,N′-tetramethyl-6-carboxyrhodamine (TAMRA), 6-carboxy-X-rhodamine (ROX), 4-(4′dimethylaminophenylazo) benzoic acid (DABCYL), Cascade Blue, Oregon Green, Texas Red, Cyanine and 5-(2′-aminoethyl)aminonaphthalene-1-sulfonic acid (EDANS). Specific examples of fluorescently labeled nucleotides can include [R6G]dUTP, [TAMRA]dUTP, [R110]dCTP, [R6G]dCTP, [TAMRA]dCTP, [JOE]ddATP, [R6G]ddATP, [FAM]ddCTP, [R110]ddCTP, [TAMRA]ddGTP, [ROX]ddTTP, [dR6G]ddATP, [dR110]ddCTP, [dTAMRA]ddGTP, and [dROX]ddTTP available from Perkin Elmer, Foster City, Calif, FluoroLink DeoxyNucleotides, FluoroLink Cy3-dCTP, FluoroLink Cy5-dCTP, FluoroLink Fluor X-dCTP, FluoroLink Cy3-dUTP, and FluoroLink Cy5-dUTP available from Amersham, Arlington Heights, Ill.; Fluorescein-15-dATP, Fluorescein-12-dUTP, Tetramethyl-rodamine-6-dUTP, IR770-9-dATP, Fluorescein-12-ddUTP, Fluorescein-12-UTP, and Fluorescein-15-2′-dATP available from Boehringer Mannheim, Indianapolis, Ind.; and Chromosome Labeled Nucleotides, BODIPY-FL-14-UTP, BODIPY-FL-4-UTP, BODIPY-TMR-14-UTP, BODIPY-TMR-14-dUTP, BODIPY-TR-14-UTP, BODIPY-TR-14-dUTP, Cascade Blue-7-UTP, Cascade Blue-7-dUTP, fluorescein-12-UTP, fluorescein-12-dUTP, Oregon Green 488-5-dUTP, Rhodamine Green-5-UTP, Rhodamine Green-5-dUTP, tetramethylrhodamine-6-UTP, tetramethylrhodamine-6-dUTP, Texas Red-5-UTP, Texas Red-5-dUTP, and Texas Red-12-dUTP available from Molecular Probes, Eugene, Oreg. Nucleotides can also be labeled or marked by chemical modification. A chemically-modified single nucleotide can be biotin-dNTP. Some non-limiting examples of biotinylated dNTPs can include, biotin-dATP (e.g., bio-N6-ddATP, biotin-14-dATP), biotin-dCTP (e.g., biotin-11-dCTP, biotin-14-dCTP), and biotin-dUTP (e.g., biotin-11-dUTP, biotin-16-dUTP, biotin-20-dUTP).

[0234] The terms “polynucleotide,” “oligonucleotide,” and “nucleic acid” are used interchangeably to generally refer to a polymeric form of nucleotides of any length, either deoxyribonucleotides or ribonucleotides, or analogs thereof, either in single-, double-, or multi-stranded form. A polynucleotide may be exogenous or endogenous to a cell. A polynucleotide may exist in a cell-free environment. A polynucleotide may be a gene or fragment thereof. A polynucleotide may be DNA. A polynucleotide may be RNA. A polynucleotide may have any three-dimensional structure and may perform any function. A polynucleotide may comprise one or more analogs (e.g., altered backbone, sugar, or nucleobase). If present, modifications to the nucleotide structure may be imparted before or after assembly of the polymer. Some non-limiting examples of analogs include: 5-bromouracil, peptide nucleic acid, xeno nucleic acid, morpholinos, locked nucleic acids, glycol nucleic acids, threose nucleic acids, dideoxynucleotides, cordycepin, 7-deaza-GTP, fluorophores (e.g., rhodamine or fluorescein linked to the sugar), thiol containing nucleotides, biotin linked nucleotides, fluorescent base analogs, CpG islands, methyl-7-guanosine, methylated nucleotides, inosine, thiouridine, pseudourdine, dihydrouridine, queuosine, and wyosine. Non-limiting examples of polynucleotides include coding or non-coding regions of a gene or gene fragment, loci (locus) defined from linkage analysis, exons, introns, messenger RNA (mRNA), transfer RNA (tRNA), ribosomal RNA (rRNA), short interfering RNA (siRNA), short-hairpin RNA (shRNA), micro-RNA (miRNA), ribozymes, cDNA, recombinant polynucleotides, branched polynucleotides, plasmids, vectors, isolated DNA of any sequence, isolated RNA of any sequence, cell-free polynucleotides including cell-free DNA (cfDNA) and cell-free RNA (cfRNA), nucleic acid probes, and primers. The sequence of nucleotides may be interrupted by non-nucleotide components.

[0235] The terms “transfection” or “transfected” generally refer to introduction of a nucleic acid into a cell by non-viral or viral-based methods. The nucleic acid molecules may be gene sequences encoding complete proteins or functional portions thereof. See, e.g., Sambrook et al., 1989, Molecular Cloning: A Laboratory Manual, 18.1-18.88.

[0236] The terms “peptide,” “polypeptide,” and “protein” are used interchangeably herein to generally refer to a polymer of at least two amino acid residues joined by peptide bond(s). This term does not connote a specific length of polymer, nor is it intended to imply or distinguish whether the peptide is produced using recombinant techniques, chemical or enzymatic synthesis, or is naturally occurring. The terms apply to naturally occurring amino acid polymers as well as amino acid polymers comprising at least one modified amino acid. In some cases, the polymer may be interrupted by non-amino acids. The terms include amino acid chains of any length, including full length proteins, and proteins with or without secondary and/or tertiary structure (e.g., domains). The terms also encompass an amino acid polymer that has been modified, for example, by disulfide bond formation, glycosylation, lipidation, acetylation, phosphorylation, oxidation, and any other manipulation such as conjugation with a labeling component. The terms “amino acid” and “amino acids,” as used herein, generally refer to natural and non-natural amino acids, including, but not limited to, modified amino acids and amino acid analogues. Modified amino acids may include natural amino acids and non-natural amino acids, which have been chemically modified to include a group or a chemical moiety not naturally present on the amino acid. Amino acid analogues may refer to amino acid derivatives. The term “amino acid” includes both D-amino acids and L-amino acids.

[0237] As used herein, the “non-native” can generally refer to a nucleic acid or polypeptide sequence that is not found in a native nucleic acid or protein. Non-native may refer to affinity tags. Non-native may refer to fusions. Non-native may refer to a naturally occurring nucleic acid or polypeptide sequence that comprises mutations, insertions and/or deletions. A non-native sequence may exhibit and/or encode for an activity (e.g., enzymatic activity, methyltransferase activity, acetyltransferase activity, kinase activity, ubiquitinating activity, etc.) that may also be exhibited by the nucleic acid and/or polypeptide sequence to which the non-native sequence is fused. A non-native nucleic acid or polypeptide sequence may be linked to a naturally-occurring nucleic acid or polypeptide sequence (or a variant thereof) by genetic engineering to generate a chimeric nucleic acid and/or polypeptide sequence encoding a chimeric nucleic acid and/or polypeptide.

[0238] The term “promoter”, as used herein, generally refers to the regulatory DNA region which controls transcription or expression of a gene and which may be located adjacent to or overlapping a nucleotide or region of nucleotides at which RNA transcription is initiated. A promoter may contain specific DNA sequences which bind protein factors, often referred to as transcription factors, which facilitate binding of RNA polymerase to the DNA leading to gene transcription. A ‘basal promoter’, also referred to as a ‘core promoter’, may generally refer to a promoter that contains all the basic necessary elements to promote transcriptional expression of an operably linked polynucleotide. Eukaryotic basal promoters typically, though not necessarily, contain a TATA-box and/or a CAAT box.

[0239] The term “expression”, as used herein, generally refers to the process by which a nucleic acid sequence or a polynucleotide is transcribed from a DNA template (such as into mRNA or other RNA transcript) and/or the process by which a transcribed mRNA is subsequently translated into peptides, polypeptides, or proteins. Transcripts and encoded polypeptides may be collectively referred to as “gene product.” If the polynucleotide is derived from genomic DNA, expression may include splicing of the mRNA in a eukaryotic cell.

[0240] As used herein, “operably linked”, “operable linkage”, “operatively linked”, or grammatical equivalents thereof generally refer to juxtaposition of genetic elements, e.g., a promoter, an enhancer, a polyadenylation sequence, etc., wherein the elements are in a relationship permitting them to operate in the expected manner. For instance, a regulatory element, which may comprise promoter and/or enhancer sequences, is operatively linked to a coding region if the regulatory element helps initiate transcription of the coding sequence. There may be intervening residues between the regulatory element and coding region so long as this functional relationship is maintained.

[0241] A “vector” as used herein, generally refers to a macromolecule or association of macromolecules that comprises or associates with a polynucleotide and which may be used to mediate delivery of the polynucleotide to a cell. Examples of vectors include plasmids, viral vectors, liposomes, and other gene delivery vehicles. The vector generally comprises genetic elements, e.g., regulatory elements, operatively linked to a gene to facilitate expression of the gene in a target.

[0242] As used herein, “an expression cassette” and “a nucleic acid cassette” are used interchangeably generally to refer to a combination of nucleic acid sequences or elements that are expressed together or are operably linked for expression. In some cases, an expression cassette refers to the combination of regulatory elements and a gene or genes to which they are operably linked for expression.

[0243] A “functional fragment” of a DNA or protein sequence generally refers to a fragment that retains a biological activity (either functional or structural) that is substantially similar to a biological activity of the full-length DNA or protein sequence. A biological activity of a DNA sequence may be its ability to influence expression in a manner known to be attributed to the full-length sequence.

[0244] As used herein, an “engineered” object generally indicates that the object has been modified by human intervention. According to non-limiting examples: a nucleic acid may be modified by changing its sequence to a sequence that does not occur in nature; a nucleic acid may be modified by ligating it to a nucleic acid that it does not associate with in nature such that the ligated product possesses a function not present in the original nucleic acid; an engineered nucleic acid may synthesized in vitro with a sequence that does not exist in nature; a protein may be modified by changing its amino acid sequence to a sequence that does not exist in nature; an engineered protein may acquire a new function or property. An “engineered” system comprises at least one engineered component.

[0245] As used herein, “synthetic” and “artificial” are used interchangeably to refer to a protein or a domain thereof that has low sequence identity (e.g., less than 50% sequence identity, less than 25% sequence identity, less than 10% sequence identity, less than 5% sequence identity, less than 1% sequence identity) to a naturally occurring human protein. For example, VPR and VP64 domains are synthetic transactivation domains.

[0246] The term “tracrRNA” or “tracr sequence”, as used herein, can generally refer to a nucleic acid with at least about 5%, 10%, 20%, 30%, 40%, 50%, 60%, 70%, 80%, 90%, 95%, or 100% sequence identity and/or sequence similarity to a wild type exemplary tracrRNA sequence (e.g., a tracrRNA from S. pyogenes S. aureus, etc or SEQ ID NOs: 5476-5511). tracrRNA can refer to a nucleic acid with at most about 5%, 10%, 20%, 30%, 40%, 50%, 60%, 70%, 80%, 90%, or 100% sequence identity and/or sequence similarity to a wild type exemplary tracrRNA sequence (e.g., a tracrRNA from S. pyogenes S. aureus, etc). tracrRNA may refer to a modified form of a tracrRNA that can comprise a nucleotide change such as a deletion, insertion, or substitution, variant, mutation, or chimera. A tracrRNA may refer to a nucleic acid that can be at least about 60% identical to a wild type exemplary tracrRNA (e.g., a tracrRNA from S. pyogenes S. aureus, etc) sequence over a stretch of at least 6 contiguous nucleotides. For example, a tracrRNA sequence can be at least about 60% identical, at least about 65% identical, at least about 70% identical, at least about 75% identical, at least about 80% identical, at least about 85% identical, at least about 90% identical, at least about 95% identical, at least about 98% identical, at least about 99% identical, or 100% identical to a wild type exemplary tracrRNA (e.g., a tracrRNA from S. pyogenes S. aureus, etc) sequence over a stretch of at least 6 contiguous nucleotides. Type II tracrRNA sequences can be predicted on a genome sequence by identifying regions with complementarity to part of the repeat sequence in an adjacent CRISPR array.

[0247] As used herein, a “guide nucleic acid” can generally refer to a nucleic acid that may hybridize to another nucleic acid. A guide nucleic acid may be RNA. A guide nucleic acid may be DNA. The guide nucleic acid may be programmed to bind to a sequence of nucleic acid site-specifically. The nucleic acid to be targeted, or the target nucleic acid, may comprise nucleotides. The guide nucleic acid may comprise nucleotides. A portion of the target nucleic acid may be complementary to a portion of the guide nucleic acid. The strand of a double-stranded target polynucleotide that is complementary to and hybridizes with the guide nucleic acid may be called the complementary strand. The strand of the double-stranded target polynucleotide that is complementary to the complementary strand, and therefore may not be complementary to the guide nucleic acid may be called noncomplementary strand. A guide nucleic acid may comprise a polynucleotide chain and can be called a “single guide nucleic acid.” A guide nucleic acid may comprise two polynucleotide chains and may be called a “double guide nucleic acid.” If not otherwise specified, the term “guide nucleic acid” may be inclusive, referring to both single guide nucleic acids and double guide nucleic acids. A guide nucleic acid may comprise a segment that can be referred to as a “nucleic acid-targeting segment” or a “nucleic acid-targeting sequence.” A nucleic acid-targeting segment may comprise a sub-segment that may be referred to as a “protein binding segment” or “protein binding sequence” or “Cas protein binding segment”.

[0248] The term “sequence identity” or “percent identity” in the context of two or more nucleic acids or polypeptide sequences, generally refers to two (e.g., in a pairwise alignment) or more (e.g., in a multiple sequence alignment) sequences that are the same or have a specified percentage of amino acid residues or nucleotides that are the same, when compared and aligned for maximum correspondence over a local or global comparison window, as measured using a sequence comparison algorithm. Suitable sequence comparison algorithms for polypeptide sequences include, e.g., BLASTP using parameters of a wordlength (W) of 3, an expectation I of 10, and the BLOSUM62 scoring matrix setting gap costs at existence of 11, extension of 1, and using a conditional compositional score matrix adjustment for polypeptide sequences longer than 30 residues; BLASTP using parameters of a wordlength (W) of 2, an expectation(E) of 1000000, and the PAM30 scoring matrix setting gap costs at 9 to open gaps and 1 to extend gaps for sequences of less than 30 residues (these are the default parameters for BLASTP in the BLAST suite available at https.//blast.ncbi.nlm.nih.gov); CLUSTALW with parameters of; the Smith-Waterman homology search algorithm with parameters of a match of 2, a mismatch of −1, and a gap of −1; MUSCLE with default parameters; MAFFT with parameters retree of 2 and maxiterations of 1000; Novafold with default parameters; HMMER hmmalign with default parameters.

[0249] Included in the current disclosure are variants of any of the enzyme described herein with one or more conservative amino acid substitutions. Such conservative substitutions can be made in the amino acid sequence of a polypeptide without disrupting the three-dimensional structure or function of the polypeptide. Conservative substitutions can be accomplished by substituting amino acids with similar hydrophobicity, polarity, and R chain length for one another. Additionally or alternatively, by comparing aligned sequences of homologous proteins from different species, conservative substitutions can be identified by locating amino acid residues that have been mutated between species (e.g. non-conserved residues) without altering the basic functions of the encoded proteins. Such conservatively substituted variants may include variants with at least about 20%, at least about 25%, at least about 30%, at least about 35%, at least about 40%, at least about 45%, at least about 50%, at least about 55%, at least about 60%, at least about 65%, at least about 70%, at least about 75%, at least about 80%, at least about 85%, at least about 90%, at least about 91%, at least about 92%, at least about 93%, at least about 94%, at least about 95%, at least about 96%, at least about 97%, at least about 98%, at least about 99% identity to any one of the endonuclease protein sequences described herein (e.g. MG1, MG2, MG3, MG4, MG6, MG7, MG14, MG15, MG16, MG18, MG21, MG22, or MG23 family endonucleases described herein). In some embodiments, such conservatively substituted variants are functional variants. Such functional variants can encompass sequences with substitutions such that the activity of critical active site residues of the endonuclease are not disrupted. In some embodiments, a functional variant of any of the proteins described herein lacks substitution of at least one of the conserved or functional residues called out in FIG. 6, 7, 8, 9A, 9B, 9C, 9D, 9E, 9F, 9G, or 9H. In some embodiments, a functional variant of any of the proteins described herein lacks substitution of all of the conserved or functional residues called out in in FIG. 6, 7, 8, 9A, 9B, 9C, 9D, 9E, 9F, 9G, or 9H.

[0250] Conservative substitution tables providing functionally similar amino acids are available from a variety of references (see, for e.g., Creighton, Proteins: Structures and Molecular Properties (W H Freeman & C°.; 2nd edition (December 1993)). The following eight groups each contain amino acids that are conservative substitutions for one another:
[0251] 1) Alanine (A), Glycine (G);
[0252] 2) Aspartic acid (D), Glutamic acid (E);
[0253] 3) Asparagine (N), Glutamine (Q);
[0254] 4) Arginine (R), Lysine (K);
[0255] 5) Isoleucine (I), Leucine (L), Methionine (M), Valine (V);
[0256] 6) Phenylalanine (F), Tyrosine (Y), Tryptophan (W);
[0257] 7) Serine (S), Threonine (T); and
[0258] 8) Cysteine (C), Methionine (M)

[0259] As used herein, the term “RuvC_III domain” generally refers to a third discontinuous segment of a RuvC endonuclease domain (the RuvC nuclease domain being comprised of three discontiguous segments, RuvC_I, RuvC_II, and RuvC_III). A RuvC domain or segments thereof can generally be identified by alignment to known domain sequences, structural alignment to proteins with annotated domains, or by comparison to Hidden Markov Models (HMMs) built based on known domain sequences (e.g., Pfam HMM PF18541 for RuvC_III).

[0260] As used herein, the term “HNH domain” generally refers to an endonuclease domain having characteristic histidine and asparagine residues. An HNH domain can generally be identified by alignment to known domain sequences, structural alignment to proteins with annotated domains, or by comparison to Hidden Markov Models (HMMs) built based on known domain sequences (e.g., Pfam HMM PF01844 for domain HNH).

### Overview

[0261] The discovery of new Cas enzymes with unique functionality and structure may offer the potential to further disrupt deoxyribonucleic acid (DNA) editing technologies, improving speed, specificity, functionality, and ease of use. Relative to the predicted prevalence of Clustered Regularly Interspaced Short Palindromic Repeats (CRISPR) systems in microbes and the sheer diversity of microbial species, relatively few functionally characterized CRISPR/Cas enzymes exist in the literature. This is partly because a huge number of microbial species may not be readily cultivated in laboratory conditions. Metagenomic sequencing from natural environmental niches that represent large numbers of microbial species may offer the potential to drastically increase the number of new CRISPR/Cas systems known and speed the discovery of new oligonucleotide editing functionalities. A recent example of the fruitfulness of such an approach is demonstrated by the 2016 discovery of CasX/CasY CRISPR systems from metagenomic analysis of natural microbial communities.

[0262] CRISPR/Cas systems are RNA-directed nuclease complexes that have been described to function as an adaptive immune system in microbes. In their natural context, CRISPR/Cas systems occur in CRISPR (clustered regularly interspaced short palindromic repeats) operons or loci, which generally comprise two parts: (i) an array of short repetitive sequences (30-40 bp) separated by equally short spacer sequences, which encode the RNA-based targeting element; and (ii) ORFs encoding the Cas encoding the nuclease polypeptide directed by the RNA-based targeting element alongside accessory proteins/enzymes. Efficient nuclease targeting of a particular target nucleic acid sequence generally requires both (i) complementary hybridization between the first 6-8 nucleic acids of the target (the target seed) and the crRNA guide; and (ii) the presence of a protospacer-adjacent motif (PAM) sequence within a defined vicinity of the target seed (the PAM usually being a sequence not commonly represented within the host genome). Depending on the exact function and organization of the system, CRISPR-Cas systems are commonly organized into 2 classes, 5 types and 16 subtypes based on shared functional characteristics and evolutionary similarity.

[0263] Class I CRISPR-Cas systems have large, multisubunit effector complexes, and comprise Types I, III, and IV.

[0264] Type I CRISPR-Cas systems are considered of moderate complexity in terms of components. In Type I CRISPR-Cas systems, the array of RNA-targeting elements is transcribed as a long precursor crRNA (pre-crRNA) that is processed at repeat elements to liberate short, mature crRNAs that direct the nuclease complex to nucleic acid targets when they are followed by a suitable short consensus sequence called a protospacer-adjacent motif (PAM). This processing occurs via an endoribonuclease subunit (Cas6) of a large endonuclease complex called Cascade, which also comprises a nuclease (Cas3) protein component of the crRNA-directed nuclease complex. Cas I nucleases function primarily as DNA nucleases.

[0265] Type III CRISPR systems may be characterized by the presence of a central nuclease, known as Cas10, alongside a repeat-associated mysterious protein (RAMP) that comprises Csm or Cmr protein subunits. Like in Type I systems, the mature crRNA is processed from a pre-crRNA using a Cas6-like enzyme. Unlike type I and II systems, type III systems appear to target and cleave DNA-RNA duplexes (such as DNA strands being used as templates for an RNA polymerase).

[0266] Type IV CRISPR-Cas systems possess an effector complex that consists of a highly reduced large subunit nuclease (csf1), two genes for RAMP proteins of the Cas5 (csf3) and Cas7 (csf2) groups, and, in some cases, a gene for a predicted small subunit; such systems are commonly found on endogenous plasmids.

[0267] Class II CRISPR-Cas systems generally have single-polypeptide multidomain nuclease effectors, and comprise Types II, V and VI.

[0268] Type II CRISPR-Cas systems are considered the simplest in terms of components. In Type II CRISPR-Cas systems, the processing of the CRISPR array into mature crRNAs does not require the presence of a special endonuclease subunit, but rather a small trans-encoded crRNA (tracrRNA) with a region complementary to the array repeat sequence; the tracrRNA interacts with both its corresponding effector nuclease (e.g. Cas9) and the repeat sequence to form a precursor dsRNA structure, which is cleaved by endogenous RNAse III to generate a mature effector enzyme loaded with both tracrRNA and crRNA. Cas II nucleases are known as DNA nucleases. Type 2 effectors generally exhibit a structure consisting of a RuvC-like endonuclease domain that adopts the RNase H fold with an unrelated HNH nuclease domain inserted within the folds of the RuvC-like nuclease domain. The RuvC-like domain is responsible for the cleavage of the target (e.g., crRNA complementary) DNA strand, while the HNH domain is responsible for cleavage of the displaced DNA strand.

[0269] Type V CRISPR-Cas systems are characterized by a nuclease effector (e.g. Cas12) structure similar to that of Type II effectors, comprising a RuvC-like domain. Similar to Type II, most (but not all) Type V CRISPR systems use a tracrRNA to process pre-crRNAs into mature crRNAs; however, unlike Type II systems which requires RNAse III to cleave the pre-crRNA into multiple crRNAs, type V systems are capable of using the effector nuclease itself to cleave pre-crRNAs. Like Type-II CRISPR-Cas systems, Type V CRISPR-Cas systems are again known as DNA nucleases. Unlike Type II CRISPR-Cas systems, some Type V enzymes (e.g., Cas12a) appear to have a robust single-stranded nonspecific deoxyribonuclease activity that is activated by the first crRNA directed cleavage of a double-stranded target sequence.

[0270] Type VI CRIPSR-Cas systems have RNA-guided RNA endonucleases. Instead of RuvC-like domains, the single polypeptide effector of Type VI systems (e.g. Cas13) comprises two HEPN ribonuclease domains. Differing from both Type II and V systems, Type VI systems also appear to not need a tracrRNA for processing of pre-crRNA into crRNA. Similar to type V systems, however, some Type VI systems (e.g., C2C2) appear to possess robust single-stranded nonspecific nuclease (ribonuclease) activity activated by the first crRNA directed cleavage of a target RNA.

[0271] Because of their simpler architecture, Class II CRISPR-Cas have been most widely adopted for engineering and development as designer nuclease/genome editing applications.

[0272] One of the early adaptations of such a system for in vitro use can be found in Jinek et al. (Science. 2012 Aug. 17; 337(6096):816-21, which is entirely incorporated herein by reference). The Jinek study first described a system that involved (i) recombinantly-expressed, purified full-length Cas9 (e.g., a Class II, Type II Cas enzyme) isolated from S. pyogenes SF370, (ii) purified mature ˜42 nt crRNA bearing a ˜20 nt 5′ sequence complementary to the target DNA sequence desired to be cleaved followed by a 3′ tracr-binding sequence (the whole crRNA being in vitro transcribed from a synthetic DNA template carrying a T7 promoter sequence); (iii) purified tracrRNA in vitro transcribed from a synthetic DNA template carrying a T7 promoter sequence, and (iv) Mg2+. Jinek later described an improved, engineered system wherein the crRNA of (ii) is joined to the 5′ end of (iii) by a linker (e.g., GAAA) to form a single fused synthetic guide RNA (sgRNA) capable of directing Cas9 to a target by itself (compare top and bottom panel of FIG. 2).

[0273] Mali et al. (Science. 2013 Feb. 15; 339(6121): 823-826.), which is entirely incorporated herein by reference, later adapted this system for use in mammalian cells by providing DNA vectors encoding (i) an ORF encoding codon-optimized Cas9 (e.g., a Class II, Type II Cas enzyme) under a suitable mammalian promoter with a C-terminal nuclear localization sequence (e.g., SV40 NLS) and a suitable polyadenylation signal (e.g., TK pA signal); and (ii) an ORF encoding an sgRNA (having a 5′ sequence beginning with G followed by 20 nt of a complementary targeting nucleic acid sequence joined to a 3′ tracr-binding sequence, a linker, and the tracrRNA sequence) under a suitable Polymerase III promoter (e.g., the U6 promoter).

### MG Enzymes

[0274] In one aspect, the present disclosure provides for an engineered nuclease system discovered through metagenomic sequencing. In some cases, the metagenomic sequencing is conducted on samples. In some cases, the samples may be collected by a variety of environments. Such environments may be a human microbiome, an animal microbiome, environments with high temperatures, environments with low temperatures. Such environments may include sediment. An example of the types of such environments of the engineered nuclease systems described herein may be found in FIG. 45.

### MG1 Enzymes

[0275] In one aspect, the present disclosure provides for an engineered nuclease system comprising (a) an endonuclease. In some cases, the endonuclease is a Cas endonuclease. In some cases, the endonuclease is a Type II, Class II Cas endonuclease. The endonuclease may comprise a RuvC_III domain, wherein said RuvC_III domain has at least about 70% sequence identity to any one of SEQ ID NOs: 1827-2140. In some cases, the endonuclease may comprise a RuvC_III domain, wherein the RuvC_III domain has at least about 20%, at least about 25%, at least about 30%, at least about 35%, at least about 40%, at least about 45%, at least about 50%, at least about 55%, at least about 60%, at least about 65%, at least about 70%, at least about 75%, at least about 80%, at least about 85%, at least about 90%, at least about 91%, at least about 92%, at least about 93%, at least about 94%, at least about 95%, at least about 96%, at least about 97%, at least about 98%, at least about 99% identity to any one of SEQ ID NOs: 1827-2140. In some cases, the endonuclease may comprise a RuvC_III domain, wherein the substantially identical to any one of SEQ ID NOs: 1827-2140. The endonuclease may comprise a RuvC_III domain having at least about 70% sequence identity to any one of SEQ ID NOs: 1827-1831. In some cases, the endonuclease may comprise a RuvC_III domain having at least about 20%, at least about 25%, at least about 30%, at least about 35%, at least about 40%, at least about 45%, at least about 50%, at least about 55%, at least about 60%, at least about 65%, at least about 70%, at least about 75%, at least about 80%, at least about 85%, at least about 90%, at least about 91%, at least about 92%, at least about 93%, at least about 94%, at least about 95%, at least about 96%, at least about 97%, at least about 98%, at least about 99% identity to any one of SEQ ID NOs: 1827-1831. In some cases, the endonuclease may comprise a RuvC_III domain substantially identical to any one of SEQ ID NOs: 1827-1831. In some cases, the endonuclease may comprise a RuvC_III domain having at least about 70%, at least about 75%, at least about 80%, at least about 85%, at least about 90%, at least about 91%, at least about 92%, at least about 93%, at least about 94%, at least about 95%, at least about 96%, at least about 97%, at least about 98%, at least about 99% identity to SEQ ID NO: 1827. In some cases, the endonuclease may comprise a RuvC_III domain having at least about 70%, at least about 75%, at least about 80%, at least about 85%, at least about 90%, at least about 91%, at least about 92%, at least about 93%, at least about 94%, at least about 95%, at least about 96%, at least about 97%, at least about 98%, at least about 99% identity to SEQ ID NO: 1828. In some cases, the endonuclease may comprise a RuvC_III domain having at least about 70%, at least about 75%, at least about 80%, at least about 85%, at least about 90%, at least about 91%, at least about 92%, at least about 93%, at least about 94%, at least about 95%, at least about 96%, at least about 97%, at least about 98%, at least about 99% identity to SEQ ID NO: 1829. In some cases, the endonuclease may comprise a RuvC_III domain having at least about 70%, at least about 75%, at least about 80%, at least about 85%, at least about 90%, at least about 91%, at least about 92%, at least about 93%, at least about 94%, at least about 95%, at least about 96%, at least about 97%, at least about 98%, at least about 99% identity to SEQ ID NO: 1830. In some cases, the endonuclease may comprise a RuvC_III domain having at least about 70%, at least about 75%, at least about 80%, at least about 85%, at least about 90%, at least about 91%, at least about 92%, at least about 93%, at least about 94%, at least about 95%, at least about 96%, at least about 97%, at least about 98%, at least about 99% identity to SEQ ID NO: 1831.

[0276] The endonuclease may comprise an HNH domain having at least about 70% identity to any one of SEQ ID NOs: 3638-3955. In some cases, the endonuclease may comprise an HNH domain having at least about 70%, at least about 75%, at least about 80%, at least about 85%, at least about 90%, at least about 91%, at least about 92%, at least about 93%, at least about 94%, at least about 95%, at least about 96%, at least about 97%, at least about 98%, or at least about 99% identical to any one of SEQ ID NOs: 3638-3955. The endonuclease may comprise an HNH domain substantially identical to any one of SEQ ID NOs: 3638-3955. The endonuclease may comprise an HNH domain having at least about 70% identity to any one of SEQ ID NOs: 3638-3955. In some cases, the endonuclease may comprise an HNH domain having at least about 70%, at least about 75%, at least about 80%, at least about 85%, at least about 90%, at least about 91%, at least about 92%, at least about 93%, at least about 94%, at least about 95%, at least about 96%, at least about 97%, at least about 98%, or at least about 99% identical to any one of SEQ ID NOs: 3638-3955. The endonuclease may comprise an HNH domain substantially identical to any one of SEQ ID NOs: 3638-3955. The endonuclease may comprise an HNH domain having at least about 70% identity to any one of SEQ ID NOs: 3638-3641. In some cases, the endonuclease may comprise an HNH domain having at least about 70%, at least about 75%, at least about 80%, at least about 85%, at least about 90%, at least about 91%, at least about 92%, at least about 93%, at least about 94%, at least about 95%, at least about 96%, at least about 97%, at least about 98%, or at least about 99% identical to any one of SEQ ID NOs: 3638-3641. The endonuclease may comprise an HNH domain substantially identical to any one of SEQ ID NOs: 3638-3641. The endonuclease may comprise an HNH domain having at least about 70% identity to any one of SEQ ID NOs: 3638. In some cases, the endonuclease may comprise an HNH domain having at least about 70%, at least about 75%, at least about 80%, at least about 85%, at least about 90%, at least about 91%, at least about 92%, at least about 93%, at least about 94%, at least about 95%, at least about 96%, at least about 97%, at least about 98%, or at least about 99% identical to any one of SEQ ID NOs: 3638. The endonuclease may comprise an HNH domain substantially identical to any one of SEQ ID NOs: 3638. The endonuclease may comprise an HNH domain having at least about 70% identity to any one of SEQ ID NOs: 3639. In some cases, the endonuclease may comprise an HNH domain having at least about 70%, at least about 75%, at least about 80%, at least about 85%, at least about 90%, at least about 91%, at least about 92%, at least about 93%, at least about 94%, at least about 95%, at least about 96%, at least about 97%, at least about 98%, or at least about 99% identical to any one of SEQ ID NOs: 3639. The endonuclease may comprise an HNH domain substantially identical to any one of SEQ ID NOs: 3639. The endonuclease may comprise an HNH domain having at least about 70% identity to any one of SEQ ID NOs: 3640. In some cases, the endonuclease may comprise an HNH domain having at least about 70%, at least about 75%, at least about 80%, at least about 85%, at least about 90%, at least about 91%, at least about 92%, at least about 93%, at least about 94%, at least about 95%, at least about 96%, at least about 97%, at least about 98%, or at least about 99% identical to any one of SEQ ID NOs: 3640. The endonuclease may comprise an HNH domain substantially identical to any one of SEQ ID NOs: 3640. The endonuclease may comprise an HNH domain having at least about 70% identity to any one of SEQ ID NOs: 3641. In some cases, the endonuclease may comprise an HNH domain having at least about 70%, at least about 75%, at least about 80%, at least about 85%, at least about 90%, at least about 91%, at least about 92%, at least about 93%, at least about 94%, at least about 95%, at least about 96%, at least about 97%, at least about 98%, or at least about 99% identical to any one of SEQ ID NOs: 3641. The endonuclease may comprise an HNH domain substantially identical to any one of SEQ ID NOs: 3641.

[0277] In some cases, the endonuclease may comprise a variant having at least about 30%, at least about 35%, at least about 40%, at least about 45%, at least about 50%, at least about 55%, at least about 60%, at least about 65%, at least about 70%, at least about 75%, at least about 80%, at least about 85%, at least about 90%, at least about 95%, at least about 96%, at least about 97%, at least about 98%, or at least about 99% identity to any one of SEQ ID NOs: 1-6 or 9-319. In some cases, the endonuclease may be substantially identical to any one of SEQ ID NOs: 1-6 or 9-319. In some cases, the endonuclease may comprise a variant having at least about 30%, at least about 35%, at least about 40%, at least about 45%, at least about 50%, at least about 55%, at least about 60%, at least about 65%, at least about 70%, at least about 75%, at least about 80%, at least about 85%, at least about 90%, at least about 95%, at least about 96%, at least about 97%, at least about 98%, or at least about 99% identity to any one of SEQ ID NOs:1-4. In some cases, the endonuclease may be substantially identical to any one of SEQ ID NOs: 1-4. In some cases, the endonuclease may comprise a peptide motif substantially identical to any one of SEQ ID NOs: 5615, 5616, or 5617.

[0278] In some cases, the endonuclease may comprise a variant having one or more nuclear localization sequences (NLSs). The NLS may be proximal to the N- or C-terminus of said endonuclease. The NLS may be appended N-terminal or C-terminal to any one of SEQ ID NOs: 1-6 or 9-319, or to a variant having at least about 30%, at least about 35%, at least about 40%, at least about 45%, at least about 50%, at least about 55%, at least about 60%, at least about 65%, at least about 70%, at least about 75%, at least about 80%, at least about 85%, at least about 90%, at least about 95%, at least about 96%, at least about 97%, at least about 98%, or at least about 99% identity to any one of SEQ ID NOs: 1-319. The NLS may be an SV40 large T antigen NLS. The NLS may be a c-myc NLS. The NLS can comprise a sequence with at least about 80%, at least about 85%, at least about 90%, at least about 95%, at least about 99% identity to any one of SEQ ID NOs: 5593-5608. The NLS can comprise a sequence substantially identical to any one of SEQ ID NOs: 5593-5608. The NLS can comprise any of the sequences in Table 1 below, or a combination thereof:

TABLE 1
Example NLS Sequences that can be used with Cas Effectors According to
the Disclosure

| Source | NLS amino acid sequence | SEQ ID NO: |
|---|---|---|
| SV40 | PKKKRKV | 5597 |
| nucleoplasmin bipartite NLS | KRPAATKKAGQAKKKK | 5598 |
| c-myc NLS | PAAKRVKLD | 5599 |
| c-myc NLS | RQRRNELKRSP | 5600 |
| hRNPA1 M9 NLS | NQSSNFGPMKGGNFGGRSSGPYGGGGQYFA | 5601 |
| | KPRNQGGY | |
| Importin-alpha IBB domain | RMRIZFKNKGKDTAELRRRRVEVSVELRKAK | 5602 |
| | KDEQILKRRNV | |
| Myoma T protein | VSRKRPRP | 5603 |
| Myoma T protein | PPKKARED | 5604 |
| p53 | PQPKKKPL | 5605 |
| mouse c-abl IV | SALIKKKKKMAP | 5606 |
| influenza virus NS1 | DRLRR | 5607 |
| influenza virus NS1 | PKQKKRK | 5608 |
| Hepatitis virus delta antigen | RKLKKKIKKL | 5609 |
| mouse Mx1 protein | REKKKFLKRR | 5610 |
| human poly(ADP-ribose) | KRKGDEVDGVDEVAKKKSKK | 5611 |
| polymerase | | |
| steroid hormone receptor | RKCLQAGMNLEARKTKK | 5612 |
| (human) glucocorticoid | | |

[0279] In some cases, the endonuclease may be recombinant (e.g., cloned, expressed, and purified by a suitable method such as expression in E. coli followed by epitope-tag purification). In some cases, the endonuclease may be derived from a bacterium with a 16S rRNA gene having at least about 9000 identity to any one of SEQ ID NOs: 5592-5595. The endonuclease may be derived from a species having a 16S rRNA gene at least about 80%, at least about 82%, at least about 83%, at least about 84%, at least about 85%, at least about 86%, at least about 87%, at least about 88%, at least about 89%, at least about 90%, at least about 91%, at least about 92%, at least about 93%, at least about 9400 at least about 9500 at least about 96%, at least about 9700 at least about 98%, or at least about 9900 identity to any one of SEQ TD NOs: 5592-5595. The endonuclease may be derived from a species having a 16S rRNA gene substantially identical to any one of SEQ ID NOs: 5592-5595. The endonuclease may be derived from a bacterium belonging to the Phylum Verrucomicrobia or the Phylum Candidatus Peregrinibacteria.

[0280] In some cases, sequence identity may be determined by the BLASTP, CLUSTALW, MUSCLE, MAFFT, Novafold, or CLUSTALW with the parameters of the Smith-Waterman homology search algorithm. The sequence identity may be determined by the BLASTP algorithm using parameters of a wordlength (W) of 3, an expectation (E) of 10, and using a BLOSUM62 scoring matrix setting gap costs at existence of 11, extension of 1, and using a conditional compositional score matrix adjustment.

[0281] In some cases, the system above may comprise (b) at least one engineered synthetic guide ribonucleic acid (sgRNA) capable of forming a complex with the endonuclease bearing a 5′ targeting region complementary to a desired cleavage sequence. In some cases, the 5′ targeting region may comprises a PAM sequence compatible with the endonuclease. In some cases, the 5′ most nucleotide of the targeting region may be G. In some cases, the 5′ targeting region may be 15-23 nucleotides in length. The guide sequence and the tracr sequence may be supplied as separate ribonucleic acids (RNAs) or a single ribonucleic acid (RNA). The guide RNA may comprise a crRNA tracrRNA binding sequence 3′ to the targeting region. The guide RNA may comprise a tracrRNA sequence preceded by a 4-nucleotide linker 3′ to the crRNA tracrRNA binding region. The sgRNA may comprise, from 5′ to 3′: a non-natural guide nucleic acid sequence capable of hybridizing to a target sequence in a cell; and a tracr sequence. In some cases, the non-natural guide nucleic acid sequence and the tracr sequence are covalently linked.

[0282] In some cases, the tracr sequence may have a particular sequence. The tracr sequence may have at least about 80% to at least about 60-100 (e.g., at least about 60, at least about 65, at least about 70, at least about 75, at least about 80, at least about 85, or at least about 90) consecutive nucleotides of a natural tracrRNA sequence. The tracr sequence may have at least about 80% sequence identity to at least about 60-100 (e.g., at least about 60, at least about 65, at least about 70, at least about 75, at least about 80, at least about 85, or at least about 90) consecutive nucleotides of any one of SEQ ID NOs: 5476-5489. In some cases, the tracrRNA may have at least about 80%, at least about 85%, at least about 90%, at least about 91%, at least about 92%, at least about 93%, at least about 94%, at least about 95%, at least about 96%, at least about 97%, at least about 98%, or at least about 99% identity to at least about 60-90 (e.g., at least about 60, at least about 65, at least about 70, at least about 75, at least about 80, at least about 85, or at least about 90) consecutive nucleotides of any one of SEQ ID NOs: 5476-5489. In some cases, the tracrRNA may be substantially identical to at least about 60-100 (e.g., at least about 60, at least about 65, at least about 70, at least about 75, at least about 80, at least about 85, or at least about 90) consecutive nucleotides of any one of SEQ ID NOs: 5476-5489. The tracrRNA may comprise any of SEQ ID NOs: 5476-5489.

[0283] In some cases, the at least one engineered synthetic guide ribonucleic acid (sgRNA) capable of forming a complex with the endonuclease may comprise a sequence having at least about 80% identity to any one of SEQ ID NOs: 5461-5464. The sgRNA may comprise a sequence having at least about 80%, at least about 85%, at least about 90%, at least about 91%, at least about 92%, at least about 93%, at least about 94%, at least about 95%, at least about 96%, at least about 97%, at least about 98%, or at least about 99% identity to any one of SEQ ID NOs: 5461-5464. The sgRNA may comprise a sequence substantially identical to any one of SEQ ID NOs: 5461-5464.

[0284] In some cases, the system above may comprise two different sgRNAs targeting a first region and a second region for cleavage in a target DNA locus, wherein the second region is 3′ to the first region. In some cases, the system above may comprise a single- or double-stranded DNA repair template comprising from 5′ to 3′: a first homology arm comprising a sequence of at least about 20 (e.g., at least about 40, 80, 120, 150, 200, 300, 500, or 1 kb) nucleotides 5′ to the first region, a synthetic DNA sequence of at least about 10 nucleotides, and a second homology arm comprising a sequence of at least about 20 (e.g., at least about 40, 80, 120, 150, 200, 300, 500, or 1 kb) nucleotides 3′ to the second region.

[0285] In another aspect, the present disclosure provides a method for modifying a target nucleic acid locus. The method may comprise delivering to the target nucleic acid locus any of the non-natural systems disclosed herein, including an enzyme and at least one synthetic guide RNA (sgRNA) disclosed herein. The enzyme may form a complex with the at least one sgRNA, and upon binding of the complex to the target nucleic acid locus, may modify the target nucleic acid locus. Delivering the enzyme to said locus may comprise transfecting a cell with the system or nucleic acids encoding the system. Delivering the nuclease to said locus may comprise electroporating a cell with the system or nucleic acids encoding the system. Delivering the nuclease to said locus may comprise incubating the system in a buffer with a nucleic acid comprising the locus of interest. In some cases, the target nucleic acid locus comprises deoxyribonucleic acid (DNA) or ribonucleic acid (RNA). The target nucleic acid locus may comprise genomic DNA, viral DNA, viral RNA, or bacterial DNA. The target nucleic acid locus may be within a cell. The target nucleic acid locus may be in vitro. The target nucleic acid locus may be within a eukaryotic cell or a prokaryotic cell. The cell may be an animal cell, a human cell, bacterial cell, archaeal cell, or a plant cell. The enzyme may induce a single or double-stranded break at or proximal to the target locus of interest.

[0286] In cases where the target nucleic acid locus may be within a cell, the enzyme may be supplied as a nucleic acid containing an open reading frame encoding the enzyme having a RuvC_III domain having at least about 75% (e.g., at least about 90%, at least about 91%, at least about 92%, at least about 93%, at least about 94%, at least about 95%, at least about 96%, at least about 97%, at least about 98%, at least about 99%) identity to any one of SEQ ID NOs: 1827-2140. The deoxyribonucleic acid (DNA) containing an open reading frame encoding said endonuclease may comprise a sequence substantially identical to any of SEQ ID NOs: 5572-5575 or at variant having at least about 30%, at least about 35%, at least about 40%, at least about 45%, at least about 50%, at least about 55%, at least about 60%, at least about 65%, at least about 70%, at least about 75%, at least about 80%, at least about 85%, at least about 90%, at least about 95%, at least about 96%, at least about 97%, at least about 98%, or at least about 99% identity to any one of SEQ ID NOs: 5572-5575. In some cases, the nucleic acid comprises a promoter to which the open reading frame encoding the endonuclease is operably linked. The promoter may be a CMV, EF1a, SV40, PGK1, Ubc, human beta actin, CAG, TRE, or CaMKIIa promoter. The endonuclease may be supplied as a capped mRNA containing said open reading frame encoding said endonuclease. The endonuclease may be supplied as a translated polypeptide. The at least one engineered sgRNA may be supplied as deoxyribonucleic acid (DNA) containing a gene sequence encoding said at least one engineered sgRNA operably linked to a ribonucleic acid (RNA) pol III promoter. In some cases, the organism may be eukaryotic. In some cases, the organism may be fungal. In some cases, the organism may be human.

[0287] In some cases, the present disclosure may provide for an expression cassette comprising the system disclosed herein, or the nucleic acid described herein. In some cases, the expression cassette or nucleic acid may be supplied as a vector. In some cases, the expression cassette, nucleic acid, or vector may be supplied in a cell. In some cases, the cell is a cell of a bacterium with a 16S rRNA gene having at least about 90% (e.g., at least about 99%) identity to any one of SEQ ID NOs: 5592-5595.

### MG2 Enzymes

[0288] In one aspect, the present disclosure provides for an engineered nuclease system comprising (a) an endonuclease. In some cases, the endonuclease is a Cas endonuclease. In some cases, the endonuclease is a Type II, Class II Cas endonuclease. The endonuclease may comprise a RuvC_III domain, wherein said RuvC_III domain has at least about 70% sequence identity to any one of SEQ ID NOs: 2141-2241. In some cases, the endonuclease may comprise a RuvC_III domain, wherein the RuvC_III domain has at least about 20%, at least about 25%, at least about 30%, at least about 35%, at least about 40%, at least about 45%, at least about 50%, at least about 55%, at least about 60%, at least about 65%, at least about 70%, at least about 75%, at least about 80%, at least about 85%, at least about 90%, at least about 91%, at least about 92%, at least about 93%, at least about 94%, at least about 95%, at least about 96%, at least about 97%, at least about 98%, at least about 99% identity to any one of SEQ ID NOs: 2141-2241. In some cases, the endonuclease may comprise a RuvC_III domain, wherein the substantially identical to any one of SEQ ID NOs: 2141-2142. The endonuclease may comprise a RuvC_III domain having at least about 70% sequence identity to any one of SEQ ID NOs: 2141-2142. In some cases, the endonuclease may comprise a RuvC_III domain having at least about 20%, at least about 25%, at least about 30%, at least about 35%, at least about 40%, at least about 45%, at least about 50%, at least about 55%, at least about 60%, at least about 65%, at least about 70%, at least about 75%, at least about 80%, at least about 85%, at least about 90%, at least about 91%, at least about 92%, at least about 93%, at least about 94%, at least about 95%, at least about 96%, at least about 97%, at least about 98%, at least about 99% identity to any one of SEQ ID NOs: 2141-2142. In some cases, the endonuclease may comprise a RuvC_III domain substantially identical to any one of SEQ ID NOs: 2141-2142.

[0289] The endonuclease may comprise an HNH domain having at least about 70% identity to any one of SEQ ID NOs: 3955-4055. In some cases, the endonuclease may comprise an HNH domain having at least about 70%, at least about 75%, at least about 80%, at least about 85%, at least about 90%, at least about 91%, at least about 92%, at least about 93%, at least about 94%, at least about 95%, at least about 96%, at least about 97%, at least about 98%, or at least about 99% identical to any one of SEQ ID NOs: 3955-4055. The endonuclease may comprise an HNH domain substantially identical to any one of SEQ ID NOs: 3955-4055. The endonuclease may comprise an HNH domain having at least about 70% identity to any one of SEQ ID NOs: 3955-3956. In some cases, the endonuclease may comprise an HNH domain having at least about 70%, at least about 75%, at least about 80%, at least about 85%, at least about 90%, at least about 91%, at least about 92%, at least about 93%, at least about 94%, at least about 95%, at least about 96%, at least about 97%, at least about 98%, or at least about 99% identical to any one of SEQ ID NOs: 3955-3956. The endonuclease may comprise an HNH domain substantially identical to any one of SEQ ID NOs: 3955-3956.

[0290] In some cases, the endonuclease may comprise a variant having at least about 30%, at least about 35%, at least about 40%, at least about 45%, at least about 50%, at least about 55%, at least about 60%, at least about 65%, at least about 70%, at least about 75%, at least about 80%, at least about 85%, at least about 90%, at least about 95%, at least about 96%, at least about 97%, at least about 98%, or at least about 99% identity to any one of SEQ ID NOs: 320-420. In some cases, the endonuclease may be substantially identical to any one of SEQ ID NOs: 320-420. In some cases, the endonuclease may comprise a variant having at least about 30%, at least about 35%, at least about 40%, at least about 45%, at least about 50%, at least about 55%, at least about 60%, at least about 65%, at least about 70%, at least about 75%, at least about 80%, at least about 85%, at least about 90%, at least about 95%, at least about 96%, at least about 97%, at least about 98%, or at least about 99% identity to any one of SEQ ID NOs:320-321. In some cases, the endonuclease may be substantially identical to any one of SEQ ID NOs: 320-321.

[0291] In some cases, the endonuclease may comprise a variant having one or more nuclear localization sequences (NLSs). The NLS may be proximal to the N- or C-terminus of said endonuclease. The NLS may be appended N-terminal or C-terminal to any one of SEQ ID NOs: 320-420, or to a variant having at least about 30%, at least about 35%, at least about 40%, at least about 45%, at least about 50%, at least about 55%, at least about 60%, at least about 65%, at least about 70%, at least about 75%, at least about 80%, at least about 85%, at least about 90%, at least about 95%, at least about 96%, at least about 97%, at least about 98%, or at least about 99% identity to any one of SEQ ID NOs: 320-420. The NLS may be an SV40 large T antigen NLS. The NLS may be a c-myc NLS. The NLS can comprise a sequence with at least about 80%, at least about 85%, at least about 90%, at least about 95%, at least about 99% identity to any one of SEQ ID NOs: 5593-5608. The NLS can comprise a sequence substantially identical to any one of SEQ ID NOs: 5593-5608. The NLS can comprise any of the sequences in Table 1 or a combination thereof:

[0292] In some cases, sequence identity may be determined by the BLASTP, CLUSTALW, MUSCLE, MAFFT, Novafold, or CLUSTALW with the parameters of the Smith-Waterman homology search algorithm. The sequence identity may be determined by the BLASTP algorithm using parameters of a wordlength (W) of 3, an expectation (E) of 10, and using a BLOSUM62 scoring matrix setting gap costs at existence of 11, extension of 1, and using a conditional compositional score matrix adjustment.

[0293] In some cases, the system above may comprise (b) at least one engineered synthetic guide ribonucleic acid (sgRNA) capable of forming a complex with the endonuclease bearing a 5′ targeting region complementary to a desired cleavage sequence. In some cases, the 5′ targeting region may comprises a PAM sequence compatible with the endonuclease. In some cases, the 5′ most nucleotide of the targeting region may be G. In some cases, the 5′ targeting region may be 15-23 nucleotides in length. The guide sequence and the tracr sequence may be supplied as separate ribonucleic acids (RNAs) or a single ribonucleic acid (RNA). The guide RNA may comprise a crRNA tracrRNA binding sequence 3′ to the targeting region. The guide RNA may comprise a tracrRNA sequence preceded by a 4-nucleotide linker 3′ to the crRNA tracrRNA binding region. The sgRNA may comprise, from 5′ to 3′: a non-natural guide nucleic acid sequence capable of hybridizing to a target sequence in a cell; and a tracr sequence. In some cases, the non-natural guide nucleic acid sequence and the tracr sequence are covalently linked.

[0294] In some cases, the tracr sequence may have a particular sequence. The tracr sequence may have at least about 80% to at least about 60-100 (e.g., at least about 60, at least about 65, at least about 70, at least about 75, at least about 80, at least about 85, or at least about 90) consecutive nucleotides of a natural tracrRNA sequence. The tracr sequence may have at least about 80% sequence identity to at least about 60-100 (e.g., at least about 60, at least about 65, at least about 70, at least about 75, at least about 80, at least about 85, or at least about 90) consecutive nucleotides of any one of SEQ ID NOs: 5490-5494. In some cases, the tracrRNA may have at least about 80%, at least about 85%, at least about 90%, at least about 91%, at least about 92%, at least about 93%, at least about 94%, at least about 95%, at least about 96%, at least about 97%, at least about 98%, or at least about 99% identity to at least about 60-90 (e.g., at least about 60, at least about 65, at least about 70, at least about 75, at least about 80, at least about 85, or at least about 90) consecutive nucleotides of any one of SEQ ID NOs: 5490-5494. In some cases, the tracrRNA may be substantially identical to at least about 60-100 (e.g., at least about 60, at least about 65, at least about 70, at least about 75, at least about 80, at least about 85, or at least about 90) consecutive nucleotides of any one of SEQ ID NOs: 5490-5494. The tracrRNA may comprise any of SEQ ID NOs: 5490-5494.

[0295] In some cases, the at least one engineered synthetic guide ribonucleic acid (sgRNA) capable of forming a complex with the endonuclease may comprise a sequence having at least about 80% identity to SEQ ID NO: 5465. The sgRNA may comprise a sequence having at least about 80%, at least about 85%, at least about 90%, at least about 91%, at least about 92%, at least about 93%, at least about 94%, at least about 95%, at least about 96%, at least about 97%, at least about 98%, or at least about 99% identity to SEQ ID NO: 5465. The sgRNA may comprise a sequence substantially identical to SEQ ID NO: 5465.

[0296] In some cases, the system above may comprise two different sgRNAs targeting a first region and a second region for cleavage in a target DNA locus, wherein the second region is 3′ to the first region. In some cases, the system above may comprise a single- or double-stranded DNA repair template comprising from 5′ to 3′: a first homology arm comprising a sequence of at least about 20 (e.g., at least about 40, 80, 120, 150, 200, 300, 500, or 1 kb) nucleotides 5′ to the first region, a synthetic DNA sequence of at least about 10 nucleotides, and a second homology arm comprising a sequence of at least about 20 (e.g., at least about 40, 80, 120, 150, 200, 300, 500, or 1 kb) nucleotides 3′ to the second region.

[0297] In another aspect, the present disclosure provides a method for modifying a target nucleic acid locus of interest. The method may comprise delivering to the target nucleic acid locus any of the non-natural systems disclosed herein, including an enzyme and at least one synthetic guide RNA (sgRNA) disclosed herein. The enzyme may form a complex with the at least one sgRNA, and upon binding of the complex to the target nucleic acid locus of interest, may modify the target nucleic acid locus of interest. Delivering the enzyme to said locus may comprise transfecting a cell with the system or nucleic acids encoding the system. Delivering the nuclease to said locus may comprise electroporating a cell with the system or nucleic acids encoding the system. Delivering the nuclease to said locus may comprise incubating the system in a buffer with a nucleic acid comprising the locus of interest. In some cases, the target nucleic acid locus comprises deoxyribonucleic acid (DNA) or ribonucleic acid (RNA). The target nucleic acid locus may comprise genomic DNA, viral DNA, viral RNA, or bacterial DNA. The target nucleic acid locus may be within a cell. The target nucleic acid locus may be in vitro. The target nucleic acid locus may be within a eukaryotic cell or a prokaryotic cell. The cell may be an animal cell, a human cell, bacterial cell, archaeal cell, or a plant cell. The enzyme may induce a single or double-stranded break at or proximal to the target locus of interest.

[0298] In cases where the target nucleic acid locus may be within a cell, the enzyme may be supplied as a nucleic acid containing an open reading frame encoding the enzyme having a RuvC_III domain having at least about 75% (e.g., at least about 90%, at least about 91%, at least about 92%, at least about 93%, at least about 94%, at least about 95%, at least about 96%, at least about 97%, at least about 98%, at least about 99%) identity to any one of SEQ ID NOs: 2141-2241. The deoxyribonucleic acid (DNA) containing an open reading frame encoding said endonuclease may comprise a sequence substantially identical to any of SEQ ID NOs: 5576-5577 or at variant having at least about 30%, at least about 35%, at least about 40%, at least about 45%, at least about 50%, at least about 55%, at least about 60%, at least about 65%, at least about 70%, at least about 75%, at least about 80%, at least about 85%, at least about 90%, at least about 95%, at least about 96%, at least about 97%, at least about 98%, or at least about 99% identity to any one of SEQ ID NOs: 5576-5577. In some cases, the nucleic acid comprises a promoter to which the open reading frame encoding the endonuclease is operably linked. The promoter may be a CMV, EF1a, SV40, PGK1, Ubc, human beta actin, CAG, TRE, or CaMKIIa promoter. The endonuclease may be supplied as a capped mRNA containing said open reading frame encoding said endonuclease. The endonuclease may be supplied as a translated polypeptide. The at least one engineered sgRNA may be supplied as deoxyribonucleic acid (DNA) containing a gene sequence encoding said at least one engineered sgRNA operably linked to a ribonucleic acid (RNA) pol III promoter. In some cases, the organism may be eukaryotic. In some cases, the organism may be fungal. In some cases, the organism may be human.

### MG3 Enzymes

[0299] In one aspect, the present disclosure provides for an engineered nuclease system comprising (a) an endonuclease. In some cases, the endonuclease is a Cas endonuclease. In some cases, the endonuclease is a Type II, Class II Cas endonuclease. The endonuclease may comprise a RuvC_III domain, wherein said RuvC_III domain has at least about 70% sequence identity to any one of SEQ ID NOs: 2242-2251. In some cases, the endonuclease may comprise a RuvC_III domain, wherein the RuvC_III domain has at least about 20%, at least about 25%, at least about 30%, at least about 35%, at least about 40%, at least about 45%, at least about 50%, at least about 55%, at least about 60%, at least about 65%, at least about 70%, at least about 75%, at least about 80%, at least about 85%, at least about 90%, at least about 91%, at least about 92%, at least about 93%, at least about 94%, at least about 95%, at least about 96%, at least about 97%, at least about 98%, at least about 99% identity to any one of SEQ ID NOs: 2242-2251. In some cases, the endonuclease may comprise a RuvC_III domain, wherein the substantially identical to any one of SEQ ID NOs: 2242-2251. The endonuclease may comprise a RuvC_III domain having at least about 70% sequence identity to any one of SEQ ID NOs: 2242-2244. In some cases, the endonuclease may comprise a RuvC_III domain having at least about 20%, at least about 25%, at least about 30%, at least about 35%, at least about 40%, at least about 45%, at least about 50%, at least about 55%, at least about 60%, at least about 65%, at least about 70%, at least about 75%, at least about 80%, at least about 85%, at least about 90%, at least about 91%, at least about 92%, at least about 93%, at least about 94%, at least about 95%, at least about 96%, at least about 97%, at least about 98%, at least about 99% identity to any one of SEQ ID NOs: 2242-2244. In some cases, the endonuclease may comprise a RuvC_III domain substantially identical to any one of SEQ ID NOs: 2242-2244.

[0300] The endonuclease may comprise an HNH domain having at least about 70% identity to any one of SEQ ID NOs: 4056-4066. In some cases, the endonuclease may comprise an HNH domain having at least about 70%, at least about 75%, at least about 80%, at least about 85%, at least about 90%, at least about 91%, at least about 92%, at least about 93%, at least about 94%, at least about 95%, at least about 96%, at least about 97%, at least about 98%, or at least about 99% identical to any one of SEQ ID NOs: 4056-4066. The endonuclease may comprise an HNH domain substantially identical to any one of SEQ ID NOs: 4056-4066. The endonuclease may comprise an HNH domain having at least about 70% identity to any one of SEQ ID NOs: 4056-4058. In some cases, the endonuclease may comprise an HNH domain having at least about 70%, at least about 75%, at least about 80%, at least about 85%, at least about 90%, at least about 91%, at least about 92%, at least about 93%, at least about 94%, at least about 95%, at least about 96%, at least about 97%, at least about 98%, or at least about 99% identical to any one of SEQ ID NOs: 4056-4058. The endonuclease may comprise an HNH domain substantially identical to any one of SEQ ID NOs: 4056-4058.

[0301] In some cases, the endonuclease may comprise a variant having at least about 30%, at least about 35%, at least about 40%, at least about 45%, at least about 50%, at least about 55%, at least about 60%, at least about 65%, at least about 70%, at least about 75%, at least about 80%, at least about 85%, at least about 90%, at least about 95%, at least about 96%, at least about 97%, at least about 98%, or at least about 99% identity to any one of SEQ ID NOs: 421-431. In some cases, the endonuclease may be substantially identical to any one of SEQ ID NOs: 421-431. In some cases, the endonuclease may comprise a variant having at least about 30%, at least about 35%, at least about 40%, at least about 45%, at least about 50%, at least about 55%, at least about 60%, at least about 65%, at least about 70%, at least about 75%, at least about 80%, at least about 85%, at least about 90%, at least about 95%, at least about 96%, at least about 97%, at least about 98%, or at least about 99% identity to any one of SEQ ID NOs:421-423. In some cases, the endonuclease may be substantially identical to any one of SEQ ID NOs: 421-423.

[0302] In some cases, the endonuclease may comprise a variant having one or more nuclear localization sequences (NLSs). The NLS may be proximal to the N- or C-terminus of said endonuclease. The NLS may be appended N-terminal or C-terminal to any one of SEQ ID NOs: 421-431, or to a variant having at least about 30%, at least about 35%, at least about 40%, at least about 45%, at least about 50%, at least about 55%, at least about 60%, at least about 65%, at least about 70%, at least about 75%, at least about 80%, at least about 85%, at least about 90%, at least about 95%, at least about 96%, at least about 97%, at least about 98%, or at least about 99% identity to any one of SEQ ID NOs: 421-431. The NLS may be an SV40 large T antigen NLS. The NLS may be a c-myc NLS. The NLS can comprise a sequence with at least about 80%, at least about 85%, at least about 90%, at least about 95%, at least about 99% identity to any one of SEQ ID NOs: 5593-5608. The NLS can comprise a sequence substantially identical to any one of SEQ ID NOs: 5593-5608. The NLS can comprise any of the sequences in Table 1 or a combination thereof:

[0303] In some cases, sequence identity may be determined by the BLASTP, CLUSTALW, MUSCLE, MAFFT, Novafold, or CLUSTALW with the parameters of the Smith-Waterman homology search algorithm. The sequence identity may be determined by the BLASTP algorithm using parameters of a wordlength (W) of 3, an expectation (E) of 10, and using a BLOSUM62 scoring matrix setting gap costs at existence of 11, extension of 1, and using a conditional compositional score matrix adjustment.

[0304] In some cases, the system above may comprise (b) at least one engineered synthetic guide ribonucleic acid (sgRNA) capable of forming a complex with the endonuclease bearing a 5′ targeting region complementary to a desired cleavage sequence. In some cases, the 5′ targeting region may comprises a PAM sequence compatible with the endonuclease. In some cases, the 5′ most nucleotide of the targeting region may be G. In some cases, the 5′ targeting region may be 15-23 nucleotides in length. The guide sequence and the tracr sequence may be supplied as separate ribonucleic acids (RNAs) or a single ribonucleic acid (RNA). The guide RNA may comprise a crRNA tracrRNA binding sequence 3′ to the targeting region. The guide RNA may comprise a tracrRNA sequence preceded by a 4-nucleotide linker 3′ to the crRNA tracrRNA binding region. The sgRNA may comprise, from 5′ to 3′: a non-natural guide nucleic acid sequence capable of hybridizing to a target sequence in a cell; and a tracr sequence. In some cases, the non-natural guide nucleic acid sequence and the tracr sequence are covalently linked.

[0305] In some cases, the tracr sequence may have a particular sequence. The tracr sequence may have at least about 80% to at least about 60-100 (e.g., at least about 60, at least about 65, at least about 70, at least about 75, at least about 80, at least about 85, or at least about 90) consecutive nucleotides of a natural tracrRNA sequence. The tracr sequence may have at least about 80% sequence identity to at least about 60-100 (e.g., at least about 60, at least about 65, at least about 70, at least about 75, at least about 80, at least about 85, or at least about 90) consecutive nucleotides of any one of SEQ ID NOs: 5495-5502. In some cases, the tracrRNA may have at least about 80%, at least about 85%, at least about 90%, at least about 91%, at least about 92%, at least about 93%, at least about 94%, at least about 95%, at least about 96%, at least about 97%, at least about 98%, or at least about 99% identity to at least about 60-90 (e.g., at least about 60, at least about 65, at least about 70, at least about 75, at least about 80, at least about 85, or at least about 90) consecutive nucleotides of any one of SEQ ID NOs: 5495-5502. In some cases, the tracrRNA may be substantially identical to at least about 60-100 (e.g., at least about 60, at least about 65, at least about 70, at least about 75, at least about 80, at least about 85, or at least about 90) consecutive nucleotides of any one of SEQ ID NOs: 5495-5502. The tracrRNA may comprise any of SEQ ID NOs: 5495-5502.

[0306] In some cases, the at least one engineered synthetic guide ribonucleic acid (sgRNA) capable of forming a complex with the endonuclease may comprise a sequence having at least about 80% identity to any one of SEQ ID NOs: 5466-5467. The sgRNA may comprise a sequence having at least about 80%, at least about 85%, at least about 90%, at least about 91%, at least about 92%, at least about 93%, at least about 94%, at least about 95%, at least about 96%, at least about 97%, at least about 98%, or at least about 99% identity to any one of SEQ ID NOs: 5466-5467. The sgRNA may comprise a sequence substantially identical to any one of SEQ ID NOs: 5466-5467.

[0307] In some cases, the system above may comprise two different sgRNAs targeting a first region and a second region for cleavage in a target DNA locus, wherein the second region is 3′ to the first region. In some cases, the system above may comprise a single- or double-stranded DNA repair template comprising from 5′ to 3′: a first homology arm comprising a sequence of at least about 20 (e.g., at least about 40, 80, 120, 150, 200, 300, 500, or 1 kb) nucleotides 5′ to the first region, a synthetic DNA sequence of at least about 10 nucleotides, and a second homology arm comprising a sequence of at least about 20 (e.g., at least about 40, 80, 120, 150, 200, 300, 500, or 1 kb) nucleotides 3′ to the second region.

[0308] In another aspect, the present disclosure provides a method for modifying a target nucleic acid locus of interest. The method may comprise delivering to the target nucleic acid locus any of the non-natural systems disclosed herein, including an enzyme and at least one synthetic guide RNA (sgRNA) disclosed herein. The enzyme may form a complex with the at least one sgRNA, and upon binding of the complex to the target nucleic acid locus of interest, may modify the target nucleic acid locus of interest. Delivering the enzyme to said locus may comprise transfecting a cell with the system or nucleic acids encoding the system. Delivering the nuclease to said locus may comprise electroporating a cell with the system or nucleic acids encoding the system. Delivering the nuclease to said locus may comprise incubating the system in a buffer with a nucleic acid comprising the locus of interest. In some cases, the target nucleic acid locus comprises deoxyribonucleic acid (DNA) or ribonucleic acid (RNA). The target nucleic acid locus may comprise genomic DNA, viral DNA, viral RNA, or bacterial DNA. The target nucleic acid locus may be within a cell. The target nucleic acid locus may be in vitro. The target nucleic acid locus may be within a eukaryotic cell or a prokaryotic cell. The cell may be an animal cell, a human cell, bacterial cell, archaeal cell, or a plant cell. The enzyme may induce a single or double-stranded break at or proximal to the target locus of interest.

[0309] In cases where the target nucleic acid locus may be within a cell, the enzyme may be supplied as a nucleic acid containing an open reading frame encoding the enzyme having a RuvC_III domain having at least about 75% (e.g., at least about 90%, at least about 91%, at least about 92%, at least about 93%, at least about 94%, at least about 95%, at least about 96%, at least about 97%, at least about 98%, at least about 99%) identity to any one of SEQ ID NOs: 2242-2251. The deoxyribonucleic acid (DNA) containing an open reading frame encoding said endonuclease may comprise a sequence substantially identical to any of SEQ ID NOs: 5578-5580 or at variant having at least about 30%, at least about 35%, at least about 40%, at least about 45%, at least about 50%, at least about 55%, at least about 60%, at least about 65%, at least about 70%, at least about 75%, at least about 80%, at least about 85%, at least about 90%, at least about 95%, at least about 96%, at least about 97%, at least about 98%, or at least about 99% identity to any one of SEQ ID NOs: 5578-5580. In some cases, the nucleic acid comprises a promoter to which the open reading frame encoding the endonuclease is operably linked. The promoter may be a CMV, EF1a, SV40, PGK1, Ubc, human beta actin, CAG, TRE, or CaMKIIa promoter. The endonuclease may be supplied as a capped mRNA containing said open reading frame encoding said endonuclease. The endonuclease may be supplied as a translated polypeptide. The at least one engineered sgRNA may be supplied as deoxyribonucleic acid (DNA) containing a gene sequence encoding said at least one engineered sgRNA operably linked to a ribonucleic acid (RNA) pol III promoter. In some cases, the organism may be eukaryotic. In some cases, the organism may be fungal. In some cases, the organism may be human.

### MG4 Enzymes

[0310] In one aspect, the present disclosure provides for an engineered nuclease system comprising (a) an endonuclease. In some cases, the endonuclease is a Cas endonuclease. In some cases, the endonuclease is a Type II, Class II Cas endonuclease. The endonuclease may comprise a RuvC_III domain, wherein said RuvC_III domain has at least about 70% sequence identity to any one of SEQ ID NOs: 2253-2481. In some cases, the endonuclease may comprise a RuvC_III domain, wherein the RuvC_III domain has at least about 20%, at least about 25%, at least about 30%, at least about 35%, at least about 40%, at least about 45%, at least about 50%, at least about 55%, at least about 60%, at least about 65%, at least about 70%, at least about 75%, at least about 80%, at least about 85%, at least about 90%, at least about 91%, at least about 92%, at least about 93%, at least about 94%, at least about 95%, at least about 96%, at least about 97%, at least about 98%, at least about 99% identity to any one of SEQ ID NOs: 2253-2481. In some cases, the endonuclease may comprise a RuvC_III domain, wherein the substantially identical to any one of SEQ ID NOs: 2253-2481. The endonuclease may comprise a RuvC_III domain having at least about 70% sequence identity to any one of SEQ ID NOs: 2253-2481. In some cases, the endonuclease may comprise a RuvC_III domain having at least about 20%, at least about 25%, at least about 30%, at least about 35%, at least about 40%, at least about 45%, at least about 50%, at least about 55%, at least about 60%, at least about 65%, at least about 70%, at least about 75%, at least about 80%, at least about 85%, at least about 90%, at least about 91%, at least about 92%, at least about 93%, at least about 94%, at least about 95%, at least about 96%, at least about 97%, at least about 98%, at least about 99% identity to any one of SEQ ID NOs: 2253-2481. In some cases, the endonuclease may comprise a RuvC_III domain substantially identical to any one of SEQ ID NOs: 2253-2481.

[0311] The endonuclease may comprise an HNH domain having at least about 70% identity to any one of SEQ ID NOs: 4067-4295. In some cases, the endonuclease may comprise an HNH domain having at least about 70%, at least about 75%, at least about 80%, at least about 85%, at least about 90%, at least about 91%, at least about 92%, at least about 93%, at least about 94%, at least about 95%, at least about 96%, at least about 97%, at least about 98%, or at least about 99% identical to any one of SEQ ID NOs: 4067-4295. The endonuclease may comprise an HNH domain substantially identical to any one of SEQ ID NOs: 4067-4295. The endonuclease may comprise an HNH domain having at least about 70% identity to any one of SEQ ID NOs: 4067-4295. In some cases, the endonuclease may comprise an HNH domain having at least about 70%, at least about 75%, at least about 80%, at least about 85%, at least about 90%, at least about 91%, at least about 92%, at least about 93%, at least about 94%, at least about 95%, at least about 96%, at least about 97%, at least about 98%, or at least about 99% identical to any one of SEQ ID NOs: 4067-4295. The endonuclease may comprise an HNH domain substantially identical to any one of SEQ ID NOs: 4067-4295.

[0312] In some cases, the endonuclease may comprise a variant having at least about 30%, at least about 35%, at least about 40%, at least about 45%, at least about 50%, at least about 55%, at least about 60%, at least about 65%, at least about 70%, at least about 75%, at least about 80%, at least about 85%, at least about 90%, at least about 95%, at least about 96%, at least about 97%, at least about 98%, or at least about 99% identity to any one of SEQ ID NOs: 432-660. In some cases, the endonuclease may be substantially identical to any one of SEQ ID NOs: 432-660. In some cases, the endonuclease may comprise a variant having at least about 30%, at least about 35%, at least about 40%, at least about 45%, at least about 50%, at least about 55%, at least about 60%, at least about 65%, at least about 70%, at least about 75%, at least about 80%, at least about 85%, at least about 90%, at least about 95%, at least about 96%, at least about 97%, at least about 98%, or at least about 99% identity to any one of SEQ ID NOs: 432-660. In some cases, the endonuclease may be substantially identical to any one of SEQ ID NOs: 432-660.

[0313] In some cases, the endonuclease may comprise a variant having one or more nuclear localization sequences (NLSs). The NLS may be proximal to the N- or C-terminus of said endonuclease. The NLS may be appended N-terminal or C-terminal to any one of SEQ ID NOs: 432-660, or to a variant having at least about 30%, at least about 35%, at least about 40%, at least about 45%, at least about 50%, at least about 55%, at least about 60%, at least about 65%, at least about 70%, at least about 75%, at least about 80%, at least about 85%, at least about 90%, at least about 95%, at least about 96%, at least about 97%, at least about 98%, or at least about 99% identity to any one of SEQ ID NOs: 432-660. The NLS may be an SV40 large T antigen NLS. The NLS may be a c-myc NLS. The NLS can comprise a sequence with at least about 80%, at least about 85%, at least about 90%, at least about 95%, at least about 99% identity to any one of SEQ ID NOs: 5593-5608. The NLS can comprise a sequence substantially identical to any one of SEQ ID NOs: 5593-5608. The NLS can comprise any of the sequences in Table 1 or a combination thereof:

[0314] In some cases, sequence identity may be determined by the BLASTP, CLUSTALW, MUSCLE, MAFFT, Novafold, or CLUSTALW with the parameters of the Smith-Waterman homology search algorithm. The sequence identity may be determined by the BLASTP algorithm using parameters of a wordlength (W) of 3, an expectation (E) of 10, and using a BLOSUM62 scoring matrix setting gap costs at existence of 11, extension of 1, and using a conditional compositional score matrix adjustment.

[0315] In some cases, the system above may comprise (b) at least one engineered synthetic guide ribonucleic acid (sgRNA) capable of forming a complex with the endonuclease bearing a 5′ targeting region complementary to a desired cleavage sequence. In some cases, the 5′ targeting region may comprises a PAM sequence compatible with the endonuclease. In some cases, the 5′ most nucleotide of the targeting region may be G. In some cases, the 5′ targeting region may be 15-23 nucleotides in length. The guide sequence and the tracr sequence may be supplied as separate ribonucleic acids (RNAs) or a single ribonucleic acid (RNA). The guide RNA may comprise a crRNA tracrRNA binding sequence 3′ to the targeting region. The guide RNA may comprise a tracrRNA sequence preceded by a 4-nucleotide linker 3′ to the crRNA tracrRNA binding region. The sgRNA may comprise, from 5′ to 3′: a non-natural guide nucleic acid sequence capable of hybridizing to a target sequence in a cell; and a tracr sequence. In some cases, the non-natural guide nucleic acid sequence and the tracr sequence are covalently linked.

[0316] In some cases, the tracr sequence may have a particular sequence. The tracr sequence may have at least about 80% to at least about 60-100 (e.g., at least about 60, at least about 65, at least about 70, at least about 75, at least about 80, at least about 85, or at least about 90) consecutive nucleotides of a natural tracrRNA sequence. The tracr sequence may have at least about 80% sequence identity to at least about 60-100 (e.g., at least about 60, at least about 65, at least about 70, at least about 75, at least about 80, at least about 85, or at least about 90) consecutive nucleotides of SEQ ID NO: 5503. In some cases, the tracrRNA may have at least about 80%, at least about 85%, at least about 90%, at least about 91%, at least about 92%, at least about 93%, at least about 94%, at least about 95%, at least about 96%, at least about 97%, at least about 98%, or at least about 99% identity to at least about 60-90 (e.g., at least about 60, at least about 65, at least about 70, at least about 75, at least about 80, at least about 85, or at least about 90) consecutive nucleotides of SEQ ID NO: 5503. In some cases, the tracrRNA may be substantially identical to at least about 60-100 (e.g., at least about 60, at least about 65, at least about 70, at least about 75, at least about 80, at least about 85, or at least about 90) consecutive nucleotides of SEQ ID NO: 5503. The tracrRNA may comprise SEQ ID NO: 5503.

[0317] In some cases, the at least one engineered synthetic guide ribonucleic acid (sgRNA) capable of forming a complex with the endonuclease may comprise a sequence having at least about 80% identity to SEQ ID NO: 5468. The sgRNA may comprise a sequence having at least about 80%, at least about 85%, at least about 90%, at least about 91%, at least about 92%, at least about 93%, at least about 94%, at least about 95%, at least about 96%, at least about 97%, at least about 98%, or at least about 99% identity to SEQ ID NO: 5468. The sgRNA may comprise a sequence substantially identical to SEQ ID NO: 5468.

[0318] In some cases, the system above may comprise two different sgRNAs targeting a first region and a second region for cleavage in a target DNA locus, wherein the second region is 3′ to the first region. In some cases, the system above may comprise a single- or double-stranded DNA repair template comprising from 5′ to 3′: a first homology arm comprising a sequence of at least about 20 (e.g., at least about 40, 80, 120, 150, 200, 300, 500, or 1 kb) nucleotides 5′ to the first region, a synthetic DNA sequence of at least about 10 nucleotides, and a second homology arm comprising a sequence of at least about 20 (e.g., at least about 40, 80, 120, 150, 200, 300, 500, or 1 kb) nucleotides 3′ to the second region.

[0319] In another aspect, the present disclosure provides a method for modifying a target nucleic acid locus of interest. The method may comprise delivering to the target nucleic acid locus any of the non-natural systems disclosed herein, including an enzyme and at least one synthetic guide RNA (sgRNA) disclosed herein. The enzyme may form a complex with the at least one sgRNA, and upon binding of the complex to the target nucleic acid locus of interest, may modify the target nucleic acid locus of interest. Delivering the enzyme to said locus may comprise transfecting a cell with the system or nucleic acids encoding the system. Delivering the nuclease to said locus may comprise electroporating a cell with the system or nucleic acids encoding the system. Delivering the nuclease to said locus may comprise incubating the system in a buffer with a nucleic acid comprising the locus of interest. In some cases, the target nucleic acid locus comprises deoxyribonucleic acid (DNA) or ribonucleic acid (RNA). The target nucleic acid locus may comprise genomic DNA, viral DNA, viral RNA, or bacterial DNA. The target nucleic acid locus may be within a cell. The target nucleic acid locus may be in vitro. The target nucleic acid locus may be within a eukaryotic cell or a prokaryotic cell. The cell may be an animal cell, a human cell, bacterial cell, archaeal cell, or a plant cell. The enzyme may induce a single or double-stranded break at or proximal to the target locus of interest.

[0320] In cases where the target nucleic acid locus may be within a cell, the enzyme may be supplied as a nucleic acid containing an open reading frame encoding the enzyme having a RuvC_III domain having at least about 75% (e.g., at least about 90%, at least about 91%, at least about 92%, at least about 93%, at least about 94%, at least about 95%, at least about 96%, at least about 97%, at least about 98%, at least about 99%) identity to any one of SEQ ID NOs: 2253-2481. In some cases, the nucleic acid comprises a promoter to which the open reading frame encoding the endonuclease is operably linked. The promoter may be a CMV, EF1a, SV40, PGK1, Ubc, human beta actin, CAG, TRE, or CaMKIIa promoter. The endonuclease may be supplied as a capped mRNA containing said open reading frame encoding said endonuclease. The endonuclease may be supplied as a translated polypeptide. The at least one engineered sgRNA may be supplied as deoxyribonucleic acid (DNA) containing a gene sequence encoding said at least one engineered sgRNA operably linked to a ribonucleic acid (RNA) pol III promoter. In some cases, the organism may be eukaryotic. In some cases, the organism may be fungal. In some cases, the organism may be human.

### MG6 Enzymes

[0321] In one aspect, the present disclosure provides for an engineered nuclease system comprising (a) an endonuclease. In some cases, the endonuclease is a Cas endonuclease. In some cases, the endonuclease is a Type II, Class II Cas endonuclease. The endonuclease may comprise a RuvC_III domain, wherein said RuvC_III domain has at least about 70% sequence identity to any one of SEQ ID NOs: 2482-2489. In some cases, the endonuclease may comprise a RuvC_III domain, wherein the RuvC_III domain has at least about 20%, at least about 25%, at least about 30%, at least about 35%, at least about 40%, at least about 45%, at least about 50%, at least about 55%, at least about 60%, at least about 65%, at least about 70%, at least about 75%, at least about 80%, at least about 85%, at least about 90%, at least about 91%, at least about 92%, at least about 93%, at least about 94%, at least about 95%, at least about 96%, at least about 97%, at least about 98%, at least about 99% identity to any one of SEQ ID NOs: 2482-2489. In some cases, the endonuclease may comprise a RuvC_III domain, wherein the substantially identical to any one of SEQ ID NOs: 2482-2489.

[0322] The endonuclease may comprise an HNH domain having at least about 70% identity to any one of SEQ ID NOs: 4296-4303. In some cases, the endonuclease may comprise an HNH domain having at least about 70%, at least about 75%, at least about 80%, at least about 85%, at least about 90%, at least about 91%, at least about 92%, at least about 93%, at least about 94%, at least about 95%, at least about 96%, at least about 97%, at least about 98%, or at least about 99% identical to any one of SEQ ID NOs: 4296-4303. The endonuclease may comprise an HNH domain substantially identical to any one of SEQ ID NOs: 4056-4066.

[0323] In some cases, the endonuclease may comprise a variant having at least about 30%, at least about 35%, at least about 40%, at least about 45%, at least about 50%, at least about 55%, at least about 60%, at least about 65%, at least about 70%, at least about 75%, at least about 80%, at least about 85%, at least about 90%, at least about 95%, at least about 96%, at least about 97%, at least about 98%, or at least about 99% identity to any one of SEQ ID NOs: 661-668. In some cases, the endonuclease may be substantially identical to any one of SEQ ID NOs: 661-668.

[0324] In some cases, the endonuclease may comprise a variant having one or more nuclear localization sequences (NLSs). The NLS may be proximal to the N- or C-terminus of said endonuclease. The NLS may be appended N-terminal or C-terminal to any one of SEQ ID NOs: 661-668, or to a variant having at least about 30%, at least about 35%, at least about 40%, at least about 45%, at least about 50%, at least about 55%, at least about 60%, at least about 65%, at least about 70%, at least about 75%, at least about 80%, at least about 85%, at least about 90%, at least about 95%, at least about 96%, at least about 97%, at least about 98%, or at least about 99% identity to any one of SEQ ID NOs: 661-668. The NLS may be an SV40 large T antigen NLS. The NLS may be a c-myc NLS. The NLS can comprise a sequence with at least about 80%, at least about 85%, at least about 90%, at least about 95%, at least about 99% identity to any one of SEQ ID NOs: 5593-5608. The NLS can comprise a sequence substantially identical to any one of SEQ ID NOs: 5593-5608. The NLS can comprise any of the sequences in Table 1 or a combination thereof:

[0325] In some cases, sequence identity may be determined by the BLASTP, CLUSTALW, MUSCLE, MAFFT, Novafold, or CLUSTALW with the parameters of the Smith-Waterman homology search algorithm. The sequence identity may be determined by the BLASTP algorithm using parameters of a wordlength (W) of 3, an expectation (E) of 10, and using a BLOSUM62 scoring matrix setting gap costs at existence of 11, extension of 1, and using a conditional compositional score matrix adjustment.

[0326] In some cases, the system above may comprise (b) at least one engineered synthetic guide ribonucleic acid (sgRNA) capable of forming a complex with the endonuclease bearing a 5′ targeting region complementary to a desired cleavage sequence. In some cases, the 5′ targeting region may comprises a PAM sequence compatible with the endonuclease. In some cases, the 5′ most nucleotide of the targeting region may be G. In some cases, the 5′ targeting region may be 15-23 nucleotides in length. The guide sequence and the tracr sequence may be supplied as separate ribonucleic acids (RNAs) or a single ribonucleic acid (RNA). The guide RNA may comprise a crRNA tracrRNA binding sequence 3′ to the targeting region. The guide RNA may comprise a tracrRNA sequence preceded by a 4-nucleotide linker 3′ to the crRNA tracrRNA binding region. The sgRNA may comprise, from 5′ to 3′: a non-natural guide nucleic acid sequence capable of hybridizing to a target sequence in a cell; and a tracr sequence. In some cases, the non-natural guide nucleic acid sequence and the tracr sequence are covalently linked.

[0327] In some cases, the tracr sequence may have a particular sequence. The tracr sequence may have at least about 80% to at least about 60-100 (e.g., at least about 60, at least about 65, at least about 70, at least about 75, at least about 80, at least about 85, or at least about 90) consecutive nucleotides of a natural tracrRNA sequence.

[0328] In some cases, the system above may comprise two different guide RNAs targeting a first region and a second region for cleavage in a target DNA locus, wherein the second region is 3′ to the first region. In some cases, the system above may comprise a single- or double-stranded DNA repair template comprising from 5′ to 3′: a first homology arm comprising a sequence of at least about 20 (e.g., at least about 40, 80, 120, 150, 200, 300, 500, or 1 kb) nucleotides 5′ to the first region, a synthetic DNA sequence of at least about 10 nucleotides, and a second homology arm comprising a sequence of at least about 20 (e.g., at least about 40, 80, 120, 150, 200, 300, 500, or 1 kb) nucleotides 3′ to the second region.

[0329] In another aspect, the present disclosure provides a method for modifying a target nucleic acid locus of interest. The method may comprise delivering to the target nucleic acid locus any of the non-natural systems disclosed herein, including an enzyme and at least one synthetic guide RNA (sgRNA) disclosed herein. The enzyme may form a complex with the at least one sgRNA, and upon binding of the complex to the target nucleic acid locus of interest, may modify the target nucleic acid locus of interest. Delivering the enzyme to said locus may comprise transfecting a cell with the system or nucleic acids encoding the system. Delivering the nuclease to said locus may comprise electroporating a cell with the system or nucleic acids encoding the system. Delivering the nuclease to said locus may comprise incubating the system in a buffer with a nucleic acid comprising the locus of interest. In some cases, the target nucleic acid locus comprises deoxyribonucleic acid (DNA) or ribonucleic acid (RNA). The target nucleic acid locus may comprise genomic DNA, viral DNA, viral RNA, or bacterial DNA. The target nucleic acid locus may be within a cell. The target nucleic acid locus may be in vitro. The target nucleic acid locus may be within a eukaryotic cell or a prokaryotic cell. The cell may be an animal cell, a human cell, bacterial cell, archaeal cell, or a plant cell. The enzyme may induce a single or double-stranded break at or proximal to the target locus of interest.

[0330] In cases where the target nucleic acid locus may be within a cell, the enzyme may be supplied as a nucleic acid containing an open reading frame encoding the enzyme having a RuvC_III domain having at least about 75% (e.g., at least about 90%, at least about 91%, at least about 92%, at least about 93%, at least about 94%, at least about 95%, at least about 96%, at least about 97%, at least about 98%, at least about 99%) identity to any one of SEQ ID NOs: 2482-2489. In some cases, the nucleic acid comprises a promoter to which the open reading frame encoding the endonuclease is operably linked. The promoter may be a CMV, EF1a, SV40, PGK1, Ubc, human beta actin, CAG, TRE, or CaMKIIa promoter. The endonuclease may be supplied as a capped mRNA containing said open reading frame encoding said endonuclease. The endonuclease may be supplied as a translated polypeptide. The at least one engineered sgRNA may be supplied as deoxyribonucleic acid (DNA) containing a gene sequence encoding said at least one engineered sgRNA operably linked to a ribonucleic acid (RNA) pol III promoter. In some cases, the organism may be eukaryotic. In some cases, the organism may be fungal. In some cases, the organism may be human.

### MG7 Enzymes

[0331] In one aspect, the present disclosure provides for an engineered nuclease system comprising (a) an endonuclease. In some cases, the endonuclease is a Cas endonuclease. In some cases, the endonuclease is a Type II, Class II Cas endonuclease. The endonuclease may comprise a RuvC_III domain, wherein said RuvC_III domain has at least about 70% sequence identity to any one of SEQ ID NOs: 2490-2498. In some cases, the endonuclease may comprise a RuvC_III domain, wherein the RuvC_III domain has at least about 20%, at least about 25%, at least about 30%, at least about 35%, at least about 40%, at least about 45%, at least about 50%, at least about 55%, at least about 60%, at least about 65%, at least about 70%, at least about 75%, at least about 80%, at least about 85%, at least about 90%, at least about 91%, at least about 92%, at least about 93%, at least about 94%, at least about 95%, at least about 96%, at least about 97%, at least about 98%, at least about 99% identity to any one of SEQ ID NOs: 2490-2498. In some cases, the endonuclease may comprise a RuvC_III domain, wherein the substantially identical to any one of SEQ ID NOs: 2490-2498. The endonuclease may comprise a RuvC_III domain having at least about 70% sequence identity to any one of SEQ ID NOs: 2490-2498. In some cases, the endonuclease may comprise a RuvC_III domain having at least about 20%, at least about 25%, at least about 30%, at least about 35%, at least about 40%, at least about 45%, at least about 50%, at least about 55%, at least about 60%, at least about 65%, at least about 70%, at least about 75%, at least about 80%, at least about 85%, at least about 90%, at least about 91%, at least about 92%, at least about 93%, at least about 94%, at least about 95%, at least about 96%, at least about 97%, at least about 98%, at least about 99% identity to any one of SEQ ID NOs: 2490-2498. In some cases, the endonuclease may comprise a RuvC_III domain substantially identical to any one of SEQ ID NOs: 2490-2498.

[0332] The endonuclease may comprise an HNH domain having at least about 70% identity to any one of SEQ ID NOs: 4304-4312. In some cases, the endonuclease may comprise an HNH domain having at least about 70%, at least about 75%, at least about 80%, at least about 85%, at least about 90%, at least about 91%, at least about 92%, at least about 93%, at least about 94%, at least about 95%, at least about 96%, at least about 97%, at least about 98%, or at least about 99% identical to any one of SEQ ID NOs: 4304-4312. The endonuclease may comprise an HNH domain substantially identical to any one of SEQ ID NOs: 4304-4312. The endonuclease may comprise an HNH domain having at least about 70% identity to any one of SEQ ID NOs: 4304-4312. In some cases, the endonuclease may comprise an HNH domain having at least about 70%, at least about 75%, at least about 80%, at least about 85%, at least about 90%, at least about 91%, at least about 92%, at least about 93%, at least about 94%, at least about 95%, at least about 96%, at least about 97%, at least about 98%, or at least about 99% identical to any one of SEQ ID NOs: 4304-4312. The endonuclease may comprise an HNH domain substantially identical to any one of SEQ ID NOs: 4304-4312.

[0333] In some cases, the endonuclease may comprise a variant having at least about 30%, at least about 35%, at least about 40%, at least about 45%, at least about 50%, at least about 55%, at least about 60%, at least about 65%, at least about 70%, at least about 75%, at least about 80%, at least about 85%, at least about 90%, at least about 95%, at least about 96%, at least about 97%, at least about 98%, or at least about 99% identity to any one of SEQ ID NOs: 669-677. In some cases, the endonuclease may be substantially identical to any one of SEQ ID NOs: 669-677. In some cases, the endonuclease may comprise a variant having at least about 30%, at least about 35%, at least about 40%, at least about 45%, at least about 50%, at least about 55%, at least about 60%, at least about 65%, at least about 70%, at least about 75%, at least about 80%, at least about 85%, at least about 90%, at least about 95%, at least about 96%, at least about 97%, at least about 98%, or at least about 99% identity to any one of SEQ ID NOs: 669-677. In some cases, the endonuclease may be substantially identical to any one of SEQ ID NOs: 669-677.

[0334] In some cases, the endonuclease may comprise a variant having one or more nuclear localization sequences (NLSs). The NLS may be proximal to the N- or C-terminus of said endonuclease. The NLS may be appended N-terminal or C-terminal to any one of SEQ ID NOs: 669-677, or to a variant having at least about 30%, at least about 35%, at least about 40%, at least about 45%, at least about 50%, at least about 55%, at least about 60%, at least about 65%, at least about 70%, at least about 75%, at least about 80%, at least about 85%, at least about 90%, at least about 95%, at least about 96%, at least about 97%, at least about 98%, or at least about 99% identity to any one of SEQ ID NOs: 669-677. The NLS may be an SV40 large T antigen NLS. The NLS may be a c-myc NLS. The NLS can comprise a sequence with at least about 80%, at least about 85%, at least about 90%, at least about 95%, at least about 99% identity to any one of SEQ ID NOs: 5593-5608. The NLS can comprise a sequence substantially identical to any one of SEQ ID NOs: 5593-5608. The NLS can comprise any of the sequences in Table 1 or a combination thereof:

[0335] In some cases, sequence identity may be determined by the BLASTP, CLUSTALW, MUSCLE, MAFFT, Novafold, or CLUSTALW with the parameters of the Smith-Waterman homology search algorithm. The sequence identity may be determined by the BLASTP algorithm using parameters of a wordlength (W) of 3, an expectation (E) of 10, and using a BLOSUM62 scoring matrix setting gap costs at existence of 11, extension of 1, and using a conditional compositional score matrix adjustment.

[0336] In some cases, the system above may comprise (b) at least one engineered synthetic guide ribonucleic acid (sgRNA) capable of forming a complex with the endonuclease bearing a 5′ targeting region complementary to a desired cleavage sequence. In some cases, the 5′ targeting region may comprises a PAM sequence compatible with the endonuclease. In some cases, the 5′ most nucleotide of the targeting region may be G. In some cases, the 5′ targeting region may be 15-23 nucleotides in length. The guide sequence and the tracr sequence may be supplied as separate ribonucleic acids (RNAs) or a single ribonucleic acid (RNA). The guide RNA may comprise a crRNA tracrRNA binding sequence 3′ to the targeting region. The guide RNA may comprise a tracrRNA sequence preceded by a 4-nucleotide linker 3′ to the crRNA tracrRNA binding region. The sgRNA may comprise, from 5′ to 3′: a non-natural guide nucleic acid sequence capable of hybridizing to a target sequence in a cell; and a tracr sequence. In some cases, the non-natural guide nucleic acid sequence and the tracr sequence are covalently linked.

[0337] In some cases, the tracr sequence may have a particular sequence. The tracr sequence may have at least about 80% to at least about 60-100 (e.g., at least about 60, at least about 65, at least about 70, at least about 75, at least about 80, at least about 85, or at least about 90) consecutive nucleotides of a natural tracrRNA sequence. The tracr sequence may have at least about 80% sequence identity to at least about 60-100 (e.g., at least about 60, at least about 65, at least about 70, at least about 75, at least about 80, at least about 85, or at least about 90) consecutive nucleotides of SEQ ID NO: 5504. In some cases, the tracrRNA may have at least about 80%, at least about 85%, at least about 90%, at least about 91%, at least about 92%, at least about 93%, at least about 94%, at least about 95%, at least about 96%, at least about 97%, at least about 98%, or at least about 99% identity to at least about 60-90 (e.g., at least about 60, at least about 65, at least about 70, at least about 75, at least about 80, at least about 85, or at least about 90) consecutive nucleotides of SEQ ID NO: 5504. In some cases, the tracrRNA may be substantially identical to at least about 60-100 (e.g., at least about 60, at least about 65, at least about 70, at least about 75, at least about 80, at least about 85, or at least about 90) consecutive nucleotides of SEQ ID NO: 5504. The tracrRNA may comprise SEQ ID NO: 5504.

[0338] In some cases, the system above may comprise two different sgRNAs targeting a first region and a second region for cleavage in a target DNA locus, wherein the second region is 3′ to the first region. In some cases, the system above may comprise a single- or double-stranded DNA repair template comprising from 5′ to 3′: a first homology arm comprising a sequence of at least about 20 (e.g., at least about 40, 80, 120, 150, 200, 300, 500, or 1 kb) nucleotides 5′ to the first region, a synthetic DNA sequence of at least about 10 nucleotides, and a second homology arm comprising a sequence of at least about 20 (e.g., at least about 40, 80, 120, 150, 200, 300, 500, or 1 kb) nucleotides 3′ to the second region.

[0339] In another aspect, the present disclosure provides a method for modifying a target nucleic acid locus of interest. The method may comprise delivering to the target nucleic acid locus any of the non-natural systems disclosed herein, including an enzyme and at least one synthetic guide RNA (sgRNA) disclosed herein. The enzyme may form a complex with the at least one sgRNA, and upon binding of the complex to the target nucleic acid locus of interest, may modify the target nucleic acid locus of interest. Delivering the enzyme to said locus may comprise transfecting a cell with the system or nucleic acids encoding the system. Delivering the nuclease to said locus may comprise electroporating a cell with the system or nucleic acids encoding the system. Delivering the nuclease to said locus may comprise incubating the system in a buffer with a nucleic acid comprising the locus of interest. In some cases, the target nucleic acid locus comprises deoxyribonucleic acid (DNA) or ribonucleic acid (RNA). The target nucleic acid locus may comprise genomic DNA, viral DNA, viral RNA, or bacterial DNA. The target nucleic acid locus may be within a cell. The target nucleic acid locus may be in vitro. The target nucleic acid locus may be within a eukaryotic cell or a prokaryotic cell. The cell may be an animal cell, a human cell, bacterial cell, archaeal cell, or a plant cell. The enzyme may induce a single or double-stranded break at or proximal to the target locus of interest.

[0340] In cases where the target nucleic acid locus may be within a cell, the enzyme may be supplied as a nucleic acid containing an open reading frame encoding the enzyme having a RuvC_III domain having at least about 75% (e.g., at least about 90%, at least about 91%, at least about 92%, at least about 93%, at least about 94%, at least about 95%, at least about 96%, at least about 97%, at least about 98%, at least about 99%) identity to any one of SEQ ID NOs: 2490-2498. In some cases, the nucleic acid comprises a promoter to which the open reading frame encoding the endonuclease is operably linked. The promoter may be a CMV, EF1a, SV40, PGK1, Ubc, human beta actin, CAG, TRE, or CaMKIIa promoter. The endonuclease may be supplied as a capped mRNA containing said open reading frame encoding said endonuclease. The endonuclease may be supplied as a translated polypeptide. The at least one engineered sgRNA may be supplied as deoxyribonucleic acid (DNA) containing a gene sequence encoding said at least one engineered sgRNA operably linked to a ribonucleic acid (RNA) pol III promoter. In some cases, the organism may be eukaryotic. In some cases, the organism may be fungal. In some cases, the organism may be human.

### MG14 Enzymes

[0341] In one aspect, the present disclosure provides for an engineered nuclease system comprising (a) an endonuclease. In some cases, the endonuclease is a Cas endonuclease. In some cases, the endonuclease is a Type II, Class II Cas endonuclease. The endonuclease may comprise a RuvC_III domain, wherein said RuvC_III domain has at least about 70% sequence identity to any one of SEQ ID NOs: 2499-2750. In some cases, the endonuclease may comprise a RuvC_III domain, wherein the RuvC_III domain has at least about 20%, at least about 25%, at least about 30%, at least about 35%, at least about 40%, at least about 45%, at least about 50%, at least about 55%, at least about 60%, at least about 65%, at least about 70%, at least about 75%, at least about 80%, at least about 85%, at least about 90%, at least about 91%, at least about 92%, at least about 93%, at least about 94%, at least about 95%, at least about 96%, at least about 97%, at least about 98%, at least about 99% identity to any one of SEQ ID NOs: 2499-2750. In some cases, the endonuclease may comprise a RuvC_III domain, wherein the substantially identical to any one of SEQ ID NOs: 2499-2750. The endonuclease may comprise a RuvC_III domain having at least about 70% sequence identity to any one of SEQ ID NOs: 2499-2750. In some cases, the endonuclease may comprise a RuvC_III domain having at least about 20%, at least about 25%, at least about 30%, at least about 35%, at least about 40%, at least about 45%, at least about 50%, at least about 55%, at least about 60%, at least about 65%, at least about 70%, at least about 75%, at least about 80%, at least about 85%, at least about 90%, at least about 91%, at least about 92%, at least about 93%, at least about 94%, at least about 95%, at least about 96%, at least about 97%, at least about 98%, at least about 99% identity to any one of SEQ ID NOs: 2499-2750. In some cases, the endonuclease may comprise a RuvC_III domain substantially identical to any one of SEQ ID NOs: 2499-2750.

[0342] The endonuclease may comprise an HNH domain having at least about 70% identity to any one of SEQ ID NOs: 4313-4564. In some cases, the endonuclease may comprise an HNH domain having at least about 70%, at least about 75%, at least about 80%, at least about 85%, at least about 90%, at least about 91%, at least about 92%, at least about 93%, at least about 94%, at least about 95%, at least about 96%, at least about 97%, at least about 98%, or at least about 99% identical to any one of SEQ ID NOs: 4313-4564. The endonuclease may comprise an HNH domain substantially identical to any one of SEQ ID NOs: 4313-4564. The endonuclease may comprise an HNH domain having at least about 70% identity to any one of SEQ ID NOs: 4313-4564. In some cases, the endonuclease may comprise an HNH domain having at least about 70%, at least about 75%, at least about 80%, at least about 85%, at least about 90%, at least about 91%, at least about 92%, at least about 93%, at least about 94%, at least about 95%, at least about 96%, at least about 97%, at least about 98%, or at least about 99% identical to any one of SEQ ID NOs: 4067-4295. The endonuclease may comprise an HNH domain substantially identical to any one of SEQ ID NOs: 4313-4564.

[0343] In some cases, the endonuclease may comprise a variant having at least about 30%, at least about 35%, at least about 40%, at least about 45%, at least about 50%, at least about 55%, at least about 60%, at least about 65%, at least about 70%, at least about 75%, at least about 80%, at least about 85%, at least about 90%, at least about 95%, at least about 96%, at least about 97%, at least about 98%, or at least about 99% identity to any one of SEQ ID NOs: 678-929. In some cases, the endonuclease may be substantially identical to any one of SEQ ID NOs: 678-929. In some cases, the endonuclease may comprise a variant having at least about 30%, at least about 35%, at least about 40%, at least about 45%, at least about 50%, at least about 55%, at least about 60%, at least about 65%, at least about 70%, at least about 75%, at least about 80%, at least about 85%, at least about 90%, at least about 95%, at least about 96%, at least about 97%, at least about 98%, or at least about 99% identity to any one of SEQ ID NOs: 678-929. In some cases, the endonuclease may be substantially identical to any one of SEQ ID NOs: 678-929.

[0344] In some cases, the endonuclease may comprise a variant having one or more nuclear localization sequences (NLSs). The NLS may be proximal to the N- or C-terminus of said endonuclease. The NLS may be appended N-terminal or C-terminal to any one of SEQ ID NOs: 678-929, or to a variant having at least about 30%, at least about 35%, at least about 40%, at least about 45%, at least about 50%, at least about 55%, at least about 60%, at least about 65%, at least about 70%, at least about 75%, at least about 80%, at least about 85%, at least about 90%, at least about 95%, at least about 96%, at least about 97%, at least about 98%, or at least about 99% identity to any one of SEQ ID NOs: 678-929. The NLS may be an SV40 large T antigen NLS. The NLS may be a c-myc NLS. The NLS can comprise a sequence with at least about 80%, at least about 85%, at least about 90%, at least about 95%, at least about 99% identity to any one of SEQ ID NOs: 5593-5608. The NLS can comprise a sequence substantially identical to any one of SEQ ID NOs: 5593-5608. The NLS can comprise any of the sequences in Table 1 or a combination thereof:

[0345] In some cases, sequence identity may be determined by the BLASTP, CLUSTALW, MUSCLE, MAFFT, Novafold, or CLUSTALW with the parameters of the Smith-Waterman homology search algorithm. The sequence identity may be determined by the BLASTP algorithm using parameters of a wordlength (W) of 3, an expectation (E) of 10, and using a BLOSUM62 scoring matrix setting gap costs at existence of 11, extension of 1, and using a conditional compositional score matrix adjustment.

[0346] In some cases, the system above may comprise (b) at least one engineered synthetic guide ribonucleic acid (sgRNA) capable of forming a complex with the endonuclease bearing a 5′ targeting region complementary to a desired cleavage sequence. In some cases, the 5′ targeting region may comprises a PAM sequence compatible with the endonuclease. In some cases, the 5′ most nucleotide of the targeting region may be G. In some cases, the 5′ targeting region may be 15-23 nucleotides in length. The guide sequence and the tracr sequence may be supplied as separate ribonucleic acids (RNAs) or a single ribonucleic acid (RNA). The guide RNA may comprise a crRNA tracrRNA binding sequence 3′ to the targeting region. The guide RNA may comprise a tracrRNA sequence preceded by a 4-nucleotide linker 3′ to the crRNA tracrRNA binding region. The sgRNA may comprise, from 5′ to 3′: a non-natural guide nucleic acid sequence capable of hybridizing to a target sequence in a cell; and a tracr sequence. In some cases, the non-natural guide nucleic acid sequence and the tracr sequence are covalently linked.

[0347] In some cases, the tracr sequence may have a particular sequence. The tracr sequence may have at least about 80% to at least about 60-100 (e.g., at least about 60, at least about 65, at least about 70, at least about 75, at least about 80, at least about 85, or at least about 90) consecutive nucleotides of a natural tracrRNA sequence. The tracr sequence may have at least about 80% sequence identity to at least about 60-100 (e.g., at least about 60, at least about 65, at least about 70, at least about 75, at least about 80, at least about 85, or at least about 90) consecutive nucleotides of SEQ ID NO: 5505. In some cases, the tracrRNA may have at least about 80%, at least about 85%, at least about 90%, at least about 91%, at least about 92%, at least about 93%, at least about 94%, at least about 95%, at least about 96%, at least about 97%, at least about 98%, or at least about 99% identity to at least about 60-90 (e.g., at least about 60, at least about 65, at least about 70, at least about 75, at least about 80, at least about 85, or at least about 90) consecutive nucleotides of SEQ ID NO: 5505. In some cases, the tracrRNA may be substantially identical to at least about 60-100 (e.g., at least about 60, at least about 65, at least about 70, at least about 75, at least about 80, at least about 85, or at least about 90) consecutive nucleotides of SEQ ID NO: 5505. The tracrRNA may comprise SEQ ID NO: 5505.

[0348] In some cases, the at least one engineered synthetic guide ribonucleic acid (sgRNA) capable of forming a complex with the endonuclease may comprise a sequence having at least about 80% identity to SEQ ID NO: 5469. The sgRNA may comprise a sequence having at least about 80%, at least about 85%, at least about 90%, at least about 91%, at least about 92%, at least about 93%, at least about 94%, at least about 95%, at least about 96%, at least about 97%, at least about 98%, or at least about 99% identity to SEQ ID NO: 5469. The sgRNA may comprise a sequence substantially identical to SEQ ID NO: 5469.

[0349] In some cases, the system above may comprise two different sgRNAs targeting a first region and a second region for cleavage in a target DNA locus, wherein the second region is 3′ to the first region. In some cases, the system above may comprise a single- or double-stranded DNA repair template comprising from 5′ to 3′: a first homology arm comprising a sequence of at least about 20 (e.g., at least about 40, 80, 120, 150, 200, 300, 500, or 1 kb) nucleotides 5′ to the first region, a synthetic DNA sequence of at least about 10 nucleotides, and a second homology arm comprising a sequence of at least about 20 (e.g., at least about 40, 80, 120, 150, 200, 300, 500, or 1 kb) nucleotides 3′ to the second region.

[0350] In another aspect, the present disclosure provides a method for modifying a target nucleic acid locus of interest. The method may comprise delivering to the target nucleic acid locus any of the non-natural systems disclosed herein, including an enzyme and at least one synthetic guide RNA (sgRNA) disclosed herein. The enzyme may form a complex with the at least one sgRNA, and upon binding of the complex to the target nucleic acid locus of interest, may modify the target nucleic acid locus of interest. Delivering the enzyme to said locus may comprise transfecting a cell with the system or nucleic acids encoding the system. Delivering the nuclease to said locus may comprise electroporating a cell with the system or nucleic acids encoding the system. Delivering the nuclease to said locus may comprise incubating the system in a buffer with a nucleic acid comprising the locus of interest. In some cases, the target nucleic acid locus comprises deoxyribonucleic acid (DNA) or ribonucleic acid (RNA). The target nucleic acid locus may comprise genomic DNA, viral DNA, viral RNA, or bacterial DNA. The target nucleic acid locus may be within a cell. The target nucleic acid locus may be in vitro. The target nucleic acid locus may be within a eukaryotic cell or a prokaryotic cell. The cell may be an animal cell, a human cell, bacterial cell, archaeal cell, or a plant cell. The enzyme may induce a single or double-stranded break at or proximal to the target locus of interest.

[0351] In cases where the target nucleic acid locus may be within a cell, the enzyme may be supplied as a nucleic acid containing an open reading frame encoding the enzyme having a RuvC_III domain having at least about 75% (e.g., at least about 90%, at least about 91%, at least about 92%, at least about 93%, at least about 94%, at least about 95%, at least about 96%, at least about 97%, at least about 98%, at least about 99%) identity to any one of SEQ ID NOs: 2499-2750. The deoxyribonucleic acid (DNA) containing an open reading frame encoding said endonuclease may comprise a sequence substantially identical to SEQ ID NO: 5581 or at variant having at least about 30%, at least about 35%, at least about 40%, at least about 45%, at least about 50%, at least about 55%, at least about 60%, at least about 65%, at least about 70%, at least about 75%, at least about 80%, at least about 85%, at least about 90%, at least about 95%, at least about 96%, at least about 97%, at least about 98%, or at least about 99% identity to SEQ ID NO: 5581. In some cases, the nucleic acid comprises a promoter to which the open reading frame encoding the endonuclease is operably linked. The promoter may be a CMV, EF1a, SV40, PGK1, Ubc, human beta actin, CAG, TRE, or CaMKIIa promoter. The endonuclease may be supplied as a capped mRNA containing said open reading frame encoding said endonuclease. The endonuclease may be supplied as a translated polypeptide. The at least one engineered sgRNA may be supplied as deoxyribonucleic acid (DNA) containing a gene sequence encoding said at least one engineered sgRNA operably linked to a ribonucleic acid (RNA) pol III promoter. In some cases, the organism may be eukaryotic. In some cases, the organism may be fungal. In some cases, the organism may be human.

### MG15 Enzymes

[0352] In one aspect, the present disclosure provides for an engineered nuclease system comprising (a) an endonuclease. In some cases, the endonuclease is a Cas endonuclease. In some cases, the endonuclease is a Type II, Class II Cas endonuclease. The endonuclease may comprise a RuvC_III domain, wherein said RuvC_III domain has at least about 70% sequence identity to any one of SEQ ID NOs: 2751-2913. In some cases, the endonuclease may comprise a RuvC_III domain, wherein the RuvC_III domain has at least about 20%, at least about 25%, at least about 30%, at least about 35%, at least about 40%, at least about 45%, at least about 50%, at least about 55%, at least about 60%, at least about 65%, at least about 70%, at least about 75%, at least about 80%, at least about 85%, at least about 90%, at least about 91%, at least about 92%, at least about 93%, at least about 94%, at least about 95%, at least about 96%, at least about 97%, at least about 98%, at least about 99% identity to any one of SEQ ID NOs: 2751-2913. In some cases, the endonuclease may comprise a RuvC_III domain, wherein the substantially identical to any one of SEQ ID NOs: 2751-2913. The endonuclease may comprise a RuvC_III domain having at least about 70% sequence identity to any one of SEQ ID NOs: 2751-2913. In some cases, the endonuclease may comprise a RuvC_III domain having at least about 20%, at least about 25%, at least about 30%, at least about 35%, at least about 40%, at least about 45%, at least about 50%, at least about 55%, at least about 60%, at least about 65%, at least about 70%, at least about 75%, at least about 80%, at least about 85%, at least about 90%, at least about 91%, at least about 92%, at least about 93%, at least about 94%, at least about 95%, at least about 96%, at least about 97%, at least about 98%, at least about 99% identity to any one of SEQ ID NOs: 2751-2913. In some cases, the endonuclease may comprise a RuvC_III domain substantially identical to any one of SEQ ID NOs: 2751-2913.

[0353] The endonuclease may comprise an HNH domain having at least about 70% identity to any one of SEQ ID NOs: 4565-4727. In some cases, the endonuclease may comprise an HNH domain having at least about 70%, at least about 75%, at least about 80%, at least about 85%, at least about 90%, at least about 91%, at least about 92%, at least about 93%, at least about 94%, at least about 95%, at least about 96%, at least about 97%, at least about 98%, or at least about 99% identical to any one of SEQ ID NOs: 4565-4727. The endonuclease may comprise an HNH domain substantially identical to any one of SEQ ID NOs: 4565-4727. The endonuclease may comprise an HNH domain having at least about 70% identity to any one of SEQ ID NOs: 4565-4727. In some cases, the endonuclease may comprise an HNH domain having at least about 70%, at least about 75%, at least about 80%, at least about 85%, at least about 90%, at least about 91%, at least about 92%, at least about 93%, at least about 94%, at least about 95%, at least about 96%, at least about 97%, at least about 98%, or at least about 99% identical to any one of SEQ ID NOs: 4565-4727. The endonuclease may comprise an HNH domain substantially identical to any one of SEQ ID NOs: 4565-4727.

[0354] In some cases, the endonuclease may comprise a variant having at least about 30%, at least about 35%, at least about 40%, at least about 45%, at least about 50%, at least about 55%, at least about 60%, at least about 65%, at least about 70%, at least about 75%, at least about 80%, at least about 85%, at least about 90%, at least about 95%, at least about 96%, at least about 97%, at least about 98%, or at least about 99% identity to any one of SEQ ID NOs: 930-1092. In some cases, the endonuclease may be substantially identical to any one of SEQ ID NOs: 930-1092. In some cases, the endonuclease may comprise a variant having at least about 30%, at least about 35%, at least about 40%, at least about 45%, at least about 50%, at least about 55%, at least about 60%, at least about 65%, at least about 70%, at least about 75%, at least about 80%, at least about 85%, at least about 90%, at least about 95%, at least about 96%, at least about 97%, at least about 98%, or at least about 99% identity to any one of SEQ ID NOs: 930-1092. In some cases, the endonuclease may be substantially identical to any one of SEQ ID NOs: 930-1092.

[0355] In some cases, the endonuclease may comprise a variant having one or more nuclear localization sequences (NLSs). The NLS may be proximal to the N- or C-terminus of said endonuclease. The NLS may be appended N-terminal or C-terminal to any one of SEQ ID NOs: 930-1092, or to a variant having at least about 30%, at least about 35%, at least about 40%, at least about 45%, at least about 50%, at least about 55%, at least about 60%, at least about 65%, at least about 70%, at least about 75%, at least about 80%, at least about 85%, at least about 90%, at least about 95%, at least about 96%, at least about 97%, at least about 98%, or at least about 99% identity to any one of SEQ ID NOs: 930-1092. The NLS may be an SV40 large T antigen NLS. The NLS may be a c-myc NLS. The NLS can comprise a sequence with at least about 80%, at least about 85%, at least about 90%, at least about 95%, at least about 99% identity to any one of SEQ ID NOs: 5593-5608. The NLS can comprise a sequence substantially identical to any one of SEQ ID NOs: 5593-5608. The NLS can comprise any of the sequences in Table 1 or a combination thereof:

[0356] In some cases, sequence identity may be determined by the BLASTP, CLUSTALW, MUSCLE, MAFFT, Novafold, or CLUSTALW with the parameters of the Smith-Waterman homology search algorithm. The sequence identity may be determined by the BLASTP algorithm using parameters of a wordlength (W) of 3, an expectation (E) of 10, and using a BLOSUM62 scoring matrix setting gap costs at existence of 11, extension of 1, and using a conditional compositional score matrix adjustment.

[0357] In some cases, the system above may comprise (b) at least one engineered synthetic guide ribonucleic acid (sgRNA) capable of forming a complex with the endonuclease bearing a 5′ targeting region complementary to a desired cleavage sequence. In some cases, the 5′ targeting region may comprises a PAM sequence compatible with the endonuclease. In some cases, the 5′ most nucleotide of the targeting region may be G. In some cases, the 5′ targeting region may be 15-23 nucleotides in length. The guide sequence and the tracr sequence may be supplied as separate ribonucleic acids (RNAs) or a single ribonucleic acid (RNA). The guide RNA may comprise a crRNA tracrRNA binding sequence 3′ to the targeting region. The guide RNA may comprise a tracrRNA sequence preceded by a 4-nucleotide linker 3′ to the crRNA tracrRNA binding region. The sgRNA may comprise, from 5′ to 3′: a non-natural guide nucleic acid sequence capable of hybridizing to a target sequence in a cell; and a tracr sequence. In some cases, the non-natural guide nucleic acid sequence and the tracr sequence are covalently linked.

[0358] In some cases, the tracr sequence may have a particular sequence. The tracr sequence may have at least about 80% to at least about 60-100 (e.g., at least about 60, at least about 65, at least about 70, at least about 75, at least about 80, at least about 85, or at least about 90) consecutive nucleotides of a natural tracrRNA sequence. The tracr sequence may have at least about 80% sequence identity to at least about 60-100 (e.g., at least about 60, at least about 65, at least about 70, at least about 75, at least about 80, at least about 85, or at least about 90) consecutive nucleotides of SEQ ID NO: 5506. In some cases, the tracrRNA may have at least about 80%, at least about 85%, at least about 90%, at least about 91%, at least about 92%, at least about 93%, at least about 94%, at least about 95%, at least about 96%, at least about 97%, at least about 98%, or at least about 99% identity to at least about 60-90 (e.g., at least about 60, at least about 65, at least about 70, at least about 75, at least about 80, at least about 85, or at least about 90) consecutive nucleotides of SEQ ID NO: 5506. In some cases, the tracrRNA may be substantially identical to at least about 60-100 (e.g., at least about 60, at least about 65, at least about 70, at least about 75, at least about 80, at least about 85, or at least about 90) consecutive nucleotides of SEQ ID NO: 5506. The tracrRNA may comprise SEQ ID NO: 5506.

[0359] In some cases, the at least one engineered synthetic guide ribonucleic acid (sgRNA) capable of forming a complex with the endonuclease may comprise a sequence having at least about 80% identity to SEQ ID NO: 5470. The sgRNA may comprise a sequence having at least about 80%, at least about 85%, at least about 90%, at least about 91%, at least about 92%, at least about 93%, at least about 94%, at least about 95%, at least about 96%, at least about 97%, at least about 98%, or at least about 99% identity to SEQ ID NO: 5470. The sgRNA may comprise a sequence substantially identical to SEQ ID NO: 5470.

[0360] In some cases, the system above may comprise two different sgRNAs targeting a first region and a second region for cleavage in a target DNA locus, wherein the second region is 3′ to the first region. In some cases, the system above may comprise a single- or double-stranded DNA repair template comprising from 5′ to 3′: a first homology arm comprising a sequence of at least about 20 (e.g., at least about 40, 80, 120, 150, 200, 300, 500, or 1 kb) nucleotides 5′ to the first region, a synthetic DNA sequence of at least about 10 nucleotides, and a second homology arm comprising a sequence of at least about 20 (e.g., at least about 40, 80, 120, 150, 200, 300, 500, or 1 kb) nucleotides 3′ to the second region.

[0361] In another aspect, the present disclosure provides a method for modifying a target nucleic acid locus of interest. The method may comprise delivering to the target nucleic acid locus any of the non-natural systems disclosed herein, including an enzyme and at least one synthetic guide RNA (sgRNA) disclosed herein. The enzyme may form a complex with the at least one sgRNA, and upon binding of the complex to the target nucleic acid locus of interest, may modify the target nucleic acid locus of interest. Delivering the enzyme to said locus may comprise transfecting a cell with the system or nucleic acids encoding the system. Delivering the nuclease to said locus may comprise electroporating a cell with the system or nucleic acids encoding the system. Delivering the nuclease to said locus may comprise incubating the system in a buffer with a nucleic acid comprising the locus of interest. In some cases, the target nucleic acid locus comprises deoxyribonucleic acid (DNA) or ribonucleic acid (RNA). The target nucleic acid locus may comprise genomic DNA, viral DNA, viral RNA, or bacterial DNA. The target nucleic acid locus may be within a cell. The target nucleic acid locus may be in vitro. The target nucleic acid locus may be within a eukaryotic cell or a prokaryotic cell. The cell may be an animal cell, a human cell, bacterial cell, archaeal cell, or a plant cell. The enzyme may induce a single or double-stranded break at or proximal to the target locus of interest.

[0362] In cases where the target nucleic acid locus may be within a cell, the enzyme may be supplied as a nucleic acid containing an open reading frame encoding the enzyme having a RuvC_III domain having at least about 75% (e.g., at least about 90%, at least about 91%, at least about 92%, at least about 93%, at least about 94%, at least about 95%, at least about 96%, at least about 97%, at least about 98%, at least about 99%) identity to any one of SEQ ID NOs: 2751-2913. The deoxyribonucleic acid (DNA) containing an open reading frame encoding said endonuclease may comprise a sequence substantially identical to SEQ ID NO: 5582 or at variant having at least about 30%, at least about 35%, at least about 40%, at least about 45%, at least about 50%, at least about 55%, at least about 60%, at least about 65%, at least about 70%, at least about 75%, at least about 80%, at least about 85%, at least about 90%, at least about 95%, at least about 96%, at least about 97%, at least about 98%, or at least about 99% identity to SEQ ID NO: 5582. In some cases, the nucleic acid comprises a promoter to which the open reading frame encoding the endonuclease is operably linked. The promoter may be a CMV, EF1a, SV40, PGK1, Ubc, human beta actin, CAG, TRE, or CaMKIIa promoter. The endonuclease may be supplied as a capped mRNA containing said open reading frame encoding said endonuclease. The endonuclease may be supplied as a translated polypeptide. The at least one engineered sgRNA may be supplied as deoxyribonucleic acid (DNA) containing a gene sequence encoding said at least one engineered sgRNA operably linked to a ribonucleic acid (RNA) pol III promoter. In some cases, the organism may be eukaryotic. In some cases, the organism may be fungal. In some cases, the organism may be human.

### MG16 Enzymes

[0363] In one aspect, the present disclosure provides for an engineered nuclease system comprising (a) an endonuclease. In some cases, the endonuclease is a Cas endonuclease. In some cases, the endonuclease is a Type II, Class II Cas endonuclease. The endonuclease may comprise a RuvC_III domain, wherein said RuvC_III domain has at least about 70% sequence identity to any one of SEQ ID NOs: 2914-3174. In some cases, the endonuclease may comprise a RuvC_III domain, wherein the RuvC_III domain has at least about 20%, at least about 25%, at least about 30%, at least about 35%, at least about 40%, at least about 45%, at least about 50%, at least about 55%, at least about 60%, at least about 65%, at least about 70%, at least about 75%, at least about 80%, at least about 85%, at least about 90%, at least about 91%, at least about 92%, at least about 93%, at least about 94%, at least about 95%, at least about 96%, at least about 97%, at least about 98%, at least about 99% identity to any one of SEQ ID NOs: 2914-3174. In some cases, the endonuclease may comprise a RuvC_III domain, wherein the substantially identical to any one of SEQ ID NOs: 2914-3174. The endonuclease may comprise a RuvC_III domain having at least about 70% sequence identity to any one of SEQ ID NOs: 2914-3174. In some cases, the endonuclease may comprise a RuvC_III domain having at least about 20%, at least about 25%, at least about 30%, at least about 35%, at least about 40%, at least about 45%, at least about 50%, at least about 55%, at least about 60%, at least about 65%, at least about 70%, at least about 75%, at least about 80%, at least about 85%, at least about 90%, at least about 91%, at least about 92%, at least about 93%, at least about 94%, at least about 95%, at least about 96%, at least about 97%, at least about 98%, at least about 99% identity to any one of SEQ ID NOs: 2914-3174. In some cases, the endonuclease may comprise a RuvC_III domain substantially identical to any one of SEQ ID NOs: 2914-3174.

[0364] The endonuclease may comprise an HNH domain having at least about 70% identity to any one of SEQ ID NOs: 4728-4988. In some cases, the endonuclease may comprise an HNH domain having at least about 70%, at least about 75%, at least about 80%, at least about 85%, at least about 90%, at least about 91%, at least about 92%, at least about 93%, at least about 94%, at least about 95%, at least about 96%, at least about 97%, at least about 98%, or at least about 99% identical to any one of SEQ ID NOs: 4728-4988. The endonuclease may comprise an HNH domain substantially identical to any one of SEQ ID NOs: 4728-4988. The endonuclease may comprise an HNH domain having at least about 70% identity to any one of SEQ ID NOs: 4728-4988. In some cases, the endonuclease may comprise an HNH domain having at least about 70%, at least about 75%, at least about 80%, at least about 85%, at least about 90%, at least about 91%, at least about 92%, at least about 93%, at least about 94%, at least about 95%, at least about 96%, at least about 97%, at least about 98%, or at least about 99% identical to any one of SEQ ID NOs: 4728-4988. The endonuclease may comprise an HNH domain substantially identical to any one of SEQ ID NOs: 4728-4988.

[0365] In some cases, the endonuclease may comprise a variant having at least about 30%, at least about 35%, at least about 40%, at least about 45%, at least about 50%, at least about 55%, at least about 60%, at least about 65%, at least about 70%, at least about 75%, at least about 80%, at least about 85%, at least about 90%, at least about 95%, at least about 96%, at least about 97%, at least about 98%, or at least about 99% identity to any one of SEQ ID NOs: 1093-1353. In some cases, the endonuclease may be substantially identical to any one of SEQ ID NOs: 1093-1353. In some cases, the endonuclease may comprise a variant having at least about 30%, at least about 35%, at least about 40%, at least about 45%, at least about 50%, at least about 55%, at least about 60%, at least about 65%, at least about 70%, at least about 75%, at least about 80%, at least about 85%, at least about 90%, at least about 95%, at least about 96%, at least about 97%, at least about 98%, or at least about 99% identity to any one of SEQ ID NOs: 1093-1353. In some cases, the endonuclease may be substantially identical to any one of SEQ ID NOs: 1093-1353.

[0366] In some cases, the endonuclease may comprise a variant having one or more nuclear localization sequences (NLSs). The NLS may be proximal to the N- or C-terminus of said endonuclease. The NLS may be appended N-terminal or C-terminal to any one of SEQ ID NOs: 1093-1353, or to a variant having at least about 30%, at least about 35%, at least about 40%, at least about 45%, at least about 50%, at least about 55%, at least about 60%, at least about 65%, at least about 70%, at least about 75%, at least about 80%, at least about 85%, at least about 90%, at least about 95%, at least about 96%, at least about 97%, at least about 98%, or at least about 99% identity to any one of SEQ ID NOs: 1093-1353. The NLS may be an SV40 large T antigen NLS. The NLS may be a c-myc NLS. The NLS can comprise a sequence with at least about 80%, at least about 85%, at least about 90%, at least about 95%, at least about 99% identity to any one of SEQ ID NOs: 5593-5608. The NLS can comprise a sequence substantially identical to any one of SEQ ID NOs: 5593-5608. The NLS can comprise any of the sequences in Table 1 or a combination thereof:

[0367] In some cases, sequence identity may be determined by the BLASTP, CLUSTALW, MUSCLE, MAFFT, Novafold, or CLUSTALW with the parameters of the Smith-Waterman homology search algorithm. The sequence identity may be determined by the BLASTP algorithm using parameters of a wordlength (W) of 3, an expectation (E) of 10, and using a BLOSUM62 scoring matrix setting gap costs at existence of 11, extension of 1, and using a conditional compositional score matrix adjustment.

[0368] In some cases, the system above may comprise (b) at least one engineered synthetic guide ribonucleic acid (sgRNA) capable of forming a complex with the endonuclease bearing a 5′ targeting region complementary to a desired cleavage sequence. In some cases, the 5′ targeting region may comprises a PAM sequence compatible with the endonuclease. In some cases, the 5′ most nucleotide of the targeting region may be G. In some cases, the 5′ targeting region may be 15-23 nucleotides in length. The guide sequence and the tracr sequence may be supplied as separate ribonucleic acids (RNAs) or a single ribonucleic acid (RNA). The guide RNA may comprise a crRNA tracrRNA binding sequence 3′ to the targeting region. The guide RNA may comprise a tracrRNA sequence preceded by a 4-nucleotide linker 3′ to the crRNA tracrRNA binding region. The sgRNA may comprise, from 5′ to 3′: a non-natural guide nucleic acid sequence capable of hybridizing to a target sequence in a cell; and a tracr sequence. In some cases, the non-natural guide nucleic acid sequence and the tracr sequence are covalently linked.

[0369] In some cases, the tracr sequence may have a particular sequence. The tracr sequence may have at least about 80% to at least about 60-100 (e.g., at least about 60, at least about 65, at least about 70, at least about 75, at least about 80, at least about 85, or at least about 90) consecutive nucleotides of a natural tracrRNA sequence. The tracr sequence may have at least about 80% sequence identity to at least about 60-100 (e.g., at least about 60, at least about 65, at least about 70, at least about 75, at least about 80, at least about 85, or at least about 90) consecutive nucleotides of SEQ ID NO: 5507. In some cases, the tracrRNA may have at least about 80%, at least about 85%, at least about 90%, at least about 91%, at least about 92%, at least about 93%, at least about 94%, at least about 95%, at least about 96%, at least about 97%, at least about 98%, or at least about 99% identity to at least about 60-90 (e.g., at least about 60, at least about 65, at least about 70, at least about 75, at least about 80, at least about 85, or at least about 90) consecutive nucleotides of SEQ ID NO: 5507. In some cases, the tracrRNA may be substantially identical to at least about 60-100 (e.g., at least about 60, at least about 65, at least about 70, at least about 75, at least about 80, at least about 85, or at least about 90) consecutive nucleotides of SEQ ID NO: 5507. The tracrRNA may comprise SEQ ID NO: 5507.

[0370] In some cases, the at least one engineered synthetic guide ribonucleic acid (sgRNA) capable of forming a complex with the endonuclease may comprise a sequence having at least about 80% identity to SEQ ID NO: 5471. The sgRNA may comprise a sequence having at least about 80%, at least about 85%, at least about 90%, at least about 91%, at least about 92%, at least about 93%, at least about 94%, at least about 95%, at least about 96%, at least about 97%, at least about 98%, or at least about 99% identity to SEQ ID NO: 5471. The sgRNA may comprise a sequence substantially identical to SEQ ID NO: 5471.

[0371] In some cases, the system above may comprise two different sgRNAs targeting a first region and a second region for cleavage in a target DNA locus, wherein the second region is 3′ to the first region. In some cases, the system above may comprise a single- or double-stranded DNA repair template comprising from 5′ to 3′: a first homology arm comprising a sequence of at least about 20 (e.g., at least about 40, 80, 120, 150, 200, 300, 500, or 1 kb) nucleotides 5′ to the first region, a synthetic DNA sequence of at least about 10 nucleotides, and a second homology arm comprising a sequence of at least about 20 (e.g., at least about 40, 80, 120, 150, 200, 300, 500, or 1 kb) nucleotides 3′ to the second region.

[0372] In another aspect, the present disclosure provides a method for modifying a target nucleic acid locus of interest. The method may comprise delivering to the target nucleic acid locus any of the non-natural systems disclosed herein, including an enzyme and at least one synthetic guide RNA (sgRNA) disclosed herein. The enzyme may form a complex with the at least one sgRNA, and upon binding of the complex to the target nucleic acid locus of interest, may modify the target nucleic acid locus of interest. Delivering the enzyme to said locus may comprise transfecting a cell with the system or nucleic acids encoding the system. Delivering the nuclease to said locus may comprise electroporating a cell with the system or nucleic acids encoding the system. Delivering the nuclease to said locus may comprise incubating the system in a buffer with a nucleic acid comprising the locus of interest. In some cases, the target nucleic acid locus comprises deoxyribonucleic acid (DNA) or ribonucleic acid (RNA). The target nucleic acid locus may comprise genomic DNA, viral DNA, viral RNA, or bacterial DNA. The target nucleic acid locus may be within a cell. The target nucleic acid locus may be in vitro. The target nucleic acid locus may be within a eukaryotic cell or a prokaryotic cell. The cell may be an animal cell, a human cell, bacterial cell, archaeal cell, or a plant cell. The enzyme may induce a single or double-stranded break at or proximal to the target locus of interest.

[0373] In cases where the target nucleic acid locus may be within a cell, the enzyme may be supplied as a nucleic acid containing an open reading frame encoding the enzyme having a RuvC_III domain having at least about 75% (e.g., at least about 90%, at least about 91%, at least about 92%, at least about 93%, at least about 94%, at least about 95%, at least about 96%, at least about 97%, at least about 98%, at least about 99%) identity to any one of SEQ ID NOs: 2914-3174. The deoxyribonucleic acid (DNA) containing an open reading frame encoding said endonuclease may comprise a sequence substantially identical to SEQ ID NO: 5583 or at variant having at least about 30%, at least about 35%, at least about 40%, at least about 45%, at least about 50%, at least about 55%, at least about 60%, at least about 65%, at least about 70%, at least about 75%, at least about 80%, at least about 85%, at least about 90%, at least about 95%, at least about 96%, at least about 97%, at least about 98%, or at least about 99% identity to SEQ ID NO: 5583. In some cases, the nucleic acid comprises a promoter to which the open reading frame encoding the endonuclease is operably linked. The promoter may be a CMV, EF1a, SV40, PGK1, Ubc, human beta actin, CAG, TRE, or CaMKIIa promoter. The endonuclease may be supplied as a capped mRNA containing said open reading frame encoding said endonuclease. The endonuclease may be supplied as a translated polypeptide. The at least one engineered sgRNA may be supplied as deoxyribonucleic acid (DNA) containing a gene sequence encoding said at least one engineered sgRNA operably linked to a ribonucleic acid (RNA) pol III promoter. In some cases, the organism may be eukaryotic. In some cases, the organism may be fungal. In some cases, the organism may be human.

### MG18 Enzymes

[0374] In one aspect, the present disclosure provides for an engineered nuclease system comprising (a) an endonuclease. In some cases, the endonuclease is a Cas endonuclease. In some cases, the endonuclease is a Type II, Class II Cas endonuclease. The endonuclease may comprise a RuvC_III domain, wherein said RuvC_III domain has at least about 70% sequence identity to any one of SEQ ID NOs: 3175-3300. In some cases, the endonuclease may comprise a RuvC_III domain, wherein the RuvC_III domain has at least about 20%, at least about 25%, at least about 30%, at least about 35%, at least about 40%, at least about 45%, at least about 50%, at least about 55%, at least about 60%, at least about 65%, at least about 70%, at least about 75%, at least about 80%, at least about 85%, at least about 90%, at least about 91%, at least about 92%, at least about 93%, at least about 94%, at least about 95%, at least about 96%, at least about 97%, at least about 98%, at least about 99% identity to any one of SEQ ID NOs: 3175-3300. In some cases, the endonuclease may comprise a RuvC_III domain, wherein the substantially identical to any one of SEQ ID NOs: 3175-3300. The endonuclease may comprise a RuvC_III domain having at least about 70% sequence identity to any one of SEQ ID NOs: 3175-3300. In some cases, the endonuclease may comprise a RuvC_III domain having at least about 20%, at least about 25%, at least about 30%, at least about 35%, at least about 40%, at least about 45%, at least about 50%, at least about 55%, at least about 60%, at least about 65%, at least about 70%, at least about 75%, at least about 80%, at least about 85%, at least about 90%, at least about 91%, at least about 92%, at least about 93%, at least about 94%, at least about 95%, at least about 96%, at least about 97%, at least about 98%, at least about 99% identity to any one of SEQ ID NOs: 3175-3300. In some cases, the endonuclease may comprise a RuvC_III domain substantially identical to any one of SEQ ID NOs: 3175-3300.

[0375] The endonuclease may comprise an HNH domain having at least about 70% identity to any one of SEQ ID NOs: 4989-5146. In some cases, the endonuclease may comprise an HNH domain having at least about 70%, at least about 75%, at least about 80%, at least about 85%, at least about 90%, at least about 91%, at least about 92%, at least about 93%, at least about 94%, at least about 95%, at least about 96%, at least about 97%, at least about 98%, or at least about 99% identical to any one of SEQ ID NOs: 4989-5146. The endonuclease may comprise an HNH domain substantially identical to any one of SEQ ID NOs: 4989-5146. The endonuclease may comprise an HNH domain having at least about 70% identity to any one of SEQ ID NOs: 4989-5146. In some cases, the endonuclease may comprise an HNH domain having at least about 70%, at least about 75%, at least about 80%, at least about 85%, at least about 90%, at least about 91%, at least about 92%, at least about 93%, at least about 94%, at least about 95%, at least about 96%, at least about 97%, at least about 98%, or at least about 99% identical to any one of SEQ ID NOs: 4989-5146.

[0376] The endonuclease may comprise an HNH domain substantially identical to any one of SEQ ID NOs: 4989-5146.

[0377] In some cases, the endonuclease may comprise a variant having at least about 30%, at least about 35%, at least about 40%, at least about 45%, at least about 50%, at least about 55%, at least about 60%, at least about 65%, at least about 70%, at least about 75%, at least about 80%, at least about 85%, at least about 90%, at least about 95%, at least about 96%, at least about 97%, at least about 98%, or at least about 99% identity to any one of SEQ ID NOs: 1354-1511. In some cases, the endonuclease may be substantially identical to any one of SEQ ID NOs: 1354-1511. In some cases, the endonuclease may comprise a variant having at least about 30%, at least about 35%, at least about 40%, at least about 45%, at least about 50%, at least about 55%, at least about 60%, at least about 65%, at least about 70%, at least about 75%, at least about 80%, at least about 85%, at least about 90%, at least about 95%, at least about 96%, at least about 97%, at least about 98%, or at least about 99% identity to any one of SEQ ID NOs: 1354-1511. In some cases, the endonuclease may be substantially identical to any one of SEQ ID NOs: 1354-1511.

[0378] In some cases, the endonuclease may comprise a variant having one or more nuclear localization sequences (NLSs). The NLS may be proximal to the N- or C-terminus of said endonuclease. The NLS may be appended N-terminal or C-terminal to any one of SEQ ID NOs: 1354-1511, or to a variant having at least about 30%, at least about 35%, at least about 40%, at least about 45%, at least about 50%, at least about 55%, at least about 60%, at least about 65%, at least about 70%, at least about 75%, at least about 80%, at least about 85%, at least about 90%, at least about 95%, at least about 96%, at least about 97%, at least about 98%, or at least about 99% identity to any one of SEQ ID NOs: 1354-1511. The NLS may be an SV40 large T antigen NLS. The NLS may be a c-myc NLS. The NLS can comprise a sequence with at least about 80%, at least about 85%, at least about 90%, at least about 95%, at least about 99% identity to any one of SEQ ID NOs: 5593-5608. The NLS can comprise a sequence substantially identical to any one of SEQ ID NOs: 5593-5608. The NLS can comprise any of the sequences in Table 1 or a combination thereof:

[0379] In some cases, sequence identity may be determined by the BLASTP, CLUSTALW, MUSCLE, MAFFT, Novafold, or CLUSTALW with the parameters of the Smith-Waterman homology search algorithm. The sequence identity may be determined by the BLASTP algorithm using parameters of a wordlength (W) of 3, an expectation (E) of 10, and using a BLOSUM62 scoring matrix setting gap costs at existence of 11, extension of 1, and using a conditional compositional score matrix adjustment.

[0380] In some cases, the system above may comprise (b) at least one engineered synthetic guide ribonucleic acid (sgRNA) capable of forming a complex with the endonuclease bearing a 5′ targeting region complementary to a desired cleavage sequence. In some cases, the 5′ targeting region may comprises a PAM sequence compatible with the endonuclease. In some cases, the 5′ most nucleotide of the targeting region may be G. In some cases, the 5′ targeting region may be 15-23 nucleotides in length. The guide sequence and the tracr sequence may be supplied as separate ribonucleic acids (RNAs) or a single ribonucleic acid (RNA). The guide RNA may comprise a crRNA tracrRNA binding sequence 3′ to the targeting region. The guide RNA may comprise a tracrRNA sequence preceded by a 4-nucleotide linker 3′ to the crRNA tracrRNA binding region. The sgRNA may comprise, from 5′ to 3′: a non-natural guide nucleic acid sequence capable of hybridizing to a target sequence in a cell; and a tracr sequence. In some cases, the non-natural guide nucleic acid sequence and the tracr sequence are covalently linked.

[0381] In some cases, the tracr sequence may have a particular sequence. The tracr sequence may have at least about 80% to at least about 60-100 (e.g., at least about 60, at least about 65, at least about 70, at least about 75, at least about 80, at least about 85, or at least about 90) consecutive nucleotides of a natural tracrRNA sequence. The tracr sequence may have at least about 80% sequence identity to at least about 60-100 (e.g., at least about 60, at least about 65, at least about 70, at least about 75, at least about 80, at least about 85, or at least about 90) consecutive nucleotides of SEQ ID NO: 5508. In some cases, the tracrRNA may have at least about 80%, at least about 85%, at least about 90%, at least about 91%, at least about 92%, at least about 93%, at least about 94%, at least about 95%, at least about 96%, at least about 97%, at least about 98%, or at least about 99% identity to at least about 60-90 (e.g., at least about 60, at least about 65, at least about 70, at least about 75, at least about 80, at least about 85, or at least about 90) consecutive nucleotides of SEQ ID NO: 5508. In some cases, the tracrRNA may be substantially identical to at least about 60-100 (e.g., at least about 60, at least about 65, at least about 70, at least about 75, at least about 80, at least about 85, or at least about 90) consecutive nucleotides of SEQ ID NO: 5508. The tracrRNA may comprise SEQ ID NO: 5508.

[0382] In some cases, the at least one engineered synthetic guide ribonucleic acid (sgRNA) capable of forming a complex with the endonuclease may comprise a sequence having at least about 80% identity to SEQ ID NO: 5472. The sgRNA may comprise a sequence having at least about 80%, at least about 85%, at least about 90%, at least about 91%, at least about 92%, at least about 93%, at least about 94%, at least about 95%, at least about 96%, at least about 97%, at least about 98%, or at least about 99% identity to SEQ ID NO: 5472. The sgRNA may comprise a sequence substantially identical to SEQ ID NO: 5472.

[0383] In some cases, the system above may comprise two different sgRNAs targeting a first region and a second region for cleavage in a target DNA locus, wherein the second region is 3′ to the first region. In some cases, the system above may comprise a single- or double-stranded DNA repair template comprising from 5′ to 3′: a first homology arm comprising a sequence of at least about 20 (e.g., at least about 40, 80, 120, 150, 200, 300, 500, or 1 kb) nucleotides 5′ to the first region, a synthetic DNA sequence of at least about 10 nucleotides, and a second homology arm comprising a sequence of at least about 20 (e.g., at least about 40, 80, 120, 150, 200, 300, 500, or 1 kb) nucleotides 3′ to the second region.

[0384] In another aspect, the present disclosure provides a method for modifying a target nucleic acid locus of interest. The method may comprise delivering to the target nucleic acid locus any of the non-natural systems disclosed herein, including an enzyme and at least one synthetic guide RNA (sgRNA) disclosed herein. The enzyme may form a complex with the at least one sgRNA, and upon binding of the complex to the target nucleic acid locus of interest, may modify the target nucleic acid locus of interest. Delivering the enzyme to said locus may comprise transfecting a cell with the system or nucleic acids encoding the system. Delivering the nuclease to said locus may comprise electroporating a cell with the system or nucleic acids encoding the system. Delivering the nuclease to said locus may comprise incubating the system in a buffer with a nucleic acid comprising the locus of interest. In some cases, the target nucleic acid locus comprises deoxyribonucleic acid (DNA) or ribonucleic acid (RNA). The target nucleic acid locus may comprise genomic DNA, viral DNA, viral RNA, or bacterial DNA. The target nucleic acid locus may be within a cell. The target nucleic acid locus may be in vitro. The target nucleic acid locus may be within a eukaryotic cell or a prokaryotic cell. The cell may be an animal cell, a human cell, bacterial cell, archaeal cell, or a plant cell. The enzyme may induce a single or double-stranded break at or proximal to the target locus of interest.

[0385] In cases where the target nucleic acid locus may be within a cell, the enzyme may be supplied as a nucleic acid containing an open reading frame encoding the enzyme having a RuvC_III domain having at least about 75% (e.g., at least about 90%, at least about 91%, at least about 92%, at least about 93%, at least about 94%, at least about 95%, at least about 96%, at least about 97%, at least about 98%, at least about 99%) identity to any one of SEQ ID NOs: 3175-3300. The deoxyribonucleic acid (DNA) containing an open reading frame encoding said endonuclease may comprise a sequence substantially identical to SEQ ID NOs: 5584 or at variant having at least about 30%, at least about 35%, at least about 40%, at least about 45%, at least about 50%, at least about 55%, at least about 60%, at least about 65%, at least about 70%, at least about 75%, at least about 80%, at least about 85%, at least about 90%, at least about 95%, at least about 96%, at least about 97%, at least about 98%, or at least about 99% identity to SEQ ID NOs: 5584. In some cases, the nucleic acid comprises a promoter to which the open reading frame encoding the endonuclease is operably linked. The promoter may be a CMV, EF1a, SV40, PGK1, Ubc, human beta actin, CAG, TRE, or CaMKIIa promoter. The endonuclease may be supplied as a capped mRNA containing said open reading frame encoding said endonuclease. The endonuclease may be supplied as a translated polypeptide. The at least one engineered sgRNA may be supplied as deoxyribonucleic acid (DNA) containing a gene sequence encoding said at least one engineered sgRNA operably linked to a ribonucleic acid (RNA) pol III promoter. In some cases, the organism may be eukaryotic. In some cases, the organism may be fungal. In some cases, the organism may be human.

### MG21 Enzymes

[0386] In one aspect, the present disclosure provides for an engineered nuclease system comprising (a) an endonuclease. In some cases, the endonuclease is a Cas endonuclease. In some cases, the endonuclease is a Type II, Class II Cas endonuclease. The endonuclease may comprise a RuvC_III domain, wherein said RuvC_III domain has at least about 70% sequence identity to any one of SEQ ID NOs: 3331-3474. In some cases, the endonuclease may comprise a RuvC_III domain, wherein the RuvC_III domain has at least about 20%, at least about 25%, at least about 30%, at least about 35%, at least about 40%, at least about 45%, at least about 50%, at least about 55%, at least about 60%, at least about 65%, at least about 70%, at least about 75%, at least about 80%, at least about 85%, at least about 90%, at least about 91%, at least about 92%, at least about 93%, at least about 94%, at least about 95%, at least about 96%, at least about 97%, at least about 98%, at least about 99% identity to any one of SEQ ID NOs: 3331-3474. In some cases, the endonuclease may comprise a RuvC_III domain, wherein the substantially identical to any one of SEQ ID NOs: 3331-3474. The endonuclease may comprise a RuvC_III domain having at least about 70% sequence identity to any one of SEQ ID NOs: 3331-3474. In some cases, the endonuclease may comprise a RuvC_III domain having at least about 20%, at least about 25%, at least about 30%, at least about 35%, at least about 40%, at least about 45%, at least about 50%, at least about 55%, at least about 60%, at least about 65%, at least about 70%, at least about 75%, at least about 80%, at least about 85%, at least about 90%, at least about 91%, at least about 92%, at least about 93%, at least about 94%, at least about 95%, at least about 96%, at least about 97%, at least about 98%, at least about 99% identity to any one of SEQ ID NOs: 3331-3474. In some cases, the endonuclease may comprise a RuvC_III domain substantially identical to any one of SEQ ID NOs: 3331-3474.

[0387] The endonuclease may comprise an HNH domain having at least about 70% identity to any one of SEQ ID NOs: 5147-5290. In some cases, the endonuclease may comprise an HNH domain having at least about 70%, at least about 75%, at least about 80%, at least about 85%, at least about 90%, at least about 91%, at least about 92%, at least about 93%, at least about 94%, at least about 95%, at least about 96%, at least about 97%, at least about 98%, or at least about 99% identical to any one of SEQ ID NOs: 5147-5290. The endonuclease may comprise an HNH domain substantially identical to any one of SEQ ID NOs: 5147-5290. The endonuclease may comprise an HNH domain having at least about 70% identity to any one of SEQ ID NOs: 5147-5290. In some cases, the endonuclease may comprise an HNH domain having at least about 70%, at least about 75%, at least about 80%, at least about 85%, at least about 90%, at least about 91%, at least about 92%, at least about 93%, at least about 94%, at least about 95%, at least about 96%, at least about 97%, at least about 98%, or at least about 99% identical to any one of SEQ ID NOs: 5147-5290. The endonuclease may comprise an HNH domain substantially identical to any one of SEQ ID NOs: 5147-5290.

[0388] In some cases, the endonuclease may comprise a variant having at least about 30%, at least about 35%, at least about 40%, at least about 45%, at least about 50%, at least about 55%, at least about 60%, at least about 65%, at least about 70%, at least about 75%, at least about 80%, at least about 85%, at least about 90%, at least about 95%, at least about 96%, at least about 97%, at least about 98%, or at least about 99% identity to any one of SEQ ID NOs: 1512-1655. In some cases, the endonuclease may be substantially identical to any one of SEQ ID NOs: 1512-1655. In some cases, the endonuclease may comprise a variant having at least about 30%, at least about 35%, at least about 40%, at least about 45%, at least about 50%, at least about 55%, at least about 60%, at least about 65%, at least about 70%, at least about 75%, at least about 80%, at least about 85%, at least about 90%, at least about 95%, at least about 96%, at least about 97%, at least about 98%, or at least about 99% identity to any one of SEQ ID NOs: 1512-1655. In some cases, the endonuclease may be substantially identical to any one of SEQ ID NOs: 1512-1655.

[0389] In some cases, the endonuclease may comprise a variant having one or more nuclear localization sequences (NLSs). The NLS may be proximal to the N- or C-terminus of said endonuclease. The NLS may be appended N-terminal or C-terminal to any one of SEQ ID NOs: 1512-1655, or to a variant having at least about 30%, at least about 35%, at least about 40%, at least about 45%, at least about 50%, at least about 55%, at least about 60%, at least about 65%, at least about 70%, at least about 75%, at least about 80%, at least about 85%, at least about 90%, at least about 95%, at least about 96%, at least about 97%, at least about 98%, or at least about 99% identity to any one of SEQ ID NOs: 1512-1655. The NLS may be an SV40 large T antigen NLS. The NLS may be a c-myc NLS. The NLS can comprise a sequence with at least about 80%, at least about 85%, at least about 90%, at least about 95%, at least about 99% identity to any one of SEQ ID NOs: 5593-5608. The NLS can comprise a sequence substantially identical to any one of SEQ ID NOs: 5593-5608. The NLS can comprise any of the sequences in Table 1 or a combination thereof:

[0390] In some cases, sequence identity may be determined by the BLASTP, CLUSTALW, MUSCLE, MAFFT, Novafold, or CLUSTALW with the parameters of the Smith-Waterman homology search algorithm. The sequence identity may be determined by the BLASTP algorithm using parameters of a wordlength (W) of 3, an expectation (E) of 10, and using a BLOSUM62 scoring matrix setting gap costs at existence of 11, extension of 1, and using a conditional compositional score matrix adjustment.

[0391] In some cases, the system above may comprise (b) at least one engineered synthetic guide ribonucleic acid (sgRNA) capable of forming a complex with the endonuclease bearing a 5′ targeting region complementary to a desired cleavage sequence. In some cases, the 5′ targeting region may comprises a PAM sequence compatible with the endonuclease. In some cases, the 5′ most nucleotide of the targeting region may be G. In some cases, the 5′ targeting region may be 15-23 nucleotides in length. The guide sequence and the tracr sequence may be supplied as separate ribonucleic acids (RNAs) or a single ribonucleic acid (RNA). The guide RNA may comprise a crRNA tracrRNA binding sequence 3′ to the targeting region. The guide RNA may comprise a tracrRNA sequence preceded by a 4-nucleotide linker 3′ to the crRNA tracrRNA binding region. The sgRNA may comprise, from 5′ to 3′: a non-natural guide nucleic acid sequence capable of hybridizing to a target sequence in a cell; and a tracr sequence. In some cases, the non-natural guide nucleic acid sequence and the tracr sequence are covalently linked.

[0392] In some cases, the tracr sequence may have a particular sequence. The tracr sequence may have at least about 80% to at least about 60-100 (e.g., at least about 60, at least about 65, at least about 70, at least about 75, at least about 80, at least about 85, or at least about 90) consecutive nucleotides of a natural tracrRNA sequence. The tracr sequence may have at least about 80% sequence identity to at least about 60-100 (e.g., at least about 60, at least about 65, at least about 70, at least about 75, at least about 80, at least about 85, or at least about 90) consecutive nucleotides of SEQ ID NO: 5509. In some cases, the tracrRNA may have at least about 80%, at least about 85%, at least about 90%, at least about 91%, at least about 92%, at least about 93%, at least about 94%, at least about 95%, at least about 96%, at least about 97%, at least about 98%, or at least about 99% identity to at least about 60-90 (e.g., at least about 60, at least about 65, at least about 70, at least about 75, at least about 80, at least about 85, or at least about 90) consecutive nucleotides of SEQ ID NO: 5509. In some cases, the tracrRNA may be substantially identical to at least about 60-100 (e.g., at least about 60, at least about 65, at least about 70, at least about 75, at least about 80, at least about 85, or at least about 90) consecutive nucleotides of SEQ ID NO: 5509. The tracrRNA may comprise SEQ ID NO: 5509.

[0393] In some cases, the at least one engineered synthetic guide ribonucleic acid (sgRNA) capable of forming a complex with the endonuclease may comprise a sequence having at least about 80% identity to SEQ ID NO: 5473. The sgRNA may comprise a sequence having at least about 80%, at least about 85%, at least about 90%, at least about 91%, at least about 92%, at least about 93%, at least about 94%, at least about 95%, at least about 96%, at least about 97%, at least about 98%, or at least about 99% identity to SEQ ID NO: 5473. The sgRNA may comprise a sequence substantially identical to SEQ ID NO: 5473.

[0394] In some cases, the system above may comprise two different sgRNAs targeting a first region and a second region for cleavage in a target DNA locus, wherein the second region is 3′ to the first region. In some cases, the system above may comprise a single- or double-stranded DNA repair template comprising from 5′ to 3′: a first homology arm comprising a sequence of at least about 20 (e.g., at least about 40, 80, 120, 150, 200, 300, 500, or 1 kb) nucleotides 5′ to the first region, a synthetic DNA sequence of at least about 10 nucleotides, and a second homology arm comprising a sequence of at least about 20 (e.g., at least about 40, 80, 120, 150, 200, 300, 500, or 1 kb) nucleotides 3′ to the second region.

[0395] In another aspect, the present disclosure provides a method for modifying a target nucleic acid locus of interest. The method may comprise delivering to the target nucleic acid locus any of the non-natural systems disclosed herein, including an enzyme and at least one synthetic guide RNA (sgRNA) disclosed herein. The enzyme may form a complex with the at least one sgRNA, and upon binding of the complex to the target nucleic acid locus of interest, may modify the target nucleic acid locus of interest. Delivering the enzyme to said locus may comprise transfecting a cell with the system or nucleic acids encoding the system. Delivering the nuclease to said locus may comprise electroporating a cell with the system or nucleic acids encoding the system. Delivering the nuclease to said locus may comprise incubating the system in a buffer with a nucleic acid comprising the locus of interest. In some cases, the target nucleic acid locus comprises deoxyribonucleic acid (DNA) or ribonucleic acid (RNA). The target nucleic acid locus may comprise genomic DNA, viral DNA, viral RNA, or bacterial DNA. The target nucleic acid locus may be within a cell. The target nucleic acid locus may be in vitro. The target nucleic acid locus may be within a eukaryotic cell or a prokaryotic cell. The cell may be an animal cell, a human cell, bacterial cell, archaeal cell, or a plant cell. The enzyme may induce a single or double-stranded break at or proximal to the target locus of interest.

[0396] In cases where the target nucleic acid locus may be within a cell, the enzyme may be supplied as a nucleic acid containing an open reading frame encoding the enzyme having a RuvC_III domain having at least about 75% (e.g., at least about 90%, at least about 91%, at least about 92%, at least about 93%, at least about 94%, at least about 95%, at least about 96%, at least about 97%, at least about 98%, at least about 99%) identity to any one of SEQ ID NOs: 3331-3474. The deoxyribonucleic acid (DNA) containing an open reading frame encoding said endonuclease may comprise a sequence substantially identical to SEQ ID NOs: 5585 or at variant having at least about 30%, at least about 35%, at least about 40%, at least about 45%, at least about 50%, at least about 55%, at least about 60%, at least about 65%, at least about 70%, at least about 75%, at least about 80%, at least about 85%, at least about 90%, at least about 95%, at least about 96%, at least about 97%, at least about 98%, or at least about 99% identity to SEQ ID NOs: 5585. In some cases, the nucleic acid comprises a promoter to which the open reading frame encoding the endonuclease is operably linked. The promoter may be a CMV, EF1a, SV40, PGK1, Ubc, human beta actin, CAG, TRE, or CaMKIIa promoter. The endonuclease may be supplied as a capped mRNA containing said open reading frame encoding said endonuclease. The endonuclease may be supplied as a translated polypeptide. The at least one engineered sgRNA may be supplied as deoxyribonucleic acid (DNA) containing a gene sequence encoding said at least one engineered sgRNA operably linked to a ribonucleic acid (RNA) pol III promoter. In some cases, the organism may be eukaryotic. In some cases, the organism may be fungal. In some cases, the organism may be human.

### MG22 Enzymes

[0397] In one aspect, the present disclosure provides for an engineered nuclease system comprising (a) an endonuclease. In some cases, the endonuclease is a Cas endonuclease. In some cases, the endonuclease is a Type II, Class II Cas endonuclease. The endonuclease may comprise a RuvC_III domain, wherein said RuvC_III domain has at least about 70% sequence identity to any one of SEQ ID NOs: 3475-3568. In some cases, the endonuclease may comprise a RuvC_III domain, wherein the RuvC_III domain has at least about 20%, at least about 25%, at least about 30%, at least about 35%, at least about 40%, at least about 45%, at least about 50%, at least about 55%, at least about 60%, at least about 65%, at least about 70%, at least about 75%, at least about 80%, at least about 85%, at least about 90%, at least about 91%, at least about 92%, at least about 93%, at least about 94%, at least about 95%, at least about 96%, at least about 97%, at least about 98%, at least about 99% identity to any one of SEQ ID NOs: 3475-3568. In some cases, the endonuclease may comprise a RuvC_III domain, wherein the substantially identical to any one of SEQ ID NOs: 3475-3568. The endonuclease may comprise a RuvC_III domain having at least about 70% sequence identity to any one of SEQ ID NOs: 3475-3568. In some cases, the endonuclease may comprise a RuvC_III domain having at least about 20%, at least about 25%, at least about 30%, at least about 35%, at least about 40%, at least about 45%, at least about 50%, at least about 55%, at least about 60%, at least about 65%, at least about 70%, at least about 75%, at least about 80%, at least about 85%, at least about 90%, at least about 91%, at least about 92%, at least about 93%, at least about 94%, at least about 95%, at least about 96%, at least about 97%, at least about 98%, at least about 99% identity to any one of SEQ ID NOs: 3475-3568. In some cases, the endonuclease may comprise a RuvC_III domain substantially identical to any one of SEQ ID NOs: 3475-3568.

[0398] The endonuclease may comprise an HNH domain having at least about 70% identity to any one of SEQ ID NOs: 5291-5389. In some cases, the endonuclease may comprise an HNH domain having at least about 70%, at least about 75%, at least about 80%, at least about 85%, at least about 90%, at least about 91%, at least about 92%, at least about 93%, at least about 94%, at least about 95%, at least about 96%, at least about 97%, at least about 98%, or at least about 99% identical to any one of SEQ ID NOs: 5291-5389. The endonuclease may comprise an HNH domain substantially identical to any one of SEQ ID NOs: 5291-5389. The endonuclease may comprise an HNH domain having at least about 70% identity to any one of SEQ ID NOs: 5291-5389. In some cases, the endonuclease may comprise an HNH domain having at least about 70%, at least about 75%, at least about 80%, at least about 85%, at least about 90%, at least about 91%, at least about 92%, at least about 93%, at least about 94%, at least about 95%, at least about 96%, at least about 97%, at least about 98%, or at least about 99% identical to any one of SEQ ID NOs: 5291-5389. The endonuclease may comprise an HNH domain substantially identical to any one of SEQ ID NOs: 5291-5389.

[0399] In some cases, the endonuclease may comprise a variant having at least about 30%, at least about 35%, at least about 40%, at least about 45%, at least about 50%, at least about 55%, at least about 60%, at least about 65%, at least about 70%, at least about 75%, at least about 80%, at least about 85%, at least about 90%, at least about 95%, at least about 96%, at least about 97%, at least about 98%, or at least about 99% identity to any one of SEQ ID NOs: 1656-1755. In some cases, the endonuclease may be substantially identical to any one of SEQ ID NOs: 1656-1755. In some cases, the endonuclease may comprise a variant having at least about 30%, at least about 35%, at least about 40%, at least about 45%, at least about 50%, at least about 55%, at least about 60%, at least about 65%, at least about 70%, at least about 75%, at least about 80%, at least about 85%, at least about 90%, at least about 95%, at least about 96%, at least about 97%, at least about 98%, or at least about 99% identity to any one of SEQ ID NOs: 1656-1755. In some cases, the endonuclease may be substantially identical to any one of SEQ ID NOs: 1656-1755.

[0400] In some cases, the endonuclease may comprise a variant having one or more nuclear localization sequences (NLSs). The NLS may be proximal to the N- or C-terminus of said endonuclease. The NLS may be appended N-terminal or C-terminal to any one of SEQ ID NOs: 432-660, or to a variant having at least about 30%, at least about 35%, at least about 40%, at least about 45%, at least about 50%, at least about 55%, at least about 60%, at least about 65%, at least about 70%, at least about 75%, at least about 80%, at least about 85%, at least about 90%, at least about 95%, at least about 96%, at least about 97%, at least about 98%, or at least about 99% identity to any one of SEQ ID NOs: 1656-1755. The NLS may be an SV40 large T antigen NLS. The NLS may be a c-myc NLS. The NLS can comprise a sequence with at least about 80%, at least about 85%, at least about 90%, at least about 95%, at least about 99% identity to any one of SEQ ID NOs: 5593-5608. The NLS can comprise a sequence substantially identical to any one of SEQ ID NOs: 5593-5608. The NLS can comprise any of the sequences in Table 1 or a combination thereof:

[0401] In some cases, sequence identity may be determined by the BLASTP, CLUSTALW, MUSCLE, MAFFT, Novafold, or CLUSTALW with the parameters of the Smith-Waterman homology search algorithm. The sequence identity may be determined by the BLASTP algorithm using parameters of a wordlength (W) of 3, an expectation (E) of 10, and using a BLOSUM62 scoring matrix setting gap costs at existence of 11, extension of 1, and using a conditional compositional score matrix adjustment.

[0402] In some cases, the system above may comprise (b) at least one engineered synthetic guide ribonucleic acid (sgRNA) capable of forming a complex with the endonuclease bearing a 5′ targeting region complementary to a desired cleavage sequence. In some cases, the 5′ targeting region may comprises a PAM sequence compatible with the endonuclease. In some cases, the 5′ most nucleotide of the targeting region may be G. In some cases, the 5′ targeting region may be 15-23 nucleotides in length. The guide sequence and the tracr sequence may be supplied as separate ribonucleic acids (RNAs) or a single ribonucleic acid (RNA). The guide RNA may comprise a crRNA tracrRNA binding sequence 3′ to the targeting region. The guide RNA may comprise a tracrRNA sequence preceded by a 4-nucleotide linker 3′ to the crRNA tracrRNA binding region. The sgRNA may comprise, from 5′ to 3′: a non-natural guide nucleic acid sequence capable of hybridizing to a target sequence in a cell; and a tracr sequence. In some cases, the non-natural guide nucleic acid sequence and the tracr sequence are covalently linked.

[0403] In some cases, the tracr sequence may have a particular sequence. The tracr sequence may have at least about 80% to at least about 60-100 (e.g., at least about 60, at least about 65, at least about 70, at least about 75, at least about 80, at least about 85, or at least about 90) consecutive nucleotides of a natural tracrRNA sequence. The tracr sequence may have at least about 80% sequence identity to at least about 60-100 (e.g., at least about 60, at least about 65, at least about 70, at least about 75, at least about 80, at least about 85, or at least about 90) consecutive nucleotides of SEQ ID NO: 5510. In some cases, the tracrRNA may have at least about 80%, at least about 85%, at least about 90%, at least about 91%, at least about 92%, at least about 93%, at least about 94%, at least about 95%, at least about 96%, at least about 97%, at least about 98%, or at least about 99% identity to at least about 60-90 (e.g., at least about 60, at least about 65, at least about 70, at least about 75, at least about 80, at least about 85, or at least about 90) consecutive nucleotides of SEQ ID NO: 5510. In some cases, the tracrRNA may be substantially identical to at least about 60-100 (e.g., at least about 60, at least about 65, at least about 70, at least about 75, at least about 80, at least about 85, or at least about 90) consecutive nucleotides of SEQ ID NO: 5510. The tracrRNA may comprise SEQ ID NO: 5510.

[0404] In some cases, the at least one engineered synthetic guide ribonucleic acid (sgRNA) capable of forming a complex with the endonuclease may comprise a sequence having at least about 80% identity to SEQ ID NO: 5474. The sgRNA may comprise a sequence having at least about 80%, at least about 85%, at least about 90%, at least about 91%, at least about 92%, at least about 93%, at least about 94%, at least about 95%, at least about 96%, at least about 97%, at least about 98%, or at least about 99% identity to SEQ ID NO: 5474. The sgRNA may comprise a sequence substantially identical to SEQ ID NO: 5474.

[0405] In some cases, the system above may comprise two different sgRNAs targeting a first region and a second region for cleavage in a target DNA locus, wherein the second region is 3′ to the first region. In some cases, the system above may comprise a single- or double-stranded DNA repair template comprising from 5′ to 3′: a first homology arm comprising a sequence of at least about 20 (e.g., at least about 40, 80, 120, 150, 200, 300, 500, or 1 kb) nucleotides 5′ to the first region, a synthetic DNA sequence of at least about 10 nucleotides, and a second homology arm comprising a sequence of at least about 20 (e.g., at least about 40, 80, 120, 150, 200, 300, 500, or 1 kb) nucleotides 3′ to the second region.

[0406] In another aspect, the present disclosure provides a method for modifying a target nucleic acid locus of interest. The method may comprise delivering to the target nucleic acid locus any of the non-natural systems disclosed herein, including an enzyme and at least one synthetic guide RNA (sgRNA) disclosed herein. The enzyme may form a complex with the at least one sgRNA, and upon binding of the complex to the target nucleic acid locus of interest, may modify the target nucleic acid locus of interest. Delivering the enzyme to said locus may comprise transfecting a cell with the system or nucleic acids encoding the system. Delivering the nuclease to said locus may comprise electroporating a cell with the system or nucleic acids encoding the system. Delivering the nuclease to said locus may comprise incubating the system in a buffer with a nucleic acid comprising the locus of interest. In some cases, the target nucleic acid locus comprises deoxyribonucleic acid (DNA) or ribonucleic acid (RNA). The target nucleic acid locus may comprise genomic DNA, viral DNA, viral RNA, or bacterial DNA. The target nucleic acid locus may be within a cell. The target nucleic acid locus may be in vitro. The target nucleic acid locus may be within a eukaryotic cell or a prokaryotic cell. The cell may be an animal cell, a human cell, bacterial cell, archaeal cell, or a plant cell. The enzyme may induce a single or double-stranded break at or proximal to the target locus of interest.

[0407] In cases where the target nucleic acid locus may be within a cell, the enzyme may be supplied as a nucleic acid containing an open reading frame encoding the enzyme having a RuvC_III domain having at least about 75% (e.g., at least about 90%, at least about 91%, at least about 92%, at least about 93%, at least about 94%, at least about 95%, at least about 96%, at least about 97%, at least about 98%, at least about 99%) identity to any one of SEQ ID NOs: 3475-3568. The deoxyribonucleic acid (DNA) containing an open reading frame encoding said endonuclease may comprise a sequence substantially identical to SEQ ID NOs: 5586 or at variant having at least about 30%, at least about 35%, at least about 40%, at least about 45%, at least about 50%, at least about 55%, at least about 60%, at least about 65%, at least about 70%, at least about 75%, at least about 80%, at least about 85%, at least about 90%, at least about 95%, at least about 96%, at least about 97%, at least about 98%, or at least about 99% identity to SEQ ID NOs: 5586. In some cases, the nucleic acid comprises a promoter to which the open reading frame encoding the endonuclease is operably linked. The promoter may be a CMV, EF1a, SV40, PGK1, Ubc, human beta actin, CAG, TRE, or CaMKIIa promoter. The endonuclease may be supplied as a capped mRNA containing said open reading frame encoding said endonuclease. The endonuclease may be supplied as a translated polypeptide. The at least one engineered sgRNA may be supplied as deoxyribonucleic acid (DNA) containing a gene sequence encoding said at least one engineered sgRNA operably linked to a ribonucleic acid (RNA) pol III promoter. In some cases, the organism may be eukaryotic. In some cases, the organism may be fungal. In some cases, the organism may be human.

### MG23 Enzymes

[0408] In one aspect, the present disclosure provides for an engineered nuclease system comprising (a) an endonuclease. In some cases, the endonuclease is a Cas endonuclease. In some cases, the endonuclease is a Type II, Class II Cas endonuclease. The endonuclease may comprise a RuvC_III domain, wherein said RuvC_III domain has at least about 70% sequence identity to any one of SEQ ID NOs: 3569-3637. In some cases, the endonuclease may comprise a RuvC_III domain, wherein the RuvC_III domain has at least about 20%, at least about 25%, at least about 30%, at least about 35%, at least about 40%, at least about 45%, at least about 50%, at least about 55%, at least about 60%, at least about 65%, at least about 70%, at least about 75%, at least about 80%, at least about 85%, at least about 90%, at least about 91%, at least about 92%, at least about 93%, at least about 94%, at least about 95%, at least about 96%, at least about 97%, at least about 98%, at least about 99% identity to any one of SEQ ID NOs: 3569-3637. In some cases, the endonuclease may comprise a RuvC_III domain, wherein the substantially identical to any one of SEQ ID NOs: 3569-3637. The endonuclease may comprise a RuvC_III domain having at least about 70% sequence identity to any one of SEQ ID NOs: 3569-3637. In some cases, the endonuclease may comprise a RuvC_III domain having at least about 20%, at least about 25%, at least about 30%, at least about 35%, at least about 40%, at least about 45%, at least about 50%, at least about 55%, at least about 60%, at least about 65%, at least about 70%, at least about 75%, at least about 80%, at least about 85%, at least about 90%, at least about 91%, at least about 92%, at least about 93%, at least about 94%, at least about 95%, at least about 96%, at least about 97%, at least about 98%, at least about 99% identity to any one of SEQ ID NOs: 3569-3637. In some cases, the endonuclease may comprise a RuvC_III domain substantially identical to any one of SEQ ID NOs: 3569-3637.

[0409] The endonuclease may comprise an HNH domain having at least about 70% identity to any one of SEQ ID NOs: 5390-5460. In some cases, the endonuclease may comprise an HNH domain having at least about 70%, at least about 75%, at least about 80%, at least about 85%, at least about 90%, at least about 91%, at least about 92%, at least about 93%, at least about 94%, at least about 95%, at least about 96%, at least about 97%, at least about 98%, or at least about 99% identical to any one of SEQ ID NOs: 5390-5460. The endonuclease may comprise an HNH domain substantially identical to any one of SEQ ID NOs: 5390-5460. The endonuclease may comprise an HNH domain having at least about 70% identity to any one of SEQ ID NOs: 5390-5460. In some cases, the endonuclease may comprise an HNH domain having at least about 70%, at least about 75%, at least about 80%, at least about 85%, at least about 90%, at least about 91%, at least about 92%, at least about 93%, at least about 94%, at least about 95%, at least about 96%, at least about 97%, at least about 98%, or at least about 99% identical to any one of SEQ ID NOs: 5390-5460. The endonuclease may comprise an HNH domain substantially identical to any one of SEQ ID NOs: 5390-5460.

[0410] In some cases, the endonuclease may comprise a variant having at least about 30%, at least about 35%, at least about 40%, at least about 45%, at least about 50%, at least about 55%, at least about 60%, at least about 65%, at least about 70%, at least about 75%, at least about 80%, at least about 85%, at least about 90%, at least about 95%, at least about 96%, at least about 97%, at least about 98%, or at least about 99% identity to any one of SEQ ID NOs: 1756-1826. In some cases, the endonuclease may be substantially identical to any one of SEQ ID NOs: 1756-1826. In some cases, the endonuclease may comprise a variant having at least about 30%, at least about 35%, at least about 40%, at least about 45%, at least about 50%, at least about 55%, at least about 60%, at least about 65%, at least about 70%, at least about 75%, at least about 80%, at least about 85%, at least about 90%, at least about 95%, at least about 96%, at least about 97%, at least about 98%, or at least about 99% identity to any one of SEQ ID NOs: 1756-1826. In some cases, the endonuclease may be substantially identical to any one of SEQ ID NOs: 1756-1826.

[0411] In some cases, the endonuclease may comprise a variant having one or more nuclear localization sequences (NLSs). The NLS may be proximal to the N- or C-terminus of said endonuclease. The NLS may be appended N-terminal or C-terminal to any one of SEQ ID NOs: 1756-1826, or to a variant having at least about 30%, at least about 35%, at least about 40%, at least about 45%, at least about 50%, at least about 55%, at least about 60%, at least about 65%, at least about 70%, at least about 75%, at least about 80%, at least about 85%, at least about 90%, at least about 95%, at least about 96%, at least about 97%, at least about 98%, or at least about 99% identity to any one of SEQ ID NOs: 1756-1826. The NLS may be an SV40 large T antigen NLS. The NLS may be a c-myc NLS. The NLS can comprise a sequence with at least about 80%, at least about 85%, at least about 90%, at least about 95%, at least about 99% identity to any one of SEQ ID NOs: 5593-5608. The NLS can comprise a sequence substantially identical to any one of SEQ ID NOs: 5593-5608. The NLS can comprise any of the sequences in Table 1 or a combination thereof:

[0412] In some cases, sequence identity may be determined by the BLASTP, CLUSTALW, MUSCLE, MAFFT, Novafold, or CLUSTALW with the parameters of the Smith-Waterman homology search algorithm. The sequence identity may be determined by the BLASTP algorithm using parameters of a wordlength (W) of 3, an expectation (E) of 10, and using a BLOSUM62 scoring matrix setting gap costs at existence of 11, extension of 1, and using a conditional compositional score matrix adjustment.

[0413] In some cases, the system above may comprise (b) at least one engineered synthetic guide ribonucleic acid (sgRNA) capable of forming a complex with the endonuclease bearing a 5′ targeting region complementary to a desired cleavage sequence. In some cases, the 5′ targeting region may comprises a PAM sequence compatible with the endonuclease. In some cases, the 5′ most nucleotide of the targeting region may be G. In some cases, the 5′ targeting region may be 15-23 nucleotides in length. The guide sequence and the tracr sequence may be supplied as separate ribonucleic acids (RNAs) or a single ribonucleic acid (RNA). The guide RNA may comprise a crRNA tracrRNA binding sequence 3′ to the targeting region. The guide RNA may comprise a tracrRNA sequence preceded by a 4-nucleotide linker 3′ to the crRNA tracrRNA binding region. The sgRNA may comprise, from 5′ to 3′: a non-natural guide nucleic acid sequence capable of hybridizing to a target sequence in a cell; and a tracr sequence. In some cases, the non-natural guide nucleic acid sequence and the tracr sequence are covalently linked.

[0414] In some cases, the tracr sequence may have a particular sequence. The tracr sequence may have at least about 80% to at least about 60-100 (e.g., at least about 60, at least about 65, at least about 70, at least about 75, at least about 80, at least about 85, or at least about 90) consecutive nucleotides of a natural tracrRNA sequence. The tracr sequence may have at least about 80% sequence identity to at least about 60-100 (e.g., at least about 60, at least about 65, at least about 70, at least about 75, at least about 80, at least about 85, or at least about 90) consecutive nucleotides of SEQ ID NO: 5511. In some cases, the tracrRNA may have at least about 80%, at least about 85%, at least about 90%, at least about 91%, at least about 92%, at least about 93%, at least about 94%, at least about 95%, at least about 96%, at least about 97%, at least about 98%, or at least about 99% identity to at least about 60-90 (e.g., at least about 60, at least about 65, at least about 70, at least about 75, at least about 80, at least about 85, or at least about 90) consecutive nucleotides of SEQ ID NO: 5511. In some cases, the tracrRNA may be substantially identical to at least about 60-100 (e.g., at least about 60, at least about 65, at least about 70, at least about 75, at least about 80, at least about 85, or at least about 90) consecutive nucleotides of SEQ ID NO: 5511. The tracrRNA may comprise SEQ ID NO: 5511.

[0415] In some cases, the at least one engineered synthetic guide ribonucleic acid (sgRNA) capable of forming a complex with the endonuclease may comprise a sequence having at least about 80% identity to SEQ ID NO: 5475. The sgRNA may comprise a sequence having at least about 80%, at least about 85%, at least about 90%, at least about 91%, at least about 92%, at least about 93%, at least about 94%, at least about 95%, at least about 96%, at least about 97%, at least about 98%, or at least about 99% identity to SEQ ID NO: 5475. The sgRNA may comprise a sequence substantially identical to SEQ ID NO: 5475.

[0416] In some cases, the system above may comprise two different sgRNAs targeting a first region and a second region for cleavage in a target DNA locus, wherein the second region is 3′ to the first region. In some cases, the system above may comprise a single- or double-stranded DNA repair template comprising from 5′ to 3′: a first homology arm comprising a sequence of at least about 20 (e.g., at least about 40, 80, 120, 150, 200, 300, 500, or 1 kb) nucleotides 5′ to the first region, a synthetic DNA sequence of at least about 10 nucleotides, and a second homology arm comprising a sequence of at least about 20 (e.g., at least about 40, 80, 120, 150, 200, 300, 500, or 1 kb) nucleotides 3′ to the second region.

[0417] In another aspect, the present disclosure provides a method for modifying a target nucleic acid locus of interest. The method may comprise delivering to the target nucleic acid locus any of the non-natural systems disclosed herein, including an enzyme and at least one synthetic guide RNA (sgRNA) disclosed herein. The enzyme may form a complex with the at least one sgRNA, and upon binding of the complex to the target nucleic acid locus of interest, may modify the target nucleic acid locus of interest. Delivering the enzyme to said locus may comprise transfecting a cell with the system or nucleic acids encoding the system. Delivering the nuclease to said locus may comprise electroporating a cell with the system or nucleic acids encoding the system. Delivering the nuclease to said locus may comprise incubating the system in a buffer with a nucleic acid comprising the locus of interest. In some cases, the target nucleic acid locus comprises deoxyribonucleic acid (DNA) or ribonucleic acid (RNA). The target nucleic acid locus may comprise genomic DNA, viral DNA, viral RNA, or bacterial DNA. The target nucleic acid locus may be within a cell. The target nucleic acid locus may be in vitro. The target nucleic acid locus may be within a eukaryotic cell or a prokaryotic cell. The cell may be an animal cell, a human cell, bacterial cell, archaeal cell, or a plant cell. The enzyme may induce a single or double-stranded break at or proximal to the target locus of interest.

[0418] In cases where the target nucleic acid locus may be within a cell, the enzyme may be supplied as a nucleic acid containing an open reading frame encoding the enzyme having a RuvC_III domain having at least about 75% (e.g., at least about 90%, at least about 91%, at least about 92%, at least about 93%, at least about 94%, at least about 95%, at least about 96%, at least about 97%, at least about 98%, at least about 99%) identity to any one of SEQ ID NOs: 3569-3637. The deoxyribonucleic acid (DNA) containing an open reading frame encoding said endonuclease may comprise a sequence substantially identical to SEQ ID NOs: 5587 or at variant having at least about 30%, at least about 35%, at least about 40%, at least about 45%, at least about 50%, at least about 55%, at least about 60%, at least about 65%, at least about 70%, at least about 75%, at least about 80%, at least about 85%, at least about 90%, at least about 95%, at least about 96%, at least about 97%, at least about 98%, or at least about 99% identity to SEQ ID NOs: 5587. In some cases, the nucleic acid comprises a promoter to which the open reading frame encoding the endonuclease is operably linked. The promoter may be a CMV, EF1a, SV40, PGK1, Ubc, human beta actin, CAG, TRE, or CaMKIIa promoter. The endonuclease may be supplied as a capped mRNA containing said open reading frame encoding said endonuclease. The endonuclease may be supplied as a translated polypeptide. The at least one engineered sgRNA may be supplied as deoxyribonucleic acid (DNA) containing a gene sequence encoding said at least one engineered sgRNA operably linked to a ribonucleic acid (RNA) pol III promoter. In some cases, the organism may be eukaryotic. In some cases, the organism may be fungal. In some cases, the organism may be human.

[0419] Systems of the present disclosure may be used for various applications, such as, for example, nucleic acid editing (e.g., gene editing), binding to a nucleic acid molecule (e.g., sequence-specific binding). Such systems may be used, for example, for addressing (e.g., removing or replacing) a genetically inherited mutation that may cause a disease in a subject, inactivating a gene in order to ascertain its function in a cell, as a diagnostic tool to detect disease-causing genetic elements (e.g. via cleavage of reverse-transcribed viral RNA or an amplified DNA sequence encoding a disease-causing mutation), as deactivated enzymes in combination with a probe to target and detect a specific nucleotide sequence (e.g. sequence encoding antibiotic resistance int bacteria), to render viruses inactive or incapable of infecting host cells by targeting viral genomes, to add genes or amend metabolic pathways to engineer organisms to produce valuable small molecules, macromolecules, or secondary metabolites, to establish a gene drive element for evolutionary selection, to detect cell perturbations by foreign small molecules and nucleotides as a biosensor.

### Examples

### Example 1.—Metagenomic Analysis for New Proteins

[0420] Metagenomic samples were collected from sediment, soil and animal. Deoxyribonucleic acid (DNA) was extracted with a Zymobiomics DNA mini-prep kit and sequenced on an Illumina HiSeq® 2500. Samples were collected with consent of property owners. Additional raw sequence data from public sources included animal microbiomes, sediment, soil, hot springs, hydrothermal vents, marine, peat bogs, permafrost, and sewage sequences. Metagenomic sequence data was searched using Hidden Markov Models generated based on known Cas protein sequences including type II Cas effector proteins to identify new Cas effectors (see FIG. 45, which shows distribution of such proteins detected from different sample types). Novel effector proteins identified by the search were aligned to known proteins to identify potential active sites (see FIG. 46, which shows distribution of Cas catalytic residues among the enzymes identified from the different sites). This metagenomic workflow resulted in delineation of the MG1, MG2, MG3, MG4, MG6, MG14, MG15, MG16, MG18, MG21, MG22, and MG23 families of class II, type II CRISPR endonucleases described herein.

### Example 2A.—Discovery of an MG1 Family of CRISPR Systems

[0421] Analysis of the data from the metagenomic analysis of Example 1 revealed a new cluster of previously undescribed putative CRISPR systems initially comprising six members (MG1-1, MG1-2, MG1-3, MG1-4, MG1-5, and MG1-6 recorded as SEQ ID NOs: 5, 6, 1, 2, and 3 respectively). This family is characterized by an enzyme bearing HNH and RuvC domains. The RuvC domains of this family have a RuvC_III portion having low homology to previously described Cas9 family members. Although the initial family members have a maximum of 56.8% identity among them, all 6 enzymes exhibit a divergent RuvC_III portion of the RuvC domain and bear the common motif of RHHALDAMV (SEQ ID NO:5615), KHHALDAMC (SEQ ID NO:5616), or KHHALDAIC (SEQ ID NO:5617). These motifs are not found in other described Cas9-like enzymes. The corresponding protein and nucleic acid sequences for these new enzymes and their relevant subdomains are presented in the sequence listing. Putative tracrRNA sequences were identified based on their location relative to the other genes and are presented as SEQ ID NOs: 5476-5479. The enzyme systems appear to derive from the Phylum Verrucomicrobia, the Phylum Candidatus Peregrinibacteria, or the Phylum Candidatus Melainabacteria based on the sequences of 16S rRNAs from genome bins containing the CRISPR systems. The 16S rRNA sequences are presented as SEQ ID NOs: 5592-5596). A detailed domain-level alignment of the CRISPR system sequences together calling out the features described by Shmakov et al. (Mol Cell. 2015 Nov. 5; 60(3):385-97), which is entirely incorporated by reference) is depicted in FIGS. 9A, 9B, 9C, 9D, 9E, 9F, 9G, and 9H. A comparison of MG1-1, 1-2, and 1-3 versus additional proprietary protein datasets revealed additional protein sequences with similar architecture, presented as SEQ NOs: 7-319. These MG1 protein sequences led to the discovery of additional MG1 motifs as shown in SEQ ID NOs: 5618-5632.

### Example 2B.—Discovery of an MG2 Family of CRISPR Systems

[0422] Analysis of data from the metagenomic analysis of Example 1 revealed a new cluster of previously undescribed putative CRISPR systems comprising six members (MG2-1, MG2-2, MG2-3, MG2-5, and MG2-6). The corresponding protein and nucleic acid sequences for these new enzymes and exemplary subdomains are presented as SEQ ID NOs: 320, 322-325. Based on their location relative to the other genes, putative tracrRNA sequences were identified in the operon and are presented as SEQ ID NOs: 5490, 5492-5494, and 5538. A detailed domain-level alignment of these sequences versus Cas9 as outlined in Shmakov et al. (Mol Cell. 2015 Nov. 5; 60(3):385-97.), is depicted in FIG. 7.

[0423] A comparison of MG2-1, MG2-2, MG2-3, MG2-5, and MG2-6 versus additional proprietary protein datasets revealed additional protein sequences with similar architecture, presented as SEQ NOs: 321 and 326-420. Motifs commonly found in MG2 family members are presented as SEQ ID NOs: 5631-5638.

### Example 2C.—Discovery of an MG3 Family of CRISPR Systems

[0424] Analysis of the data from the metagenomic analysis of Example 1 revealed a new previously undescribed putative CRISPR system: MG3-1. The corresponding amino acid sequences for this new enzyme and its exemplary subdomains are presented as SEQ ID NOs: 424, 2245, and 4059. Based on proximity to the other elements in the operon, a putative tracrRNA containing sequence was identified and is included as SEQ ID NO: 5498. A detailed domain-level alignment of the sequence versus Cas9 from Actinomyces naeslundii is depicted in FIG. 8.

[0425] A comparison of MG3-1 versus additional proprietary protein datasets revealed additional protein sequences with similar architecture, presented as SEQ NOs: 421-423, 425-431.

### Example 2D.—Discovery of MG4, 7, 14, 15, 16, 18, 21, 22, 23 Families of CRISPR Systems

[0426] Analysis of the data from the metagenomic analysis of Example 1 revealed new clusters of previously undescribed putative CRISPR systems comprising 9 families of one member each (MG 4-5, MG7-2, MG14-1, MG15-1, MG16-2, MG18-1, MG21-1, MG22-1, MG23-1). The corresponding protein and nucleic acid sequences for these new enzymes and their exemplary subdomains are presented as SEQ ID NOs: 432, 669, 678, 930, 1093, 1354, 1512, 1656, 1756. Based on proximity to the other elements in the operon, a putative tracr containing sequence was identified for each family. These sequences are presented in the sequence listing as SEQ ID NOs: 5503-5511, respectively.

[0427] A comparison of MG 4-5, MG7-2, MG14-1, MG15-1, MG16-2, MG18-1, MG21-1, MG22-1, MG23-1 versus additional proprietary protein datasets revealed additional protein sequences with similar architecture, presented as SEQ NOs: 433-660, 670-677, 679-929, 931-1092, 1094-1353, 1355-1511, 1513-1655, 1657-1755, and 1757-1826. Motifs common to the nucleases of these sets of CRISPR systems are presented as SEQ ID NO: 5649 for MG4; SEQ ID NOs: 5650-5667 for MG14; 5668-5675 for MG15; SEQ ID NOs: 5676-5678 for MG16; SEQ ID NOs: 5679-5686 for MG18; SEQ ID NOs: 5687-5693 and SEQ ID NOs: 5674-5675 for MG21; SEQ ID NOs: 5694-5699 for MG22; and SEQ ID NOs: 5700-5717 for MG23.

### Example 3.—Prophetic—Determination of Protospacer-Adjacent Motif

[0428] Experiments are performed as in any of the examples in Karvelis et al. Methods. 2017 May 15; 121-122:3-8, which is entirely incorporated by reference herein, to identify the protospacer adjacent motif (PAM) sequence specificity for the novel enzymes described herein to allow for optimal synthetic sequence targeting.

[0429] In one example (in-vivo screen), cells bearing plasmids encoding any of the enzymes described herein and protospacer-targeting guide RNA are co-transformed with a plasmid library containing an antibiotic resistance gene, and a protospacer sequence flanked by a randomized PAM sequence. Plasmids containing functional PAMs are cleaved by the enzyme, leading to cell death. Deep-sequencing of the enzyme cleavage-resistant plasmid pool isolated from the surviving cells displays a set of depleted plasmids that contain functional cleavage-permitting PAMs.

[0430] In another example (in vitro screen), PAM library in the form of DNA plasmid or concatemeric repeats is subjected to cleavage by the RNP complex (e.g., including the enzyme, tracrRNA and crRNA or the enzyme and hybrid sgRNA) assembled in vitro or in cell lysates. Resulting free DNA ends from successful cleavage events are captured by adapter ligation, followed by the PCR amplification of the PAM-sided products. Amplified library of functional PAMs is subjected to deep sequencing and PAMs licensing DNA cleavage are identified.

### Example 4.—Prophetic—Use of Synthetic CRISPR System as Described Herein in a Mammalian Cell for Genome Editing

[0431] DNA/RNA sequences encoding (i) an ORF encoding codon-optimized enzyme under a cell-compatible promoter with a cell-compatible C-terminal nuclear localization sequence (e.g., SV40 NLS in the case of human cells) and a suitable polyadenylation signal (e.g., TK pA signal in the case of human cells); and (ii) an ORF encoding an sgRNA (having a 5′ sequence beginning with G followed by 20 nt of a complementary targeting nucleic acid sequence targeting genomic DNA followed by a corresponding compatible PAM identified via Example 3 and a 3′ tracr-binding sequence, a linker, and the tracrRNA sequence) under a suitable Polymerase III promoter (e.g., the U6 promoter in mammalian cells) are prepared. In some embodiments, these sequences are prepared on the same or separate plasmid vectors, which are transfected via a suitable technique into eukaryotic cells. In some embodiments, these sequences are prepared as separate DNA sequences, which are transfected or microinjected into cells. In some embodiments, these sequences are prepared as synthesized RNAs or in-vitro transcribed RNAs which are transfected or microinjected into cells. In some embodiments, these sequences are translated into proteins and transfected or microinjected into cells.

[0432] Whichever transfection method is selected, (i) and (ii) are introduced into cells. A period of incubation is allowed to pass so that the enzyme and/or sgRNA can be transcribed and/or translated into active form. After the incubation period, genomic DNA in the vicinity of the targeting sequence is analyzed (e.g., by sequencing). An indel is introduced into the genomic DNA in the vicinity of the targeting sequence as a result of enzyme-mediated cleavage and non-homologous end joining.

[0433] In some embodiments, (i) and (ii) are introduced into cells with a third repair nucleotide that encodes regions of the genome flanking the cleavage site of sizes 25 bp or larger, which will facilitate homology directed repair. Containing within these flanking sequences may be a single base pair mutation, a functional gene fragment, a foreign or native gene for expression, or several genes composing a biochemical pathway.

### Example 5.—Prophetic—Use of Synthetic CRISPR System as Described Herein In Vitro

[0434] Any of the enzymes described herein are cloned into a suitable E. coli expression plasmid containing a purification tag and are recombinantly expressed in E. coli and purified using the recombinant tag. RNAs comprising a 5′ G followed by a 20 nt targeting sequence and PAM sequence, a tracrRNA binding region of a compatible crRNA, a GAAA linker, and a compatible tracrRNA are synthesized by suitable solid-phase RNA synthesis methods. Recombinant enzymes and sgRNA are combined in a suitable cleavage buffer containing Mg2+ (e.g., 20 mM HEPES pH 7.5, 100 mM KCl, 5 mM MgCl₂, 1 mM DTT, 5% glycerol) and the reaction is initiated by introducing a target DNA including a sequence complementary to the targeting sequence and PAM sequence. Cleavage of the DNA is monitored by a suitable assay (e.g., agarose gel electrophoresis followed by ethidium bromide staining (or similarly acting DNA-intercalating agent) and UV visualization).

### Example 6.—(General Protocol) PAM Sequence Identification/Confirmation for the Endonucleases Described Herein

[0435] PAM sequences were determined by sequencing plasmids containing randomly-generated PAM sequences that could be cleaved by putative endonucleases expressed in an E. coli lysate-based expression system (myTXTL, Arbor Biosciences). In this system, an E. coli codon optimized nucleotide sequence was transcribed and translated from a PCR fragment under control of a T7 promoter. A second PCR fragment with a tracr sequence under a T7 promoter and a minimal CRISPR array composed of a T7 promoter followed by a repeat-spacer-repeat sequence was transcribed in the same reaction. Successful expression of the endonuclease and tracr sequence in the TXTL system followed by CRISPR array processing provided active in vitro CRISPR nuclease complexes.

[0436] A library of target plasmids containing a spacer sequence matching that in the minimal array followed by 8N mixed bases (putative PAM sequences) was incubated with the output of the TXTL reaction. After 1-3 hr, the reaction was stopped and the DNA was recovered via a DNA clean-up kit, e.g., Zymo DCC, AMPure XP beads, QiaQuick etc. Adapter sequences were blunt-end ligated to DNA with active PAM sequences that had been cleaved by the endonuclease, whereas DNA that had not been cleaved was inaccessible for ligation. DNA segments comprising active PAM sequences were then amplified by PCR with primers specific to the library and the adapter sequence. The PCR amplification products were resolved on a gel to identify amplicons that corresponded to cleavage events. The amplified segments of the cleavage reaction were also used as template for preparation of an NGS library. Sequencing this resulting library, which was a subset of the starting 8N library, revealed the sequences which contain the correct PAM for the active CRISPR complex. For PAM testing with a single RNA construct, the same procedure was repeated except that an in vitro transcribed RNA was added along with the plasmid library and the tracr/minimal CRISPR array template was omitted. For endonucleases where NGS libraries were prepared, seqLogo (see e.g., Huber et al. Nat Methods. 2015 February; 12(2):115-21) representations were constructed and are presented in FIGS. 27, 38, 29, 30, 31, 32, 33, 34, and 35. The seqLogo module used to construct these representations takes the position weight matrix of a DNA sequence motif (e.g. a PAM sequence) and plots the corresponding sequence logo as introduced by Schneider and Stephens (see e.g. Schneider et al. Nucleic Acids Res. 1990 Oct. 25; 18(20):6097-100. The characters representing the sequence in the seqLogo representations have been stacked on top of each other for each position in the aligned sequences (e.g. PAM sequences). The height of each letter is proportional to its frequency, and the letters have been sorted so the most common one is on top.

### Example 7.—(General Protocol) RNA Folding of tracrRNA and sgRNA Structures

[0437] Folded structures of guide RNA sequences at 37° C. were computed using the method of Andronescu et al. Bioinformatics. 2007 Jul. 1; 23(13):i19-28, which is incorporated by reference herein in its entirety. Predicted structures of exemplary sgRNAs described herein are presented in FIGS. 21, 22, 23, 24, 25, and 26.

### Example 8.—(General Protocol) In Vitro Cleavage Efficiency of MG CRISPR Complexes

[0438] Endonucleases were expressed as His-tagged fusion proteins from an inducible T7 promoter in a protease deficient E. coli B strain. Cells expressing the His-tagged proteins were lysed by sonication and the His-tagged proteins were purified by Ni-NTA affinity chromatography on a HisTrap FF column (GE Lifescience) on an AKTA Avant FPLC (GE Lifescience). The eluate was resolved by SDS-PAGE on acrylamide gels (Bio-Rad) and stained with InstantBlue Ultrafast coomassie (Sigma-Aldrich). Purity was determined using densitometry of the protein band with ImageLab software (Bio-Rad). Purified endonucleases were dialyzed into a storage buffer composed of 50 mM Tris-HCl, 300 mM NaCl, 1 mM TCEP, 5% glycerol; pH 7.5 and stored at −80° C.

[0439] Target DNAs containing spacer sequences and PAM sequences (determined e.g., as in Example 6) were constructed by DNA synthesis. A single representative PAM was chosen for testing when the PAM had degenerate bases. The target DNAs comprised 2200 bp of linear DNA derived from a plasmid via PCR amplification with a PAM and spacer located 700 bp from one end. Successful cleavage resulted in fragments of 700 and 1500 bp. The target DNA, in vitro transcribed single RNA, and purified recombinant protein were combined in cleavage buffer (10 mM Tris, 100 mM NaCl, 10 mM MgCl₂) with an excess of protein and RNA and incubated for 5 minutes to 3 hours, usually 1 hr. The reaction was stopped via addition of RNAse A and incubation at 60 minutes. The reaction was then resolved on a 1.2% TAE agarose gel and the fraction of cleaved target DNA is quantified in ImageLab software.

### Example 9.—(General Protocol) Testing of Genome Cleavage Activity of MG CRISPR Complexes in E. coli

[0440] E. coli lacks the capacity to efficiently repair double-stranded DNA breaks. Thus, cleavage of genomic DNA can be a lethal event. Exploiting this phenomenon, endonuclease activity was tested in E. coli by recombinantly expressing an endonuclease and a tracrRNA in a target strain with spacer/target and PAM sequences integrated into its genomic DNA.

[0441] In this assay, the PAM sequence is specific for the endonuclease being tested as determined by the methods described in Example 6. sgRNA sequences were determined based upon the sequence and predicted structure of the tracrRNA. Repeat-anti-repeat pairings of 8-12 bp (generally 10 bp) were chosen, starting from the 5′ end of the repeat. The remaining 3′ end of the repeat and 5′ end of the tracrRNA were replaced with a tetraloop. Generally, the tetraloop was GAAA, but other tetraloops can be used, particularly if the GAAA sequence is predicted to interfere with folding. In these cases, a TTCG tetraloop was used.

[0442] Engineered strains with PAM sequences integrated into their genomic DNA were transformed with DNA encoding the endonuclease. Transformants were then made chemocompetent and transformed with 50 ng of single guide RNAs either specific to the target sequence (“on target”), or non-specific to the target (“non target”). After heat shock, transformations were recovered in SOC for 2 hrs at 37° C. Nuclease efficiency was then determined by a 5-fold dilution series grown on induction media. Colonies were quantified from the dilution series in triplicate.

### Example 10a.—(General Protocol) Testing of Genome Cleavage Activity of MG CRISPR Complexes in Mammalian Cells

[0443] To show targeting and cleavage activity in mammalian cells, the MG Cas effector protein sequences were tested in two mammalian expression vectors: (a) one with a C-terminal SV40 NLS and a 2A-GFP tag, and (b) one with no GFP tag and two SV40 NLS sequences, one on the N-terminus and one on the C-terminus. In some instances, nucleotide sequences encoding the endonucleases were codon-optimized for expression in mammalian cells.

[0444] The corresponding single guide RNA sequence (sgRNA) with targeting sequence attached is cloned into a second mammalian expression vector. The two plasmids are cotransfected into HEK293T cells. 72 hr after co-transfection of the expression plasmid and a sgRNA targeting plasmid into HEK293T cells, the DNA is extracted and used for the preparation of an NGS-library. Percent NHEJ is measured via indels in the sequencing of the target site to demonstrate the targeting efficiency of the enzyme in mammalian cells. At least 10 different target sites were chosen to test each protein's activity.

### Example 10b. (General Protocol) Testing of Genome Cleavage Activity of MG CRISPR Complexes in Mammalian Cells

[0445] To show targeting and cleavage activity in mammalian cells, the MG Cas effector protein sequences were cloned into two mammalian expression vector: (a) one with flanking N and C-terminal SV40 NLS sequences, a C-terminal His tag, and a 2A-GFP tag at the C terminus after the His tag (Backbone 1), and (b) one with flanking NLS sequences and C-terminal His tag but no T2A GFP tag (Backbone 2). In some instances, nucleotide sequences encoding the endonucleases were the native sequence, codon-optimized for expression in E. coli, or codon-optimized for expression in mammalian cells.

[0446] The corresponding single guide RNA sequence (sgRNA) with targeting sequence attached was cloned into a second mammalian expression vector. The two plasmids were cotransfected into HEK293T cells. 72 hr after co-transfection of the expression plasmid and a sgRNA targeting plasmid into HEK293T cells, the DNA was extracted and used for the preparation of an NGS-library. Percent NHEJ was measured via indels in the sequencing of the target site to demonstrate the targeting efficiency of the enzyme in mammalian cells. About 7-12 different target sites were chosen for testing each protein's activity. An arbitrary threshold of 5% indels was used to identify active candidates.

### Example 11.—Characterization of MG1 Family Members

[0447] PAM Specificity, tracrRNA sgRNA Validation

[0448] The targeted endonuclease activity of MG1 family endonuclease systems was confirmed using the myTXTL system described in Example 6. In this assay, PCR amplification of cleaved target plasmids yields a product that migrates at approximately 170 bp in the gel, as shown in FIGS. 17-20. Amplification products were observed for MG1-4 (dual guide: see gel 1, lane 3, single guide: see gel 6 lane 2), MG1-5 (gel 2 lane 10), MG1-6 (dual guide: see gel 5 lane 6, single guide see: gel 6 lane 5), and MG1-7 (dual guide: see gel 3 lane 13, single guide: see gel 3 lane 2) (protein SEQ ID NOs: 1-4, respectively). Sequencing the PCR products revealed active PAM sequences for these enzymes as shown in Table 2.

TABLE 2
PAM sequence specificities and related data for MG1 enzymes

| | | | | | | | Synthetic |
|---|---|---|---|---|---|---|---|
| | Enzyme | Native | | | | Synthetic | (single |
| | protein | (dual | PAM | tracrRNA | sgRNA | (single | guide) |
| | SEQ ID | guide) | SEQ ID | SEQ ID | SEQ ID | guide) | PAM SEQ |
| Enzyme | NO | PAM | NO: | NO: | NO: | PAM | ID NO: |
| MG1-4 | 1 | nRRRAA | 5527 | 5476 | 5461 | nRRR | 5512 |
| MG1-5 | 2 | nnnnCC | 5528 | 5477 | 5462 | nnnnYY | 5513 |
| MG1-6 | 3 | nnRRAC | 5529 | 5478 | 5463 | nnRRAY | 5514 |
| MG1-7 | 4 | nRRRAA | 5530 | 5479 | 5464 | nRRRAAG | 5515 |

[0449] Synthetic single guide RNAs (sgRNAs) were designed based on the sequences and predicted structures of the tracrRNAs and are presented as SEQ ID NOs: 5461-5464. The PAM sequence screen of Example 6 was repeated with the sgRNAs. The results of this experiment are also presented in Table 2, which reveals that PAM specificity changed slightly when using sgRNAs.

### Targeted Endonuclease Activity In Vitro

[0450] In vitro activity of the MG1-4 endonuclease system (protein SEQ ID NO: 1 with sgRNA SEQ ID NO: 5461) on a target DNA with a PAM sequence CAGGAAGG was verified using the method of Example 8. The single guide sequence reported above (SEQ ID NO: 5461) was used, with varying spacer/targeting sequence lengths from 18-24 nt replacing the Ns of the sequence. The results are shown in FIG. 10, wherein the left panel shows a gel demonstrating DNA cleavage by MG1-4 in combination with corresponding single guide sgRNAs having different targeting sequence lengths (18-24 nt), and the right panel shows the same data quantified as a bar graph. The data demonstrated that targeting sequences from 18-24 nucleotides were functional with the MG1-4/sgRNA system.

### Targeted Endonuclease Activity in Bacterial Cells

[0451] In vivo activity of the MG1-4 endonuclease system (protein SEQ ID NO: 1, sgRNA SEQ ID NO: 5461) was tested with the PAM sequence CAGGAAGG as in Example 9. Transformed E. coli were plated in serial dilution, and the results (showing E. coli serial dilutions in the left panel and quantitated growth in the right panel) are presented in FIG. 11. A substantial reduction in the growth of E. coli expressing on target sgRNA compared to E. coli expressing non-target sgRNA indicates that genomic DNA was specifically cleaved by the endonuclease in E. coli cells.

### Targeted Endonuclease Activity in Mammalian Cells (a)

[0452] The method of Example 10 was used to demonstrate targeting and cleavage activity in mammalian cells. Open reading frames encoding the MG1-4 (protein SEQ ID NO: 5527) and MG1-6 (protein SEQ ID NO: 5529) sequences were cloned into 2 mammalian expression vectors, one with a C-terminal SV40 NLS and a 2A-GFP tag (E. coli MG-BB) and one with no GFP tag and 2 NLS sequences, one on the N-terminus and one on the C-terminus (E. coli pMG5-BB). For MG1-6, the open reading frame was additionally codon-optimized for mammalian expression (SEQ ID NO: 5589) and cloned into the 2-NLS plasmid backbone (MG-16hs). The results of this experiment are shown in FIG. 12. The endonuclease expression vectors were cotransfected into HEK293T cells with a second vector for expressing a sgRNA (e.g., SEQ ID NOs: 5512 or 5515) with a tracr sequence specific for the endonuclease and a guide sequence selected from Tables 3-4. 72 hr after co-transfection the DNA was extracted and used for the preparation of an NGS-library. Cleavage activity was detected by the appearance of internal deletions (NHEJ remnants) proximal to the sequence of the target site. Percent NHEJ was measured via indels in the sequencing of the target site to demonstrate the targeting efficiency of the enzyme in mammalian cells and is presented in FIG. 12.

TABLE 3
MG1-4 mammalian targeting sequences

| | | Targeting | |
|---|---|---|---|
| MG1-4 | | sequence | |
| Target ID | MG1-4 Targeting Sequence | SEQ ID NO: | Targeted Gene |
| 1 | aatatgtagctgtttgggaggt | 5543 | VEGFA |
| 2 | ctagggggcgctcggccaccac | 5544 | VEGFA |
| 3 | tggctaaagagggaatgggctt | 5545 | VEGFA |
| 4 | cacaccccggctctggctaaag | 5546 | VEGFA |
| 5 | tcggaggagccgtggtccgcgc | 5547 | VEGFA |
| 6 | gcggaccacggctcctccgaag | 5548 | VEGFA |
| 7 | gtacaaacggcagaagctggag | 5549 | EMX1 |
| 8 | gaggaagggcctgagtccgagca | 5550 | EMX1 |
| 9 | aaggcaaacatcctgataatgg | 5551 | Apolipoprotein |

TABLE 4
MG1-6 mammalian targeting sequences

| | | Targeting | |
|---|---|---|---|
| MG1-6 | | sequence | |
| Target ID | MG1-6 Targeting Sequence | SEQ ID NO: | Targeted Gene |
| 1 | tctttagccagagccggggtgt | 5552 | VEGFA |
| 2 | tggaccccctatttctgacctc | 5553 | VEGFA |
| 3 | atgggagcccttcttcttctgc | 5554 | EMX1 |
| 4 | tgccacgaagcaggccaatggg | 5555 | EMX1 |
| 5 | tggtgtctgtttgaggttgcta | 5556 | HBB-R01 |
| 6 | gggcaggttggtatcaaggtta | 5557 | HBB-R01 |
| 7 | aggtgctgacgtaggtagtgct | 5558 | FANCF |
| 8 | gccctacttccgctttcacctt | 5559 | FANCF |
| 9 | aatgtatgctggcttttaaggg | 5560 | IVS40 |
| 10 | gctcctttggctagggaagtgt | 5561 | IVS40 |

### Targeted Endonuclease Activity in Mammalian Cells (b)

[0453] MG1-4 target loci were chosen to test locations in the genome with the PAM nRRRAA (SEQ TD NO: 5527). The spacers corresponding to the chosen target sites were cloned into the sgRNA scaffold in the mammalian vector system Backbone 2 described in Example 10b. The sites are listed in Table 4a below. The activity of MG1-4 at various target sites is shown in Table 4a and FIG. 37

TABLE 4a
Activity of MG1-4 at various target sites

| target | | | | %NHEJ |
|---|---|---|---|---|
| ID | target sequence | PAM | locus | (mean ± std) |
| 1 | aatatgtagctgtttgggaggt | CAGAAA | VEGFA | 1.62 ± 1.2 |
| 2 | ctagggggcgctcggccaccac | AGGGAA | VEGFA | −0.07 ± 0 |
| 3 | tggctaaagagggaatgggctt | TGGAAA | VEGFA | 10.32 ± 2.75 |
| 4 | cacaccccggctctggctaaag | AGGGAA | VEGFA | 0.18 ± 0.53 |
| 5 | tcggaggagccgtggtccgcgc | GGGGAA | VEGFA | 0 ± 0.03 |
| 6 | gaagccgagccgagcggagccg | CGAGAA | VEGFA | 4.53 ± 1.73 |
| 7 | gcggaccacggctcctccgaag | GAGGAA | VEGFA | 0.3 ± 0.04 |
| 8 | gtacaaacggcagaagctggag | GAAGAA | EMX1 | 0.23 ± 0.1 |
| 10 | Gaaggcaaacatcctgataatgg | TGAAAA | Apolipoprotein | 0.07 ± 0.06 |

[0454] MG1-6 target loci were chosen to test locations in the genome with the PAM nnRRAC (SEQ TD NO: 5529). The spacers corresponding to the chosen target sites were cloned into the sgRNA scaffold in the mammalian vector system backbone 2 described in Example 10b. The sites are listed in Table 4b below. The activity of MG1-6 at various target sites is shown in Table 4b and FIG. 38.

TABLE 4b
Activity of MG1-6 at various target sites.

| | | | | %NHEJ |
|---|---|---|---|---|
| target ID | target sequence | PAM | locus | (mean ± std) |
| 1 | tctttagccagagccggggtgt | GCAGAC | VEGFA | 0.385 ± 0.035 |
| 2 | tggaccccctatttctgacctc | CCAAAC | VEGFA | 0.65 ± 0.62 |
| 3 | atgggagcccttcttcttctgc | TCGGAC | EMX1 | −0.045 ± 0.105 |
| 4 | tgccacgaagcaggccaatggg | GAGGAC | EMX1 | 0.96 ± 0.14 |
| 5 | tggtgtctgtttgaggttgcta | GTGAAC | HBB | −0.09 ± 0.09 |
| 6 | gggcaggttggtatcaaggtta | CAAGAC | HBB | 4.915 ± 0.135 |
| 7 | aggtgctgacgtaggtagtgct | TGAGAC | FANCF | 3.85 ± 1.86 |
| 9 | aatgtatgctggcttttaaggg | GGAAAC | IVS40 | −0.215 ± 0.105 |
| 10 | gctcctttggctagggaagtgt | TAAAAC | IVS40 | 3.03 ± 3.5 |

[0455] MG1-7 target loci were chosen to test locations in the genome with the PAM nRRRAAG (SEQ ID NO: 5515). The spacers corresponding to the chosen target sites were cloned into the sgRNA scaffold in the mammalian vector system backbone 2 described in Example 10b. The sites are listed in Table 4c below. The activity of MG1-7 at various target sites is shown in Table 4c and FIG. 39.

TABLE 4c
Activity of MG1-7 at various target sites

| target | | | | %NHEJ |
|---|---|---|---|---|
| ID | target sequence | PAM | locus | (mean ± std) |
| 1 | atcaaactgtgagcatcttcag | ggaaaag | IVS40 | 0.105 ± 0.88 |
| 2 | cagcgaatctactcagccagag | caggaag | IVS40 | 0.075 ± 0.02 |
| 3 | ctttaacttgtgtgattctgga | gaggaag | IVS40 | −0.25 |
| 4 | agcttaattagctcctttggct | agggaag | IVS40 | 0.54 ± 1.71 |
| 5 | ccatggtgcatctgactcctga | ggagaag | HBB | 0.005 ± 0.01 |
| 6 | tgcttgagaccgccagaagctc | ggaaaag | FANCF | 0.91 ± 0.38 |
| 7 | cgagaacagcccagaagttgga | cgaaaag | VEGFA | 5.49 ± 0.44 |
| 8 | cggaggagccgtggtccgcgcg | ggggaag | VEGFA | 0.27 ± 0.20 |
| 9 | atgtgtgagaaaaatttaatca | taagaag | Apolipoprotein | −1.85 ± 1.89 |
| 10 | aggtccaagtaaaatttgtctt | agaaaag | Apolipoprotein | −2.17 ± 2.55 |
| 11 | gtacaaacggcagaagctggag | gaggaag | EMX1 | 0.77 ± 0.33 |
| 12 | aggaagggcctgagtccgagca | gaagaag | EMX1 | 0.01 ± 0.01 |
| 13 | aagggcctgagtccgagcagaa | gaagaag | EMX1 | 0.18 ± 0.22 |

### Example 12.—Characterization of MG2 Family Members

[0456] PAM Specificity, tracrRNA/sgRNA Validation

[0457] The targeted endonuclease activity of MG2 family members was confirmed in the myTXTL system as described in Example 6. Results of this assay are shown in FIGS. 17-20. In the assay shown in FIGS. 17-20, active proteins that successfully cleave the library result in a band around 170 bp in the gel. Amplification products were observed for MG2-1 (see gel 2 lane 11 and gel 4 lane 6) and MG2-7 (see gel 11 lane 10) (SEQ ID NOs: 320 and 321, respectively). Sequencing the PCR products revealed active PAM sequences in Table 5 below:

TABLE 5
PAM sequence specificities and related data for MG2 enzymes

| | | | | | | | Synthetic |
|---|---|---|---|---|---|---|---|
| | Enzyme | Native | | | | Synthetic | (single |
| | protein | (dual | PAM | tracrRNA | sgRNA | (single | guide) |
| | SEQ ID | guide) | SEQ ID | SEQ ID | SEQ ID | guide) | PAM SEQ |
| Enzyme | NO | PAM | NO: | NO: | NO: | PAM | ID NO: |
| MG2-1 | 320 | nRCGTA | 5531 | 5490 | N/A | N/A | N/A |
| MG2-7 | 321 | N/A | N/A | 5491 | 5465 | NNNRTA | 5516 |

### Targeted Endonuclease Activity in Bacterial Cells

[0458] In vivo activity of the MG2-7 endonuclease system with a sgRNA (endonuclease SEQ ID NO: 321; sgRNA SEQ ID NO: 5465) and an AGCGTAAG PAM sequence was confirmed using the method described in Example 9. Transformed E. coli were plated in serial dilution, and the results (showing E. coli serial dilutions in the left panel and quantitated growth in the right panel) are presented in FIG. 34. A substantial reduction in the growth of E. coli expressing on target sgRNA compared to E. coli expressing non-target sgRNA indicates that genomic DNA was specifically cleaved by the MG1-4 endonuclease in E. coli cells.

### Example 13.—Characterization of MG3 Family Members

[0459] PAM Specificity, tracrRNA sgRNA Validation

[0460] The targeted endonuclease activity of MG3 family members was confirmed using the myTXTL system as described in Example 6 using tracr sequences and CRISPR arrays. In this assay, PCR amplification of cleaved target plasmids yields a product that migrates at approximately 170 bp in the gel, as shown in FIGS. 17-20. Amplification products were observed for MG3-6 (dual guide: see gel 2 lane 8; single guide: see gel 3 lane 3), MG3-7 (dual guide: see gel 2 lane 3, single guide: see gel 3 lane 4), and MG3-8 (dual guide: see gel 9 lane 5) (SEQ ID NOs: 421, 422, and 423, respectively). Sequencing the PCR products revealed active PAM sequences in Table 6 below:

TABLE 6
PAM sequence specificities and related data for MG3 enzymes

| | | | | | | | Synthetic |
|---|---|---|---|---|---|---|---|
| | Enzyme | Native | | | | Synthetic | (single |
| | protein | (dual | PAM | tracrRNA | sgRNA | (single | guide) |
| | SEQ ID | guide) | SEQ ID | SEQ ID | SEQ ID | guide) | PAM SEQ |
| Enzyme | NO | PAM | NO: | NO: | NO: | PAM | ID NO: |
| MG3-6 | 421 | nnRGGTT | 5532 | 5500 | 5466 | nnGGG | 5517 |
| MG3-7 | 422 | nnRnYAY | 5533 | 5501 | 5467 | nnGnTnT | 5518 |
| MG3-8 | 423 | nnRGGTT | 5534 | 5502 | N/A | N/A | N/A |

[0461] Synthetic single guide RNAs (sgRNAs) were designed based on the sequences and predicted structures of the tracrRNAs and are presented as SEQ ID NOs: 5466-5467. The PAM sequence screen of Example 6 was repeated with the sgRNAs. The results of this experiment are also presented in Table 6, which reveals that PAM specificity changed slightly when using sgRNAs.

### Targeted Endonuclease Activity In Vitro

[0462] In vitro activity of the MG3-6 (endonuclease SEQ ID NO: 421) was verified with the PAM sequence GTGGGTTA using the method of Example 8. The single guide sequence reported above (SEQ ID NO: 5466) was used, with varying spacer/targeting sequence lengths from 18-24 nt replacing the Ns of the sequence. The results are shown in FIG. 13, wherein the top panel shows a gel demonstrating DNA cleavage by MG3-6 in combination with different sgRNAs having different targeting sequence lengths (18-24 nt), and the bottom panel shows the same data quantified as a bar graph. The data demonstrated that targeting sequences from 18-24 nucleotides were functional with the MG3-6/sgRNA system.

### Targeted Endonuclease Activity in Bacterial Cells

[0463] In vivo activity of the MG3-7 endonuclease system (protein SEQ ID NO: 422; sgRNA SEQ ID NO: 5467) was tested with the PAM sequence TGGACCTG using the method of Example 9. Transformed E. coli were plated in serial dilution, and the results (showing E. coli serial dilutions in the top panel and quantitated growth in the bottom panel) are presented in FIG. 14. A substantial reduction in the growth of E. coli expressing on target sgRNA compared to E. coli expressing non-target sgRNA indicates that genomic DNA was being specifically cleaved by the MG3-7 endonuclease system.

### Targeted Endonuclease Activity in Mammalian Cells (a)

[0464] The method of Example 10 was used to demonstrate targeting and cleavage activity in mammalian cells. Open reading frames encoding MG3-7 (protein SEQ ID NO: 422) was cloned into 2 mammalian expression vectors, one with a C-terminal SV40 NLS and a 2A-GFP tag (E. coli MG-BB) and one with no GFP tag and 2 NLS sequences, one on the N-terminus and one on the C-terminus (E. coli pMG5-BB). The endonuclease expression vectors were cotransfected into HEK293T cells with a second vector for expressing the sgRNA above with a guide sequence selected from Table 7. The results of this experiment are shown in FIG. 12. 72 hr after co-transfection DNA was extracted and used for the preparation of an NGS-library. Cleavage activity was detected by the appearance of internal deletions (NHEJ remnants) in the vicinity of the target site. Results are presented in FIG. 15.

[0465] The target site which were encoded on the sgRNA plasmids are shown in Table 7 below.

TABLE 7
MG3-7 mammalian targeting sequences

| MG3-7 | | Targeting | |
|---|---|---|---|
| Target | MG3-7 Targeting | sequence | |
| ID | Sequence | SEQ ID NO: | Targeted Gene |
| 1 | cccctatttctgacctcccaaa | 5563 | VEGFA |
| 2 | tgtggttccagaaccggaggac | 5564 | EMX1 |
| 3 | ggccctgggcaggttggtatca | 5565 | HBB-R01 |
| 4 | tccttaaacctgtcttgtaacc | 5566 | HBB-R01 |
| 5 | ctgactcctgaggagaagtctg | 5567 | HBB-R01 |
| 6 | tccgagcttctggcggtctcaa | 5568 | FANCF |
| 7 | tatcatttcgcggatgttccaa | 5569 | FANCF |
| 8 | tcgggcagagggtgcatcacct | 5570 | Apolipoprotein |
| 9 | ataataagcagaacttttagtg | 5571 | Fibrinogen |
| 10 | gttttctttagttattaatttc | 5572 | Fibrinogen |

### Targeted Endonuclease Activity in Mammalian Cells (b)

[0466] MG3-6 target loci were chosen to test locations in the genome with the PAM nnRGGTT (SEQ ID NO: 5532). The spacers corresponding to the chosen target sites were cloned into the sgRNA scaffold in the mammalian vector system backbone 1 described in Example 21b. The sites are listed in Table 7a below. The activity of MG3-6 at various target sites is shown in Table 7a and FIG. 40.

TABLE 7a
Activity of MG3-6 at various target sites

| | | | | %NHEJ |
|---|---|---|---|---|
| target ID | target sequence | PAM | locus | (mean ± std) |
| target1 | gagtgactgaaacttcacagaa | tagggtt | Albumin | 9.75 ± 4.67 |
| target2 | ttctatttatgagatcaacagc | acaggtt | Albumin | 32.75 ± 7.42 |
| target3 | cagatgcaccatggtgtctgtt | tgaggt | HBB_R01 | 2.52 ± 2.13 |
| target5 | gaggccctgggcaggttggtat | caaggtt | HBB_R01 | 25.16 ± 3.67 |
| target6 | aggttggtatcaaggttacaag | acaggtt | HBB_R01 | 35.27 ± 2.78 |
| target7 | tcaactttcctggcaacttgcg | gtaggtt | Apolipoprotein | 21.57 ± 5.70 |
| target8 | aggaacattcagttaagatagt | ctaggtt | Fibrinogen | 7.56 ± 11.99 |
| target9 | tttaaattatgaatccatctct | aaaggtt | Fibrinogen | 46.32 ± 31.46 |
| target10 | gagtgactgaaacttcacagaa | tagggtt | Albumin | 3.93 ± 3.53 |

[0467] MG3-7 target loci were chosen to test locations in the genome with the PAM nnRnTAC (SEQ TD NO: 6303). The spacers corresponding to the chosen target sites were cloned into the sgRNA scaffold in the mammalian vector systems described in Example 10b. The sites are listed in Table 7b below. The activity of MG3-7 at various target sites is shown in Table 7b and FIG. 41.

TABLE 7b
Activity of MG3-7 at various target sites

| | | | | %NHEJ | %NHEJ |
|---|---|---|---|---|---|
| target | | | | backbone 2 | backbone |
| ID | target sequence | PAM | locus | (mean ± std) | 1 |
| 1 | cccctatttctgacctcccaaa | CAGCTAC | VEGFA | 0.54 ± 0.44 | |
| 2 | tgtggttccagaaccggaggac | AAAGTAC | EMX1 | −0.09 ± 0.04 | |
| 3 | ggccctgggcaggttggtatca | AGGTTAC | HBB | 8.275 ± 0.3.12 | 3.87 |
| 4 | tccttaaacctgtcttgtaacc | TTGATAC | HBB | 0.16 ± 0.20 | |
| 5 | ctgactcctgaggagaagtctg | CCGTTAC | HBB | 0.25 ± 0.16 | |
| 6 | tccgagcttctggcggtctcaa | GCACTAC | FANCF | 1.84 ± 0.10 | 3.95 |
| 7 | tatcatttcgoggatgttccaa | TCAGTAC | FANCF | 0.32 ± 0.68 | |
| 8 | tcgggcagagggtgcatcacct | GGACTAC | Apolipoprotein | 13 | 23.88 |

[0468] MG3-8 target loci were chosen to test locations in the genome with the PAM nnRGGTT (SEQ TD NO: 5534). The spacers corresponding to the chosen target sites were cloned into the sgRNA scaffold in the mammalian vector system backbone 1 described in Example 10b. The sites are listed in Table 7c below. The activity of MG3-8 at various target sites is shown in Table 7c and FIG. 42.

TABLE 7c
Activity of MG3-8 at various target sites

| | | | | %NHEJ |
|---|---|---|---|---|
| target ID | target sequence | PAM | locus | (mean ± std) |
| target1 | gagtgactgaaacttcacagaa | tagggtt | Albumin | 10.81 ± 4.26 |
| target2 | ttctatttatgagatcaacagc | acaggtt | Albumin | 30.48 ± 11.17 |
| target3 | cagatgcaccatggtgtctgtt | tgaggt | HBB | 3.39 ± 2.13 |
| target4 | gaagttggtggtgaggccctgg | gcaggtt | HBB | 29.00 ± 11.87 |
| target5 | gaggccctgggcaggttggtat | caaggtt | HBB | 28.69 ± 1.96 |
| target6 | aggttggtatcaaggttacaag | acaggtt | HBB | 30.86 ± 13.24 |
| target7 | tcaactttcctggcaacttgcg | gtaggtt | Apolipoprotein | 7.98 ± 3.23 |
| target8 | aggaacattcagttaagatagt | ctaggtt | Fibrinogen | 20.29 ± 17.10 |
| target9 | tttaaattatgaatccatctct | aaaggtt | Fibrinogen | 35.5 ± 25.5 |
| target10 | gagtgactgaaacttcacagaa | tagggtt | Albumin | 4.9 ± 0.71 |

### Example 13.—Characterization of MG4 Family Members

[0469] PAM Specificity, tracrRNA/sgRNA Validation

[0470] The targeted endonuclease activity of MG4 family endonuclease systems was confirmed using the myTXTL system as described in Example 6. In this assay, PCR amplification of cleaved target plasmids yields a product that migrates at approximately 170 bp in the gel, as shown in FIGS. 17-20. Amplification products were observed for, MG4-2 (dual guide: see gel2 lane 9, single guide: see gel 10 lane 7) (SEQ ID NO: 432). Sequencing the PCR products revealed active PAM sequences shown in Table 8 below.

TABLE 8
PAM sequence specificities and related data for MG4 enzymes

| | Enzyme | | | Synthetic | Synthetic |
|---|---|---|---|---|---|
| | protein | tracrRNA | sgRNA | (single | (single guide) |
| | SEQ ID | SEQ ID | SEQ ID | guide) | PAM SEQ |
| Enzyme | NO | NO: | NO: | PAM | ID NO: |
| MG4-5 | 432 | 5503 | 5468 | nnCCR | 5519 |

### Example 14.—Characterization of MG14 Family Members

[0471] PAM Specificity, tracrRNA sgRNA Validation

[0472] The targeted endonuclease activity of MG14 family members (was confirmed using the myTXTL system as described in Example 6. In this assay, PCR amplification of cleaved target plasmids yields a product that migrates at approximately 170 bp in the gel, as shown in FIGS. 17-20. Amplification products were observed for MG14-1 (dual guide: see gel 1 lane 4, single guide: see gel 3 lane 8) (SEQ ID NO: 678). Sequencing the PCR products revealed active PAM sequence specificities shown in Table 9 below.

TABLE 9
PAM sequence specificities and
related data for MG14 enzymes

| | En- | | | | | | Syn- |
|---|---|---|---|---|---|---|---|
| | zyme | | | | | | thetic |
| | pro- | | | | | Syn- | (single |
| | tein | Native | PAM | tracrRNA | sgRNA | thetic | guide) |
| | SEQ | (dual | SEQ | SEQ | SEQ | (single | PAM |
| En- | ID | guide) | ID | ID | ID | guide) | SEQ |
| zyme | NO | PAM | NO: | NO: | NO: | PAM | ID NO: |
| MG14-1 | 678 | NNN | 5535 | 5505 | 5469 | NNNGGR | 5520 |
| | | NGG | | | | TA | |
| | | TA | | | | | |

### Targeted Endonuclease Activity in Bacterial Cells

[0473] In vivo activity of the MG14-1 endonuclease system with a sgRNA (endonuclease SEQ ID NO: 678; sgRNA SEQ ID NO: 5469) and a GGCGGGGA PAM sequence was confirmed using the method described in Example 9. Transformed E. coli were plated in serial dilution, and the results (showing E. coli serial dilutions in the left panel and quantitated growth in the right panel) are presented in FIG. 35. A substantial reduction in the growth of E. coli expressing on target sgRNA compared to E. coli expressing non-target sgRNA indicates that genomic DNA was specifically cleaved by the MG1-4 endonuclease in E. coli cells.

### Targeted Endonuclease Activity in Mammalian Cells

[0474] MG14-1 target loci were chosen to test locations in the genome with the PAM nnnnGGTA (SEQ ID NO: 5535). The spacers corresponding to the chosen target sites were cloned into the sgRNA scaffold in the mammalian vector system backbone 2 described in Example 10b. The sites are listed in Table 9a below. The activity of MG14-1 at various target sites is shown in Table 9a and FIG. 43.

TABLE 9a
Activity of MG14-1 at various target sites

| target | | | | %NHEJ |
|---|---|---|---|---|
| ID | target sequence | PAM | locus | (mean ± std) |
| 1 | cttattaataaaattcaaacat | CCTAGGTA | Albumin | 0.22 ± 1.04 |
| 2 | gttggtggtgaggccctgggca | GGTTGGTA | HBB | 0.67 ± 0.16 |
| 3 | ctagttaatggaataaaacatt | TTATGGTA | Fibrinogen | 0.15 |
| 4 | gcattataatgcaccaaggctt | TATAGGTA | Fibrinogen | 0.2 |
| 5 | gtggcggggtcccaggtgctga | CGTAGGTA | FANCF | 5.33 ± 4.13 |
| 6 | tgtccgccgccggccggggagg | AGGTGGTA | VEGFA | 4.88 ± 0.65 |
| 7 | ggtgatgcaccctctgcccgat | GCTTGGTA | Apolipoprotein | -0.35 ± 0.59 |
| 8 | ccacatcaactttcctggcaac | TTGCGGTA | Apolipoprotein | 0.19 ± 0.98 |
| 9 | gctagttaatggaataaaacatt | TTATGGTA | Fibrinogen | 0.6 |
| 10 | gcattataatgcaccaaggctt | TATAGGTA | Fibrinogen | 1.17 ± 1.42 |

### Example 15.—Characterization of MG15 Family Members

[0475] PAM Specificity, tracrRNA sgRNA Validation

[0476] The targeted endonuclease activity of MG15 family members was confirmed using the myTXTL system as described in Example 6. In this assay, PCR amplification of cleaved target plasmids yields a product that migrates at approximately 170 bp in the gel, as shown in FIGS. 17-20. Amplification products were observed for MG15-1 (dual guide: see gel 7 lane 7, single guide: see gel 3 lane 9) (SEQ ID NO: 930). Sequencing the PCR products revealed active PAM sequence specificities detailed in Table 10 below.

TABLE 10

| | | | | | | | Synthetic |
|---|---|---|---|---|---|---|---|
| | Enzyme | Native | | | | Synthetic | (single |
| | protein | (dual | PAM | tracrRNA | sgRNA | (single | guide) |
| | SEQ ID | guide) | SEQ ID | SEQ ID | SEQ ID | guide) | PAM SEQ |
| Enzyme | NO | PAM | NO: | NO: | NO: | PAM | ID NO: |
| MG15-1 | 930 | nnnnC | 5536 | 5506 | 5470 | nnnnC | 5521 |

### In Vitro Activity

[0477] In vitro activity of the MG15-1 endonuclease system (protein SEQ ID NO: 930; sgRNA SEQ ID NO:5470) was tested with the PAM sequence GGGTCAAA using the method of Example 8. The single guide sequence reported above (SEQ ID NO: 5470) was used, with varying spacer/targeting sequence lengths from 18-24 nt (replacing the Ns of the sequence). The results are shown in FIG. 16, wherein the top panel shows a gel demonstrating DNA cleavage by MG15-1 in combination with different sgRNAs having different targeting sequence lengths (18-24 nt), and the bottom panel shows the same data quantified as a bar graph. The data demonstrated that targeting sequences from 18-24 nucleotides were functional with the MG15-1/sgRNA system.

### Targeted Endonuclease Activity in Bacterial Cells

[0478] In vivo activity of the MG15-1 endonuclease system with a sgRNA (endonuclease SEQ ID NO: 930; sgRNA SEQ ID NO: 5470) and a GGGTCAAA PAM sequence was confirmed using the method described in Example 9. Transformed E. coli were plated in serial dilution, and the results (showing E. coli serial dilutions in the left panel and quantitated growth in the right panel) are presented in FIG. 35. A substantial reduction in the growth of E. coli expressing on target sgRNA compared to E. coli expressing non-target sgRNA indicates that genomic DNA was specifically cleaved by the MG1-4 endonuclease in E. coli cells.

### Example 16.—Characterization of MG16 Family Members

[0479] PAM Specificity, tracrRNA sgRNA Validation

[0480] The targeted endonuclease activity of MG16 family members was confirmed using the myTXTL system as described in Example 6. In this assay, PCR amplification of cleaved target plasmids yields a product that migrates at approximately 170 bp in the gel, as shown in FIGS. 17-20. Amplification products were observed for MG16-2 (see gel 11, lane 17) (SEQ ID NO: 1093). Sequencing the PCR products revealed active PAM sequence specificities detailed in Table 11 below.

TABLE 11
PAM sequence specificities and related data for MG16 enzymes

| | Enzyme | sgRNA | Synthetic | Synthetic |
|---|---|---|---|---|
| | protein | SEQ ID | (single guide) | (single guide) |
| Enzyme | SEQ ID NO | NO: | PAM | PAM SEQ ID NO: |
| MG16-2 | 1093 | 5471 | nRTnCC | 5522 |

### Example 17.—Characterization of MG18 Family Members

[0481] PAM Specificity, tracrRNA sgRNA Validation

[0482] The targeted endonuclease activity of MG18 family members was confirmed using the myTXTL system as described in Example 6. In this assay, PCR amplification of cleaved target plasmids yields a product that migrates at approximately 170 bp in the gel, as shown in FIGS. 17-20. Amplification products were observed for MG18-1 (dual guide: see gel 9 lane 9, single guide: see gel 11 lane 12) (SEQ ID NO: 1354). Sequencing the PCR products revealed active PAM sequence specificities detailed in Table 12 below.

TABLE 12
PAM sequence specificities and related data for MG18 enzymes

| | | | | | | | Synthetic |
|---|---|---|---|---|---|---|---|
| | Enzyme | Native | | | | Synthetic | (single |
| | protein | (dual | PAM | tracrRNA | sgRNA | (single | guide) |
| | SEQ ID | guide) | SEQ ID | SEQ ID | SEQ ID | guide) | PAM SEQ |
| Enzyme | NO | PAM | NO: | NO: | NO: | PAM | ID NO: |
| MG18-1 | 1354 | nRWART | 5537 | 5508 | 5472 | nnnRRT | 5523 |

### Targeted Endonuclease Activity in Mammalian Cells

[0483] MG18-1 target loci were chosen to test locations in the genome with the PAM nRWART (SEQ ID NO: 5537). The spacers corresponding to the chosen target sites were cloned into the sgRNA scaffold in the mammalian vector system backbone 1 described in Example 10b. The sites are in Table 12a below. The activity of MG18-1 at various target sites is shown in Table 12a and FIG. 44.

TABLE 12a
Activity of MG18-1 at various target sites

| | | | | %NHEJ |
|---|---|---|---|---|
| target ID | target sequence | PAM | locus | (mean ± std) |
| target2 | tgcttattatggacaagtagca | agaaat | Fibrinogen | 9.00 ± 3.70 |
| target4 | tccctgaagatgctcacagttt | gatagt | IVS40 | 1.99 ± 2.56 |
| target5 | ttttatttctcctgcatatgat | gatagt | IVS40 | 6.30 ± 4.82 |
| target8 | tgtggggcaaggtgaacgtgga | tgaagt | HBB | 14.90 ± 2.73 |
| target9 | atggtgcatctgactcctgagg | agaagt | HBB | 0.39 ± 0.32 |
| target10 | agaacagcccagaagttggacg | aaaagt | VEGFA | 4.3 ± 1.29 |
| target11 | tcctccgaagcgagaacagccc | agaagt | VEGFA | 15.22 ± 2.40 |

### Example 18.—Characterization of MG21 Family Members

[0484] PAM Specificity, tracrRNA sgRNA Validation

[0485] The targeted endonuclease activity of MG21 family was confirmed using the myTXTL system as described in Example 6. In this assay, PCR amplification of cleaved target plasmids yields a product that migrates at approximately 170 bp in the gel, as shown in FIGS. 17-20. Amplification products were observed for MG21-1 (see gel 11 lane 2) (SEQ ID NO: 1512). Sequencing the PCR products revealed active PAM sequence specificities detailed in Table 13 below.

TABLE 13

| | Enzyme | sgRNA | Synthetic | Synthetic |
|---|---|---|---|---|
| | protein | SEQ ID | (single guide) | (single guide) |
| Enzyme | SEQ ID NO | NO: | PAM | PAM SEQ ID NO: |
| MG21-1 | 1512 | 5473 | nnRnR | 5524 |

### Example 19.—Characterization of MG22 Family Members

[0486] PAM Specificity, tracrRNA sgRNA Validation

[0487] The targeted endonuclease activity of MG22 family members was confirmed using the myTXTL system as described in Example 6. In this assay, PCR amplification of cleaved target plasmids yields a product that migrates at approximately 170 bp in the gel, as shown in FIGS. 17-20. In the assay shown FIGS. 17-20, active proteins that successfully cleave the library result in a band around 170 bp in the gel. Amplification products were observed for MG22-1 (see gel 11 lane 3) (protein SEQ ID NO: 1656). Sequencing the PCR products revealed active PAM sequence specificities detailed in Table 14 below.

TABLE 14

| | | | | | | | Synthetic |
|---|---|---|---|---|---|---|---|
| | Enzyme | Native | | | | Synthetic | (single |
| | protein | (dual | PAM | tracrRNA | sgRNA | (single | guide) |
| | SEQ ID | guide) | SEQ ID | SEQ ID | SEQ ID | guide) | PAM SEQ |
| Enzyme | NO | PAM | NO: | NO: | NO: | PAM | ID NO: |
| MG22-1 | 1656 | N/A | N/A | 5510 | 5474 | nnRCnT | 5525 |

### Example 20.—Characterization of MG23 Family Members

[0488] PAM Specificity, tracrRNA sgRNA Validation

[0489] The targeted endonuclease activity of MG23 family members was confirmed using the myTXTL system as described in Example 6. In this assay, PCR amplification of cleaved target plasmids yields a product that migrates at approximately 170 bp in the gel, as shown in FIGS. 17-20. Amplification products were observed for MG23-1 (see gel 11 lane 4) (SEQ ID NO: 1756). Sequencing the PCR products revealed active PAM sequences specificities for these enzymes detailed Table 15 below.

TABLE 15

| | Enzyme | | | Synthetic | Synthetic |
|---|---|---|---|---|---|
| | protein | tracrRNA | sgRNA | (single | (single guide) |
| | SEQ ID | SEQ ID | SEQ ID | guide) | PAM SEQ |
| Enzyme | NO | NO: | NO: | PAM | ID NO: |
| MG23-1 | 1756 | 5511 | 5475 | nRRA | 5526 |

### Example 21.—Mammalian Activity of MG21-MG23 Family Members

[0490] To show targeting and cleavage activity in mammalian cells, the protein sequences were cloned into a mammalian expression vector with flanking N and C-terminal SV40 NLS sequences, a C-terminal His tag, and a 2A-GFP tag at the C terminus after the His tag (backbone 1) or an expression vector with flanking NLS sequences and C-terminal His tag but no 2A GFP tag (backbone 2). The DNA sequence for the protein can be the native sequence, the E. coli codon optimized sequence, or the mammalian codon optimized sequence. The single guide RNA sequence with a gene target of interest is also cloned into a mammalian expression vector. The two plasmids are cotransfected into HEK293T cells. 72 hr after co-transfection of the expression plasmid and a sgRNA targeting plasmid into HEK293T cells, the DNA is extracted and used for the preparation of an NGS-library. Percent NHEJ is measured via indels in the sequencing of the target site to demonstrate the targeting efficiency of the enzyme in mammalian cells. 7-12 different target sites were chosen for testing each protein's activity. An arbitrary threshold of 5% indels is used to identify active candidates.

[0491] MG21-1 target loci were chosen to test locations with the PAM nnRnR. The spacers corresponding to the chosen target sites were cloned into the sgRNA scaffold in the mammalian vector system backbone 2 described above. The sites are listed below in Table 16.

TABLE 16
MG21 target loci and target efficiency demonstrated in mammalian cells

| | | | | %NHEJ |
|---|---|---|---|---|
| target ID | target sequence | PAM | locus | (mean # std) |
| 1 | TCCCTCTTTAGCCAGAGCCGGG | GTGTG | VEGFA T22 | 25.5 ± 9.5 |
| | (SEQ ID NO: 5897) | (SEQ ID NO: | | |
| | | 5907) | | |
| 2 | CCAAAGCCCATTCCCTCTTTAG | CCAGA | VEGFA T22 | 0.79 ± 0.04 |
| | (SEQ ID NO: 5898) | (SEQ ID NO: | | |
| | | 5908) | | |
| 3 | ACGGCAGTCACTAGGGGGCGCT | CTGCA | VEGFA T22 | 2.30 ± 0.28 |
| | (SEQ ID NO: 5899) | (SEQ ID NO: | | |
| | | 5909) | | |
| 4 | GGGGGCGCTCGGCCACCACAGG | TAGTG | VEGFA T22 | 0.69 ± 0.54 |
| | (SEQ ID NO: 5900) | (SEQ ID NO: | | |
| | | 5910) | | |
| 5 | ACAACTGTGTTCACTAGCAACC | TCAAA | HBB-R01 | 0.07 ± 0.11 |
| | (SEQ ID NO: 5901) | (SEQ ID NO: | | |
| | | 5911) | | |
| 6 | GACACCATGGTGCATCTGACTC | CTGAG | HBB-R01 | 0.0 ± 0.03 |
| | (SEQ ID NO: 5902) | (SEQ ID NO: | | |
| | | 5912) | | |
| 7 | TCACTAGCAACCTCAAACAGAC | ACACA (SEQ ID | HBB-R01 | 0.04 ± 0.16 |
| | (SEQ ID NO: 5903) | NO: 5913) | | |
| 8 | GTATCAAGGTTACAAGACAGGT | TTAAG (SEQ ID | HBB-R01 | 0. ± 0.028 |
| | (SEQ ID NO: 5904) | NO: 5914) | | |
| 9 | GCTGGAGCAGTACTCTAGTAAC | CTGGA (SEQ ID | Gucy-2D_new | 0.0 ± 0.24 |
| | (SEQ ID NO: 5905) | NO: 5915) | | |
| 10 | AAGCAGAAGACAGACCGGCTGC | TTACA (SEQ ID | Gucy-2D_new | 0.0 ± 0.21 |
| | (SEQ ID NO: 5906) | NO: 5916) | | |

[0492] MG22-1 target loci were chosen to test locations with the PAM nnRCnT. The spacers corresponding to the chosen target sites were cloned into the sgRNA scaffold in the mammalian vector system backbone 2 described above. The sites are listed below in Table 17.

TABLE 17
MG22 target loci and target efficiency demonstrated in mammalian cells

| | | | | %NHEJ |
|---|---|---|---|---|
| target ID | target sequence | PAM | locus | (mean ± std) |
| 1 | GAAATAGGGGGTCCAGGAGCAA | TGACCT | VEGFA-T22 | -0.3 ± 0.47 |
| | (SEQ ID NO: 5917) | (SEQ ID NO: | | |
| | | 5926) | | |
| 2 | ATTCCCTCTTTAGCCAGAGCCG | GGGCTT | VEGFA-T22 | 0.105 ± 0.007 |
| | (SEQ ID NO: 5918) | (SEQ ID NO: | | |
| | | 5927) | | |
| 3 | GAAGCTGGGTGAATGGAGCGAG | CAGCGT | VEGFA-T22 | 32.6 ± 26.7 |
| | (SEQ ID NO: 5919) | (SEQ ID NO: | | |
| | | 5928) | | |
| 4 | CTGACACAACTGTGTTCACTAG | CAACCT | HBB-R01 | 5.59 ± 2.03 |
| | (SEQ ID NO: 5920) | (SEQ ID NO: | | |
| | | 5929) | | |
| 6 | GTATCAAGGTTACAAGACAGGT | CAACCT | HBB-R01 | 0.65 ± 1.65 |
| | SEQ ID NO: 5921) | (SEQ ID NO: | | |
| | | 5930) | | |
| 7 | GCCGTTACTGCCCTGTGGGGCA | AGACTT | HBB-R01 | -0.13 ± 0.11 |
| | (SEQ ID NO: 5922) | (SEQ ID NO: | | |
| | | 5931) | | |
| 8 | GGCAGAGGGTGCATCACCTGGA | CTACAT | Apolipoprotein- | 42.66 |
| | (SEQ ID NO: 5923) | (SEQ ID NO: | T524 | |
| | | 5932) | | |
| 9 | GAATCTGCTATTTGAGCAAGGC | AAACAT | Apolipoprotein- | 0.68 |
| | (SEQ ID NO: 5924) | (SEQ ID NO: | T524 | |
| | | 5933) | | |
| 10 | ACTACCAAGCATCGGGCAGAGG | GTGCAT | Apolipoprotein- | 21.59 ± 19.13 |
| | (SEQ ID NO: 5925) | (SEQ ID NO: | T524 | |
| | | 5934) | | |

[0493] MG23-1 target loci were chosen to test locations with the PAM nRRA. The spacers corresponding to the chosen target sites were cloned into the sgRNA scaffold in the mammalian vector system backbone 2 described above. The sites are listed below in Table 18.

TABLE 18
MG23 target loci and target efficiency demonstrated in mammalian cells

| | | | | %NHEJ |
|---|---|---|---|---|
| target ID | target sequence | PAM | locus | (mean ± std) |
| 1 | GGAGGTCAGAAATAGGGGGTCC | AGGA | VEGFA-T22 | 0.605 ± 0.078 |
| | (SEQ ID NO: 5935) | (SEQ ID NO: | | |
| | | 5942) | | |
| 2 | CAAAGCCCATTCCCTCTTTAGC | CAGA | VEGFA-T22 | 19.1 ± 8.5 |
| | (SEQ ID NO: 5936) | (SEQ ID | | |
| | | NO: | | |
| | | 5943) | | |
| 3 | CGGCCACCACAGGGAAGCTGGG | TGAA (SEQ ID | VEGFA-T22 | 8.3 ± 5.4 |
| | (SEQ ID NO: 5937) | NO: 5944) | | |
| 5 | TGTGTTCACTAGCAACCTCAAA | CAGA (SEQ ID | HBB-R01 | 0.37 ± 0.82 |
| | (SEQ ID NO: 5938) | NO: 5945) | | |
| 7 | CCGTTACTGCCCTGTGGGGCAA | CAGA (SEQ ID | HBB-R01 | 0.24 ± 0.52 |
| | (SEQ ID NO: 5939) | NO: 5946) | | |
| 8 | AAGGAAACTGGAACACAAAGCA | TAGA (SEQ ID | HEKsite2 | 21.64 ± 11.14 |
| | (SEQ ID NO: 5940) | NO: 5947) | | |
| 9 | TCCAGCCCGCTGGCCCTGTAAA (SEQ | GGAA (SEQ ID | HEKsite2 | 34.1 ± 17.6 |
| | ID NO: 5941) | NO: 5948) | | |

### Example 22.—T Cell Editing Using Systems Described Herein

[0494] Having established that various MG systems function in mammalian cells, we sought to test their usefulness for editing human T cell genomes. Seeking to first use MG3-6 (protein sequence SEQ ID NO:421) and MG3-8 (protein sequence SEQ ID NO: 423) for this purpose, we determined that based on guide activity in human cells, the MG3-6 consensus PAM sequence was 5′-NNRGRYY-3′ (SEQ TD NO: 5949). The PAM for MG3-8 was previously determined as 5′-NNRGGTT-3′ (SEQ ID NO: 5534).

### TRAC Locus Targeting

[0495] To generate edited cells, appropriate spacer sequences targeting the TRAC locus in T-cells were designed for both MG3-6 (e.g. spacers represented in SEQ TD NOs: 5950-5958, referred to in experiments as MG3-6 guides 1-9) and MG3-8 (e.g. spacers represented in SEQ ID NOs: 5959-5965, referred to in experiments as “MG3-8 guide 1-7”). Spacer sequences were used in the background of the SEQ ID NO: 5466 sgRNA for MG3-6 and the SEQ TD NO: 6304 sgRNA for MG3-8 (which is listed below).

| SEQ | |
|---|---|
| ID NO: | Nucleotide sequence (RNA) |
| 6304 | (N22)GUUGAGAAUCUUUCGAAAG |
| | AAAGAUUCUUAAUAAGGCAUCCUU |
| | CCGAUGCUGACUUCUCACCGUCCG |
| | GCUCCUCUUAGGAACGGGCGGUAU |
| | GUUUU |

* where (N22) denotes 22 N bases

[0496] We first sought to determine the optimal length of spacer used to target the TRAC gene compatible with each endonuclease. For MG3-6, we nucleofected sgRNAs with a subset of the spacers above (SEQ ID NOs:5953-5957, referred to as “MG3-6 guide 4-8” in experiments) having lengths ranging from 22-16 nucleotides truncating from the 5′ PAM-distal end when the sequence was to be shortened. These spacer-bearing guide RNAs were nucleofected into 200K primary T cells (that had previously been expanded with CD2/3/28 beads) per condition using a Lonza 4D electroporator and solution P3, delivering 26 or 52 or 104 pmol of MG3-6 protein with 32 or 64 or 128 pmol of guide RNAs, respectively. Genomic DNA from the T cells were harvested after 3 days and analyzed by NGS. The data are presented in FIG. 56, which shows the effect of truncating MG3-6 guides 4-8 from 22-16 nucleotides, demonstrating that lengths from 19-22 nucleotides showed superior performance to shorter spacers for MG3-6.

[0497] To perform the same spacer-length optimizing experiment with MG3-8, we nucleofected sgRNAs with a subset of the spacers above (SEQ ID NOs: 5960-5961 and 5963-5964, referred to as MG3-8 guides 2, 3, 5, and 8 in experiments) having lengths ranging from 22-16 nucleotides truncating from the 5′ PAM-distal end when the sequence was to be shortened. These spacer-bearing guide RNAs were nucleofected into 200K primary T cells (that had previously been expanded with CD2/3/28 beads) per condition) using a Lonza 4D electroporator and solution P3, delivering 104 pmol of MG3-8 protein and 120 pmol of guide RNAs. Genomic DNA from the T cells was harvested after 3 days and analyzed by NGS. The data are presented in FIG. 57, which shows the effect of truncating MG3-8 guides 2, 3, 5, and 8 from 22-16 nucleotides, demonstrating that lengths from 19-22 nucleotides showed superior performance to shorter spacers for MG3-8.

[0498] Having identified spacer sequences that appeared to target TRAC, we tested the ability of these spacers to induce indels in the TRAC gene and disrupt TRAC expression in cells. We nucleofected the best-performing 22-nucleotide-spacer-bearing sgRNAs (MG3-6 guide 6, SEQ ID NO: 5955; and MG3-8 guide 5, SEQ ID NO: 5963) into primary T cells as above using 104 pmol of MG3-6 protein and 128 pmol of guide RNAs. Genomic DNA was harvested after 3 days of recovery and analyzed by NGS for appearance of indels or by flow-cytometry using an anti-TCR-alpha chain Ab. The NGS indel analysis is shown in FIG. 58, which demonstrates that both the MG3-6 and MG3-8 sgRNA/enzyme combinations generate approximately 90% or greater frequency of indels in the TRAC gene. The flow cytometry analysis is shown in in FIG. 59, which demonstrates that the MG3-6 sgRNA/enzyme combination generates approximately 95% TCR negative cells.

[0499] Having observed that the MG3-6/guide 6 combination effectively generated TRAC knockout by flow cytometry, we tested whether the addition of transfection enhancer or higher guide concentrations could improve efficiency of knockout for the lower-performing MG3-6 TRAC spacer-bearing guides. Accordingly we transfected T cells as above, delivering 52 pmol of MG3-6 protein and 60 pmol guide RNA and 1 μL IDT transfection enhancer (if utilized) or 120 pmol guide RNA or 180 pmol guide RNA for each of MG3-6 guides 4 through 6 (spacer sequences SEQ ID NOs: 5953-5955 and were 22 nucleotides in length), and assaying by flow cytometry again using an anti-TCR-alpha chain Ab. The results are shown in FIG. 60, which demonstrates that for guides 4 and 5, efficiency of TRAC knockout could be increased to ˜87% or ˜71% respectively by increasing the guide concentration.

### TRBC Locus Targeting

[0500] Having demonstrated TRAC locus targeting in T cells above, we next designed and screened reagents for targeting the TRBC locus. Accordingly, we again designed corresponding spacers for MG3-6 and MG3-8 as above (see Table 19 for MG3-6 and Table 20 for MG3-8), only directing them against sequences in the TRBC locus. As TRBC has two splice variants (TRBC1 and TRBC2), we designed spacers to target each. We nucleofected each 22-nt spacer bearing guide RNA into T cells alongside the enzyme as described above, and assessed the expression of T cell receptor using anti-TCR Ab. The TCR for each spacer-bearing guide are shown in Tables 19 and 20 below, alongside the % viability of the T cells at the time of flow cytometry. Tables 19 and 20 show that several spacers (5, 6, 18, and 19 for MG3-6, and 2, 6, 7, and 8 for MG3-8) are moderately to highly effective in inducing TCR knockout in T cells.

TABLE 19
MG3-6 TRBC guide screen

| System | | TRBC | % | % |
|---|---|---|---|---|
| No. | Spacer sequence | (1 or 2) | Viability | TCR- |
| MG3-6 | ACCAGCTCAGCTCCACGTGG | 2 | 86.86 | 7.8 |
| TRBC | (SEQ ID NO: 5966) | | | |
| guide 1 | | | | |
| MG3-6 | ACCTGCAGAAGAGAAAGTTT | 1 | 73.98 | 3.12 |
| TRBC | (SEQ ID NO: 5967) | | | |
| guide 2 | | | | |
| MG3-6 | AGGTCAAGAGAAAGGATTCC | 2 | 64.35 | 4.51 |
| TRBC | (SEQ ID NO: 5968) | | | |
| guide 3 | | | | |
| MG3-6 | AGGTCCTCTGGAAAGGGAAG | 1 | 75.39 | 10.89 |
| TRBC | (SEQ ID NO: 5969) | | | |
| guide 4 | | | | |
| MG3-6 | AGTATCTGGAGTCATTGAGG | 1 | 84.75 | 25.66 |
| TRBC | (SEQ ID NO: 5970) | | | |
| guide 5 | | | | |
| MG3-6 | AGTATCTGGAGTCATTGAGG | 2 | 82.68 | 28.72 |
| TRBC | (SEQ ID NO: 5971) | | | |
| guide 6 | | | | |
| MG3-6 | ATACAGGGTGGCCTTCCCTA | 1 | 83.9 | 4.2 |
| TRBC | (SEQ ID NO: 5972) | | | |
| guide 7 | | | | |
| MG3-6 | ATACTGCCTGAGCAGCCGCC | 1 | 83.91 | 3.37 |
| TRBC | (SEQ ID NO: 5973) | | | |
| guide 8 | | | | |
| MG3-6 | ATACTGCCTGAGCAGCCGCC | 2 | 82.22 | 14.21 |
| TRBC | (SEQ ID NO: 5974) | | | |
| guide 9 | | | | |
| MG3-6 | CAGATCGTCAGCGCCGAGGC | 1 | 84.52 | 11.18 |
| TRBC | (SEQ ID NO: 5975) | | | |
| guide 10 | | | | |
| MG3-6 | CAGATCGTCAGCGCCGAGGC | 2 | 85.73 | 10.38 |
| TRBC | (SEQ ID NO: 5976) | | | |
| guide 11 | | | | |
| MG3-6 | CAGGTCCTCTGGAAAGGGAA | 1 | 81.67 | 3.39 |
| TRBC | (SEQ ID NO: 5977) | | | |
| guide 12 | | | | |
| MG3-6 | CCACACTGGTGTGCCTGGCC | 1 | 86.46 | 9.13 |
| TRBC | (SEQ ID NO: 5978) | | | |
| guide 13 | | | | |
| MG3-6 | CCACACTGGTGTGCCTGGCC | 2 | 80.45 | 5.11 |
| TRBC | (SEQ ID NO: 5979) | | | |
| guide 14 | | | | |
| MG3-6 | CCGCTGTCAAGTCCAGTTCT | 1 | 83.96 | 3.89 |
| TRBC | (SEQ ID NO: 5980) | | | |
| guide 15 | | | | |
| MG3-6 | CCGCTGTCAAGTCCAGTTCT | 2 | 79.26 | 5.13 |
| TRBC | (SEQ ID NO: 5981) | | | |
| guide 16 | | | | |
| MG3-6 | CCTGCAGAAGAGAAAGTTTT | 1 | 81.71 | 4.79 |
| TRBC | (SEQ ID NO: 5982) | | | |
| guide 17 | | | | |
| MG3-6 | CGGCGCTGACGATCTGGGTG | 1 | 83.62 | 88.51 |
| TRBC | (SEQ ID NO: 5983) | | | |
| guide 18 | | | | |
| MG3-6 | CGGCGCTGACGATCTGGGTG | 2 | 86.75 | 89.05 |
| TRBC | (SEQ ID NO: 5984) | | | |
| guide 19 | | | | |
| MG3-6 | CTGTGGAAGAGAGAACATTT | 2 | 77.22 | 4.04 |
| TRBC | (SEQ ID NO: 5985) | | | |
| guide 20 | | | | |
| MG3-6 | CTTCCCTAGCAAGATCTCAT | 2 | 0 | 0 |
| TRBC | (SEQ ID NO: 5986) | | | |
| guide 21 | | | | |
| MG3-6 | CTTCCCTAGCAGGATCTCAT | 1 | 85.64 | 3.42 |
| TRBC | (SEQ ID NO: 5987) | | | |
| guide 22 | | | | |
| MG3-6 | CTTGACAGCGGAAGTGGTTG | 1 | 77.99 | 4.49 |
| TRBC | (SEQ ID NO: 5988) | | | |
| guide 23 | | | | |
| MG3-6 | CTTGACAGCGGAAGTGGTTG | 2 | 83.42 | 4.86 |
| TRBC | (SEQ ID NO: 5989) | | | |
| guide 24 | | | | |
| MG3-6 | GAATGGGAAGGAGGTGCACA | 1 | 81.42 | 8.25 |
| TRBC | (SEQ ID NO: 5990) | | | |
| guide 25 | | | | |
| MG3-6 | GAATGGGAAGGAGGTGCACA | 2 | 56.57 | 4.22 |
| TRBC | (SEQ ID NO: 5991) | | | |
| guide 26 | | | | |
| MG3-6 | GCCAACAGTGTCCTACCAGC | 1 | 83.36 | 3.51 |
| TRBC | (SEQ ID NO: 5992) | | | |
| guide 27 | | | | |
| MG3-6 | GCTGATGGCCATGGTAAGGA | 2 | 0 | 0 |
| TRBC | (SEQ ID NO: 5993) | | | |
| guide 28 | | | | |
| MG3-6 | GGCGCTGACCAGCACAGCAT | 1 | 71.58 | 3.89 |
| TRBC | (SEQ ID NO: 5994) | | | |
| guide 29 | | | | |
| MG3-6 | GTCAACAGAGTCTTACCAGC | 2 | 72.87 | 6.24 |
| TRBC | (SEQ ID NO: 5995) | | | |
| guide 30 | | | | |
| MG3-6 | TCGGAGAATGACGAGTGGAC | 1 | 84.3 | 8.5 |
| TRBC | (SEQ ID NO: 5996) | | | |
| guide 31 | | | | |
| MG3-6 | TCGGAGAATGACGAGTGGAC | 2 | 84.37 | 8.92 |
| TRBC | (SEQ ID NO: 5997) | | | |
| guide 32 | | | | |
| MG3-6 | TCTCTTCCACAGGTCAAGAG | 2 | 72.63 | 4.46 |
| TRBC | (SEQ ID NO: 5998) | | | |
| guide 33 | | | | |
| MG3-6 | TCTCTTCTGCAGGTCAAGAG | 1 | 81.88 | 3.55 |
| TRBC | (SEQ ID NO: 5999) | | | |
| guide 34 | | | | |
| MG3-6 | TGAGGGCGGGCTGCTCCTTG | 1 | 50.37 | 4.52 |
| TRBC | (SEQ ID NO: 6000) | | | |
| guide 35 | | | | |
| MG3-6 | TGAGGGCGGGCTGCTCCTTG | 2 | 78.44 | 5.76 |
| TRBC | (SEQ ID NO: 6001) | | | |
| guide 36 | | | | |
| MG3-6 | TGTGGAAGAGAGAACATTTT | 2 | 75.46 | 8.69 |
| TRBC | (SEQ ID NO: 6002) | | | |
| guide 37 | | | | |
| MG3-6 | TTGACAGCGGAAGTGGTTGC | 1 | 80.06 | 4.62 |
| TRBC | (SEQ ID NO: 6003) | | | |
| guide 38 | | | | |
| MG3-6 | TTGACAGCGGAAGTGGTTGC | 2 | 81.85 | 4.44 |
| TRBC | (SEQ ID NO: 6004) | | | |
| guide 39 | | | | |

TABLE 20
MG3-8 TRBC guide screen

| | | TRBC | % | % |
|---|---|---|---|---|
| System | Spacer sequence | (1 or 2) | Viability | TCR- |
| MG3-8 | AATGGGAAGGAGGTGCACAG | 1 | 83.9 | 3.74 |
| TRBC | (SEQ ID NO: 6005) | | | |
| Guide 1 | | | | |
| MG3-8 | AATGGGAAGGAGGTGCACAG | 2 | 82.55 | 40.52 |
| TRBC | (SEQ ID NO: 6006) | | | |
| Guide 2 | | | | |
| MG3-8 | AGGTCCTCTGGAAAGGGAAG | 1 | 89.35 | 3.95 |
| TRBC | (SEQ ID NO: 6007) | | | |
| Guide 3 | | | | |
| MG3-8 | CCAACAGTGTCCTACCAGCA | 1 | 82.02 | 6.91 |
| TRBC | (SEQ ID NO: 6008) | | | |
| Guide 4 | | | | |
| MG3-8 | CCTGCAGAAGAGAAAGTTTT | 1 | 81.37 | 5.34 |
| TRBC | (SEQ ID NO: 6009) | | | |
| Guide 5 | | | | |
| MG3-8 | CGGCGCTGACGATCTGGGTG | 1 | 84.53 | 75.35 |
| TRBC | (SEQ ID NO: 6010) | | | |
| Guide 6 | | | | |
| MG3-8 | CGGCGCTGACGATCTGGGTG | 2 | 85.77 | 87.58 |
| TRBC | (SEQ ID NO: 6011) | | | |
| Guide 7 | | | | |
| MG3-8 | CTCGGGTGGGAACACCTTGT | 1 | 85.95 | 48.69 |
| TRBC | (SEQ ID NO: 6012) | | | |
| Guide 8 | | | | |
| MG3-8 | CTGAAAAACGTGTTCCCACC | 2 | 85.32 | 4.18 |
| TRBC | (SEQ ID NO: 6013) | | | |
| Guide 9 | | | | |
| MG3-8 | CTGAACAAGGTGTTCCCACC | 1 | 86.84 | 3.9 |
| TRBC | (SEQ ID NO: 6014) | | | |
| Guide 10 | | | | |
| MG3-8 | CTTGGGTGGGAACACGTTTT (SEQ | 2 | 82.04 | 4.63 |
| TRBC | ID NO: 6015) | | | |
| Guide 11 | | | | |
| MG3-8 | GGGCTGCTCCTTGAGGGGCT | 1 | 82.64 | 7.12 |
| TRBC | (SEQ ID NO: 6016) | | | |
| Guide 12 | | | | |
| MG3-8 | GGGCTGCTCCTTGAGGGGCT | 2 | 80.1 | 3.38 |
| TRBC | (SEQ ID NO: 6017) | | | |
| Guide 13 | | | | |
| MG3-8 | GTGACAGGTTTGGCCCTATC (SEQ | 2 | 82.46 | 3.65 |
| TRBC | ID NO: 6018) | | | |
| Guide 14 | | | | |
| MG3-8 | GTGACGGGTTTGGCCCTATC (SEQ | 1 | 85.63 | 3.7 |
| TRBC | ID NO: 6019) | | | |
| Guide 15 | | | | |
| MG3-8 | TACTGCCTGAGCAGCCGCCT (SEQ | 1 | 83.6 | 4.24 |
| TRBC | ID NO: 6020) | | | |
| Guide 16 | | | | |
| MG3-8 | TACTGCCTGAGCAGCCGCCT (SEQ | 2 | 82.5 | 10.84 |
| TRBC | ID NO: 6021) | | | |
| Guide 17 | | | | |
| MG3-8 | TCAACAGAGTCTTACCAGCA | 2 | 82.09 | 6.91 |
| TRBC | (SEQ ID NO: 6022) | | | |
| Guide 18 | | | | |
| MG3-8 | TGTGGAAGAGAGAACATTTT | 2 | 82.55 | 6.95 |
| TRBC | (SEQ ID NO: 6023) | | | |
| Guide 19 | | | | |
| MG3-8 | TTGACAGCGGAAGTGGTTGC | 1 | 74.67 | 4.26 |
| TRBC | (SEQ ID NO: 6024) | | | |
| Guide 20 | | | | |
| MG3-8 | TTGACAGCGGAAGTGGTTGC | 2 | 70.69 | 3.83 |
| TRBC | (SEQ ID NO: 6025) | | | |
| Guide 21 | | | | |

### TCR Ablation Alongside CAR-T Expression

[0501] Having demonstrated that we could effectively knock out TCR expression in T-cells using our endonuclease/guide combinations, we next asked if we could generate allogeneic CAR-T cells by knocking out TCR and expression a heterologous CAR (chimeric antigen receptor) in the same cells. The scheme we used for this experiment is depicted in FIG. 61, which shows the proposed targeting of the TCR locus followed by integration of a CAR at the same locus by homologous recombination.

[0502] Accordingly, we nucleofected T cells as described above using the high performing MG3-6 enzyme with TRAC-targeting MG3-6 guide 6, SEQ TD NO: 5955, only infecting the same T cells with AAV #3029 bearing a heterologous CAR sequence with TRAC homology arms at an MOI of 300K. After observing the transfected cells alongside controls using flow cytometry against the TCR receptor and the heterologous CAR antigen, we observed that the MG3-6 transfection condition could generate CAR+/TCR− cells at an approximate frequency of ˜60%.

### GR (Glucocorticoid Receptor) Locus Targeting

[0503] Having demonstrated that we could effectively knock out TCR expression in T-cells using our endonuclease/guide combinations, we next asked if we could target the GR (Glucocorticoid receptor) locus to modulate other characteristics of T cells (e.g. response to glucocorticoids). We again designed appropriate spacers for MG3-6 and MG3-8, but this time targeted against sequences in the GR locus (see Table 21 below and Table 22 below).

[0504] For the MG3-6 targeting sequences (Table 21), sequences 1-40 were designed to target GR exon 2, sequences 41-45 were designed to target GR exon 3, sequence 46 was designed to target GR exon 4, sequences 47-54 were designed to target GR exon 5, sequences 55-58 were designed to target GR exon 6, sequences 59-61 were designed to target GR exon 7, and sequences 62-65 were designed to target GR exon 8. Sequences were screened by nucleofection into primary T cells above using 126 pmol MG3-6 protein and 160 pmol guide, analyzing as before by NGS. The results of screening are depicted in FIG. 63, which depicts % indels generated by the numbered guides in Table 21. The results indicated that several spacer sequences (2, 3, 4, 13, 18, 24, 51, 55, 56, and 61 in Table 21 below) were moderately effective at generating indels in the GR gene using MG3-6.

TABLE 21
MG3-6 GR guides

| Number | System | Name | DNA sequence of spacer |
|---|---|---|---|
| 1 | MG3-6 | A1 | CTCAGGAGAGGGGAGATGTG |
| | | | (SEQ ID NO: 6026) |
| 2 | MG3-6 | B1 | CTCCTGAGCAAGCACACTGC |
| | | | (SEQ ID NO: 6027) |
| 3 | MG3-6 | C1 | CTAAGAGGAGGAGCTACTGT |
| | | | (SEQ ID NO: 6028) |
| 4 | MG3-6 | D1 | TTCACAGTAGCTCCTCCTCT |
| | | | (SEQ ID NO: 6029) |
| 5 | MG3-6 | E1 | CACTGGCTGTCGCTTCTCAA |
| | | | (SEQ ID NO: 6030) |
| 6 | MG3-6 | F1 | TCAATCAGACTCCAAGCAGC |
| | | | (SEQ ID NO: 6031) |
| 7 | MG3-6 | G1 | GACTTTTGGTTGATTTTCCA |
| | | | (SEQ ID NO: 6032) |
| 8 | MG3-6 | H1 | CAGTAAGCAATGCGCAGCAG |
| | | | (SEQ ID NO: 6033) |
| 9 | MG3-6 | A2 | CAAAGCAGTTTCACTCTCAA |
| | | | (SEQ ID NO: 6034) |
| 10 | MG3-6 | B2 | TGAGAGTGAAACTGCTTTGG |
| | | | (SEQ ID NO: 6035) |
| 11 | MG3-6 | C2 | AAAAGTGATGGGAAATGACC |
| | | | (SEQ ID NO: 6036) |
| 12 | MG3-6 | D2 | ATGACCTGGGATTCCCACAG |
| | | | (SEQ ID NO: 6037) |
| 13 | MG3-6 | E2 | TTGGCCCTGCTGTGGGAATC |
| | | | (SEQ ID NO: 6038) |
| 14 | MG3-6 | F2 | TCAGCCTTTCCTCGGGGGAA |
| | | | (SEQ ID NO: 6039) |
| 15 | MG3-6 | G2 | TAAGTCTGTTTCCCCCGAGG |
| | | | (SEQ ID NO: 6040) |
| 16 | MG3-6 | H2 | AGAAAGCATTGCAAACCTCA |
| | | | (SEQ ID NO: 6041) |
| 17 | MG3-6 | A3 | TGGAACACTGGTCGACCTAT |
| | | | (SEQ ID NO: 6042) |
| 18 | MG3-6 | B3 | AGCAGTGGATGCTGAACTCT |
| | | | (SEQ ID NO: 6043) |
| 19 | MG3-6 | C3 | CTTCAGAACAGCAACATTTG |
| | | | (SEQ ID NO: 6044) |
| 20 | MG3-6 | D3 | GAACAGCAACATTTGAAGGG |
| | | | (SEQ ID NO: 6045) |
| 21 | MG3-6 | E3 | GCAATGTGAAATTGTATACC |
| | | | (SEQ ID NO: 6046) |
| 22 | MG3-6 | F3 | AAAGCACCTTTGACATTTTG |
| | | | (SEQ ID NO: 6047) |
| 23 | MG3-6 | G3 | GCAGGATTTGGAGTTTTCTT |
| | | | (SEQ ID NO: 6048) |
| 24 | MG3-6 | H3 | AGAGACGAATGAGAGTCCTT |
| | | | (SEQ ID NO: 6049) |
| 25 | MG3-6 | A4 | TCTCATTCGTCTCTTTACCT |
| | | | (SEQ ID NO: 6050) |
| 26 | MG3-6 | B4 | TATCAACAGGTCTGATCTCC |
| | | | (SEQ ID NO: 6051) |
| 27 | MG3-6 | C4 | CAAACAGTTTTCATCTATCA |
| | | | (SEQ ID NO: 6052) |
| 28 | MG3-6 | D4 | TTTTGGAAGGAAACTCGAAT |
| | | | (SEQ ID NO: 6053) |
| 29 | MG3-6 | E4 | AACCCAAAATTAAGGATAAT |
| | | | (SEQ ID NO: 6054) |
| 30 | MG3-6 | F4 | GTTTAGTGTCCGGTAAAATG |
| | | | (SEQ ID NO: 6055) |
| 31 | MG3-6 | G4 | GATCTCCATTATCCTTAATT |
| | | | (SEQ ID NO: 6056) |
| 32 | MG3-6 | H4 | ATTACTGGGGCTTGACAAAA |
| | | | (SEQ ID NO: 6057) |
| 33 | MG3-6 | A5 | CCCAAGTGAAAACAGAAAAA |
| | | | (SEQ ID NO: 6058) |
| 34 | MG3-6 | B5 | TTGGGGCAGTGTTACATTAC |
| | | | (SEQ ID NO: 6059) |
| 35 | MG3-6 | C5 | CAGCATCCCTTTCTCAACAG |
| | | | (SEQ ID NO: 6060) |
| 36 | MG3-6 | D5 | TTGGTGGAATGACATTAAAA |
| | | | (SEQ ID NO: 6061) |
| 37 | MG3-6 | E5 | CGAAAATTGGAATAGGTGCC |
| | | | (SEQ ID NO: 6062) |
| 38 | MG3-6 | F5 | GATGACAACTTGACTTCTCT |
| | | | (SEQ ID NO: 6063) |
| 39 | MG3-6 | G5 | GAGAAGTCAAGTTGTCATCT |
| | | | (SEQ ID NO: 6064) |
| 40 | MG3-6 | H5 | TTTCTAATGGCTATTCAAGG |
| | | | (SEQ ID NO: 6065) |
| 41 | MG3-6 | A6 | CCCCTTCTTTAGCCCCAGCA |
| | | | (SEQ ID NO: 6066) |
| 42 | MG3-6 | B6 | GCTTACATCTGGTCTCATGC |
| | | | (SEQ ID NO: 6067) |
| 43 | MG3-6 | C6 | CAGCTCCTCAACAGCAACAA |
| | | | (SEQ ID NO: 6068) |
| 44 | MG3-6 | D6 | ACTTTACAGCTTCCACAAGT |
| | | | (SEQ ID NO: 6069) |
| 45 | MG3-6 | E6 | TGCCGCTATCGAAAATGTCT |
| | | | (SEQ ID NO: 6070) |
| 46 | MG3-6 | F6 | TCAGATATTTATATTACCTT |
| | | | (SEQ ID NO: 6071) |
| 47 | MG3-6 | G6 | AAAAAAATAAAAGGAATTCA |
| | | | (SEQ ID NO: 6072) |
| 48 | MG3-6 | H6 | GGATTTTCAGAGGTTTCTTG |
| | | | (SEQ ID NO: 6073) |
| 49 | MG3-6 | A7 | GTTTTGTTACCAGGATTTTC |
| | | | (SEQ ID NO: 6074) |
| 50 | MG3-6 | B7 | AGGAACTATTGTTTTGTTAC |
| | | | (SEQ ID NO: 6075) |
| 51 | MG3-6 | C7 | CCTACCCTGGTGTCACTGTT |
| | | | (SEQ ID NO: 6076) |
| 52 | MG3-6 | D7 | CAGGATATGATAGCTCTGTT |
| | | | (SEQ ID NO: 6077) |
| 53 | MG3-6 | E7 | CATATCCTGCATATAACACT |
| | | | (SEQ ID NO: 6078) |
| 54 | MG3-6 | F7 | TCTGTTCCAGACTCAACTTG |
| | | | (SEQ ID NO: 6079) |
| 55 | MG3-6 | G7 | AACATCCAGGAGTACTGCAG |
| | | | (SEQ ID NO: 6080) |
| 56 | MG3-6 | H7 | TATGGCATTTGCTCTGGGGT |
| | | | (SEQ ID NO: 6081) |
| 57 | MG3-6 | A8 | CAGATCAGGAGCAAAACACA |
| | | | (SEQ ID NO: 6082) |
| 58 | MG3-6 | B8 | TACAACTTACTCATTAATAA |
| | | | (SEQ ID NO: 6083) |
| 59 | MG3-6 | C8 | GTATGTTTCCTCTGAGTTAC |
| | | | (SEQ ID NO: 6084) |
| 60 | MG3-6 | D8 | AAACCTTACTGCTTCTCTCT |
| | | | (SEQ ID NO: 6085) |
| 61 | MG3-6 | E8 | CAACCTGAAGAGAGAAGCAG |
| | | | (SEQ ID NO: 6086) |
| 62 | MG3-6 | F8 | CAGACCGTCCTTAGGAACTA |
| | | | (SEQ ID NO: 6087) |
| 63 | MG3-6 | G8 | ATCAAATAGCTCTTGGCTCT |
| | | | (SEQ ID NO: 6088) |
| 64 | MG3-6 | H8 | GCTTTTCCTAGCTCTTTGAT |
| | | | (SEQ ID NO: 6089) |
| 65 | MG3-6 | A9 | TTTATCAACTGACAAAACTC |
| | | | (SEQ ID NO: 6090) |

[0505] For the MG3-8 targeting sequences (Table 22), sequences 1-17 were designed to target GR exon 2, sequence 18 was designed to target GR exon 3, sequences 19-20 were designed to target GR exon 4, sequences 21-24 were designed to target GR exon 5, sequences 25-26 were designed to target GR exon 6, sequences 27-29 were designed to target GR exon 7, and sequences 30-31 were designed to target GR exon 8. Sequences were screened by nucleofection into primary T cells as above using 52 pmol MG3-8 protein and 60 pmol guide, analyzing as before by NGS. The results of screening are depicted in FIG. 64, which depicts 00 indels generated by the numbered guides in Table 22. The results indicated that some spacer sequences (2, 25, and 29 in Table 22 below) were moderately effective at generating indels in the GR gene using MG3-8.

TABLE 22
GR (NR3Cl) guide screen for MG3-8 guides

| Number | System | Name | DNA sequence of spacer |
|---|---|---|---|
| 1 | MG3-8 | B9 | CTCCTGAGCAAGCACACTGC |
| | | | (SEQ ID NO: 6091) |
| 2 | MG3-8 | C9 | CTAAGAGGAGGAGCTACTGT |
| | | | (SEQ ID NO: 6092) |
| 3 | MG3-8 | D9 | TTCACAGTAGCTCCTCCTCT |
| | | | (SEQ ID NO: 6093) |
| 4 | MG3-8 | E9 | GACTTTTGGTTGATTTTCCA |
| | | | (SEQ ID NO: 6094) |
| 5 | MG3-8 | F9 | ATGACCTGGGATTCCCACAG |
| | | | (SEQ ID NO: 6095) |
| 6 | MG3-8 | G9 | TTGGCCCTGCTGTGGGAATC |
| | | | (SEQ ID NO: 6096) |
| 7 | MG3-8 | H9 | TAAGTCTGTTTCCCCCGAGG |
| | | | (SEQ ID NO: 6097) |
| 8 | MG3-8 | A10 | AGAAAGCATTGCAAACCTCA |
| | | | (SEQ ID NO: 6098) |
| 9 | MG3-8 | B10 | TGGAACACTGGTCGACCTAT |
| | | | (SEQ ID NO: 6099) |
| 10 | MG3-8 | C10 | AGCAGTGGATGCTGAACTCT |
| | | | (SEQ ID NO: 6100) |
| 11 | MG3-8 | D10 | CTTCAGAACAGCAACATTTG |
| | | | (SEQ ID NO: 6101) |
| 12 | MG3-8 | E10 | GCAGGATTTGGAGTTTTCTT |
| | | | (SEQ ID NO: 6102) |
| 13 | MG3-8 | F10 | CAAACAGTTTTCATCTATCA |
| | | | (SEQ ID NO: 6103) |
| 14 | MG3-8 | G10 | GTTTAGTGTCCGGTAAAATG |
| | | | (SEQ ID NO: 6104) |
| 15 | MG3-8 | H10 | GATCTCCATTATCCTTAATT |
| | | | (SEQ ID NO: 6105) |
| 16 | MG3-8 | A11 | TTGGGGCAGTGTTACATTAC |
| | | | (SEQ ID NO: 6106) |
| 17 | MG3-8 | B11 | TTGGTGGAATGACATTAAAA |
| | | | (SEQ ID NO: 6107) |
| 18 | MG3-8 | C11 | GCTTACATCTGGTCTCATGC |
| | | | (SEQ ID NO: 6108) |
| 19 | MG3-8 | D11 | TGCCGCTATCGAAAATGTCT |
| | | | (SEQ ID NO: 6109) |
| 20 | MG3-8 | E11 | TCAGATATTTATATTACCTT |
| | | | (SEQ ID NO: 6110) |
| 21 | MG3-8 | F11 | AAAAAAATAAAAGGAATTCA |
| | | | (SEQ ID NO: 6111) |
| 22 | MG3-8 | G11 | GTTTTGTTACCAGGATTTTC |
| | | | (SEQ ID NO: 6112) |
| 23 | MG3-8 | H11 | CCTACCCTGGTGTCACTGTT |
| | | | (SEQ ID NO: 6113) |
| 24 | MG3-8 | A12 | CATATCCTGCATATAACACT |
| | | | (SEQ ID NO: 6114) |
| 25 | MG3-8 | B12 | AACATCCAGGAGTACTGCAG |
| | | | (SEQ ID NO: 6115) |
| 26 | MG3-8 | C12 | CAGATCAGGAGCAAAACACA |
| | | | (SEQ ID NO: 6116) |
| 27 | MG3-8 | D12 | GTATGTTTCCTCTGAGTTAC |
| | | | (SEQ ID NO: 6117) |
| 28 | MG3-8 | E12 | AAACCTTACTGCTTCTCTCT |
| | | | (SEQ ID NO: 6118) |
| 29 | MG3-8 | F12 | CAACCTGAAGAGAGAAGCAG |
| | | | (SEQ ID NO: 6119) |
| 30 | MG3-8 | G12 | CAGACCGTCCTTAGGAACTA |
| | | | (SEQ ID NO: 6120) |
| 31 | MG3-8 | H12 | GCTTTTCCTAGCTCTTTGAT |
| | | | (SEQ ID NO: 6121) |

### AAVS1 Safe-Harbor Locus Targeting

[0506] Having demonstrated that we could effectively knock out TCR expression in T-cells using our endonuclease/guide combinations, we next asked if we could target the AAVS1 safe-harbor locus in T cells. We designed appropriate spacers for MG3-6, but this time targeted against sequences in the AAVS1 locus (see Table 23 below). Sequences were screened by nucleofection into primary T cells as above using 126 pmol MG3-6 protein and 160 pmol guide and analyzed by NGS for indel formation in the AAVS1 locus. Table 23 shows the percentage of indels generated alongside each AAVS1-targeting spacer sequence in the transfected T cells, demonstrating that several sequences (A1, D1, E1, G1, B2, D2, G2, D3, F3, and C4) generate indels with moderate to high frequency in the AAVS1 locus with MG3-6.

TABLE 23
AAVS1 guide screen with MG3-6

| System | Name | DNA sequence of spacer | Indels |
|---|---|---|---|
| MG3-6 | A1 | CCTCACCACAGCCCTGCCAGGA | 54.84 |
| | | (SEQ ID NO: 6122) | |
| MG3-6 | B1 | GAAGTGTAAGGAAGCTGCAGCA | 0.08 |
| | | (SEQ ID NO: 6123) | |
| MG3-6 | C1 | CAGACGGCCGCGTCAGAGCAGC | 20.19 |
| | | (SEQ ID NO: 6124) | |
| MG3-6 | D1 | TCAGAGCAGCTCAGGTTCTGGG | 61.3 |
| | | (SEQ ID NO: 6125) | |
| MG3-6 | E1 | TCAGGTTCTGGGAGAGGGTAGC | 32.56 |
| | | (SEQ ID NO: 6126) | |
| MG3-6 | F1 | ACCCCCTGCCAAGCTCTCCCTC | N/A |
| | | (SEQ ID NO: 6127) | |
| MG3-6 | G1 | GGCTCCATCGTAAGCAAACCTT | 100 |
| | | (SEQ ID NO: 6128) | |
| MG3-6 | H1 | GGAGAGAGATGGCTCCAGGAAA | 0 |
| | | (SEQ ID NO: 6129) | |
| MG3-6 | A2 | AAGGAATCTGCCTAACAGGAGG | 21.8 |
| | | (SEQ ID NO: 6130) | |
| MG3-6 | B2 | AGGAATCTGCCTAACAGGAGGT | 87.48 |
| | | (SEQ ID NO: 6131) | |
| MG3-6 | C2 | GGAGACTAGGAAGGAGGAGGCC | 0.16 |
| | | (SEQ ID NO: 6132) | |
| MG3-6 | D2 | TAGGAAGGAGGAGGCCTAAGGA | 75.26 |
| | | (SEQ ID NO: 6133) | |
| MG3-6 | E2 | TCCTGTCCCTAGTGGCCCCACT | 5.1 |
| | | (SEQ ID NO: 6134) | |
| MG3-6 | F2 | AAGGTGGTCCCAGCTCGGGGAC | 0.04 |
| | | (SEQ ID NO: 6135) | |
| MG3-6 | G2 | GTCCTGAAGTGGACATAGGGGC | 78.2 |
| | | (SEQ ID NO: 6136) | |
| MG3-6 | H2 | ACCCCTGGAAGATGCCATGACA | 2.37 |
| | | (SEQ ID NO: 6137) | |
| MG3-6 | A3 | CTAGCACAGACTAGAGAGGTAA | 19.22 |
| | | (SEQ ID NO: 6138) | |
| MG3-6 | B3 | GGTGACCCGAATCCACAGGAGA | 0.9 |
| | | (SEQ ID NO: 6139) | |
| MG3-6 | C3 | GGGTGTCCAGGCAAAGAAAGCA | 0.14 |
| | | (SEQ ID NO: 6140) | |
| MG3-6 | D3 | AGAGGTGGCTAAAGCCAGGGAG | 67.24 |
| | | (SEQ ID NO: 6141) | |
| MG3-6 | E3 | AAAGCCAGGGAGACGGGGTACT | 1.14 |
| | | (SEQ ID NO: 6142) | |
| MG3-6 | F3 | AAGCCAGGGAGACGGGGTACTT | 67.85 |
| | | (SEQ ID NO: 6143) | |
| MG3-6 | G3 | GGCCTGTGCCATCTCTCGTTTC | 0.81 |
| | | (SEQ ID NO: 6144) | |
| MG3-6 | H3 | AGCCCCCTGTCATGGCATCTTC | 0.37 |
| | | (SEQ ID NO: 6145) | |
| MG3-6 | A4 | AGGACAGCATGTTTGCTGCCTC | 0.05 |
| | | (SEQ ID NO: 6146) | |
| MG3-6 | B4 | CCCCACAGTGGGGCCACTAGGG | 2.32 |
| | | (SEQ ID NO: 6147) | |
| MG3-6 | C4 | TCTCTCTCCTTGCCAGAACCTC | 82.66 |
| | | (SEQ ID NO: 6148) | |
| MG3-6 | D4 | GGTTTGCTTACGATGGAGCCAG | 0.57 |
| | | (SEQ ID NO: 6149) | |
| MG3-6 | E4 | ATCCTGGGAGGGAGAGCTTGGC | N/A |
| | | (SEQ ID NO: 6150) | |
| MG3-6 | F4 | TGGCAGGGGGTGGGAGGGAAGG | 0 |
| | | (SEQ ID NO: 6151) | |
| MG3-6 | G4 | CCAGTAGCCAGCCCCGTCCTGG | N/A |
| | | (SEQ ID NO: 6152) | |

### TIGIT Locus Targeting

[0507] Having demonstrated that we could effectively knock out TCR expression in T-cells using our endonuclease/guide combinations, we next asked if we could target the TIGIT locus in T cells. We designed appropriate spacers for MG3-6, but this time targeted against sequences in the TIGIT locus (see Table 24 below). Sequences were screened by nucleofection into primary T cells as above using 126 pmol MG3-6 protein and 160 pmol guide and analyzed by NGS as above. Table 24 shows the percentage of indels generated alongside each TIGIT-targeting spacer sequence in the transfected T cells, demonstrating that several sequences (C1, G1, H1, D3) have high indel-generating activity with MG3-6. Genomic DNA was harvested after 3 days and analyzed by NGS (see table 24 below).

TABLE 24
TIGIT guide screen with MG3-6

| | | | % |
|---|---|---|---|
| System | Name | DNA sequence of spacer | indels |
| MG3-6 | A1 | TGCGCTGGTGTCTCCTCCTGAT | 0 |
| | | (SEQ ID NO: 6153) | |
| MG3-6 | B1 | TGTCTCCTCCTGATCTGGGCCC | 17 |
| | | (SEQ ID NO: 6154) | |
| MG3-6 | C1 | TGATCTGGGCCCAGGGGCTGAG | 81 |
| | | (SEQ ID NO: 6155) | |
| MG3-6 | D1 | GGCAGGCTCCCCTCGCCTCAGG | 30 |
| | | (SEQ ID NO: 6156) | |
| MG3-6 | E1 | CGAGGGGAGCCTGCCTCAGCCC | 18 |
| | | (SEQ ID NO: 6157) | |
| MG3-6 | F1 | GAGCCTGCCTCAGCCCCTGGGC | 7 |
| | | (SEQ ID NO: 6158) | |
| MG3-6 | G1 | CCTCCACCACGGCACAAGTGAC | 75 |
| | | (SEQ ID NO: 6159) | |
| MG3-6 | H1 | GACCCAGGTCAACTGGGAGCAG | 73 |
| | | (SEQ ID NO: 6160) | |
| MG3-6 | A2 | GTGGCACATCTCCCCATCCTTC | 3 |
| | | (SEQ ID NO: 6161) | |
| MG3-6 | B2 | ATCCTTCAAGGATCGAGTGGCC | 4 |
| | | (SEQ ID NO: 6162) | |
| MG3-6 | C2 | TCGAGTGGCCCCAGGTCCCGGC | 1 |
| | | (SEQ ID NO: 6163) | |
| MG3-6 | D2 | CGTACACTGGGAGAATCTTCCT | 0 |
| | | (SEQ ID NO: 6164) | |
| MG3-6 | E2 | CAGCAGGAATACCTGAGCTTTC | 0 |
| | | (SEQ ID NO: 6165) | |
| MG3-6 | F2 | CTGAGCTTTCTAGGACCTCCAG | 0 |
| | | (SEQ ID NO: 6166) | |
| MG3-6 | G2 | TTCACGGTCAGCGACTGGAGGG | 3 |
| | | (SEQ ID NO: 6167) | |
| MG3-6 | H2 | GTCAGCGACTGGAGGGTGAGGC | 1 |
| | | (SEQ ID NO: 6168) | |
| MG3-6 | A3 | GACTGGAGGGTGAGGCCCAGGC | 0 |
| | | (SEQ ID NO: 6169) | |
| MG3-6 | B3 | GGGTGAGGCCCAGGCCGGGACC | 0 |
| | | (SEQ ID NO: 6170) | |
| MG3-6 | C3 | GGTCCTGCTGCTCCCAGTTGAC | 10 |
| | | (SEQ ID NO: 6171) | |
| MG3-6 | D3 | CCTCTAGTGGCTGAGCACGGTG | 79 |
| | | (SEQ ID NO: 6172) | |
| MG3-6 | E3 | TGGCTGAGCACGGTGCCAGGTT | 42 |
| | | (SEQ ID NO: 6173) | |
| MG3-6 | F3 | GTCCAGGCAGAAGCTGCACCTG | |
| | | (SEQ ID NO: 6174) | |
| | | (data not available) | |
| MG3-6 | G3 | GCTCTGTGGAGAGCAGCGGGGA | |
| | | (SEQ ID NO: 6175) | |
| | | (data not available) | |
| MG3-6 | H3 | TGGGTAACTGCAGCTTCTTCAC | 10 |
| | | (SEQ ID NO: 6176) | |
| MG3-6 | A4 | TCTGTGAAGAAGCTGCAGTTAC | 10 |
| | | (SEQ ID NO: 6177) | |
| MG3-6 | B4 | CTTCCTGGGGGTGAGGGAGCAC | 16 |
| | | (SEQ ID NO: 6178) | |
| MG3-6 | C4 | TCCTGTCCAGCTGATTTTCTCC | 6 |
| | | (SEQ ID NO: 6179) | |
| MG3-6 | D4 | TCCTGAGGTCACCTTCCACAGA | 10 |
| | | (SEQ ID NO: 6180) | |
| MG3-6 | E4 | CACCTTCCACAGAATGGATTCT | 10 |
| | | (SEQ ID NO: 6181) | |

### Example 23.—NK Cell Editing Using Systems Described Herein

[0508] TCR Ablation Combined with CAR Expression

[0509] Having observed we could efficiently knock out TCR expression in T cells, we next asked if we could edit TRAC in NK cells, for example disrupting TCR alongside introduction of a CAR with TRAC homology arms to create an allogeneic CAR-NK cell (see FIG. 66 for an example scheme). Accordingly, we cultured NK cells using the Cloudz Human NK cell Expansion Kit. NK cells were transfected with the Lonza 4D system using the mannitol-containing buffer in Rautela et al. (see https://doi.org/10.1101/406934, which is incorporated by reference herein) with 104 pmol MG3-6 protein and 180 pmol guide RNA (using the high performing MG3-6 enzyme with TRAC-targeting MG3-6 guide 6, SEQ ID NO: 5955), followed by infection using 300K MOI with AAV #3029 bearing a CAR sequence with TRAC homology arms. Genomic DNA was harvested from the cells after 5 days recovery and analyzed by NGS. Simultaneously, CAR expression assayed by flow cytometry using biotinylated BCMA protein in parallel with an antibody to the NIK cell marker CD56. The results are presented in FIG. 67 (which shows TRAC indel formation) and FIG. 68 (which shows flow cytometry for CD56 expression on the x-axis and CAR expression on the y-axis). The results demonstrate that the MG3-6/guide RNA combination alongside CAR expression was effective for generating CAR-positive NK cells.

### CD38 Targeting

[0510] A CD38 guide screen was then conducted in primary NIK cells using spacer sequences designed for MG3-6 (Table 24) and MG3-8 (Table 25) to target the CD38 gene in NK cells. Results are presented alongside the sequences in Tables 24 and 25, demonstrating that several sequences (A1, B1, H1, B2, C4, E4, F4, B5, D5, for MG3-6 and CA for MG3-8) have moderate to high activity for generating indels in the CD38 locus when introduced to cells alongside their respective endonucleases.

TABLE 24
CD38 guide screen using MG3-6

| System | Name | DNA sequence of spacer | Indels |
|---|---|---|---|
| MG3-6 | A1 | CTGAAATTCATCCTGAGATGAG | 54.32 |
| | | (SEQ ID NO: 6182) | |
| MG3-6 | B1 | TTAGTCGCCAACCCACCTCATC | 95.45 |
| | | (SEQ ID NO: 6183) | |
| MG3-6 | C1 | ACGACCACCGCGAGCACCACGA | 0.4 |
| | | (SEQ ID NO: 6184) | |
| MG3-6 | D1 | AGCACCACGACGAGGATCAGGA | 6.79 |
| | | (SEQ ID NO: 6185) | |
| MG3-6 | E1 | GGATACTGACGCCAAGACAGAG | 14.35 |
| | | (SEQ ID NO: 6186) | |
| MG3-6 | F1 | GGGCTCTCCTAGAGAGCCGGCA | 0.16 |
| | | (SEQ ID NO: 6187) | |
| MG3-6 | G1 | GGCTCTCCTAGAGAGCCGGCAG | 31.35 |
| | | (SEQ ID NO: 6188) | |
| MG3-6 | H1 | CAGCAGGGTTTGTCCCCGGACA | 53.03 |
| | | (SEQ ID NO: 6189) | |
| MG3-6 | A2 | GGGCTGAACTCGCAGTTGGCCA | 0.62 |
| | | (SEQ ID NO: 6190) | |
| MG3-6 | B2 | GCAGTTGGCCATAGGGCTCCAG | 41.92 |
| | | (SEQ ID NO: 6191) | |
| MG3-6 | C2 | CAGTTGGCCATAGGGCTCCAGG | 70 |
| | | (SEQ ID NO: 6192) | |
| MG3-6 | D2 | GACATGTAGACTGCCAAAGTGT | 0.19 |
| | | (SEQ ID NO: 6193) | |
| MG3-6 | E2 | GCCAAAGTGTATGGGATGCTTT | 0.02 |
| | | (SEQ ID NO: 6194) | |
| MG3-6 | F2 | ATAGTCTTCTTCAGTAATGTTG | 0.2 |
| | | (SEQ ID NO: 6195) | |
| MG3-6 | G2 | GTTCACCCTGGAGGACACGCTG | 9.82 |
| | | (SEQ ID NO: 6196) | |
| MG3-6 | H2 | GTGGTGAATTCAACACTTCCAG | 0.21 |
| | | (SEQ ID NO: 6197) | |
| MG3-6 | A3 | AGGTAGCCTAGCAGCGTGTCCT | 0.04 |
| | | (SEQ ID NO: 6198) | |
| MG3-6 | B3 | GTATTCTGGAAAACGGTTTCCC | 0.17 |
| | | (SEQ ID NO: 6199) | |
| MG3-6 | C3 | AACCGTTTTCCAGAATACTGAA | 0.01 |
| | | (SEQ ID NO: 6200) | |
| MG3-6 | D3 | ACCGTTTTCCAGAATACTGAAA | 0.11 |
| | | (SEQ ID NO: 6201) | |
| MG3-6 | E3 | TGTTTTTGTCAAAGATTTTACT | 0.16 |
| | | (SEQ ID NO: 6202) | |
| MG3-6 | F3 | AAGTCCATAATTTGCAACCAGA | 0.17 |
| | | (SEQ ID NO: 6203) | |
| MG3-6 | G3 | CTTTCTTCCCCAGAGACTTATG | 0.12 |
| | | (SEQ ID NO: 6204) | |
| MG3-6 | H3 | AATCGATTCCAGCTCTTTTATG | 0.29 |
| | | (SEQ ID NO: 6205) | |
| MG3-6 | A4 | TTCTTCAGTGTGTGAAAAATCC | 0.6 |
| | | (SEQ ID NO: 6206) | |
| MG3-6 | B4 | CTCAGATGTGCAAGATGAATCC | 0.06 |
| | | (SEQ ID NO: 6207) | |
| MG3-6 | C4 | CGGGCACCACCAAGCGCTTTCC | 98.21 |
| | | (SEQ ID NO: 6208) | |
| MG3-6 | D4 | CTGAAATTCATCCTGAGATGAG | 100 |
| | | (SEQ ID NO: 6209) | |
| MG3-6 | E4 | TCGGGAAAGCGCTTGGTGGTGC | 99.59 |
| | | (SEQ ID NO: 6210) | |
| MG3-6 | F4 | CGACCACCGCGAGCACCACGAC | 95.73 |
| | | (SEQ ID NO: 6211) | |
| MG3-6 | G4 | CCGCGAGCACCACGACGAGGAT | 2.08 |
| | | (SEQ ID NO: 6212) | |
| MG3-6 | H4 | GGATACTGACGCCAAGACAGAG | 9 |
| | | (SEQ ID NO: 6213) | |
| MG3-6 | A5 | GGCTCTCCTAGAGAGCCGGCAG | 87.5 |
| | | (SEQ ID NO: 6214) | |
| MG3-6 | B5 | CAGCAGGGTTTGTCCCCGGACA | 98.07 |
| | | (SEQ ID NO: 6215) | |
| MG3-6 | C5 | GGGCTGAACTCGCAGTTGGCCA | 0.55 |
| | | (SEQ ID NO: 6216) | |
| MG3-6 | D5 | CAGTTGGCCATAGGGCTCCAGG | 92.34 |
| | | (SEQ ID NO: 6217) | |
| MG3-6 | E5 | TTCTGTGTTTTATCTCAGACAT | 0.01 |
| | | (SEQ ID NO: 6218) | |
| MG3-6 | F5 | ACATCCTTGCAACATTACTGAA | 0.02 |
| | | (SEQ ID NO: 6219) | |
| MG3-6 | G5 | AGCCACTAATGAAGTTGGGAAC | 0.02 |
| | | (SEQ ID NO: 6220) | |
| MG3-6 | H5 | GATTCTTCTTTGGAGCAGAATA | 0.07 |
| | | (SEQ ID NO: 6221) | |
| MG3-6 | A6 | AAGATCTGGCCCATCAGTTCAC | 0 |
| | | (SEQ ID NO: 6222) | |
| MG3-6 | B6 | GTTCACCCTGGAGGACACGCTG | 8.42 |
| | | (SEQ ID NO: 6223) | |
| MG3-6 | C6 | GTGGTGAATTCAACACTTCCAG | 0.14 |
| | | (SEQ ID NO: 6224) | |
| MG3-6 | D6 | ATTCAACACTTCCAGTGAGGCT | 0.41 |
| | | (SEQ ID NO: 6225) | |
| MG3-6 | E6 | GTGTTGAATTCACCACACCATG | 3.84 |
| | | (SEQ ID NO: 6226) | |
| MG3-6 | F6 | CCTCCAGGGTGAACATGTCCCG | 0.66 |
| | | (SEQ ID NO: 6227) | |
| MG3-6 | G6 | CCCGCTGGACCTGTGTGAACTG | 2.42 |
| | | (SEQ ID NO: 6228) | |
| MG3-6 | H6 | TGGACCTGTGTGAACTGATGGG | 26.83 |
| | | (SEQ ID NO: 6229) | |
| MG3-6 | A7 | AGAAATAAACTATCAATCTTGC | 0 |
| | | (SEQ ID NO: 6230) | |
| MG3-6 | B7 | TCAATCTTGCCCAGACTGGAGA | 0.06 |
| | | (SEQ ID NO: 6231) | |
| MG3-6 | C7 | ACCGTTTTCCAGAATACTGAAA | 0.11 |
| | | (SEQ ID NO: 6232) | |
| MG3-6 | D7 | GCAGTCCTTTCTCCAGTCTGGG | 0.11 |
| | | (SEQ ID NO: 6233) | |
| MG3-6 | E7 | GATGTGGTCCATGTGATGCTCA | 0.02 |
| | | (SEQ ID NO: 6234) | |
| MG3-6 | F7 | TAAATGTGTACCTGTTTTTGTC | 0.18 |
| | | (SEQ ID NO: 6235) | |
| MG3-6 | G7 | GTTTTTGTCAAAGATTTTACTG | 0.53 |
| | | (SEQ ID NO: 6236) | |
| MG3-6 | H7 | TGCGGGATCCATTGAGCATCAC | 1.72 |
| | | (SEQ ID NO: 6237) | |
| MG3-6 | A8 | AAGTCCATAATTTGCAACCAGA | 0 |
| | | (SEQ ID NO: 6238) | |
| MG3-6 | B8 | AACCAGAGAAGGTTCAGACACT | 0.3 |
| | | (SEQ ID NO: 6239) | |
| MG3-6 | C8 | CTGGGTGATACATGGTGGAAGA | 0.15 |
| | | (SEQ ID NO: 6240) | |
| MG3-6 | D8 | CTTCTCTTCCACCATGTATCAC | 0.08 |
| | | (SEQ ID NO: 6241) | |
| MG3-6 | E8 | GAACCTTCTCTGGTTGCAAATT | 0.12 |
| | | (SEQ ID NO: 6242) | |
| MG3-6 | F8 | TTTCTTCCCCAGAGACTTATGC | 0.06 |
| | | (SEQ ID NO: 6243) | |
| MG3-6 | G8 | ATCGATTCCAGCTCTTTTATGG | 0.08 |
| | | (SEQ ID NO: 6244) | |
| MG3-6 | H8 | TCTTCAGTGTGTGAAAAATCCT | 0.18 |
| | | (SEQ ID NO: 6245) | |
| MG3-6 | A9 | CTGAGGATTCATCTTGCACATC | 0 |
| | | (SEQ ID NO: 6246) | |
| MG3-6 | B9 | TCAGATGTGCAAGATGAATCCT | 2.73 |
| | | (SEQ ID NO: 6247) | |
| MG3-6 | C9 | TTTCACACACTGAAGAAACTTG | 22.95 |
| | | (SEQ ID NO: 6248) | |

TABLE 25
CD38 guide screen using MG3-8

| System | Name | DNA sequence of spacer | Indels |
|---|---|---|---|
| MG3-8 | A1 | CTGAAATTCATCCTGAGATGAG | N/A |
| | | (SEQ ID NO: 6249) | |
| MG3-8 | B1 | GGCTCTCCTAGAGAGCCGGCAG | N/A |
| | | (SEQ ID NO: 6250) | |
| MG3-8 | C1 | CAGTTGGCCATAGGGCTCCAGG | 83.37 |
| | | (SEQ ID NO: 6251) | |
| MG3-8 | D1 | AAGATCTGGCCCATCAGTTCAC | 0.02 |
| | | (SEQ ID NO: 6252) | |
| MG3-8 | E1 | GTGTTGAATTCACCACACCATG | 0.13 |
| | | (SEQ ID NO: 6253) | |
| MG3-8 | F1 | ACCGTTTTCCAGAATACTGAAA | 0.07 |
| | | (SEQ ID NO: 6254) | |
| MG3-8 | G1 | AAGTCCATAATTTGCAACCAGA | 1.06 |
| | | (SEQ ID NO: 6255) | |
| MG3-8 | H1 | TTTCACACACTGAAGAAACTTG | 2.2 |
| | | (SEQ ID NO: 6256) | |

### Example 23.—Gene Editing in Hematopoietic Stem Cells Using Systems Described Herein

[0511] For Hematopoietic stem cell (HSC) editing, HSCs were thawed at 37 per Allcells instructions, washed in DMEM+10% FBS, resuspended in Stemspan II medium plus CC110 cytokines. 200K cells were nucleofected using a Lonza 4D electroporator and solution P3. Genomic DNA was harvested three days post-transfection and analyzed by NGS (see FIG. 70). MG3-6 was tested with TRAC guide 5 (SEQ ID NO: 5954) and TRAC guide 6 (SEQ ID NO: 5955). MG3-8 was tested with TRAC guide 2 (SEQ ID NO: 5960) and TRAC guide 5 (SEQ ID NO: 5963).

### Example 24.—Gene Editing in B-Cells Using Systems Described Herein

[0512] For B-cell editing, B cells were transfected with the Lonza 4D system using buffer P3 or buffer #2 (the mannitol-containing buffer described in Rautela et al., “Efficient genome editing of human natural killer cells by CRISPR RNP (2021) (available at https://doi.org/10.1101/406934)) with 104 pmol MG3-6 protein and 180 pmol guide. Genomic DNA was harvested three days post-transfection and analyzed by NGS (see FIG. 71). MG3-6 was tested with TRAC guide 6 (SEQ ID NO: 5955).

### Example 25.—Characterization of MG48 Family Members

### Template DNA for Transcription Translation

[0513] E. coli codon-optimized sequences of MG48-1 (protein sequence SEQ ID NO: 5769) and MG48-3 (protein sequence SEQ ID NO: 5771) were ordered (Twist Biosciences) with a T7 promoter. Linear templates were amplified from the plasmids by PCR to include the T7 and nuclease sequence. Minimal array linear templates were amplified from sequences composed of a T7 promoter, native repeat, universal spacer targeting our plasmid library, native repeat, flanked by adapter sequences for amplification. Three intergenic sequences near the ORF or CRISPR array were identified from the metagenomic contigs and ordered as gBlocks with flanking adapter sequences for amplification (Integrated DNA Technologies).

### Transcription Translation and Cleavage Reactions

[0514] MG48-1 and MG48-3 nucleases, intergenic sequences and minimal arrays were expressed in transcription-translation reaction mixtures using myTXTL® Sigma 70 Master Mix Kit (Arbor Biosciences). The final reaction mixtures contained 5 nM nuclease DNA template, 12 nM intergenic DNA template, 15 nM minimal array DNA template, 0.1 nM pTXTL-P70a-T7map and 1× of myTXTL® Sigma 70 Master Mix. The reactions were incubated at 29° C. for 16 hours then stored at 4° C.

[0515] Plasmid library DNA cleavage reactions were carried out by mixing 5 nM of the target library, a 5-fold dilution of the TXTL expressions, 10 nM Tris-HCl, 10 nM MgCl2 and, 100 mM NaCl at 37° C. for 2 hours. The reactions were stopped and cleaned with SPRIselect beads (Beckman Coulter, Inc.) and eluted in Tris EDTA pH 8.0 buffer. 1.5 nM of the cleavage products were ligated with 150 nM adapters, 1×T4 ligase buffer (New England Biolabs), 20 U/μL T4 DNA ligase (New England Biolabs) at room temperature for 20 minutes. The ligated products were amplified by PCR with NGS primers and sequenced by NGS to obtain the PAM. The results of this experiment are shown in FIG. 72A-72B, which show consensus PAM sequences for MG48-1 (FIG. 72A, SEQ ID NO: 5855) and MG48-3 (FIG. 72B, SEQ ID NO: 5856) obtained from NGS.

RNAseq Library Prep of Intergenic Enrichment from Transcription/Translation

[0516] RNA was extracted from TXTL expressions following the Quick-RNA™ Miniprep Kit (Zymo Research) and eluted in 50 μL of water. The total concentration of the transcripts were measured on a Nanodrop and Tapestation.

[0517] 100 ng of total RNA from each sample were prepped for RNA sequencing using the RealSeq-AC miRNA Library Kit (Somagenics). Amplicons between 162-163 bp were quantified with Tapestation and pooled to a final concentration of 20 nM. A final concentration of 6 pM was loaded into a Nano MiSeq V2 kit and sequenced in a Miseq system (Illumina). The RNAseq reads were used to identify the tracr sequence (SEQ ID NO:5886 for MG48-1 and SEQ ID NO: 5893 for MG48-3) of the genes (see FIG. 73A-73B, which illustrates RNAseq mapping with the sequenced tracr region highlighted). Using the tracr sequence we designed sgRNAs (SEQ ID NO: 5888 for MG48-1 and SEQ ID NO: 5895 for MG48-3), which was in vitro transcribed from a dsDNA template using the HiScribe T7 kit (New England Biolabs). The sgRNAs were tested in vitro using the same protocol as the examples above to verify activity and were verified as functional.

### EMBODIMENTS

[0518] The following embodiments are illustrative in nature and are not intended to be limiting in any way:
[0519] 1. An engineered nuclease system, comprising:
   [0520] (a) an endonuclease comprising a RuvC_III domain and an HNH domain, wherein said endonuclease is derived from an uncultivated microorganism, wherein said endonuclease is a class 2, type II Cas endonuclease; and
   [0521] (b) an engineered guide ribonucleic acid structure configured to form a complex with said endonuclease comprising:
      [0522] (i) a guide ribonucleic acid sequence configured to hybridize to a target deoxyribonucleic acid sequence; and
      [0523] (ii) a tracr ribonucleic acid sequence configured to bind to said endonuclease.
[0524] 2. The engineered nuclease system of embodiment 1, wherein said RuvC_III domain comprises a sequence with at least 70%, at least 75%, at least 80% or at least 90% sequence identity to any one of SEQ ID NOs: 1827-3637.
[0525] 3. An engineered nuclease system comprising:
   [0526] (a) an endonuclease comprising a RuvC_III domain having at least 75% sequence identity to any one of SEQ ID NOs: 1827-3637; and
   [0527] (b) an engineered guide ribonucleic acid structure configured to form a complex with said endonuclease comprising:
      [0528] (i) a guide ribonucleic acid sequence configured to hybridize to a target deoxyribonucleic acid sequence; and
      [0529] (ii) a tracr ribonucleic acid sequence configured to bind to said endonuclease.
[0530] 4. An engineered nuclease system comprising:
   [0531] (a) an endonuclease configured to bind to a protospacer adjacent motif (PAM) sequence comprising SEQ ID NOs: 5512-5537, wherein said endonuclease is a class 2, type II Cas endonuclease; and
   [0532] (b) an engineered guide ribonucleic acid structure configured to form a complex with said endonuclease comprising:
      [0533] (i) a guide ribonucleic acid sequence configured to hybridize to a target deoxyribonucleic acid sequence; and
      [0534] (ii) a tracr ribonucleic acid sequence configured to bind to said endonuclease.
[0535] 5. The engineered nuclease system of embodiment 2, wherein said endonuclease is derived from an uncultivated microorganism.
[0536] 6. The engineered nuclease system of any one of embodiments 2-3, wherein said endonuclease has not been engineered to bind to a different PAM sequence.
[0537] 7. The engineered nuclease system of embodiment 2, wherein said endonuclease is not a Cas9 endonuclease, a Cas14 endonuclease, a Cas12a endonuclease, a Cas12b endonuclease, a Cas 12c endonuclease, a Cas12d endonuclease, a Cas12e endonuclease, a Cas13a endonuclease, a Cas13b endonuclease, a Cas13c endonuclease, or a Cas 13d endonuclease.
[0538] 8. The engineered nuclease system of embodiment 2, wherein said endonuclease has less than 80% identity to a Cas9 endonuclease.
[0539] 9. The engineered nuclease system of any one of embodiments 1-6, wherein said endonuclease further comprises an HNH domain.
[0540] 10. The engineered nuclease system of any one of embodiments 1-9, wherein said tracr ribonucleic acid sequence comprises a sequence with at least 80% sequence identity to about 60 to 90 consecutive nucleotides selected from any one of SEQ ID NOs: 5476-5511 and SEQ ID NO: 5538.
[0541] 11. An engineered nuclease system comprising,
   [0542] (a) an engineered guide ribonucleic acid structure comprising:
      [0543] (i) a guide ribonucleic acid sequence configured to hybridize to a target deoxyribonucleic acid sequence; and
      [0544] (ii) a tracr ribonucleic acid sequence configured to bind to an endonuclease,
[0545] wherein said tracr ribonucleic acid sequence comprises a sequence with at least 80% sequence identity to about 60 to 90 consecutive nucleotides selected from any one of SEQ ID NOs: 5476-5511 and SEQ ID NO: 5538; and
   [0546] (b) a class 2, type II Cas endonuclease configured to bind to said engineered guide ribonucleic acid.
[0547] 12. The engineered nuclease system of any of embodiments 1-1 or 8, wherein said endonuclease is configured to bind to a protospacer adjacent motif (PAM) sequence selected from the group comprising SEQ ID NOs: 5512-5537.
[0548] 13. The engineered nuclease system of any one of embodiments 1-8, wherein said engineered guide ribonucleic acid structure comprises at least two ribonucleic acid polynucleotides.
[0549] 14. The engineered nuclease system of any one of embodiments 1-8, wherein said engineered guide ribonucleic acid structure comprises one ribonucleic acid polynucleotide comprising said guide ribonucleic acid sequence and said tracr ribonucleic acid sequence.
[0550] 15. The engineered nuclease system of any one of embodiments 1-14, wherein said guide ribonucleic acid sequence is complementary to a prokaryotic, bacterial, archaeal, eukaryotic, fungal, plant, mammalian, or human genomic sequence.
[0551] 16. The engineered nuclease system of any one of embodiments 1-15, wherein said guide ribonucleic acid sequence is 15-24 nucleotides in length.
[0552] 17. The engineered nuclease system of any one of embodiments 1-10, wherein said endonuclease comprises one or more nuclear localization sequences (NLSs) proximal to an N- or C-terminus of said endonuclease.
[0553] 18. The engineered nuclease system of any one of embodiments 1-11, wherein said NLS comprises a sequence selected from SEQ ID NOs: 5597-5612.
[0554] 19. The engineered nuclease system of any one of embodiments 1-12, further comprising a single- or double-stranded DNA repair template comprising from 5′ to 3′: a first homology arm comprising a sequence of at least 20 nucleotides 5′ to said target deoxyribonucleic acid sequence, a synthetic DNA sequence of at least 10 nucleotides, and a second homology arm comprising a sequence of at least 20 nucleotides 3′ to said target sequence.
[0555] 20. The engineered nuclease system of embodiment 13, wherein said first or second homology arm comprises a sequence of at least 40, 80, 120, 150, 200, 300, 500, or 1,000 nucleotides.
[0556] 21. The engineered nuclease system of any one of embodiments 1-14, wherein said system further comprises a source of Mg2+.
[0557] 22. The engineered nuclease system of any one of embodiments 1-21, wherein said endonuclease and said tracr ribonucleic acid sequence are derived from distinct bacterial species within a same phylum.
[0558] 23. The engineered nuclease system of any one of embodiments 1-22, wherein said endonuclease is derived from a bacterium belonging to a genus Dermabacter.
[0559] 24. The engineered nuclease system of any one of embodiments 1-22, wherein said endonuclease is derived from a bacterium belonging to Phylum Verrucomicrobia, Phylum Candidatus Peregrinibacteria, or Phylum Candidatus Melainabacteria.
[0560] 25. The engineered nuclease system of any one of embodiments 1-22, wherein said endonuclease is derived from a bacterium comprising a 16S rRNA gene having at least 90% identity to any one of SEQ ID NOs: 5592-5595.
[0561] 26. The engineered nuclease system of any one of embodiments 1-25, wherein said HNH domain comprises a sequence with at least 70% or at least 80% identity to any one of SEQ ID NOs: 3638-3955.
[0562] 27. The engineered nuclease system of any one of embodiments 1-26, wherein said endonuclease comprises SEQ ID NOs: 1-1826 or a variant thereof having at least 55% identity thereto.
[0563] 28. The engineered nuclease system of any one of embodiments 1-27, wherein said endonuclease comprises a sequence at least 70%, 80%, or 90% identical to a sequence selected from the group consisting of SEQ ID NOs: 1827-1830 or SEQ ID NOs: 1827-2140.
[0564] 29. The engineered nuclease system of any one of embodiments 1-28, wherein said endonuclease comprises a sequence at least 70%, 80%, or 90% identical to a sequence selected from the group consisting of SEQ ID NOs: 3638-3641 or SEQ ID NOs: 3638-3954.
[0565] 30. The engineered nuclease system of any one of embodiments 1-29, wherein said endonuclease comprises at least 1, at least 2, at least 3, at least 4, or at least 5 peptide motifs selected from the group consisting of SEQ ID NOs: 5615-5632.
[0566] 31. The engineered nuclease system of any one of embodiments 1-30, wherein said endonuclease comprises a sequence at least 70%, 80%, or 90% identical to a sequence selected from the group consisting of SEQ ID NOs: 1-4 or SEQ ID NOs: 1-319.
[0567] 32. The engineered nuclease system of any one of embodiments 1-31, wherein said guide RNA structure comprises a sequence at least 70%, 80%, or 90% identical to a sequence selected from the group consisting of SEQ ID NOs: 5461-5464, SEQ ID NOs: 5476-5479, or SEQ ID NOs: 5476-5489.
[0568] 33. The engineered nuclease system of any one of embodiments 1-32, wherein said guide RNA structure comprises an RNA sequence predicted to comprise a hairpin consisting of a stem and a loop, wherein the stem comprises at least 10, at least 12 or at least 14 base-paired ribonucleotides, and an asymmetric bulge within 4 base pairs of the loop.
[0569] 34. The engineered nuclease system of any one of embodiments 1-33, wherein said endonuclease is configured to bind to a PAM comprising a sequence selected from the group consisting of SEQ ID NOs: 5512-5515 or SEQ ID NOs: 5527-5530.
[0570] 35. The engineered nuclease system of any one of embodiments 1-34, wherein:
   [0571] a) said endonuclease comprises a sequence at least 70%, at least 80%, or at least 90% identical to SEQ ID NO: 1827;
   [0572] b) said guide RNA structure comprises a sequence at least 70%, at least 80%, or at least 90% identical to at least one of SEQ ID NO: 5461 or SEQ ID NO: 5476; and c) said endonuclease is configured to bind to a PAM comprising SEQ ID NO: 5512 or SEQ ID NO: 5527.
[0573] 36. The engineered nuclease system of any one of embodiments 1-34, wherein:
   [0574] a) said endonuclease comprises a sequence at least 70%, at least 80%, or at least 90% identical to SEQ ID NO: 1828;
   [0575] b) said guide RNA structure comprises a sequence at least 70%, at least 80%, or at least 90% identical to at least one of SEQ ID NO: 5462 or SEQ ID NO: 5477; and
   [0576] c) said endonuclease is configured to bind to a PAM comprising SEQ ID NO: 5513 or SEQ ID NO: 5528.
[0577] 37. The engineered nuclease system of any one of embodiments 1-34, wherein:
   [0578] a) said endonuclease comprises a sequence at least 70%, at least 80%, or at least 90% identical to SEQ ID NO: 1829;
   [0579] b) said guide RNA structure comprises a sequence at least 70%, at least 80%, or at least 90% identical to at least one of SEQ ID NO: 5463 or SEQ ID NO: 5478; and
   [0580] c) said endonuclease is configured to bind to a PAM comprising SEQ ID NO: 5514 or SEQ ID NO: 5529.
[0581] 38. The engineered nuclease system of any one of embodiments 1-34, wherein:
   [0582] a) said endonuclease comprises a sequence at least 70%, at least 80%, or at least 90% identical to SEQ ID NO: 1830;
   [0583] b) said guide RNA structure comprises a sequence at least 70%, at least 80%, or at least 90% identical to at least one of SEQ ID NO: 5464 or SEQ ID NO: 5479; and
   [0584] c) said endonuclease is configured to bind to a PAM comprising SEQ ID NO: 5515 or SEQ ID NO: 5530.
[0585] 39. The engineered nuclease system of any one of embodiments 1-27, wherein said endonuclease comprises a sequence at least 70%, 80%, or 90% identical to a sequence selected from the group consisting of SEQ ID NOs: 2141-2142 or SEQ ID NOs: 2141-2241.
[0586] 40. The engineered nuclease system of any one of embodiments 1-27 or embodiment 39, wherein said endonuclease comprises a sequence at least 70%, 80%, or 90% identical to a sequence selected from the group consisting of SEQ ID NOs: 3955-3956 or SEQ ID NOs: 3955-4055.
[0587] 41. The engineered nuclease system of any one of embodiments 1-27 or embodiments 39-40, wherein said endonuclease comprises at least 1, at least 2, at least 3, at least 4, or at least 5 peptide motifs selected from the group consisting of SEQ ID NOs: 5632-5638.
[0588] 42. The engineered nuclease system of any one of embodiments 1-27 or embodiments 39-41, wherein said endonuclease comprises a sequence at least 70%, 80%, or 90% identical to a sequence selected from the group consisting of SEQ ID NOs: 320-321 or SEQ ID NOs: 320-420.
[0589] 43. The engineered nuclease system of any one of embodiments 1-27 or embodiments 39-42, wherein said guide RNA structure comprises a sequence at least 70%, 80%, or 90% identical to a sequence selected from the group consisting of SEQ ID NO: 5465, SEQ ID NOs: 5490-5491 or SEQ ID NOs: 5490-5494.
[0590] 44. The engineered nuclease system of any one of embodiments 1-27 or embodiments 39-43, wherein said guide RNA structure comprises a tracr ribonucleic acid sequence comprising a hairpin comprising at least 8, at least 10, or at least 12 base-paired ribonucleotides.
[0591] 45. The engineered nuclease system of any one of embodiments 1-27 or embodiments 39-44, wherein said endonuclease is configured to bind to a PAM comprising a sequence selected from the group consisting of SEQ ID NOs: 5516 and SEQ ID NOs: 5531.
[0592] 46. The engineered nuclease system of any one of embodiments 1-27 or embodiment 39-45, wherein:
   [0593] a) said endonuclease comprises a sequence at least 70%, 80%, or 90% identical to SEQ ID NO: 2141;
   [0594] b) said guide RNA structure comprises a sequence at least 70%, 80%, or 90% identical to SEQ ID NO: 5490; and
   [0595] c) said endonuclease is configured to binding to a PAM comprising SEQ ID NO: 5531.
[0596] 47. The engineered nuclease system of any one of embodiments 1-27 or embodiment 39-45, wherein
   [0597] a) said endonuclease comprises a sequence at least 70%, 80%, or 90% identical to SEQ ID NO: 2142;
   [0598] b) said guide RNA structure comprises a sequence at least 70%, 80%, or 90% identical to SEQ ID NO: 5465 or SEQ ID NO: 5491; and
   [0599] c) said endonuclease is configured to binding to a PAM comprising SEQ ID NO: 5516.
[0600] 48. The engineered nuclease system of any one of embodiments 1-27, wherein said endonuclease comprises a sequence at least 70%, 80%, or 90% identical to a sequence selected from the group consisting of SEQ ID NOs: 2245-2246.
[0601] 49. The engineered nuclease system of any one of embodiments 1-27 or embodiment 48, wherein said endonuclease comprises a sequence at least 70%, 80%, or 90% identical to a sequence selected from the group consisting of SEQ ID NOs: 4059-4060.
[0602] 50. The engineered nuclease system of any one of embodiments 1-27 or embodiments 48-49, wherein said endonuclease comprises at least 1, at least 2, at least 3, at least 4, or at least 5 peptide motifs selected from the group consisting of SEQ ID NOs: 5639-5648.
[0603] 51. The engineered nuclease system of any one of embodiments 1-27 or embodiments 48-50, wherein said endonuclease comprises a sequence at least 70%, 80%, or 90% identical to a sequence selected from the group consisting of SEQ ID NOs: 424-425.
[0604] 52. The engineered nuclease system of any one of embodiments 1-27 or embodiments 48-51, wherein said guide RNA structure comprises a sequence at least 70%, 80%, or 90% identical to a sequence selected from the group consisting of SEQ ID NOs: 5498-5499 and SEQ ID NO: 5539.
[0605] 53. The engineered nuclease system of any one of embodiments 1-27 or embodiments 48-52, wherein said guide RNA structure comprises a guide ribonucleic acid sequence predicted to comprise a hairpin with an uninterrupted base-paired region comprising at least 8 nucleotides of a guide ribonucleic acid sequence and at least 8 nucleotides of a tracr ribonucleic acid sequence, and wherein said tracr ribonucleic acid sequence comprises, from 5′ to 3′, a first hairpin and a second hairpin, wherein said first hairpin has a longer stem than said second hairpin.
[0606] 54. The engineered nuclease system of any one of embodiments 1-27, wherein said endonuclease comprises a sequence at least 70%, 80%, or 90% identical to a sequence selected from the group consisting of SEQ ID NOs: 2242-2244 or SEQ ID NOs: 2247-2249.
[0607] 55. The engineered nuclease system of any one of embodiments 1-27 or embodiment 54, wherein said endonuclease comprises a sequence at least 70%, 80%, or 90% identical to a sequence selected from the group consisting of SEQ ID NOs: 4056-4058 and SEQ ID NOs 4061-4063.
[0608] 56. The engineered nuclease system of any one of embodiments 1-27 or embodiments 54-55, wherein said endonuclease comprises at least 1, at least 2, at least 3, at least 4, or at least 5 peptide motifs selected from the group consisting of SEQ ID NOs: 5639-5648.
[0609] 57. The engineered nuclease system of any one of embodiments 1-27 or embodiments 54-56, wherein said endonuclease comprises a sequence at least 70%, 80%, or 90% identical to a sequence selected from the group consisting of SEQ ID NOs: 421-423 or SEQ ID NOs: 426-428.
[0610] 58. The engineered nuclease system of any one of embodiments 1-27 or embodiments 54-57, wherein said guide RNA structure comprises a sequence at least 70%, 80%, or 90% identical to a sequence selected from the group consisting of SEQ ID NOs: 5466-5467, SEQ ID NOs: 5495-5497, SEQ ID NO: 5500-5502, and SEQ ID NO: 5539.
[0611] 59. The engineered nuclease system of any one of embodiments 1-27 or embodiments 54-58, wherein said guide RNA structure comprises a guide ribonucleic acid sequence predicted to comprise a hairpin with an uninterrupted base-paired region comprising at least 8 nucleotides of a guide ribonucleic acid sequence and at least 8 nucleotides of a tracr ribonucleic acid sequence, and wherein said tracr ribonucleic acid sequence comprises, from 5′ to 3′, a first hairpin and a second hairpin, wherein said first hairpin has a longer stem than said second hairpin.
[0612] 60. The engineered nuclease system of any one of embodiments 1-27 or embodiments 54-59, wherein said endonuclease is configured to binding to a PAM comprising a sequence selected from the group consisting of SEQ ID NOs: 5517-5518 or SEQ ID NOs: 5532-5534.
[0613] 61. The engineered nuclease system of any one of embodiments 1-27 or embodiments 54-60, wherein:
   [0614] a) said endonuclease comprises a sequence at least 70%, 80%, or 90% identical to SEQ ID NO: 2247;
   [0615] b) said guide RNA structure comprises a sequence at least 70%, 80%, or 90% identical to SEQ ID NO: 5500; and
   [0616] c) said endonuclease is configured to binding to a PAM comprising SEQ ID NO: 5517 or SEQ ID NO: 5532.
[0617] 62. The engineered nuclease system of any one of embodiments 1-27 or embodiments 54-60, wherein:
   [0618] a) said endonuclease comprises a sequence at least 70%, 80%, or 90% identical to SEQ ID NO: 2248;
   [0619] b) said guide RNA structure comprises a sequence at least 70%, 80%, or 90% identical to SEQ ID NO: 5501; and
   [0620] c) said endonuclease is configured to binding to a PAM comprising SEQ ID NO: 5518 or SEQ ID NOs: 5533.
[0621] 63. The engineered nuclease system of any one of embodiments 1-27 or embodiments 54-60, wherein:
   [0622] a) said endonuclease comprises a sequence at least 70%, 80%, or 90% identical to SEQ ID NO: 2249;
   [0623] b) said guide RNA structure comprises a sequence at least 70%, 80%, or 90% identical to SEQ ID NO: 5502; and
   [0624] c) said endonuclease is configured to binding to a PAM comprising SEQ ID NO: 5534.
[0625] 64. The engineered nuclease system of any one of embodiments 1-27, wherein said endonuclease comprises a sequence at least 70%, 80%, or 90% identical to a sequence selected from the group consisting of SEQ ID NO: 2253 or SEQ ID NOs: 2253-2481.
[0626] 65. The engineered nuclease system of any one of embodiments 1-27 or embodiment 64, wherein said endonuclease comprises a sequence at least 70%, 80%, or 90% identical to a sequence selected from the group consisting of SEQ ID NO: 4067 or SEQ ID NOs: 4067-4295.
[0627] 66. The engineered nuclease system of any one of embodiments 1-27 or embodiments 64-65, wherein said endonuclease comprises a peptide motif according to SEQ ID NO: 5649.
[0628] 67. The engineered nuclease system of any one of embodiments 1-27 or embodiments 64-66, wherein said endonuclease comprises a sequence at least 70%, 80%, or 90% identical to a sequence selected from the group consisting of SEQ ID NO: 432 or SEQ ID NOs: 432-660.
[0629] 68. The engineered nuclease system of any one of embodiments 1-27 or embodiments 64-67, wherein said guide RNA structure comprises a sequence at least 70%, 80%, or 90% identical to a sequence selected from the group consisting of SEQ ID NO: 5468 or SEQ ID NO: 5503.
[0630] 69. The engineered nuclease system of any one of embodiments 1-27 or embodiments 64-68, wherein said endonuclease is configured to binding to a PAM comprising a sequence selected from the group consisting of SEQ ID NOs: 5519.
[0631] 70. The engineered nuclease system of any one of embodiments 1-27 or embodiments 64-69, wherein:
   [0632] a) said endonuclease comprises a sequence at least 70%, 80%, or 90% identical to SEQ ID NO: 2253;
   [0633] b) said guide RNA structure comprises a sequence at least 70%, 80%, or 90% identical to SEQ ID NO: 5468 or SEQ ID NO: 5503; and
   [0634] c) said endonuclease is configured to binding to a PAM comprising SEQ ID NO: 5519.
[0635] 71. The engineered nuclease system of any one of embodiments 1-27, wherein said endonuclease comprises a sequence at least 70%, 80%, or 90% identical to a sequence selected from the group consisting of SEQ ID NOs: 2482-2489.
[0636] 72. The engineered nuclease system of any one of embodiments 1-27 or embodiment 71, wherein said endonuclease comprises a sequence at least 70%, 80%, or 90% identical to a sequence selected from the group consisting of SEQ ID NOs: 4296-4303.
[0637] 73. The engineered nuclease system of any one of embodiments 1-27 or embodiments 71-72, wherein said endonuclease comprises a sequence at least 70%, 80%, or 90% identical to a sequence selected from the group consisting of or SEQ ID NOs: 661-668.
[0638] 74. The engineered nuclease system of any one of embodiments 1-27, wherein said endonuclease comprises a sequence at least 70%, 80%, or 90% identical to a sequence selected from the group consisting of or SEQ ID NOs: 2490-2498.
[0639] 75. The engineered nuclease system of any one of embodiments 1-27 or embodiment 74, wherein said endonuclease comprises a sequence at least 70%, 80%, or 90% identical to a sequence selected from the group consisting of SEQ ID NOs: 4304-4312.
[0640] 76. The engineered nuclease system of any one of embodiments 1-27 or embodiments 74-75, wherein said endonuclease comprises a sequence at least 70%, 80%, or 90% identical to a sequence selected from the group consisting of SEQ ID NOs: 669-677.
[0641] 77. The engineered nuclease system of any one of embodiments 1-27 or embodiments 74-76, wherein said guide RNA structure comprises a sequence at least 70%, 80%, or 90% identical to a sequence selected from the group consisting of SEQ ID NO: 5504.
[0642] 78. The engineered nuclease system of any one of embodiments 1-27, wherein said endonuclease comprises a sequence at least 70%, 80%, or 90% identical to a sequence selected from the group consisting of SEQ ID NO: 2499 or SEQ ID NOs: 2499-2750.
[0643] 79. The engineered nuclease system of any one of embodiments 1-27 or embodiment 78, wherein said endonuclease comprises a sequence at least 70%, 80%, or 90% identical to a sequence selected from the group consisting of SEQ ID NO: 4313 or SEQ ID NOs: 4313-4564.
[0644] 80. The engineered nuclease system of any one of embodiments 1-27 or embodiments 78-79, wherein said endonuclease comprises at least 1, at least 2, at least 3, at least 4, or at least 5 peptide motifs selected from the group consisting of SEQ ID NOs: 5650-5667.
[0645] 81. The engineered nuclease system of any one of embodiments 1-27 or embodiments 78-80, wherein said endonuclease comprises a sequence at least 70%, 80%, or 90% identical to a sequence selected from the group consisting of SEQ ID NO: 678 or SEQ ID NOs: 678-929
[0646] 82. The engineered nuclease system of any one of embodiments 1-27 or embodiments 78-81, wherein said guide RNA structure comprises a sequence at least 70%, 80%, or 90% identical to SEQ ID NO: 5469 or SEQ ID NO: 5505.
[0647] 83. The engineered nuclease system of any one of embodiments 1-27 or embodiments 78-82, wherein said endonuclease is configured to binding to a PAM comprising SEQ ID NOs: 5520 or SEQ ID NOs: 5535.
[0648] 84. The engineered nuclease system of any one of embodiments 1-27 or embodiments 78-83, wherein:
   [0649] a) said endonuclease comprises a sequence at least 70%, 80%, or 90% identical to SEQ ID NO: 2499;
   [0650] b) said guide RNA structure comprises a sequence at least 70%, 80%, or 90% identical to SEQ ID NO: 5469 or SEQ ID NO: 5505; and
   [0651] c) said endonuclease is configured to binding to a PAM comprising SEQ ID NO: 5520 or SEQ ID NO: 5535.
[0652] 85. The engineered nuclease system of any one of embodiments 1-27, wherein said endonuclease comprises a sequence at least 70%, 80%, or 90% identical to a sequence selected from the group consisting of SEQ ID NO: 2751 or SEQ ID NOs: 2751-2913.
[0653] 86. The engineered nuclease system of any one of embodiments 1-27 or embodiment 85, wherein said endonuclease comprises a sequence at least 70%, 80%, or 90% identical to a sequence selected from the group consisting of SEQ ID NO: 4565 or SEQ ID NOs: 4565-4727.
[0654] 87. The engineered nuclease system of any one of embodiments 1-27 or embodiments 85-86, wherein said endonuclease comprises at least 1, at least 2, at least 3, at least 4, or at least 5 peptide motifs selected from the group consisting of SEQ ID NOs: 5668-5678.
[0655] 88. The engineered nuclease system of any one of embodiments 1-27 or embodiments 85-87, wherein said endonuclease comprises a sequence at least 70%, 80%, or 90% identical to a sequence selected from the group consisting of SEQ ID NO: 930 or SEQ ID NOs: 930-1092.
[0656] 89. The engineered nuclease system of any one of embodiments 1-27 or embodiments 85-88, wherein said guide RNA structure comprises a sequence at least 70%, 80%, or 90% identical to SEQ ID NO: 5470 or SEQ ID NOs: 5506.
[0657] 90. The engineered nuclease system of any one of embodiments 1-27 or embodiments 85-89, wherein said endonuclease is configured to binding to a PAM comprising a sequence selected from the group consisting of SEQ ID NOs: 5521 or SEQ ID NOs: 5536.
[0658] 91. The engineered nuclease system of any one of embodiments 1-27 or embodiments 85-90, wherein:
   [0659] a) said endonuclease comprises a sequence at least 70%, 80%, or 90% identical to SEQ ID NO: 2751;
   [0660] b) said guide RNA structure comprises a sequence at least 70%, 80%, or 90% identical to SEQ ID NO: 5470 or SEQ ID NO: 5506; and
   [0661] c) said endonuclease is configured to binding to a PAM comprising SEQ ID NO: 5521 or SEQ ID NO: 5536.
[0662] 92. The engineered nuclease system of any one of embodiments 1-27, wherein said endonuclease comprises a sequence at least 70%, 80%, or 90% identical to a sequence selected from the group consisting of SEQ ID NO: 2914 or SEQ ID NOs: 2914-3174.
[0663] 93. The engineered nuclease system of any one of embodiments 1-27 or embodiment 92, wherein said endonuclease comprises a sequence at least 70%, 80%, or 90% identical to a sequence selected from the group consisting of SEQ ID NO: 4728 or SEQ ID NOs: 4728-4988.
[0664] 94. The engineered nuclease system of any one of embodiments 1-27 or embodiments 92-93, wherein said endonuclease comprises at least 1, at least 2, or at least 3 peptide motifs selected from the group consisting of SEQ ID NOs: 5676-5678.
[0665] 95. The engineered nuclease system of any one of embodiments 1-27 or embodiments 92-94, wherein said endonuclease comprises a sequence at least 70%, 80%, or 90% identical to a sequence selected from the group consisting of SEQ ID NO: 1093 or SEQ ID NOs: 1093-1353.
[0666] 96. The engineered nuclease system of any one of embodiments 1-27 or embodiments 92-95, wherein said guide RNA structure comprises a sequence at least 70%, 80%, or 90% identical to a sequence selected from the group consisting of SEQ ID NO: 5471, SEQ ID NO: 5507, and SEQ ID NOs: 5540-5542.
[0667] 97. The engineered nuclease system of any one of embodiments 1-27 or embodiments 92-96, wherein said guide RNA structure comprises a tracr ribonucleic acid sequence predicted to comprise at least two hairpins comprising less than 5 base-paired ribonucleotides.
[0668] 98. The engineered nuclease system of any one of embodiments 1-27 or embodiments 92-97, wherein said endonuclease is configured to binding to a PAM comprising SEQ ID NO: 5522.
[0669] 99. The engineered nuclease system of any one of embodiments 1-27 or embodiments 92-98, wherein:
   [0670] a) said endonuclease comprises a sequence at least 70%, 80%, or 90% identical to SEQ ID NO: 2914;
   [0671] b) said guide RNA structure comprises a sequence at least 70%, 80%, or 90% identical to SEQ ID NO: 5471 or SEQ ID NO: 5507; and
   [0672] c) said endonuclease is configured to binding to a PAM comprising SEQ ID NO: 5522.
[0673] 100. The engineered nuclease system of any one of embodiments 1-27, wherein said endonuclease comprises a sequence at least 70%, 80%, or 90% identical to a sequence selected from the group consisting of SEQ ID NO: 3175 or SEQ ID NOs: 3175-3330.
[0674] 101. The engineered nuclease system of any one of embodiments 1-27 or embodiment 100, wherein said endonuclease comprises a sequence at least 70%, 80%, or 90% identical to a sequence selected from the group consisting of SEQ ID NO: 4989 or SEQ ID NOs: 4989-5146.
[0675] 102. The engineered nuclease system of any one of embodiments 1-27 or embodiments 100-101, wherein said endonuclease comprises at least 1, at least 2, at least 3, at least 4, or at least 5 peptide motifs selected from the group consisting of SEQ ID NOs: 5679-5686.
[0676] 103. The engineered nuclease system of any one of embodiments 1-27 or embodiments 100-102, wherein said endonuclease comprises a sequence at least 70%, 80%, or 90% identical to a sequence selected from the group consisting of SEQ ID NO: 1354 or SEQ ID NOs: 1354-1511.
[0677] 104. The engineered nuclease system of any one of embodiments 1-27 or embodiments 100-103, wherein said guide RNA structure comprises a sequence at least 70%, 80%, or 90% identical to a sequence selected from the group consisting of SEQ ID NOs: 5472 or SEQ ID NOs: 5508.
[0678] 105. The engineered nuclease system of any one of embodiments 1-27 or embodiments 100-104, wherein said endonuclease is configured to binding to a PAM comprising a sequence selected from the group consisting of SEQ ID NO: 5523 or SEQ ID NO: 5537.
[0679] 106. The engineered nuclease system of any one of embodiments 1-27 or embodiments 100-105, wherein:
   [0680] a) said endonuclease comprises a sequence at least 70%, 80%, or 90% identical to SEQ ID NO: 3175;
   [0681] b) said guide RNA structure comprises a sequence at least 70%, 80%, or 90% identical to SEQ ID NO: 5472 or SEQ ID NO: 5508; and
   [0682] c) said endonuclease is configured to binding to a PAM comprising SEQ ID NO: 5523 or SEQ ID NO: 5537.
[0683] 107. The engineered nuclease system of any one of embodiments 1-27, wherein said endonuclease comprises a sequence at least 70%, 80%, or 90% identical to a sequence selected from the group consisting of SEQ ID NOs: 3331 or SEQ ID NOs: 3331-3474.
[0684] 108. The engineered nuclease system of any one of embodiments 1-27 or embodiment 107, wherein said endonuclease comprises a sequence at least 70%, 80%, or 90% identical to a sequence selected from the group consisting of SEQ ID NOs: 5147 or SEQ ID NOs: 5147-5290.
[0685] 109. The engineered nuclease system of any one of embodiments 1-27 or embodiments 107-108, wherein said endonuclease comprises at least 1, at least 2, at least 3, at least 4, or at least 5 peptide motifs selected from the group consisting of SEQ ID NOs: 5674-5675 and SEQ ID NOs: 5687-5693.
[0686] 110. The engineered nuclease system of any one of embodiments 1-27 or embodiments 107-109, wherein said endonuclease comprises a sequence at least 70%, 80%, or 90% identical to a sequence selected from the group consisting of SEQ ID NO: 1512 or SEQ ID NOs: 1512-1655.
[0687] 111. The engineered nuclease system of any one of embodiments 1-27 or embodiments 107-110, wherein said guide RNA structure comprises a sequence at least 70%, 80%, or 90% identical to a sequence selected from the group consisting of SEQ ID NO: 5473 or SEQ ID NO: 5509.
[0688] 112. The engineered nuclease system of any one of embodiments 1-27 or embodiments 107-111, wherein said endonuclease is configured to binding to a PAM comprising SEQ ID NO: 5524.
[0689] 113. The engineered nuclease system of any one of embodiments 1-27 or embodiments 107-112, wherein:
   [0690] a) said endonuclease comprises a sequence at least 70%, 80%, or 90% identical to SEQ ID NO: 3331;
   [0691] b) said guide RNA structure comprises a sequence at least 70%, 80%, or 90% identical to SEQ ID NO: 5473 or SEQ ID NO: 5509; and
   [0692] c) said endonuclease is configured to binding to a PAM comprising SEQ ID NO: 5524.
[0693] 114. The engineered nuclease system of any one of embodiments 1-27, wherein said endonuclease comprises a sequence at least 70%, 80%, or 90% identical to a sequence selected from the group consisting of SEQ ID NO: 3475 or SEQ ID NOs: 3475-3568.
[0694] 115. The engineered nuclease system of any one of embodiments 1-27 or embodiment 114, wherein said endonuclease comprises a sequence at least 70%, 80%, or 90% identical to a sequence selected from the group consisting of SEQ ID NO: 5291 or SEQ ID NOs: 5291-5389.
[0695] 116. The engineered nuclease system of any one of embodiments 1-27 or embodiments 114-115, wherein said endonuclease comprises at least 1, at least 2, at least 3, at least 4, or at least 5 peptide motifs selected from the group consisting of SEQ ID NOs: 5694-5699.
[0696] 117. The engineered nuclease system of any one of embodiments 1-27 or embodiments 114-116, wherein said endonuclease comprises a sequence at least 70%, 80%, or 90% identical to a sequence selected from the group consisting of SEQ ID NO: 1656 or SEQ ID NOs: 1656-1755.
[0697] 118. The engineered nuclease system of any one of embodiments 1-27 or embodiments 114-117, wherein said guide RNA structure comprises a sequence at least 70%, 80%, or 90% identical to SEQ ID NO: 5474 or SEQ ID NO: 5510.
[0698] 119. The engineered nuclease system of any one of embodiments 1-27 or embodiments 114-118, wherein said endonuclease is configured to binding to a PAM comprising SEQ ID NOs: 5525.
[0699] 120. The engineered nuclease system of any one of embodiments 1-27 or embodiments 114-119, wherein:
   [0700] a) said endonuclease comprises a sequence at least 70%, 80%, or 90% identical to SEQ ID NO: 3475;
   [0701] b) said guide RNA structure comprises a sequence at least 70%, 80%, or 90% identical to SEQ ID NO: 5474 or SEQ ID NO: 5510; and
   [0702] c) said endonuclease is configured to binding to a PAM comprising SEQ ID NO: 5525.
[0703] 121. The engineered nuclease system of any one of embodiments 1-27, wherein said endonuclease comprises a sequence at least 70%, 80%, or 90% identical to a sequence selected from the group consisting of SEQ ID NO: 3569 or SEQ ID NOs: 3569-3637.
[0704] 122. The engineered nuclease system of any one of embodiments 1-27 or embodiment 121, wherein said endonuclease comprises a sequence at least 70%, 80%, or 90% identical to a sequence selected from the group consisting of SEQ ID NO: 5390 or SEQ ID NOs: 5390-5460.
[0705] 123. The engineered nuclease system of any one of embodiments 1-27 or embodiments 121-122, wherein said endonuclease comprises at least 1, at least 2, at least 3, at least 4, or at least 5 peptide motifs selected from the group consisting of SEQ ID NOs: 5700-5717.
[0706] 124. The engineered nuclease system of any one of embodiments 1-27 or embodiments 121-123, wherein said endonuclease comprises a sequence at least 70%, 80%, or 90% identical to a sequence selected from the group consisting of SEQ ID NO: 1756 or SEQ ID NOs: 1756-1826.
[0707] 125. The engineered nuclease system of any one of embodiments 1-27 or embodiments 121-124, wherein said guide RNA structure comprises a sequence at least 70%, 80%, or 90% identical to SEQ ID NO: 5475 or SEQ ID NOs: 5511.
[0708] 126. The engineered nuclease system of any one of embodiments 1-27 or embodiments 121-125, wherein said endonuclease is configured to binding to a PAM comprising SEQ ID NO: 5526.
[0709] 127. The engineered nuclease system of any one of embodiments 1-27 or embodiments 121-126, wherein:
   [0710] a) said endonuclease comprises a sequence at least 70%, 80%, or 90% identical to SEQ ID NO: 3569;
   [0711] b) said guide RNA structure comprises a sequence at least 70%, 80%, or 90% identical to SEQ ID NO: 5475 or SEQ ID NO: 5511; and
   [0712] c) said endonuclease is configured to binding to a PAM comprising SEQ ID NO: 5526.
[0713] 128. The engineered nuclease system of any one of embodiments 1-127, wherein said sequence identity is determined by a BLASTP, CLUSTALW, MUSCLE, MAFFT, or Smith-Waterman homology search algorithm.
[0714] 129. The engineered nuclease system of embodiment 15, wherein said sequence identity is determined by said BLASTP homology search algorithm using parameters of a wordlength (W) of 3, an expectation (E) of 10, and a BLOSUM62 scoring matrix setting gap costs at existence of 11, extension of 1, and using a conditional compositional score matrix adjustment.
[0715] 130. An engineered guide ribonucleic acid polynucleotide comprising:
   [0716] a) a DNA-targeting segment comprising a nucleotide sequence that is complementary to a target sequence in a target DNA molecule; and
   [0717] b) a protein-binding segment comprising two complementary stretches of nucleotides that hybridize to form a double-stranded RNA (dsRNA) duplex,
   [0718] wherein said two complementary stretches of nucleotides are covalently linked to one another with intervening nucleotides, and
   [0719] wherein said engineered guide ribonucleic acid polynucleotide is configured to forming a complex with an endonuclease comprising a RuvC_III domain having at least 75% sequence identity to any one of SEQ ID NOs: 1827-3637 and targeting said complex to said target sequence of said target DNA molecule.
[0720] 131. The engineered guide ribonucleic acid polynucleotide of embodiment 17, wherein said DNA-targeting segment is positioned 5′ of both of said two complementary stretches of nucleotides.
[0721] 132. The engineered guide ribonucleic acid polynucleotide of any of embodiments 17-18, wherein:
   [0722] a) said protein binding segment comprises a sequence having at least 70%, at least 80%, or at least 90% identity to a sequence selected from the group consisting of SEQ ID NOs: 5476-5479 or SEQ ID NOs: 5476-5489;
   [0723] b) said protein binding segment comprises a sequence having at least 70%, at least 80%, or at least 90% identity to a sequence selected from the group consisting of (SEQ ID NOs: 5490-5491 or SEQ ID NOs: 5490-5494) and SEQ ID NO: 5538;
   [0724] c) said protein binding segment comprises a sequence having at least 70%, at least 80%, or at least 90% identity to a sequence selected from the group consisting of SEQ ID NOs: 5498-5499;
   [0725] d) said protein binding segment comprises a sequence having at least 70%, at least 80%, or at least 90% identity to a sequence selected from the group consisting of SEQ ID NOs: 5495-5497 and SEQ ID NOs: 5500-5502;
   [0726] e) said protein binding segment comprises a sequence having at least 70%, at least 80%, or at least 90% identity to SEQ ID NO: 5503;
   [0727] f) said protein binding segment comprises a sequence having at least 70%, at least 80%, or at least 90% identity to SEQ ID NO: 5504;
   [0728] g) said protein binding segment comprises a sequence having at least 70%, at least 80%, or at least 90% identity to SEQ ID NOs: 5505;
   [0729] h) protein binding segment comprises a sequence having at least 70%, at least 80%, or at least 90% identity to SEQ ID NO: 5506;
   [0730] i) protein binding segment comprises a sequence having at least 70%, at least 80%, or at least 90% identity to SEQ ID NO: 5507;
   [0731] j) said protein binding segment comprises a sequence having at least 70%, at least 80%, or at least 90% identity to SEQ ID NO: 5508;
   [0732] k) said protein binding segment comprises a sequence having at least 70%, at least 80%, or at least 90% identity to SEQ ID NO: 5509;
   [0733] l) said protein binding segment comprises a sequence having at least 70%, at least 80%, or at least 90% identity to SEQ ID NO: 5510; or
   [0734] m) said protein binding segment comprises a sequence having at least 70%, at least 80%, or at least 90% identity to SEQ ID NO: 5511.
[0735] 133. The engineered guide ribonucleic acid polynucleotide of any of embodiment 17-132, wherein:
   [0736] a) said guide ribonucleic acid polynucleotide comprises an RNA sequence comprising a hairpin comprising a stem and a loop, wherein said stem comprises at least 10, at least 12, or at least 14 base-paired ribonucleotides, and an asymmetric bulge within 4 base pairs of the loop;
   [0737] b) said guide ribonucleic acid polynucleotide comprises a tracr ribonucleic acid sequence predicted to comprise a hairpin comprising at least 8, at least 10, or at least 12 base-paired ribonucleotides;
   [0738] c) said guide ribonucleic acid polynucleotide comprises a guide ribonucleic acid sequence predicted to comprise a hairpin with an uninterrupted base-paired region comprising at least 8 nucleotides of a guide ribonucleic acid sequence and at least 8 nucleotides of a tracr ribonucleic acid sequence, and wherein said tracr ribonucleic acid sequence comprises, from 5′ to 3′, a first hairpin and a second hairpin, wherein said first hairpin has a longer stem than said second hairpin; or
   [0739] d) said guide ribonucleic acid polynucleotide comprises a tracr ribonucleic acid sequence predicted to comprise at least two hairpins comprising less than 5 base-paired ribonucleotides.
[0740] 134. A deoxyribonucleic acid polynucleotide encoding the engineered guide ribonucleic acid polynucleotide of any one of embodiments 17-133.
[0741] 135. A nucleic acid comprising an engineered nucleic acid sequence optimized for expression in an organism, wherein said nucleic acid encodes a class 2, type II Cas endonuclease comprising a RuvC_III domain and an HNH domain, and wherein said endonuclease is derived from an uncultivated microorganism.
[0742] 136. A nucleic acid comprising an engineered nucleic acid sequence optimized for expression in an organism, wherein said nucleic acid encodes an endonuclease comprising a RuvC_III domain having at least 70% sequence identity to any one of SEQ ID NOs: 1827-3637.
[0743] 137. The nucleic acid of any one of embodiments 135-20, wherein said endonuclease comprises an HNH domain having at least 70% or at least 80% sequence identity to any one of SEQ ID NOs: 3638-5460.
[0744] 138. The nucleic acid of any one of embodiments 135-137, wherein said endonuclease comprises SEQ ID NOs: 5572-5591 or a variant thereof having at least 70% sequence identity thereto.
[0745] 139. The nucleic acid of any one of embodiments 135-138, wherein said endonuclease comprises a sequence encoding one or more nuclear localization sequences (NLSs) proximal to an N- or C-terminus of said endonuclease.
[0746] 140. The nucleic acid of embodiment 21, wherein said NLS comprises a sequence selected from SEQ ID NOs: 5597-5612.
[0747] 141. The nucleic acid of any one of embodiments 135-22, wherein said organism is prokaryotic, bacterial, eukaryotic, fungal, plant, mammalian, rodent, or human.
[0748] 142. The nucleic acid of embodiment 23, wherein said organism is E. coli, and wherein:
   [0749] a) said nucleic acid sequence has at least 70%, 80%, or 90% identity to a sequence selected from the group consisting of SEQ ID NOs: 5572-5575;
   [0750] b) said nucleic acid sequence has at least 70%, 80%, or 90% identity to a sequence selected from the group consisting of SEQ ID NOs: 5576-5577;
   [0751] c) said nucleic acid sequence has at least 70%, 80%, or 90% identity to a sequence selected from the group consisting of SEQ ID NOs: 5578-5580;
   [0752] d) said nucleic acid sequence has at least 70%, 80%, or 90% identity to SEQ ID NO: 5581;
   [0753] e) said nucleic acid sequence has at least 70%, 80%, or 90% identity to SEQ ID NO: 5582;
   [0754] f) said nucleic acid sequence has at least 70%, 80%, or 90% identity to SEQ ID NO: 5583;
   [0755] g) said nucleic acid sequence has at least 70%, 80%, or 90% identity to SEQ ID NO: 5584;
   [0756] h) said nucleic acid sequence has at least 70%, 80%, or 90% identity to SEQ ID NO: 5585;
   [0757] i) said nucleic acid sequence has at least 70%, 80%, or 90% identity to SEQ ID NO: 5586; or
   [0758] j) said nucleic acid sequence has at least 70%, 80%, or 90% identity to SEQ ID NO: 5587.
[0759] 143. The nucleic acid of embodiment 23, wherein said organism is human, and wherein:
   [0760] a) said nucleic acid sequence has at least 70%, 80%, or 90% identity to SEQ ID NO: 5588 or SEQ ID NO: 5589; or
   [0761] b) said nucleic acid sequence has at least 70%, 80%, or 90% identity to SEQ ID NO: 5590 or SEQ ID NO: 5591.
[0762] 144. A vector comprising a nucleic acid sequence encoding a class 2, type II Cas endonuclease comprising a RuvC_III domain and an HNH domain, wherein said endonuclease is derived from an uncultivated microorganism.
[0763] 145. A vector comprising the nucleic acid of any of embodiments 135-143.
[0764] 146. The vector of any of embodiments 144-24, further comprising a nucleic acid encoding an engineered guide ribonucleic acid structure configured to form a complex with said endonuclease comprising:
   [0765] a) a guide ribonucleic acid sequence configured to hybridize to a target deoxyribonucleic acid sequence; and
   [0766] b) a tracr ribonucleic acid sequence configured to binding to said endonuclease.
[0767] 147. The vector of any of embodiments 144-25, wherein the vector is a plasmid, a minicircle, a CELiD, an adeno-associated virus (AAV) derived virion, or a lentivirus.
[0768] 148. A cell comprising the vector of any of embodiments 144-26.
[0769] 149. A method of manufacturing an endonuclease, comprising cultivating said cell of embodiment 146.
[0770] 150. A method for binding, cleaving, marking, or modifying a double-stranded deoxyribonucleic acid polynucleotide, comprising:
   [0771] (a) contacting said double-stranded deoxyribonucleic acid polynucleotide with a class 2, type II Cas endonuclease in complex with an engineered guide ribonucleic acid structure configured to bind to said endonuclease and said double-stranded deoxyribonucleic acid polynucleotide;
   [0772] (b) wherein said double-stranded deoxyribonucleic acid polynucleotide comprises a protospacer adjacent motif (PAM); and
   [0773] (c) wherein said PAM comprises a sequence selected from the group consisting of SEQ ID NOs: 5512-5526 or SEQ ID NOs: 5527-5537.
[0774] 151. A method of embodiment 28, wherein said double-stranded deoxyribonucleic acid polynucleotide comprises a first strand comprising a sequence complementary to a sequence of said engineered guide ribonucleic acid structure and a second strand comprising said PAM.
[0775] 152. A method of embodiment 30, wherein said PAM is directly adjacent to the 3′ end of said sequence complementary to said sequence of said engineered guide ribonucleic acid structure.
[0776] 153. A method of any one of embodiments 28-31, wherein said class 2, type II Cas endonuclease is not a Cas9 endonuclease, a Cas14 endonuclease, a Cas12a endonuclease, a Cas12b endonuclease, a Cas 12c endonuclease, a Cas12d endonuclease, a Cas12e endonuclease, a Cas13a endonuclease, a Cas13b endonuclease, a Cas13c endonuclease, or a Cas 13d endonuclease.
[0777] 154. A method of any one of embodiments 28-32, wherein said class 2, type II Cas endonuclease is derived from an uncultivated microorganism.
[0778] 155. A method of any one of embodiments 28-154, wherein said double-stranded deoxyribonucleic acid polynucleotide is a eukaryotic, plant, fungal, mammalian, rodent, or human double-stranded deoxyribonucleic acid polynucleotide.
[0779] 156. A method of any one of embodiments 28-33, wherein:
   [0780] a) said PAM comprises a sequence selected from the group consisting of SEQ ID NOs: 5512-5515 and SEQ ID NOs: 5527-5530;
   [0781] b) said PAM comprises SEQ ID NO: 5516 or SEQ ID NO: 5531;
   [0782] c) said PAM comprises SEQ ID NO: 5539;
   [0783] d) said PAM comprises SEQ ID NO: 5517 or SEQ ID NO: 5518;
   [0784] e) said PAM comprises SEQ ID NO: 5519;
   [0785] f) said PAM comprises SEQ ID NO: 5520 or SEQ ID NO: 5535;
   [0786] g) said PAM comprises SEQ ID NO: 5521 or SEQ ID NO: 5536;
   [0787] h) said PAM comprises SEQ ID NO: 5522;
   [0788] i) said PAM comprises SEQ ID NO: 5523 or SEQ ID NO: 5537;
   [0789] j) said PAM comprises SEQ ID NO: 5524;
   [0790] k) said PAM comprises SEQ ID NO: 5525; or
   [0791] l) said PAM comprises SEQ ID NO: 5526.
[0792] 157. A method of modifying a target nucleic acid locus, said method comprising delivering to said target nucleic acid locus said engineered nuclease system of any one of embodiments 1-16, wherein said endonuclease is configured to form a complex with said engineered guide ribonucleic acid structure, and wherein said complex is configured such that upon binding of said complex to said target nucleic acid locus, said complex modifies said target nucleic locus.
[0793] 158. A method of embodiment 34, wherein modifying said target nucleic acid locus comprises binding, nicking, cleaving, or marking said target nucleic acid locus.
[0794] 159. A method of any of embodiments 34-35, wherein said target nucleic acid locus comprises deoxyribonucleic acid (DNA) or ribonucleic acid (RNA).
[0795] 160. A method of embodiment 36, wherein said target nucleic acid comprises genomic DNA, viral DNA, viral RNA, or bacterial DNA.
[0796] 161. A method of any one of embodiments 34-37, wherein said target nucleic acid locus is in vitro.
[0797] 162. A method of any one of embodiments 34-37, wherein said target nucleic acid locus is within a cell.
[0798] 163. A method of embodiment 39, wherein said cell is a prokaryotic cell, a bacterial cell, a eukaryotic cell, a fungal cell, a plant cell, an animal cell, a mammalian cell, a rodent cell, a primate cell, or a human cell.
[0799] 164. A method of any one of embodiments 39-40, wherein delivering said engineered nuclease system to said target nucleic acid locus comprises delivering the nucleic acid of any of embodiments 135-22 or the vector of any of embodiments 142-25.
[0800] 165. A method of any one of embodiments 39-40, wherein delivering said engineered nuclease system to said target nucleic acid locus comprises delivering a nucleic acid comprising an open reading frame encoding said endonuclease.
[0801] 166. A method of embodiment 41, wherein said nucleic acid comprises a promoter to which said open reading frame encoding said endonuclease is operably linked.
[0802] 167. A method of any one of embodiments 39-40, wherein delivering said engineered nuclease system to said target nucleic acid locus comprises delivering a capped mRNA containing said open reading frame encoding said endonuclease.
[0803] 168. A method of any one of embodiments 39-40, wherein delivering said engineered nuclease system to said target nucleic acid locus comprises delivering a translated polypeptide.
[0804] 169. A method of any one of embodiments 39-40, wherein delivering said engineered nuclease system to said target nucleic acid locus comprises delivering a deoxyribonucleic acid (DNA) encoding said engineered guide ribonucleic acid structure operably linked to a ribonucleic acid (RNA) pol III promoter.
[0805] 170. A method of any one of embodiments 34-46, wherein said endonuclease induces a single-stranded break or a double-stranded break at or proximal to said target locus.

[0806] While preferred embodiments of the present invention have been shown and described herein, it will be obvious to those skilled in the art that such embodiments are provided by way of example only. It is not intended that the invention be limited by the specific examples provided within the specification. While the invention has been described with reference to the aforementioned specification, the descriptions and illustrations of the embodiments herein are not meant to be construed in a limiting sense. Numerous variations, changes, and substitutions will now occur to those skilled in the art without departing from the invention. Furthermore, it shall be understood that all aspects of the invention are not limited to the specific depictions, configurations or relative proportions set forth herein which depend upon a variety of conditions and variables. It should be understood that various alternatives to the embodiments of the invention described herein may be employed in practicing the invention. It is therefore contemplated that the invention shall also cover any such alternatives, modifications, variations or equivalents. It is intended that the following claims define the scope of the invention and that methods and structures within the scope of these claims and their equivalents be covered thereby.

The application's sequence listing, which the Patent Office published only in electronic form, follows.

SEQUENCE LISTING (6302 sequences)

SEQ ID NO: 1 - protein, 1025 aa, unidentified
  REGION 1..1025: note = Description of Unknown: uncultivated organism with predicted taxonomy: Candidatus Melainabacteria
  REGION 1..1025: note = MG1-4 effector
MKKKVFAFDLGKASIGYCVRDGFNINEANSIIIDKDHAETMSLRDRRRIKKTLDAHHAREEYFNKVWSGVGLNILDKNNNNFKKEFPSKNEDVIYTSCLLRIALLQNQKLEEWQIYKALYNAFQRRGYDVNIAWKSVQTDDDKENIERMKKYTCENDIELIISDEYKYPCYYDALRLGLWNEDEPTKLNRSIPQHNSNKVRTTEYVAPRELVEKELKQLWLNAQLQLPQLNSISAEEFLYGEYKIPYGSCVQKEFKQYRGTKKDWQGVLCQKIPRFDNRIIAKCKLLPKRNVCKANTIENVSFVLLMKLKNLRFTVISGEKLRLSPVQIKQIYENWLEKVEDTYNKDLEKAEKLGKENPEKRLNITITRQEIEKIIGEKIIDKIEPMKADISGRSSFCRRACQIMNKIILDGELYPQNVDISEFVDRDNAKNGITEEEIQSMLSKIGDWNNLYIPDNREENAQNASNSRIKTDIMLGNITNPIVRNRLQIFRDLLLNLAEKYGTPDEVIFEFVRDGADNSLYGSKKAQDTERFMKQQEKENEQIINELKDAGLYVNGQNHANATYFLMHKLLKSQGGKCIYSGQNISPSNYDECEIDHIYPRTLGGNDALYNKVVCYRRENQDKKGRTPYEWLSPDSDKWANYVNRLNKIKKQLGKKKFELLTSKPEDCEKLIESYNGLAETSHIARVAQQMTAFIFGWGLQIQGESRRIFVNNGSSTCAIRKRYGLNKLLGDNLKKNRSNDKHHALDAICISFSRDFKYDKEIKKDIIKGFNPEIVKNAIDKIMPYPYANDKPFKGNTKPLETIYGLRTYGDKSYITQRVELNSIDKKATKIKSIIDETIKNDLLNKLKENPTEQEWKLMLQNYIHPKKQTKVKKVMISVSEGEITKDSNNRERMGEFVDFGTKGTQHQFKHSKRHKGQILYFNEKGVVEVMPVYSNIKTTDVKDKLQNMGCKLYNKGQMFYSGCLVDIPKPFKAGSKEYPAGRYQIKTIRSDKVAELEDACGNKISTNVKYLVPAEFKKVESK

SEQ ID NO: 2 - protein, 1077 aa, unidentified
  REGION 1..1077: note = Description of Unknown: uncultivated organism with predicted taxonomy: Verrucomicrobia
  REGION 1..1077: note = MG1-5 effector
MHTKETVWGFDIGKGSLGEAVRVGNEFKHVLSMEIDADFAEIKTAAATRRAWRTREAHKAREMWLEKCLSDADIEILGRRKVDIVDGTWKLVSRGDGRLEREFPADGENVCYNSIALRCKLLLGEKLESWQVFKALNSAIQNRGYDAQIPWGDEDGKSSETKRSGKSDSAKKSGEDESYAERLALFEREFDKLLAEVENREKYDFPCFFKAAKMGLWSPENPDKVGIRIDNTAEKAKGYVVPRNAVIAEFRALVNAAAKQYPKLKGKADFIMFGKAEEAYASYKPELRRKFGLRRGADSDWTALGQKTPRFDNRIIGKCKLIPRLNVCKIKPLKECKAEDDFLPHTITLALKLLNLRFFRGAGIDSLSFDEFLRAFEIARQNKFALNKTNLKKFFKTIGAEIMDENQSSVEQPREGGRASYSRPAMRLLRDLIFSGKSPAEFYASRICKIENTDKNRGLVAEDLAFIKLMGDIPWNGIFVPDVDTFNFANIRESERADKINKLIGSQNDPIVRHRLAFFYERIKLLESKFGAPDKIVLEFVRDDFLGSKAKKEMSQGIKKRFEEKKKLAEELDSQRAEFGNKYASKKMLLKFELYKKQRGRCVYTDNALPLSELENLEVEHIFPRSRGGADAMYNYVLTDENTNKQKGDKTPFEWLSSDKTKWESYCDRVRSLTQSLGAKRCKLLVSPNAEELMQKYTALAETAWISKLAQKICCIHFGFQFGGLKGEKKVWTVSGNTTAMIRGRYGLNRLLHNEEISEDLPLLDRIVKEKNFEEKNRDNKKHHALDAMCICFAPTSNAKKALSRKNILPEEIAKNPESDDARNFFAKYLAEVVPTKVAIKKPELEQTIYSKRVIGGRQTIVKKCNVRDLAYKGQNPKYDFDTLTKRIKDIINPVSKRVIEDFAKTEPTEAEWEDWCKYEAAIPSKNGSPTRLLRVLCKTKDDAERFKDLSKDGCGAYRKSKSHKGQFIWKDNKGNYLVAPVYIYSSKQKVYAELKNNPKCMGICDFFKTGCLVKISNEVVDEKKNRLWLKAGFYNLNSIAKEKRVYLTDVNGQEHKKIPLQHLMNAGMKRVETNTI

SEQ ID NO: 3 - protein, 1059 aa, unidentified
  REGION 1..1059: note = Description of Unknown: uncultivated organism with predicted taxonomy: unclassified Verrucomicrobia (miscellaneous)
  REGION 1..1059: note = MG1-6 effector
MEKEKNNHVWGFDIGKGSLGEAVRVGGDFKHIASVLLDPEFGEIKTAALARRQMRTRKAHKAREKWLEECLDGTGVEILKRREVGIVDGQWRLISKGDERLEREFPPNGEEVCYNSIALRCKLLLGEKLEGWQVFKALNSAIQKRGYDENIPWGEAEEKSSKKDEDDYAQKLSQYEREKSELFESFADGEKYDFPCFFKAYKMGLWSPENPRRVEVRIDCRAQKAKSYVVARKYVEREFECLVEAAAKFFPKLKGRAKFILYGVSETPYASYYGNMRKKFGLKRGAESDWTALGQKVPRFDNRIIDKCRLIPRMNVCKIRPLNEARNEKDLLYYEVTLALKLLNLRFFRNSNIEQLTFEEFKKAFEIASGAKYKMTKTAMKKFLKSISATALGDDYAEIEPPKESGRASFSRPAMDILKELIFSGMPPREFYGRKIPEISNTDKNKGVVASDLDFIKLMGDCPWGGIFIPDVQTYQFANAAFPNPDAQINKLIGSQNNPIVRHRLTFFFERIKFLESKYGVPDKVVLEFVRDDFMGEKEKKEMRIAMKKRAEEKMMIAKDLDEHGFKGGNLLLKMELYRKQNGICLYTGDALPLSELATLEIEHIVPRSRGGPDAQYNYVITREKTNKLKGDKTPYEWLSSDAKEWASYTDRVNACAKALGKKRCRLLLEKDAEELVEKYTALAETAHIAKLAQKIVCMHFGFQFGGLSGTKRVFTVPGALTSRIRKFYGLDRILHNAAAESENLSFEEFLKFSEDLEKKNRKNKKHHALDAMCLCFAPTGVDSRRAKLGEILPEKLRSEKAAREFFKSYLDKIMPVDVAPKKPRLEDGIYSKRIIGGKACMVKRNNLVDLAYKSGLKPVFDIPTLIKLVDKKEKGIINPQIRKMIGEFAATNPDESAWRKWCEEVRLPSKSGLGARVLRVLVYYGEADEYKDLSKDGCGAYRKGDGHKGQVVWESVDGKYYVEPVYVHASKAGVMAALNANPKKKRICGMFNSHCTVDVGDVYNDRGDFILPAGRYMVNTILTTGRCVLTNADGEKRNPININYLMRAGMRRVELSEL

SEQ ID NO: 4 - protein, 1061 aa, unidentified
  REGION 1..1061: note = Description of Unknown: uncultivated organism with predicted taxonomy: unclassified Verrucomicrobia (miscellaneous)
  REGION 1..1061: note = MG1-7 effector
MKVMEDEGGNHIWGFDIGKGSLGEAVLDGSEFKHVASLLLDADFGEIETAAGLRRQMRTRKAHKAREKWLESCLSGFGIETLKRREVGIVNGQWTLISKGDERLEREFPPDGENICYNSIALRCKLLLGEKLEGWQIFKALNSAIQNRGYDENIPWKESDASPSKKEGGDYAQKLSQYSREKSELFESFEGGEKYDYPCFFKAYKMGLWSPDNPERVEVRIGSDAQKAKDYVIPRKDVEREFERLVEAASKWYPAMKGKAMYIMYGIAETPYASYKPLLRKKFDLKRGAESDWTALGQKIPRFDNRIIDKCRLIPRLNVCKIRPLSKIRGEADLLHYEITLSLKLLNLRFFRNSNVESLSFGEFKAAFEIAKGAKYKMGKAALKKFLKSISASVLSEDQSEIEAPRESGRAAFSRPAMLLLKELIFSGMTPAEFYAKKSGEISNADPNKGIVASDLDFIKLMGNCGWSGIFIPDVDTFHFANKGAEPAKLINELIGSQNNPIVRHRLSFFYERIKFLESKFGIPDKVVLEFVREDFMGKEQKKRMQIEMKKRASEKMLIAKKLDEAGYKGGNLLLKMELLEKQGGVCLYTGEPLLPSELGVLEIEHIVPRSRGGPDAQYNYVLTREKTNKEKADRTPFEWLSSDPVKWAGYSDRVKARAGQLGRKRCELLLEKNAEELVEKYTALAETAHISKLAQKIVCLHFGFQFGGLSGTKRVFTVPGALTARIRTFYGLNKILHNEDLAHETLSFEGFLKRGEELDKKNRANKKHHALDAMCLCFAPTGVNSKRARVDMLLPPKIRSEKEAELFFRKYLDKLIPVDVAPKKPKLEDGIYSMRTVGGKKIMARRVNLVDLAYKSGLKPVYDVSVLIKLLDKKERGIINPQIRKLVADFARTNPSEDEWKKWCGECRLPSKNGLGTRVIRVLLNYGEPAEYKDLSKDGRGAFRRGDGHKGQIVWESTDGKYCVLPIYVHASKAKLLAELCANPKKKRICGIFTSHCMVKVGNTYNNKGELLLPEGVYMLNTIRTDGWIQLTSANGDKSKPININYLMKAGMKKVPVKDL

SEQ ID NO: 5 - protein, 1294 aa, unidentified
  REGION 1..1294: note = Description of Unknown: uncultivated organism
  REGION 1..1294: note = MG1-1 effector
MWAFDLGKGSIGEAVRQGNDFKHKESLLIPHELARRGPAAVSGTPANKYRAKKTREAHLERERWLDTIWKVAGLTPLQARAVWENPETQKWELKHKGDYRLEREFAPKQFKKGAGGELVPIKYPNGKATDGAPAEKKADFETCYTSALLRIRLLQGDPSLKDWQIFKALRAALQSRGYGPVPWATKEARKQGRTPEELAREEEKKLQSADPRYREAVNKWQAFKDSVPKAFHFPCYFDAWKLGLWLHAKPDELGCRINHLAESTRNIRFDRADVRVELIRLGDQAAEILPALKKAFSDWQSGGWKYQHPVTGEKLTYPLRAKTFGEFLCDGPAGTPDESSFEAFLDQRHKAGLNRGSFEEWMAALGQKTPSFDNRILNNCVLIPRFHVCKMDVRLVMDEQGKLTGQIVTESLLATEVTLLLKLKNILVADPSAKDGQRKLTVGEVQDILAYAHRRLAELELVAADGTLLNLWPSKVAQRFSISKSSWRDVAVEAEFLRRMTASNIVVGSETRRLTIAEASSLLRAIANPKKGLEAQLPKDLQLLTKTAKSEFKKAKTASDEKTLRPMPGHEEVKAPKSSGRCGYSRVALRILKELILSGQAPSAFHSRLRELDTELLRKLGSSPEKPLVLIDDSKSQDQEQRKKENIENGKRGLLVSELNFLRQMRKERATEDSWENFFIPSQTIDALQQRHTQDGKLDSQSAIRELLGTINDPIVRHRLGVLAERLRKLQCGDEKRDSPGFGVPDAIVLEFVREDFMGEEAKREYQNFINEREKDRKAAREEAGKLGFDSRSSGLRYELWKAQGCCCLYTGRALAETELDQYEIDHIVPRSLGGPDAIVNYALTFHDINHTKEKGKLTPFTLLHGKPGWAEYLLRVDARATFLRNKKVQLLTRPDAAELVQRYTALAETAWISKLAQAIVNLQFGWTNGYDEKRERRVIVVSGGLTARVRRKYGLDKLLYNDVTDLEVLAKKVKNRDDKRHHALDAMVMTFIPQWARNPDQEGFFRFPREFRDASGREDYQKVRQLFAKHLSEVMPTNIAFERAALADTSFGLRVEGGKRIIVKRVSLFDLAQEPAGAPGKTKFSSKYLLKKIEWVRDATIRRRVKEEFLHKEPTEPNWQKFCDSFRQNSRNGVPGARIMKVWVYAGEPNEFKDLSKDGEGAMRKAKDDHQGQIIYTANDGELAVNPVYAHASITREMKRLRESGSKAKVHCFVRSKCIFHLRKAVPQPEYKLVVKNEQKQKRRIPATLALAPAKFMLNTIITDSMDVEFSAANGQRLVAPLRVLIDAGFEPV

SEQ ID NO: 6 - protein, 1031 aa, unidentified
  REGION 1..1031: note = Description of Unknown: uncultivated organism with predicted taxonomy: Verrucomicrobia
  REGION 1..1031: note = MG1-2 effector
MTWAFDLGLGSIGEAVQQKGEFKHAASWLVPSEFASTKAARTRRRMWRTRQAHKARESWLNQCLRSAGMEVLVGRRVERGPQGWTTLPGDPRLEREFPSAGDTTCYNSALLRIRLLRGETLAPWQVYKALHAAIQRRGYDPNIPWKSGASRSTEEKEEGETRARAAEYQSLLEDMAPGRTEFHYPCYLQAWKMRLWNPGQPEVLQERVSHDAESIHGMVAPRTLVEKEVRDLVAAAARYHPQLAGQADFILWGPACKPYASHNGTLRKQHGLRQGSEEDWEGVMGQKIPRFDNRIIEKCALIPRFNVCKMAPEGRAAAQPDAALPREVAFLMKLKNLRFSRGGGIAHLEAAEIATLFEKRREALSLTQKQWETACEKLGGRPLPPDLEVKAPRLGGRSAFCRPALKHVKELILSGKSPRDFHAEALARLHGNTNPQKGLVPADLDFLLRMGDSWEGLYLPNKRLEAISSRARTPDEAIREVIGSVNDPIVRHRLQLFVERLDELETRFGPPDQVALEFVREDFMGEKAKIEYRKFLNRREKERKEAREQAGQLGATSGSSGLKMELFKAQRGQCLYSGQRLHETKIEDYVIEHIVPRAKRGPDAVINYVLTTEELNNDKSDHIPFEWPYLKKQWDAYTQRVESCAGALGVKRVRLLVSPDAVELAQKYTALAETAWISKLAQTILNLKFGWTNGNTPDGRKAVVVVPGGLTARIRRKYSLNSLLAGDGVDEEEAEKKNRKDHRHHALDAMVISFLPGWVANPDKEHFFRFPEPVRANPRGFFQTAIHNVVPRQLCFEKGKLEETIYARRTIAGNSVAAVRQEFRALAFKSVGINKTEFNLDYLYKQTDKILEPRIRQLVQDFASTEPNEAAWERFCDEVRLPRKDGHPGPHVRRVRMRVGPMDEFKNLSKDRAASGAYRKGSTHHGQWVYRDATGRSLVRPVYAFESAGQVRRELIAMHGLDALVGYFQSGCLVELVRPVAHKKTPLAPGQFSLNTLRKDGFAVVTDARGRKSEPISLKTLLESGFHRVTS

SEQ ID NO: 7 - protein, 1200 aa, unidentified
  REGION 1..1200: note = Description of Unknown: uncultivated organism
  REGION 1..1200: note = MG1-3 effector
MNEYILREPDRKPLAEEWLNHEFYRSAVVLGIDIGLEGIGVYLRRGPQEIFARSIMLELPEAEALAERRQKRAWRHCRKNRKRRLHRLKQLFAKHGLPWLDADRMSRAHPFRERYRAINNGVASKEALSICIRHCVVHRGYDYGGTEEGTFPWGESPLLSKAAEWLATAYVTPELKEQIEQRAPGLVPGKNEEEQRNKFAELLRERLEWSQQHDIARVLAEHVKGGHDNLRTRARGYNFPRQKVWEHLETIVRKHAHLIDDVEGFLAVLGLNPNKAANAKEAAKARKRAIFFYNRKTRFDMERHWEKKVNRCPFAGKLGGNPDERCAENGDLNVRRWKALEFAATRRVEIEATEGKGATKKKRRCLHSLSASATRKLIEFIEKHHGAASPATAPKWEEGKAIILDDITAVHGEKAKPVAEKQSEWNKSYFTQLKDLLTPTLANRKKRASLSAFAAGHLFNIATADSSDFAPENVVTRLREAGFYDWRRNASVDFNPFPQVELLLGRRIKHGKRRGELSPTCQGLLRRIFAEHREALGGATAPDYCVIEVIGDPPRNARQRAERQKEIEANREKREKLFEQYGIEDSGVASKRRRIMLYEQQRGKCPYTGRDLPSNPLDPSLEIEHIFPVEMGGLSVDDNLVLTWRSVNAEKGKRTPLQWAGERFDAMLANTRDMRWSARKREIFAWGTIREDKPDKPSHYNADGTLRVPDFGNTTRTAQLARQLRAEIMRWMQVDDKPDEAARRIGTPSGWLAAQARKSWLPAEEYEKVRNNVTHHLIDAAILAHIPPREGMNSVRCKGIFYVESVPVRDPVTGDTTYRLETKALPELSPLPRLKHWLPDNGEYDVCPVWKPRRQSKTQSLGDSTFWRQVRPDEATVAQRTALKPEEITDADELLTTLQRMNIPAKLIPSRSALADWLAAATAATKADKDKPIAPLKLTDGTPVKNLWKFDSKGSFSSPVGWSGKRNPDGKLRELRTISLKYDRLELWLGYDHQKAERARRAKQPDWEQAGWVYQKRLIPDARALRHVKQMGFSFARDKRHKAPAFMQNKPDKPETHQTLRDLVLGGRLLPFSHKVGEIRKGDVFKLHLLPDGSIRKRTPVGQPEPAAALSTFYVVTALKHGRGNPVVKLTSQLFKDKEGTPMERFAGDVLSKILSTADDLAYVLGLPPAAEEAQKHGWRIPTSPPPPAAAAKETDGNLL

SEQ ID NO: 8 - protein, 1200 aa, unidentified; identical to SEQ ID NO: 7
  REGION 1..1200: note = Description of Unknown: uncultivated organism
  REGION 1..1200: note = MG1-13 effector

SEQ ID NO: 9 - protein, 692 aa, unidentified
  REGION 1..692: note = Description of Unknown: uncultivated organism
  REGION 1..692: note = MG1-3 effector
MGYGVKEKMKHFHYSIPRTQEKLHYPNKYKVTKAQWKKWCEEKGYKINLGTSEIPAPKISGRTGFSRPTMLLLREFILSGLGAQDFREKILTTNFKGFEKFKLQEEDLDFLKNIKNNDPQNIYLPNNSLKEKFLNKNTGDMEEAVQKLIGSTRHSVVRHRLTIFFKELQKLEKKFGAPDQIVIEFAREDFSTKDSKKKYENDSKENNRIFEAAKKELQEKFGIDYRRQNENLVRKYMMWEKQGYTCPYTGQALSFEKLPEYEIEHIIPRGNKWNGPDDIKNTVLTTGTENRKKGDNMPFEYIKNEEWEAFKERVNNMKISGKTKNILFARTKEEAEKLIDRYYGLATTGWVARMARDIACLWFGWQPNAEGEKRKLHTVSGSLVGKVRRKFGLNKALNPFLSEADAGKDEKNRDDKRHHALDAMVMTYLDEYMRNPRNFSKLQKELGEMFGKLGGAQYFEERLAEVTPYKIARNKAKLGETAYRKIEVQEKIIKRGKPEIKKEEIIVTRKNIEDAKPKEIIDKNIAKKIDDFLNKKPSEEEKKEFYKKLGIKKITVKKGKPDNLKNLSKNPNARGQYYESKSITGTGTLQHGVYLYSRDGENWKVEPVYAFKSPYKTKKELLEQGFQIKDNALFYAGCIIEVTENIEGKDIDRGKYTAMTIKTAGTIKLRNYKGDIIQTSLPQLKNNFHFIK

SEQ ID NO: 10 - protein, 692 aa, unidentified; identical to SEQ ID NO: 9
  REGION 1..692: note = Description of Unknown: uncultivated organism
  REGION 1..692: note = MG1-3 effector

SEQ ID NO: 11 - protein, 1271 aa, unidentified
  REGION 1..1271: note = Description of Unknown: uncultivated organism
  REGION 1..1271: note = MG1-8 effector
MPSPTTIWAFDLGKGSVGEAVRDIETNQFLHVAALLLPPDLARRGRADQTGTPASRYRAWKVRLAHRERERWLDTVWLAAGLTPLQKREVWRNPATGRWELKHPADYRLEREFAPALGEKTKDGAPSDAAGANLCYTSCLLRIKLLRWKRGDPPLEEWQVYKALRSAMQKRGYGRVPWAVKQARAQGKTPEELEAEEQKQLEQADPRYREAAGKWPEFKRAVPAEFHFPCYYDAFHMGLWSPDQPDQLRLRLDHRAASTRNVRFDRANVRKELIALGNNAAAMLPQLQQAFERWQRDGWTFRHPVTGKALTKPVHARTFGEFLCDGPAGQPDETSFEAFLNQRREAGIRIGTFEEWMAALGQKTPRFDNRILAPCVLIPRYHACKVYARLEKDRAGRLTGKLVPDSLLASEVTFLLKLKNLLVADPVKGQRKLTVEEVRDIFAFAQRRLKTLPLFTPEGEPAKEWPSKVANCFAINPSDWPKIAVETECLKGLARLTVSDNGAPRPLTREEAEALLHAVAGGRRAAQSALPAHLLPLVKRAAAAWKQAKQQAGEIMLRPLPGHEEVKAPRTSGRSAYSRVALRILKELILSGDAPSAFHARLVRRDPDLLQRLGPAPGQPLAIFDDSTASNEAQRKQHDAENRKRGLLVSELNFLLQMRKDDGSPDSWENLFIPAQTLEALQQRHTEDGRLDADAAVRELLGTIKDPLVRHRLGVFDERLRKLRFGDARKGLRGFGVPEAIVLEFVREDFMGEQAKRELQTFQKRREQARAEAEAEAAKLGLESRSSALRYELFKAQGGICLYTGRPLSETQLDQYEIDHIVPRSLGGPDAMVNYVLTFPEVNSAKEKGKLTPYALLHGTDGWDAYVARVKARAAALRNKKVQLLTREDAPELVERYTALAETAWISKLAQTIVNLRFGWRNGVDYSGPQPVKRVIVVSGGLTARVRAKYGLDKLLYGENTPPEVLAKKVKNRDDDRHHALDAMVMTFIPHWARDPNKQGFFRFPPAFRDANGREDYQQIQSLFARQLEKIVPRHLAYEPCALADTIYGRRLDKGEPVIVQRVPVRELAYKQEQQRPVFNLTYAKDQIAHLRDPRLRRVLEALVATGPDQVAWDNYCRALAAGTCPELPGRKVLKVTLNRDEDPAEFKDLSKDGCGAFRTRKGEHRGQFVYLDARGRVRVRPVRPFESLVAVKAEVERLAAGGRLIGFFQSMCPVELDQPVTHGNFVLRPGTYRLNTIKKDGRAQVTTAAGEKTPQINLAKLVAAGFRRIA

SEQ ID NO: 12 - protein, 1655 aa, unidentified
  REGION 1..1655: note = Description of Unknown: uncultivated organism with predicted taxonomy: Verrucomicrobia
  REGION 1..1655: note = MG1-9 effector
MPSPTTIWAFDLGKGSVGEAVRDIETNQFLHVAALLLPPDLARRGRADQTGTPASRYRAWKVRLAHRERERWLDTVWLAAGLTPLQKREVWRNPATGRWELKHPADYRLEREFAPALGEKTKDGAPSDAAGANLCYTSCLLRIKLLRWKRGDPPLEEWQVYKALRSAMQKRGYGRVPWAVNQARAQGKTPEELEAEEQKQLEQADPRYREAAGKWPEFKRAVPAEFHFPCYYDAFHMGLWSPDQPDQLRLRPDHRAASTRNVRFDRADVRKELIALGNNAAAMLPQLQQAFARWQRDGWTFRHPVTREALTKPVRARTFGEFLCDGPAGQPDETSFEAFLNQRREAGIRIGTFEEWMAALGQKTPRFDNRIVENCALIPRLHVCKVAPRWRRNQNGDKELDPRSLLAAEVTFLLQLKNLQVDDATAGTVRYLNTDELNEWWKHACEKAANVPLSDTWERDVLDCFKITRAEWRRWCVSKNLLPVARERSEAAALAGEIATQSAEAASGDSGAEERSRGKSQDVVQAPKPTGRSRFCRPALAILRHLLLHREKPQDFAARLRNREPALLDALDFDVLDTAPAEERPTGNGKALKRYRKQQRTWLLTGDLDFLDHVWKATDRDGNPRDFEPHQLRIPDMTLRDLRKRHDLTETPYSDLLRQNSAELERRDKAILELIGQQKNPVVRDRLTRFWQRLKHFQNPVVPSDPKKQKPGLGLADPACLVLEFVRDDKDNSLEGRKRTEAIQQALRENEQRRDKARKALEQCGLPTTDDMVVRWLLREAQGGVCIYTSNEIRPADLPNLQIEHIVPRSRGGPDAFWNWVLCDENANAEKGDRVPYVWFKEEKTDEEWADYKRRVLARAAHLGRRKVDLLLRPDAAELAGEKYTALAESAWIARLAQTIARLHFGWPLDDEPGEERVITISGGLTARIRRKYLLDSLLGVGNDAETLRREIDSALNELQALRTDTSLSENAPKQKRAELRQRLANLAAEAEKNRDDQRHHALDAMLLTFLPNWARDRTKEDFFRFPTAIGDNDFYSKEDQPEMAAIKSQLAKLYVENKPVFREIKQARLAGDFGRLQQLKASVFPARKRIAELYRALDKLKQPRNVRAVREWFRAQLEGASPAPNGPVLPRTMAWQRTPTEATLYRRVYLIYKDCPERSLLALTDLAFAPNPRNPQQPVFDLKWLRTRIQSIAEHPGYDRKKLQSVLSAKLEATLSAKRFASCQFGPEDWQQICAQPEVAACFQPVGRGKSKRPPEPDQRLVKVCKVEVLPATRYELSELGYTSGNNYAWNPDHLAETARNILRKDDAQARTRGRRRTPAPASSPSADASPWPGFLWDREMQAKLASPKFREALEQQLVPHLLPPKPARMSDAERTDWATREERWKQAFEQFRKSHNLPKSFFVFTSDSDRPPRRPNVSLLRVLFEPKDKVFSRDALAKQAQSVVDAQLRRCLECFADSLTQVRDPRLQEKAWRDYCNVVRVVPKETLEQFTREHPTPTADQWISFFEAQTGPRIFQVMQTVGTSLEEYFDLSKDACGAFARGGNKGYWLCKRGDAIEARPIRFFENPEQVRVRLLGQGWELLDPKPWRTGDLLNLPEAAQSGARSVPAGYYFLGSFSNDTGVNLKPCFGGEVPQNVSLKALWNRGLRRCSPTA

SEQ ID NO: 13 - protein, 1147 aa, unidentified
  REGION 1..1147: note = Description of Unknown: uncultivated organism
  REGION 1..1147: note = MG1-10 effector
MTHYYQFNSIPDAVSPNSESLEQLKSASARYWAEHDFFSSDTVVLGLDIGMEGIGICVRKGKDILYCKSLLVDLPESEALAKRRAFRASRHVRKNRRRRMRLLKDLFGQYGLPWVDDSIMSRSDPYILRHRAVSKKLASKEALSICIRSLVARRGYDYDAMKEQGNNPWGDSNSVKEVMSWLKTTFVDEKMVQFIKEREEELTEGKGAPLKEETREKLWELLQARKAASDKQDINAMTAAYAKQRISERQAKGMNYPRSMVRKNLEEIIDRHAHLIDDVEGFKASLFRPCVTKEDKGKAIFYYQRKTAEENRLHFEKKVKDCPLAGWLQLGDENSKCCLKGNAWFRLWKLVDFLSVRRFYLKKKEKGSVPIRRLLPASVIESLVKASVHQDDHHFVSGWKDVKAVLNESLACEGWMAIDKGGDVKDQKDWNKEQLIALQDLCSPSASSRQARASLGEASARKLYYMVTQNESNFDPECMEEQKKNCGLYEQRQAISLFGGTFPQVAALLGTIGPDKKNKNGRFVQKTTGILQRIFADLSPMIGGKKVPDYVVVECIRQAPRTETQKKEIEVEQKNNRASKDKMASEFGVGEGKLGRSKYFRIALWKQQGGSKTTKAICPFTGKTLDVDDPLSPQLELAHLYPDTKGGLYMMDNLVLTTREVNKAMDNMTPVEAARAGIFGISCDEMIRRSEQFAWGESKRKLFRFEPTAEESFPDFNNMTRISQLASQLRKQVAFWLGIHADSDDLSAAVALRERIGNPQGQYTAAMRRSLLPESGKDRSGYVHHREDAALLSCMPPMGLNSIKYKGIFYTKMVPWLDSSGQLQQRRSLFALSCADGLPLPDIASILEDDTECPIIKRRSESKYKALGDSTFWHVDEEGNTWQRTPLVLGKDTSADSLHAMLVASCIPENLIPSQSEIDKWISHHTPAHRGEEIKNIPLRLKNGVPVKSIWKEASKGTLINSPMGWSGTMSDDGIFREARSLRSSNDRLELWIGWNAKKQVWEYQTRVVPTREAMAGIRRMGLPWRNTKNIPPYLQKILKQKKVSSLKELISGKLCPHSIHVADIRKGMVAKIEFEYDVKKCPSDKNGLKEVMWGEVTAILTSGKVECKSLIRKDMKPYSATNSLKIAMLFGFPPPDEFAKTHSLKP

SEQ ID NO: 14 - protein, 1206 aa, unidentified
  REGION 1..1206: note = Description of Unknown: uncultivated organism
  REGION 1..1206: note = MG1-11 effector
MNNTPLSPNTASAEPEPDRKLAAESAAENAQARAVAASWAQHPFFDDESIVLGLDIGMQGIGIAVRRGRQLLYAKTLMVELPESAPLRQRRQYRAARHARKNRKTRMRRLRELFLRHGLPWVSDEIYGRSDPYKLRARAFTPGKTLASKEALSLCIRSVVAHRGFDYYALCSESGGYPWGESSDMKDAARWLRTQYVTEETRDQLIGMAGAFSCFDEKEITDNHLLEWERLVRERCDDPNKPDLATLLRQYASSRPDDRRARGWNFPRSLMEDHLRTIINKHRHLIDDCDGFLAALFRPCDTKADKKRAIFHYNRKTPAEARARFERKIALCPYLSDPETAISLGHADAEGRPLPPEKCGTRGEAAICRWSMLDFLSTRRFELKPPKARGKDLAEPPLLRQTLPEATIRALDEALQEPVKPRWADLKSRLTKALKPFTLETNTKSPTNALLIEQLKDICCPSGPKAAARAGLSARAAELLIGVITGRSNPAGEASDTPPAPSYDPRQLEERKLAWGLYEKRARIDASRTGIYPQVHTLLGTLRVHRKSAEDSAFSTRGLLQRLFEGELRESLGGKTRPDYCIIECIKNPACNTKQASEIQKQNDARRKRKEELCRAYGCANPTHAEMLRLQLFEEQGGKRKGEAPAICPFTGESLGTDPLSPHLELAHIFPDARGGLYIRENLVLTTARTNRDMNNRTPIEAAEASLPGWSRWETIEQRIRHFRWNAKKLELFTFRPTPEQPIPDFNNMTRTAQLARELRRYIAVWMGINRDVDAVRERIGNPCGSYTAAARRGMLPADYRKDRSNNLHHRIDAAVLTCIPPAAGLNNLRCGGIFRNTRINGKRCTTTIPGLPLPDFGALIADDSTCPLVSRRRTGSTRQSLGDSTFWGVNSQGDLTQRTPLVYDKDTSVESIAQDLVRTGIRAEEMPDQDHIEQWLLRMSQAQQEEREGRDAAGPAPTLRLKNGRPIRSIRKGSKKGEIAVSPLGWSGIIEPRSESPAGDGAPAAEATSGRGRDRNRAAITAPNRFIALRCLSSSNDRLELWLGHDGKKWKYVTRVIPTKQALAGLKRMGLPWRGRERAPLYLIRLLDAARCRDLKQFICGTLPPHAVKVATVRKGDFFRATFNLKPKKREEQHSHTACLDTPATLTGWGKVTALMTKGQIGISPATHQGYEKTSVRGPSRLAKMLGLQEDAAAEAESRGLLPRP

SEQ ID NO: 15 - protein, 1244 aa, unidentified
  REGION 1..1244: note = Description of Unknown: uncultivated organism
  REGION 1..1244: note = MG1-12 effector
MDYIIKPAPGSTSSPYDWANDPFYKSAIVLGIDIGIEGIGVWLRKGRNHVFARTFLFNTPEAAPLKGRRLLRGGRRCRQSEQHREVLLKQFCAEFGLPWTEIKDQENEDGPFKLRLRAVRSKLGSKEALVVCLRHIIRHRGYDYHETDGGSFPWGDELKADVATGWAKAAYCSPEDAAEFLHDVSDCGWNDKQLASFRHALTAAVERHKQGIEAALEKHFAQDKNNLRIPARKHNFPRSLIWKHMEKICANHRDFLGGEAGLSAALLKLKPILNYHRKKPGALAERKVNRCPVAIHLFGGTAPKCDPNSNPHIRRFKLLEFLATRSFVAKDGTRLLANADLMKWLLDEVLAEDIRAVVVNKVKGGQKQERRKFGGFRDEFIARFDPNGKIELAGDRVSHNKDFFEQLGDLLRPKLSVLNARASICGKSAEELFKRATKDGYQAEIISRNLKEKQFDGQSFYTLRQAAAAGFGIYPQVEFLLGRRGKKGNQAVPGVLRQMLELPEVSAKLDGQKIPDYVIIETVGDMPRNVVQAKEIQDEQKRRREFKEGLFEKFGVHDKQQDSEARKRVLLYDQQGGNRGEAICPYTGEPLGDPLSPKLQIDHIFPESLGGISEMVNLVLTHETTNNQRKGNQTPYQAFGGQQNTAEWQALVARVQKMGWNKQKRELVLREESSCPEWDNMTRIAQLARQLREEAARWLGVFGDDAKVRQKIGTPTGYQTSVCREAWSENVPKKDRTNLRHHLWDAAVISHIPPDRGMQLSHCGGIFFHAGEKKNGNILMRALPGLGPDLNSFENATKDQCLVEKKKTNRSKKSRFQQWIYGFPDKNGQMWARDSLKSLADKANLLELLRDAGIGENQLPTSHFEEWQEKRKAQFFTREEAWAAVEALALPPEQKIPEPIFEEWWSYRFSGDKRKVDEKLLRILIAKAGVKESVSKERLASVLTNRGDPGPLTRKDGTPINGVSGTAKQMTPMAIIPHRNHKREIIGFKLATESFVRAEIWVTEKPTKDGNAELNYHCRLIPHPRGLANLRQRVMQCTGKQLTWERRLTDEELRELGLLKELAALKREQEKISATHAKAVQKWQKEQQAKTNTLDLASSPSVQPIELKLPWLSLRKCYAGLPLYARRLTNKHGADISRIAKDDLLRVPLNSEGDICKREESAYQTLWYRVSAINKSGKIEMKMAERKQIKPPSERELRDGKRKPLTTDELWRVYAYTKEPSSTDVLAYLLEITRGNDQPPHPVK

SEQ ID NO: 16 - protein, 1294 aa, unidentified
  REGION 1..1294: note = Description of Unknown: uncultivated organism
  REGION 1..1294: note = MG1-14 effector
VWAFDLGKGSIGEAVRQGNDFKHKESLLIPHELARRGPAAVSGTPANKYRAKKTREAHLERERWLDTIWKVAGLTPLQARAVWENPETQKWELKHKGDYRLEREFAPKQFKKGAGGELVPIKYPNGKATDGAPAEKKADFETCYTSALLRIRLLQGDPSLKDWQIFKALRAALQSRGYGPVPWATKEARKQGRTPEELAREEEKKLQSADPRYREAVNKWQAFKDSVPKAFHFPCYFDAWKLGLWLHAKPDELGCRINHLAESTRNIRFDRADVRVELIRLGDQAAEILPALKKAFSDWQSGGWKYQHPVTGEKLTYPLRAKTFGEFLCDGPAGTPDESSFEAFLDQRHKAGLNRGSFEEWMAALGQKTPSFDNRILNNCVLIPRFHVCKMDVRLVMDEQGKLTGQIVTESLLATEVTLLLKLKNILVADPSAKDGQRKLTVGEVQDILAYAHRRLAELELVAADGTLLNLWPSKVAQRFSISKSSWRDVAVEAEFLRRMTASNIVVGSETRRLTIAEASSLLRAIANPKKGLEAQLPKDLQLLTKTAKSEFKKAKTASDEKTLRPMPGHEEVKAPKSSGRCGYSRVALRILKELILSGQAPSAFHSRLRELDTELLRKLGSSPEKPLVLIDDSKSQDQEQRKKENIENGKRGLLVSELNFLRQMRKERATEDSWENFFIPSQTIDALQQRHTQDGKLDSQSAIRELLGTINDPIVRHRLGVLAERLRKLQCGDEKRDSPGFGVPDAIVLEFVREDFMGEEAKREYQNFINEREKDRKAAREEAGKLGFDSRSSGLRYELWKAQGCCCLYTGRALAETELDQYEIDHIVPRSLGGPDAIVNYALTFHDINHTKEKGKLTPFTLLHGKPGWAEYLLRVDARATFLRNKKVQLLTRPDAAELVQRYTALAETAWISKLAQAIVNLQFGWTNGYDEKRERRVIVVSGGLTARVRRKYGLDKLLYNDVTDLEVLAKKVKNRDDKRHHALDAMVMTFIPQWARNPDQEGFFRFPREFRDASGREDYQKVRQLFAKHLSEVMPTNIAFERAALADTSFGLRVEGGKRIIVKRVSLFDLAQEPAGAPGKTKFSSKYLLKKIEWVRDATIRRRVKEEFLHKEPTEPNWQKFCDSFRQNSRNGVPGARIMKVWVYAGEPNEFKDLSKDGEGAMRKAKDDHQGQIIYTANDGELAVNPVYAHASITREMKRLRESGSKAKVHCFVRSKCIFHLRKAVPQPEYKLVVKNEQKQKRRIPATLALAPAKFMLNTIITDSMDVEFSAANGQRLVAPLRVLIDAGFEPV

SEQ ID NO: 17 - protein, 1010 aa, unidentified
  REGION 1..1010: note = Description of Unknown: uncultivated organism
  REGION 1..1010: note = MG1-20 effector
MNTKKIIFGFDVGLGSLGEAVRQGDKIIHADSLLIDKEVAEIKDQAERRRQYRTRTTHKEREKWWKKIWKMIGKQPLKGIEVFKDKNGNWQAEKGDEKLEREFPKKGDDTVYTSCLLRILLLQGEKLKDWQIYKAVRSAFMRAGYPNVPWAKQDEKEEEKRATEFTEMLEKIFTNLDYRFPCYYDAYQMEIFDAETGEIEIRQKKKANRARGYTAPRDLVEKELRLLLEQAAKQIPDLKNMPAKDWKDYILFGLKGDEKLQNKQWKGFYDTKIRGILDQKKAKFDNRCVNNCSQIPRFRVSRTKNILYFQTHLLLKLCNMMVEKNKKNEKLTPEERQEWYEKAEGERKQYMKDFFAKGGKKLTEDDYKKIANKYKITKTQWKKWCEKKGYKTYPGTCEIAAPKISGRTGFSRPAMLLLREFILSGLGAHDFRKKVLLENFKGFEKYKLHKEDLDFLKNIKGNDPQNIYLPSISLKEKFLDKNTGDIEDAVQKLIGSTRNSVVRHRLSVFFKRLQELEKKFGTPDNIVIEFAREDFSTKDSKKKYENDSKTNNKLFLEAKKKLRDNFGIDYRKQNENLVRKYMMWEKQGHICPYTGQPLDFEKLPEYEIEHIIPRGNKWNGPDDIKNTVLTTSAENRRKGENMPFEYIKNEEWESFKNRVNNMNISGKTKNILLARTEEEVEKLINRYYGLAVTGWVARMARDIACLWFGWEPGAEGEQRKLHTVSGSLVGKVRRKFGLNKALNPFLSAADAKKDEKNREDKRHHALDAMVMTYLDEYMRNPRNFSKLQKELGEIFGKLGGAQYFEEKLEDVIPHKIARNKARLEAQAISSVKKKISELKKTDIESIIDYKMKIEIQEIGLKNFQKKHSKEQKILLKPNGAINLSKDKKSRPRWYVTKTGEGFSYEGHYIFKERNNENFKICPVKAFESSWQVFRKLKNKGYEIKDNALFYAGCIIEITKPIPKKDIDVGFYEIKSLKPSDHRIQLKSLKRGEVFPLFAISYLKNNFHFVQ

SEQ ID NO: 18 - protein, 774 aa, unidentified
  REGION 1..774: note = Description of Unknown: uncultivated organism with predicted taxonomy: Candidatus Peregrinibacteria bacterium CG10_big_fil_rev_8_21_14_0_10_54_7
  REGION 1..774: note = MG1-21 effector
EKLEREFPKKGDDTVYTSCLLRILLLQGEKLKDWQIYKAVRSAFMRAGYPNVPWAKQDEKEEEKRATEFTEMLEKIFTNLDYRFPCYYDAYQMEIFDAETGEIEIRQKKKANRARGYTAPRDLVEKELRLLLEQAAKQIPDLKNMPAKDWKDYILFGLKGDEKLQNKQWKGFYDTKIRGILDQKKAKFDNRCVNNCSQIPRFRVSRTKNILYFQTHLLLKLCNMMVEKNKKNEKLTPEERQERYEKAEEERKQYMKDFFAKGGKKLTEDDYKKIANKYKITKTQWKKWCEKKGYKTYPGTCEIAAPKISGRTGFSRPAMLLLREFILSGLGAHDFRKKVLLENFKGFEKYKLHKEDLDFLKNIKGNDPQNIYLPSISLKEKFLDKNTGDIEDAVQKLIGSTRNSVVRHRLSVFFKRLQELEKKFGTPDNIVIEFAREDFSTKDSKKKYENDSKTNNKLFLEAKKKLRDNFGIDYRKQNENLVRKYMMWEKQGHICPYTGQPLDFEKLPEYEIEHIIPRGNKWNGPDDIKNTVLTTSAENRRKGENMPFEYIKNEEWESFKNRVNNMNISGKTKNILLARTEEEVEKLINRYYGLAVTGWVARMARDIACLWFGWEPGAEGEQRKLHTVSGSLVGKVRRKFGLNKALNPFLSAADAKKDEKNREDKRHHALDAMVMTYLDEYMRNPRNFSKLQKELGEIFGKLGGAQYFEEKLEDVIPHKIARNKARLEAQAISSVKKKISELKKTDIESIIDYKMKIEIQEIGLKNFQKKHSKE

SEQ ID NO: 19 - protein, 774 aa, unidentified; identical to SEQ ID NO: 18
  REGION 1..774: note = Description of Unknown: uncultivated organism with predicted taxonomy: Candidatus Peregrinibacteria bacterium CG10_big_fil_rev_8_21_14_0_10_54_7
  REGION 1..774: note = MG1-22 effector

SEQ ID NO: 20 - protein, 809 aa, unidentified
  REGION 1..809: note = Description of Unknown: uncultivated organism with predicted taxonomy: Candidatus Melainabacteria bacterium
  REGION 1..809: note = MG1-23 effector
MSKKVFAFDLGKASVGYCVREGFDIRKVGSIIIEKDHAEITTNRDRRRVKKTLEAHKAREQFFKKLWQNAGLETLDKEDERFKKEFGNKKDKNIYTSCLLRIALLQNKKLEQWQIYKALFNAFQRRGYDANLAWANAKTDDDKKNAEYMAKYTKENNVELINNDDFKFPCYYDAKRLGLWSEENPSELKTTIPLTGSKKVRTNGLVAPRELVEKELKQLWLNAQKQLPQLQNIDAEYFLYGDYRQAYGSYVVKEFRKFRGTKNDWQGVLGQKIPRFDNRIIAKCKLLPKRNVCKANTLENVSLVLLMKLKNLRLTDNMGEKFLLSPIDIKKIYENWLIKAKIDTNEEKLDTTITKKEIETVLNRKIKDKIDPMKANISGRSSFCRRACKIMTKIILSCELYPQNVDITEFVDKPNTQNPITIEEINTMISKIGDWNNLYIPDNRDEMAENSSDNREQTDTLIGNITNPIVRNRLQIFRDLILNLKQEYGTPNEVIFEFVRDGADNSLFGAKKANDTLKVMKENEKDNEQIVSELKDANALSSENILKLKLLKKQGLKCIYSGKSIAISNFDACEIDHIYPRSMGGNDALYNKVLCYSMENQKKAGRTPYEWLHKDEKTWFDFVNRLEAIKDTLGKKKYELLTSKPEDCKILIDSYNGLAETAQIARIAQQITALVFNWGLQVEGENRHIFVNNGSSTASIRRTYKLNKLLGDDVKKNRDNDKHHALDAICISFSRDYKYNKEKKVDEIEGLNPEIIKEVINNLMPYPYANDKTFKGNIKPLESIYGKRVKNGNTYLTKRADITSLEPKE

SEQ ID NO: 21 - protein, 1036 aa, unidentified
  REGION 1..1036: note = Description of Unknown: uncultivated organism
  REGION 1..1036: note = MG1-24 effector
MGKKVFAFDMGKTSIGFCVREALEIKEANSIIIDKEHSDISSIRERRRVKKNLEAHKAREAFFINLWKSCGLIPLDTKDENFKKEFATKHEDVIYTSCLLRIALLQNKKLEQWQIFKALYNAIQRRGYDTNLAWKSAQSDDDKENQELVKKYTQENGIEMIQNEEYKYPCYYDAKRLGLWNETTPKVCKRTLNNENLIKIRTTTYVAPRQLIEKELCNLWKNAQAQIPELNKYTVEEFLYGEYKEPYGSFVNPKFKQYMGTNHDWQGVLGQKIPRFDNRIIAKCKLLPKRNVCKANTIENVSLVLLMKLKNLRLTILDGSKRILAPAEIKHIYENWLSKVEQNVIKMQEKCKKENKTPDKEDKKLDTTITKKEIENVINQVISDKIEPLKANISGRSAFCKRACQIINKFILGGYLYPNEMDITEFIDSENRPNGITKAEIQNMLSKIGDWNNLFIPDNRGETIDNSENIRVKTDLMIGGITNPIVRNRLQIFRDLLLSLERDYGKPDEVIFEFVREGADNSLFGKAKAQAAETNMREMEKRNQQLIEELKNYDAYSSKNFEKLKLLKIQCGQCAYSGEKIGIGDFNKCEIDHIYPRAMGGNDALYNKVLCYRVENQKKQDRTPYEWLSSNKEQWANYVFRLNKIKQSLGKKKFELLTSKPEDCAKLIDSYNGLAETAYIARVAQQITAFCFGWGLQVEGEKRHIFVNNGSSTHAIRRRYGLNSLLGNDIKKNRDNDKHHALDAICISFSRDFKYDEKSKVDVIDGFTKEMVKKVLDEIIPYPYTNKKPFKGNIRPLETIYGLRTYGNNSYITQRIPLESIEQKDKKIKTIIDEAIKNDLLEKLTQKMDSKDWIKMLQNYVHPTKKTKVKKVMVVVSEGKIEKDSNGKERIGEFCDFGTKGTNHQFKHSKGHKGQILYFNEKGSVKVMPIYANIKTQDVKDKLLALGCKLYNKGEMFYSGCLIEVEKPFNATVYYKETDENGKDKTISVKQEVPAGIFKLRTIMSNGAIKLENNCGMEILSSAKVLVEANMKKYKN

SEQ ID NO: 22 - protein, 1027 aa, unidentified
  REGION 1..1027: note = Description of Unknown: uncultivated organism
  REGION 1..1027: note = MG1-25 effector
MVKKIFAFDMGKSSIGYCAREGLKVLELGSLIIDKDHAEIVSNRDRRRVFKTLNAHKAREKFFNDLWKSCNLEPLEKEDKLFKKEFGKKDEETIYNSTLLRIALLQNIELEEWQIYKALHSAIQRRGYDTSLAWANANTDDEKENKKRTLEYTTNKENDELISQEEYKYPCYYDAKRLGLWEEENPKTLKTYVDVYNNDKIRTAGIVAPRNMVEKELKQLYINAQKQLPELNKYSADYFLYGVSEKAYATYLDSDYKKYRGTNWEWENGGVLGQKIPRFDNRIIAKCKLLPKRNVCKAETVENVSLVLLMKLKNLRFTDVLGEKSMLSAEAIKQIYENWQKKATKNDGSIKLDTTITKQEIEKVIGEKILEKFEPMKAKLSGRSSFCRRACKIMCKIILEGIENPATMDVGEFIDNIDVKNGITEKEIRTMLSKIGTWDNLYIPDNRYEMAEISSDEREKTDILIGNITNAIVRNRLQIFRDKILELKYKHGTPDEVIFEFVRDDNSLFGAKKTQEYISNINKNQKENEEIAQQLKDANCFSSKNLEKLKLLQKQGGHCIYSGRPIAISNLEECEIDHIYPRSRGGNDALSNKVLCYAIENQNKKEQTPYEWLHNNEHSWNEFVKRVTNKQEALGKIKVKLLISKPEDSEKLIKSYNGLAETAQIARVAQDITAFVFGWGLQLEGEKRRIFVNNGATTSAIRKTYRLNKLLGNDVKKNRQNDKHHALDAICISFSRGYKYNATTKRDEIEGLDIHDNEFRDLVKSSIDSLLPYPYSNDKPFKGNIKPLETIYGYRKLGEKTYITQRVDITSIEQKDKKIKSIIDEIIKNDLLAKLEDKMTSKEWANMLSKYVHPTKKTRVKKVLLVVSEGITNFDENGRARIGEFVDFGTKGTKHQFKHSKGHKGQILYYNEKNAIKVMPIYANQKLGEVKDKLEQMNCKLYKKGMMFYSGCLIKVDKEFEGTAYYTIADENGKEKQTPKKEILPAGIYKLRTLKSDGRVQLESSVGIEIWTNAKNLVDTDFKKLTK

SEQ ID NO: 23 - protein, 1025 aa, unidentified
  REGION 1..1025: note = Description of Unknown: uncultivated organism
  REGION 1..1025: note = MG1-26 effector
MKKKVFAFDLGKASIGYCVREGFEINEANSIIIDKDHAETMSLRDRRRIKKTLDAHHAREEYFNKVWSGVGLNILDKNNNNFKKEFPSKNEDIIYTSCLLRIALLQNQKLEQWQIYKALYNAFQRRGYDVNIAWKSVQTDDDKENIERMKKYTCENDIELIISDEYKYPCYYDALRLGLWNEDEPTKLNHSIPQHNSNKIRTTEYVAPRELVEKELKQLWLNAQLQLPQLNSISPEEFLYGEYKVPYGSCTEKEFKQYRGTERDWQGVLGQKIPRFNNRIISKCKLLPKRNVCKANTLENVSFVFLMKLKNLRFTTVSGEKLRLSPTEIKQIYENWLLKVENAYDKDIEKANNLGKEKPEKRLNINITKKEIENVICNEIIDKIEPMKADISGRSSFCRRACQIMNKIILDGELYPQNVDISEFVDRDNVKNGITEEEIQSMLSKIGDWNNLYIPDNREENAQNASNSRTKTDIMLGNITNPIVRNRLQIFRDLLLDLAEKYGTPDEVIFEFVRDGADNSLYGSKKAQDTEKYMKQQEKENEQIIKELKEAGLYVNGQNHANATYFLMHKLLKSQGGACAYSGQKIAPSNYDECEIDHIYPRTLGGNDALYNKVVCYRRENQDKKGRTPYEWLSSDNDKWANYVNRLNKIKKQLGKKKFELLTSKPEDCEKLIESYNGLAETSHIARVAQQMTAFIFGWGLQVQGKNRRIFVNNGSSTCAIRKRYDLNKLLGDDRKKNRENDKHHALDAICISFSRDFKYDKEIKKDIIKGFNPEIVKDAIDKIMPYPYANDKPFKGNTKPLETIYGLRTYGEKSYITQRVELNSIDKKATKIKSIIDETIKNDLLNKLEENPTEQEWKLMLQNYIHPKKQTKVKKVMIIVSEGEITKDSNDRERIGEFVDFGTKGTQHQFKHSKGHKGQILYFNQKGIVKVMPVYSNIKITDIKDKLQNMGCKLYNKGQMFYSGCLVDIPKPFKAGSKEHPAGCYKVRTITLGGQIKLEDNCGIEILTSATYLVQAGFKKVESK

SEQ ID NO: 24 - protein, 1028 aa, unidentified
  REGION 1..1028: note = Description of Unknown: uncultivated organism
  REGION 1..1028: note = MG1-27 effector
MNKKVFAFDLGKASIGYCVREDLKILEAGSLIINKDHAECISNRDRRRVQKTLLAHKKRESFFNNLWQNCDLNILNKDDKRFSTEFGKKNDSTIYNSTLLRIALIQNKPLEEWQIYKALHNAIQRRGYDSKLPWANAKSDDDKKNEELSARYTQNEQGEELIKNENFKYPCYYDAVRLSLWSENMPEKLQTYVPLDNVKKIRDAGIVAPRNLVEKELKQLYINAQLQLPQLNKYSVEYFLYGEGEVAYASYNKKDYKCHRGTEWDMQGVLGQKIPRFDNRIIAKCKLLPKRNVCKANTLENVSFVLLMKLKNLRYTNINNEYSMLSADTINKIYQNWLNKALKDDGSYKLDTTIIQKEVEKVLGEKIQDKFEPLKANISGRSSFCRRACKIMNHIILNGIEDPTTMDVAEFTDNIDTPNGITEAEIRTMLSKIGTWENLYIPDNRYEMAELSSDNREKTDILIGNITNPIVRNRLQVFRDKLIELKQKYETPDKIIFEFIRDGADNSLYGAKKAQDFLKTIKENEKTNNDLAIELKNADCFSVVNLEKLKLLKQQDGICIYCGQRIGISDLDKCEIDHIYPRSRGGNDAISNKVLCYSIENQKKKDRTPYEWLHNDERTWADFVNRAKLLKDKLKKTKYTLLTSKPENCEELIKSYNGLAETAQIARVAQDITAFIFGWGLQLKDEKRRIFVNNGASTSGIRKTYRLNKLLGNDVKKNRNNDKHHALDAICISFSQNYKYNKHTKRDEIEGLDIHDNEFRELIKQTLDAIIPYPYTNDKPFKGNTKPLETIYGYRCIDNKHYITQRVSLETIEQKDKKIKCIVDEVIKNDLLEKIKEKMPTKDWTTMLQNYIHPTKQTKVKKILVIVSEGELTKDSNAHSRIGEYADFGTKGTKHQFKHSKGHKGQILYYNEKGVIKVLPIYANQKDSDVKSYIEQNGCKLYKKGMKFYSGCLIQINKDFEATAYYTQTDENGNDKQIPTKEKLQAGVYKLRTMMIDGKVKLESSTGIELLTNAKVLVEADFSKFSKY

SEQ ID NO: 25 - protein, 1036 aa, unidentified
  REGION 1..1036: note = Description of Unknown: uncultivated organism
  REGION 1..1036: note = MG1-28 effector
MGKKVFAFDMGKASIGYCAREDFEIKEANSIIIDKDHSDISSIRDRRRVKKTIIAHKAREQFFVNLWKSCNLTPIDTKDDNFKKEFANKKDSTIYTSCLLRIALLQNKKLEQWQIFKALYNAIQRRGYDANLAWKSAQTNDDKENIELTQKYTQENGIELIKNEKYKYPCYYDAKRLGLWDENFPNRFNQAINLDNVIKVRTTTYVAPRQLVEKELKQLWINAQIQIPELNKYSVEEFLYGEYKEAYGSYVNPEFKKYMGTAHDWQGVLGQKIPRFDNRIIAKCKLLPKRNVCKANTIENVTFVLLMKLKNLRITNNLGEKIILSPEEIKHIYENWLSKVEQNVIKMQEKCKKENKTPDKEDKKLDTTITKKEIENVINQVISDKIEPMKANISGRSSFCKRACQIMNKFILGGYLYPQEMDITEFIDSENSPNGITKQEIQVMLSRIGDWNNLYIPDNRGENINDSEKIRTNTDLIIGSITNPVIRNRLQIFRDLLLSLEKDYGKPDEVIFEFVREGADNSLFGKAKAQAAETNMKAMEKQNQQLVKELKNYDAYSSINFEKLKLLKMQCGQCAYSGQKIGISDFDKCEIDHIYPRTMGGNDALYNKVLCYRVENQKKQGRIPYEWLSSDKEKWANYVFRLNEIKKSLGKKKFELLTSKPEDCEKLIDSYNGLAETAHIAKVAQQIAAVCFSWGLQIEGEKRHIYVNNGSSTHAIRHRYGLNSLLGNDIKKNRDNDKHHALDAICISFSRDFKYDEESKKDIIKGFTREMVKKVIDEIMPVPYTNKKPFKGNTRPLETIYGLRAYNGKSYITQRVPLESIEPKEKKVRTIIDEVIKNDLLEKLNQKIDSKEWISMLQNYIHPKKKTIVKKVMIVVSEASIEKDSNGVERIGEFCDFGTKGTKHQFKHSKGHKGQILYFDEKGLVKVMPIYSNIRTQDIKDKLMTMGCKLYNKGEIFYSGCLVEIEKPFVATVYYKETDADGKEKTISVKQEVPYGIFKIRTIMGDGKIKLENNCGLEILSSAKVLVPLNMKKYKN

SEQ ID NO: 26 - protein, 1036 aa, unidentified; identical to SEQ ID NO: 21
  REGION 1..1036: note = Description of Unknown: uncultivated organism
  REGION 1..1036: note = MG1-29 effector

SEQ ID NO: 27 - protein, 1036 aa, unidentified
  REGION 1..1036: note = Description of Unknown: uncultivated organism
  REGION 1..1036: note = MG1-30 effector
MGKKVFAFDMGKASIGYCAREDFEIKEANSIIIDKDHSDISSIRDRRRVKKTLNAHKARERFLVNLWKSCNLIPLDTKDDKFKKEFANKKDSTIYTSCLLRIALLQNKKLEQWQIFKALYNAIQRRGYDANLAWKSAQTNDDKENIELTQKYTQENGIELIKNEKYKYPCYYDAKRLGLWDENFPNRFNQAINLDNVIKVRTTTYVAPRQLVEKELKQLWINAQIQIPELNKYSVEEFLYGEYKEAYGSYVNPEFKKYMGTAHDWQGVLGQKIPRFDNRIIAKCKLLPKRNVCKANTIENVTFVLLMKLKNLRITNNLGEKIILSPEEIKHIYENWLSKVEQNVIKMQEKCKKENKTPDKEDKKLDTTITKKEIENVINQVISDKIEPMKANISGRSSFCKRACQIMNKFILGGYLYPQEMDITEFIDSENSPNGITKQEIQVMLSRIGDWNNLYIPDNRGENINDSEKIRTNTDLIIGSITNPVIRNRLQIFRDLLLSLEKDYGKPDEVIFEFVREGADNSLFGKAKAQAAETNMKAMEKQNQQLVKELKNYDAYSSINFEKLKLLKMQCGQCAYSGQKIGISDFDKCEIDHIYPRTMGGNDALYNKVLCYRVENQKKQGRIPYEWLSSDKEKWANYVFRLNEIKKSLGKKKFELLTSKPEDCEKLIDSYNGLAETAHIAKVAQQIAAVCFSWGLQIEGEKRHIYVNNGSSTHAIRHRYGLNSLLGNDIKKNRDNDKHHALDAICISFSRDFKYDEESKKDIIKGFTREMVKKVIDEIMPVPYTNKKPFKGNTRPLETIYGLRAYNGKSYITQRVPLESIEPKEKKVRTIIDEVIKNDLLEKLNQKIDSKEWISMLQNYIHPKKKTIVKKVMIVVSEGSIEKDSNGVERIGEFCDFGTKGTKHQFKHSKGHKGQILYFDEKGLVKVMPIYSNIRTQDIKDKLMTMGCKLYNKGEIFYSGCLVEIEKPFVATVYYKETDTDGKEKTISVKQEVPDGIFKIRTIMGDGKIKLENNCGLEILSSAKVLVPLNMKKYKN

SEQ ID NO: 28 - protein, 1028 aa, unidentified
  REGION 1..1028: note = Description of Unknown: uncultivated organism
  REGION 1..1028: note = MG1-31 effector
MNKKVFAFDLGKASIGYCVREDLKILEAGSLIINKDHAECISNRDRRRVQKTLLAHKKRESFFNKLWQNCDLNILNKDDKRFSTEFGKKNDSTIYNSTLLRIALIQNKPLEEWQIYKALHNAIQRRGYDSKLPWANAKSDDDKKNEELSARYTQNEQGEELIKNENFKYPCYYDAVRLSLWSENMPEKLQTYVPLDNVKKIRDAGIVAPRNLVEKELKQLYINAQLQLPQLNKYSVEYFLYGEGEVAYASYNKKDYKCHRGTEWDMQGVLGQKIPRFDNRIIAKCKLLPKRNVCKANTLENVSFVLLMKLKNLRYTNINNEYSILSADTINKIYQNWLNKALKDDGSYKLDTTIIQKEVEKVLGEKIQDKFEPLKANISGRSSFCRRACKIMNHIILNGIEDPSTMDVAEFTDNIDTPNGITEAEIRTMLSKIGTWENLYIPDNRYEMAELSSDNREKTDILIGNITNPIVRNRLQVFRDKLIELKQKYETPDKIIFEFIRDGADNSLYGAKKAQDFLKTIKENEKTNNDLAIELKNADCFSVVNLEKLKLLKQQDGICIYCGQRIGISDLDKCEIDHIYPRSRGGNDAISNKVLCYSIENQKKKDRTPYEWLHNDERTWADFVNRAKLLKDKLKKTKYTLLTSKPENCEELIKSYNGLAETAQIARVAQDITAFIFSWGLQLKDEKRRIFVNNGASTSGIRKTYRLNKLLGNDVKKNRSNDKHHALDAICISFSQNYKYNKYTKRDEIEGLDIHDNEFRELIKQTLDAIIPYPYTNDKPFKGNTKPLETIYGYRCIDNKHYITQRVSLETIEQKDKKIKCIVDEVIKNDLLEKIKEKMPTKDWTTMLQNYIHPTKQTKVKKILVIVSEGELTKDSNAHSRIGEYADFGTKGTKHQFKHSKGHKGQILYYNEKGVIKVLPIYANQKDSDVKSHIEQNGCKLYKKGMKFYSGCLIQINKDFEATAYYTQTDGNGNDKQIPTKEKLQAGVYKLRTMTEAGQIKLESSTGIELLTSAKVLVEADFSKFSKY

SEQ ID NO: 29 - protein, 1028 aa, unidentified
  REGION 1..1028: note = Description of Unknown: uncultivated organism
  REGION 1..1028: note = MG1-32 effector
MNKKVFAFDLGKASIGYCVREDLKILEAGSLIINKDHAECISNRDRRRVQKTLLAHKKRESFFNNLWQNCDLNILNKDDKKFSTEFGKKNDSTIYNSTLLRIALIQNKPLEEWQIYKALHNAIQRRGYDSKLPWANAKSDDDRKNEELSARYTQNEQGEELIQNENFKYPCYYDAVRLSLWSENMPEKLQTYVPLDNVKKIRDAGIVAPRNLVEKELKQLYINAQLQLPQLNKYSVEYFLYGEGEVAYASYNKKDYKCHRGTEWDMQGVLGQKIPRFDNRIIAKCKLLPKRNVCKANTLENVSFVLLMKLKNLRYTNINNEYSMLSADTINKIYQNWLNKALKDDGSYKLDTTIIQKEVEKVLGEKIQDKFEPLKANISGRSSFCRRACKIMNHIILNGIEDPSTMDVAEFTDNIDTPNGITEAEIRTMLSKIGTWENLYIPDNRYEMAELSSDNREKTDILIGNITNPIVRNRLQVFRDKLIELKQKYETPDKIIFEFIRDGADNSLYGAKKAQDFLKTIKENEKTNNDLAIELKNADCFSVVNLEKLKLLKQQDGICIYCGQRIGISDLDKCEIDHIYPRSRGGNDAISNKVLCYSIENQKKKDRTPYEWLHNDERTWADFVNRAKLLKDKLKKTKYTLLTSNPENCKELIKSYNGLAETAQIARVAQDITAFIFGWGLQLKDEKRRIFVNNGASTSGIRKTYRLNKLLGNDVKKNRSNDKHHALDAICISFSQNYKYNKYTKRDEIEGLDIHDNEFRELIKQTLDAIIPYPYTNDKPFKGNTKPLETIYGYRCIDNKHCITQRVSIETIEQKDKKIKCIVDEVIKNDLLEKIKEKMPTKDWTTMLQNYIHPTKQTKVKKILVIVSEGELTKDSNAHSRIGEYADFGTKGTKHQFKHSKGHKGQILYYNEKGVIKVLPIYANQKDSDVKSYIEQNGCKLYKKGMKFYSGCLIQINKDFEATAYYTQTDKNGNDKRIPTKEKLQAGVYKLRTMTEAGQIKLESSTGIELLTSATVLVEADFSKFSKY

SEQ ID NO: 30 - protein, 1028 aa, unidentified; identical to SEQ ID NO: 28
  REGION 1..1028: note = Description of Unknown: uncultivated organism
  REGION 1..1028: note = MG1-33 effector

SEQ ID NO: 31 - protein, 1025 aa, unidentified; identical to SEQ ID NO: 23
  REGION 1..1025: note = Description of Unknown: uncultivated organism with predicted taxonomy: Candidatus Gastranaerophilales bacterium HUM_9
  REGION 1..1025: note = MG1-34 effector

SEQ ID NO: 32 - protein, 1027 aa, unidentified; identical to SEQ ID NO: 22
  REGION 1..1027: note = Description of Unknown: uncultivated organism
  REGION 1..1027: note = MG1-35 effector

SEQ ID NO: 33 - protein, 1011 aa, unidentified
  REGION 1..1011: note = Description of Unknown: uncultivated organism with predicted taxonomy: Clostridium
  REGION 1..1011: note = MG1-36 effector
MRYRIGLNIGINSCGWAVIEHNEDGEPIKLENMGVRMFEISENLKDGLSLSKAPRETRSIRRRIRRRKHRIERLKYLIVNSNMLTQEEVNNLYNSTNLENIYLLRVRALSEKISNTDLTRVLINLMKKRGYKSNVELEDYAKDEDGKVLTATKENQKIMKEKGYSTVAEMYLKDKKFKMILPDGTIIYKIRNTTGNYSSTVLRNQIREELIRILIKQQELNDLVTNDFVQKCLEIFDSQRPYDEGPGLRYSTTQVDKMLGKCIFEKQENRAVKASYSFEYFDFLKQLNNIIIEKTIITSNNKTTQKRKLSKEERQKIIKLAKYQSQIRYYDIRQELQLSDYERFCNLEYSSISEFSESINKLAERKPKLEGFTSYFRIKQALYYVDNTLIERLSNEELDEIAYVLTVYKSNERRLEQFEIRNLHLPANAIQELLKISFIEIAYLSLKAIKKITPYIEEGYTYNSALEQAYPSFETSLCNINSEILNPVCRRAISQSIKVLKAIVNQYGKPDLINIEFSNELGKGKSEREKIKKQKQENLGKTSRIKEELQAQGIENPTGTEITKYKLWKEQTNYCMYSGKKIDIEQVFSSETQINYIIPFWMCFDDTYKNKILTFTSEVKQKQDLMPYQYIQKMRRDTEEYETRISMLIRVYSKKNRLVKKNITKEEMIKWRNRNIEDTQYIAKWITNYIRRNIQFVECSKYNNKVLIISSNLTSYINRKLDISNNIIIGNQKHALDALVTATVSKELLNKIIIYSRENTENSQFPIPWENFKQDMNNLPPIFVSRAPKRKVTGQAHDETIRRMQICGKEIKCISRTDIKKLKLNSEGEIENFSKNSKNTDKVLYNALKEEIKENGGNATRSFIKQFYKPKKDKTPGLPVKKVKLESKTRLPIKLKNQAIATNGSIIRLDVFKVENEGYYYVPIYVSDTVLPKLPNKACASSKPYEEWPEMREEDFIFSLYSRDLIYIKNKSPMNLHPTDGKRKHSNNRRNISVLHKGRYLRSNHKHNKQW

SEQ ID NO: 34 - protein, 1027 aa, unidentified
  REGION 1..1027: note = Description of Unknown: uncultivated organism
  REGION 1..1027: note = MG1-37 effector
MVRKIFAFDMGKSSIGYCAREGLKVLELGSLIIDKDHAEIVSNRDRRRVFKTLNAHKAREKFFNELWKSCNLEPLEKEDKLFKKEFGKKDEETICNSTLLRIALLQNIELEEWQIYKALHSAIQRRGYDTSLAWANANSDDEKENKKRTLEYSTNKENDELISQEEYKYPCYYDAKRLGLWEEENPKMLKTYVDVYNNDKIRTAGIVAPRNMVEKELKQLYINAQKQLPELNKYSADYFLYGVSEKAYATYLDSDYKKYRGTNWEWENGGVLGQKIPRFDNRIIAKCKLLPKRNVCKAETVENVSLVLLMKLKNLRFTDVLGEKSMLSAEAIKQIYENWQKKATKNDGSIKLDTTITKQEIEKVIGEKILEKFEPMKAKLSGRSSFCRRACKIMCKIILEGIENPATMDVGEFIDNIDVKNGITEKEIRTMLSKIGTWDNLYIPDNRYEMAEISSDEREKTDILIGNITNAIVRNRLQIFRDKILELKYKHGTPDEVIFEFVRDDNSLFGAKKTQEYISNINKNQKENEEIAQQLKDANCFSSKNLEKLKLLQKQGGHCIYSGRPIAISNLEECEIDHIYPRSRGGNDALSNKVLCYAIENQNKKEQTPYEWLHNNEHSWNEFVKRVTNKQEALGKIKVKLLISKPEDSEKLIKSYNGLAETAQIARVAQDITAFVFGWGLQLEGEKRRIFVNNGATTSAIRKTYRLNKLLGNDVKKNRQNDKHHALDAICISFSRGYKYNATTKRDEIEGLDIHDNEFRDLVKSSIDSLLPYPYSNDKPFKGNIKPLETIYGYRKLGEKTYITQRVDITSIEQKDKKIKSIIDEIIKNDLLAKLEDKMTSKEWANMLSKYVHPTKKTKVKKVLLVVSEGITNFDENGRARIGEFVDFGTKGTKHQFKHSKGHKGQILYYNEKNAIKVMPIYANQKLGEVKDKLEQMNCKLYKKGMMFYSGCLIKVDKEFEGTAYYTIADENGKEKQTPNKEILPAGIYKLRTLMSDGTVKLESSIGIEILTSAKKLAEADFKKLTK

SEQ ID NO: 35 - protein, 810 aa, unidentified
  REGION 1..810: note = Description of Unknown: uncultivated organism with predicted taxonomy: Candidatus Melainabacteria bacterium
  REGION 1..810: note = MG1-38 effector
MSKKVFAFDLGKASVGYCVREGFDIRKVGSIIIEKDHAEITTNRDRRRVKKTLEAHKAREQFFKKLWQNAGLETLDKEDERFKKEFGNKKDKNIYTSCLLRIALLQNKKLEQWQIYKALFNAFQRRGYDANLAWANAKTDDDKKNAEYMAKYTKENNVELINNDDFKFPCYYDAKRLGLWSEENPSELKTTIPLTGSKKVRTNGLVAPRELVEKELKQLWLNAQKQLPQLQNIDAEYFLYGDYRQAYGSYVVKEFRKFRGTKNDWQGVLGQKIPRFDNRIIAKCKLLPKRNVCKANTLENVSLVLLMKLKNLRLTDNMGEKFLLSPIDIKKIYENWLIKAKIDTNEEKLDTTITKKEIETVLNRKIKDKIDPMKANISGRSSFCRRACKIMTKIILSCELYPQNVDITEFVDKPNTQNPITIEEINTMISKIGDWNNLYIPDNRDEMAENSSDNREQTDTLIGNITNPIVRNRLQIFRDLILNLKQEYGTPNEVIFEFVRDGADNSLFGAKKANDTLKVMKENEKDNEQIVSELKDANALSSENILKLKLLKKQGLKCIYSGKSIAISNFDACEIDHIYPRSMGGNDALYNKVLCYSMENQKKAGRTPYEWLHKDEKTWFDFVNRLEAIKDTLGKKKYELLTSKPEDCKILIDSYNGLAETAQIARIAQQITALVFNWGLQVEGENRHIFVNNGSSTASIRRTYKLNKLLGDDVKKNRDNDKHHALDAICISFSRDYKYNKEKKVDEIEGLNPEIIKEVINNLMPYPYANDKTFKGNIKPLESIYGKRVKNGNTYLTKRADITSLEPKEK

SEQ ID NO: 36 - protein, 1028 aa, unidentified; identical to SEQ ID NO: 28
  REGION 1..1028: note = Description of Unknown: uncultivated organism
  REGION 1..1028: note = MG1-39 effector

SEQ ID NO: 37 - protein, 1028 aa, unidentified; identical to SEQ ID NO: 29
  REGION 1..1028: note = Description of Unknown: uncultivated organism
  REGION 1..1028: note = MG1-40 effector

SEQ ID NO: 38 - protein, 1025 aa, unidentified; identical to SEQ ID NO: 23
  REGION 1..1025: note = Description of Unknown: uncultivated organism with predicted taxonomy: Candidatus Gastranaerophilales bacterium HUM_9
  REGION 1..1025: note = MG1-41 effector

SEQ ID NO: 39 - protein, 1028 aa, unidentified; identical to SEQ ID NO: 24
  REGION 1..1028: note = Description of Unknown: uncultivated organism
  REGION 1..1028: note = MG1-42 effector

SEQ ID NO: 40 - protein, 1028 aa, unidentified; identical to SEQ ID NO: 28
  REGION 1..1028: note = Description of Unknown: uncultivated organism
  REGION 1..1028: note = MG1-43 effector

SEQ ID NO: 41 - protein, 1036 aa, unidentified; identical to SEQ ID NO: 27
  REGION 1..1036: note = Description of Unknown: uncultivated organism
  REGION 1..1036: note = MG1-44 effector

SEQ ID NO: 42 - protein, 1025 aa, unidentified; identical to SEQ ID NO: 23
  REGION 1..1025: note = Description of Unknown: uncultivated organism with predicted taxonomy: Candidatus Melainabacteria
  REGION 1..1025: note = MG1-45 effector

SEQ ID NO: 43 - protein, 1036 aa, unidentified; identical to SEQ ID NO: 25
  REGION 1..1036: note = Description of Unknown: uncultivated organism
  REGION 1..1036: note = MG1-46 effector

SEQ ID NO: 44 - protein, 1028 aa, unidentified; identical to SEQ ID NO: 24
  REGION 1..1028: note = Description of Unknown: uncultivated organism
  REGION 1..1028: note = MG1-47 effector

SEQ ID NO: 45 - protein, 996 aa, unidentified
  REGION 1..996: note = Description of Unknown: uncultivated organism
  REGION 1..996: note = MG1-48 effector
MNKKVYAFDLGKASIGYCARDGFNILELGSLIINKDHAEVVSNRDRRRAYKTLQAHKSREEFFIKLWQDCGLPVLEKNDKRFTIEFSKEKDETLYNSTLLRITLLQEKPLEVWQIYKALHSAIQRRGYDANIRWANDSDDEKENQERVTKYTQDENGIQIITNDAYKYPCYYDAVRLGLWDEKNPLEYKKHIPLQGVTKVRTTGIVAPRSFVEKELTQLYINAQKQLPQLEKYSVNYFLYGKYGKAYATFHKQEQGKEKDYGVLGQKIPRFDNRIIAKCKLLPKRNVCNAGTIENVSFTLLMKLKNLRFTNANGERCMLDSSAIKEVYENWLKKANKDNEIKLDTTITKKEIENVIGFKIQDKIEPMKTNISGRSSFCRRACQIMNKIILEGIENPATMDVAEFTDNVDSPNGITEQEIREMLSKIGTWENLYIPDNRYEMAELSSDDRQKTDLLIGNITNPIVRNRLQILRDKLLELKAEHGTPDEVIFEFVRDGADNSLYGAKKANGYLKNIKENEKENNEIKKELEEANAYSPTNFEKLKLLRMQCGKCVYSGKNISINDFDSCEIDHVYPRTMGGNDALYNRVLCYSIENQNKAGRTPYEWLSSDKELWANYVARLNDIKGSLGKKKFELLTSKPEVCEKLIESYNGLAETAQIARVAQQLAAFIFGWGMQTEGDKRHLFINNGSTTAAIRRRYGLNKLLGDDIKKNRENDKHHALDAICISFSKDFKYDHKSKKDIIEGFTYDFVKNEIDKLIPYPYANDKPFKGNTRPLETIYGYRKYGDKNYLTNRVDITSIEQKEKKIKTIVDEVIKNDLLEKLNLSSGDWAAMLKNYKHPKKHTIVKKVLTIVSEGTITTDSNNKSRMGEYADFGNKGVKNQFKHSKGHKGQILYYNEKGAVKVMPIYANQKLSEVKEKLLAMNCKLYKKGIMFYSGCLVSIPKDFKGGSNDYSAGIYTLKTIIADTGVIKLENLNGVEIGTSAKYLTDAEFRKYKN

SEQ ID NO: 46 - protein, 1015 aa, unidentified
  REGION 1..1015: note = Description of Unknown: uncultivated organism
  REGION 1..1015: note = MG1-49 effector
MKKFFAFDIGKKGLGYCCREGSKIHCAGSLTIEPDHSSVEDIRNNRKAIKTRIFHKAREEYFNKLWHDEAGLEILDKDDERFKIEFSKQDDERIYNSTLLRIALLQNRELEKWQIYKALHNAFQRRGYDSELPWKNSGTKADEENEKLAKNYTQKNGQKLIKKEKFQYPCYYDALALGMWKERNPSDLQRIVSKNPQKIRTGRRVAPRKLVIKELTDLWTAAQKQIPELQKISADKFLYGEYREPYASYTNPDWHKNMGKEKDWQGVLGQKIPRFNNRIISKCKLLPKRNVCSADTIENIVFTLLYQLKNFRYTNSNGEVGCRLAPIEIKEIYDNNIQNWMKNLYDNKKNNKSHTFTVSKTEIEKVIGKGQIYTTKNEKFKSFQANTSGRSSFCRRALQIMNEIILTGTDPKDVNISKFVDKSTTNNPITEDEIKEMLTKVGDWNELYIPYNSTRMAEFAQNPDIQSDLMIGSITNPIIRNRLQIFKNLLNDMIKKYGKPDEVIFEFVKDGKDNSLFGAEKAKATEQMMRINEKKNEEIRNNLSDDYSAINFLKYKLAEMQDWTCIYSGRKIEITDFDACEIDHIFPRTDDTNDALYNKVICYKEEIADKHGRTPYEWMNNNTARWQEYIMRVKSLSQKSGKTKTALLTLSPTQSEKFLEKRKALNETTQIAKIVQSVTASVLEWDLQVKDKNRHIFISDGSSTHKIRQQYKLDRLLDDNAKKNRENGKHRALDAICISYSKDFQYNTEQHKYEIENIDIPHIEDVINHVVPYPYTNDKPLKSALAPAGTIYGKKVKNGKTYITKRIALLDIKKDSKSINKISDNDIKSDLLNKSGKNLSDDNWVKILSKYTHPKRGTKVKKVIVLEEFKGQITFDSNGRERLGEYCDFGNKGTKGQFKHSKQHRGQILYFNEKGKIKVMPVYANKKVQDVKDELINMGCKLYHGGEMFYSGCLIEIPNDFKAGGNIQPKGIYKVSTITTAGLVKIENNSGNIVHTNSTHITEADFRKFIKRSNS

SEQ ID NO: 47 - protein, 1015 aa, unidentified; identical to SEQ ID NO: 46
  REGION 1..1015: note = Description of Unknown: uncultivated organism
  REGION 1..1015: note = MG1-50 effector

SEQ ID NO: 48 - protein, 997 aa, unidentified
  REGION 1..997: note = Description of Unknown: uncultivated organism with predicted taxonomy: Candidatus Melainabacteria bacterium
  REGION 1..997: note = MG1-51 effector
MNKKVYAFDLGKASIGYCVREDFNILELGSLIINKDHAEVITNRDRRRVYKTILAHKKREEFFNNLWSECGLTLLSKTDKRFTIEFSSSNDNTIYNSTLLRIALLQNKPLEQWQIYKALHNAIQRRGYDAEIAWTNDSADEKDNQKRVIKYTQDDLGNELIKDENYKYPCYYDALRLQLWSEKNPKDFNRHIPLTGSTKVRTTGLVVPRAFVEKELTQLYLNAQKQLPQLKKYTVEYFLYGKYGSAYATFRTPQQGKEKDYGVLGQKIPRFDNRIIGKCKLLPKRNVCKANTIENVSFVLLMKLKNLRFTDINGNKCKLGLSAIKDIYNNWYKESGNGKKLNTTITKTKIEKVIGCKILEDAKNINETLKANTSGRSSFCRRACQIMNKIILEGIANPLTMDVVEFTDDVGTANGITEQEIREMLSKIGTWENLYIPDNRYEMVELSSDDRQKTDLLIGKITNPIVRNRLQILRDKLLALKEKYGTPDKVIFEFIRDGADNSLYGAQKANNYLISIKANEKENNEIKKELEDANAYSNTNFDKLKLLRMQGGRCIYSGEKIGISNFEQCDIDHIFPRSRGGNDALYNKVLCYSKENRIKGDKVPYEWLNNTENWDIYLQRTRDLKGSLGKKKFELLTSKPDQCEKLIESYNGLADTAQIAKVAQQLAAFIFGWGMQTDGDKRHLFVNNGSTTAAIRRRYGLNKILGNDIKKNRENDKHHALDAICISFSQDFKYDPKSQKDIINGFTYDFVKNEIDKLIPYPYANNKPFKGNTKPLETIYGYREYNGKKYITNKIDINSLEQKEKKIKNIIDEVIKNDLLNKINLPSDEWKNMLQNYIHPKKQTHVKKVMVIVSEGDVTFDTNNRIRMGEYVDFGTKNVKKQFKHSKGHKGQILYYNEKGAIKVMPVYANQKLQEVKEKLLGMNCKLYKKGMMFTSGCLLEIPNEFYAGSNKYPAGIYKLRTIIADTCVIKIESSEGIEIVSSAKYLADAEFKKYKP

SEQ ID NO: 49 - protein, 997 aa, unidentified
  REGION 1..997: note = Description of Unknown: uncultivated organism
  REGION 1..997: note = MG1-52 effector
MNKKVYAFDLGKASIGYCAREGFNILDLGSLIINKDHAEVVSNRDRRRVHKTLLAHRTREEFFNKLWKDCGLEILDKSDKRFTIEFAKNNDSILYNSILLRIALLQNKPLEEWQIYKSLHNAIQRRGYDANLVWANDSDDEKTNKELAARYMQDEAGIELITNDEYKYPCYYDATRLGLWNEEAPNKFNRHIPLTDVTKVRTTGLVAPRQLVEKELTQLYLNAQKQLPQLNKYSVEYFLYGKYGRAYATFRKPEHGREKDYGVLGQKIPRFDNRIISKCKLLPKRNVCKAATLENVSFTLLMKLKNLRFTAPDGNKHMLSADAIREIYENWLQESNNGEKLNTTITKTKIEKVIGFKMLDDTKNINETLKANINGRSSFCRRACQIMNKIILEGIENPATMDVAEFTDDITAHNGITEAEIREMLSKIGTWDNLYIPDNRYEMAELSSDDRQKTDLIIGKITNPIVRNRLQILRDKLLELKSEYGTPDEVIFEFIRDGADNSLYGAKKSNDYLKNIKENEKENLEIKKELEDVDRYSPTNFEKLKLLRMQGGKCIYSGKPICIDDFDKCEIDHIYPRTMGGNDALYNRVLCYSIENQNKKGRTPYEWLSNDKEYWSAYVDRLNKIKGSLGKKKFELLTSKPEDCEKLIESYNGLAETAQIARVAQQLAAFIFGLGMQTEGDKRHLFVNNGSTTAAIRRRYGLNKLLGDDVKKNRENDKHHALDAICISFSRDFKYDEKSKKDVIEGFTYDFVKKAIDELIPYPYANDKQFKGNIRPLETIYGYREYGNKKYITNRVDITTIEQKEKKIKTIVDEYIKKDLLDKLNLSSSEWVELMKNYKHPKKHTIVKKVLTLVSEGEISKDSNDKSRMGEYADFGTKGVANQFKHSKGHKGQILYYNEKGAIKVMPIYANQKLSDVKQKLMSMGCKLYKKGMMFTAGCLLNIPNDFYVSENLYTSGIYKLRTIMSSGQIKIENSNGKEIITSAKYLTDANFLKYKN

SEQ ID NO: 50 - protein, 1015 aa, unidentified; identical to SEQ ID NO: 46
  REGION 1..1015: note = Description of Unknown: uncultivated organism
  REGION 1..1015: note = MG1-53 effector

SEQ ID NO: 51 - protein, 1015 aa, unidentified; identical to SEQ ID NO: 46
  REGION 1..1015: note = Description of Unknown: uncultivated organism
  REGION 1..1015: note = MG1-54 effector

SEQ ID NO: 52 - protein, 1015 aa, unidentified; identical to SEQ ID NO: 46
  REGION 1..1015: note = Description of Unknown: uncultivated organism
  REGION 1..1015: note = MG1-55 effector

SEQ ID NO: 53 - protein, 1003 aa, unidentified
  REGION 1..1003: note = Description of Unknown: uncultivated organism
  REGION 1..1003: note = MG1-56 effector
MTKKVFAFDMGKASIGFCVRDNHDIKEANSIIIDKDHSDISSLRDRRRVYRTLKAHHAREAFFNTLWTECGLSLLDKNDIRFTKEFSGKKDNTIYTSCLLRIALLQNKHLERWQIYKAIFNALQRRGYDPKLAWKTAQTDDDKENLELVEKYTQENGIELIQSEEYKYPCYYDATRLGLWSEEEPNKLKTCQPMNGIIKVRSTNYVAPRSMVEKELAQLWENAQIQLPQLKKYSTDYFLYGEYREAYGSYKNPDYRKFMGTEYDWQGALGQKIPRFNNRIIAKCKLLPKRNVCKAETLENVTFVLLMKLKNLRFTSPDGQKCMLSADAIKEIYNNWLMESDNGKKLNTTITKTKIEKVIGYKMLDNTKNINDTMKVNLSGRSSFCRRACQIMNRIILDGIEEPKTMDVAEFIDNIDTPNGITEQEIRTMLSKIGTWDNLYIPDNRNEMAEIADDSRTKTDIMIGNITNPIVRNRLQIFRDLLLRLKSDYGTPDEVIFEFVRDEADNSLEGQKRAKDTENYMKAQAKENEQIKKELEEQNALSGINFEKLKLLKMQGGKCIYSGQNIGISDFDKCEIDHIYPRTMGGNDALYNRVLCYRIENQDKKGRTPYEWLSHDEEQWAAYVHRLSEIKQILGKKKFELLTSKPEDCAKIIDSYNGLAETAHIARVAQQITAFIFDWGLQLEGENRHIFVNNGSSTCAIRKRYHLNSLLGDDEKKNRSNDKHHALDAICISYSRDFKYDKNIKKDTIEEFNPEVVKKVIDEIIPYPYANKKPFKGNTRPLETIYGLRYREKSYITNRVAITSIEQKDKKIKTIIDETIKNDLLNKLEEKMSSNDWINMLENYVHPKKRTHVKKVNVIVSEGKIEADKNGRDRIGEYSDFGTKGTQHQFKHSKGHKGQILYFNEKGAIKVMPVYANKSTKEVRKQLEQMGCKLYNGGELFYSGCLIEVPNEFKGTKSNQKHGIYKLRTMMSDGKVKLENNSGEEIMTSANYLVNAKFSKYKD

SEQ ID NO: 54 - protein, 1013 aa, unidentified
  REGION 1..1013: note = Description of Unknown: uncultivated organism
  REGION 1..1013: note = MG1-57 effector
MKKIFAFDMGKKGLGYCCREGSKINCAGSIIVEPDHSSIEDVRNRRRIIRTRNSHKSREKYFNKLWHVEAGLEILDNNDELFKTEFSKQNDETIYNSTLLRIALLQNRKLENWQIYKALHNAFQRRGYDSALPWKNSKTKDDEESEKQVKIYTQKDGKELIEKDEFQYPCYYDALSLGLWEEKNPYDLKRTISKEPQKIRTGGRVAPRNLVIKELSDLWIAAQKQIPKLQKISVEKFLYGDYREPYASYTNPDWRKNMGKKEDWQGVLGQKIPRFNNRVISKCKLLPKRNVCSADTIENIVFTLLYQLKNFRYTNSKGKVGCRLAPFDIKEIYDNNIEVWINNLEENKKNNKNHTFTVSKTEIEKVIGKGEIYTTKNEKFESFKANTSGRSSFCRRALQIMNEIILTGTEPQDIEVSKYVDKSTTNNPITEEEIREMLSKVGDWNELYIPDNRAEVAELAQNSDIQSDLMIGSITNPIVRNRLQIFKNLLIDMIRKYGKPEEVIFEFVRDGKDNSLFGAEKAKATEQMMKNNEKKNEEIKKNLGDDYSAINFLKYKLAEMQDWKCIYSGRKIGITDFAACEIDHIFPRTDDGNDALYNKVICYKEENADKLGRTPYEWLYHNIARWQEYVTRVKSLSQKLGKTKTALLTLPPEQSEKLLEKKNALNETAQIAKVAQSITAFILGWGLQVKGENRHIFVNNGSSTHKIRQQFKLNRLLGNDEKKNRENDKHHALDAICISYSKDFRYNTEKHKYEIDNLDIPHIEEVINSIVPYPYTNDKPLKSAVAPEETIYGKKIKDGKTYITKRISLADIKKDTKSINKISDEDIKKDLLLKSEQNLSERDWTNLLQDYIHPKRGTRVKKVITLEEFKGKITYDSNGRERLGEYCDFGNKGTKGQFKRSKQHRGQILYFDDKGKVKVMPVYSNKKVQDVKDELINMGCKLYRGGEMFNSGCQIEIPNDFKAGSNMYPKGLYKLSTITTAGQIKIENNSGNQLLTSATYLVQAEFKKSKKKR

SEQ ID NO: 55 - protein, 809 aa, unidentified
  REGION 1..809: note = Description of Unknown: uncultivated organism with predicted taxonomy: Candidatus Termititenax aidoneus
  REGION 1..809: note = MG1-58 effector
GEYEQAYGSYLNPDFKKYRGTNRDWQGVLGQKIPRFDNRIISKCKLLPKRNVCKSETIENVSFVLLMKLKNLRFTNLMGEKCILNSDAIKQIYENWKNKALKENGEYKLDTTITKKEIENVIGEKIQDKIEPMKANISGRSSFCRRACQIMNKIILEGIENPAEMDVIEFMDNIDSPNGITEKEIREMLSKIGNWDNLYIPDNRYKMAEISSDDREKTDLLIGNITNPIVRNRLQIFRDKLLKMKQEYGTPDEVIFEFVRDGADNSVLSGAKAEGYKLLCEQNYAKNEKLKNDLGDDFSPQNLIKLKLLESQNFQCIYSGNNIAPTDLDACEIDHIYPRTMGGNDALYNKVLCYSIENQNKKGRTPYEWFHQEKTEEEWIEYKNRCFNFLNKYPIPKKVKRRQDNHISKSIKEYYVKLSEYKLAKKKFELLTSKPEDCEKLIESYNGLAETAQIARVAQEITAFVFGWGMQTSGDDRHIFVNNGSSTSAIRRRYGLNKILGDDVKKNRENDKHHALDAICISFSRDFKYDEHSKKDVIKGFTYDFVKKEIDKLMPYPYANDKHFKGNTKPLETIYGYRRIDNKDYITKRISITDINKKEKVIKTILDKQIRKDLLDNLKLSDNEWKEYLSNYTHPTQKTIVKKVLTIESEGTLTFDKNNRGRIGEFADFGTKGTKYQFKHSKGHKGQILYYNEKGNIKVMPIYANQKKSDVIENLEQMNCKLYKNGMMFYSGCLIEISKEFIATVYYTIKDENDKNKQISQKETLNSGIYKLRTIKSDGTIKIENNNGIEILTSVKILSEINFKKYKKS

SEQ ID NO: 56 - protein, 1076 aa, unidentified
  REGION 1..1076: note = Description of Unknown: uncultivated organism with predicted taxonomy: Verrucomicrobia
  REGION 1..1076: note = MG1-59 effector
MYTKEIIWGFDIGKGSLGEAVRVGNEFKHVQSLEIAPDFAETKTTAAARRAWRTREAHKARELWLEKCLSEAGIEVLLRRKVGVVDGAWKLVSKGDVRLEREFPPAGEDLCYNSIALRCKLLLGEKLESWQVFKALNSAIQNRGYDANIPWGDEDAADGGDGSSRKSSDSDASGDGESYAEKLAHYEREFDGILAELDNREKYEFPCFFKAAKMGLWSPENPDFVGVRIDNTAEKAKGYVVPREAVVREFRALVNAAALQYPNLKGKADFIMFGRACEPYASYNPELRKRFGLKRGAATDWTALGQKTPRFDNRVIDKCKLIPRLNVCKIKPLDECKTDDDFLSYTITLSLKLLNLRFFRGAGMDSLSFDEFLRAFELAKNSKFKLGKAALKKFFKTIGAEVMDESQSEIEQPRNGGRAAFSRPAMRILRDLIFSGKSPAEFYATAIENIANTDKNKGLVAGDLDFLKLMGDAPWSGIFIPDVGLSDFADASEAAREAQINKLIGSQNDPIVRHRLSFFYERIKSLEAKIVVPVKIVLEFVRDDFLGKKAKSDLNKAIKTRFDEKKKLAEDLDSKREEFGFKYASKKMLLKFELYKKQGGECVYTGNALPLSELESLEIEHIVPRSRGGPDAMYNYVLTDEKTNKEKGDRTPFEWRSTMGAEWESYCERVRKLTKELGAKRCKLLLSPNAAELVEKYTAFAETAWISKLAQRICCLHFGFQFGGLTGAKKVWTVSGNTTAMIRGRYGLNRLLHDEESAADSLFDRICMEKKFEEKNRKNKKHHALDAMCLCFAPTSNAKKASAYKNILPEEITRNPESDEARKFFGKYLANVIPNKVAVEKPTLEQTIYAKRLIGGKETIVKKCNVRELAYTGINPKYNYSTLVKSIKSIVAEVPKRIISDFVLSNPNLSESEWEDWCKYEALIPSKNGAPTKLLRVLCDVGSPEEYKDLSKDGCGAYRKGDSHKGQFIWKTKQGRYVVAPVYAHASKAKVFAALKNNPDCAEVCGFFRQNCLVEIPNDVVDKSGKMLLKAGVYRSNTIKTDCRAKLTNSDGISPNPISIQYLMPAGMKRIKLDTL

SEQ ID NO: 57 - protein, 956 aa, unidentified
  REGION 1..956: note = Description of Unknown: uncultivated organism with predicted taxonomy: unclassified Verrucomicrobia (miscellaneous)
  REGION 1..956: note = MG1-60 effector
EFPPSGEDVCYNSIALRCKLLLGEKLEGWQVFKALNSAIQKRGYDENIPWGEAEEKSSKKDDDDYAQKLSQYEKEKSELFESFADGEKYDFPCFFKAYKMGLWSPENPTRVEVRIDCRAQKAKSYVIARKYVEREFECLVEAAAKFFPKLKGRAKFILYGVSKTPYASYYGNMRKKFGLKRGAESDWTALGQKVPRFDNRIIDKCRLIPRMNVCKIRPLNEARNEKDLLYYEVTLALKLLNLRFFRNSNIEQLTFEEFKKAFEIAAGAKYKMTKTAMKKFLKSISATALGDDYAEIEPPKEGGRASFSRPAMEILKELIFSGMPPREFYGRKISEISNTDKNKGVVSSDLDFIKLMGDCPWGGIFIPDVQTYQFANAAFPDPDAQINKLIGSQNNPIVRHRLTFFFERIKFLESKYGVPDKVVLEFVRDDFMGEKEKKEMRIAMKKRAEEKMRIAKDLDEHGFKGGNLLLKMELYRKQNGICLYTGDALPLSELATLEIEHIVPRSRGGPDAQYNYVITREKTNKLKGDKTPYEWLSSDAKEWASYTDRVNACAKALGKKRCRLLLEKDAEELVEKYTALAETAHIAKLAQKIVCMHFGFQFGGLSGTKRVFTVPGALTSRIRKFYGLDRILHNSAAESENLSFEEFLKFSEDLEKKNRKNKKHHALDAMCLCFAPTGVDSRRAKLGEILPEKLRSEKAAREFFKSYLDKIMPVDVAPKKPRLEDGIYSKRIIGGKACMVKRNNLVDLAYKSGLKPVFDIPTLIKLVDKKEKGIINPQIRKMIGEFAATNPDESAWRKWCEEVRLPSKSGLGARVMRVLVYYGEADEYKDLSKDGCGAYRKGDGHKGQVIWESVDGKYYVEPVYVHASKAGVMAALNANPKKKRICGMFNSHCTVDVGDVYNDKGDFILPAGRYMVNTIRSDNQCVLTNADGEKRNPININYLMRAGMRRVDLSEL

SEQ ID NO: 58 - protein, 1043 aa, unidentified
  REGION 1..1043: note = Description of Unknown: uncultivated organism
  REGION 1..1043: note = MG1-61 effector
MENKTVFAFDIGTGSLGTCVRKEKEILDLSVNLLPQDFASLKEAREKRRQIRTRIAHKMREKWWKEQAQKAGIEIPETGHLDEKGNFIKPDERMSREFPKEGDNTIYNSALLRIALLQGKKLEGWQIFKAIWSAIQHRGYDSNLPWINNPKRNVEEEGEENKDEKENKEAVKKYNNELKKVFGEGDENERFYYPCYYEAYKMGIWSKEEPENLNKKISNNPSPARNKDGKVDLVIPRELIEKEIKDMLIKAGDKYTYIKENLDYILYGPSKSKYAAYNLKEYKKYRGKDWEWQGLLSQKTPRFDNRLISKCVLIPRLNVCKAKDELNKEVTFLMKLNNMRYFEIKGGEEKKLNAEQIKQIFEKFKDKLKITKDQWSKYLKINFAAVPNPGQLKIDAPKISGRSSFCRPALGIIKELILSGKKPSELYKELTENNKNTDPKKGLIKEDYNFLLKLPDDYNFYISDSRDEESKLNESERKNKIDEIISEIINPVVKHRLKLFYDKLIELKQKHGTPEKIIIEFVRDPKEGFYGEKRRKEIIFEQNKKRKENDLAFEDAKKIGLKGKDAVLKIKLHKEQGGFDIYDGNPIKDNEIDNYEIDHIVPRESGGPDSYINKVLTSRKNNEEKGKRTPYEWLKDKNYWNDYVKRIKDSKTLNDKKKTLLTSSEAVNLAEKYTQLAETAYIAKMSQKIAHLFFGWSQGTLGSKKKVIVANGSLTAKMRGLYGLNRILHSGISEEEYKELVKSGKIDEKNRDNPRHHALDAIVLSMLPEIQMNDRKKDFFPIWFTPDYCRENLEKCFPKHIKYEKPKLAETIYGLRKVLDNGKERYVFVMRFGKGTKIEEYYDMDLAKKNLDSILSDKIKKDFSEKLSENPSAEEWKKFIDDYNAGGKVKKIILKCSSLIDPEEIKDFLEGKVRNYGEYIKGKMPGQYLKQKKDSYGYMVYKNEEGKWIRESIYAFDSVIKKQKEIKEKYKETYYFRSGMIVEIQETFEFDGRKEKIKVKKGKYYLKTIGFTNQVKIESIDSSSDFLINLKYLMENGKMKPVF

SEQ ID NO: 59 - protein, 1043 aa, unidentified; identical to SEQ ID NO: 58
  REGION 1..1043: note = Description of Unknown: uncultivated organism with predicted taxonomy: Deltaproteobacteria
  REGION 1..1043: note = MG1-62 effector

SEQ ID NO: 60 - protein, 833 aa, unidentified
  REGION 1..833: note = Description of Unknown: uncultivated organism with predicted taxonomy: Verrucomicrobia bacterium 61-8
  REGION 1..833: note = MG1-63 effector
DGPAGQPDETSFEAFLNQRREAGIRIGTFEEWMAALGQKTPRFDNRIVENCALIPRLHVCKVAPRWRRNQNGDKELDPRSLLAAEVTFLLQLKNLQVDDATAGTVRYLNTDELNEWWKHACEKAANVPLSDTWERDVLDCFKITRAEWRRWCVSKNLLPVARERSEAAALAGEIATQSAEAASGDSGAEERSRGKSQDVVQAPKPTGRSRFCRPALAILRHLLLHREKPQDFAARLRNREPALLDALDFDVLDNAPAEERPTGNGKALKGYRKQQRTWLLTGDLDFLDHVWKATDRDGNPRDFEPHQLRIPDMTLRDLRKRHDLTETPYSELLRQNSAELERRDKAILELIGQQKNPVVRDRLTRFWQRLKHFQNPVVPSDPKKQKPGLGLADPACLVLEFVRDDKDNSLEGRKRTEAIQQALRENEQRRDKARKALEQCGLPTTDDMVVRWLLLEAQGPACIYTNKPIRCTDLPNLQIEHIVPRALGGPDAFWNWVLSDENANAEKGDRVPYVWFKEEKTDEEWADYKRRVLARAAHLGRRKVDLLLRPDAAELAGEKYTALAESAWIARLAQTIARLHFGWPLDDEPGEERVITISGGLTARIRRKYLLDSLLGVGNDAETLRREIDSALDELEALRTDTSLSENARKQKRAELRQRLANLAAEAEKNRDDQRHHALDAMLLTFLPNWARDRTKEDFFRFPTAIGDNDFYSKEDQPEMAAIKSELAKLYVENKPVFREIKQARLAGDFGRLQQLKASVFPARKRIAELYRALDKLKQPRNVRAVREWFRAQLEGASPAPNGPVLPRTMAWQRTPTEATLYRRVYLIYKDCP

SEQ ID NO: 61 - protein, 1306 aa, unidentified
  REGION 1..1306: note = Description of Unknown: uncultivated organism
  REGION 1..1306: note = MG1-64 effector
IGTFEEWMAALGQKTPRFDNRIVENCALIPRLHVCKVAPRWRRNQNGDKELDPRSLLAAEVTFLLQLKNLQVDDATAGTVRYLNTDELNEWWKHACEKAANVPLSDTWERDVLDCFKITRAEWRRWCVSKNPLPVARERSEAAALAGEIATQSAEAASGDSGAEERSRGKSQDVVQAPKPTGRSRFCRPALAILRHLLLHREKPQDFAARLRNREPALLDALDFDVLDTAPAEERPTGNGKALKRYRKQQRTWLLTGDLDFLDHVWKATDRDGNPRDFEPHQLRIPDMTLRDLRKRHDLTETPYSELLRQNSAELERRDKAILELIGQQKNPVVRDRLTRFWQRLKHFQNPVVPSDPKKQKPGLGLADPACLVLEFVRDDKDNSLEGRKRTEAIQQALRENEQRRDKARKALEQCGLPTTDDMVVRWLLREAQGGVCIYTSNEIRPADLPNLQIEHIVPRSRGGPDAFWNWVLCDENANAEKGDRVPYVWFKEEKTDEEWADYKRRVLARAAQLGRRKADLHLRPDAAELAGEKYTALAESAWIARLAQTIARLHFGWPLDDEPGEERVITISGGLTARIRRKYLLDSLLGVGNDAETLRREIDSALNELQALRTDTSLSENAPKQKRAELRQRLANLAAEAEKNRDDQRHHALDAMLLTFLPNWARDRNKEDFFRFPTAIGDNDFYSKEDQPEMAAIKSELAKLYVENKPVFREIKQARLAGDFGRLQQLKASVFPARKRIAELYRALDKLKQPRNVRAVREWFRSQLEGASPAAKRPVLPRTMAWQRTPTEATLYRRVYLIYKDCPERSLLALTDLAFAPNPRNPQQPVFDLKWLRTRIQSIAEHPGYDRKKLQSVLSAKLEATLSAKRFASCQFGPEDWQQICAQPEVAACFQPVGRGKSKRPPEPDQRLVKVCKVEVLPATRYELSELGYTSGNNYAWNPDHLAETARNILRKDDAQARTRGRRRTPAPASSPSADASPWPGFLWDREMQAKLASPKFREALEQQLVPHLLPPKPARMSDAERTDWATREERWKQAFEQFRKSHNLPKSFFVFTSDSDRPPRRPNVSLLRVLFEPKDKVFSRDALAKQAQSVVDAQLRRCLECFADSLTQVRDPRLQEKAWRDYCNVVRVVPKETLEQFTREHPTPTADQWISFFEAQTGPRIFQVMQTVGTSLEEYFDLSKDACGAFARGGNKGYWLCKRGDAIEARPIRFFENPEQVRVRLLGQGWELLDPKPWRTGDLLNLPEAAQSGARSVPAGYYFLGSFSNDTGVNLKPCFGGEVPQNVSLKALWNRGLRRCSPTA

SEQ ID NO: 62 - protein, 1150 aa, unidentified
  REGION 1..1150: note = Description of Unknown: uncultivated organism with predicted taxonomy: Verrucomicrobia
  REGION 1..1150: note = MG1-65 effector
ILPSGKAKDGAPAATEADLAICYNSALLRIKLLRGEKLEEWQIFKALRAALQNRGQQIVPWIAREAARTGKTPEELLEEEKKALKDKDPDDQSPMTKWQEFCQLDPIKNNHSLQYPCYYDAYKIGLWDPTQPNSFKNKPDHNAASTQQVVFPGDRIEAELLLLAQNAATQLPVLDHAYKKVIGEFLNDRRARIENINQKRAARAQARNQAPRLLSTENLPHAKNFAELFVYGPAGKPNLPNGYRNIALADASIARALVLRPGTDFDHQSAIGQKIPRFDNRILAHCALFPRFHVCKATPRIYPDNSVDADSLLPCEVTFLFKLKNLRVSRAGQVTSLTPQQIQTIFHHVRNTALSQLGAAQEPSAKALASKFSLTKTELTKWGKKPGMAFSLLPTQQEIEKPKFLGRSRFSKPALKIIKEIILFGKSPQQIAQELKAPNSPLAQQLQLKISPQSPMQGLTHHDLDILTKCGDSWDNFHIPDTTTDFLLSTNQNSSYPNQSDKDTLIKKYIATSNNPIIRHRLELFYERLRLHLEKYGKPDFIALEFVREDFLGEEAKKKIQKIQNENKKLNSQAAEKVEELKLAGRQSILKYKLWQLQGGICLYTGKPIAQTEIESHEVEHIVPRNHPQTQGPDAQWNLVLTAREINDRKANRTPFEWFQQDPIAFQWPMGQPDASIPSQEKQRLWEAYCDRIKQRKKNLGNKRVKLLLSDKAPELVERYETLATTATIARMALRITDILFDWQNGNDAQGNKRVRVFPGGRTAAIRRRYLLNTLLGADSDQKLKTITDLQSEISQIKAQWPSLQGEEHKPTRKAYYQKRRQLAELIEGTKKDRSDARHHALDAMVLTFLPTWAQHPNKDEFFRFPPPLDNPYPQRPDILKVHQFFRDALNNVIPTPLAFEKARLAETAYGFRIINNKKKIAQRVAVEKLAYPGQEQKFDLAYLEGQIPSIADEKIRSMLTEIYNNIKSKTLQEAEQTWKDECAKLRLKTRDGSPGPFIKKVTQITDFHREYKDLSKDGTGAYYKGGDRHQGQFIYRDARGEFTVHPVYVHESIPQVKKALIEQNKTICIFVNSGCLVKTAQPIDPANYRKIIYENNKPKRITPEHPLPSGIYKWRTIIESSTSVTLENVFGEEFAINFCHLCKAGIQRL

SEQ ID NO: 63 - protein, 1076 aa, unidentified
  REGION 1..1076: note = Description of Unknown: uncultivated organism
  REGION 1..1076: note = MG1-66 effector
MADERIFSFDLGTGSIAYCVREGSNVIALGVDEIPSDFSELKDVRERTRQIRTRKAHKVREEWWKKHAELAGIEVPETGHLDEETGKFIPPDIRISTEFTKPGDSTIYNSYLLRIALLQGKELESWQIFKAIWSAIQHRGYERVPWINKEEDNEDTNKKRKSKSEGSEKEKEEREIQQAVVNYRNELKNAFGEKTQYYYPCYLEAYRLGIWSPDEPDNLTKTISDNPEPIRNKGGKIRRIIPRELLEAEIKQLLHQAGKKYPYIEENLDVILYGPAKTKYPAYTLKEYRRFMGKDWEWQGLLSQKTPRFDNRIIYKCRLIPRLNACKRKDPLAQEVIFLMKLKNFRYVDAETGEVLALKPEQLKTMFEEFQEEKKIGKRELEKFVKIRLNGKPHPGHTVIEPPNTNGRASFCRPALRIIKEILLTGKSPHQLYEEYTKANTNTDPRKGLVNDDYKFLLDLPAEWDKFHIPDRREEEAGLDEETRLKKIQELLGKITNAVVRHRLVLFYQKLQELKEKYGSPDKVIFEFARDPEETLDSKGRKERYKKVQDANRKAKEEAKKNLRELRNNGISIDGENALLKVRLWQEQNGRDLYTGLPIGQTEISICEIDHIIPREMGGPNAMYNFVLTKPECNREKGKRTPYQWLGSDPEKWQMFVDRINSEEYKKLSDRKKELLLKTITDEDELKELVEKYTHLAETSYISRLAQKIVHLYFGWEQLTKGSSRRVFVVSGAFTKRIRDLFKLDAILYPDLTLEEVYKYSAEEREEKNRNNPRHHALDALVVSITQEIKYNPLKGKDEYPEWFTPEFCKQAVERCLPVKVRFEKPTLAETIYGLRPYLDDNGRPTGKYVFVTRFGEGTDFEEYDDLDHAKKNVDSIYSANIRRELKQKLDENPSEQEWKIFIYNYRAGGKPKKLLMIASSDFAQEEVEKFLRGEINNLGEFIKGKMPGQYLKQSKESRGYFVYKDAKGKWRREAIYAFESPYLKKRKILSELKGRGDVYFFRSGVLVEIRNDIIKKQKPQSGNTETISKGFYYLNTIFETGYSKITSMEGKECLLSISKLMEEGKMKPAQEIRMR

SEQ ID NO: 64 - protein, 1655 aa, unidentified
  REGION 1..1655: note = Description of Unknown: uncultivated organism
  REGION 1..1655: note = MG1-67 effector
MPSPTTIWAFDLGKGSVGEAVRDIETNQFLHVAALLLPPDLARRGRADQTGTPASRYRAWKVRLAHRERERWLDTVWLAAGLTPLQKREVWRNPATGRWELKHPADYRLEREFAPAFGEKTKDGAPSDAAGANLCYTSCLLRIKLLRWKPGDPLLEEWQVYKALRSAMQKRGYGRVPWAVKEARAQGKTPEELEAEEQKQLEQADPRYREAAGKWPKFKRAVPAEFHFPCYYDAFHMGLWSPDQPDQLRLRPDHRAASTRNVRFDRADVRKELIALGNNAAAMLPQLQQAFERWQRDGWTFRHPVTGKALTKPVHARTFGEFLCDGPAGQPDETSFEAFLNQRREAGIRIGTFEEWMAALGQKTPRFDNRIVENCALIPRLHVCKVAPRWRRNQNGDKELDPRSLLAAEVTFLLQLKNLQVDDATAGTVRYLNTDELNEWWKHACEKAANVPLSDTWERDVLDCFKITRAEWRRWCVSKNLLPVARERSEAAAFAGEIATQSAEAASGDSGAEERSRGKSQDVVQAPKPTGRSRFCRPALAILRHLLLHREKPQDFAARLRNREPALLDALDFDVLDTAPAEERPTGNGKALKRYRKQQRTWLLTGDLDFLDHVWKATDRDGNPRDFEPHQLRIPDMTLRDLRKRHDLTETPYSELLRQNSAELERRDKAIVELIGQQKNPVVRDRLTRFWQRLKHFQNPVVPSDPKKQKPGLGLADPACLVLEFVRDDKDNSLEGRKRTEAIQQALRENEQRRDKARKALEQCGLPTTDDMVVRWLLLEAQGPACIYTNKPIRCTDLPNLQIEHIVPRSFGGPDAFWNWVLCDENANAEKGDRVPYVWFKEEKTDEEWADYKRRVLARAAQLGRRKVDLLLRPDAAELAGEKYTALAESAWIARLAQTIARLHFGWPLDDEPGEERVITISGGLTARIRRKYLLDSLLGVGNDAETLRREIDSALDELEALRTDTSLSENARKQKRAELRQRLANLAAEAEKNRDDQRHHALDAMLLTFLPNWARDRNKEDFFRFPTAIGDNDLYSKEDQPKIEAIKSKLAKLYEENGAVFREIKQARLAGDFGRLQQLKASVFPARKRIAELYRALDKLKQPRNVRAVREWFRAQLEGASPAPNGPVLPRTMAWQRTPTEATLYRRVYLIYKDCPERSLLALTDLAFAPNPRNPQQPVFDLKWLRTRIQSIAEHPGYDRKKLQSVLSAKLEATLSAKRFASCQFGPEDWQQICAQPEVAACFQPVGRGKSKRPPEPDQRLVKVCKVEVLPATRYELSELGYTSGNNYVWNPDHLAETARNILRKDDAQARTRGRRRTPAPASSPSADASPWPGFLWDREMQAKLASPEFREALEQQLVPHLLPPKPARMSDAERTDWATREERWKQAFEQFRKSHNLPKSFFVFTSDSDRPPRRPNVSLLRVLFEPKDKVFSRDALAKQAQSVVDAQLRRCLECFADSLTQVRDPRLQEKAWRDYCNVVRVVPKETLEQFTREHPTPTADQWISFFEAQTGPRIFQVMQTVGTSLEEYFDLSKDACGAFARGGNKGYWLCKRGDAIEARPIRFFENPEQVRVRLLGQGWELLDPKPWRTGDLLNLPEAAQSGARSVPAGYYFLGSFSNDTGVNLKPCFGGEVPQNVSLKALWNRGLRRCSPTA

SEQ ID NO: 65 - protein, 983 aa, unidentified
  REGION 1..983: note = Description of Unknown: uncultivated organism with predicted taxonomy: Elusimicrobia bacterium HGW-Elusimicrobia-1
  REGION 1..983: note = MG1-68 effector
MGKIYAFDLGTGSLGSCVREDKEIKDLSVELLPNDFATLKEARERRRQIRTRIAHKKREEWWKEQSQKAGIEVLETGHLDKNGNFIKPDDKISRQFPESGDDAIYNSSLLRIAILQGKKLEGWQIFKAIWSAIQHRGYDSNLPWIRESKRNIDEDENTEQINKDEKENQEAVKKYNNALKDVFGDKKEYYYPCYYEAYKMGIWSPNEPNNLNKKFSANPNPARNKDGKVDLVIPRDLIEKEIKDMLLKIGESYPYIKENLDLILYGPGKSKYAAYKAKEYRKYLGKDWEWQGLLSQKTPRFDNRLISKCALIPRLNVCKAKDELNKEVVFLMKLKDVRYYKIDGGEEKYLTNEEIKNIYEKFKDKLKITERQWTKYLKENLQGSPNPSQPKIEPSKPSGRSRFCRPALRIIKEIILSGKSPDLLYKELVENNKNTDPKKGLVKEDYSFLLKMPEKWENFHIPDNRMDESKLDETERKNLIEEIFSKTSNPIVKHRLKIFYDKLIEYKNKFGEPEKVIIEFVRDTDDGFYGKIKKKKIIAEQNKNRKESDLAFKEAQTLGLKGGESILKIKLYREQGGFDLYDGKTIKDTEIDNYEIDHIVPREDGGPDSYINKVLTSRKNNDDKGKRTPYEWLSKSDNWEEYFERVKKLPKDSKKKKDLLVSANAKELVEKYTQLAETAYIAKLSQKICHLFFGWEQGTEGSKRKVIVANGGLTAKMRNAYDLNRILHTGLSDAEYKELCKSGEIDKKNRDNPRHHALDAMVISMIPEIKMNDRKKDFFPIWFNPDYCREKLEQCFPKNIRYEKPKLAETIYGLREIIDDKGNKKYVFVSRLVGDVKNIEGYYDIKTAKKYLDKIFSDKIRKDFKEKLDSNPSNEEWKSFLDNYFAGGKPKKILLKVSDEYTYDKIKDFLDGKVKNCGEFIKGRLPGQYLKQKKEAYGYFIYKNEKEKWIRDVIYAFDSVFNKMKEIKSKYKEAYFFRSEMLV

SEQ ID NO: 66 - protein, 1235 aa, unidentified
  REGION 1..1235: note = Description of Unknown: uncultivated organism with predicted taxonomy: Pedosphaera sp. Tous-C6FEB
  REGION 1..1235: note = MG1-69 effector
RAMTSPATIWAFDLGKGSLGEAVLNLETHQFHHKATLLLPADLAQRGPASQAGTPASRYRALKVRQAHRERERWLDTVWQAAGLEVLQPRQTALVCALPPKRDDTGQPLFDQGHWALVGRADYRLEREFAPALGEKTKDGAPSDAAGANLCYTSCLLRIKLLRWKPGDPALEDWQVYKALRSAMQKRGYGPVPWAAEESRPKLTKEEQAKEQEIAARWDKFKKGYRYDENPDADPNRAPLPPQFHFPCYYDAFHMGLWRPDQPDHLRPRPDHRAASTRNVRFDRADVRKELIALGNNAAAMLPQLQQAFERWQSDGWTFRHPVTGEELTKPVRARTFGEFLCDGPAGQPDETSFEAFLNQRRQAGIRIGTFEEWMAALGQKTPRFDNRILAPCVLIPRYHACKVDARLEKDRAGRLTGKLVPDSLLASEVTFLLKLKNLLVADPVKGQRKLTVEEVREIFAFAQRRLKTLPLLTPEGEPAKEWPRKVANCFAINPSDWPKIAAEAECLKGLARLTVSDNGAPRPLTREEAEALLHAVAGGRRAAQTVLPAHLLPLVKRAAAAWKQAKQQAEEIMLRPLPGHEEVKAPRTCGRSAYSRVALRILKELILSGDAPSAFHARLVRREPDLLQRLGPAPGQPLAIFDDSTASNEAQRKQENAENRKHGLLVSELNFLLQMRKDDGSPDSWENLFIPAQTLEALQQRHTEDGRLDADAAVRELLGTIKDPVVRHRLGVFDERLRKLRFGDAREGLPGFGVPEAIVLEFVREDFMGEEAKRRLQTFQRQREEERKKARSIAAQAGAESALSALKCQLWEAQGGECLNGREVLDQTGQSKARCLYRQTALPLSRLDEYVIDHIVPRARGGPEAMVNYVLTTAETNEAKGDRTPFEWLHGSPDWDAYVARVKARAAALRNKKVQLLTREDAPELVERYTALAETAWISKLAQTIVNLRFGWRNGVDYSGPQPVKRVIVVSGGLTARVRRKYGLDKLLYGEDTAPEVLAKKVKNRDDDRHHALDAMVMTFIPHWARDPNKQGFFRFPPAFRDANGREDYQRIRSLFASHLQQIVPRHLAYEPSVLADTIYGGRLDNGRPVIVQRVPVRELAYKQEQQRPVFNLTYARDQIAHVRDPRLRRVLEAFVATGPDQAAWDNYCRALAAGTCPELPDRKVLKVTLNRDEDPEEFKDLSKDGCGAFRTRKGEHRGQFVYLDARGRVRVRPVRPFESLVAVKAEVERLAAG

SEQ ID NO: 67 - protein, 1052 aa, unidentified
  REGION 1..1052: note = Description of Unknown: uncultivated organism with predicted taxonomy: Endomicrobium
  REGION 1..1052: note = MG1-70 effector
SIAYCVREGVNVLDIGVDILPGDFASLKNVREKRRMIRTRMAHKVREEWWKMHAKEAGIEVLETGHLNENGEFVKPDIRLSTEFTPPGDSTIYNSYLLRIALLQGKDLESWQIFKAIWSAIQHRGYEKAPWVRKEEAQKEPSDGKKSRKSKSEDESEKEREEKEIQQAVENYRNELKQAFGDNHQYYYPCYLEAYKLGIWSPDEPDNLTKTISENPEPIRNKDGEIRRIIPRELLEKEIKELLQQAGKKYPYIEKNLNYILYGPAGTKYPAYTLKEYRRYMGKDWEWQGLLSQKTPRFDNRIISKCRLIPRLNVCRRKDELVQDVTFLMKLKNFRFIDRETGEVKALTPEQLKEMFETFRSERKINKTELKKYVKDRLNGWVHPSHTNIDPPKTTGRASYCRPALRILKEILLTGKSPHQLYQEYTSTNTNTDPRKGLVNDDYKFLLDLPAEWDNFYIPDRREEEANLDEETRLKKIYETFSKITNSVVRHRLLLFYNKLRELKEKYGAPDKVIFEFARDPEETLETSKRKDYKKIQKFNLKAKEKAKQILEELRSKGISMQGSNKVLKVRLWQEQGGFDVYTGQPIGETEIDICEIDHIVPREMGGPNARYNMVLTKPECNREKGKRTPYQWLGQDPEEWQKFVERLEREKGFENLPAKKKNLLVATNPEELIERYTHLAETSYISRLAQRIVHLFFGWEQLTKGSTRHVYVVSGALTKYIRDKFELDVLLYPDLTKEEVFKIPSEEREEKNRNNPRHHALDALVVSIARPENVDKYPEWFTQDFCRMAIEKCLPVKVRFEKPTLAETIYGLRPMLDDNGRPTGKYVFVTRFGEGTRFSDYSKLEHAKKNVDSIYSANIRRDLKNKLKENPSKEEWEVFIHNYRAGGKPKKLLMIASSEIDGDDVKKFLSGELRNLGEFIKGKMPGQFLKQAQESRGYFVYKDEKGKWRREVIYAFESPYLRRREILSKLKDCKEIYFFRSGMLVKIENDFLYEPRGGASKTIPGGYYYINTINVSEQVKITAIDGREIKLSLSQLMEKGRMKPAQKVRMD

SEQ ID NO: 68 - protein, 1110 aa, unidentified
  REGION 1..1110: note = Description of Unknown: uncultivated organism
  REGION 1..1110: note = MG1-71 effector
WQIYKALRAALQNRGQQTVPWIAREAARTGKTPEELLEEEKKAFENKDPDYQSALTKWQQFCQLDPIKNNHSLQYPCYYDAYKIGLWDPTQPNSFKNKPDHNAASTQQVVFPGDRIEAELLLLAQNAATQLPVLDHAYKKVIGEFLNDRRARIENINQKRAARAQARNQAPRLLSTENLPHAKNFAELFVYGPAGKPNLPNGYRNIALADASIARALVLRPGTDFDHQSAIGQKIPRFDNRILAHCALFPRFHVCKATPKIYPDNSVDADSLLPCEVTFLFKLKNLRVSRAGQVTSLTPQQIQTIFHHVRNTALSQLGAAQEPSAKALASKFSLTKTELTKWGKKPGMAFSLLPTQQEIEKPKFLGRSRFSKPALKIIKEIILSGKSPQQIAQELKAPNSPLAQQLQLKISPQSPMQGLTHHDLDILTKCGDSWDNFHIPDTTTDFLLSTNQNSSYPNQSDKDTLIKKYIATSNNPIIRHRLELFYERLRLHLEKYGKPDFIALEFVREDFLGEEAKKKIQKIQNENKKLNSQAAEKVEELKLAGRQSILKYKLWQLQGGICLYTGKPIAQTEIESHEVEHIVPRNHPQTQGPDAQWNLVLTAREINDRKANRTPFEWFQQDPIAFQWPMGQPDASIPSQEKQRLWEAYCDRIKQRKKNLGNKRVKLLLSDKAPELVERYETLATTATIARMALRITDILFDWQNGNDAQGNKRVRVFPGGRTAAIRRRYLLNTLLGADSDQKLKTITDLQSEISQIKAQWPSLQGEEHKPTRKAYYQKRRQLAELIEGTKKDRSDARHHALDAMVLTFLPTWAQHPNKDEFFRFPPPLDNPYPQRPDILKVHQFFRDALNNVIPTPLAFEKARLAETAYGFRIINNKKKIAQRVAVEKLAYPGQEQKFDLAYLEGQIPSIADEKIRSMLTEIYNNIKSKTLQEAEQTWKDECAKLRLKTRDGSPGPFIKKVTQITDFHREYKDLSKDGTGAYYKGGDRHQGQFIYRDARGEFTVHPVYVHESIPQVKKALIEQNKTICIFVNSGCLVKTAQPIDPANYRKIIYENNKPKRITPEHPLPSGIYKWRTIIESSTSVTLENVFGEEFAINFCHLCKAGIQRL

SEQ ID NO: 69 - protein, 1005 aa, unidentified
  REGION 1..1005: note = Description of Unknown: uncultivated organism with predicted taxonomy: Deltaproteobacteria
  REGION 1..1005: note = MG1-72 effector
MPSPTTIWAFDLGKGSVGEAVRDIETNQFLHVAALLLPPDLARRGRADQTGTPASRYRAWKVRLAHRERERWLDTVWLAAGLTPLQKREVWRNPATGRWELKHPADYRLEREFAPALGEKTKDGAPSDAAGANLCYTSCLLRIKLLRWKRGDPPLEEWQVYKALRSAMQKRGYGRVPWAVNQARAQGKTPEELEAEEQKQLEQADPRYREAAGKWPEFKRAVPAEFHFPCYYDAFHMGLWSPDQPDQLRLRPDHRAASTRNVRFDRADVRKELIALGNNAAAMLPQLQQAFERWQRDGWTFRHPVTGKALTKPVHARTFGEFLCDGPAGQPDETSFEAFLNQRREAGIRIGTFEEWMAALGQKTPRFDNRILAPCVLIPRYHACKVDARLEKDRAGRLTGKLVPDSLLASEVTFLLKLKNLLVADPVKGQRKLTVQEVRDIFAFAQRRLKTLPLFTPEGEPAKEWPRKVANCFAINPSDWPKIAVETECLKGLARLTVSDNGAPRPLTREEAEALLHAVAGGRRAAQTALPAHLLPLVKRAAAAWKQAKQQAEEIMLRPLPGHEEVKAPRTSGRSAYSRVALRILKELILSGDAPSAFHARLVRRDPDLLQRLGPAPGQPLAIFDDSTASNEAQRKQHDAENRKRGLLVSELNFLLQMRKDDGSPDSWENLFIPAQTLEALQQRHTEDGRLDADAAVRELLGTIKDPVVRHRLGVFDERLRKLRFGDAREGLPGFGVPEAIVLEFVREDFMGEQAKRELQTFQKRREQARAEAEAEAAKLGLESRSSSLRYELFKAQGGICLYTGRTLSETQLDQYEIDHIVPRSLGGPDAMVNYVLTFPEVNSAKEKGKLTPYALLHGTDGWDAYVARVKARAAALRNKKVQLLTREDAPQLVERYTALAETAWISKLAQTIVNLRFGWRNGVDYSGPQPVKRVIVVSGGLTARVRAKYGLDKLLYGENTPPEVLAKKVKNRDDDRHHALDAMVMTFIPHWARDPHKEGFFRFP

SEQ ID NO: 70 - protein, 1141 aa, unidentified
  REGION 1..1141: note = Description of Unknown: uncultivated organism with predicted taxonomy: Pedosphaera sp. Tous-C6FEB
  REGION 1..1141: note = MG1-73 effector
SLTTLVTFPIVSPMPSPTTIWAFDLGKGSVGEAVRDIETNQFLHVAALLLPPDLARRGRADQTGTPASRYRAWKVRLAHRERERWLDTVWLAAGLTPLQKREVWRNPATGRWELKHPADYRLEREFAPALGEKTKDGAPSDAAGANLCYTSCLLRIKLLRWKRGDPPLEEWQVYKALRSAMQKRGYGRVPWAVNQARAQGKTPEELEAEEQKQLEQADPRYREAAGKWPEFKRAVPAEFHFPCYYDAFHMGLWSPDQPDQLRLRPDHRAASTRNVRFDRADVRKELIALGNNAAAMLPQLQQAFARWQRDGWTFRHPVTREALTKPVRARTFGEFLCDGPAGQPDETSFEAFLNQRREAGIRIGTFEEWMAALGQKTPRFDNRIVENCALIPRLHVCKVAPRWRRNQNGDKELDPRSLLAAEVTFLLQLKNLQVDDATAGTVRYLNTDELNEWWKHACEKAANVPLSDTWERDVLDCFKITRAEWRRWCVSKNLLPVARERSEAAALAGEIATQSAEAASGDSGAEERSRGKSQDVVQAPKPTGRSRFCRPALAILRHLLLHREKPQDFAARLRNREPALLDALDFDVLDTAPAEERPTGNGKALKRYRKQQRTWLLTGDLDFLDHVWKATDRDGNPRDFEPHQLRIPDMTLRDLRKRHDLTETPYSDLLRQNSAELERRDKAILELIGQQKNPVVRDRLTRFWQRLKHFQNPVVPSDPKKQKPGLGLADPACLVLEFVRDDKDNSLEGRKRTEAIQQALRENEQRRDKARKALEQCGLPTTDDMVVRWLLREAQGGVCIYTSNEIRPADLPNLQIEHIVPRSRGGPDAFWNWVLCDENANAEKGDRVPYVWFKEEKTDEEWADYKRRVLARAAHLGRRKVDLLLRPDAAELAGEKYTALAESAWIARLAQTIARLHFGWPLDDEPGEERVITISGGLTARIRRKYLLDSLLGVGNDAETLRREIDSALNELQALRTDTSLSENAPKQKRAELRQRLANLAAEAEKNRDDQRHHALDAMLLTFLPNWARDRNKEDFFRFPTAIGDNDFYSKEDQPEMAAIKSQLAKLYVENKPVFREIKQARLAGDFGRLQQLKASVFPARKRIAELYRALDKLKQPRNVRAVREWFRAQLEGASPAPNGP

SEQ ID NO: 71 - protein, 1171 aa, unidentified
  REGION 1..1171: note = Description of Unknown: uncultivated organism
  REGION 1..1171: note = MG1-74 effector
WIPKLCQKADYRLEREFPPSRILPSGKAKDGAPAATEADLAICYNSALLRIKLLRGEKLEEWQIFKALRAALQNRGQQIVPWIAREAARTGKTPEELLEEEKKALKDKDPDDQSPMTKWQEFCQLDPIKNNHSLQYPCYYDAYKIGLWDPTQPNSFKNKPDHNAASTQQVVFPGDRIEAELLLLAQNAATQLPVLDHAYKKVIGEFLNDRRARIENINQKRAARAQARNQAPRLLSTENLPHAKNFAELFVYGPAGKPNLPNGYRNIALADASIARALVLRPGTDFDHQSAIGQKIPRFDNRILAHCALFPRFHVCKATPRIYPDNSVDADSLLPCEVTFLFKLKNLRVSRAGQVTSLTPQQIQTIFHHVRNTALSQLGAAQEPSAKALASKFSLTKTELTKWGKKPGMAFSLLPTQQEIEKPKFLGRSRFSKPALKIIKEIILSGKSPQQIAQELKAPNSPLAQQLQLKISPQSPMQGLTHHDLDILTKCGDSWDNFHIPDTTTDFLLSTNQNSSYPNQSDKDTLIKKYIATSNNPIIRHRLELFYERLRLHLEKYGKPDFIALEFVREDFLGEEAKKKIQKIQNENKKLNSQAAEKVEELKLAGRQSILKYKLWQLQGGICLYTGKPIAQTEIESHEVEHIVPRNHPQTQGPDAQWNLVLTAREINDRKANRTPFEWFQQDPIAFQWPMGQPDASIPSQEKQRLWEAYCDRIKQRKKNLGNKRVKLLLSDKAPELVERYETLATTATIARMALRITDILFDWQNGNDAQGNKRVRVFPGGRTAAIRRRYLLNTLLGADSDQKLKTITDLQSEISQIKAQWPSLQGEEHKPTRKAYYQKRRQLAELIEGTKKDRSDARHHALDAMVLTFLPTWAQHPNKDEFFRFPPPLDNPYPQRPDILKVHQFFRDALNNVIPTPLAFEKARLADTAYGFRIINNKKKIAQRVAVEKLAYPGQEQKFDLAYLEGQIPSIADEKIRSMLTEIYNNIKSKTLQEAEQTWKDECAKLRLKTRDGSPGPFIKKVTQITDFHREYKDLSKDGTGAYYKGGDRHQGQFIYRDARGEFTVHPVYVHESIPQVKKALIEQNKTICIFVNSGCLVKTAQPIDPANYRKIIYENNKPKRITPEHPLPSGIYKWRTIIESSTSVTLENVFGEEFAINFCHLCKAGIQRL

SEQ ID NO: 72 - protein, 800 aa, unidentified
  REGION 1..800: note = Description of Unknown: uncultivated organism
  REGION 1..800: note = MG1-75 effector
MTESDPFQHKAILRKWENHEFYRSSVVLGLDVGLEGIGVYLRKGPRTLYEKTLLYQIPKTNALQDRRQSRAARRCRKNRRTRMTRLKALFERHGFPWFEGNDDALTRSDPFLLRHRATTKKLASREALGICIRHLVTHRRYEFFSDEGENPWGEEASLATEVKWLRTAYVDEKDADLLRTECRVLADVAGGRAEDKYEEFRQILEDRIVTERNNPILEMLESYAGEKRNHLRQKARGAVFPRRLVWSHLESICRRHGELFDDVDEFLRDLGAPRSRKDRAIFNYHRKTEEEMKAHWARKVGPCPYAEMLGLSSKLRRGVRGEMPIRRFSLLEFLVSRRIELSDGRLLLVPDSCIEMLFDWMERFEAAYRDQRTLPPMKKIREIVVGEMRKSTGQAPAPASKSEINKAFFEQIKGIMAPTASRRNARASLSCEAAEKLFEEATSSGLSRDSVNRQLQTYYQWRKRASSDFGLYPQVEFLLGRRRRRRAGEGEYAVSGRLQRIFSLPEVVEHLDGQASPDYCVIEVVGDIPRNEKERREKEQEIRKNQGRKEKLFERFNAADSAVGSAYKRVLLFDQQRGLCPYSGGELGDPLSSDLEIDHIFPRKRGGISVRENLVLTFADRNRDKGNLTPREAARKRNGWDWDEIEAATARMKWSRKKREIFEREGAGIPPLANVTRTAQLARQLVAECAHWMGIAGDPDEIQRRIGTPSGYMRAQALRSWEDTVPAKNRSDLVHHLVDAAVVAHIPPGAGMNQVSYGGIFYPSSVDGKDRARLAALPLGPGLRRWTAAEPLECSAAPPG

SEQ ID NO: 73 - protein, 953 aa, unidentified
  REGION 1..953: note = Description of Unknown: uncultivated organism
  REGION 1..953: note = MG1-76 effector
MGNGTIFSFDLGTGSIATCVRQDEEIKYIHVETLPGEFATLKETRERRRQIRTRLAHKQREEWWKIHAKEAGIEVLETGHLDEKGNFISPDPRLTCEFSKKGNPTIYNSLLLRIALLQGKKLEGWQIFKAIWNAIQRRGYDENIPWKHKLEAEKTEDDNEQENSKQTKGKKSKKKEDANSEDEEQKIRQAVIKYKEKLNNTFGDKEEYKYPSYLEAYLLGIWSPDEPDNLTKTISENPEPIRNKDGNIKLITPTELVEKELKQLLVKVGEQNEYIKKNLNYILYGPSGCRYGTYILPKYRRYIGKDREWEGLLSQKTPRFDNRIVYKCRLMPRFNVCKRKDLLSQEVIFLMKLKNFRFVDAETGEEKMLTPEQIQKMFNDFQNTLKINNRELKKYLKENFKGEIHPSFPAIDAPNTKGRASFCRPTLKIIKEIILSGKSPHTLYQEYTSSNTNTDPKKGLINNDYKFLLKMPTEWENFHIPDEREDEAQLNEDERIKVIYNILSKITNPVVRHRLLLFYRKLQYLKQEFGIPNIVMLEFARDPEELLAGEERKKKYLKLQKENRQKKEKAEKIYQELKNGNVNLKGRSILLKIQLWQEQNGIDPYSGEQIPQTKINLYEIDHIVPREMGGSDAYFNKVLTSPEKNREKAKRTPYQMFKGNISDWKKYLNTIEKITNLSKKKRALLTSENPEELIERYTHLAETAYISRLAQKICHLFFGWEQLTKGSQRKVFVVSGAFTRKIRTIFELDRILYPDLSDEEYKELLTKGEIQKKNRDNPRHHVLDTIVLSIIPEIKYNPEREKDDYPVWFNKEYCRQYIEKCFPRPIRFVKAKLAETIYGLRERNDYTEEEKKKGKKQYVFVTRFGTGTTLKELKEYDDLKFAKKNVESIYSYNIRQDLMKKLEEKPAPEEWKVFLHNYRAGGKPKKILVKASSYIDEEEVQKFLNGEIPNLGE

SEQ ID NO: 74 - protein, 898 aa, unidentified
  REGION 1..898: note = Description of Unknown: uncultivated organism
  REGION 1..898: note = MG1-77 effector
MTTPATIWAFDLGKGSLGEAVRDQQTNQFLHKATLLLPADLAQRGPATQAGTPASRYRALKVRQAHRERERWLDTVWQAAGLEVLQPRQTALVCELPPKRDDTGQPLFDQGHWALVGRADYRLEREFAPALGEKTRDGAPSDAAGANLCYTSCLLRIKLLRWKPGDPPLEEWQVYKALRSALQKRGYGRVPWAVKEARARGKTPEELEAEEQKQLEQADPRYREAAGKWPEFKRAVPVEFHFPCYYDAFHMGLWSPDQPDHLRLRPDHRAASTRNVRFDRADVRKELIALGNHAAAMLPQLQQAFERWQRDGWKFPHPVTGQELTKPVRARSFGEFLCDGPAGQPDETSFEAFLNQRREAGIRIGTFEEWMAALGQKTPKFDNRILAPCVLIPRYHACKVDARLEKDRAGRLTGRLVSDSLLASEVTLLLKLKNLLVADADTGQRKLTVEEVRDIFAFVQRRLKLLPLLTPEGEPVKEWPRKVADCFAINPSDWPKLAAETECLKGLARLTVSDNGAPRPLTREETEVLLHAVAGGRRAAQTALPAHLLPLVKKAEAAWKQAKQAVEGNILRPLPGHEEVKAPRTSGRSAYSRVALRILKELILSGDAPSAFHARLVQREPDLLQRLGPAPDQPLAIFDDSTASNETQRKQEDAENRKRGLLVSELNFLLQMRKDDGSPDSWENLFIPAQTIEALQQRHTEDGWLDADAAVRELLGTIKDPVVRHRLGVFDERLRKLRFGDARERLSGFGVPEAIVLEFVREDFMGEQAKRDLQSFQKRREQARAEAEAEAAKLGLGSRSRALRYELFKAQGGICLYTGRPLSETQLDQYEIDHIVPRSLGGPDAMVNYVLTFPEVNSAKEKGKLTPYALLHGTPHWDAYVARVKARAATLRNKKVQL

SEQ ID NO: 75 - protein, 1035 aa, unidentified
  REGION 1..1035: note = Description of Unknown: uncultivated organism with predicted taxonomy: Verrucomicrobia
  REGION 1..1035: note = MG1-78 effector
MSKTETVWAFDLGKGSMGEAVRQGNQFLHKASLLIPAEFAETRTARDRRRMWRTRQAHKARERWLDEVMTAAGIEVLKGRQVGKVDGKWVETAKGDPRLEREFAAPGDSTCYTSCLLRIKLLRGEKLEPWQIYKALHSAIQRRGYDPDIPWKTREQRQGKKSEDEEGKTLTRMQEFEKQLLAMSPDHPEYRWPCYFDAWKMGLWSPAKPDELKERLDFNAQTTRDQIVPRKVVEAEVRALVEAASQFYPSLKGKADYLLYGPPQRAYASYYVEQRKQHGLREGGVNDWQGVVGQKIPRFDNRIIGKCVLIPRLNVCKIRKGDDGKLHPQSRIVAETVFLMKLKNMRLQTAKGVTGLTAQQISKIFADPKRKKYGLTKTQWKQWCIKFGGMPLPGNQEEVEEPHFGGRSRFCRPALEIVKRLILSGDTPPMAYEKEVARLNGNTDPLKGLVKDDLKFLLQMGPTWEGIYIPNQKLDALTRSTEDANEAIRQLIGAQNDPIVRHRLTLFADRLNLLAEKHGTPDCVVLEFVREDFMGRKAKQEYLKFQRERAKERSEAREEAAKAGATEGAAGLKMELYKAQGGICLYTGEALSVTSLDEYVIDHIVPRAKGGPDSVMNYVLTTRRANDDKLDRTPYEWLSQTPGWDAYVERVKERAVTLRNKKVSLLTRPDADTLVDKYTALAETAWISKLAQTIISLRFGWPGGIANGERKIIVVSGGLTGRIRRKYKLNSLLNPDAKSEEEAEVKNRNDDRHHALDAMVISFIPNWARDAKKTGFFRFPDGIHRELFAKEIADVIPLNVCFEKPALAETIYGARNDHGAKVIVQRTALLSLAMKPTTPGKTTFDLKYAGKQAQSVRDPIIQKRLLEFIATNPDEATWRKFCAELHIKRKDGTAGPRVEYVTVTVGEPTEYKDMSKDGTGAYRKALKGHKGQFVFVDSKGKFKVRPVYAFESAQKVGQELTQKFGQNAIKGFFQSGCLVELTAPVPHSFTPLVPGQYKLNTIFTDGRAKLTDSTGKQSLPISLEKLFSAGFKRAR

SEQ ID NO: 76 - protein, 1333 aa, unidentified
  REGION 1..1333: note = Description of Unknown: uncultivated organism
  REGION 1..1333: note = MG1-79 effector
MPTTNPYVITHVTKNWMKDEFYDSALVLGLDIGIEGIGVWLRKGREPLFARTFMVSLPEAAPLKNRRAKRAQRHARQSLRRREAMLREWVVRYGLLPQEKTDGRWWKNPAVFERAFEHRHRAITTGVASPECLVVCIRHLLRHRGFDYHLTDEGAFPWGDELDDKEIIQWAKNSCCAPEYRTHLCNLIEADAAWAKNSDGSFTEKYLKVRQALDDAVREYENRPVERMLEQHMSEKNHPHLRPRARGRNFARELVKQHLYAICEKHRHFFAPGTFDQAMRELLGDQTGPSQWKLTWMDQDGKARQTILDYHRRTREEAEELWKRKVKKCPFAPLLFEKRHPTTPQHDCAVRSDPRIRRFNLLMFLAERRIELETHDAEGRLQNPRVNLDANVVRDLLGDLEQDIRAVEALRNKQSASRPDKPGKKTFEQRWRICNDCGKETGQDETGKSSCCKAKTKPKMPLAGVAKGSFNADFFDQLGDLLRPELRSLKGRASLSGEAAEVLFKLVTRNGTDFEPARIRQALEDCGYYDWRTNLPAGLGIYPQVTFLLGNRGHYDKDGNPRQIDKTTGNPVHHGILRRLFAGQLRLDDGTLVGLKDKLDDKVVPDYVVIETIGEIPKNQKEKKEFQDEIKANRSRKTDIIEKKYGLKLDSLSDWQVKQVLLFDQQANEEGEAFSPYSGVSLGTNPLAHDLEVEHIYPERRGGISVMDNLVITWRTENQTKGDRTPWEWAKDEGWRVDVHLQKMHWSANKRALFVRQESDPPQWDNTTRMAQLARHLRAEVIHWLGLDQIQDQKERNKEIARRIGTPTGFQTSVCRESWTPPHVFPQMYRLLCDKKGVPVRDRNGQERWVKDRTNLRHHLWDAAVLSHIPPGVGLNSADCGGIFVHRRDPQNGEWSVSALADLGPDLVAFEKANADRCLVVRLRQRKSKKSRYKETIFSLPDQQNRVFAREPLSKVVTSLLKSKKKNPDAELRKLLDRPGLLNPLEITNKKTGQTKQIKLLNKADVERWLSCKDVSLDQEGFRKFIEDVGVPTEQIPDDAVKAAFMKRNGETLLRKTFKPNSLVSFIRQKCRIKDSEIEARVEIAIAERNERTVLRAANGRDGQPGQVIRSILIEQDKLPPCGFGLHFNPTAKPKRGSEVAGFKPVDNSNSVVYLRREIWIGQRTKKKGRKTTVETFYKSRLIPHPRHLASYQKLHGQPWKADPLPLGMKLAGKLAVGDLLRIPLKKEKRNRNDNLIAKRGETPLESRFYRVKSMKTNCTIEFQMAEFAEPKLVKGQIPDPATERLLETYELTCSNEADLLWLLEVTTGKRIKLPPPVVENAPTTGKREGELL

SEQ ID NO: 77 - protein, 1035 aa, unidentified
  REGION 1..1035: note = Description of Unknown: uncultivated organism with predicted taxonomy: Verrucomicrobia
  REGION 1..1035: note = MG1-80 effector
MSKTETVWAFDLGKGSMGEAVRQGNQFLHKASLLIPAEFAETRTARDRRRMWRTRQAHKARERWLDEVMTAAGIEVLKGRQVGKVDGKWVETAKGDPRLEREFAAPGDSTCYTSCLLRIKLLRGEKLEPWQIYKALHSAIQRRGYDPDIPWKTREQRQGKKSEDEEGKTLTRMQEFEKQLLAMSPDHPEYRWPCYFDAWKMGLWSPAKPDELKERLDFNAQTTRDQIVPRKVVEAEVRALVEAASQFYPSLKGKADYLLYGPPQRAYASYYVEQRKQHGLREGGVNDWQGVVGQKIPRFDNRIIGKCVLIPRLNVCKIRKGDDGKLHPQSRIVAETVFLMKLKNMRLQTAKGVTGLTAQQISKIFADPKRKKYGLTKTQWKQWCIKFGGMPLPGNQEEVEEPHFGGRSRFCRPALEIVKRLILSGDTPPMAYEKEVARLNGNTDPLKGLVKDDLKFLLQMGPTWEGIYIPNQKLDALTRSTEDANEAIRQLIGAQNDPIVRHRLTLFADRLNLLAEKHGTPDCVVLEFVREDFMGRKAKQEYLKFQRERAKERSEAREEAAKAGATEGAAGLKMELYKAQGGICLYTGEALSVTSLDEYVIDHIVPRAKGGPDSVMNYVLTTRRANDDKLDRMPYEWLSQTPGWDAYVERVKERAVTLRNKKVSLLTRPDADTLVDKYTALAETAWISKLAQTIISLRFGWPGGIANGERKIIVVSGGLTGRIRRKYKLNSLLNPDAKSEEEAEVKNRNDDRHHALDAMVISFIPNWARDAKKTGFFRFPDGIHRELFAKEIADVIPLNVCFEKPALAETIYGARNDHGAKVIVQRTALLSLAMKPTTPGKTTFDLKYAGKQAQSVRDPIIQKRLLEFIATNPDEATWRKFCAELHIKRKDGTAGPRVEYVTVTVGEPTEYKDMSKDGTGAYRKALKGHKGQFVFVDSKGKFKVRPVYAFESAQKVGQELTQKFGQNAIKGFFQSGCLVELTAPVPHSFTPLVPGQYKLNTIFTDGRAKLTDSTGKQSLPISLEKLFSAGFKRAR

SEQ ID NO: 78 - protein, 1074 aa, unidentified
  REGION 1..1074: note = Description of Unknown: uncultivated organism
  REGION 1..1074: note = MG1-81 effector
MNSSRSPVTRFSTGLVFGFDVGTGSIGWAVRNGTEFLDVGVLVCPEETAKLDSRRGLRRQRRTLRSKKYRRQWFARELAGLLGLTLIRQGQSELPLPETAWEQNAKGGWVPKPGFESLRDPVALRVAAAEGEPLRPEELFTALVHLFRLRGYLADVPWANREVEAKESDAKKEEGEIRARMSALQAEMQAAGCELPCQLLALRANNGQRQRKEVWPRELVEKEFRAIVAAQATRHPTLAEKADWLLFGDCREVKSHRVFFKTTESRNPGVLGLKWPRFDNRGPALDALRPIDELGRPLHVVRKNKEAFSKAQWELAVMNFRVIDRQTGALVPPDARALARLREMWESSSRKRRAKKEAMSGTPAGSPETTPRVEIKVALLEKWAAEFANRYKLVEGQQSLTPQTGAGRARYSTPTLELIREQFERGIRFDPPQPVLRRPGESPQRALDRYLADIKHPLVRHRLLLFSRLLDKLVKQHGEPDLIVLEAVRSLALGEKNKRELLKRNKANRDQRESIRQELASRNASTSRNAILRYRLWKEALSTCPFCGDKITQEQLLRGEADIEHLVPRSVVDCNEFYNLTVGHVRCNRELKGDRTPFQAFGHTEKWPQLRDNAEKCFKGRKLEIFLSDNAEQLIEQKADLQHTAYIARIVRHVALIRLGWTGDDGRDPTIIKGNKPSSSFQVTNGQLTSRLRQAWGLNHILHPLPEGKRWDDLTDAEKEQMQQKNRGDLRHHALDAMVIACTLPWLAHRTVGATDPETGEHGWWQLDERTRRSLALNPVFPTEGQMRRVAEEWMQKVVVRHHVSRSPHQSAYATTIYGKKAPNTYVAREVFTTLTPKNLGSIWPPDFAAYCEAAWARYVEESPDIEAELKRSKGCVPESFTARLCFAHFQQWRELMKRGENVEFTWPETVKIPIRSVRLISVKDDTAVMRFAPGTPGYVKRTGFKEVRIHVSADGNSFVPVFVPYWKGDAIPPETPIKTGTRPVAVIRKGQVVGLKKPLAAGASAGHYRVIVLGQSQVSILPPHVANKDEAKLALGIPRTGIKPYWPEFIRALGYELPHPPSAQSPPPGALPT

SEQ ID NO: 79 - protein, 917 aa, unidentified
  REGION 1..917: note = Description of Unknown: uncultivated organism
  REGION 1..917: note = MG1-82 effector
MTPATTIWAFDLGKGSLGEAVRDLQTDQFLHTTTLLLPADLAQRGPARQAGTPASRYRAWKVRHAHRERERWLATVWRATGLTPLQTREVWQNPSTGRWELKHPADYRLEREFAPTLGEKTRDGAPSDEAGANLCYTSCLLRIKLLRWKPGDPPLEKWQVYKALRSAMQKRGYGRVPWAVKEARARGKTPEELEAEEQKQLEQADPRYREAAGKWPDFKRAVPAEFHFPCYYDALYMGLWSPDQPGHLRLRPDHRAASTRNVRFDRADVRKELIALGNNAAAMLPQLQQAFERWQHDGWKFLHPVTGQEVTYPVRARTFGEFLCDGPAGQPDETSFEAFLNQRREGGIRIGTFEEWMAALGQKTPKFDNRILAPCVLIPRYHACKVDARLEKDRAGRLTGKLVPDSLLASEVTLLLKLKNLLVADADKGQRKLTVEEIRDIFAFAQRRLRTLPLLNPKGEPVKEWPKKVANCFAITPSDWPKLAAETECLKGLARLTVSDNGTSRPLTSEEAEALLHAVAGGRRAAQTALPAHLLPLLKRAADTWRQAKQAAEGNVLRPLPGHEEVNAPRTSGRSAYSRVALRILKELILSGDAPSAFHARLVRREPVLLQRLGPAPDKPLAIFDDSTASNEAQRKQADAENRKRGLLVSELSFLRQMRKDDGSPDSWENLFIPAQTLEALQQRHTENGRLDADAAVRELLGTIKDPVVRHRLGVFDERLRKLRFGDAREGLPGFGVPEAIVLEFVREDFMGEEAKRRLRSFQRQREAERKRAREETAEAGATEKSAPLKYELLTAQGGLCLYCGQALTLKKLEQYAIDHIVPVGAQGSDALFNKVLAHQECNAAKGKQTPFEWLHGTPGWDAYVARVKARAATLRNKKVQLLTREDAPELVERYTALAETAWISKLAQTIVNLRFG

SEQ ID NO: 80 - protein, 1016 aa, unidentified
  REGION 1..1016: note = Description of Unknown: uncultivated organism
  REGION 1..1016: note = MG1-83 effector
DSAGKPQQTILDYHRKTPEEAKELWERKVKDCPFAPTLHQQDKLSTPKHKCSFRSDARIRRFNLLMFLAERRVELETEDAQGQRQNPCVNLDAEVVRQLMEDLEKDIHAVEALVNKQPAPRPDKPGKKNFEKRFNLSLAGVAKGSFNADFFDQLGDLLRPELRSLRQRASLSGEAAEVLYQLATNNGTTFEPVKVRQALEECDYYHWRANPPHGLGIYPQVAFLLGQRGHYDDEGNPTDKDKAGNPVHHGILRRLFAGQLRLDDGTGQGAKLIDLCEHLDGKTVPDYVIIETIGDIPRNQKEKKEFKDEIKANRSRKTDIIEKKYNLKLDSLSDWQVKQVLLFDQQANDDGEAFSPYTGASLGKNPLAHGLEVEHIYPERRGGISIMDNLVITWRTENQTKGDQTPWEWLGQRATAQLQKMHWNRDKRALFVREESEPPQWDNTTRMAQIARYLRVEIIHWLGLDRIKNEMERNKQIAGRIGTPTGFQTSICRESWTPRTVFPQMYRLLHDKKGIPVRDQHGRERWVKDRTNLRHHLWDAAVLSHIPPREGLNSADCGGIFVHRRDQQTGEWRVSALPNLGPDLVAFEKENEGRCLVAHLRQRKSKRSRYKDTIFGLPDREQKHFAREPLDKVVAGLLKSKKKNPDVQLRKLLDRPGFLKPLEIKNKKTGEMKRIQLLREEDLTRWLSCKDISLDPQEFRDFIAKLGVPAECVTDEAVAEQFLNSKTGESRPKWNFKPTQIIAFIRKCGVKEDKLPNSRVEDAIRARKECTVLRASNGRDGQQGQAIRRIPIEQDKLPPCGFGLHFNPTAEAKHGNAIAGFKAVDNSNSIVYLRREIWIGQKWKKKGKDKVASTFYESRLIPHPRHLAAYEKLHGQPWKSEPLPAGMSLAGCLAVGDLLRVPLKKEKKNAGDNLIAKRGEPPVEWKFYRVKSLRTEGPVEFQLAEFTEPKLAKDQIPDAATKRLLDICELSSRKDADLLWLLEATTGQEVQPLPPCDEPPPVSPTKPATKTGDELL

SEQ ID NO: 81 - protein, 1062 aa, unidentified
  REGION 1..1062: note = Description of Unknown: uncultivated organism with predicted taxonomy: Coraliomargarita sp. CAG:312
  REGION 1..1062: note = MG1-84 effector
MNNNNTQIWGFDIGKASLGEAVWCGGEFKHVESLILDKDFAEIKTSAGRRRQARTRKAHKAREEWLEKCLEDCGIEILKRRKVGIVNGQWKLISKGDARLEKEFPAEGEEVCYNSIALRCKLILGEKLESWQIFKALNSSIQHRGYDENIPWKETQNESKKEDGDYFKKIVLYESEKEDILNRLPQECKREDFDFPCFFKAKKMGIWSEENPYKVGLRISNNAQKAKGYVIPRKYVENEFVRLVQMASLQYPKLKDKQMFILYGISETPYASLFKDARKKFGLKRGADSDWTALGQKIPRFDNRMIGKCKLIPRLNTCKIKSPDKIKSEEDLLHYDITLALKLLNLRFFKDSEICALSFEEFKKLFEIGKSNKYKISKTDLKKFLKSIGASVLSQDHSEIEAPRTSGRSSFSRPAMKILKELIFSGEPPSKFLKAKIDKIANTDPNKGIIREDLDFIRIMGDCPWNGIFIPDVETYKYASQTQESSEAQINKLIGSQNDPIVRHRLSFFYERIKALSEKFGVPDKIVLEFVREDFMGKQAKKDLSLSMKKRFEEKIDIAKKLDDIGYKGNKMLLKMELLQKQGFACLYTGEALQETDLPILEIEHIVPRSLGGPDAAYNYVLTSESTNKAKGNQTPYKWLSPDRDKWRAYTERVRARAAELGSKRCRLLLSENAEELINKYTALAETAWISKLAQRIVCMHFGFQFGGNTGEKRVFTVPGNITAKIRSAFGLNKILHNIDADKKNMSEFDIVKLDYELDKKNRKNKKHHALDAMCLCFAPTGPNAQKLGIGALLPPEIAAKAEEFFRGYIEKVVPNEVAPKKPKLEESIYSKRTINRKECIVRKFNLVDLAYKSGLKPVYDISAIEKLLEDKPKKIPPIINPTVRRIVRDFVSTNPNEDEWRNWCKTVRMPSKNRNGTRIIRVLVYVGTPEEYKDLSKDGCGAFRKGDSHKGQIIWMDKNGRYKVSPVYVHSSKSQTMESIKSNPDFIKIAGFFKSHCLVEIESPVVNGKRDVLLSPGTYMINTIMAAGMAILSDTNGVKSPAININYLMNAGMRRISIKYK

SEQ ID NO: 82 - protein, 1080 aa, unidentified
  REGION 1..1080: note = Description of Unknown: uncultivated organism with predicted taxonomy: unclassified Verrucomicrobia (miscellaneous)
  REGION 1..1080: note = MG1-85 effector
YIVDFCSHCKYFNNNKKFNKNMEKEKNNHVWGFDIGKGSLGEAVRIGGDFKHIASVLLDPEFGEIKTAALARRQMRTRKAHKAREKWLEECLEGTGVEILKRREVGIVDGQWQLISKGDERLEREFPPSGEDVCYNSIALRCKLLLGEKLEGWQVFKALNSAIQKRGYDENIPWGEAEEKSSKKDDDDYAQKLSQYEKEKSELFESFADGEKYDFPCFFKAYKMGLWSPENPTRVEVRIDCRAQKAKSYVIARKYVEREFECLVEAAAKFFPKLKGRAKFILYGVSETPYASYYGNMRKKFGLKRGAESDWTALGQKVPRFDNRIIDKCRFIPRMNVCKIRPLNEARNEKDLLYYEVTLALKLLNLRFFRNSNIEQLTFEEFKKAFEIAAGAKYKMTKTAMKKFLKSISATALGDDYAEIEPPKESGRASFSRPAMEILKELIFSGMPPREFYGRKISEISNTDKNKGVVSSDLDFIKLMGDCPWGGIFIPDVQTYQFANAAFPDPDAQINKLIGSQNNPIVRHRLTFFFERIKFLESKYGVPDKVVLEFVRDDFMGEKEKKEMRIAMKKRAEEKMRIAKDLDEHGFKGGNLLLKMELYRKQNGICLYTGDALPLSELATLEIEHIVPRSRGGPDAQYNYVITREKTNKLKGDKTPYEWLSSDAKEWASYTDRVNACAKALGKKRCRLLLEKDAEELVEKYTALAETAHIAKLAQKIVCMHFGFQFGGLSGTKRVFTVPGALTSRIRKFYGLDRILHNSAAESENLSFEEFLKFSEDLEKKNRKNKKHHALDAMCLCFAPTGVDSRRAKLGEILPEKLRSEKAAREFFKSYLDKIMPVDVAPKKPRLEDGIYSKRIIGGKACMVKRNNLVDLAYKSGLKPVFDIPTLIKLVDKKEKGIINPQIRKMIGEFAATNPDESAWRKWCEEVRLPSKSGLGARIMRVLVYYGEADEYKDLSKDGYGAYRKGDGHKGQVIWESVDGKYYVEPVYVHASKAGVMAALNANPKKKRICGMFNSHCTVDVGDVYNDKGDFILPAGRYMVNTIQKNGQCVLTNADGEKRNPININYLMRAGMRRVDLSEL

SEQ ID NO: 83 - protein, 1062 aa, unidentified
  REGION 1..1062: note = Description of Unknown: uncultivated organism with predicted taxonomy: Coraliomargarita sp. CAG:312
  REGION 1..1062: note = MG1-86 effector
MNNNNTQIWGFDIGKASLGEAVWCGGKFKHVESLILDKDFAEIKTSAGRRRQARTRKAHKAREEWLEKCLEDCGIEILKRRKVGIVNGQWKLISKGDARLEKEFPAEGEEVCYNSIALRCKLILGENLESWQIFKALNSSIQHRGYDENIPWKETQNESKKEDGDYFKKIVLYESEKEDILNRLPQECKREDFDFPCFFKAKKMGIWSEENPYKVGLRISNNAQKAKGYVIPRKYVESEFVRLVQMASLQYPKLKDKQMFILYGISETPYASLFKDARKKFGLKRGADSDWTALGQKIPRFDNRMIGKCKLIPRLNTCKIKSPDKIKSEEDLLHYDITLALKLLNLQFFKDSEICALSFEEFKKLFEIGKSNKYKISKTDLKKFLKSIGASVLSQDHSEIEAPRTSGRSSFSRPAMKILKELIFSGEPPSKFLKAKIDKIANTDPNKGIIREDLDFIRIMGDCPWNGIFIPDMETYKYASQTQESSEAQINKLIGSQNDPIVRHRLSFFYERIKALSEKFGVPDKIVLEFVREDFMGKQAKKDLSLSMKKRFEEKIDIAKKLDDIGYKGNKMLLKMELLQKQGFACLYTGEALQETDLPVLEIEHIVPRSLGGPDAAYNYVLTSESTNKAKGNQTPYKWLSPDRDKWRAYTERVRARAAELGSKRCRLLLSENAEELINKYTALAETAWISKLAQRIVCMHFGFQFGGNTGEKRVFTVPGNITAKIRSAFGLNKILHNIDADKKNMSEFDIVKLDYELDKKNRKNKKHHALDAMCLCFAPTGPNAQKLGIGALLPPEIAAKAEEFFRGYIEKVVPNEVAPKKPKLEESIYSKRTINRKECIVRKFNLVDLAYKSGLKPVYDISAIEKLLEDKPKKIPPIINPTVRRIVRDFVSTNPNEDEWRNWCKTVRMPSKNRNGTRIIRVLVYVGTPEEYKDLSKDGCGAFRKGDSHKGQIIWMDKNGRYKVSPVYVHSSKSQTMESIKSNPDFIKIAGFFKSHCLVEIESPVVNGKRDVLLSPGTYMINTIMAAGMAILSDTNGVKSPAININYLMNAGMRRISIKYK

SEQ ID NO: 84 - protein, 1073 aa, unidentified
  REGION 1..1073: note = Description of Unknown: uncultivated organism with predicted taxonomy: Verrucomicrobia
  REGION 1..1073: note = MG1-87 effector
MYTKEIIWGFDIGKGSLGEAVRVGNEFKHVQSLEIAPDFAETKTTAAARRAWRTREAHKAREFWLEKCLSEAGIEVLLRRKVGVVDGAWKLVSKGDVRLEREFPPAGEDLCYNSIALRCKLLLGEKLESWQVFKALNSAIQNRGYDANIPWGDEDAADGGDGSSRKSSDSDASGDGESYAEKLAHYEREFDGILAELDNREKYEFPCFFKAAKMGLWSPENPDFVGVRIDNTAEKAKGYVVPREAVVREFRALVNAAALQYPNLKGKADFIMFGRACEPYASYNPELRKRFGLKRGAATDWTALGQKTPRFDNRVIDKCKLIPRLNVCKIKPLDECKTDDDFLSYTITLSLKLLNLRFFRGAGVDSLSFDEFLRAFELVKNSKFKLGKAALKKFFKTIGAEVMDESQSEIEQPRNGGRAAFSRPAMRILRDLIFSGKSPAEFYATAIENIANTDKNKGLVAGDLDFLKLMGDAPWSGIFIPDVGLSDFADASEAAREAQINKLIGSQNDPIVRHRLSFFYERIKSLEAKFGVPDKIVLEFVRDDFLGKKAKSDLNKAIKTRFDEKKKLAEDLDSKREEFGFKYASKKMLLKFELYKKQGGECVYTGNALPLSELESLEIEHIVPRSRGGPDAMYNYVLTDEKTNKEKGDRTPFEWRSTMGAEWESYCERVRKLTKELGAKRCKLLLSPNAAELVEKYTALAETAWISKLAQRICCLHFGFQFGGLAGAKKVWTVSGNTTAMIRGRYGLNRLLHDEESAEDLSLFDRICMEKKFEEKNRKNKKHHALDAMCLCFAPTSNAKKASAYKNILPEEITRNPESDEARKFFGKYLASVIPNKVAVKKSALEQTIYALRKGRIVKKCNVRDLAYTGINPKYNYSTLVKSIKSIVGEVPKRIVSDFVLSNSDLSESEWEDWCKNNAAIPSKNGAPTKLLRVLCDAGNPEEYKDLSKDGCGAYRKGDSHKGQFIWKTKQGRYVVAPVYAHASKAKVLASLKNNPDCAEVCGFFRQNCLVEIPNDVVDKSGKMLLKSGIYKSNSIRADGYGYLENSDGISSKPISIQYLMPAGMKRIKLDII

SEQ ID NO: 85 - protein, 1059 aa, unidentified
  REGION 1..1059: note = Description of Unknown: uncultivated organism with predicted taxonomy: unclassified Verrucomicrobia (miscellaneous)
  REGION 1..1059: note = MG1-88 effector
MEKEKNNHVWGFDIGKGSLGEAVRIGGDFKHIASVLLDPEFGEIKTAALARRQMRTRKAHKAREKWLEECLEGTGVEILKRREVGIVDGQWQLISKGDERLEREFPPSGEDVCYNSIALRCKLLLGEKLEGWQVFKALNSAIQKRGYDENIPWGEAEEKSSKKDDDDYAQKLSQYEKEKSELFESFADGEKYDFPCFFKAYKMGLWSPENPTRVEVRIDCRAQKAKSYVIARKYVEREFECLVEAAAKFFPKLKGRAKFILYGVSKTPYASYYGNMRKKFGLKRGAESDWTALGQKVPRFDNRIIDKCRFIPRMNVCKIRPLNEARNEKDLLYYEVTLALKLLNLRFFRNSNIEQLTFEEFKKAFEIAAGAKYKMTKTAMKKFLKSISATALGDDYAEIEPPKESGRASFSRPAMEILKELIFSGMPPREFYGRKISEISNTDKNKGVVSSDLDFIKLMGDCPWGGIFIPDVQTYQFANAAFPDPDAQINKLIGSQNNPIVRHRLTFFFERIKFLESKYGVPDKVVLEFVRDDFMGEKEKKEMRIAMKKRAEEKMRIAKDLDEHGFKGGNLLLKMELYRKQNGICLYTGDALPLSELATLEIEHIVPRSRGGPDAQYNYVITREKTNKLKGDKTPYEWLSSDAKEWASYTDRVNACAKALGKKRCRLLLEKDAEELVEKYTALAETAHIAKLAQKIVCMHFGFQFGGLSGTKRVFTVPGALTSRIRKFYGLDRILHNSASESENLSFEEFLKFSEDLEKKNRKNKKHHALDAMCLCFAPTGVDSRRAKLGEILPEKLRSEKAAREFFKSYLDKIMPVDVAPKKPRLEDGIYSKRIIGGKACMVKRNNLVDLAYKSGLKPVFDIPTLIKLVDKKEKGIINPQIRKMIGEFAATNPDESAWRKWCEEVRLPSKSGLGARIMRVLVYYGEADEYKDLSKDGCGAYRKGDGHKGQVIWESVDGKYYVEPVYVHASKAGVMAALNANPKKKRICGMFNSHCTVDVGDVYNDKGDFILPAGRYMVNTIRSDNQCVLTNADGEKRNPININYLMRAGMRRVDLSEL

SEQ ID NO: 86 - protein, 1059 aa, unidentified
  REGION 1..1059: note = Description of Unknown: uncultivated organism with predicted taxonomy: unclassified Verrucomicrobia (miscellaneous)
  REGION 1..1059: note = MG1-89 effector
MEKEKNNHVWGFDIGKGSLGEAVRIGGDFKHIASVLLDPEFGEIKTAALARRQMRTRKAHKAREKWLEECLEGTGVEILKRREVGIVDGQWQLISKGDERLEREFPPSGEDVCCNSIALRCKLLLGEKLEGWQVFKALNSAIQKRGYDENIPWGEAEEKSSKKDDDDYAQKLSQYEKEKSELFESFADGEKYDFPCFFKAYKMGLWSPENPTRVEVRIDCRAQKAKSYVIARKYVEREFECLVEAAAKFFPKLKGRAKFILYGVSETPYASYYGNMRKKFGLKRGAESDWTALGQKVPRFDNRIIDKCRLIPRMNVCKIRPLNEARNEKDLLYYEVTLALKLLNLRFFRNSNIEQLTFEEFKKAFEIAAGAKYKMTKTAMKKFLKSISATALGDDYAEIEPPKESGRASFSRPAMEILKELIFSGMPPREFYGRKISEISNTDKNKGVVSSDLDFIKLMGDCPWGGIFIPDVQTYQFANAAFPDPDAQINKLIGSQNNPIVRHRLTFFFERIKFLESKYGVPDKVVLEFVRDDFMGEKEKKEMRIAMKKRAEEKMRIAKDLDEHGFKGGNLLLKMELYRKQNGICLYTGDALPLSELATLEIEHIVPRSRGGPDAQYNYVITREKTNKLKGDKTPYEWLSSDAKEWASYTDRVNACAKALGKKRCRLLLEKDAEELVEKYTALAETAHIAKLAQKIVCMHFGFQFGGLSGTKRVFTVPGALTSRIRKFYGLDRILHNSAAESENLSFEEFLKFSEDLEKKNRKNKKHHALDAMCLCFAPTGVDSRRAKLGEILPEKLRSEKAAREFFKSYLDKIMPVDVAPKKPRLEDGIYSKRIIGGKACMVKRNNLVDLAYKSGLKPVFDIPTLIKLVDKKEKGIINPQIRKMIGEFAATNPDESAWRKWCEEVRLPSKSGLGARVMRVLVYYGEADEYKDLSKDGCGAYRKGDGHKGQVIWESVDGKYYVEPVYVHASKAGVMAALNANPKKKRICGMFNSHCTVDVGDVYNDKGDFILPAGRYMVNTIRSDNQCVLTNADGEKRNPININYLMRAGMRRVDLSEL

SEQ ID NO: 87 - protein, 1059 aa, unidentified
  REGION 1..1059: note = Description of Unknown: uncultivated organism with predicted taxonomy: unclassified Verrucomicrobia (miscellaneous)
  REGION 1..1059: note = MG1-90 effector
MEKEKNNHVWGFDIGKGSLGEAVRIGGDFKHIASVLLDPEFGEIKTAALARRQMRTRKAHKAREKWLEECLEGTGVEILKRREVGIVDGQWQLISKGDERLEREFPPSGEDVCYNSIALRCKLLLGEKLEGWQVFKALNSAIQKRGYDENIPWGEAEEKSSKKDDDDYAQKLSQYEKEKSELFESFADGEKYDFPCFFKAYKMGLWSPENPTRVEVRIDCRAQKAKSYVIARKYVEREFECLVEAAAKFFPKLKGRAKFILYGVSETPYASYYGNMRKKFGLKRGAESDWTALGQKVPRFDNRIIDKCRFIPRMNVCKIRPLNEARNEKDLLYYEVTLALKLLNLRFFRNSNIEQLTFEEFKKAFEIAAGAKYKMTKTAMKKFLKSISATALGDDYAEIEPPKESGRASFSRPAMEILKELIFSGMPPREFYGRKISEISNTDKNKGVVSSDLDFIKLMGDCPWGGIFIPDVQTYQFANAAFPDPDAQINKLIGSQNNPIVRHRLTFFFERIKFLESKYGVPDKVVLEFVRDDFMGEKEKKEMRIAMKKRAEEKMRIAKDLDEHGFKGGNLLLKMELYRKQNGICLYTGDALPLSELATLEIEHIVPRSRGGPDAQYNYVITREKTNKLKGDKTPYEWLSSDAKEWASYTDRVNACAKALGKKRCRLLLEKDAEELVEKYTALAETAHIAKLAQKIVCMHFGFQFGGLSGTKRVFTVPGALTSRIRKFYGLDRILHNSAAESENLSFEEFLKFSEDLEKKNRKNKKHHALDAMCLCFAPTGVDSRRAKLGEILPEKLRSEKAAREFFKSYLDKIMPVDVAPKKPRLEDGIYSKRIIGGKACMVKRNNLVDLAYKSGLKPVFDIPTLIKLVDKKEKGIINPQIRKMIGEFAATNPDESAWRKWCEEVRLPSKSGLGARVMRVLVYYGEADEYKDLSKDGCGAYRKGDGHKGQVIWESVDGKYYVEPVYVHASKAGVMAALNANPKKKRICGIFNSHCTVDVGDVYNDKGDFILPAGRYMVNTIRSDNQCVLTNADGEKRNPININYLMRAGMRRVDLSEL

SEQ ID NO: 88 - protein, 874 aa, unidentified
  REGION 1..874: note = Description of Unknown: uncultivated organism
  REGION 1..874: note = MG1-91 effector
MVKRVARLRQTFWRDTENPDVVKIRIDNTAEKAKGYVVPRSAVIAEFRALVDAAAKQYPALKGKADFIMFGVSEEPYASYNPELRKKFGLKRGAESDWTALGQKTPRFDNRVIDKCKLIPRLNVCKIKPLPECRTDDDFLPYETTLALKLLNLRFFRGAGVDSLSFDEFLRAFEIAKNNKFELNKTNLKKFFKSIGAEVIDESQSKIEQPRSSGRASFSRPAMRILRNLVFSGKSPAEFYETELVKITNTDKNRGIVAEDIKFLKLMGNVPWGGIFVPDVGVFDFADSTECSRAVQINKLIGMQNDPIVRHRLSFFYGRIKSLDAEFGTPDKIVLEFVRDDFLGKKAKADLSKAINDRAKEKKKYAEELDSQRENFGPKYASKKMLLKYELYSKQKGECIYTGRALGFSDLEQLEVEHIVPRSRGGPDALYNYVLTDEKTNKDKGDRTPFEWLSSKGVEWDAYRDRVRGLTKELGAKRCKLLLSPNAEELVEKYTALAETAWISKLAQRICCIHFGFQFGGLTGEKKVWTVSGNTTAMIRSRYGLNRLLHNEDVPKDISLSERLKLESEFERKNRDNKKHHALDAMCLCYAPTSNTRRAASYKNILPAEITRNPESDEARRFFGGYLANVIPNKVAIEKPTLEQTIYAKRLINGKETIVKKCNVRDLAYAGRNPQYSYLTLVKNIKCIVGKVSKNIISDFVLSNPDLNESEWENWCKYDAVIPSKNGAPTKLLRVLCGARNPEEYKDLSKDGCGAYRKGNLHKGQFVWKTKQGCYVVTPVYAFESKIKVWDDMRRDPNCEEICGFFRQNCLVEIPNDVYDSKGVLKLKAGVYRSNTIRADGFVKLTNSDGFSPNPISIQYLMSAGMKRITLNTI

SEQ ID NO: 89 - protein, 1077 aa, unidentified
  REGION 1..1077: note = Description of Unknown: uncultivated organism with predicted taxonomy: unclassified Verrucomicrobia (miscellaneous)
  REGION 1..1077: note = MG1-92 effector
MSLYFIEQISDWKIMKVMEDEGGNHIWGFDIGKGSLGEAVLDGSEFKHVASLLLDADFGEIETAAGLRRQMRTRKAHKAREKWLESCLSGFGIETLKRREVGIVNGQWTLISKGDERLEREFPPDGENICYNSIALRCKLLLGEKLEGWQIFKALNSAIQNRGYDENIPWKESDASPSKKEGGDYAQKLSQYSREKSELFESFEGGEKYDYPCFFKAYKMGLWSPDNPERVEVRIGSDAQKAKDYVIPRKDVEREFERLVEAASKWYPAMKGKAMYIMYGIAETPYASYKPLLRKKFDLKRGAESDWTALGQKIPRFDNRIIDKCRLIPRLNVCKIRPLSEIRGEADLLHYEITLSLKLLNLRFFRNSNVESLSFGEFKAAFEIAKGAKYKMGKAALKKFLKSISASVLSEDQSEIEAPRESGRAAFSRPAMLLLKELIFSGMTPAEFYAKKSGEISNADPNKGLVASDLDFIKLMGNCGWSGIFIPDVDTFHFANKGAEPAKLINELIGSQNNPIVRHRLSFFYERIKFLESKFGIPDKVVLEFVREDFMGKEQKKRMQIEMKKRASEKMLIAKKLDEAGYKGGNLLLKMELLEKQGGVCLYTGEPLLPSELGVLEIEHIVPRSRGGPDAQYNYVLTREKTNKEKADRTPFEWLSSDPVKWAGYSDRVKARAGQLGRKRCELLLEKNAEELVEKYTALAETAHISKLAQKIVCLHFGFQFGGLSGTKRVFTVPGSLTARIRTFYGLNKILHNEDLAHETLSYEGFLKRGEELDKKNRANKKHHALDAMCLCFAPTGVNSKRARVDMLLPPKIRSEKDAELFFRKYLDKLIPVDVAPKKPKLEDGIYSMRMVGGKKIMARRVNLVDLAYKGGQGQKPVYDISVLMDKKNPKEKKIINPQIRKLVADFARTNPSEDEWKKWCGECRLPSKNGLGTRVIRVLLNYGEPAEYKDLSKDGCGAFRKGKEHKGQIVWESTDGKYYVLPIYVHASKAKLLAELCANPKKKRICGIFTSHCMVKVGNTYNNKGELLLPEGVYMLNTIQTDGRGKLTNANGEKSNLININYLMKAGMKKVSIKEL

SEQ ID NO: 90 - protein, 1059 aa, unidentified
  REGION 1..1059: note = Description of Unknown: uncultivated organism with predicted taxonomy: unclassified Verrucomicrobia (miscellaneous)
  REGION 1..1059: note = MG1-93 effector
MEKEKNNHVWGFDIGKGSLGEAVRIGGDFKHIASVLLDPEFGEIKTAALARRQMRTRKAHKAREKWLEECLEGTGVEILKRREVGIVDGQWQLISKGDERLEREFPPSGEDVCYNSIALRCKLLLGEKLEGWQVFKALNSAIQKRGYDENIPWGEAEEKSSKKDDDDYAQKLSQYEKEKSELFESFADGEKYDFPCFFKAYKMGLWSPENPTRVEVRIDCRAQKAKSYVIARKYVEREFECLVEAAAKFFPKLKGRAKFILYGVSETPYASYYGNMRKKFGLKRGAESDWTALGQKVPRFDNRIIDKCRLIPRMNVCKIRPLNEARNEKDLLYYEVTLALKLLNLRFFRNSNIEQLTFEEFKKAFEIAAGAKYKMTKTAMKKFLKSISATALGDDYAEIEPPKESGRASFSRPAMEILKELIFSGMPPREFYGREISEISNTDKNKGVVSSDLDFIKLMGDCPWGGIFIPDVQTYQFANAAFPDPDAQINKLIGSQNNPIVRHRLTFFFERIKFLESKYGVPDKVVLEFVRDDFMGEKEKKEMRIAMKKRAEEKMRIAKDLDEHGFKGGNLLLKMELYRKQNGICLYTGDALPLSELATLEIEHIVPRSRGGPDAQYNYVITREKTNKLKGDKTPYEWLSSDAKEWASYTDRVNACAKALGKKRCRLLLEKDAEELVEKYTALAETAHIAKLAQKIVCMHFGFQFGGLSGTKRVFTVPGALTSRIRKFYGLDRILHNSAAESENLSFEEFLKFSEDLEKKNRKNKKHHALDAMCLCFAPTGVDSRRAKLGEILPEKLRSEKAAREFFKSYLDKIMPVDVAPKKPRLEDGIYSKRIIGGKACMVKRNNLVDLAYKSGLKPVFDIPTLIKLVDKKEKGIINPQIRKMIGEFAATNPDESAWRKWCEEVRLPSKSGLGARIMRVLVYYGEADEYKDLSKDGCGAYRKGDGHKGQVIWESVDGKYYVEPVYVHASKAGVMAALNANPKKKRICGMFNSHCTVDVGDVYNDKGDFILPAGRYMVNTIQKNGQCVLTNADGEKRNPININYLMRAGMRRVELSEL

SEQ ID NO: 91 - protein, 762 aa, unidentified
  REGION 1..762: note = Description of Unknown: uncultivated organism with predicted taxonomy: unclassified Verrucomicrobia (miscellaneous)
  REGION 1..762: note = MG1-94 effector
NRIIGKCKLIPRLNVCKIKPLKECKTEDDFLPHTITLALKLLNLRFFRGAGIDSLSFDEFLRAFEIARQNKFALNKTNLKKFFKTIGAEIMDENQSSVEQPREGGRASYSRPAMRLLRDLIFSGKSPAEFYASRICKIENTDKNRGLVAEDLAFIKLMGDIPWNGIFVPDVDTFNFANIRESERADKINKLIGSQNDPIVRHRLAFFYERIKLLESKFGAPDKIVLEFVRDDFLGSKAKKEMSQGIKKRFEEKKKLAEELDSQRAEFGNKYASKKMLLKFELYKKQRGRCVYTDNALPLSELENLEVEHIFPRSRGGADAMYNYVLTDENTNKQKGDRTPFEWLSSDKTKWESYCDRVRSLTQSLGAKRCKLLVSPNAEELMQKYTALAETAWISKLAQKICCIHFGFQFGGLKGEKKVWTVSGNTTAMIRGRYGLNRLLHNEEISEDLPLLDRIVKEKNFEEKNRDNKKHHALDAMCICFAPTSNAKKALSRKNILPEEIAKNPESDDARNFFAKYLEEVVPTKVAIKKPELEQTIYSKRVIGGRQTIVKKCNVRDLAYKGQNPKYDFDTLTKRIKDIINPVSKRVIEDFAKTEPTEAEWEDWCKYEAAIPSKNGSPTRLLRVLVEIGNPEEYKDLSKDGCGAYRKGDSHKGQFIWKNKKGRYIVAPIYAHASKAKVLDDLQNNPDCAEICGFFRTNCLVKIPNDVADKDGKFLLKAGFYKSNTIMASGSVKLTDPNGIIKIVGIQHLMNAGMKRVETNTI

SEQ ID NO: 92 - protein, 1062 aa, unidentified
  REGION 1..1062: note = Description of Unknown: uncultivated organism with predicted taxonomy: Coraliomargarita sp. CAG:312
  REGION 1..1062: note = MG1-95 effector
MNNNNTQIWGFDIGKASLGEAVWCGGKFKHVESLILDKDFAEIKTSAGRRRQARTRKAHKAREEWLEKCLEDCGIEILKRRKVGIVNGQWKLISKGDARLEKEFPAEGEEVCYNSIALRCKLILGEKLESWQIFKALNSSIQHRGYDENIPWKETQNESKKEDGDYFKKIVLYESEKEDILNRLPQECKREDFDFPCFFKAKKMGIWSEENPYKVGLRISNNAQKAKGYVIPRKYVESEFVRLVQMASLQYPKLKDKQMFILYGISETPYASLFKDARKKFGLKRGADSDWTALGQKIPRFDNRMIGKCKLIPRLNTCKIKSPDKIKSEEDLLHYDITLALKLLNLRFFKDSEICALSFEEFKKLFEIGKSNKYKISKTDLKKFLKSIGASVLSQDHSEIEAPRTSGRSSFSRPAMKILKELIFSGEPPSKFLKAKIDKIANTDPNKGIIREDLDFIRIMGDCPWNGIFIPDVETYKYASQTQESSEAQINKLIGSQNDPIVRHRLSFFYERIKALSEKFGVPDKIVLEFVREDFMGKQAKKDLSLSMKKRFEEKIDIAKKLDDIGYKGNKMLLKMELLQKQGFACLYTGEALQETDLPILEIEHIVPRSLGGPDAAYNYVLTSESTNKAKGNQTPYKWLSPDRDKWRAYTERVRARATELGSKRCRLLLSENAEELINKYTALAETAWISKLAQRIVCMHFGFQFGGNTGEKRVFTVPGNITAKIRSAFGLNKILHNIDADKKNMSEFDIVKLDYELDKKNRKNKKHHALDAMCLCFAPTGPNAQKLGIGALLPPEIAAKAEEFFRGYIEKVVPNEVAPKKPKLEESIYSKRTINGKECIVRKFNLVDLAYKSGLKPVYDISAIEKLLEDKPKKIPPIINPTVRRIVRDFVSTNPNEDEWRNWCKTVRMPSKNRNGTRIIRVLVYVGTPEEYKDLSKDGCGAFRKGDSHKGQIIWMDKNGRYKVSPVYVHSSKSQTMESIKSNPDFIKIAGFFKSHCLVEIESPVVNGKGDVLLSPGTYMINTIMAAGMAILSDTNGVKSPAININYLMNAGMRRVSIKYK

SEQ ID NO: 93 - protein, 1059 aa, unidentified
  REGION 1..1059: note = Description of Unknown: uncultivated organism with predicted taxonomy: unclassified Verrucomicrobia (miscellaneous)
  REGION 1..1059: note = MG1-96 effector
MEKEKNNHVWGFDIGKGSLGEAVRIGGDFKHIASVLLDPEFGEIKTAALARRQMRTRKAHKAREKWLEECLEGTGVEILKRREVGIVDGQWQLISKGDERLEREFPPSGEDVCYNSIALRCKLLLGEKLEGWQVFKALNSAIQKRGYDENIPWGEAEEKSSKKDDDDYAQKLSQYEKEKSELFESFADGEKYDFPCFFKAYKMGLWSPENPTRVEVRIDCRAQKAKSYVIARKYVEREFECLVEAAAKFFPKLKGRAKFILYGVSETPYASYYGNMRKKFGLKRGAESDWTALGQKVPRFDNRIIDKCRLIPRMNVCKIRPLNEARNEKDLLYYEVTLALKLLNLRFFRNSNIEQLTFEEFKKAFEIAAGAKYKMTKTAMKKFLKSISATALGDDYAEIEPPKESGRASFSRPAMEILKELIFSGMPPREFYGRKISEISNTDKNKGVVSSDLDFIKLMGDCPWGGIFIPDVQTYQFANVAFPDPDAQINKLIGSQNNPIVRHRLTFFFERIKFLESKYGVPDKVVLEFVRDDFMGEKEKKEMRIAMKKRAEEKMRIAKDLDEHGFKGGNLLLKMELYRKQNGICLYTGDALPLSELATLEIEHIVPRSRGGPDAQYNYVITREKTNKLKGDKTPYEWLSSDAKEWASYTDRVNACAKALGKKRCRLLLEKDAEELVEKYTALAETAHIAKLAQKIVCMHFGFQFGGLSGTKRVFTVPGALTSRIRKFYGLDRILHNSASESENLSFEEFLKFSEDLEKKNRKNKKHHALDAMCLCFAPTGVDSRRAKLGEILPEKLRSEKAAREFFKSYLDKIMPVDVAPKKPRLEDGIYSKRIIGGKACMVKRNNLVDLAYKSGLKPVFDIPTLIKLVDKKEKGIINPQIRKMIGEFAATNPDESAWRKWCEEVRLPSKSGLGARVMRVLVYYGEADEYKDLSKDGCGAYRKGDGHKGQVIWESVDGKYYVEPVYVHASKAGVMAALNANPKKKRICGMFNSHCTVDVGDVYNDKGDFILPAGRYMVNTIQKNGQCVLTNADGEKRNPININYLMRAGMRRVELSEL

SEQ ID NO: 94 - protein, 1059 aa, unidentified
  REGION 1..1059: note = Description of Unknown: uncultivated organism with predicted taxonomy: unclassified Verrucomicrobia (miscellaneous)
  REGION 1..1059: note = MG1-97 effector
MEKEKNNHVWGFDIGKGSLGEAVRIGGDFKHIASVLLDPEFGEIKTAALARRQMRTRKAHKAREKWLEECLEGTGVEILKRREVGIVDGQWQLISKGDERLEREFPPSGEDVCYNSIALRCKLLLGEKLEGWQVFKALNSAIQKRGYDENIPWGEAEEKSSKKDDDDYAQKLSQYEKEKSELFESFADGEKYDFPCFFKAYKMGLWSPENPTRVEVRIDCRAQKAKSYVIARKYVEREFECLVEAAAKFFPKLKGRAKFILYGVSETPYASYYGNMRKKFGLKRGAESDWTALGQKVPRFDNRIIDKCRLIPRMNVCKIRPLNEARNEKDLLYYEVTLALKLLNLRFFRNSNIEQLTFEEFKKAFEIAAGAKYKMTKTAMKKFLKSISATALGDDYAEIEPPKESGRASFSRPAMEILKELIFSGMPPREFYGRKISEISNTDKNKGIVSSDLDFIKLMGDCPWGGIFIPDVQTYQFANAAFPDPDAQINKLIGSQNNPIVRHRLTFFFERIKFLESKYGVPDKVVLEFVRDDFMGEKEKKEMRIAMKKRAEEKMRIAKDLDEHGFKGGNLLLKMELYRKQNGICLYTGDALPLSELATLEIEHIVPRSRGGPDAQYNYVITREKTNKLKGDKTPYEWLSSDAKEWASYTDRVNACAKALGKKRCRLLLEKDAEELVEKYTALAETAHIAKLAQKIVCMHFGFQFGGLSGTKRVFTVPGALTSRIRKFYGLDRILHNSAAESENLSFEEFLKFSEDLEKKNRKNKKHHALDAMCLCFAPTGVDSRRAKLGEILPEKLRSEKAAREFFKSYLDKIMPVDVAPKKPRLEDGIYSKRIIGGKACMVKRNNLVDLAYKSGLKPVFDIPTLIKLVDKKEKGIINPQIRKMIGEFAATNPDESAWRKWCEEVRLPSKSGLGARVMRVLVYYGEADEYKDLSKDGCGAYRKGDGHKGQVIWESVDGKYYVEPVYVHASKAGVMAALNANPKKKRICGMFNSHCTVDVGDVYNDKGDFILPAGRYMVNTIRSDNQCVLTNADGEKRNPININYLMRAGMRRVDLSEL

SEQ ID NO: 95 - protein, 1059 aa, unidentified; identical to SEQ ID NO: 86
  REGION 1..1059: note = Description of Unknown: uncultivated organism with predicted taxonomy: unclassified Verrucomicrobia (miscellaneous)
  REGION 1..1059: note = MG1-98 effector

SEQ ID NO: 96 - protein, 1059 aa, unidentified
  REGION 1..1059: note = Description of Unknown: uncultivated organism with predicted taxonomy: unclassified Verrucomicrobia (miscellaneous)
  REGION 1..1059: note = MG1-99 effector
MEKEKNNHVWGFDIGKGSLGEAVRIGGDFKHIASVLLDPEFGEIKTAALARRQMRTRKAHKAREKWLEECLEGTGVEILKRREVGIVDGQWQLISKGDERLEREFPPSGEDVCYNSIALRCKLLLGEKLEGWQVFKALNSAIQKRGYDENIPWGEAEEKSSKKDDDDYAQKLSQYEKEKSELFESFADGEKYDFPCFFKAYKMGLWSPENPTRVEVRIDCRAQKAKSYVIARKYVEREFECLVEAAAKFFPELKGRAKFILYGVSETPYASYYGNMRKKFGLKRGAESDWTALGQKVPRFDNRIIDKCRFIPRMNVCKIRPLNEARNEKDLLYYEVTLALKLLNLRFFRNSNIEQLTFEEFKKAFEIAAGAKYKMTKTAMKKFLKSISATALGDDYAEIEPPKESGRASFSRPAMEILKELIFSGMPPREFYGRKISEISNTDKNKGVVSSDLDFIKLMGDCPWGGIFIPDVQTYQFANAAFPDPDAQINKLIGSQNNPIVRHRLTFFFERIKFLESKYGVPDKVVLEFVRDDFMGEKEKKEMRIAMKKRAEEKMRIAKDLDEHGFKGGNLLLKMELYRKQNGICLYTGDALPLSELATLEIEHIVPRSRGGPDAQYNYVITREKTNKLKGDKTPYEWLSSDAKEWASYTDRVNACAKALGKKRCRLLLEKDAEELVEKYTALAETAHIAKLAQKIVCMHFGFQFGGLSGTKRVFTVPGALTSRIRKFYGLDRILHNSAAESENLSFEEFLKFSEDLEKKNRKNKKHHALDAMCLCFAPTGVDSRRAKLGEILPEKLRSEKAAREFFKSYLDKIMPVDVAPKKPRLEDGIYSKRIIGGKACMVKRNNLVDLAYKSGLKPVFDIPTLIKLVDKKEKGIINPQIRKMIGEFAATNPDESAWRKWCEEVRLPSKSGLGARVMRVLVYYGEADEYKDLSKDGCGAYRKGDGHKGQVIWESVDGKYYVEPVYVHASKAGVMAALNANPKKKRICGMFNSHCTVDVGDVYNDKGDFILPAGRYMVNTIRSDNQCVLTNADGEKRNPININYLMRAGMRRVDLSEL

SEQ ID NO: 97 - protein, 1062 aa, unidentified
  REGION 1..1062: note = Description of Unknown: uncultivated organism with predicted taxonomy: Coraliomargarita sp. CAG:312
  REGION 1..1062: note = MG1-100 effector
MNNNNTQIWGFDIGKASLGEAVWCGGKFKHVESLILDKDFAEIKTSAGRRRQARTRKAHKAREEWLEKCLEDCGIEILKRRKVGIVNGQWKLISKGDARLEKEFPAEGEEVCYNSIALRCKLILGENLESWQIFKALNSSIQHRGYDENIPWKETQNESKKEDGDYFKKIVLYESEKEDILNRLPQECKREDFDFPCFFKAKKMGIWSEENPYKVGLRISNNAQKAKGYVIPRKYVESEFVRLVQMASLQYPKLKDKQMFILYGISETPYASLFKDARKKFGLKRGADSDWTALGQKIPRFDNRMIGKCKLIPRLNTCKIKSPDKIKSEEDLLHYDITLALKLLNLRFFKDSEICALSFEEFKKLFEIGKSNKYKISKTDLKKFLKSIGASVLSQDHSEIEAPRTSGRSSFSRPAMKILKELIFSGEPPSKFLKAKIDKIANTDPNKGIIREDLDFIRIMGDCPWNGIFIPDVETYKYASQTQESSEAQINKLIGSQNDPIVRHRLSFFYERIKALSEKFGVPDKIVLEFVREDFMGKQAKKDLSLSMKKRFEEKIDIAKKLDDIGYKGNKMLLKMELLQKQGFACLYTGEALQETDLPILEIEHIVPRSLGGPDAAYNYVLTSESTNKAKGNQTPYKWLSPDRDKWRAYTERVRARAAELGSKRCRLLLSENAEELINKYTALAETAWISKLAQRIVCMHFGFQFGGNTGEKRVFTVPGNITAKIRSAFGLNKILHNIDADKKNMSEFDIVKLDYELDKKNRKNKKHHALDAMCLCFAPTGPNAQKLGIGALLPPEIAAKAEEFFRGYIEKVVPNEVAPKKPKLEESIYSKRTINGKECIVRKFNLVDLAYKSGLKPVYDISAIEKLLEDKPKKIPPIINSTVRRIVRDFVSTNPNEDEWRNWCKTVRMPSKNRNGTRIIRVLVYVGTPEEYKDLSKDGCGAFRKGDSHKGQIIWMDKNGRYKVSPVYVHSSKSQTMESIKSNPDFIKIAGFFKSHCLVEIESPVVNGKRDVLLSPGTYMINTIMAAGMAILSDTNGVKSPAININYLMNAGMRRVSIKYK

SEQ ID NO: 98 - protein, 1055 aa, unidentified
  REGION 1..1055: note = Description of Unknown: uncultivated organism with predicted taxonomy: unclassified Verrucomicrobia (miscellaneous)
  REGION 1..1055: note = MG1-101 effector
MENRVNIWGFDIGKGSLGEAVRIGSEIKHVQSLILYKDFGEIKTAAGIRRQYRTRKAHRAREKFLEKVLGECGIEVLRRREVGIVDGCWKLIAKGDIRLEKEFPSPGEDVCYNSIALRCKLLLGEPLESWQVFKALNSAIQNRGYDPDIPWTETDADKKEDSDWAKRLSAYEDEKKVVFSGLADPQRYDYPCFFKAYKMGLWSPEDPEIVKLRIDNHAEKAKNYVIPRKCVEAEFEKLVENASLQYPKLKGKALYIMFGPAQKEYASLNPELRRQFNLKRGADTDWTALGQKIPRFDNRIVDKCKLMPRFNVCKIRSLDEIKNPADFLPYEITTLMKLLNLRFLRNGTIESLACDELKEAFELARDNKYKLSKTALKKFLKKIGAEVLDEDQSKIEAPRSGGRASFSRPAMAVLKELILSGESPAKFYARKVSQIENTDKLKGLVASDFDFIKQMGDIAWGKIFMPDMRLLEFANRQNIDAEARINKLIGSQNDPIVRHRLGFFYDRIKFLESKFGVPDKIVIEFVRDDFLGEKAKKEYQKAINERFKEKQELAKEMDEAGYKGAKMLLKLELYKKQGGQCVYTGEALPSSEIASLEIEHIVPRSRGGPDSIYNYVLTRESTNKEKADMTPYEWLSRNADRWNAYVSRVNSLYKSLGGKRCKLLLANNAEELVDKYTALAETAWISKLAQQVVCLHFGFQFGGMEGQRRVFCIPGGVTARIRGMFGLNELLHVKDYDTDSMSETEIVELHKRLEKKNRENKKHHALDAMCLCFAPTGSQIKRFDAKTIMPEGILGREKQYFKSYLDKIVPNEVATQKPRLEQTLYSKRVVGGKECIVRKFNLIDLAYKSGLKPVYDLQTIKKLVGKDQSESDIINPVVGALVREFIATDPTEEQWRAWCGEVCMPSESFTGSRIKRVLVRCGNPDEFKDLSKDGCGAYRKGDAHKGQIVWRSTNGKCYVMPIYVHASKYGLIEALKKRADFKEIVGLFRMHCLVNIERDVVNKNGQKLLPPGIYMLNTIMTKGTAVLTNTDGVKQKEVNMNYLVESGMRPIKVDY

SEQ ID NO: 99 - protein, 1012 aa, unidentified
  REGION 1..1012: note = Description of Unknown: uncultivated organism with predicted taxonomy: unclassified Verrucomicrobia (miscellaneous)
  REGION 1..1012: note = MG1-102 effector
ALARRQMRTRKAHKAREKWLEECLEGTGVEILKRREVGIVDGQWQLISKGDERLEREFPPSGEDVCYNSIALRCKLLLGEKLEGWQVFKALNSAIQKRGYDENIPWGEAEEKSSKKDDDDYAQKLSQYEKEKSELFESFADGEKYDFPCFFKAYKMGLWSPENPTRVEVRIDCRAQKAKSYVIARKYVEREFECLVEAAAKFFPKLKGRAKFILYGVSETPYASYYGNMRKKFGLKRGAESDWTALGQKVPRFDNRIIDKCRLIPRMNVCKIRPLNEARNEKDLLYYEVTLALKLLNLRFFRNSNIEQLTFEEFKKAFEIAAGAKYKMTKTAMKKFLKSISATALGDDYAEIEPPKESGRASFSRPAMEILKELIFSGMPPREFYGRKISEISNTDKNKGVVSSDLDFIKLMGDCPWGGIFIPDVQTYQFANAAFPDPDAQINKLIGSQNNPIVRHRLTFFFERIKFLESKYGVPDKVVLEFVRDDFMGEKEKKEMRIAMKKRAEEKMRIAKDLDGHGFKGGNLLLKMELYRKQNGICLYTGDALPLSELATLEIEHIVPRSRGGPDAQYNYVITREKTNKLKGDKTPYEWLSSDAKEWASYTDRVNACAKALGKKRCRLLLEKDAEELVEKYAALAETAHIAKLAQKIVCMHFGFQFGGLSGTKRVFTVPGALTSRIRKFYGLDRILHNSAAESENLSFEEFLKFSEDLEKKNRKNKKHHALDAMCLCFAPTGVDSRRAKLGEILPEKLRSEKAAREFFKSYLDKIMPVDVAPKKPRLEDGIYSKRIIGGKACMVKRNNLVDLAYKSGLKPVFDIPTLIKLVDKKEKGIINPQIRKMIGEFAATNPDESAWRKWCEEVRLPSKSGLGARIMRVLVYYGEADEYKDLSKDGCGAYRKGDGHKGQVIWESVDGKYYVEPVYVHASKAGVMAALNANPKKKRICGMFNSHCAVDVGDVYNDKGDFILPAGRYMVNTIRSDNQCVLTNADGEKRNPININYLMRAGMRRVDLSEL

SEQ ID NO: 100 - protein, 1059 aa, unidentified
  REGION 1..1059: note = Description of Unknown: uncultivated organism with predicted taxonomy: Verrucomicrobia
  REGION 1..1059: note = MG1-103 effector
MEKEKNNHVWGFDIGKGSLGEAVRIGGDFKHIASVLLDPEFGEIKTAALARRQMRTRKAHKAREKWLEECLEGTGVEILKRREVGIVDGQWQLISKGDERLEREFPPSGEDVCYNSIALRCKLLLGEKLEGWQVFKALNSAIQKRGYDENIPWGEAEEKSSKKDDDDYAQKLSQYEKEKSELFESFADGEKYDFPCFFKAYKMGLWSPENPTRVEVRIDCRAQKAKSYVIARKYVEREFECLVEAAAKFFPKLKGRAKFILYGVSETPYASYYGNMRKKFGLKRGAESDWTALGQKVPRFDNRIIDKCRLIPRMNVCKIRPLNEARNEKDLLYYEVTLALKLLNLRFFRNSNIEQLTFEEFKKAFEIAAGAKYKMTKTAMKKFLKSISATALGDDYAEIEPPKESGRASFSRPAMEILKELIFSGMPPREFYGRKISEISNTDKNKGVVSSDLDFIKLMGDCPWGGIFIPDVQTYQFANAAFPDPDAQINKLIGSQNNPIVRHRLTFFFERIKFLESKYGVPDKVVLEFVRDDFMGEKEKKEMRIAMKKRAEEKMRIAKDLDEHGFKGGNLLLKMELYRKQNGICLYTGDALPLSELATLEIEHIVPRSRGGPDAQYNYVITREKTNKLKGDKTPYEWLSSDAKEWASYTDRVNACAKALGKKRCRLLLEKDAEELVEKYTALAETAHIAKLAQKIVCMHFGFQFGGLSGTKRVFTLPGALTSRIRKFYGLDRILHISAAESENLSFEEFLKFSEDLEKKNRKNKKHHALDAMCLCFAPTGVDSRRAKLGEILPEKLRSEKAAREFFKSYLDKIMPVDVAPKKPRLEDGIYSKRIIGGKACMVKRNNLVDLAYKSGLKPVFDIPTLIKLVDKKEKGIINPQIRKMIGEFAATNPDESAWRKWCEEVRLPSKSGLGARVKRVLVYYGEADEYKDLSKDGCGAYRKGDGHKGQVIWESVDGKYYVEPVYVHASKAGVMAALNANPKKKRICGMFNSHCTVDVGDVYNDKGDFILPAGRYMVNTIRSDNQCVLTNADGEKRNPININYLMRAGMRRVELSEL

SEQ ID NO: 101 - protein, 1062 aa, unidentified; identical to SEQ ID NO: 81
  REGION 1..1062: note = Description of Unknown: uncultivated organism with predicted taxonomy: Verrucomicrobia
  REGION 1..1062: note = MG1-104 effector

SEQ ID NO: 102 - protein, 1059 aa, unidentified
  REGION 1..1059: note = Description of Unknown: uncultivated organism
  REGION 1..1059: note = MG1-105 effector
MEKEKNNHVWGFDIGKGSLGEAVRIGGDFKHIASVLLDPEFGEIKTAALVRRQMRTRKAHKAREKWLEECLEGTGVEILKRREVGIVDGQWQLISKGDERLEREFPPSGEDVCYNSIALRCKLLLGEKLEGWQVFKALNSAIQKRGYDENIPWGEAEEKSSKKDDDDYAQKLSQYEKEKSELFESFADGEKYDFPCFFKAYKMGLWSPENPTRVEVRIDCRAQKAKSYVIARKYVEREFECLVEAAAKFFPKLKGRAKFILYGVSETPYASYYGNMRKKFGLKRGAESDWTALGQKVPRFDNRIIDKCRFIPRMNVCKIRPLNEARNEKDLLYYEVTLALKLLNLRFFRNSNIEQLTFEEFKKAFEIAAGAKYKMTKTAMKKFLKSISATALGDDYAEIEPPKESGRASFSRPAMEILKELIFSGMPPREFYGRKISEISNTDKNKGVVSSDLDFIKLMGDCPWGGIFIPDVQTYQFANAAFPDPDAQINKLIGSQNNPIVRHRLTFFFERIKFLESKYGVPDKVVLEFVRDDFMGEKEKKEMRIAMKKRAEEKMRIAKDLDEHGFKGGNLLLKMELYRKQNGICLYTGDALPLSELATLEIEHIVPRSRGGPDAQYNYVITREKTNKLKGDKTPYEWLSSDAKEWASYTDRVNACAKALGKKRCRLLLEKDAEELVEKYTALAETAHIAKLAQKIVCMHFGFQFGGLSGTKRVFTVPGALTSRIRKFYGLDRILHNSAAERENLSFEEFLKFSEDLEKKNRKNKKHHALDAMCLCFAPTGVDSRRVKLGEILPEKLKSEKAAREFFKSYLDKIMPVDVAPKKPRLEDGIYSKRIIGGKACMVKRNNLVDLAYKSGLKPVFDIPTLIKLVDKKEKGIINPQIRKMIGEFAATNPDESAWRKWCEEVRLPSKSGLGARIMRVLVYYGEADEYKDLSKDGYGAYRKGDGHKGQVIWESVDGKYYVEPVYVHASKAGVMAALNANPKKKRICGMFNSHCTVDVGDVYNDKGDFILPAGRYMVNTIRSDNQCVLTNADGEKRNPININYLMRAGMRRVDLSEL

SEQ ID NO: 103 - protein, 1073 aa, unidentified
  REGION 1..1073: note = Description of Unknown: uncultivated organism with predicted taxonomy: Verrucomicrobia
  REGION 1..1073: note = MG1-106 effector
MYTKEIIWGFDIGKGSLGEAVRVGNEFKHVQSLEIASDFAETKTTAAARRAWRTREAHKARELWLEKCLSEAGIEVLLRRKVGVVDGAWKLVSKGDVRLEREFPPAGEDLCYNSIALRCKLLLGEKLESWQVFKALNSAIQNRGYDANIPWGDEDAADGGDGSSRKSSDSDASGDGESYAEKLAHYEREFDGILAELDNREKYEFPCFFKAAKMGLWSPENPDFVGVRIDNTAEKAKGYVVPREAVVREFRALVNAAALQYPNLKGKADFIMFGRACEPYASYNPELRKRFGLKRGAATDWTALGQKTPRFDNRVIDKCKLIPRLNVCKIKPLDECKTDDDFLSYTITLSLKLLNLRFFRGAGVDSLSFDEFLRAFELAKNSKFKLGKAALKKFFKTIGAEVMDESQSEIEQPRNGGRAAFSRPAMRILRDLIFSGKSPAEFYATAIENVANTDKNKGLVAGDLDFLKLMGDAPWSGIFIPDVGLSDFADASEAAREAQINKLIGSQNDPIVRHRLSFFYERIKSLEAKFGVPDKIVLEFVRDDFLGKKAKSDLNKAIKTRFDEKKKLAEDLDSKREEFGLKYASKKMLLKFELYKKQGGECVYTGNALPLSELENLEVEHIVPRSRGGPDAMYNYVLTDEKTNKEKGDRTPYEWLSSKGAEWDSYCDRVRELTKNLGAKRCRLLLAPNAAELVEKYTALAETAWISKLAQRICCLHFGFQFGGLAGAKKVWTVSGNTTAMIRGRYGLNRLLHDEESAEDLSLFDRICMEKKFEEKNRKNKKHHALDAMCLCFAPTSNAKKASAYKNILPEEITRNPESDEARKFFGKYLATVIPNKVAVEKSKLEQTIYSLRKGRIVKKCNVRDLAYEGINPKYNYTKLVKRIESIVGDVSKRIISDFVLSNPDLKESEWEDWCKYEAAIPSKNGAPTKLLRVLCEVGSPEEYKDLSKDGCGAYRKGDSHKGQFIWKTQKGKYMVAPVYAHASKAKVFAALKSNPDCAEVCGFFRQNCLVEISNDVIDKSGKMLLKAGVYRSNSVRSNGQVAITNSDGISPNPISIQYLMPAGMKRIKLDTV

SEQ ID NO: 104 - protein, 1073 aa, unidentified; identical to SEQ ID NO: 84
  REGION 1..1073: note = Description of Unknown: uncultivated organism with predicted taxonomy: Verrucomicrobia
  REGION 1..1073: note = MG1-107 effector

SEQ ID NO: 105 - protein, 1073 aa, unidentified
  REGION 1..1073: note = Description of Unknown: uncultivated organism with predicted taxonomy: Verrucomicrobia
  REGION 1..1073: note = MG1-108 effector
MHTKDIIWGFDIGKGSLGEAVRVGNEFKHVQSLEIAPDFAETKTTAAARRAWRTREAHKARELWLEKCLSEAGIEVLLRRKVGVVDGAWKLVSKGDVRLEREFPPAGEDLCYNSIALRCKLLLGEKLESWQVFKALNSAIQNRGYDANIPWGDEDAADGGDGSSRKSSDSDASGDGESYAEKLAHYEREFDGILAELDNREKYEFPCFFKAAKMGLWSPENPDFVGVRIDNTAEKAKGYVVPREAVVREFRALVNAAELQYPNLKGKADFIMFGRACEPYASYNPELRKRFGLKRGAATDWTALGQKTPRFDNRVIDKCKLIPRLNVCKIKPLDECKTDDDFLSYTITLSLKLLNLRFFRGAGVDSLSFDEFLRAFELAKNSKFKLGKAALKKFFKTIGAEVMDESQSEIEQPRNGGRAAFSRPAMRILRDLIFSGKSPAEFYATELGKIANTDKNKGLVAGDLDFLKLMSDAPWSGIFIPDVGLSDFADTSEAARAAQINKLIGSQNDPIVRHRLSFFYERIKSLEAKFGVPDKIVLEFVRDDFLGKKAKSDLNKAIKTRFDEKKKLAEDLDSKREEFGLKYASKKMLLKFELYKKQGGECVYTGNALPLSELENLEVEHIVPRSRGGPDAMYNYVLTDEKTNKEKGDRTPYEWHSLKGAEWDSYCDRVRELTKNLGAKRCRLLLAPNAAELVEKYTALAETAWISKLAQRICCLHFGFQFGGLAGAKKVWTVSGNTTAMIRGRYGLNRLLHDEEAAEDLSLFDRICMEKKFEEKNRKNKKHHALDAMCLCFAPTSNAKKASAYKNILPEEITRNPESDEARKFFGRYLATVIPNKVAVEKSKLEQTIYSLRKGRIVKKCNVRDLAYEGINPKYNYTKLVKRIESIVGDVSKRIISDFVLSNPDLKESEWEDWCKYEAAIPSKNGAPTKLLRVLCEVGSPEEYKDLSKDGCGAYRKGDSHKGQFIWKTQKGKYMVAPVYAYASKAKVFAALKSNPDCAEVCGFFRQNCLVEISNDVIDKSGKMLLKSGIYKSNTIMSDGRAKFTNSDGISTNPISIQYLMPAGMKRIKLDTV

SEQ ID NO: 106 - protein, 1059 aa, unidentified
  REGION 1..1059: note = Description of Unknown: uncultivated organism with predicted taxonomy: unclassified Verrucomicrobia (miscellaneous)
  REGION 1..1059: note = MG1-109 effector
MEKEKNNHVWGFDIGKGSLGEAVRIGGDFKHIASVLLDPEFGEIKTAALARRQMRTRKAHKAREKWLEECLEGTGVEILKRREVGIVDGQWQLISKGDERLEREFPPSGEDVCYNSIALRCKLLLGEKLEGWQVFKALNSAIQKRGYDENIPWGEAEEKSSKKDDDDYAQKLSQYEKEKSELFESFADGEKYDFPCFFKAYKMGLWSPENPTRVEVRIDCRAQKAKSYVIARKYVEREFECLVEAAAKFFPKLKGRAKFILYGVSETPYASYYGNMRKKFGLKRGAESDWTALGQKVPRFDNRIIDKCRLIPRMNVCKIRPLNEARNEKDLLYYEVTLALKLLNLRFFRNSNIEQLTFEEFKKAFEIAAGAKYKMTKTAMKKFLKSISATALGDDYAEIEPPKESGRASFSRPAMEILKELIFSGMPPREFYGRKISEISNTDKNKGVVSSDLDFIKLMGDCPWGGIFIPDVQTYQFANAAFPDPDAQINKLIGSQNNPIVRHRLTFFFERIKFLESKYGVPDKVVLEFVRDDFMGEKEKKEMRSAMKKRAEEKMRIAKDLDEHGFKGGNLLLKMELYRKQNGICLYTGDALPLSELATLEIEHIVPRSRGGPDAQYNYVITREKTNKLKGDKTPYEWLSSDAKEWASYTDRVNACAKALGKKRCRLLLEKDAEELVEKYTALAETAHIAKLAQKIVCMHFGFQFGGLSGTKRVFTVPGALTSRIRKFYGLDRILHNSAAESENLSFEEFLKFSEDLEKKNRKNKKHHALDAMCLCFAPTGVDSRRAKLGEILPEKLRSEKAAREFFKSYLDKIMPVDVAPKKPRLEDGIYSKRIIGGKACMVKRNNLVDLAYKSGLKPVFDIPTLIKLVDKKEKGIINPQIRKMIGEFAATNPDESAWRKWCEEVRLPSKSGLGARVMRVLVYYGEADEYKDLSKDGCGAYRKGDGHKGQVIWESVDGKYYVEPVYVHASKAGVMAALNANPKKKRICGMFNSHCTVDVGDVYNDKGDFILPAGRYMVNTIRSDNQCVLTNADGEKRNPININYLMRAGMRRVDLSEL

SEQ ID NO: 107 - protein, 1073 aa, unidentified
  REGION 1..1073: note = Description of Unknown: uncultivated organism with predicted taxonomy: Verrucomicrobia
  REGION 1..1073: note = MG1-110 effector
MYTKEIIWGFDIGKGSLGEAVRVGNEFKHVQSLEIAPDFAETKTTAAARRAWRTREAHKARELWLEKCLSEAGIEVLLRRKVGVVDGAWKLVSKGDVRLEREFPPAGEDLCYNSIALRCKLLLGEKLESWQVFKALNSAIQNRGYDANIPWGDEDAADGGDGSSRKSSDSDASGDGESYAEKLAHYEREFDGILAELDNREKYEFPCFFKAAKMGLWSPENPDFVGVRIDNTAEKAKGYVVPREAVVREFRALVNAAALQYPNLKDKADFIMFGRACEPYASYNPELRKRFGLKRGAATDWTALGQKTPRFDNRVIDKCKLIPRLNVCKIKPLDECKTDDDFLSYTITLSLKLLNLRFFRGAGVDSLSFDEFLRAFELAKNSKFKLGKAALKKFFKTIGAEVMDESQSEIEQPRNGGRAAFSRPAMRILRDLIFSGKSPAEFYAAAIENIANTDKNKGLVAGDLDFLKLMGDAPWSGIFIPDVGLSDFADASEAAREEQINKLIGSQNDPIVRHRLSFFYERIKSLEAKFGVPDKIVLEFVRDDFLGKKAKSDLNKAIKTRFDEKKKLAEDLDSKREEFGFKYASKKMLLKFELYKKQGGECVYTGKALPLSELESLEIEHIVPRSRGGPDAMYNYVLTDEKTNKEKGDRTPFEWRSTMGAEWESYCERVRKLTKELGAKRCKLLLSPNAAELVEKYTALAETAWISKLAQRICCLHFGFQFGGLAGAKKVWTVSGNTTAMIRGRYGLNRLLHDEESAEDLSLFDRICMEKKLEEKNRKNKKHHALDAMCLCFAPTSNAKKASAYKNILPEEITRNPESDEARKFFGKYLANVIPNKVAVEKPTLEQTIYAMRNGRIVKKCNVRDLAYTGINPKYNYSTLVKSIKSIVGEVPKRIISDFVLSNPKLSESEWEDWCKNEALIPSKNGAPTKLLRVLCDVGSPEEYKDLSKDGCGAYRKGDSHNGQFIWKTKQGRYVVAPVYAHASKAKVLAALKNNPDCAEVCGFFRQNCLVEIPNDVVDKSGKMLLKSGIYKSNTIMSDGRAKFTNSDGISTNPISIQYLMPAGMKRIKLDTV

SEQ ID NO: 108 - protein, 1062 aa, unidentified; identical to SEQ ID NO: 97
  REGION 1..1062: note = Description of Unknown: uncultivated organism with predicted taxonomy: Coraliomargarita sp. CAG:312
  REGION 1..1062: note = MG1-111 effector

SEQ ID NO: 109 - protein, 1059 aa, unidentified; identical to SEQ ID NO: 96
  REGION 1..1059: note = Description of Unknown: uncultivated organism with predicted taxonomy: unclassified Verrucomicrobia (miscellaneous)
  REGION 1..1059: note = MG1-112 effector

SEQ ID NO: 110 - protein, 1034 aa, unidentified
  REGION 1..1034: note = Description of Unknown: uncultivated organism with predicted taxonomy: Verrucomicrobia
  REGION 1..1034: note = MG1-113 effector
MGAEFRHVASLLLDKDFGEIKTAAGLRRQMRTRKAHKAREKWLERCLSDFGIEPLKRREVGIVNGRWMLISKGDERLEREFPPDGEDICYNAIALRCKLLLGEKLESWQIFKALNSAIQNRGYDENIPWKESDVSPSKKDDDDYAKRLSQYSREKSELLESFEGGEKYDYPCFFKAYKMGLWSPENPERVEIRIGNDAQKAKGYVIPRKDVEREFESLVEAASKWHPAMKGKAMYMMYGIAETPYASFKPSLRKKFDLKRGAESDWTALGQKIPRFDNRIIDKCRLIPRLNVCKIRPLSEARGEGDLLHYEITLSLKLLNLRFFRNSNVESLSFEEFKAAFEIAKSAKYKMGKAALKKFLKSISASVLSEDQSEIEAPRESGRAAFSRPAMLLLKELIFSGMPPAEFYAKKAGEISNADPNKGIVASDLDFIKLMGNCGWNGIFIPDVETYRFANDGADSAKLINGLIGSQNNPIVRHRLAFFYERIKFLESKFGIPDKVVLEFVREDFMGKEQKKRMQIGMKKRASEKMLIAKKLDEAGYKGGNLLLKMELLEKQGGICLYTGEPLLPSELGVLEIEHIVPRSRGGPDAQYNYALTREKTNKEKADRTPFEWLSSDPVKWAGYSDRIKARAGQLGRKRCELLLEKNAEELVEKYTALAETAHISKLAQKIVCLHFGFQFGGLGGTKRVFTVPGALTARIRSFYGLNKILHNEDLAKDALSYEEVLKRGEELDKKNRENEKHHALDAMCLCFAPTGVNSKRARIDMLLPPDIRGEGKAELFFRKYLDRLIPVDVAPKKPRLEDGIYSMRAVGGKKFMARRVNLVDLAYTVGQKPVYDISVLIGKKNPKEKKIINAQIRKLVADFARTNPSEDEWRKWCGECRLPSKNGIGTRVIRVLLNYGEPAEYKDLSKDGRGAFRRGDGHKGQIVWESTDGKYYVVPIYVHASKAKLLAELDANPKKKRVCDIFTSHCMVKVGNAYNDKGELLLPEGVYMVNTIQTDGRGKLTNPNGEKSNLININYLMKAGMRKVSVKDL

SEQ ID NO: 111 - protein, 1077 aa, unidentified
  REGION 1..1077: note = Description of Unknown: uncultivated organism with predicted taxonomy: unclassified Verrucomicrobia (miscellaneous)
  REGION 1..1077: note = MG1-114 effector
MSLYFIEQISDWKIMKVIEDEGGNHIWGFDIGKGSLGEAVLDGSEFKHVASLLLDADFGEIETAAGLRRQMRTRKAHKAREKWLESCLSGFGIETLKRREVGIVNGQWTLISKGDERLEREFPPDGENICYNSIALRCKLLLGEKLEGWQIFKALNSAIQNRGYDENIPWKESDASPSKKEGGDYAQKLSQYSREKSELFESFEGGEKYDYPCFFKACKMGLWSPDNPERVEVRIGSDAQKAKGYVIPRKDVEREFERLVEAASKWYPAMKGKAMYIMYGIAETPYASFKPLLRKKFDLKRGAESDWTALGQKIPRFDNRIIDKCRLIPRLNVCKIRPLSEIRGEADLLHYEITLSLKLLNLRFFRNSNVESLSFGEFKAAFEIAKGAKYKMGKAALKKFLKSISASVLSEDQSEIEAPRESGRAAFSRPAMLLLKELIFSGMTPAEFYAKKSGEISNADPNKGLVASDLDFIKLMGNCGWSGIFIPDVDTFHFANKGAEPAKLINELIGSQNNPIVRHRLSFFYERIKFLESKFGIPDKVVLEFVREDFMGKEQKKRMQIEMKKRASEKMLIAKKLDEAGYKGGNLLLKMELLEKQGGVCLYTGEPLLPSELGVLEIEHIVPRSRGGPDAQYNYVLTREKTNKEKADRTPFEWLSSDPVKWAGYSDRVKARAGQLGRKRCELLLEKNAEELVEKYTALAETAHISKLAQKIVCLHFGFQFGGLSGTKRVFTVPGSLTARIRTFYGLNKILHNEDLAHETLSYEGFLKRGEELDKKNRANKKHHALDAMCLCFAPTGVNSKRARVDMLLPPKIRSEKDAELFFRKYLDKLIPVDVAPKKPKLEDGIYSMRMVGGKKIMARRVNLVDLAYKGGQGQKPVYDISVLMDKKNPKEKKIINPQIRKLVADFARTNPSEDEWKKWCGECRLPSKNGLGTRVIRVLLNYGEPAEYKDLSKDGCGAFRKGKEHKGQIVWESTDGKYYVLPIYVHASKAKLLAELCANPKKKRICGIFTSHCMVKVGNTYNNKGELLLPEGVYMLNTIQTDGRGKLTNANGEKSNLININYLMKAGMKKVSIKEL

SEQ ID NO: 112 - protein, 1061 aa, unidentified
  REGION 1..1061: note = Description of Unknown: uncultivated organism with predicted taxonomy: unclassified Verrucomicrobia (miscellaneous)
  REGION 1..1061: note = MG1-115 effector
MKVIEDEGGNHIWGFDIGKGSLGEAVLDGSEFKHVASLLLDADFGEIKTAAGLRRQMRTRKAHKAREKWLESCLSGFGMETLKRREVGIVNGQWTLISKGDERLEREFPPDGENICYNSIALRCKLLLGEKLEGWQIFKALNSAIQNRGYDENIPWKESDASPSKKEDGDYAQKLSQYSKEKSELFESFEGGEKYDYPCFFKACKMGLWSPDNPERVEVRIGSDAQKAKDYVIPRKDVEREFERLVEAASKWYPAMKGKAMYIMYGIAETPYASYKPLLRKKFDLKRGAESDWTALGQKIPRFDNRIIDKCRLIPRLNVCKIRPLSKIRGEADLLHYEITLSLKLLNLRFFRNSNVESLSFGEFKAAFEIAKGAKYKMGKAALKKFLKSISASVLSEDQSEIEAPRESGRAAFSRPAMLLLKELIFSGMTPAEFYAKKSGEISNADPNKGIVASDLDFIKLMGNCGWSGIFIPDVDTFHFANKGAEPAKLINELIGSQNNPIVRHRLSFFYERIKFLESKFGIPDKVVLEFVREDFMGKEQKKRMQIEMKKRASEKMLIAKKLDEAGYKGGNLLLKMELLEKQGGVCLYTGEPLLPSELGVLEIEHIVPRSRGGPDAQYNYVLTREKTNKEKADRTPFEWLSSDPVKWAGYSDRVKARAGQLGRKRCELLLEKNAEELVEKYTALAETAHISKLAQKIVCLHFGFQFGGLSGTKRVFTVPGALTARIRTFYGLNKILHNEDLAHETLSFEGFLKRGEELDKKNRANKKHHALDAMCLCFAPTGVNSKRARVDMLLPPKIRSEKEAELFFRKYLDKLIPVDVAPKKPKLEDGIYSMRTVGGKKIMARRVNLVDLAYKSGLKPVYDVSVLIKLLDKKERGIINPQIRKLVADFARTNPSEDEWKKWCGECRLPSKNGLGTRVIRVLLNYGEPAEYKDLSKDGRGAFRRGDGHKGQIVWESTDGKYCVLPIYVHASKAKLLAELCANPKKKRICGIFTSHCMVKVGNTYNNKGELLLPEGVYMLNTIRTDGWIQLTSANGDKSKPININYLMKAGMKKVPVKDL

SEQ ID NO: 113 - protein, 1073 aa, unidentified
  REGION 1..1073: note = Description of Unknown: uncultivated organism with predicted taxonomy: Verrucomicrobia
  REGION 1..1073: note = MG1-116 effector
MYTKEIIWGFDIGKGSLGEAVRVGNEFKHVQSLEIAPDFAETKTTAAARRAWRTREAHKARELWLEKCLSEAGIEVLLRRKVGVVDGAWKLVSKGDVRLEREFPPAGEDLCYNSIALRCKLLLGEKLESWQVFKALNSAIQNRGYDANIPWGDEDAADGGDGSSRKSSDSDASGDGESYAEKLAHYEREFDGILAELDNREKYEFPCFFKAAKMGLWSPENPDFVGVRIDNTAEKAKGYVVPREAVVREFRALVNAAALQYPNLKGKADFIMFGRACEPYASYNPELRKRFGLKRGAATDWTALGQKTPRFDNRVIDKCKLIPRLNVCKIKPLDECKTDDDFLSYTITLSLKLLNLRFFRGAGVDSLSFDEFLRAFELAKNSKFKLGKAALKKFFKTIGAEVMDESQSEIEQPRNGGRAAFSRPAMRILRDLIFSGKSPAEFYATAIENIANTDKNKGLVAGDLDFLKLMGDAPWSGIFIPDVGLSDFADASEAAREAQINKLIGSQNDPIVRHRLSFFYERIKSLEAKFGVPDKIVLEFVRDDFLGKKAKSDLNKAIKTRFDEKKKLAEDLDSKREEFGFKYASKKMLLKFELYKKQGGECVYTGNALPLSELESLEIEHIVPRSRGGPDAMYNYVLTDEKTNKEKGDRTPFEWRSTMGAEWESYCERVRKLTKELGAKRCKLLLSPNAAELVEKYTALAETAWISKLAQRICCLHFGFQFGGLAGAKKVWTVSGNTTAMIRGRYGLNRLLHDEESAEDLSLFDRICMEKKFEEKNRKNKKHHALDAMCLCFAPTSNAKKASAYKNILPEEITRNPESDEARKFFGRYLATVIPNKVAVEKSKLEQTIYSLRKGRIVKKCNVRDLAYEGINPKYNYTKLVKRIESIVGDVSKRIISDFVLYNPDLKESEWEDWCKYEAAIPSKNGAPTKLLRVLCEVGSPEEYKDLSKDGCGAYRKGDSHKGQFIWKTQKGKYMVAPVYAHASKAKVFASLKNNPDCAEVCGFFRQNCLVEIPNDVIDKSGKMLLKAGVYRSNSVRSNGQVAITNSDGISPNPISIQYLMPAGMKRIKLDTV

SEQ ID NO: 114 - protein, 1062 aa, unidentified
  REGION 1..1062: note = Description of Unknown: uncultivated organism with predicted taxonomy: Coraliomargarita sp. CAG:312
  REGION 1..1062: note = MG1-117 effector
MNNNNTQIWGFDIGKASLGEAVWCGGKFKHVESLILDKDFAEIKTSAGRRRQARTRKAHKAREEWLEKCLEDCGIEILKRRKVGIVNGQWKLISKGDARLEKEFPAEGEEVCYNSIALRCKLILGENLESWQIFKALNSSIQHRGYDENIPWKETQNESKKEDGDYFKKIVLYESEKEDILNRLPQECKREDFDFPCFFKAKKMGIWSEENPYKVGLRISNNAQKAKGYVIPRKYVESEFVRLVQMASLQYPKLKDKQMFILYGISETPYASLFKDARKKFGLKRGADSDWTALGQKIPRFDNRMIGKCKLIPRLNTCKIKSPDKIKSEEDLLHYDITLALKLLNLRFFKDSEICALSFEEFKKLFEIGKSNKYKISKTDLKKFLKSIGASVLSQDHSEIEAPRTSGRSSFSRPAMKILKELIFSGEPPSKFLKAKIDKIANTDPNKGIIREDLDFIRIMGDCPWNGIFIPDVETYKYASQTQESSEAQINKLIGSQNDPIVRHRLSFFYERIKALSEKFGVPDKIVLEFVREDFMGKQAKKDLSLSMKKRFEEKIDIAKKLDDIGYKGNKMLLKMELLQKQGFACLYTGEALQETDLPILEIEHIVPRSLGGPDAAYNYVLTSESTNKAKGNQTPYKWLSPDRDKWRAYTERVRARAAELGSKRCRLLLSENAEELINKYTALAETAWISKLAQRIVCMHFGFQFGGNTGEKRVFTVPGNITAKIRSAFGLNKILHNIDADKKNMSEFDIVKLDYELDKKNRKNKKHHALDAMCLCFAPTGPNAQKLGIGALLPPEIAAKAEEFFRGYIEKVVPNEVAPKKPKLEESIYSKRTINRKECIVRKFNLVDLAYKSGLKPVYDISAIEKLLEDKPKKIPPIINPTVRRIVRDFVSTNPNEDEWRNWCKTVRMPSKNRNGTRIIRVLVYVGTPEEYKDLSKDGCGAFRKGDSHKGQIIWMDKNGRYKVSPVYVHSSKSQTMESIKSNPDFIKIAGFFKSHCLVEIESPVVNGKRDVLLSPGTYMINTIMAAGMAILSDTNGVKSPAININYLMNAGMRRISIKYK

SEQ ID NO: 115 - protein, 1059 aa, unidentified
  REGION 1..1059: note = Description of Unknown: uncultivated organism with predicted taxonomy: unclassified Verrucomicrobia (miscellaneous)
  REGION 1..1059: note = MG1-118 effector
MEKEKNNHVWGFDIGKGSLGEAVRIGGDFKHIASVLLDPEFGEIKTAALARRQMRTRKAHKAREKWLEECLEGTGVEILKRREVGIVDGQWQLISKGDERLEREFPPSGEDVCYNSIALRCKLLLGEKLEGWQVFKALNSAIQKRGYDENIPWGEAEEKSSKKDDDDYAQKLSQYEKEKSELFESFADGEKYDFPCFFKAYKMGLWSPENPTRVEVRIDCRAQKAKSYVIARKYVEREFECLVEAAAKFFPKLKGRAKFILYGVSETPYASYYGNMRKKFGLKRGAESDWTALGQKVPRFDNRIIDKCRLIPRMNVCKIRPLNEARNEKDLLYYEVTLALKLLNLRFFRNSNIEQLTFEEFKKAFEIAAGAKYKMTKTAMKKFLKSISATALGDGYAEIEPPKESGRASFSRPAMEILKELIFSGMPPREFYGRKISEISNTDKNKGVVSSDLDFIKLMGDCPWGGIFIPDVQTYLFANAAFPDPDAQINKLIGSQNNPIVRHRLTFFFERIKFLESKYGVPDKVVLEFVRDDFMGEKEKKEMRIAMKKRAEEKMRIAKDLDEHGFKGGNLLLKMELYRKQNGICLYTGDALPLSELATLEIEHIVPRSRGGPDAQYNYVITREKTNKLKGDKTPYEWLSSDAKEWASYTDRVNACAKALGKKRCRLLLEKDAEELVEKYTALAETAHIAKLAQKIVCMHFGFQFGGLSGTKRVFTVPGALTSRIRKFYGLDRILHNSAAESENLSFEEFLKFSEDLEKKNRKNKKHHALDAMCLCFAPTGVDSRRAKLGEILPEKLRSEKAAREFFKSYLDKIMPVDVAPKKPRLEDGIYSKRIIGGKACMVKRNNLVDLAYKSGLKPVFDIPTLIKLVDKKEKGIINPQIRKMIGEFAATNPDESAWRKWCEEVRLPSKSGLGARVMRVLVYYGEADEYKDLSKDGCGAYRKGDGHKGQVIWESVDGKYYVEPVYVHASKAGVMAALNANPKKKRICGMFNSHCTVDVGDVYNDKGDFILPAGRYMVNTIRSDNQCVLTNADGEKRNPININYLMRAGMRRVDLSEL

SEQ ID NO: 116 - protein, 1059 aa, unidentified
  REGION 1..1059: note = Description of Unknown: uncultivated organism with predicted taxonomy: unclassified Verrucomicrobia (miscellaneous)
  REGION 1..1059: note = MG1-119 effector
MEKEKNNHVWGFDIGKGSLGEAVRIGGDFKHIASVLLDPEFGEIKTAALARRQMRTRKAHKAREKWLEECLEGTGVEILKRREVGIVDGQWQLISKGDERLEREFPPSGEDVCYNSIALRCKLLLGEKLEGWQVFKALNSAIQKRGYDENIPWGEAEEKSSKKDDDDYAQKLSQYEKEKSELFESFADGEKYDFPCFFKAYKMGLWSPENPTRVEVRIDCRAQKAKSYVIARKYVEREFECLVEAAAKFFPKLKGRAKFILYGVSETPYASYYGNMRKKLGLKRGAESDWTALGQKVPRFDNRIIDKCRLIPRMNVCKIRPLNEARNEKDLLYYEVTLALKLLNLRFFRNSNIEQLTFEEFKKAFEIAAGAKYKMTKTAMKKFLKSISATALGDDYAEIEPPKESGRASFSRPAMEILKELIFSGMPPREFYGRKISEISNTDKNKGVVSSDLDFIKLMGDCPWGGIFIPDVQTYQFANAAFPDPDAQINKLIGSQNNPIVRHRLTFFFERIKFLESKYGVPDKVVLEFVRDDFMGEKEKKEMRIAMKKRAEEKMRIAKDLDEHGFKGGNLLLKMELYRKQNGICLYTGDALPLSELATLEIEHIVPRSRGGPDAQYNYVITREKTNKLKGDKTPYEWLSSDAKEWASYTDRVNACAKALGKKRCRLLLEKDAEELVEKYTALAETAHIAKLAQKIVCMHFGFQFGGLSGTKRVFTVPGALTSRIRKFYGLDRILHNSAAESENLSFEEFLKFSEDLEKKNRKNKKHHALDAMCLCFAPTGVDSRRAKLGEILPEKLRSEKAAREFFKSYLDKIMPVDVAPKKPRLEDGIYSKRIIGGKACMVKRNNLVDLAYKSGLKPVFDIPTLIKLVDKKEKGIINPQIRKMIGEFAATNPDESAWRKWCEEVRLPSKSGLGARIMRVLVYYGEADEYKDLSKDGCGAYRKGDGHKGQVIWESVDGKYYVEPVYVHASKAGVMAALNANPKKKRICGMFNSHCTVDVGDVYNDKGDFILPAGRYMVNTIRSDNQCVLTNADGEKRNPININYLMRAGMRRVDLSEL

SEQ ID NO: 117 - protein, 1034 aa, unidentified
  REGION 1..1034: note = Description of Unknown: uncultivated organism with predicted taxonomy: unclassified Verrucomicrobia (miscellaneous)
  REGION 1..1034: note = MG1-120 effector
MGAEFRHVTSLLLDEDFGEIKTAAGLRRQMRTRKAHKAREKWLERCLLEFGIEPLKRREVGIVNGRWMLISKGDERLEREFPPDGEDICYNAIALRCKLLLGEKLESWQIFKALNSAIQNRGYDENIPWKESDVSLPKKDDDDYAKKLSQYSREKGELLESFEDGEKYDYPCFFKAYKMGLWSPENPERVEIRIGNDAQKAKGYVIPRKDVEREFESLVEAASKWHPAMKGKAMYIMYGIAETPYASFKPALRKKFDLKRGAESDWTALGQKIPRFDNRIIDKCRLIPRLNVCKIRPLSEARGEGDLLHYEITLSLKLLNLRFFRNSNVESLSFEEFKAAFEIAKSAKYKMGKAALKKFLKSISASVLSEDQSEIEAPRESGRASFSRPAMLLLKELIFSGMPPTEFYAKKAGEISNADPNKGIVASDLDFIKLMGNCGWSGIFIPDVETYRFANNGADSAKLINGLIGSQNNPIVRHRLAFFYERIKFLESKFGVPDKVVLEFVREDFMGKEQKKRMQIEMKKRASEKMLIAKKLDEAGYKGGNLLLKMELLEKQGGICLYTGEPLLPSELGVLEIEHIVPRSRGGPDAQYNYALTREKTNKEKADRTPFEWLSSDPVKWAGYSDRVKARAGQLGRKRCELLLEKNAEELVEKYTALAETAHISKLAQKIVCLHFGFQFGGLGGTKRVFTVPGALTARIRSFYGLNKILHNEDLAKDALSYEEVLKRGEELDKKNRKNKKHHALDAMCLCFAPTGVNSKRARIDMLLPPDIRGEREAELFFRKYLDRLIPVDVAPKKPRLEDGIYSMRAVGGKKFMARRVNLVDLAYKSGLKPVYDISALIKLLDKKEKGIINAQIRKLVADFARTNPSEDEWRKWCGECRLPSKNGIGTRVIRVLLNYGEPAEYKDLSKDGRGAFRRGDGHKGQIVWESTDGKYYVVPIYVHASKAKLLAELDANPKKKRVCDIFTSHCMVKIGNTYNDKGELLLHEGVYMVNTIQTDGRGKLTNPNGEKSNLININYLMKAGMRKVSVKDL

SEQ ID NO: 118 - protein, 1057 aa, unidentified
  REGION 1..1057: note = Description of Unknown: uncultivated organism with predicted taxonomy: unclassified Verrucomicrobia (miscellaneous)
  REGION 1..1057: note = MG1-121 effector
KEKNNHVWGFDIGKGSLGEAVRIGGDFKHIASVLLDPEFGEIKTAALVRRQMRTRKAHKAREKWLEECLEGTGVEILKRREVGIVDGQWQLISKGDERLEREFPPSGEDVCYNSIALRCKLLLGEKLEGWQVFKALNSAIQKRGYDENIPWGEAEEKSSKKDDDDYAQKLSQYEKEKSELFESFADGEKYDFPCFFKAYKMGLWSPENPTRVEVRIDCRAQKAKSYVIARKYVEREFECLVEAAAKFFPKLKGRAKFILYGVSETPYASYYGNMRKKFGLKRGAESDWTALGQKVPRFDNRIIDKCRFIPRMNVCKIRPLNEARNEKDLLYYEVTLALKLLNLRFFRNSNIEQLTFEEFKKAFEIAAGAKYKMTKTAMKKFLKSISAIALGDDYAEIEPPKESGRASFSRPAMEILKELIFSGMPPREFYGRKISEISNTDKNKGVVSSDLDFIKLMGDCPWGGIFIPDVQTYQFANAAFPDPDAQINKLIGSQNNPIVRHRLTFFFERIKFLESKYGVPDKVVLEFVRDDFMGEKEKKEMRIAMKKRAEEKMRIAKDLDEHGFKGGNLLLKMELYRKQNGICLYTGDALPLSELATLEIEHIVPRSRGGPDAQYNYVITREKTNKLKGDKTPYEWLSSDAKEWASYTDRVNACAKALGKKRCRLLLEKDAEELVEKYTALAETAHIAKLAQKIVCMHFGFQFGGLSGTKRVFTVPGALTSRIRKFYGLDRILHNSAAESENLSFEEFLKFSEDLEKKNRKNKKHHALDAMCLCFAPTGVDSRRAKLGEILPEKLRSEKAAREFFKSYLDKIMPVDVAPKKPRLEDGIYSKRIIGGKACMVKRNNLVDLAYKSGLKPVFDIPTLIKLVDKKEKGIINPQIRKMIGEFAATNPDESAWRKWCEEVRLPSKSGLGARVMRVLVYYGEADEYKDLSKDGCGAYRKGDGHKGQVIWESVDGKYYVEPVYVHASKAGVMAALNANPKKKRICGMFNSHCTVDVGDVYNDKGDFILPAGRYMVNTIWKSGPCVLTNADGEKRNPININYLMRAGMRRVDLSEL

SEQ ID NO: 119 - protein, 1059 aa, unidentified
  REGION 1..1059: note = Description of Unknown: uncultivated organism with predicted taxonomy: unclassified Verrucomicrobia (miscellaneous)
  REGION 1..1059: note = MG1-122 effector
MEKEKNNHVWGFDIGKGSLGEAVRIGGDFKHIASVLLDPEFGEIKTAALARRQMRTRKAHKAREKWLEECLEGTGVEILKRREVGIVDGQWQLISKGDERLEREFPPSGEDVCYNSIALRCKLLLGEKLEGWQVFKALNSAIQKRGYDENIPWGEAEEKSSKKDDDDYAQKLSQYEKEKSELFESFADGEKYDFPCFFKAYKMGLWSPENPTRVEVRIDCRAQKAKSYVIARKYVEREFECLVEAAAKFFPKLKGRAKFILYGVSKTPYASYYGNMRKKFGLKRGAESDWTALGQKVPRFDNRIIDKCRFIPRMNVCKIRPLNEARNEKDLLYYEVTLALKLLNLRFFRNSNIEQLTFEEFKKAFEIAAGAKYKMTKTAMKKFLKSISATALGDDYAEIEPPKESGRASFSRPAMEILKELIFSGMPPREFYGRKISEISNTDKNKGVVSSDLDFIKLMGDCPWGGIFIPDVQTYQFANAAFPDPDAQINKLIGSQNNPIVRHRLTFFFERIKFLESKYGVPDKVVLEFVRDDFMGEKEKKEMRIAMKKRAEEKMRIAKDLDEHGFKGGNLLLKMELYRKQNGICLYTGDALPLSELATLEIEHIVPRSRGGPDAQYNYVITREKTNKLKGDKTPYEWLSSDAKEWASYTDRVNACAKALGKKRCRLLLEKDAEELVEKYTALAETAHIAKLAQKIVCMHFGFQFGGLSGTKRVFTVPGALTSRIRKFYGLDRILHNSASESENLSFEEFLKFSEDLEKKNRKNKKHHALDAMCLCFAPTGVDSRRAKLGEILPEKLRSEKAAREFFKSYLDKIMPVDVAPKKPRLEDGIYSKRIIGGKACMVKRNNLVDLAYKSGLKPVFDIPTLIKLVDKKEKGIINPQIRKMIGEFAATNPDESAWRKWCEEVRLPSKSGLGARVMRVLVYYGEADEYKDLSKDGCGAYRKGDGHKGQVIWESVDGKYYVEPVYVHASKAGVMAALNANPKKKRICGMFNSHCTVDVGDVYNDKGDFILPAGRYMVNTIRSDNQCVLTNADGEKRNPININYLMRAGMRRVDLSEL

SEQ ID NO: 120 - protein, 1059 aa, unidentified
  REGION 1..1059: note = Description of Unknown: uncultivated organism with predicted taxonomy: unclassified Verrucomicrobia (miscellaneous)
  REGION 1..1059: note = MG1-123 effector
MEKEKNNHVWGFDIGKGSLGEAVRIGGDFKHIASVLLDPEFGEIKTAALARRQMRTRKAHKAREKWLEECLEGTGVEILKRREVGIVDGQWQLISKGDERLEREFPPSGEDVCYNSIALRCKLLLGEKLEGWQVFKALNSAIQKRGYDENIPWGEAEEKSPKKDDDDYAQKLSQYEKEKSELFESFADGEKYDFPCFFKAYKMGLWSPENPTRVEVRIDCRAQKAKSYVIARKYVEREFECLVEAAAKFFPKLKGRAKFILYGVSETPYASYYGNMRKKFGLKRGAESDWTALGQKVPRFDNRIIDKCRFIPRMNVCKIRPLNEARNEKDLLYYEVTLALKLLNLRFFRNSNIEQLTFEEFKKAFEIAAGAKYKMTKTAMKKFLKSISATALGDDYAEIEPPKESGRASFSRPAMEILKELIFSGMPPREFYGRKISEISNTDKNKGVVSSDLDFIKLMGDCPWGGIFIPDVQTYQFANAAFPDPDAQINKLIGSQNNPIVRHRLTFFFERIKFLESKYGVPDKVVLEFVRDDFMGEKEKKEMRIAMKKRAEEKMRIAKDLDEHGFKGGNLLLKMELYRKQNGICLYTGDALPLSELATLEIEHIVPRSRGGPDAQYNYVITREKTNKLKGDKTPYEWLSSDAKEWASYTDRVNACAKALGKKRCRLLLEKDAEELVEKYTALAETAHIAKLAQKIVCMHFGFQFGGLSGTKRVFTVPGALTSRIRKFYGLDRILHNSAAERENLSFEEFLKFSEDLEKKNRKNKKHHALDAMCLCFAPTGVDSRRAKLGEILPEKLRSEKAAREFFKSYLDKIMPVDVAPKKPRLEDGIYSKRIIGGKACMVKRNNLVDLAYKSGLKPVFDIPTLIKLVDKKEKGIINPQIRKMIGEFAATNPDESAWRKWCEEVRLPSKSGLGARIMRVLVYYGEADEYKDLSKDGCGAYRKGDGHKGQVIWESVDGKYYVGPVYVHASKAGVMAALNANPKKKRICGMFNSHCTVDVGDVYNDKGDFILPAGRYMVNTIRSDNQCVLTNADGEKRNPININYLMRTGMRRVDLSEL

SEQ ID NO: 121 - protein, 1073 aa, unidentified
  REGION 1..1073: note = Description of Unknown: uncultivated organism with predicted taxonomy: Verrucomicrobia
  REGION 1..1073: note = MG1-124 effector
MYTKEIIWGFDIGKGSLGEAVRVGNEFKHVQSLEIAPDFAETKTTAAARRAWRTREAHKARELWLEKCLSEAGIEVLLRRKVGVVDGAWKLVSKGDVRLEREFPPAGEDLCYNSIALRCKLLLGEKLESWQVFKALNSAIQNRGYDANIPWGDEDAADGGDGSSRKSSDSDASGDGESYAEKLAHYEREFDGILAELDNREKYEFPCFFKAAKMGLWSPENPDFVGVRIDNTAEKAKGYVVPREAVVREFRALVNAAALQYPNLKGKADFIMFGRACEPYASYNPELRKRFGLKRGAATDWTALGQKTPRFDNRVIDKCKLIPRLNVCKIKPLDECKTDDDFLSYTITLSLKLLNLRFFRGAGVDSLSFDEFLRAFELAKNSKFKLGKAALKKFFKTIGAEVMDESQSEIEQPRNGGRAAFSRPAMRILRDLIFSGKSPAEFYATAIENIANTDKNKGLVAGDLDFLKLMGDAPWSGIFIPDVGLSDFADASEAAREAQINKLIGSQNDPIVRHRLSFFYERIKSLEAKFGVPDKIVLEFVRDDFLGKKAKSDLNKAIKTRFDEKKKLAEDLDSKREEFGFKYASKKMLLKFELYKKQGGECVYTGNALPLSELESLEIEHIVPRSRGGPDAMYNYVLTDEKTNKEKGDRTPFEWRSTMGAEWESYCERVRKLTKELGAKRCKLLLSPNAAELVEKYTALAETAWISKLAQRICCLHFGFQFGGLAGAKKVWTVSGNTTAMIRGRYGLNRLLHDEESAEDLSLFDRICMEKKFEEKNRKNKKHHALDAMCLCFAPTSNAKKASAYKNILPEEITRNPESDEARKFFGKYLASVIPNKVAVEKPTLEQTIYAMRKGRIVKKCNVRDLAYTGINPKYNYSTLVKSIKSIVGEVPKRIISDFVLSNPKLSESEWEDWCKNNAAIPSKNGAPTKLLRVLCDAGNPEEYKDLSKDGCGAYRKGDSHKGQFIWKTKQGRYVVAPVYAHASKAKVLAALKNNPDCAEVCGFFRQNCLVEIPNDVVDKSGKMLLKAGVYRSNSIWASGHAQLTNSDGVSPNPISIQYLMPAGMKRIKLDTV

SEQ ID NO: 122 - protein, 1062 aa, unidentified
  REGION 1..1062: note = Description of Unknown: uncultivated organism with predicted taxonomy: Verrucomicrobia
  REGION 1..1062: note = MG1-125 effector
MNNNNTQIWGFDIGKASLGEAVWCGGKFKHVESLILDKDFAEIKTSAGRRRQARTRKAHKAREEWLEKCLEDCGIEILKRRKVGIVNGQWKLISKGDARLEKEFPAEGEEVCYNSIALRCKLILGEKLESWQIFKALNSSIQHRGYDENIPWKETQNESKKEDGDYFKKIVLYESEKEDILNRLPQECKREDFDFPCFFKAKKMGIWSEENPYKVGLRISNNAQKAKGYVIPRKYVENEFVRLVQMASLQYPKLKDKQMFILYGISETPYASRFKDARKKFGLKRGADSDWTALGQKIPRFDNRMIGKCKLIPRLNTCKIKSPDKIKSEEDLLHYDITLALKLLNLRFFKDSEICALSFEEFKKLFEIGKSNKYKISKTDLKKFLKSIGASVLSQDHSEIEAPRTSGRSSFSRPAMKILKELIFSGEPPSKFLKAKIDKIANTDPNKGIIREDLDFIRIMGDCPWNGIFIPDVETYKYASQTQESSEAQINKLIGSQNDPIVRHRLSFFYERIKALSEKFGVPDKIVLEFVREDFMGKQAKKDLSLSMKKRFEEKIDIAKKLDDIGYKGNKMLLKMELLQKQGFACLYTGEALQETDLPILEIEHIVPRSLGGPDAAYNYVLTSESTNKAKGNQTPYKWLSPDRDKWRAYTERVRARAAELGSKRCRLLLSENAEELINKYTALAETAWISKLAQRIVCMHFGFQFGGNTGEKRVFTVPGNITAKIRSAFGLNKILHNIDADKKNMSEFDIVKLDYELDKKNRKNKKHHALDAMCLCFAPTGPNAQKLGIGALLPPEIAAKAEEFFRGYIEKVVPNEVAPKKPKLEESIYSKRTINRKECIVRKFNLVDLAYKSGLKPVYDISAIEKLLEDKPKKIPPIINPTVRRIVRDFVSTNPNEDEWRNWCKTVRMPSKNRNGTRIIRVLVYVGTPEEYKDLSKDGCGAFRKGDSHKGQIIWMDKNGRYKVSPVYVHSSKSQTMESIKSNPDFIKIAGFFKSHCLVEIESPVVNGKRDVLLSPGTYMINTIMAAGMAILSDTNGVKSPAININYLMNAGMRRISIKYK

SEQ ID NO: 123 - protein, 1054 aa, unidentified
  REGION 1..1054: note = Description of Unknown: uncultivated organism with predicted taxonomy: unclassified Verrucomicrobia (miscellaneous)
  REGION 1..1054: note = MG1-126 effector
MEKEKNNHVWGFDIGKGSLGEAVRIGGDFKHIASVLLDPEFGEIKTAALARRQMRTRKAHKAREKWLEECLEGTGVEILKRREVGIVDGQWQLISKGDERLEREFPPSGEDVCYNSIALRCKLLLGEKLEGWQVFKALNSAIQKRGYDENIPWGEAEEKSSKKDDDDYAQKLSQYEKEKSELFESFADGEKYDFPCFFKAYKMGLWSPENPTRVEVRIDCRAQKAKSYVIARKYVEREFECLVEAAAKFFPKLKGRAKFILYGVSETPYASYYGNMRKKFGLKRGAESDWTALGQKVPRFDNRIIDKCRLIPRMNVCKIRPLNEARNEKDLLYYEVTLALKLLNLRFFRNSNIEQLTFEEFKKAFEIAAGAKYKMTKTAMKKFLKSISATALGDDYAEIEPPKESGRASFSRPAMEILKELIFSGMPPREFYGRKISEISNTDKNKGVVSSDLDFIKLMGDCPWGGIFIPDVQTYQFANAAFPDPDAQINKLIGSQNNPIVRHRLTFFFERIKFLESKYGVPDKVVLEFVRDDFMGEKEKKEMRIAMKKRAEEKMRIAKDLDEHGFKGGNLLLKMELYRKQNGICLYTGDALPLSELATLEIEHIVPRSRGGPDAQYNYVITREKTNKLKGDKTPYEWLSSDAKEWASYTDRVNACAKALGKKRCRLLLEKDAEELVEKYTALAETAHIAKLAQKIVCMHFGFQFGGLSGTKRVFTVPGALTSRIRKFYGLDRILHNSAAESENLSFEEFLKFSEDLEKKNRKNKKHHALDAMCLCFAPTGVDSRRAKLGEILPEKLRSEKAAREFFKSYLDKIMPVDVAPKKPRLEDGIYSKRIIGGKACMVKRNNLVDLVKPVFDIPTLIKLVDKKEKGIINPQIRKMIGEFAATNPDESAWRKWCEEVRLPSKSGLGARIMRVLVYYGEADEYKDLSKDGCGAYRKGDGHKGQVIWESVDGKYYVEPVYVHASKAGVMAALNANPKKKRICGMFNSHCTVDVGDVYNDKGDFILPAGRYMVNTIQKNGQCVLTNADGEKRNPININYLMRAGMRRVELSEL

SEQ ID NO: 124 - protein, 1073 aa, unidentified; identical to SEQ ID NO: 103
  REGION 1..1073: note = Description of Unknown: uncultivated organism with predicted taxonomy: Verrucomicrobia
  REGION 1..1073: note = MG1-127 effector

SEQ ID NO: 125 - protein, 1059 aa, unidentified
  REGION 1..1059: note = Description of Unknown: uncultivated organism with predicted taxonomy: unclassified Verrucomicrobia (miscellaneous)
  REGION 1..1059: note = MG1-128 effector
MEKEKNNHVWGFDIGKGSLGEAVRIGGDFKHIASVLLDPEFGEIKTAALARRQMRTRKAHKAREKWLEECLEGTGVEILKRREVGIVDGQWQLISKGDERLEREFPPSGEDVCYNSIALRCKLLLGEKLEGWQVFKALNSAIQKRGYDENIPWGEAEEKSSKKDDDDYAQKLSQYEKEKSELFESFADGEKYDFPCFFKAYKMGLWSPENPTRVEVRIDCRAQKAKSYVIARKYVEREFECLVEAAAKFFPKLKGRAKFILYGVSETPYASYYGNMRKKFGLKRGAESDWTALGQKVPRFDNRIIDKCRLIPRMNVCKIRPLNEARNEKDLLYYEVTLALKLLNLRFFRNSNIEQLTFEEFKKAFEIAAGAKYKMTKTAMKKFLKSISATALGDDYAEIEPPKESGRASFSRPAMEILKELIFSGMPPREFYGRKISEISNTDKNKGVVSSDLDFIKLMGDCPWGGIFIPDVQTYQFANAAFPDPDAQINKLIGSQNNPIVRHRLTFFFERIKFLESKYGVPDKVVLEFVRDDFMGEKEKKEMRIAMKKRAEEKMRIAKDLDEHGFKGGNLLLKMELYRKQNGICLYTGDALPLSELATLEIEHIVPRSRGGPDAQYNYVITREKTNKLKGDKTPYEWLSSDAKEWASYTDRVNACAKALGKKRCRLLLEKDAEELVEKYTALAETAHIAKLAQKIVCMHFGFQFGGLSGTKRVFTVPGALTSRIRKFYGLDRILHNSASESENLSFEEFLKFSEDLEKKNRKNKKHHALDAMCLCFAPTGVDSRRAKLGEILPEKLRSEKAAREFFKSYLDKIMPVDVAPKKPRLEDGIYSKRIIGGKACMVKRNNLVDLAYKSGLKPVFDIPTLIKLVDKKEKGIINPQIRKMIGEFAATNPDESAWRKWCEEVRLQSKSGLGARVMRVLVYYGEADEYKDLSKDGCGAYRKGDGHKGQVIWESVDGKYYVEPVYVHASKAGVMAALNANPKKKRICGMFNSHCTVDVGDVYNDKGDFILPAGRYMVNTILTTGRCVLTNADGEKRNPININYLMRAGMRRVELSEL

SEQ ID NO: 126 - protein, 1073 aa, unidentified
  REGION 1..1073: note = Description of Unknown: uncultivated organism with predicted taxonomy: Verrucomicrobia
  REGION 1..1073: note = MG1-129 effector
MYTKEIIWGFDIGKGSLGEAVRVGNEFKHVQSLEIAPDFAETKTTAAARRAWRTREAHKARELWLEKCLSEAGIEVLLRRKVGVVDGAWKLVSKGDVRLEREFPPAGEDLCYNSIALRCKLLLGEKLESWQVFKALNSAIQNRGYDANIPWGDEDAADGGDGSSRKSSDSDASGDGESYAEKLAHYEREFDGILAELDNREKYEFPCFFKAAKMGLWSPENPDFVGVRIDNTAEKAKGYVVPREAVVREFRALVNAAALQYPNLKGKADFIMFGRACEPYASYNPELRKRFGLKRGAATDWTALGQKTPRFDNRIIDKCKLIPRLNVCRIKPLDKCKTDDDFLSYTITLSLKLLNLRFFRGAGVDSLSFDEFLRAFELAKNSKFKLGKAALKKFFKTIGAEVMDESQSEIEQPRNGGRAAFSRPAMRILRDLIFSGKSPAEFYAAAIENIANTDKNKGLVAGDLDFLKLMGDAPWSGIFIPDIGLSDFADASEAAREAQINKLIGSQNDPIVRHRLSFFYERIKSLEAKFGVPDKIVLEFVRDDFLGKKAKSDLNKAIKTRFDEKKKLAEDLDSKREEFGFKYASKKMLLKFELYKKQGGECVYTGNALPLSELESLEIEHIVPRSRGGPDAMYNYVLTDEKTNKEKGDRTPFEWRSTMGAEWESYCERVRKLTKELGAKRCKLLLSPNAAELVEKYTALAETAWISKLAQRICCLHFGFQFGGLAGAKKVWTVSGNTTAMIRGRYALNRLLHDEESAEDLSLFDRICMEKKFEEKNRKNKKHHALDAMCLCFAPTSNAKKASAYKNILPEEITRNPESDEARKFFGKYLANVIPNKVAVEKPTLEQTIYAMRKGRIVKKCNVRDLAYTGINPKYNYSTLVKSIKSIVGEVPKRIISDFVLSNPKLSESEWEDWCKNNAAIPSKNGAPTKLLRVLCDAGNPEEYKDLSKDGCGAYRKGDSHKGQFIWKTKQGRYVVAPVYAHASKAKVLAALKNNPDCAEVCGFFRQNCLVEIPNDVVDKSGKMLLKAGVYRSNSIWASGHAQLTNSDGVSPNPISIQYLMPAGMKRIKLDTV

SEQ ID NO: 127 - protein, 1059 aa, unidentified
  REGION 1..1059: note = Description of Unknown: uncultivated organism with predicted taxonomy: unclassified Verrucomicrobia (miscellaneous)
  REGION 1..1059: note = MG1-130 effector
MEKEKNNHVWGFDIGKGSLGEAVRIGGDFKHIASVLLDPEFGEIKTAALARRQMRTRKAHKAREKWLEECLEGTGVEILKRREVGIVDGQWQLISKGDERLEREFPPSGEDVCYNSIALRCKLLLGEKLEGWQVFKALNSAIQKRGYDENIPWGEAEEKSSKKDDDDYAQKLSQYEKEKPELFESFADGEKYDFPCFFKAYKMGLWSPENPTRVEVRIDCRAQKAKSYVIARKYVEREFECLVEAAAKFFPKLKGRAKFILYGVSETPYASYYGNMRKKFGLKRGAESDWTALGQKVPRFDNRIIDKCRFIPRMNVCKIRPLNEARNEKDLLYYEVTLALKLLNLRFFRNSNIEQLTFEEFKKAFEIAAGAKYKMTKTAMKKFLKSISATALGDDYAEIEPPKESGRASFSRPAMEILKELIFSGMPPREFYGRKISEISNTDKNKGVVSSDLDFIKLMGDCPWGGIFIPDVQTYQFANAAFPDPDAQINKLIGSQNNPIVRHRLTFFFERIKFLESKYGVPDKVVLEFVRDDFMGEKEKKEMRIAMKKRAEEKMRIAKDLDEHGFKGGNLLLKMELYRKQNGICLYTGDALPLSELATLEIEHIVPRSRGGPDAQYNYVITREKTNKLKGDKTPYEWLSSDAKEWASYTDRVNACAKALGKKRCRLLLEKDAEELVEKYTALAETAHIAKLAQKIVCMHFGFQFGGLSGTKRVFTVPGALTSRIRKFYGLDRILHNSAAESENLSFEEFLKFSEDLEKKNRKNKKHHALDAMCLCFAPTGVDSRRAKLGEILPEKLRSEKAAREFFKSYLDKIMPVDVAPKKPRLEDGIYSKRIIGGKACMVKRNNLVDLAYKSGLKPVFDIPTLIKLVDKKEKGIINPQIRKMIGEFAATNPNESAWRKWCEEVRLPSKSGLGARVMRVLVYYGEADEYKDLSKDGCGAYRKGDEHKGQVIWESVDGKYYVEPVYVHASKAGVMAALNANPKKKRICGMFNSHCTVDVGDVYNDKGDFILPAGRYMVNTIRSDNQCVLTNADGEKRNPININYLMRAGMRRVDLSEL

SEQ ID NO: 128 - protein, 1077 aa, unidentified; identical to SEQ ID NO: 89
  REGION 1..1077: note = Description of Unknown: uncultivated organism with predicted taxonomy: unclassified Verrucomicrobia (miscellaneous)
  REGION 1..1077: note = MG1-131 effector

SEQ ID NO: 129 - protein, 1059 aa, unidentified
  REGION 1..1059: note = Description of Unknown: uncultivated organism with predicted taxonomy: unclassified Verrucomicrobia (miscellaneous)
  REGION 1..1059: note = MG1-132 effector
MEKEKNNHVWGFDIGKGSLGEAVRIGGDFKHIASVLLDPEFGEIKTAALARRQMRTRKAHKAREKWLEECLEGTGVEILKRREVGIVDGQWQLISKGDERLEREFPPSGEDVCYNSIALRCKLLLGEKLEGWQVFKALNSAIQKRGYDENIPWGEAEEKSSKKDDDDYAQKLSQYEKEKSELFESFADGEKYDFPCFFKAYKMGLWSPENPTRVEVRIDCRAQKAKSYVIARKYVEREFECLVEAAAKFFPKLKGRAKFILYGVSETPYASYYGNMRKKFGLKRGAESDWTALGQKVPRFDNRIIDKCRFIPRMNVCKIRPLNEARNEKDLLYYEVTLALKLLNLRFFRNSNIEQLTFEEFKKAFEIAAGAKYKMTKTAMKKFLKSISATALGDDYAEIEPPKESGRASFSRPAMEILKELIFSGMPPREFYGRKISEISNTDKNKGVVSSDLDFIKLMGDCPWGGIFIPDVQTYQFANAAFPDPDAQINKLIGSQNNPIVRHRLTFFFERIKFLESKYGVPDKVVLEFVRDDFMGEKEKKEMRIAMKKRAEEKMRIAKDLDEHGFKGGNLLLKMELYRKQNGICLYTGDALPLSELATLEIEHIVPRSRGGPDAQYNYVITREKTNKLKGDKTPYEWISSDAKEWASYTDRVNACAKALGKKRCRLLLEKDAEELVEKYTALAETAHIAKLAQKIVCMHFGFQFGGLSGTKRVFTVPGALTSRIRKFYGLDRILHNSAAESENLSFEEFLKFSEDLEKKNRKNKKHHALDAMCLCFAPTGVDSRRAKLGEILPEKLRSEKAAREFFKSYLDKIMPVDVAPKKPRLEDGIYSKRIIGGKACMVKRNNLVDLAYKSGLKPVFDIPTLIKLVDKKEKGIINPQIRKMIGEFAATNPDESAWRKWCEEVRLPSKSGLGARVMRVLVYYGEADEYKDLSKDGYGAYRKGDGHKGQVIWESVDGKYYVEPVYVHASKAGVMAALNANPKKKRICGMFNSHCTVDVGDVYNDKGDFILPAGRYMVNTIRSDNQCVLTNADGEKRNPININYLMRAGMRRVDLSEL

SEQ ID NO: 130 - protein, 1062 aa, unidentified
  REGION 1..1062: note = Description of Unknown: uncultivated organism with predicted taxonomy: Coraliomargarita sp. CAG:312
  REGION 1..1062: note = MG1-133 effector
MNNNNTQIWGFDIGKASLGEAVWCGGKFKHVESLILDKDFAEIKTSAGRRRQARTRKAHKAREEWLEKCLEDCGIEILKRRKVGIVNGQWKLISKGDARLEKEFPAEGEEVCYNSIALRCKLILGEKLESWQIFKALNSSIQHRGYDENIPWKETQNESKKEDGDYFKKIVLYESEKEDILNRLPQECKREDFDFPCFFKAKKMGIWSEENPYKVGLRISNNAQKAKGYVIPRKYVENEFVRLVQMASLQYPKLKDKQMFILYGISETPYASRLKDARKKFGLKRGADSDWTALGQKIPRFDNRMIGKCKLIPRLNTCKIKSPEKIKSEEDLLHYDITLALKLLNLRFFKDSEICALSFEEFKKLFEIGKSNKYKISKTDLKKFLKSIGASVLSQDHSEIEAPRTSGRSSFSRPAMKILKELIFSGEPPSKFLKAKIDKIANTDPNKGIIREDLDFIRIMGDCPWNGIFIPDVETYKYASQTQESSEAQINKLIGSQNDPIVRHRLSFFYERIKALSEKFGVPDKIVLEFVREDFMGKQAKKDLSLSMKKRFEEKIDIAKKLDDIGYKGNKMLLKMELLQKQGFACLYTGEALQETDLPILEIEHIVPRSLGGPDAAYNYVLTSESTNKAKGNQTPYKWLSPDRDKWRAYTERVRARAAELGSKRCRLLLSENAEELINKYTALAETAWISKLAQRIVCMHFGFQFGGNTGEKRVFTVPGNITAKIRSAFGLNKILHNIDADKKNMSEFDIVKLDYELDKKNRKNKKHHALDAMCLCFAPTGPNAQKLGIGALLPPEIAAKAEEFFRGYIEKVVPNEVAPKKPKLEESIYSKRTINRKECIVRKFNLVDLAYKSGLKPVYDISAIEKLLEDKPKKIPPIINPTVRRIVRDFVSTNPNEDEWRNWCKTVRMPSKNRNGTRIIRVLVYVGTPEEYKDLSKDGCGAFRKGDSHKGQIIWMDKNGRYKVSPVYVHSSKSQTMESIKSNPDFIKIAGFFKSHCLVEIESPVVNGKGDVLLSPGTYMINTIMAAGMAILSDTNGVKSPAININYLMNAGMRRISIKYK

SEQ ID NO: 131 - protein, 1061 aa, unidentified
  REGION 1..1061: note = Description of Unknown: uncultivated organism with predicted taxonomy: unclassified Verrucomicrobia (miscellaneous)
  REGION 1..1061: note = MG1-134 effector
MKVMEDEGGNHIWGFDIGKGSLGEAVLDGSEFKHVASLLLDADFGEIKTAAGLRRQMRTRKAHKAREKWLESCLSGFGMETLKRREVGIVNGQWTLISKGDERLEREFPPDGENICYNSIALRCKLLLGEKLEGWQIFKALNSAIQNRGYDENIPWKESDASPSKKEDGDYAQKLSQYSREKSELFESFEGGEKYDYPCFFKACKMGLWSPDNPERVEVRIGSDAQKAKGYVIPRKDVEREFERLVEAASKWYPAMKGKAMYIMYGIAETPYASFKPLLRKKFDLKRGAESDWTALGQKIPRFDNRIIDKCRLIPRLNVCKIRPLSEIRGEADLLHYEITLSLKLLNLRFFRNSNVESLSFGEFKAAFEIAKGAKYKMGKAALKKFLKSISASVLSEDQSEIEAPRESGRAAFSRPAMLLLKELIFSGMTPAEFYAKKSGEISNADPNKGIVASDLDFIKLMGNCGWSGIFIPDVDTFHFANKGAEPAKLINELIGSQNNPIVRHRLSFFYERIKFLESKFGIPDKVVLEFVREDFMGKEQKKRMQIEMKKRASEKMLIAKKLDEAGYKGGNLLLKMELLEKQGGVCLYTGEPLLPSELGVLEIEHIVPRSRGGPDAQYNYVLTREKTNKEKADRTPFEWLSSDPVKWAGYSDRVKARAGQLGRKRCELLLEKNAEELVEKYTALAETAHISKLAQKIVCLHFGFQFGGLSGTKRVFTVPGALTARIRTFYGLNKILHNEDLAHETLSFEGFLKRGEELDKKNRANKKHHALDAMCLCFAPTGVNSKRARVDMLLPPKIRSEKEAELFFRKYLDKLIPVDVAPKKPKLEDGIYSMRMVGGKKIMARRVNLVDLAYKSGLKPVYDVSVLIKLLDKKERGIINPQIRKLVADFARTNPSEDEWKKWCGECRLPSKNGLGTRVIRVLLNYGEPAEYKDLSKDGRGAFRRGDGHKGQIVWESTDGKYCVLPIYVHASKAKLLAELCANPKKKRICGIFTSHCMVKVGNTYNNKGELLLPEGVYMLNTIRTDGWIQLTSANGDKSKPININYLMKAGMKKVPVKDL

SEQ ID NO: 132 - protein, 1058 aa, unidentified
  REGION 1..1058: note = Description of Unknown: uncultivated organism with predicted taxonomy: unclassified Verrucomicrobia (miscellaneous)
  REGION 1..1058: note = MG1-135 effector
MEKEKNNHVWGFDIGKGSLGEAVRIGGDFKHIASVLLDPEFGEIKTAALVRRQMRTRKAHKAREKGLEECLEGTGVEILKRREVGIVDGQWQLISKGDERLEREFPPSGEDVCYNSIALRCKLLLGEKLEGWQVFKALNSAIQKRGYDENIPWGEAEEKSSKKDDDDYAQKLSQYEKEKSELFESFADGEKYDFPCFFKAYKMGLWSPENPTRVEVRIDCRAQKAKSYVIARKYVEREFECLVEAAAKFFPKLKGRAKFILYGVSETPYASYYGNMRKKFGLKRGAESDWTALGQKVPRFDNRIIDKCRLIPRMNVCKIRPLNEARNEKDLLYYEVTLALKLLNLRFFRNSNIEQLTFEEFKKAFEIAAGAKYKMTKTAMKKFLKSISATALGDDYAEIEPPKESGRASFSRPAMEILKELIFSGMPPREFYGRKISEISNTDKNKGVVSSDLDFIKLMGDCPWGGIFIPDVQTYQFANAAFPDPDAQINKLIGSQNNPIVRHRLTFFFERIKFLESKYAVPDKVVLEFVRDDFMGEKEKKEMRIAMKKRAEEKMRIAKDLDEHGFKGGNLLLKMELYRKQNGICLYTGDALPLSELATLEIEHIVPRSRGGPDAQYNYVITREKTNKLKGDKTPYEWLSSDAKEWASYTDRVNACAKALGKKRCRLLLEKDAEELVEKYTALAETAHIAKLAQKIVCMHFGFQFGGLSGTKRVFTVPGALTSRIRKFYGLDRILHNSAAESENLSFEEFLKFSEDLEKKNRKNKKHHALDAMCLCFAPTGVDSGRAKLGEILPEKLRSEKAAREFFKSYLDKIMPVDVAPKKPRLEDGIYSKRIIGGKACMVKRNNLVDLAYKSGLKPVFDIPTLIKLVDKKEKGIINPQIRKMIGEFAATNPDESAWRKWCEEVRLPSKSGLGARVMRVLVYYGEADEYKDLSKDGCGAYRKGDGHKGQVIWESVDGKYYVEPVYVHASKAGAMAALNANPKKKRICGMFNSHCTVDVGDVYNDNGDFILPAGRYMVNTIKKNGQCVLSDANNEKNTININYLMRAGMRRIELSEL

SEQ ID NO: 133 - protein, 1073 aa, unidentified
  REGION 1..1073: note = Description of Unknown: uncultivated organism with predicted taxonomy: Verrucomicrobia
  REGION 1..1073: note = MG1-136 effector
MYTKEIIWGFDIGKGSLGEAVRVGNEFKHVQSLEIAPDFAETKTTAAARRAWRTREAHKARELWLEKCLSEAGIEVLLRRKVGVVDGAWKLVSKGDVRLEREFPPAGEDLCYNSIALRCKLLLGEKLESWQVFKALNSAIQNRGYDANIPWGDEDAADGGDGSSRKSSDSDASGDGESYAEKLAHYEREFDGILAELDNREKYEFPCFFKAAKMGLWSPENPDFVGVRIDNTAEKAKGYVMPREAVVREFRALVNAAALQYPNLKGKADFIMFGRACEPYASYNPELRKRFGLKRGAATDWTALGQKTPRFDNRVIDKCKLIPRLNVCKIKPLDECKTDDDFLSYTITLSLKLLNLRFFRGAGVDSLSFDEFLRAFELAKNSKFKLGKAALKKFFKTIGAEVMDESQSEIEQPRNGGRAAFSRPAMRILRDLIFSGKSPAEFYATAIENIANTDKNKGLVAGDLDFLKLMGDAPWSGIFIPDVGLSDFADASAAAREAQINKLIGSQNDPIVRHRLSFFYERIKSLEAKFGVPDKIVLEFVRDDFLGKKAKSDLNKAIKTRFDEKKKLAEDLDSKREEFGFKYASKKMLLKFELYKKQGGECVYTGNALPLSELESLEIEHIVPRSRGGPDAMYNYVLTDEKTNKEKGDRTPFEWRSTMGAEWESYCERVRKLTKELGAKRCKLLLSPNAAELVEKYTALAETAWISKLAQRICCLHFGFQFGGLAGAKKVWTVSGNTTAMIRGRYGLNRLLHDEESAEDLSLFDRICMEKKFEEKNRKNKKHHALDAMCLCFAPTSNAKKASAYKNILPEEITRNPESDEARKFFGKYLASVIPNKVAVKKSALEQTIYALRKGRIVKKCNVRDLAYTGINPKYNYSTLVKSIKSIVGEVPKRIVSDFVLSNSDLSESEWEDWCKNNAAIPSKNGAPTKLLRVLCDAGNPEEYKDLSKDGCGAYRKGDSHKGQFIWKTKQGRYVVAPVYAHASKAKVLAALKNNPDCAEVCGFFRQNCLVEIPNDVIDKSGKMLLKSGIYKSNTIMSDGRAKFTNSDGISTNPISIQYLMPAGMKRIKLDTV

SEQ ID NO: 134 - protein, 1059 aa, unidentified
  REGION 1..1059: note = Description of Unknown: uncultivated organism with predicted taxonomy: unclassified Verrucomicrobia (miscellaneous)
  REGION 1..1059: note = MG1-137 effector
MEKEKNNHVWGFDIGKGSLGEAVRIGGDFKHIASVLLDSEFGEIKTAALVRRQMRTRKAHKAREKWLEECLEGTGVEILKRREVGIVDGQWQLISKGDERLEREFPPSGEDVCYNSIALRCKLLLGEKLEGWQVFKALNSAIQKRGYDENIPWGEAEEKSSKKDDDDYAQKLSQYEKEKSELFESFADGEKYDFPCFFKAYKIGLWSPENPTRVEVRIDCRAQKAKSYVIARKYVEREFECLVEAAAKFFPKLKGRAKFILYGVSETPYASYYGNMRKKFGLKRGAESDWTALGQKVPRFDNRIIDKCRLIPRMNVCKIRPLNEARNEKDLLYYEVTLALKLLNLRFFRNSNIEQLTFEEFKKAFEIAAGAKYKMTKTAMKKFLKSISATALGDDYAEIEPPKESGRASFSRPAMEILKELIFSGMPPREFYGRKISEISNTDKNKGVVSSDLDFIKLMGDCPWGGIFIPDVQTYQFANAAFPDPDAQINKLIGSQNNPIVRHRLTFFFERIKFLESKYGVPDKVVLEFVRDDFMGEKEKKEMRIAMKKRAEEKMRIAKDLDEHGFKGGNLLLKMELYRKQNGICLYTGDALPLSELATLEIEHIVPRSRGGPDAQYNYVITREKTNKLKGDKTPYEWLSSDAKEWASYTDRVNACAKALGKKRCRLLLEKDAEELVEKYTALAETAHIAKLAQKIVCMHFGFQFGGLSGTKRVFTVPGALTSRIRKFYGLDRILHNSAAESENLSFEEFLKFSEDLEKKNRKNKKHHALDAMCLCFAPTGVDSRRAKLGEILPEKLRSEKAAREFFKSYLDKIMPVDVAPKKPRLEDGIYSKRIIGGKACMVKRNNLVDLAYKSGLKPVFDIPTLIKLVDKKEKGIINPQIRKMIGEFAATNPDESAWRKWCEEVRLPSKSGLGARVMRVLVYYGEADEYKDLSKDGCGAYRKGDGHKGQVIWESVDGKYYVEPVYVHASKAGVMAALNANPKKKRICGMFNSHCTVDVGDVYNDKGDFILPAGRYMVNTIRSDNQCVLTNADGEKRNPININYLMRAGMRRVDLSEL

SEQ ID NO: 135 - protein, 1059 aa, unidentified; identical to SEQ ID NO: 86
  REGION 1..1059: note = Description of Unknown: uncultivated organism with predicted taxonomy: unclassified Verrucomicrobia (miscellaneous)
  REGION 1..1059: note = MG1-138 effector

SEQ ID NO: 136 - protein, 1059 aa, unidentified
  REGION 1..1059: note = Description of Unknown: uncultivated organism with predicted taxonomy: unclassified Verrucomicrobia (miscellaneous)
  REGION 1..1059: note = MG1-139 effector
MEKEKNNHVWGFDIGKGSLGEAVRIGGDFKHIASVLLDPEFGEIKTAALVRRQMRTRKAHKAREKWLEECLEGTGVEILKRREVGIVDGQWQLISKGDERLEREFPPSGEDVCYNSIALRCKLLLGEKLEGWQVFKALNSAIQKRGYDENIPWGEAEEKSSKKDDDDYAQKLSQYEKEKSELFESFADGEKYDFPCFFKAYKMGLWSPENPTRVEVRIDCRAQKAKSYVIARKYVEREFECLVEAAAKFFPKLKGRAKFILYGVSETPYASYYGNMRKKFGLKRGAESDWTALGQKVPRFDNRIIDKCRFIPRMNVCKIRPLNEARNEKDLLYYEVTLALKLLNLRFFRNSNIEQLTFEEFKKAFEIAAGAKYKMTKTAMKKFLKSISATALGDDYAEIEPPKESGRASFSRPAMEILKELIFSGMPPREFYGRKISEISNTDKNKGVVSSDLDFIKLMGDCPWGGIFIPDVQTYQFANAAFPDPDAQINKLIGSQNNPIVRHRLTFFFERIKFLESKYGVPDKVVLEFVRDDFMGEKEKKEMRIAMKKRAEEKMRIAKDLDEHGFKGGNLLLKMELYRKQNGICLYTGDALPLSELATLEIEHIVPRSRGGPDAQYNYVITREKTNKLKGDKTPYEWLSSDAKEWASYTDRVNACAKALGKKRCRLLLEKDAEELVEKYTALAETAHIAKLAQKIVCMHFGFQFGGLSGTKRVFTVPGALTSRIRKFYGLDRILHNSAAESENLSFEEFLKFSEDLEKKNRKNKKHHALDAMCLCFAPTGVDSRRAKLGEILPEKLRSEKAAREFFKSYLDKIMPVDVAPKKPRLEDGIYSKRIIGGKACMVKRNNLVDLAYKSGLKPVFDIPTLIKLVDKKEKGIINPQIRKMIGEFAATNPDESAWRKWCEEVRLPSKSGLGARIMRVLVYYGEADEYKDLSKDGCGAYRKGDGHKGQVIWESVDGKYYVEPVYVHASKAGVMAALNANPKKKRICGMFNSHCTVDVGDVYNDKGDFILPAGRYMVNTILTTGRCVLTNADGEKRNPININYLMRAGMRRVELSEL

SEQ ID NO: 137 - protein, 1059 aa, unidentified
  REGION 1..1059: note = Description of Unknown: uncultivated organism with predicted taxonomy: unclassified Verrucomicrobia (miscellaneous)
  REGION 1..1059: note = MG1-140 effector
MEKEKNNHVWGFDIGKGSLGEAVRIGGDFKHIASVLLDPEFGEIKTAALARRQMRTRKAHKAREKWLEECLEGTGVEILKRREVGIVDGQWQLISKGDERLEREFPPSGEDVCYNSIALRCKLLLGEKLEGWQVFKALNSAIQKRGYDENIPWGEAEEKSSKKDDDDYAQKLSQYEKEKSELFESFADGEKYDFPCFFKAYKMGLWSPENPTRVEVRIDCRAQKAKSYVIARKYVEREFECLVEAAAKFFPKLKGRAKFILYGVSETPYASYYGNMRKKFGLKRGAESDWTALGQKVPRFDNRIIDKCRFIPRMNVCKIRPLNEARNEKDLLYYEVTLALKLLNLRFFRNSNIEQLTFEEFKKAFEIAAGAKYKMTKTAMKKFLKSISATALGDDYAEIEPPKESGRASFSRPAMEILKELIFSGMPPREFYGRKISEISNTDKNMGVVSSDLDFIKLMGDCPWGGIFIPDVQTYQFANAAFPDPDAQINKLIGSQNNPIVRHRLTFFFERIKFLESKYGVPDKVVLEFVRDDFMGEKEKKEMRIAMKKRAEEKMRIAKDLDEHGFKGGNLLLKMELYRKQNGICLYTGDALPLSELATLEIEHIVPRSRGGPDAQYNYVITREKTNKLKGDKTPYEWLSSDAKEWASYTDRVNACAKALGKKRCRLLLEKDAEELVEKYTALAETAHIAKLAQKIVCMHFGFQFGGLSGTKRVFTVPGALTSRIRKFYGLDRILHNSAAESENLSFEEFLKFSEDLEKKNRKNKKHHALDAMCLCFAPTGVDSRRAKLGEILPEKLRSEKAAREFFKSYLDKIMPVDVAPKKPRLEDGIYSKRIIGGKACMVKRNNLVDLAYKSGLKPVFDIPTLIKLVDKKEKGIINPQIRKMIGEFAATNPDESAWRKWCEEVRLPSKSGLGARIMRVLVYYGEADEYKDLSKDGCGAYRKGDGHKGQVIWESVDGKYYVEPVYVHASKAGVMAALNANPKKKRICGMFNSHCAVDVGDVYNDKGDFILPAGRYMVNTIRSDNQCVLTNADGEKRNPININYLMRAGMRRVDLSEL

SEQ ID NO: 138 - protein, 1073 aa, unidentified
  REGION 1..1073: note = Description of Unknown: uncultivated organism with predicted taxonomy: Verrucomicrobia
  REGION 1..1073: note = MG1-141 effector
MYTKEIIWGFDIGKGSLGEAVRVGNEFKHVQSLEIAPDFAETKTTAAARRAWRTREAHKARELWLEKCLSEAGIEVLLRRKVGVVDGAWKLVSKGDVRLEREFPPAGEDLCYNSIALRCKLLLGEKLESWQVFKALNSAIQNRGYDANIPWGDEDAADGGDGSSRKSSDSDASGDGESYAEKLAHYEREFDGILAELDNREKYEFPCFFKAAKMGLWSPENPDFVGVRIDNTAEKAKGYVVPREAVVREFRALVNAAALQYPNLKGKADFIMFGRACEPYASYNPELRKRFGLKRGAATDWTALGQKTPRFDNRVIDKCKLIPRLNVCRIKPLDECKTDDDFLSYTITLSLKLLNLRFFRGAGMDSLSFDEFLRAFELAKNSKFKLGKAALKKFFKTIGAEVMDESQSEIEQPRNGGRAAFSRPAMRILRDLIFSGKSPADFYATAIENIANTDKNKGLVAGDLDFLKLMGDAPWSGIFIPDVGLSDFADASEAARAAQINKLIGSQNDPIVRHRLSFFYERIKSLEAKFGVPDKIVLEFVRDDFLGKKAKSDLNKAIKTRFDEKKKLAEELDSNRAEFGPKYASKKMLLKYELYKKQGGKCVYTGNALPLSELENLEIEHIVPRSRGGPDAMYNYVLTDEKTNKEKGDRTPFEWRSTMGAEWESYCARVRELTKKLGAKRCKLLLAPNAAELVEKYTALAETAWISKLAQRICCLHFGFQFGGLAGAKKVWTVSGNTTSMIRGRYGLNRLLHDEESAEDLSLFDRICMEKKFEEKNRKNKKHHALDAMCLCFAPTSNAKKASAYKNILPEEITRNPESDEARKFFGKYLANVIPNKVAVEKPTLEQTIYAMRNGRIVKKCNVRDLAYTGINPKYNYSTLVKSIKSIVGEVPKRIISDFVLSNSDLSESEWEDWCKNEAAIPSKNGAPTKLLRVLCDAGNPEEYKDLSKDGCGAYRKGDSHKGQFIWKTKQGRYVVAPVYAHASKAKVLAALKNNPDCAEVCGFFRQNCLVEIPNDVVDKSGKMLLKAGVYRSNSVRSNGQVAITNSDGISPNPISIQYLMPAGMKRIKLDTV

SEQ ID NO: 139 - protein, 1060 aa, unidentified
  REGION 1..1060: note = Description of Unknown: uncultivated organism with predicted taxonomy: unclassified Verrucomicrobia (miscellaneous)
  REGION 1..1060: note = MG1-142 effector
MKVMEGEGGNHIWGFDIGKGSLGEAVLDGSEFKHVASLLLDADFGEIKTAAGLRRQMRTRKAHKAREKWLESCLSGFGMETLKRREVGIVNGQWTLISKGDERLEREFPPDGENICYNSIALRCKLLLGEKLEGWQIFKALNSAIQNRGYENIPWNESDASPSKKEDGDYAQKLSQYSREKSELFESFEGGEKYDYPCFFKACKMGLWSPDNPERVEVRIGSDAQKAKGYVIPRKDVEREFERLVEAASKWYPAMKGKAMYIMYGIAETPYASFKPLLRKKFDLKRGAESDWTALGQKIPRFDNRIIDKCRLIPRLNVCKIRPLSEIRGEADLLHYEITLSLKLLNLRFFRNSNVESLSFGEFKAAFEIAKGAKYKMGKAALKKFLKSISASVLSEDQSEIEAPRESGRAAFSRPAMLLLKELIFSGMTPAEFYAKKSGEISNADPNKGIVASDLDFIKLMGNCGWSGIFIPDVDTFHFANKGAEPAKLINELIGSQNNPIVRHRLSFFYERIKFLESKFGIPDKVVLEFVREDFMGKEQKKRMQIEMKKRASEKMLIAKKLDEAGYKGGNLLLKMELFEKQGGVCLYTGEPLLPSELGILEIEHIVPRSRGGPDAQYNYVLTREKTNKEKADRTPFEWLSSDPVRWAGYSDRVKARAGQLGRKRCELLLEKNAEELVEKYTALAETAHISKLAQKIVCLHFGFQFGGLSGTKRVFTVPGALTARIRTFYGLNKILHNEDLAHETLSFEGFLKRGEELDKKNRANKKHHALDAMCLCFAPTGVNSKRARVDMLLPPKIRSEKEAELFFRKYLDKLIPVDVAPKKPKLEDGIYSMRMVGGKKIMARRVNLVDLAYKSGLKPVYDVSVLIKLLDKKERGIINPQIRKLVADFARTNPSEDEWKKWCGECRLPSKNGLGTRVIRVLLNYGEPAEYKDLSKDGCGAFRRGDGHKGQIVWESTDGKYYVLPIYVHASKAKLLAELCANPKKKRICGIFTSHCMVKVGNTYNNKGELLLPEGVYMVNTIRTDGWIQLTSANGDKSKPININYLMKAGMKKVLVKDL

SEQ ID NO: 140 - protein, 905 aa, unidentified
  REGION 1..905: note = Description of Unknown: uncultivated organism with predicted taxonomy: Verrucomicrobia bacterium
  REGION 1..905: note = MG1-143 effector
KESDVSLPKKDDDDYAKKLSQYSREKGELLESFEDGEKYDYPCFFKAYKMGLWSPENPERVEIRIGNDAQKAKGYVIPRKDVEREFESLVEAASKWHPAMKGKAMYIMYGIAETPYASFKPAFRKKFDLKRGAESDWTALGQKIPRFDNRIIDKCRLIPRLNVCKIRPLSEARGEGDLLHYEITLSLKLLNLRFFRNSNVESLSFEEFKAAFEIAKSAKYKMGKAALKKFLKSISASVLSEDQSEIEAPRESGRASFSRPAMLLLKELIFSGMPPAEFYAKKAGEISNADPNKGIVASDLDFIKLMGNCGWNGIFIPDVETYRFANNGADSAKLINGLIGSQNNPIVRHRLAFFYERIKFLESKFGVPDKVVLEFVREDFMGKEQKKRMQIEMKKRASEKMLIAKKLDEAGYKGGNLLMKMELLEKQGGICLYTGEPLLPSELGVLEIEHIVPRSRGGPDAQYNYVLTREKTNKEKADRTPFEWLSSDPVKWAGYSDRVKARAGQLGRKRCELLLEKNAEELVEKYTALAETAHISKLAQKIVCLHFGFQFGGLGGTKRVFTVPGALTARIRSFYGLNKILHNEDLAKDALSYEEVLKRGEELDKKNRKNKKHHALDAMCLCFAPTGVNSKRARIDMLLPPDIRGERKAELFFRKYLDRLIPVDVAPKKPRLEDGIYSMRAVGGKKFMARRVNLVDLAYKSGLKPVYDISALIKLLDKKEKGIINAQIRKLVADFARTNPSEDEWRKWCGECRLPSKNGIGTRVIRVLLNYGEPAEYKDLSKDGRGAFRRGDGHKGQIVWESTDGKYYVVPIYVHASKAKLLAELDANPKKKRVCDIFTSHCMVKVGNAYNDKGELLLSEGVYMVNTIRTDGWIQLTSANGDKSKPININYLMKAGMRKVSVKDL

SEQ ID NO: 141 - protein, 1025 aa, unidentified
  REGION 1..1025: note = Description of Unknown: uncultivated organism with predicted taxonomy: unclassified Verrucomicrobia (miscellaneous)
  REGION 1..1025: note = MG1-144 effector
LLDADFGEIKTAAGLRRQMRTRKAHKAREKWLESCLSGFGMETLKRREVGIVNGQWTLISKGDERLEREFPPDGENICYNSIALRCKLLLGEKLEGWQIFKALNSAIQNRGYDENIPWKESDASPSKKEDGDYAQKLSQYSKEKSELFESFEGGEKYDYPCFFKACKMGLWSPDNPERVEVRIGSDAQKAKGYVIPRKDVEREFERLVEAASKWYPAMKGKAMYIMYGIAETPYASFKPLLRKKFDLKRGAESDWTALGQKIPRFDNRIIDKCRLIPRLNVCKIRPLSEIRGEADLLHYEITLSLKLLNLRFFRNSNVESLSFGEFKAAFEIAKGAKYKMGKAALKKFLKSISASVLSEDQSEIEAPRESGRAAFSRPAMLLLKELIFSGMTPAEFYAKKSGEISNADPNKGLVASDLDFIKLMGNCGWSGIFIPDVDTFHFANKGAEPAKLINELIGSQNNPIVRHRLSFFYERIKFLESKFGIPDKVVLEFVREDFMGKEQKKRMQIEMKKRASEKMLIAKKLDEAGYKGGNLLLKMELLEKQGGVCLYTGEPLLPSELGVLEIEHIVPRSRGGPDAQYNYVLTREKTNKEKADRTPFEWLSSDPVKWAGYSDRVKARAGQLGRKRCELLLEKNAEELVEKYTALAETAHISKLAQKIVCLHFGFQFGGLSGTKRVFTVPGSLTARIRTFYGLNKILHNEDLAHETLSYEGFLKRVEELDKKNRANKKHHALDAMCLCFAPTGVNSKRARVDMLLPPKIRSEKDAELFFRKYLDKLIPVDVAPKKPKLEDGIYSMRMVGGKKIMARRVNLVDLAYKGGQGQKPVYDISVLMDKKNPKEKKIINPQIRKLVADFARTNPSEDEWKKWCGECRLPSKNGLGTRVIRVLLNYGEPAEYKDLSKDGCGAFRKGKEHKGQIVWESTDGKYYVLPIYVHASKAKLLAELCANPKKKRICGIFTSHCMVKVGNTYNNKGELLLPEGVYMLNTIQTDGRGKLTNANGEKSNLININYLMKAGMKKVSIKEL

SEQ ID NO: 142 - protein, 1073 aa, unidentified
  REGION 1..1073: note = Description of Unknown: uncultivated organism with predicted taxonomy: Verrucomicrobia
  REGION 1..1073: note = MG1-145 effector
MYTKDIIWGFDIGKGSLGEAVRVGNEFKHVQSLEIAPDFAETKTTAAARRAWRTREAHKARELWLEKCLSEAGIEVLLRRKVGVVDGAWKLVSKGDVRLEREFPPAGEDLCYNSIALRCKLLLGEKLESWQVFKALNSAIQNRGYDANIPWGDEDAADGGDGSSRKSSDSDASGDGESYAEKLAHYEREFDGILAELDNREKYEFPCFFKAAKMGLWSPENPDFVGVRIDNTAEKAKGYVVPREAVVREFRALVNAAALQYPNLKGKADFIMFGRACEPYASYNPELRKLFGLKRGAATDWTALGQKTPRFDNRVIDKCKLIPRLNVCKIKPLDECKTDDDFLSYTITLSLKLLNLRFFRGAGVDSLSFDEFLRAFELAKNSKFKLGKAALKKFFKTIGAEVMDESQSEIEQPRNGGRAAFSRPAMRILRDLIFSGKSPAEFYAAAIENIANTDKNKGLVAGDLDFLKLMGDAPWSGIFIPDVGLSDFADASEAAREAQINKLIGSQNDPIVRHRLSFFYERIKSLEAKFGVPDKIVLEFVRDDFLGKKAKSDLNKAIKTRFDEKKKLAEELDSNRAEFGPKYASKKMLLKYELYKKQGGKCVYTGKALPLSELENLEIEHIVPRSRGGPDAMYNYVLTDEKTNKEKGDRTPFEWRSTMGAEWESYCERVRKLTKELGAKRCKLLLSPNAAELVEKYTALAETAWISKLAQRICCLHFGFQFGGLAGAKKVWTVSGNTTAMIRGRYGLNRLLHDEESAEDLSLFDRICMEKKFEEKNRKNKKHHALDAMCLCFAPTSNAKKASAYKNILPEEITRNPESDEARKFFGKYLATVIPNKVAVEKSKLEQTIYSLRKGRIVKKCNVRDLAYTGINPKYNYSTLVKSIKSIVGEVPKRIVSDFVLSNSDLSESEWEDWCKNEAAIPSKNGAPTKLLRVLCDAGNPEEYKDLSKDGCGAYRKGDSHKGQFIWKTKQGRYVVAPVYAHASKAKVLAALKNNPDCAEVCGFFRQNCLVEIPNDVIDKSGKMLLKAGVYRSNSVKSNGQVAITNSDGISPNPISIQYLMPAGMKRIKLDTV

SEQ ID NO: 143 - protein, 1059 aa, unidentified
  REGION 1..1059: note = Description of Unknown: uncultivated organism with predicted taxonomy: unclassified Verrucomicrobia (miscellaneous)
  REGION 1..1059: note = MG1-147 effector
MEKEKNNHVWGFDIGKGSLGEAVRIGGDFKHIASVLLDPEFGEIKTAALARRQMRTRKAHKAREKWLEECLEGTGVEILKRREVGIVDGQWQLISKGDERLEREFPPSGEDVCYNSIALRCKLLLGEKLEGWQVFKALNSAIQKRGYDENIPWGEAEEKSSKKDDDDYAQKLSQYEKEKSELFESFADGEKYDFPCFFKAYKMGLWSPENPTRVEVRIDCRAQKAKSYVIARKYVEREFECLVEAAAKFFPKLKGRAKFILYGVSETPYASYYGNMRKKFGLKRGAESDWTALGQKVPRFDNRIIDKCRLIPRMNVCKIRPLNEARNEKDLLYYEVTLALKLLNLRFFRNSNIEQLTFEEFKKAIEIAAGAKYKMTKTAMKKFLKSISATALGDDYAEIEPPKESGRASFSRPAMEILKELIFSGMPPREFYGRKISEISNTDKNKGVVSSDLDFIKLMGDCPWGGIFIPDVQTYQFANAAFPDPDAQINKLIGSQNNPIVRHRLTFFFERIKFLESKYGVPDKVVLEFVRDDFMGEKEKKEMRIAMKKRAEEKMRIAKDLDEHGFKGGNLLLKMELYRKQNGICLYTGDALPLSELATLEIEHIVPRSRGGPDAQYNYVITREKTNKLKGDKTPYEWLSSDAKEWASYTDRVNACAKALGKKRCRLLLEKDAEELVEKYTALAETAHIAKLAQKIVCMHFGFQFGGLSGTKRVFTVPGALTSRIRKFYGLDRILHNSAAESENLSFEEFLKFSEDLEKKNRKNKKHHALDAMCLCFAPTGVDSRRAKLGEILPEKLRSEKAAREFFKSYLDKIMPVDVAPKKPRLEDGIYSKRIIGGKACMVKRNNLVDLAYKSGLKPVFDIPTLIKLVDKKEKGIINPQIRKMIGEFAATNPDESAWRKWCEEVRLPSKSGLGVRVMRVLVYYGEADEYKDLSKDGCGAYRKGDGHKGQVIWESVDGKYYVEPVYVHASKAGVMAALNANPKKKRICGMFNSHCTVDVGDVYNDKGDFILPAGRYMVNTIRSDNQCVLTNADGEKRNPININYLMRAGMRRVDLSEL

SEQ ID NO: 144 - protein, 938 aa, unidentified
  REGION 1..938: note = Description of Unknown: uncultivated organism with predicted taxonomy: unclassified Verrucomicrobia (miscellaneous)
  REGION 1..938: note = MG1-148 effector
KLLLGEKLEGWQVFKALNSAIQKRGYDENIPWGEAEEKSSKKDDDDYAQKLSQYEKEKSELFESFADGEKYDFPCFFKAYKMGLWSPENPTRVEVRIDCRAQKAKSYVIARKYVEREFECLVEAAAKFFPKLKGRAKFILYGVSETPYASYYGNMRKKFGLKRGAESDWTALGQKVPRFDNRIIDKCRLIPRMNVCKIRPLNEARNEKDLLYYEVTLALKLFNLRFFRNSNIEQLTFEEFKKAFEIAAGAKYKMTKTAMKKFLKSISATALGDDYAEIEPPKESGRASFSRPAMEILKELIFSGMPPREFYGRKISEISNTDKNKGVVSSDLDFIKLMGDCPWGGIFIPDVQTYQFANAAFPDPDAQINKLIGSQNNPIVRHRLTFFFERIKFLESKYGVPDKVVLEFVRDDFMGEKEKKEMRIAMKKRAEEKMRIAKDLDEHGFKGGNLLLKMELYRKQNGICLYTGDALPLSELATLEIEHIVPRSRGGPDAQYNYVITREKTNKLKGDKTPYEWLSSDAKEWASYTDRVNACAKALGKKRCRLLLEKDAEELVEKYTALAETAHIAKLAQKIVCMHFGFQFGGLSGTKRVFTVPGALTSRIRKFYGLDRILHNSASESENLSFEEFLKFSEDLEKKNRKNKKHHALDAMCLCFAPTGVDSRRAKLGEILPEKLRSEKAAREFFKSYLDKIMPVDVAPKKPRLEDGIYSKRIIGGKACMVKRNNLVDLAYKSGLKPVFDIPTLIKLVDKKEKGIINPQIRKMIGEFAATNPDESAWRKWCEEVRLPSKSGLGARVMRVLVYYGEADEYKDLSKDGYGAYRKGDGHKGQVIWESVDGKYYVEPVYVHASKAGVMAALNANPKKKRICGMFNSHCTVDVDDVYNDKGDFILPAGRYMVNTIRSDNQCVLTNADGEKRNPININYLMRAGMRRVDLSEL

SEQ ID NO: 145 - protein, 1059 aa, unidentified
  REGION 1..1059: note = Description of Unknown: uncultivated organism with predicted taxonomy: unclassified Verrucomicrobia (miscellaneous)
  REGION 1..1059: note = MG1-149 effector
MEKEKNNHVWGFDIGKGSLGEAVRIGGDFKHIASVLLDPEFGEIKTAALACRQMRTRKAHKAREKWLEECLEGTGVEILKRREVGIVDGQWQLISKGDERLEREFPPSGEDVCYNSIALRCKLLLGEKLEGWQVFKALNSAIQKRGYDENIPWGEAEEKSSKKDDDDYAQKLSQYEKEKSELFESFADGEKYDFPCFFKAYKMGLWSPENPTRVEVRIDCRAQKAKSYVIARKYVEREFECLVEAAAKFFPKLKGRAKFILYGVSETPYASYYGNMRKKFGLKRGAESDWTALGQKVPRFDNRIIDKCRFIPRMNVCKIRPLNEARNEKDLLYYEVTLALKLLNLRFFRNSNIEQLTFEEFKKAFEIAAGAKYKMTKTAMKKFLKSISATALGDDYAEIEPPKESGRASFSRPAMEILKELIFSGMPPREFYGRKISEISNTDKNKGVVSSDLDFIKLMGDCPWGGIFIPDVQTYQFANAAFPDPDAQINKLIGSQNNPIVRHRLTFFFERIKFLESKYGVPDKVVLEFVRDDFMGEKEKKEMRIAMKKRAEEKMRIAKDLDEHGFKGGNLLLKMELYRKQNGICLYTGDALPLSELATLEIEHIVPRSRGGPDAQYNYVITREKTNKLKGDKTPYEWISSDAKEWASYTDRVTACAKALGKKRCRLLLEKDAEELVEKYTALAETAHIAKLAQKIVCMHFGFQFGGLSGTKRVFTVPGALTSRIRKFYGLDRILHNSAAESENLSFEEFLKFSEDLEKKNRKNKKHHALDAMCLCFAPTGVDSRRAKLGEILPEKLRSEKAAREFFKSYLDKIMPVDVAPKKPRLEDGIYSKRIIGGKACMVKRNNLVDLAYKSGLKPVFDIPTLIKLVDKKEKGIINPQIRKMIGEFAATNPDESAWRKWCEEVRLPSKSGLGARIMRVLVYYGEADEYKDLSKDGCGAYRKGDGHKGQVIWESVDGKYYVEPVYVHASKAGVMAALNANPKKKRICGMFNSHCTVDVGDVYNDKGDFILPAGRYMVNTIRSDNQCVLTNADGEKRNPININYLMRAGMRRVDLSEL

SEQ ID NO: 146 - protein, 1062 aa, unidentified
  REGION 1..1062: note = Description of Unknown: uncultivated organism with predicted taxonomy: Coraliomargarita sp. CAG:312
  REGION 1..1062: note = MG1-150 effector
MNNNNTQIWGFDIGKASLGEAVWCGGKFKHVESLILDKDFAEIKTSAGRRRQARTRKAHKAREEWLEKCLEDCGIEILKRRKVGIVNGQWKLISKGDARLEKEFPAEGEEVCYNSIALRCKLILGEKLESWQIFKALNSSIQHRGYDENIPWKETQNESKKEDGDYFKKIVLYESEKEDILNRLPQECKREDFDFPCFFKAKKMGIWSEENPYKVGLRISNNAQKAKGYVIPRKYVESEFVRLVQMASLQYPKLKDKQMFILYGISETPYASLFKDARKKFGLKRGSDSDWTALGQKIPRFDNRMIGKCKLIPRLNTCKIKSPDKIKSEEDLLHYDITLALKLLNLRFFKDSEICALSFEEFKKLFEIGKSNKYKISKTDLKKFLKSIGASVLSQDHSEIEAPRTSGRSSFSRPAMKILKELIFSGEPPSKFLKAKIDKIANTDPNKGIIRKDLDFIRIMGDCPWNGIFIPDVETYKYASQTQESSEAQINKLIGSQNDPIVRHRLSFFYERIKALSEKFGVPDKIVLEFVREDFMGKQAKKDLSLSMKKRFEEKIDIAKKLDDIGYKGNKMLLKMELLQKQGFACLYTGEALQETDLPILEIEHIVPRSLGGPDAAYNYVLTSESTNKAKGNQTPYKWLSPDRDKWRAYTERVRARAAELGSKRCRLLLSENAEELINKYTALAETAWISKLAQRIVCMHFGFQFGGNTGEKRVFTVPGNITAKIRSAFGLNKILHNIDADKKNMSEFDIVKLDYELDKKNRKNKKHHALDAMCLCFAPTGPNAQKLGIGALLPPEIAAKAEEFFRGYIEKVVPNEVAPKKPKLEESIYSKRTINGKECIVRKFNLVDLAYKSGLKPVYDISAIEKLLEDKPKKIPPIINPTVRRIVRDFVSTNPNEDEWRNWCKTVRMPSKNRNGTRIIRVLVYVGTPEEYKDLSKDGCGAFRKGDSHKGQIIWMDKNGRYKVSPVYVHSSKSQTMESIKSNPDFIKIAGFFKSHCLVEIESPVVNGKGDVLLSPGTYMINTIMAAGMAILSDTNGVKSPAININYLMNAGMRRVSIKYK

SEQ ID NO: 147 - protein, 1034 aa, unidentified
  REGION 1..1034: note = Description of Unknown: uncultivated organism with predicted taxonomy: Verrucomicrobia
  REGION 1..1034: note = MG1-151 effector
MGAEFRHVTSLLLDEDFGEIKTAAGLRRQMRTRKAHKAREKWLERCLLEFGIEPLKRREVGIVNGRWMLISKGDERLEREFPPDGEDICYNAIALRCKLLLGEKLESWQIFKALNSAIQNRGYDENIPWKESDVSLPKKDDDDYAKKLSQYSREKGELLESFEDGEKYDYPCFFKAYKMGLWSPENPERVEIRIGNDAQKAKGYVIPRKDVEREFESLVEAASKWHPAMKGKAMYIMYGIAETPYASFKPALRKKFDLKRGAESDWTALGQKIPRFDNRIIDKCRLIPRLNVCKIRPLSEARGEGDLLHYEITLSLKLLNLRFFRNSNVESLSFEEFKAAFEIAKSAKYKMGKAALKKFLKSISASVLSEDQSEIEAPRESGRASFSRPAMLLLKELIFSGMPPAEFYAKKAGEISNADPNKGIVASDLDFIKLMGNCGWNGIFIPDVETYRFANNGADSAKLINGLIGSQNNPIVRHRLAFFYERIKFLESKFGVPDKVVLEFVREDFMGKEQKKRMQIEMKKRASEKMLIAKKLDEAGYKGGNLLLKMELLEKQGGICLYTGEPLLPSELGVLEIEHIVPRSRGGPDAQYNYVLTREKTNKEKADRTPFEWLSSDPVKWAGYSDRVKARAGQLGRKRCELLLEKNAEELVEKYTALAETAHISKLAQKIVCLHFGFQFGGLGGTKRVFTVTGALTARIRSFYGLNKILHNEDLAKDALSYEEVLKRGEELDKKNRKNKKHHALDAMCLCFAPTGVNSKRARIDMLLPPDIRGEREAELFFRKYLDRLIPVDVAPKKPRLEDGIYSMRAVGGKKFMARRVNLVDLAYKSGLKPVYDISALIKLLDKKEKGIINAQIRKLVADFARTNPSEDEWRKWCGECRLPSKNGIGTRVIRVLLNYGEPAEYKDLSKDGRGAFRRGDGHKGQIVWESTDGKYYVVPIYVHASKAKLLAELDANPKKKRVCDIFTSHCMVKVGNAYNDKGELLLPEGVYMVNTIQTDGRGKLTNTNGDKSKPININYLMKAGMRKVSVKDL

SEQ ID NO: 148 - protein, 874 aa, unidentified; identical to SEQ ID NO: 88
  REGION 1..874: note = Description of Unknown: uncultivated organism
  REGION 1..874: note = MG1-152 effector

SEQ ID NO: 149 - protein, 1059 aa, unidentified
  REGION 1..1059: note = Description of Unknown: uncultivated organism with predicted taxonomy: unclassified Verrucomicrobia (miscellaneous)
  REGION 1..1059: note = MG1-153 effector
MEKEKNNHVWGFDIGKGSLGEAVRIGGDFKHIASVLLDPEFGEIKTAALVRRQMRTRKAHKAREKWLEECLEGTGVEILKRREVGIVDGQWQLISKGDERLEREFPPSGEDVCYNSIALRCKLLLGEKLEGWQVFKALNSAIQKRGYDENIPWGEAEEKSSKKDDDDYAQKLSQYEKEKSELFESFADGEKYDFPCFFKAYKMGLWSPENPTRVEVRIDCRAQKAKSYVIARKYVEREFECLVEAAVKFFPKLKGRAKFILYGVSETPYASYYGNMRKKFGLKRGAESDWTALGQKVPRFDNRIIDKCRLIPRMNVCKIRPLNEARNEKDLLYYEVTLALKLLNLRFFRNSNIEQLTFEEFKKAFEIAAGAKYKMTKTAMKKFLKSISATALGDDYAEIEPPKESGRASFSRPAMEILKELIFSGMPPREFYGRKISEISNTDKNKGVVSSDLDFIKLMGDCPWGGIFIPDVQTYQFANAAFPDPDAQINKLIGSQNNPIVRHRLTFFFERIKFLESKYGVPDKVVLEFVRDDFMGEKEKKEMRIAMKKRAEEKMRIAKDLDEHGFKGGNLLLKMELYRKQNGICLYTGDALPLSELATLEIEHIVPRSRGGPDAQYNYVITREKTNKLKGDKTPYEWLSSDAKEWASYTDRVNACAKALGKKRCRLLLEKDAEELVEKYTALAETAHIAKLAQKIVCMHFGFQFGGLSGTKRVFTVPGALTSRIRKFYGLDRILHNSAAESENLSFEEFLKFSEDLEKKNRKNKKHHALDAMCLCFAPTGVDSRRAKLGEILPEKLRSEKAAREFFKSYLDKIMPMDVAPKKPRLEDGIYSKRIIGGKACMVKRNNLVDLAYKSGLKPVFDIPTLIKLVDKKEKGIINPQIRKMIGEFAATNPDESAWRKWCEEVRLPSKSGLGARIMRVLVYYGEADEYKDLSKDGCGAYRKGDGHKGQVIWESVDGKYYVEPVYVHASKAGVMAALNANPKKKRICGMFNSHCTVDVGDVYNDKGDFILPAGRYMVNTIRSDNQCVLTNADGEKRNPININYLMRAGMRRVDLSEL

SEQ ID NO: 150 - protein, 1073 aa, unidentified
  REGION 1..1073: note = Description of Unknown: uncultivated organism with predicted taxonomy: Verrucomicrobia
  REGION 1..1073: note = MG1-154 effector
MYTKEIIWGFDIGKGSLGEAVRVGNEFKHVQSLEIAPDFAETKTTAAARRAWRTREAHKARELWLEKCLSEAGIEVLLRRKVGVVDGAWKLVSKGDVRLEREFPPAGEDLCYNSIALRCKLLLGEKLESWQVFKALNSAIQNRGYDANIPWGDEDAADGGDGSSRKSSDSDASGDGESYAEKLVHYEREFDGILAELDNREKYEFPCFFKAAKMGLWSPENPDFVGVRIDNTAEKAKGYVVPREAVVREFRALVNAAALQYPNLKGKADFIMFGRACEPYASYNPELRKRFGLKRGAATDWTALGQKTPRFDNRVIDKCKLIPRLNVCKIKPLDECKTDDDFLSYTITLSLKLLNLRFFRGAGVDSLSFDEFLRAFELAKNSKFKLGKAALKKFFKTIGAEVMDESQSEIEQPRNGGRAAFSRPAMRILRDLIFSGKSPAEFYATAIENIANTDKNKGLVAGDLDFLKLMGDAPWSGIFIPDVGLSDFADASEAAREAQINKLIGSQNDPIVRHRLSFFYERIKSLEAKFGVPDKIVLEFVRDDFLGKKAKSDLNKAIKTRFDEKKKLAEDLDSKREEFGLKYASKKMLLKFELYKKQGGECVYTGNALPLSELENLEVEHIVPRSRGGPDAMYNYVLTDEKTNKEKGDRTPFEWRSTMGAEWESYCERVRKLTKELGAKRCKLLLSPNAAELVEKYTALAETAWISKLAQRICCLHFGFQFGGLAGAKKVWTVSGNTTAMIRGRYALNRLLHDEESAEDLSLFDRICMEKKFEEKNRKNKKHHALDAMCLCFAPTSNAKKASAYKNILPEEITRNPESDEARKFFGKYLANVIPNKVAVEKPTLEQTIYAMRKGRIVKKCNVRDLAYTGINPKYNYSTLVKSIKSIVGEVPKRIISDFVLSNPKLSESEWEDWCKNNAAIPSKNGAPTKLLRVLCDAGNPEEYKDLSKDGCGAYRKGDSHKGQFIWKTKQGRYVVAPVYAHASKAKVLAALKNNPDCAEVCGFFRQNCLVEIPNDVVDKSGKMLLKAGVYRSNSIWASGHAQLTNSDGVSPNPISIQYLMPAGMKRIKLDTV

SEQ ID NO: 151 - protein, 1074 aa, unidentified
  REGION 1..1074: note = Description of Unknown: uncultivated organism with predicted taxonomy: Verrucomicrobia
  REGION 1..1074: note = MG1-155 effector
MGTKEIVWGFDIGKGSLGEAVRIGNEFKHVQSLEIPPEFAETKTAAALRRAWRTRHAHKARELWLERCLSNAGIEVLGRRKVDIVGGRWKLVSEGDRRLEREFPADGEDCCYNSIALRCKLLLGEKLESWQVFKALNSAIQTRGYDAKIPWGNGNGKTPDSAKGEKSEAVKEEDSYAEKLALYEREFDGLLAEVNNRKKYDFPCFFKAAKIGLWSPENPDVVKIRIDNTAEKAKGYVVPRSAVVSEFRALVEAAAKQYPALKGKADFIMFGVSEEPYASYNPELRKKFGLKRGAESDWTALGQKTPRFDNRVIDKCKLIPRLNVCKIKPLPECRTDDDFLPYETTLALKLLNLRFFRGAGVDSLSFDEFLRAFEIAKNNKFELNKTNLKKFFKSIGAEVIDESQSKIEQPRSSGRASFSRPAMRILRNLVFSGKSPAEFYETELVKITNTDKNRGIVAEDIKFLKLMGNVPWGGIFIPDVAAFDFANSTEFSRAVQINKLIGLQNDPIVRHRLSFFYERIKSLEAKFGTPDKIVLEFVRDDFLGKKAKADLSRAINDRAKERKKYAEELDSQREIFGSKYASKKMLLKYELYSKQKGVCVYTGNALGFSNLEQLEVEHIVPRSRGGPDALYNYVLTDEKTNKEKGDRTPFEWLSSKGLEWESYCQRVRELTKEFGAKRCRLLLSPNAEELVEKYTALAETAWISKLAQRVCCIHFGFQFGGLTGVKKVWTVSGNTTAMIRSRYGLNRLLHDENVPKDISLSERLKLENDFEKKNRDNKKHHALDAMCLCYAPTSNTRRAASYKNILPAEITRNPESDEARRFFGRYLANVIPNKVAIEKPTLEQTIYAKRLINGKETIVKKCNVRDLAYAGINPKYDLGKLKDRIRDIINPVSKRVISDFVNSNPNLSESEWEDWCRHEASIPSKSGKATRLLRVQCAVGDPAEYKDLSKDGCGAYRKGKSHKGQYIWKTKGGRYVVTPVYTFASKIRVYDDMRRDPNCEEICGFFRQNCLVEIPNDVYDSKGVWKLKAGIYRSNTIRADGFVKLTNSDGFSSNPISIQYLMTAGMKRITLDTI

SEQ ID NO: 152 - protein, 891 aa, unidentified
  REGION 1..891: note = Description of Unknown: uncultivated organism with predicted taxonomy: Coraliomargarita sp. CAG:312
  REGION 1..891: note = MG1-156 effector
LYESEKEDILNRLPQECKREDFDFPCFFKAKKMGIWSEENPYKVGLRISNNAQKAKGYVIPRKYVESEFVRLVQMASLQYPKLKDKQMFILYGISETPYASLFKDARKKFGLKRGSDSDWTALGQKIPRFDNRMIGKCKLIPRLNTCKIKSPDKIKSEEDLLHYDITLALKLLNLRFFKDSEICALSFEEFKKLFEIGKSNKYKISKTDLKKFLKSIGASVLSQDHSEIEAPRTSGRSSFSRPAMKILKELIFSGEPPSKFLKAKIDKIANTDPNKGIIREDLDFIRIMGDCPWNGIFIPDVETYKYASQTQESSEAQINKLIGSQNDPIVRHRLSFFYERIKALSEKFGVPDKIVLEFVREDFMGKQAKKDLSLSMKKRFEEKIDIAKKLDDIGYKGNKMLLKMELLQKQGFACLYTGEALQETDLPILEIEHIVPRSLGGPDAAYNYVLTSESTNKAKGNQTPYKWLSPDRDKWRAYTERVRARAAELGSKRCRLLLSENAEELINKYTALAETAWISKLAQRIVCMHFGFQFGGNTGEKRVFTVPGNITAKIRSAFGLNKILHNIDADKKNMSEFDIVKLDYELDKKNRKNKKHHALDAMCLCFAPTGPNAQKLGIGALLPPEIAAKAEEFFRGYIEKVVPNEVAPKKPKLEESIYSKRTINGKECIVRKFNLVDLAYKSGLKPVYDISAIEKLLEDKPKKIPPIINPTVRRIVRDFVSTNPNEDEWRNWCKTVRMPSKNRNGTRIIRVLVYVGTPEEYKDLSKDGCGAFRKGDSHKGQIIWMDKNGRYKVSPVYVHSSKSQTMESIKSNPDFIKIAGFFKSHCLVEIESPVVNGKGDVLLSPGTYMINTIMAAGMAILSDTNGVKSPAININYLMNAGMRRVSIKYK

SEQ ID NO: 153 - protein, 1055 aa, unidentified
  REGION 1..1055: note = Description of Unknown: uncultivated organism with predicted taxonomy: Verrucomicrobia
  REGION 1..1055: note = MG1-157 effector
MENRVNIWGFDIGKGSLGEAVRIGSEIKHVQSLILDKDFGEIKTAAGIRRQYRTRKAHRAREKFLEKVLGECGIEVLRRREVGIVDGCWKLIAKGDIRLEKEFPSPGEDVCYNSIALRCKLLLGEPLESWQVFKALNSAIQNRGYDPDIPWTETDADKKEDSDWAKRLSAYEDEKKVLFSGLADPQRYDYPCFFKAYKMGLWSPEDPEIVKLRIDNHAEKAKNYVIPRKCVEAEFEKLVENASLQYPKLKGKALYIMFGPAQKEYASLNPELRRQFNLKRGADTDWTALGQKIPRFDNRIVDKCKLMPRFNVCKIKPLDEIKNPADFLPYEITTLMKLLNLRFLRNGTIESLACDELKEAFELARDNKYKLSKTALKKFLKKIGAEVLDEDQSKIEAPRSGGRASFSRPAMAVLKELILSGESPAKFYARKVSQIENTDKLKGLVASDFDFIKQMGDIAWGKIFMPDMRLLEFANRQNIDAEARINKLIGSQNDPIVRHRLGFFYDRIKFLESKFGVPDKIVIEFVRDDFLGEKAKKEYQKAINERFKEKQELAKEMDEAGYKGAKMLLKLELYKKQGGQCVYTGEALPSSEIASLEIEHIVPRSRGGPDSIYNYVLTRERTNKEKADRTPYEWLSRDQQRWNAYVSRVNSLYKSLGGKRCKLLLANNAEELVDKYTALAETAWISKLAQQVVCLHFGFQFGGMEGQRRVFCIPGGVTARIRGMFGLNELLHVKDYDTDSMSETEIVELYKRLEKKNRENKKHHALDAMCLCFAPTGSQIKRFDAKTIMPEGILGREKQYFKSYLDKIVPNEVATQKPRLEQTLYSKRVVGGKECIVRKFNLVDLAYKSGLKPVYDLQTIKKLVGKDQSESDIINPVVGALVREFIATDPTEEQWRAWCGEVCMPSESFTGSRIKRVLVRCGNPDEFKDLSKDGCGAYRKGDAHKGQTVWRSTNGKCYVLPIYVHASKYGLIEALKKRADFKEIVGLFRMHCLVNIERDVFDKKGQKLLPPGIYMLNTLRADSQALLTNTDGVKQKAININYLVESGMRPIKVDY

SEQ ID NO: 154 - protein, 1061 aa, unidentified
  REGION 1..1061: note = Description of Unknown: uncultivated organism with predicted taxonomy: unclassified Verrucomicrobia (miscellaneous)
  REGION 1..1061: note = MG1-158 effector
MKVMEDEGGNHIWGFDIGKGSLGEAVLDGSEFKHVASLLLDADFGEIETAAGLRRQMRTRKAHKAREKWLESCLSGFGIETLKRREVGIVNGQWTLISKGDERLEREFPPDGENICYNSIALRCKLLLGEKLEGWQIFKALNSAIQNRGYDENIPWKESDASPSKKEGGDYAQKLSQYSREKSELFESFEGGEKYDYPCFFKAYKMGLWSPDNPERVEVRIGSDAQKAKDYVIPRKDVEREFERLVEAASKWYPAMKGKAMYIMYGIAETPYASYKPLLRKKFDLKRGAESDWTALGQKIPRFDNRIIDKCRLIPRLNVCKIRPLSKIRGEADLLHYEITLSLKLLNLRFFRNSNVESLSFGEFKAAFEIAKGAKYKMGKAALKKFLKSISASVLSEDQSEIEAPRESGRAAFSRPAMLLLKELIFSGMTPAEFYAKKSGEISNADPNKGIVASDLDFIKLMGNCGWSGIFIPDVDTFHFANKGAEPAKLINELIGSQNNPIVRHRLSFFYERIKFLESKFGIPDKVVLEFVREDFMGKEQKKRMQIEMKKRASEKMLIAKKLDEAGYKGGNLLLKMELLEKQGGVCLYTGEPLLPSELGVLEIEHIVPRSRGGPDAQYNYVLTREKTNKEKADRTPFEWLSSDPVKWAGYSDRVTARAGQLGRKRCELLLEKNAEELVEKYTALAETAHISKLAQKIVCLHFGFQFGGLSGTKRVFTVPGALTARIRTFYGLNKILHNEDLAHETLSFEGFLKRGEELDKKNRANKKHHALDAMCLCFAPTGVNSKRARVDMLLPPKIRSEKEAELFFRKYLDKLIPVDVAPKKPKLEDGIYSMRTVGGKKIMARRVNLVDLAYKSGLKPVYDVSVLIKLLDKKERGIINPQIRKLVADFARTNPSEDEWKKWCGECRLPSKNGLGTRVIRVLLNYGEPAEYKDLSKDGRGAFRRGDGHKGQIVWESTDGKYYVLPIYVHASKAKLPAELCANPKKKRICGIFTSHCMVKVGNTYNNKGELLLPEGVYMLNTIRTDGWIQLTSANGDKSKPININYLMKAGMKKVPVKDL

SEQ ID NO: 155 - protein, 1052 aa, unidentified
  REGION 1..1052: note = Description of Unknown: uncultivated organism with predicted taxonomy: Coraliomargarita sp. CAG:312
  REGION 1..1052: note = MG1-159 effector
MDILGNKVWGFDMGKGSLGEAVRIGNEFKHVCSLLLDADFGEIKTAASLRRQYRTHKAHKAREKWLEDCLRKCGIEVLQRRQVAFVDDKWQLVSKGDIRLEKEFPTDDENICYNSIALRCKLILGEKLESWQVFKALNSAIQNRGYDSEIPWKETEVKSKDNSDYAIKLQAFEREKDELLLNLPSIDEAIRSKFDYPCFFKAYKIGLWNPVNPNQVDSKISHTANKAKGYVIPRNYVEKEFIKLVEMASLQYPKLRNKALFILYGITEKPYASFDFDLRKKFNLKRGAESDWTALGQKIPRFDNRIVDKCKLIPRFNVCKVKHIDEIQQDKDFLYYEITLAMKLLNLRFYRNANVQSLNYDEFKILFEIGKANKFKITKTNLKKFLNSINAEILDENQAEVAQPKDSGRASFSRPAMQLIKELIFSGQSPADFYARKVSSISNVETKKGLVVEDLDFIKLMGDVDWNGIFIPDVETYKFAKNFSEDNSAQINKLIGMQNDPIVRHRLSFFYDRIKYLEAKFGIPDKVVLEFVRDDFIGKEKKKELNIAIKKRYSEKLKIAEKLDEIGFKGSKMLMKLELFQKQGGICLYTREPLLPTEIPSLEIEHIVPRSRGGPDSAYNFVLTREATNKEKANRTPFEWLSGDSQKWVSYSDRVMSRSKELGKKRCQLLLKENAEELVEKYTALAETAWIARLAQRIVCMHFGFPMGALIGKKRVFTVSGSVTSRIRGMYGLNKILHNTEIDKTLSEVDILKLNDSLETKNRANKKHHALDAMCLCFAPTSKEVLNKNREILPVEIAKDAENYFRRYLDNIIPNKVATMKPRLEETIYSKRKIGKKEYIVRKYDLESLAYKGINPKYDVESIKKLANSENIINVVARKIIRDFVNDNPTEQEWKDFCNTVKMPSKNGNGSRLKRILLLVGNTAEYKDLSKDGCGAYRKGDSHKGQIIWKTKSGKFKVEPIYAHSSRAKVSKELMKKPEFDSVAGIFRTGCLVEFTNDVMNDKDEFLLERGIYSLNTISTAGQVAITNSNGNKSIGININYLMKAGMRRLNL

SEQ ID NO: 156 - protein, 933 aa, unidentified
  REGION 1..933: note = Description of Unknown: uncultivated organism with predicted taxonomy: unclassified Verrucomicrobia (miscellaneous)
  REGION 1..933: note = MG1-160 effector
EKLEGWQVFTALNSAIQKRGYDENIPWGEAEEKSPKKDDDDYAQKLSQYEKEKSELFESFADGEKYDFPCFFKAYKMGLWSPENPTRVEVRIDCRAQKAKSYVIARKYVEREFECLVEAAAKFFPKLKGRAKFILYGVSETPYASYYGNMRKKFGLKRGAESDWTALGQKVPRFDNRIIDKCRFIPRMNVCKIRPLNEARNEKDLLYYEVTLALKLLNLRFFRNSNIEQLTFEEFKKAFEIAAGAKYKMTKTAMKKFLKSISPTALGDDYAEIEPPKESGRASFSRPAMEILKELIFSGMPPREFYGRKISEISNTDKNKGVVSSDLDFIKLMGDCPWGGIFIPDVQTYQFANAAFPDPDAQINKLIGSQNNPIVRHRLTFFFERIKFLESKYGVPDKVVLEFVRDDFMGEKEKKEMRIAMKKRAEEKMRIAKDLDEHGFKGGNLLLKMELYRKQNGICLYTGDALPLSELATLEIEHIVPRSRGGPDAQYNYVITREKTNKLKGDKTPYEWLSSDAKEWASYTDRVNACAKALGKKRCRLLLEKDAEELVEKYTALAETAHIAKLAQKIVCMHFGFQFGGLSGTKRVFTVPGALTSRIRKFYGLDRILHNSAAERENLSFEEFLKFSEDLEKKNRKNKKHHALDAMCLCFAPTGVDSRRVKLGEILPEKLKSEKAAREFFKSYLDKIMPVDVAPKKPRLEDGIYSKRIIGGKACMVKRNNLVDLAYKSGLKPVFDIPTLIKLVDKKEKGIINPQIRKMIGEFAATNPDESAWRKWCEEVRLPSKSGLGARIMRVLVYYGEADEYKDLSKDGCGAYRKGDGHKGQVIWESVDGKYYVEPVYVHASKAGVMAALNANPKKKRICGMFNSHCTVDVGDVYNDKGDFILPAGRYMVNTIRSDNQCVLTNADGEKRNPININYLMRTGMRRVDLSEL

SEQ ID NO: 157 - protein, 1074 aa, unidentified
  REGION 1..1074: note = Description of Unknown: uncultivated organism with predicted taxonomy: Verrucomicrobia
  REGION 1..1074: note = MG1-161 effector
MGTKEIVWGFDIGKGSLGEAVRIGNEFKHVQSLEIPPEFAETKTAAALRRAWRTRHAHKARELWLERCLSNAGIEVLGRRKVDIVGGRWKLVSEGDRRLEREFPADGEDCCYNSIALRCKLLLGEKLESWQVFKALNSAIQTRGYDAKIPWGNDDGKTSDSAKGGKSEAAKEEESYAEKLALYEREFDGLLAEVDNRKKYDFPCFFKAAKIGLWSPANPDAVKIRIDNTAEKAKGYVVPRSAVIAEFRALVDAAAKQYPALKGKADFIMFGVSEEPYASYNPELRKKFGLKRGAESDWTALGQKTPRFDNRVIDKCKLIPRLNVCKIKPLPECRTDDDFLPYETTLALKLLNLRFFRGAGVDSLSFDEFLRAFEIAKNNKFELNKTNLKKFFKSIGAEVIDESQSKIEQPRSSGRASFSRPAMRILRNLVFSGKSPAEFYETELVKITNTDKNRGIVAEDIKFLKLMGNVPWGGIFVPDVGVFDFADSTECSRAVQINKLIGMQNDPIVRHRLSFFYGRIKSLDAEFGTPDKIVLEFVRDDFLGKKAKADLSKAINDRAKEKKKYAEELDSQRENFGPKYASKKMLLKYELYSKQKGECIYTGRALGFSDLEQLEVEHIVPRSRGGPDALYNYVLTDEKTNKDKGDRTPFEWLSSKGVEWDAYRDRVRGLTKELGAKRCKLLLSPNAEELVEKYTALAETAWISKLAQRICCIHFGFQFGGLTGEKKVWTVSGNTTAMIRSRYGLNRLLHNEDVPKDISLSERLKLESEFERKNRDNKKHHALDAMCLCYAPTSNTRRAASYKNILPAEITRNPESDEARRFFGGYLANVIPNKVAIEKPTLEQTIYAKRLIEGRETIVKKCNVRDLAYAGINPKYDLGKLKDRIRDIINPVSKRVISDFVNSNPNLSESEWEDWCRHEASIPSKSDKATRLLRVQCAVGDPAEYKDLSKDGCGAYRKGKSHKGQYIWKTKGGRYVVTPVYTFASKIRVYDDMRRDPNCEEICGFFRQNCLVEIPNDVYDNKGVLKLKAGIYRSNTIKTNGQVNLTTPNGIKFNGISIQYLMSAGMKRITLNTI

SEQ ID NO: 158 - protein, 1062 aa, unidentified
  REGION 1..1062: note = Description of Unknown: uncultivated organism with predicted taxonomy: Coraliomargarita sp. CAG:312
  REGION 1..1062: note = MG1-162 effector
MNNNNTQIWGFDIGKASLGEAVWCGGKFKHVESLILDKDFAEIKTSAGRRRQARTRKAHKAREEWLEKCLEDCGIEILKRRKVGIVNGQWKLISKGDARLEKEFPAEGEEVCYNSIALRCKLILGEKLESWQIFKALNSSIQHRGYDENIPWKETQNESKKEDGDYFKKIVLYESEKEDILNRLPQECKREDFDFPCFFKAKKMGIWSEENPYKVGLRISNNAQKAKGYVIPRKYVENEFVRLVQMASLQYPKLKDKQMFILYGISETPYASLFKDARKKFGLKRGADSDWTALGQKIPRFDNRMIGKCKLIPRLNTCKIKSPEKIKSEEDLLHYDITLALKLLNLRFFKDSEICALSFEEFKKLFEIGKSNKYKISKTDLKKFLKSIGASVLSQDHSEIEAPRTSGRSSFSRPAMKILKELIFSGEPPSKFLKAKIDKIANTDPNKGIIREDLDFIRIIGDCPWNGIFIPDVETYKYASQTQESSEAQINKLIGSQNDPIVRHRLSFFYERIKALSEKFGVPDKIVLEFVREDFMGKQAKKDLSLSMKKRFEEKIDIAKKLDDIGYKGNKMLLKMELLQKQGFACLYTGEALQETDLPILEIEHIVPRSLGGPDAAYNYVLTSESTNKAKGNQTPYKWLSPDRDKWRAYTERVRARAAELGSKRCRLLLSENAEELINKYTALAETAWISKLAQRIVCMHFGFQFGGNTGEKRVFTVPGNITAKIRSAFGLNKILHNIDADKKNMSEFDIVKLDYELDKKNRKNKKHHALDAMCLCFAPTGPNAQKLGIGALLPPEIAAKAEEFFRGYIEKVVPNEVAPKKPKLEESIYSKRTINRKECIVRKFNLVDLAYKSGLKPVYDISAIEKLLEDKPKKIPPIINPTVRRIVRDFVSTNPNEDEWRNWCKTVRMPSKNRNGTRIIRVLVYVGTPEEYKDLSKDGCGAFRKGDSHKGQIIWMDKNGRYKVSPVYVHSSKSQTMESIKSNPDFIKIAGFFKSHCLVEIESPVVNSKRDVLLSPGTYMINTIMAAGMAILSDTNGVKSPAININYLMNAGMRRISIKYK

SEQ ID NO: 159 - protein, 1063 aa, unidentified
  REGION 1..1063: note = Description of Unknown: uncultivated organism with predicted taxonomy: unclassified Verrucomicrobia (miscellaneous)
  REGION 1..1063: note = MG1-163 effector
MKVIEDEGGNHIWGFDIGKGSLGEAVLDGSEFKHVASLLLDADFGEIETAAGLRRQMRTRKAHKAREKWLESCLSGFGIETLKRREVGIVNGQWTLISKGDERLEREFPPDGENICYNSIALRCKLLLGEKLEGWQIFKALNSAIQNRGYDENIPWKESDASPSKKEGGDYAQKLSQYSREKSELFESFEGGEKYDYPCFFKACKMGLWSPDNPERVEVRIGSDAQKAKGYVIPRKDVEREFERLVEAASKWYPAMKGKAMYIMYGIAETPYASFKPLLRKKFDLKRGAESDWTALGQKIPRFDNRIIDKCRLIPRLNVCKIRPLSKIRGEADLLHYEITLSLKLLNLRFFRNSNVESLSFGEFKAAFEIAKGAKYKMGKAALKKFLKSISASVLSEDQSEIEAPRESGRAAFSRPAMLLLKELIFSGMTPAEFYAKKSGEISNADPNKGIVASDLDFIKLMGNCGWSGIFIPDVDTFHFANKGAEPAKLINELIGSQNNPIVRHRLSFFYERIKFLESKFGIPDKVVLEFVREDFMGKEQKKRMQIEMKKRASEKMLIAKKLDEAGYKGGNLLLKMELLEKQGGVCLYTGEPLLPSELGVLEIEHIVPRSRGGPDAQYNYVLPREKTNKEKADRTPFEWLSSDPVKWAGYSDRVKARAGQLGRKRCELLLEKNAEELVEKYTALAETAHISKLAQKIVCLHFGFQFGGLSGTKRVFTVPGSLTARIRTFYGLNKILHNEDLAHETLSFEGFLKRGEELDKKNRANKKHHALDAMCLCFAPTGVNSKRARVDMLLPPKIRSEKDAELFFRKYLDKLIPVDVAPKKPKLEDGIYSMRMVGGKKIMARRVNLVDLAYKGGQGQKPVYDISVLMDKKNPKEKKIINPQIRKLVADFARTNPSEDEWKKWCGECRLPSKNGLGTRVIRVLLNYGEPAEYKDLSKDGCGAFRKGKEHKGQIVWESTDGKYYVLPIYVHASKAKLLAELCANPKKKRICGIFTSHCMVKVGNTYNNKGELLLPEGVYMLNTIQTDGRGKLTNANGEKSNLININYLMKAGMKKVSIKEL

SEQ ID NO: 160 - protein, 1074 aa, unidentified
  REGION 1..1074: note = Description of Unknown: uncultivated organism with predicted taxonomy: Verrucomicrobia
  REGION 1..1074: note = MG1-164 effector
MHTKETVWGFDIGKGSLGEAVRVGNEFKHVLSMEIDADFAEIKTAAATRRAWRTREAHKAREMWLEKCLSDADIEILGRRKVDIVDGTWKLVSRGDGRLEREFPADGENVCYNSIALRCKLLLGEKLESWQVFKALNSAIQNRGYDAQIPWGDEDGKSSETKRSGKSDSAKKSGEDESYAERLALFEREFDKLLAEVENREKYDFPCFFKAAKMGLWSPENPDKVGIRIDNTAEKAKGYVVPRNAVIAEFRALVNAAAKQYPKLKGKADFIMFGKAEEAYASYKPELRRKFGLRRGADSDWTALGQKTPRFDNRIIGKCKLIPRLNVCKIKPLKECKTEDDFLPHTITLALKLLNLRFFRGAGIDSLSFDEFLRAFEIARQNKFALNKTNLKKFFKTIGAEIMDENQSSVEQPREGGRAAYSRPAMRLLRDLIFSGKSPAEFYASRICKIENTDKNRGLVAEDLAFIKLMGDIPWNGIFVPDVDTFNFANIRESERADKINKLIGSQNDPIVRHRLAFFYERIKLLESKFGAPDKIVLEFVRDDFLGSKAKKEMSQGIKKRFEEKKKLAEELDSQRAEFGNKYASKKMLLKFELYKKQRGRCVYTDNALPLSELENLEVEHIFPRSRGGADAMYNYVLTDENTNKQKGERTPFEWLSSDKTKWESYCDRVRSLTQSLGAKRCKLLVSPNAEELMQKYTALAETAWISKLAQKICCIHFGFQFGGLKGEKKVWTVSGNTTAMIRGRYGLNRLLHNEEISEDLPLLDRIVKEKNFEEKNRDNKKHHALDAMCICFAPTSNAKKALSRKNILPEEIAKNPESDDARKFFAKYLAEVVPTKVAIKKPELEQTIYSKRVIGGRQTIVKKCNVRDLAYKGQNPKYDFDTLTKRIKDIINPVSKRVIEDFAKTEPTEAEWEDWCKYEAAIPSKNGSPTRLLRVLVEIGNPEEYKDLSKDGCGAYRKGDSHKGQFIWKNKKGRYIVAPIYAHASKAKVLDDLQNNPDCAEICGFFRTNCLVKIPNDVADKDGKILLKAGFYKSNTIKTEGRVKLTNPNGIITEIGLQHLMNAGMKRVETNTI

SEQ ID NO: 161 - protein, 1059 aa, unidentified
  REGION 1..1059: note = Description of Unknown: uncultivated organism with predicted taxonomy: unclassified Verrucomicrobia (miscellaneous)
  REGION 1..1059: note = MG1-165 effector
MEKEKNNHVWGFDIGKGSLGEAVRIGGDFKHIASVLLDPEFGEIKTAALVRRQMRTRKAHKAREKWLEECLEGTGVEILKRREVGIVDGQWQLISKGDERLEREFPPSGEDVCYNSIALRCKLLLGEKLEGWQVFKALNSAIQKRGYDENIPWGEAEEKSSKKDDDDYAQKLSQYEKEKSELFESFADGEKYDFPCFFKAYKMGLWSPENPTRVEMRIDCRAQKAKSYVIARKYVEREFECLVEAAAKFFPKLKGRAKFILYGVSETPYASYYGNMRKKFGLKRGAESDWTALGQKVPRFDNRIIDKCRLIPRMNVCKIRPLNEARNEKDLLYYEVTLALKLLNLRFFRNSNIEQLTFEEFKKAFEIAAGAKYKMTKTAMKKFLKSISATALGDDYAEIEPPKESGRASFSRPAMEILKELIFSGMPPREFYGRKISEISNTDKNKGVVSSDLDFIKLMGDCPWGGIFIPDVQTYQFANAAFPDPDAQINKLIGSQNNPIVRHRLTFFFERIKFLESKYGVPDKVVLEFVRDDFMGEKEKKEMRIAMKKRAEEKMRIAKDLDEHGFKGGNLLLKMELYRKQNGICLYTGDALPLSELATLEIEHIVPRSRGGPDAQYNYVITREKTNKLKGDKTPYEWLSSDAKEWASYTDRVNACAKALGKKRCRLLLEKDAEELVEKYTALAETAHIAKLAQKIVCMHFGFQFGGLSGTKRVFTVPGALTSRIRKFYGLDRILHNSAAESENLSFEEFLKFSEDLEKKNRKNKKHHALDAMCLCFAPTGVDSRRAKLGEILPEKLRSEKAAREFFKSYLDKIMPVDVAPKKPRLEDGIYSKRIIGGKACMVKRNNLVDLAYKSGLKPVFDIPTLIKLVDKKEKGIINPQIRKMIGEFAATNPDESAWRKWCEEVRLPSKSGLGARVMRVLVYYGEADEYKDLSKDGCGAYRKGDGHKGQVIWESVDGKYYVEPVYVHASKAGVMAALNANPKKKRICGMFNSHCTVDVGDVYNDKGDFILPAGRYMVNTIQKNGQCVLTNADGEKRNPININYLMRAGMRRVELSEL

SEQ ID NO: 162 - protein, 1059 aa, unidentified
  REGION 1..1059: note = Description of Unknown: uncultivated organism with predicted taxonomy: unclassified Verrucomicrobia (miscellaneous)
  REGION 1..1059: note = MG1-166 effector
MEKEKNNHVWGFDIGKGSLGEAVRIGGDFKHIASVLLDPEFGEIKTAALARRQMRTRKAHKAREKWLEECLEGTGVEILKRREVGIVDGQWQLISKGDERLEREFPPSGEDVCYNSIALRCKLLLGEKLEGWQVFKALNSAIQKRGYDENIPWGEAEEKSSKKDDDDYAQKLSQYEKEKSELFESFADGEKYDFPCFFKAYKMGLWSPENPTRVEVRIDCRAQKAKSYVIARKYVEREFECLVEAAAKFFPKLKGRAKFILYGVSETPYASYYGNMRKKFGLKRGAESDWTALGQKVPRFDNRIIDKCRFIPRMNVCKIRPLNEARNEKDLLYYEVTLALKLLNLRFFRNSNIEQLTFEEFKKAFEIAAGAKYKMTKTAMKKFLKSISATALGDDYAEIEPPKESGRASFSRPAMEILKELIFSGMPPREFYGRKISEISNTDKNKGVVSSDLDFIKLMGDCPWGGIFIPDGQTYQFANAAFPDPDAQINKLIGSQNNPIVRHRLTFFFERIKFLESKYGVPDKVVLEFVRDDFMGEKEKKEMRIAMKKRAEEKMRIAKDLDEHGFKGGNLLLKMELYRKQNGICLYTGDALPLSELATLEIEHIVPRSRGGPDAQYNYVITREKTNKLKGDKTPYEWLSSDAKEWASYTDRVNACAKGLGKKRCRLLLEKDAEELVEKYTALAETAHIAKLAQKIVCMHFGFQFGGLSGTKRVFTVPGALTSRIRKFYGLDRILHNSASESENLSFEEFLKFSEDLEKKNRKNKKHHALDAMCLCFAPTGVDSRRAKLGEILPEKLRSEKAAREFFKSYLEKIMPVDVAPKKPRLEDGIYSKRIIGGKACMVKRNNLVDLAYKSGLKPVFDIPTLIKLVDKKEKGIINPQIRKMIGEFAATNPDESAWRKWCEEVRLPSKSGLGARIMRVLVYYGEADEYKDLSKDGYGAYRKGDGHKGQVIWESVDGKYYVEPVYVHASKAGVMAALNANPKKKRICGMFNSHCTVDVGDVYNDKGEFILPAGRYMVNTIRSDNQCVLTNADGEKRNPININYLMRAGMRRVDLSEL

SEQ ID NO: 163 - protein, 1055 aa, unidentified
  REGION 1..1055: note = Description of Unknown: uncultivated organism with predicted taxonomy: unclassified Verrucomicrobia (miscellaneous)
  REGION 1..1055: note = MG1-167 effector
KNNHVWGFDIGKGSLGEAVRIGGDFKHIASVLLDPEFGEIKTAALARRQMRTRKAHKAREKWLEECLEGTGVEILKRREVGIVDGQWRLISKGDERLEREFPPSGEDVCYNSIALRCKLLLGEKLEGWQVFKALNSAIQKRGYDENIPWGEAEEKSSKKDDDDYAQKLSQYEKEKSELFESFADGEKYDFPCFFKAYKMGLWSPENPTRVEVRIDCRAQKAKSYVIARKYVEREFECLVEAAAKFFPKLKGRAKFILYGVSETPYASYYGNMRKKFGLKRGAESDWTALGQKVPRFDNRIIDKCRLIPRMNVCKIRPLNEARNEKDLLYYEVTLALKLLNLRFFRNSNIEQLTFEEFKKAFEIAAGAKYKMTKTAMKKFLKSISATALGDDYAEIEPPKESGRASFSRPAMEILKELIFSGMPPREFYGRKISEISNTDKNKGVVSSDLDFIKLMGDCPWGGIFIPDVQTYQFANAVFPDPDAQINKLIGSQNNPIVRHRLTFFFERIKFLESKYGVPDKVVLEFVRDDFMGEKEKKEMRIAMKKRAEEKMRIAKDLDEHGFKGGNLLLKMELYRKQNGICLYTGDALPLSELATLEIEHIVPRSRGGPDAQYNYVITREKTNKLKGDKTPYEWLSSDAKEWASYTDRVNACAKALGKKRCRLLLEKDAEELVEKYTALAETAHIAKLAQKIVCMHFGFQFGGLSGTKRVFTVPGALTSRIRKFYGLDRILHNSAAESENLSFEEFLKFSEDLEKKNRKNKKHHALDAMCLCFAPTGVDSRRAKLGEILPEKLRSEKAAREFFKSYLDKIMPVDVAPKKPRLEDGIYSKRIIGGKACMVKRNNLVDLAYKSGLKPVFDIPTLIKLVDKKEKGIINPQIRKMIGEFAATNPDESAWRKWCEEVRLPSKSGLGARIMRVLVYYGEADEYKDLSKDGYGAYRKGDGHKGQVIWESVDGKYYVEPVYVHASKAGVMAALNANPKKKRICGMFNSHCTVDVGDVYNDKGDFILPAGRYMVNTIRSDNQCVLTNADGEKRNPININYLMRAGMRRVDLSEL

SEQ ID NO: 164 - protein, 988 aa, unidentified
  REGION 1..988: note = Description of Unknown: uncultivated organism with predicted taxonomy: Verrucomicrobia
  REGION 1..988: note = MG1-168 effector
GRWKLVSEGDRRLEREFPADGEDCCYNSIALRCKLLLGEKLESWQVFKALNSAIQTRGYDAKIPWGNDDGKTSDSAKGGKSEAAKEEESYAEKLALYEREFDGLLAEVDNRKKYDFPCFFKAAKIGLWSPANPDAVKIRIDNTAEKAKGYVVPRSAVIAEFRALVDAAAKQYPALKGKADFIMFGVSEEPYASYNPELRKKFGLERGAESDWTALGQKTPRFDNRVIDKCKLIPRLNVCKIKPLPECRTDDDFLPYETTLALKLLNLRFFRGAGVDSLSFDEFLRAFEIAKNNKFELNKTNLKKFFKSIGAEVIDESQSKIEQPRSSGRASFSRPAMRILRNLVFSGKSPAEFYETELVKITNTDKNRGIVAEDIKFLKLMGNVPWGGIFVPDVGVFDFADSTECSRAVQINKLIGMQNDPIVRHRLSFFYGRIKSLDAEFGTPDKIVLEFVRDDFLGKKAKADLSKAINDRAKEKKKYAEELDSQRENFGPKYASKKMLLKYELYSKQKGECIYTGRALGFSDLEQLEVEHIVPRSRGGPDALYNYVLTDEKTNKDKGDRTPFEWLSSKGVEWDAYRDRVRGLTKELGAKRCKLLLSPNAEELVEKYTALAETAWISKLAQRICCIHFGFQFGGLTGEKKVWTVSGNTTAMIRSRYGLNRLLHNEDVPKDISLSERLKLESEFERKNRDNKKHHALDAMCLCYAPTSNTRRAASYKNILPAEITRNPESDEARRFFGGYLANVIPNKVAIEKPTLEQTIYAKRLINGKETIVKKCNVRDLAYAGRNPQYSYLTLVKNIKCIVGKVSKNIISDFVLSNPDLNESEWENWCKYDAVIPSKNGAPTKLLRVLCGARNPEEYKDLSKDGCGAYRKGNLHKGQFVWKTKQGCYVVTPVYAFESKIKVWDDMRRDPNCEEICGFFRQNCLVEIPNDVYDSKGVLKLKAGVYRSNTIRADGFVKLTNSDGFSPNPISIQYLMSAGMKRITLNTI

SEQ ID NO: 165 - protein, 991 aa, unidentified
  REGION 1..991: note = Description of Unknown: uncultivated organism with predicted taxonomy: unclassified Verrucomicrobia (miscellaneous)
  REGION 1..991: note = MG1-169 effector
ECLEGTGVEILKRREVGIVDGQWQLISKGDERLEREFPPSGEDVCYNSIALRCKLLLGEKLEGWQVFKALNSAIQKRGYDENIPWGEAEEKSSKKDDDDYAQKLSQYEKEKSELFESFADGEKYDFPCFFKAYKMGLWSPENPTRVEVRIDCRAQKAKSYVIARKYVEREFECLVEAAAKFFPKLKGRAKFILYGVSETPYASYYGNMRKKFGLKRGAESDWTALGQKVPRFDNRIIDKCRLIPRMNVCKIRPLNESRNEKDLLYYEVTLALKLLNLRFFRNSNIEQLTFEEFKKAFEIAAGAKYKMTKTAMKKFLKSISATALGDDYAEIEPPKESGRASFSRPAMEILKELIFSGMPPREFYGRKISEISNTDKNKGVVSSDLDFIKLMGDCPWGGIFIPDVQTYQFANAAFPDPDAQINKLIGSQNNPIVRHRLTFFFERIKFLESKYGVPDKVVLEFVRDDFMGEKEKKEMRIAMKKRAEEKMRIAKDLDEHGFKGGNLLLKMELYRKQNGICLYTGDALPLSELATLEIEHIVPRSRGGPDAQYNYVITREKTNKLKGDKTPYEWLSSDAKEWASYTDRVNACAKALGKKRCRLLLEKDAEELVEKYTALAETAHIAKLAQKIVCMHFGFQFGGLSGTKRVFTVPGALTSRIRKFYGLDRILHNSAAESENLSFEEFLKFSEDLEKKNRKNKKHHALDAMCLCFAPTGVDSRRAKLGEILPEKLRSEKAAREFFKSYLDKIMPVDVAPKKPRLEDGIYSKRIIGGKACMVKRNNLVDLAYKSGLKPVFDIPTLIKLVDKKEKGIINPQIRKMIGEFAATNPDESAWRKWCEEVRLPSKSGLGARIMRVLVYYGEADEYKDLSKDGCGAYRKGDGHKGQVIWESVDGKYYVEPVYVHASKAGVMAALNANPKKKRICGMFNSHCTVDVGDVYNDKGDFILPAGRYMVNTILTTGRCVLTNADGEKRNPININYLMRAGMRRVDLNEL

SEQ ID NO: 166 - protein, 872 aa, unidentified
  REGION 1..872: note = Description of Unknown: uncultivated organism with predicted taxonomy: unclassified Verrucomicrobia (miscellaneous)
  REGION 1..872: note = MG1-170 effector
DGEKYDFPCFFKAYKMGLWSPENPTRVEVRIDCRAQKAKSYVIARKYVEREFECLVEAAAKFFPKLKGRAKFILYGVSETPYASYYGNMRKKFGLKRGAESDWTALGQKVPRFDNRIIDKCRLIPRMNVCKIRPLNESRNEKDLLYYEVTLALKLLNLRFFRNSNIEQLTFEEFKKAFEIAAGAKYKMTKTAMKKFLKSISATALGDDYAEIEPPKESGRASFSRPAMEILKELIFSGMPPREFYGRKISEISNTDKNKGVVSSDLDFIKLMGDCPWGGIFIPDVQTYQFANAAFPDPDAQINKLIGSQNNPIVRHRLTFFFERIKFLESKYGVPDKVVLEFVRDDFMGEKEKKEMRIAMKKRAEEKMRIAKDLDEHGFKGGNLLLKMELYRKQNGICLYTGDALPLSELATLEIEHIVPRSRGGPDAQYNYVITREKTNKLKGDKTPYEWLSSDAKEWASYTDRVNACAKALGKKRCRLLLEKDAEELVEKYTALAETAHIAKLAQKIVCMHFGFQFGGLSGTKRVFTVPGALTSRIRKFYGLDRILHNSAAESENLSFEEFLKFSEDLEKKNRKNKKHHALDAMCLCFAPTGVDSRRAKLGEILPEKLRSEKAAREFFKSYLDKIMPVDVAPKKPRLEDGIYSKRIIGGKACMVKRNNLVDLAYKSGLKPVFDIPTLIKLVDKKEKGIINPQIRKMIGEFAATNPDESAWRKWCEEVRLPSKSGLGARIMRVLVYYGEADEYKDLSKDGCGAYRKGDGHKGQVIWESVDGKYYVEPVYVHASKAGVMAALNANPKKKRICGMFNSHCTVDVGDVYNDKGDFILPAGRYMVNTILTTGRCVLTNADGEKRNPININYLMRAGMRRVDLNEL

SEQ ID NO: 167 - protein, 1064 aa, unidentified
  REGION 1..1064: note = Description of Unknown: uncultivated organism with predicted taxonomy: unclassified Verrucomicrobia (miscellaneous)
  REGION 1..1064: note = MG1-171 effector
EFNKNMEKEKNNHVWGFDIGKGSLGEAVRIGGDFKHIASVLLDPEFGEIKTAALARRQMRTRKAHKAREKWLEECLEGTGVEILKRREVGIVDGQWQLISKGDERLEREFPPSGEDVCYNSIALRCKLLLGEKLEGWQVFKALNSAIQKRGYDENIPWGEAEEKSSKKDDDDYAQKLSQYEKEKSELFESFADGEKYDFPCFFKAYKMGLWSPENPTRVEVRIDCRAQKAKSYVIARKYVEREFECLVEAAAKFFPKLKGRAKFILYGVSETPYASYYGNMRKKFGLKRGAESDWTALGQKVPRFDNRIIDKCRLIPRMNVCKIRPLNESRNEKDLLYYEVTLALKLLNLRFFRNSNIEQLTFEEFKKAFEIAAGAKYKMTKTAMKKFLKSISATALGDDYAEIEPPKESGRASFSRPAMEILKELIFSGMPPREFYGRKISEISNTDKNKGVVSSDLDFIKLMGDCPWGGIFIPDVQTYQFANAAFPDPDAQINKLIGSQNNPIVRHRLTFFFERIKFLESKYGVPDKVVLEFVRDDFMGEKEKKEMRIAMKKRAEEKMRIAKDLDEHGFKGDNLLLKMELYRKQNGICLYTGDALPLSELATLEIEHIVPRSRGGPDAQYNYVITREKTNKLKGDKTPYEWLSSDAKEWASYTDRVNACAKALGKKRCRLLLEKDAEELVEKYTALAETAHIAKLAQKIVCMHFGFQFGGLSGTKRVFTVPGALTSRIRKFYGLDRILHNSAAESENLSFEEFLKFSEDLEKKNRKNKKHHALDAMCLCFAPTGVDSRRAKLGEILPEKLRSEKAAREFFKSYLDKIMPVDVAPKKPRLEDGIYSKRIIGGKACMVKRNNLVDLAYKSGLKPVFDIPTLIKLVDKKEKGIINPQIRKMIGEFAATNPDESAWRKWCEEVRLPSKSGLGARIMRVLVYYGEADEYKDLSKDGCGAYRKGDGHKGQVIWESVDGKYYVEPVYVHASKAGVMAALNANPKKKRICGMFNSHCTVDVGDVYNDKGDFILPAGRYMVNTILTTGRCVLTNADGEKRNPININYLMRAGMRRVDLNEL

SEQ ID NO: 168 - protein, 1073 aa, unidentified; identical to SEQ ID NO: 133
  REGION 1..1073: note = Description of Unknown: uncultivated organism with predicted taxonomy: Verrucomicrobia
  REGION 1..1073: note = MG1-172 effector

SEQ ID NO: 169 - protein, 1046 aa, unidentified
  REGION 1..1046: note = Description of Unknown: uncultivated organism with predicted taxonomy: unclassified Verrucomicrobia (miscellaneous)
  REGION 1..1046: note = MG1-173 effector
IGKGSLGEAVRIGGDFKHIASVLLDPEFGEIKTAALARRQMRTRKAHKAREKWLEECLEGTGVEILKRREVGIVDGQWQLISKGDERLEREFPPSGEDVCYNSIALRCKLLLGEKLEGWQVFKALNSAIQKRGYDENIPWGEAEEKSSKKDDDDYAQKLSQYEKEKSELFESFADGEKYDFPCFFKAYKMGLWSPENPTRVEVRIDCRAQKAKSYVIARKYVEREFECLVEAAAKFFPKLKGRAKFILYGVSETPYASYYGNMRKKFGLKRGAESDWTALGQKVPRFDNRIIDKCRLIPRMNVCKIRPLNEARNEKDLLYYEVTLALKLLNLRFFRNSNIEQLTFEEFKKAFEIAAGAKYKMTKTAMKKFLKSISATALGDDYAEIEPPKESGRASFSRPAMEILKELIFSGMPPREFYGRKISEISNTDKNKGVVSSDLDFIKLMGDCPWGGIFIPDVQTYQFANAAFPDPDAQINKLIGSQNNPIVRHRLTFFFERIKFLESKYGVPDKVVLEFVRDDFMGEKEKKEMRIAMKKRAEEKMRIAKDLDEHGFKGGNLLLKMELYRKQNGICLYTGDALPLSELATLEIEHIVPRSRGGPDAQYNYVITREKTNKLKGDKTPYEWLSSDAKEWASYTDRVNACTKALGKKRCRLLLEKDAEELVEKYTALAETAHIAKLAQKIVCMHFGFQFGGLSGTKRVFTVPGALTSRIRKFYGLDRILHNSAAESENLSFEEFLKFSEDLEKKNRKNKKHHALDAMCLCFAPTGVDSRRAKLGEILPEKLRSEKAAREFFKSYLDKIMPVDVAPKKPRLEDGIYSKRIIGGKACMVKRNNLVDLAYKSGLKPVFDIPTLIKLVDKKEKGIINPQIRKMIGEFAATNPDESAWRKWCEEVRLPSKSGLGARIMRVLVYYGEADEYKDLSKDGYGAYRKGDGHKGQVIWESVDGKYYVEPVYVHASKAGVMAALNANPKKKRICGMFNSHCTVDVGDVYNDKSDFILPAGRYMVNTIRSDNQCVLTNADGEKRNPININYLMRAGMRRVDLSEL

SEQ ID NO: 170 - protein, 1059 aa, unidentified; identical to SEQ ID NO: 86
  REGION 1..1059: note = Description of Unknown: uncultivated organism with predicted taxonomy: unclassified Verrucomicrobia (miscellaneous)
  REGION 1..1059: note = MG1-174 effector

SEQ ID NO: 171 - protein, 918 aa, unidentified
  REGION 1..918: note = Description of Unknown: uncultivated organism with predicted taxonomy: Coraliomargarita sp. CAG:312
  REGION 1..918: note = MG1-175 effector
AADGGDGSSRKSSDSDASGDGESYAEKLAHYEREFDGILAELDNREKYEFPCFFKAAKMGLWSPENPDFVGVRIDNTAEKAKGYVVPREAVVREFRALVNAAALQYPNLKGKADFIMFGRACEPYASYNPELRKRFGLKRGAATDWTALGQKTPRFDNRVIDKCKLIPRLNVCKIKPLDECKTDDDFLSYTITLSLKLLNLRFFRGAGVDSLSFDEFLRAFELAKNSKFKLGKAALKKFFKTIGAEVMDESQSEIEQPRNGGRAAFSRPAMRILRDLIFSGKSPAEFYAAAIENIANTDKNKGLVAGDLDFLKLMGDAPWSGIFIPDVGLSDFADASEAAREAQINKLIGSQNDPIVRHRLSFFYERIKSLEAKFGVPDKIVLEFVRDDFLGKKAKSDLNKAIKTRFDEKKKLAEDLDSKREEFGFKYASKKMLLKFELYKKQGGECVYTGNALPLSELESLEIEHIVPRSRGGPDAMYNYVLTDEKTNKEKGDRTPFEWRSTMGAEWESYCERVRKLTKELGAKRCKLLLSPNAAELVEKYTALAETAWISKLAQRICCLHFGFQFGGLAGAKKVWTVSGNTTAMIRGRYGLNRLLHDEESAEDLSLFDRICMEKKFEEKNRKNKKHHALDAMCLCFAPTSNAKKASAYKNILPEEITRNPESDEARKFFGKYLASVIPNKVAVEKSKLEQTIYSLRKGRIVKKCNVRDLAYEGINPKYNYTKLVKRIESIVGDVSKRIISDFVLSNPDLNESEWEEWCKYKAAIPSKNGAPTKLLRVLFDVGSPEEYKDLSKDGCGAYRKGDSHKGQFIWKTQKGKYMVAPVYAHASKAKVFASLKNNPDCAEVCGFFRQNCLVEIPNDVIDKSGKMLLKSGIYKSNTIMSDGRAKFTNSDGISTNPISIQYLMPAGMKRIKLDTV

SEQ ID NO: 172 - protein, 1059 aa, unidentified
  REGION 1..1059: note = Description of Unknown: uncultivated organism with predicted taxonomy: unclassified Verrucomicrobia (miscellaneous)
  REGION 1..1059: note = MG1-176 effector
MEKEKNNHVWGFDIGKGSLGEAVRIGGDFKHIASVLLDPEFGEIKTAALARRQMRTRKAHKAREKWLEECLEGTGVEILKRREVGIVDGQWQLISKGDERLEREFPPSGEDVCYNSIALRCKLLLGEKLEGWQVFKALNSAIQKRGYDENIPWGEAEEKSSKKDDDDYAQKLSQYEKEKSELFESFADGEKYDFPCFFKAYKMGLWSPENPTRVEVRIDCRAQKAKSYVIARKYVEREFECLVEAAAKFFPKLKGRAKFILYGVSETPYASYYGNMRKKFGLKRGAESDWTALGQKVPRFDNRIIDKCRLIPRMNVCKIRPLNEARNEKDLLYYEVTLALKLLNLRFFRNSNIEQLTFEEFKKAFEIAAGAKYKMTKTAMKKFLKSISATALGDDYAEIEPPKESGRASFSRPAMEILKELIFSGMPPREFYGRKISEISNTDKNKGVVSSDLDFIKLMGDCPWGGIFIPDVQTYQFANAAFPDPDAQINKLIGSQNNPIVRHRLTFFFERIKFLESKYGVPDKVVLEFVRDDFMGEKEKKEMRIAMKKRAEEKMRIAKDLDGHGFKGGNLLLKMELYRKQNGICLYTGDALPLSELATLEIEHIVPRSRGGPDAQYNYVITREKTNKLKGDKTPYEWLSSDAKEWASYTDRVNACAKALGKKRCRLLLEKDAEELVEKYAALAETAHIAKLAQKIVCMHFGFQFGGLSGTKRVFTVPGALTSRIRKFYGLDRILHNSAAESENLSFEEFLKFSEDLEKKNRKNKKHHALDAMCLCFAPTGVDSRRAKLGEILPEKLRSEKAAREFFKSYLDKIMPVDVAPKKPRLEDGIYSKRIIGGKACMVKRNNLVDLAYKSGLKPVFDIPTLIKLVDKKEKGIINPQIRKMIGEFAATNPDESAWRKWCEEVRLPSKSGLGARIMRVLVYYGEADEYKDLSKDGCGAYRKGDGHKGQVIWESVDGKYYVEPVYVHASKAGVMAALNANPKKKRICGMFNSHCAVDVGDVYNDKGDFILPAGRYMVNTIRSDNQCVLTNADGEKRNPININYLMRAGMRRVDLSEL

SEQ ID NO: 173 - protein, 1073 aa, unidentified; identical to SEQ ID NO: 142
  REGION 1..1073: note = Description of Unknown: uncultivated organism with predicted taxonomy: Verrucomicrobia
  REGION 1..1073: note = MG1-177 effector

SEQ ID NO: 174 - protein, 1052 aa, unidentified; identical to SEQ ID NO: 155
  REGION 1..1052: note = Description of Unknown: uncultivated organism with predicted taxonomy: Coraliomargarita sp. CAG:312
  REGION 1..1052: note = MG1-178 effector

SEQ ID NO: 175 - protein, 846 aa, unidentified
  REGION 1..846: note = Description of Unknown: uncultivated organism with predicted taxonomy: Coraliomargarita sp. CAG:312
  REGION 1..846: note = MG1-179 effector
TLFRSAEKAKGYVVPREAVVREFRALVNAAALQYPNLKGKADFIMFGRACEPYASYNPELRKRFGLKRGAATDWTALGQKTPRFDNRVIDKCKLIPRLNVCRIKPLDECKTDDDFLSYTITLSLKLLNLRFFRGAGMDSLSFDEFLRAFELAKNSKFKLGKAALKKFFKTIGAEVMDESQSEIEQPRNGGRAAFSRPAMRILRDLIFSGKSPADFYATAIENIANTDKNKGLVAGDLDFLKLMGDAPWSGIFIPDVGLSDFADASEAARAAQINKLIGSQNDPIVRHRLSFFYERIKSLEAKFGVPDKIVLEFVRDDFLGKKAKSDLNKAIKTRFDEKKKLAEELDSNRAEFGPKYASKKMLLKYELYKKQGGKCVYTGNALPLSELENLEIEHIVPRSRGGPDAMYNYVLTDEKTNKEKGDRTPFEWRSTMGAEWESYCARVRELTKKLGAKRCKLLLAPNAAELVEKYTALAETAWISKLAQRICCLHFGFQFGGLAGAKKVWTVSGNTTSMIRGRYGLNRLLHDEESAEDLSLFDRICMEKKFEEKNRKNKKHHALDAMCLCFAPTSNAKKASAYKNILPEEITRNPESDEARKFFGKYLANVIPNKVAVEKPTLEQTIYAMRNGRIVKKCNVRDLAYTGINPKYNYSTLVKSIKSIVGEVPKRIISDFVLSNSDLSESEWEDWCKNEAAIPSKNGAPTKLLRVLCDAGNPEEYKDLSKDGCGAYRKGDSHKGQFIWKTKQGRYVVAPVYAHASKAKVLAALKNNPDCAEVCGFFRQNCLVEIPNDVVDKSGKMLLKAGVYRSNSVRSNGQVAITNSDGISPNPISIQYLMPAGMKRIKLDTV

SEQ ID NO: 176 - protein, 1018 aa, unidentified
  REGION 1..1018: note = Description of Unknown: uncultivated organism with predicted taxonomy: unclassified Verrucomicrobia (miscellaneous)
  REGION 1..1018: note = MG1-180 effector
IASVLLDPEFGEIKTAALVRRQMRTRKAHKAREKWLEECLEGTGVVDGQWQLISKGDERLEREFPPSGEDVCYNSIALRCKLLLGEKLEGWQVFKALNSAIQKRGYDENIPWGEAEEKSSKKDDDDYAQKLSQYEKEKSELFESFADGEKYDFPCFFKAYKMGLWSPENPTRVEMRIDCRAQKAKSYVIARKYVEREFECLVEAAAKFFPKLKGRAKFILYGVSETPYASYYGNMRKKFGLKRGAESDWTALGQKVPRFDNRIIDKCRLIPRMNVCKIRPLNEARNEKDLLYYEVTLALKLLNLRFFRNSNIEQLTFEEFKKAFEIAAGAKYKMTKTAMKKFLKSISATSLGDDYAEIEPPKESGRASFSRPAMEILKELIFSGMPPREFYGRKISEISNTDKNKGVVSSDLDFIKLMGDCPWGGIFIPDVQTYQFANAAFPDPDAQINKLIGSQNNPIVRHRLTFFFERIKFLESKYGVPDKVVLEFVRDDFMGEKEKKEMRIAMKKRAEEKMRIAKDLDEHGFKGGNLLLKMELYRKQNGICLYTGDALPLSELATLEIEHIVPRSRGGPDAQYNYVITREKTNKLKGDKTPYEWISSDAKEWASYTDRVNACAKALGKKRCRLLLEKDAEELVEKYTALAETAHIAKLAQKIVCMHFGFQFGGVSGTKRVFTVPGALTSRIRKFYGLDRILHNSAAESENLSFEEFLKFSEDLEKKNRKNKKHHALDAMCLCFAPTGVDSRRAKLGEILPEKLRSEKAAREFFKSYLDKIMPVDVAPKKPRLEDGIYSKRIIGGKACMVKRNNLVDLAYKSGLKPVFDIPTLIKLVDKKEKGIINPQIRKMIGEFAATNPDESAWRKWCEEVRLPSKSGLGARIMRVLVYYGEADEYKDLSKDGYGAYRKGDGHKGQVIWESVDGKYYVEPVYVHASKAGVMAALNANPKKKRICGMFNSHCTVDVGDVYNDKGDFILPAGRYMVNTIRSDNQCVLTNADGEKRNPININYLMRAGMRRVDLSEL

SEQ ID NO: 177 - protein, 1077 aa, unidentified; identical to SEQ ID NO: 111
  REGION 1..1077: note = Description of Unknown: uncultivated organism with predicted taxonomy: unclassified Verrucomicrobia (miscellaneous)
  REGION 1..1077: note = MG1-181 effector

SEQ ID NO: 178 - protein, 1061 aa, unidentified; identical to SEQ ID NO: 112
  REGION 1..1061: note = Description of Unknown: uncultivated organism with predicted taxonomy: unclassified Verrucomicrobia (miscellaneous)
  REGION 1..1061: note = MG1-182 effector

SEQ ID NO: 179 - protein, 1062 aa, unidentified; identical to SEQ ID NO: 92
  REGION 1..1062: note = Description of Unknown: uncultivated organism with predicted taxonomy: Coraliomargarita sp. CAG:312
  REGION 1..1062: note = MG1-183 effector

SEQ ID NO: 180 - protein, 1059 aa, unidentified; identical to SEQ ID NO: 127
  REGION 1..1059: note = Description of Unknown: uncultivated organism with predicted taxonomy: unclassified Verrucomicrobia (miscellaneous)
  REGION 1..1059: note = MG1-184 effector

SEQ ID NO: 181 - protein, 1062 aa, unidentified; identical to SEQ ID NO: 122
  REGION 1..1062: note = Description of Unknown: uncultivated organism with predicted taxonomy: Coraliomargarita sp. CAG:312
  REGION 1..1062: note = MG1-185 effector

SEQ ID NO: 182 - protein, 1054 aa, unidentified; identical to SEQ ID NO: 123
  REGION 1..1054: note = Description of Unknown: uncultivated organism with predicted taxonomy: unclassified Verrucomicrobia (miscellaneous)
  REGION 1..1054: note = MG1-186 effector

SEQ ID NO: 183 - protein, 957 aa, unidentified
  REGION 1..957: note = Description of Unknown: uncultivated organism with predicted taxonomy: Verrucomicrobia
  REGION 1..957: note = MG1-187 effector
LRCKLLLGEKLESWQVFKALNSAIQNRGYDANIPWGDEDAADGGDGSSRKSSDSDASGDGESYAEKLAHYEREFDGILAELDNREKYEFPCFFKAAKMGLWSPENPDFVGVRIDNTAEKAKGYVVPREAVVREFRALVNAAALQYPNLKGKADFIMFGRACEPYASYNPELRKRFGLKRGAATDWTALGQKTPRFDNRVIDKCKLIPRLNVCKIKPLDECKTDDDFLSYTITLSLKLLNLRFFRGAGVDSLSFDEFLRAFELAKNSKFKLGKAALKKFFKTIGAEVMDESQSEIEQPRNGGRAAFSRPAMRILRDLIFSGKSPAEFYATAIENIANTDKNKGLVAGDLDFLKLMGDAPWSGIFIPDVGLSDFADASEAAREAQINKLIGSQNDPIVRHRLSFFYERIKSLEAKFGVPDKIVLEFVRDDFLGKKAKSDLNKAIKTRFDEKKKLAEDLDSKREEFGFKYASKKMLLKFELYKKQGGECVYTGNALPLSELESLEIEHIVPRSRGGPDAMYNYVLTDEKTNKEKGDRTPFEWRSTMGAEWESYCERVRKLTKELGAKRCKLLLSPNAAELVEKYTALAETAWISKLAQRICCLHFGFQFGGLAGAKKVWTVSGNTTAMIRGRYGLNRLLHDEESAEDLSLFDRICMEKKFEEKNRKNKKHHALDAMCLCFAPTSNAKKASAYKNILPEEITRNPESDEARKFFGKYLANVIPNKVAVEKPTLEQTIYAMRKGRIVKKCNVRDLAYEGINPKYNYTKLVKRIESIVGDVSKRIISDFVLSNPDLNESEWEEWCKYKAAIPSKNGAPTKLLRVLCDAGNPEEYKDLSKDGCGAYRKGDSHKGQFIWKTKQGRYVVAPVYAHASKAKVLAALKNNPDCAEVCGFFRQNCLVEIPNDVIDKSGKMLLKSGIYKSNTIMSDGRAKFTNSDGISTNPISIQYLMPAGMKRIKLDTV

SEQ ID NO: 184 - protein, 1062 aa, unidentified
  REGION 1..1062: note = Description of Unknown: uncultivated organism with predicted taxonomy: Verrucomicrobia
  REGION 1..1062: note = MG1-188 effector
MNNNNTQIWGFDIGKASLGEAVWCGGKFKHVESLILDKDFAEIKTSAGRRRQARTRKAHKAREEWLEKCLEDCGIEILKRRKVGIVNGQWKLISKGDARLEKEFPAEGEEVCYNSIALRCKLILGENLESWQIFKALNSSIQHRGYDENIPWKETQNESKKEDGDYFKKIVLYESEKEDILNRLPQECKREDFDFPCFFKAKKMGIWSEENPYKVGLRISNNAQKAKGYVIPRKYVENEFVRLVQMASLQYPKLKDKQMFILYGISETPYASLFKDARKKFGLKRGADSDWTALGQKIPRFDNRMIGKCKLIPRLNTCKIKSPEKIKSEEDLLHYDITLALKLLNLRFFKDSEICALSFEEFKKLFEIGKSNKYKISKTDLKKFLKSIGASVLSQDHSEIEAPRTSGRSSFSRPAMKILKELIFSGEPPSKFLKAKIDKIANTDPNKGIIREDLDFIRIMGDCPWNGIFIPDVETYKYASQTQENSEAQINKLIGSQNDPIVRHRLSFFYERIKALSEKFGVPDKIVLEFVREDFMGKQAKKDLSLSMKKRFEEKIDIAKKLDDIGYKGNKMLLKMELLQKQGFACLYTGEALQETDLPILEIEHIVPRSLGGPDAAYNYVLTSESTNKAKGNQTPYKWLSPDRDKWRAYTERVRARAAELGSKRCRLLLSENAEELINKYTALAETAWISKLAQRIVCMHFGFQFGGNTGEKRVFTVPGNITAKIRSAFGLNKILHNIDADKKNMSEFDIVKLDYELDKKNRKNKKHHALDAMCLCFAPTGPNAQKLGIGALLPPEIAAKAEEFFRGYIEKVVPNEVAPKKTKLEESIYSKRTINRKECIVRKFNLVDLAYKSGLKPVYDISAIEKLLEDKPKKIPPIINPTVRRIVRDFVSTNPNEDEWRNWCKTVRMPSKNRNGTRIIRVLVYVGTPEEYKDLSKDGCGAFRKGDSHKGQIIWMDKNGRYKVSPVYVHSSKSQTMESIKSNPDFIKIAGFFKSHCLVEIESPVVNGKRDVLLSPGTYMINTIMAAGMAILSDTNGVKSPAININYLMNAGMRRISIKYK

SEQ ID NO: 185 - protein, 1073 aa, unidentified; identical to SEQ ID NO: 113
  REGION 1..1073: note = Description of Unknown: uncultivated organism with predicted taxonomy: Verrucomicrobia
  REGION 1..1073: note = MG1-189 effector

SEQ ID NO: 186 - protein, 1059 aa, unidentified; identical to SEQ ID NO: 90
  REGION 1..1059: note = Description of Unknown: uncultivated organism with predicted taxonomy: unclassified Verrucomicrobia (miscellaneous)
  REGION 1..1059: note = MG1-190 effector

SEQ ID NO: 187 - protein, 1059 aa, unidentified
  REGION 1..1059: note = Description of Unknown: uncultivated organism with predicted taxonomy: unclassified Verrucomicrobia (miscellaneous)
  REGION 1..1059: note = MG1-191 effector
MEKEKNNHVWGFDIGKGSLGEAVRIGGDFKHIASVLLDPEFGEIKTAALARRQMRTRKAHKAREKWLEECLEGTGVEILKRREVGIVDGQWQLISKGDERLEREFPPSGENVCYNSIALRCKLLLGEKLEGWQVFKALNSAIQKRGYDENIPWGEAEEKSSKKDDDDYAQKLSQYEKEKSELFESFADGEKYDFPCFFKAYKMGLWSPENPTRVEVRIDCRAQKAKSYVIARKYVEREFECLVEAAAKFFPKLKGRAKFILYGVSETPYASYYGNMRKKFGLKRGAESDWTALGQKVPRFDNRIIDKCRFIPRMNVCKIRPLNEARNEKDLLYYEVTLALKLLNLRFFRNSNIEQLTFEEFKKAFEIAAGAKYKMTKTAMKKFLKSISATALGDDYAEIEPPKESGRASFSRPAMEILKELIFSGMPPREFYGRKISEISNTDKNKGVVSSDLDFIKLMGDCPWGGIFIPDVQTYQFANAAFPDPDAQINKLIGSQNNPIVRHRLTFFFERIKFLESKYGVPDKVVLEFVRDDFMGEKEKKEMRIAMKKRAEEKMRIAKDLDEHGFKGGNLLLKMELYRKQNGICLYTGDALPLSELATLEIEHIVPRSRGGPDAQYNYVITREKTNKLKGDKTPYEWLSSDAKEWASYTDRVNACAKALGKKRCRLLLEKDAEELVEKYTALAETAHIAKLAQKIVCMHFGFQFGGLSGTKRVFTVPGALTSRIRKFYGLDRILHNSAAESENLSFEEFLKFSEDLEKKNRKNKKHHALDAMCLCFAPTGVDSRRAKLGEILPEKLRSEKAAREFFKSYLDKIMPVDVAPKKPRLEDGIYSKRIIGGKACMVKRNNLVDLAYKSGLKPVFDIPTLIKLVDKKEKGIINPQIRKMIGEFAATNPDESAWRKWCEEVRLPSKSGLGARVMRVLVYYGEADEYKDLSKDGCGAYRKGDGHKGQVIWESVDGKYYVEPVYVHASKAGVMAALNANPKKKRICGMFNSHCTVDVGDVYNDKGDFILPAGRYMVNTIRSDNQCVLTNADGEKRNPININYLMRAGMRRVELSEL

SEQ ID NO: 188 - protein, 1081 aa, unidentified
  REGION 1..1081: note = Description of Unknown: uncultivated organism with predicted taxonomy: unclassified Verrucomicrobia (miscellaneous)
  REGION 1..1081: note = MG1-192 effector
YYIVDFCSHCKYFNNNKEFNKNMEKEKNNHVWGFDIGKGSLGEAVRIGGDFKHIASVLLDPEFGEIKTAALVRRQMRTRKAHKAREKWLEECLEGTGIEILKRREVGIVDGQWRLISKGDERLEREFPPSGEDVCYNSIALRCKLLLGEKLEGWQVFKALNSAIQKRGYDENIPWGEAEEKSSKKDDDDYAQKLSQYEKEKSELFESFADGEKYDFPCFFKAYKMGLWSPENPTRVEVRIDCRAQKAKSYVIARKYVEREFECLVEAAAKFFPKLKGRAKFILYGVSETPYASYYGNMRKKFGLKRGAESDWTALGQKVPRFDNRIIDKCRLIPRMNVCKIRPLNEARNEKDLLYYEVTLALKLLNLRFFRNSNIEQLTFEEFKKAFEIAAGAKYKMTKTAMKKFLKSISATALGDDYAEIEPPKESGRASFSRPAMEILKELIFSGMPPREFYGRKISEISNTDKNKGVVSSDLDFIKLMGDCPWGGIFIPDVQTYQFANAAFPDPDAQINKLIGSQNNPIVRHRLTFFFERIKFLESKYGVPDKVVLEFVRDDFMGEKEKKEMRIAMKKRAEEKMRIAKDLDGHGFKGGNLLLKMELYRKQNGICLYTGDALPLSELATLEIEHIVPRSRGGPDAQYNYVITREKTNKLKGDKTPYEWLSSDAKEWASYTDRVNACAKALGKKRCRLLLEKDAEELVEKYTALAETAHIAKLAQKIVCMHFGFQFGGLSGTKRVFTVPGALTSRIRKFYGLDRILHNSAAESENLSFEEFLKFSEDLEKKNRKNKKHHALDAMCLCFAPTGVDSRRAKLGEILPEKLRSEKAAREFFKSYLDKIMPVDVAPKKPRLEDGIYSKRIIGGKACMVKRNNLVDLAYKSGLKPVFDIPTLIKLVDKKEKGIINPQIRKMIGEFAATNPDESAWRKWCEEVRLPSKSGLGARVMRVLVYYGEADEYKDLSKDGYGAYRKGDGHKGQVIWESVDGKYYVEPVYVHASKAGVMAALNANPKKKRICGMFNSHCTVDVGDVYNDKGDFILPAGRYMVNTIRSDNQCVLTNADGEKRNPININYLMRSGMRRVDLSEL

SEQ ID NO: 189 - protein, 1073 aa, unidentified; identical to SEQ ID NO: 150
  REGION 1..1073: note = Description of Unknown: uncultivated organism with predicted taxonomy: Verrucomicrobia
  REGION 1..1073: note = MG1-193 effector

SEQ ID NO: 190 - protein, 1059 aa, unidentified; identical to SEQ ID NO: 129
  REGION 1..1059: note = Description of Unknown: uncultivated organism with predicted taxonomy: unclassified Verrucomicrobia (miscellaneous)
  REGION 1..1059: note = MG1-194 effector

SEQ ID NO: 191 - protein, 1059 aa, unidentified; identical to SEQ ID NO: 93
  REGION 1..1059: note = Description of Unknown: uncultivated organism with predicted taxonomy: unclassified Verrucomicrobia (miscellaneous)
  REGION 1..1059: note = MG1-195 effector

SEQ ID NO: 192 - protein, 935 aa, unidentified
  REGION 1..935: note = Description of Unknown: uncultivated organism with predicted taxonomy: Verrucomicrobia
  REGION 1..935: note = MG1-196 effector
MGAEFRHVTSLLLDEDFGEIKTAAGLRRQIRTRKAHKAREKWLERCLLEFGIEPLKRREVGIVNGRWMLISKGDERLEREFPPDGEDICYNAIALRCKLLLGEKLESWQIFKALNSAIQNRGYDENIPWKESDVSLPKKDDDDYAKKLSQYSREKGELLESFEDGEKYDYPCFFKAYKMGLWSPENPERVEIRIGNDAQKAKGYVIPRKDVEREFESLVEAASKWHPAMKGKAMYIMYGIAETPYASFKPAFRKKFDLKRGAESDWTALGQKIPRFDNRIIDKCRPIPRLNVCKIRPLSEARGEGDLLHYEITLSLKLLNLRFFRNSNVESLSFEEFKAAFEIAKSAKYKMGKAALKKFLKSISASVLSEDQSEIEAPRESGRASFSRPAMLLLKELIFSGMPPAEFYAKKAGEISNADPNKGIVASDLDFIKLMGNCGWNGIFIPDVETYRFANNGADSAKLINGLIGSQNNPIVRHRLAFFYERIKFLESKFGVPDKVVLEFVREDFMGKEQKKRMQIEMKKRASEKMLIAKKLDEAGYKGGNLLLKMELLEKQGGICLYTGEPLLPSELGVLEIEHIVPRSRGGPDAQYNYVLTREKTNKEKADRTPFEWLSSDPVKWAGYSDRVKARAGQLGRKRCELLLEKNAEELVEKYTALAETAHISKLAQKIVCLHFGFQFGGLGGTKRVFTVPGALTARIRSFYGLNKILHNEDLAKDALSYEEVLKRGEELDKKNRKNKKHHALDAMCLCFAPTGVNSKRARIDMLLPPDIRGEREAELFFRKYLDRLIPVDVAPKKPRLEDGIYSMRAVGGKKFMARRVNLVDLAYKSGLKPVYDISALIKLLDKKEKGIINAQIRKLVADFARTNPTEDEWRKWCGECRLPSKNGIGTRVIRVLLNYGEPAEYKDLSKDGRGAFRRGDGHKGQIVWESTDGK

SEQ ID NO: 193 - protein, 1059 aa, unidentified; identical to SEQ ID NO: 116
  REGION 1..1059: note = Description of Unknown: uncultivated organism with predicted taxonomy: unclassified Verrucomicrobia (miscellaneous)
  REGION 1..1059: note = MG1-197 effector

SEQ ID NO: 194 - protein, 1059 aa, unidentified
  REGION 1..1059: note = Description of Unknown: uncultivated organism with predicted taxonomy: unclassified Verrucomicrobia (miscellaneous)
  REGION 1..1059: note = MG1-198 effector
MEKEKNNHVWGFDIGIGSLGEAVRIGGDFKHIASVLLDPEFGEIKTAALARRQMRTRKAHKAREKWLEECLEGTGVEILKRREVGIVDGQWQLISKGDERLEREFPPSGEDVCYNSIALRCKLLLGEKLEGWQVFKALNSAIQKRGYDENIPWGEAEEKSSKKDDDDYAQKLSQYEKEKSELFESFADGEKYDFPCFFKAYKMGLWSPENPTRVEVRIDCRAQKAKSYVIARKYVEREFECLVEAAAKFFPKLKGRAKFILYGVSETPYASYYGNMRKKFGLKRGAESDWTALGQKVPCFDNRIIDKCRLIPRMNVCKIRPLNEARNEKDLLYYEVTLALKLLNLRFFRNSNIEQLTFEEFKEAFEIAAGAKYKMTKTAMKKFLKSISATALGDDYAEIEPPKESGRASFSRPAMEILKELIFSGMPPREFYGRKISEISNTDKNKGVVSSDLDFIKLMGDCPWGGIFIPDVQTYQFANAAFPDPDAQINKLIGSQNNPIVRHRLTFFFERIKFLESKYGVPDKVVLEFVRDDFMGEKEKKEMRIAMKKRAEEKMRIAKDLDEHGFKGGNLLLKMELYRKQNGICLYTGDALPLSELATLEIEHIVPRSRGGPDAQYNYVITREKTNKLKGDKTPYEWLSSDAKEWASYTDRVNACAKAFGKKRCRLLLEKDAEELVEKYTALAETAHIAKLAQKIVCMHFGFQFGGLSGTKRVFTVPGALTSRIRKFYGLDRILHNSAAESENLSFEEFLKFSEDLEKKNRKNKKHHALDAMCLCFAPTGVDSRRAKLGEILPEKLRSEKAAREFFKSYLDKIMPVDVAPKKPRLEDGIYSKRIIGGKACMVKRNNLVDLAYKSGLKPVFDIPTLIKLVDKKEKGIINPQIRKMIGEFAATNPDESAWRKWCEEVRLPSKSGLGARIMRVLVYYGEADEYKDLSKDGCGAYRKGDGHKGQVIWESVDGKYYVEPVYVHASKAGVMAALNANPKKKRICGMFNSHCTVDVGDVYNDKGDFILPAGRYMVNTIQKNGQCVLTNADGEKRNPININYLMRAGMRRVELSEL

SEQ ID NO: 195 - protein, 899 aa, unidentified
  REGION 1..899: note = Description of Unknown: uncultivated organism with predicted taxonomy: unclassified Verrucomicrobia (miscellaneous)
  REGION 1..899: note = MG1-199 effector
SKKDDDDYAQKLSQYEKEKSELFESFADGEKYDFPCFFKAYKMGLWSPENPTRVEVRIDCRAQKAKSYVIARKYVEREFECLVEAAAKFFPKLKGRAKFILYGVSETPYASYYGNMRKKFGLKRGAESDWTALGQKVPCFDNRIIDKCRLIPRMNVCKIRPLNEARNEKDLLYYEVTLALKLLNLRFFRNSNIEQLTFEEFKEAFEIAAGAKYKMTKTAMKKFLKSISATALGDDYAEIEPPKESGRASFSRPAMEILKELIFSGMPPREFYGRKISEISNTDKNKGVVSSDLDFIKLMGDCPWGGIFIPDVQTYQFANAAFPDPDAQINKLIGSQNNPIVRHRLTFFFERIKFLESKYGVPDKVVLEFVRDDFMGEKEKKEMRIAMKKRAEEKMRIAKDLDEHGFKGGNLLLKMELYRKQNGICLYTGDALPLSELATLEIEHIVPRSRGGPDAQYNYVITREKTNKLKGDKTPYEWLSSDAKEWASYTDRVNACAKAFGKKRCRLLLEKDAEELVEKYTALAETAHIAKLAQKIVCMHFGFQFGGLSGTKRVFTVPGALTSRIRKFYGLDRILHNSAAESENLSFEEFLKFSEDLEKKNRKNKKHHALDAMCLCFAPTGVDSRRAKLGEILPEKLRSEKAAREFFKSYLDKIMPVDVAPKKPRLEDGIYSKRIIGGKACMVKRNNLVDLAYKSGLKPVFDIPTLIKLVDKKEKGIINPQIRKMIGEFAATNPDESAWRKWCEEVRLPSKSGLGARIMRVLVYYGEADEYKDLSKDGCGAYRKGDGHKGQVIWESVDGKYYVEPVYVHASKAGVMAALNANPKKKRICGMFNSHCTVDVGDVYNDKGDFILPAGRYMVNTIQKNGQCVLTNADGEKRNPININYLMRAGMRRVELSEL

SEQ ID NO: 196 - protein, 1073 aa, unidentified
  REGION 1..1073: note = Description of Unknown: uncultivated organism
  REGION 1..1073: note = MG1-200 effector
MYTKDIIWGFDIGKGSLGEAVRVGNEFKHVQSLEIAPDFAETKTTAAARRAWRTREAHKARELWLEKCLSEAGIEVLLRRKVGVVDGAWKLVSKGDVRLEREFPPAGEDLCYNSIALRCKLLLGEKLESWQVFKALNSAIQNRGYDANIPWGDEDAADGGDGSSRKSSDSDASGDGESYAEKLAHYEREFDGILAELDNREKYEFPCFFKAAKMGLWSPENPDFVGVRIDNTAEKAKGYVVPREAVVREFRALVNAAALQYPNLKGKADFIMFGRACEPYASYNPELRKRFGLKRGAATDWTALGQKTPRFDNRVIDKCKLIPRLNVCKIKPLDECKTDDDFLSYTITLSLKLLNLRFFRGAGVDSLSFDEFLRAFELAKNSKFKLGKAALKKFFKTIGAEVMDESQSEIEQPRNGGRAAFSRPAMRILRDLIFSGKSPAEFYAAAIENIANTDKNKGLVAGDLDFLKLMGDAPWSGIFIPDVGLSDFADASEAAREAQINKLIGSQNDPIVRHRLSFFYECIKSLEAKFGVPDKIVLEFVRDDFLGKKAKSDLNKAIKTRFDEKKKLAEDLDSKREEFGFKYASKKMLLKFELYKKQGGKCVYTGNALPLSELESLEIEHIVPRSRGGPDAMYNYVLTDEKTNKEKGDRTPFEWLSTMGAEWESYCERVRKLTKELGAKRCKLLLSPNAAELVEKYTALAETAWISKLAQRICCLHFGFQFGGLAGAKKVWTVSGNTTAMIRGRYALNRLLHDEESAEDLSLFDRICMEKKFEEKNRKNKKHHALDAMCLCFAPTSNAKKASAYKNILPEEITRNPESDEARKFFGKYLANVIPNKVAVEKPTLEQTIYAMRNGRIVKKCNVRDLAYTGINPKYNYSTLVKSIKSIVGEVPKRIISDFVLSNPKLSESEWEDWCKNEALIPSKNGAPTKLLRVLCDVGSPEEYKDLSKDGCGAYRKGDSHKGQFIWETKQGRYVVAPVYAHASKAKVLAALKNNPDCAEVCGFFRQNCLVEIPNDVIDKSGKMLLKSGIYKSNTIMSDGRAKFTNSDGISTNPISIQYLMPAGMKRIKLDTV

SEQ ID NO: 197 - protein, 1073 aa, unidentified; identical to SEQ ID NO: 121
  REGION 1..1073: note = Description of Unknown: uncultivated organism with predicted taxonomy: Verrucomicrobia
  REGION 1..1073: note = MG1-201 effector

SEQ ID NO: 198 - protein, 1073 aa, unidentified
  REGION 1..1073: note = Description of Unknown: uncultivated organism with predicted taxonomy: Coraliomargarita sp. CAG:312
  REGION 1..1073: note = MG1-202 effector
MYTKEIIWGFDIGKGSLGEAVRVGNEFKHVQSLEIAPDFAETKTTAAARRAWRTREAHKARELWLEKCLSEAGIEVLLRRKVGVVDGAWKLVSKGDVRLEREFPPAGEDLCYNSIALRCKLLLGEKLESWQVFKALNSAIQNRGYDANIPWGDEDAADGGDGSSRKSSDSDASGDGESYAEKLAHYEREFDGILAELDNREKYEFPCFFKAAKMGLWSPENPDFVGVRIDNTAEKAKGYVVPREAVVREFRALVNAAALQYPNLKGKADFIMFGRACEPYASYYPELRKRFGLKRGAATDWTALGQKTPRFDNRVIDKCKLIPRLNVCEIKPLDKCKTDDDFLSYTITLSLKLLNLRFFRGAGVDSLSFDEFLRAFELAKNSKFKLGKAALKKFFKTIGAEVMDESQSEIEQPRNEGRAAFSRPAMRILRDLIFSGKSPAEFYAAAIENIANTDKNKGLVAGDLDFLKLMGDAPWSGIFIPDVGLSDFADTSEAAREAQINKLIGSQNDPIVRHRLSFFYERIKSLEAKFGVPDKIVLEFVRDDFLGKKAKSDLNKAIKTRFDEKKKLAEELDSNRAEFGPKYASKKMLLKYELYKKQGGKCVYTGKALPLSELENLEIEHIVPRSRGGPDAMYNYVLTDEKTNKEKGDRTPFEWRSTMGAEWESYCERVRKLTKELGAKRCKLLLAPNAAELVEKYTALAETAWISKLAQRICCLHFGFQFGGLAGAKKVWTVSGNTTAMIRGRYGLNRLLHDEESAEDLSLFDRICMEKKFEEKNRKNKKHHALDAMCLCFAPTSNAKKASAYKNILPEEITRNPESDEARKFFGKYLANVIPNKVAVEKPTLEQTIYAMRKGRIVKKCNVRDLAYEGINPKYNYTKLVKRIESIVGDVSKRIISDFVLSNPDLNESEWEEWCKYKAAIPSKNGAPTKLLRVLCDAGNPEEYKDLSKDGCGAYRKGDSHKGQFIWKTKQGRYVVAPVYAHASKAKVLAALKNNPDCAEVCGFFRQNCLVEIPNDVIDKSGKMLLKSGIYKSNTIMSDGRAKFTNSDGISTNPISIQYLMPAGMKRIKLDTV

SEQ ID NO: 199 - protein, 1062 aa, unidentified; identical to SEQ ID NO: 146
  REGION 1..1062: note = Description of Unknown: uncultivated organism with predicted taxonomy: Coraliomargarita sp. CAG:312
  REGION 1..1062: note = MG1-203 effector

SEQ ID NO: 200 - protein, 1073 aa, unidentified; identical to SEQ ID NO: 107
  REGION 1..1073: note = Description of Unknown: uncultivated organism with predicted taxonomy: Verrucomicrobia
  REGION 1..1073: note = MG1-204 effector

SEQ ID NO: 201 - protein, 759 aa, unidentified
  REGION 1..759: note = Description of Unknown: uncultivated organism with predicted taxonomy: Coraliomargarita sp. CAG:312
  REGION 1..759: note = MG1-205 effector
FPPAGEDLCYNSIALRCKLLLGEKLESWQVFKALNSAIQNRGYDANIPWGDEDAADGGDGSSRKSSDSDASGDGESYAEKLAHYEREFDGILAELDNREKYEFPCFFKAAKMGLWSPENPDFVGVRIDNTAEKAKGYVVPREAVVREFRALVNAAALQYPNLKGKADFIMFGRACEPYASYNPELRKRFGLKRGAATDWTALGQKTPRFDNRVIDKCKLIPRLNVCKIKPLDECKTDDDFLSYTITLSLKLLNLRFFRGAGVDSLSFDEFLRAFELAKNSKFKLGKAALKKFFKTIGAEVMDESQSEIEQPRNGGRAAFSRPAMRILRDLIFSGKSPAEFYAAAIENIANTDKNKGLVAGDLDFLKLMGDAPWSGIFIPDVGLSDFADASEAAREAQINKLIGSQNDPIVRHRLSFFYERIKSLEAKFGVPDKIVLEFVRDDFLGKKAKSDLNKAIKTRFDEKKKLAEDLDSKREEFGFKYASKKMLLKFELYKKQGGECVYTGNALPLSELESLEIEHIVPRSRGGPDAMYNYVLTDEKTNKEKGDRTPFEWRSTMGAEWESYCERVRKLTKELGAKRCKLLLSPNAAELVEKYTALAETAWISKLAQRICCLHFGFQFGGLAGAKKVWTVSGNTTAMIRGRYGLNRLLHDEESAEDLSLFDRICMEKKFEEKNRKNKKHHALDAMCLCFAPTSNAKKASAYKNILPEEITRNPESDEARKFFGKYLASVIPNKVAVEKSKLEQTIYSLRKGRKIGRA

SEQ ID NO: 202 - protein, 1062 aa, unidentified; identical to SEQ ID NO: 130
  REGION 1..1062: note = Description of Unknown: uncultivated organism with predicted taxonomy: Coraliomargarita sp. CAG:312
  REGION 1..1062: note = MG1-206 effector

SEQ ID NO: 203 - protein, 1036 aa, unidentified
  REGION 1..1036: note = Description of Unknown: uncultivated organism with predicted taxonomy: unclassified Verrucomicrobia (miscellaneous)
  REGION 1..1036: note = MG1-207 effector
MKVMEAENGNHIWGFDIGKGSLGEAVLMGAEFRHVTSLLLDEDFGEIKTAAGLRRQMRTRKAHKAREKWLERCLLEFGIEPLKRREVGIVNGRWMLISKGDERLEREFPPDGEDICYNAIALRCKLLLGEKLESWQIFKALNSAIQNRGYDENIPWKESDVSLPKKDDDDYAKKLSQYSREKGELLESFEDGEKYDYPCFFKAYKMGLWSPENPERVEIRIGNDAQKAKGYVIPRKDVEREFESLVEAASKWHPAMKGKAMYIMYGIAETPYASFKPALRKKFDLKRGAESDWTALGQKIPRFDNRIIDKCRLIPRLNVCKIRPLSEARDEGDLLHYEITLSLKLLNLRFFRNSNVESLSFEEFKAAFEIAKGAKYKMGKAALKKFLKSISASVLSEDQSEIEAPRESGRASFSRPAMLLLKELIFSGMPPAEFYAKKAGEISNADPNKGIVASDLDFIKLMGNCGWNGIFIPDVETYRFANNGADSAKLINGLIGSQNNPIVRHRLAFFYERIKFLESKFGVPDKVVLEFVREDFMGKEQKKRMQIEMKKRASEKMLIAKKLDEAGYKGGNLLLKMELLEKQGGICLYTGEPLLPSELGVLEIEHIVPRSRGGPDAQYNYALTREKTNKEKADRTPFEWLSSDPVKWAGYSDRVKARAGQLGRKRCELLLEKNAEELVEKYTALAETAHISKLAQKIVCLHFGFQFGGLGGTKRVFTVPGALTARIRSFYGLNKILHNEDLAKDALSYEEVLKRGEELDKKNRKNKKHHALDAMCLCFAPTGVNSKRARIDMLLPPDIRGEREAELFFRKYLDRLIPVDVAPKKPRLEDGIYSMRAVGGKKFMARRVNLVDLAYKSGLKPVYDISALIKLLDKKEKGIINAQIRKLVADFARTNPTEDEWRKWCGECRLPSKNGIGTRVIRVLLNYGEPAEYKDLSKDGRGAFRRGDGHKGQIVWESTDGKYYVVPIYVHASKAKLLAELDANPKKKRVCDIFTSHCMVKIGNTYNDKGELLLHEGVYMVNTIKTDGRGKLTNPN

SEQ ID NO: 204 - protein, 1059 aa, unidentified
  REGION 1..1059: note = Description of Unknown: uncultivated organism with predicted taxonomy: unclassified Verrucomicrobia (miscellaneous)
  REGION 1..1059: note = MG1-208 effector
MEKEKNNHVWGFDIGKGSLGEAVRIGGDFKHIASVLLDPEFGEIKTAALVRRQMRTRKAHKAREKWLEECLEGTGVEILKRREVGIVDGQWQLISKGDERLEREFPPSGEDVCYNSIALRCKLLLGEKLEGWQVFKALNSAIQKRGYDENIPWGEAEEKSSKKDDDDYAQKLSQYEKEKSELFESFADGEKYDFPCFFKAYKMGLWSPENPTRVEVRIDCRAQKAKSYVIARKYVEREFECLVEAAAKFFPKLKGRAKFILYGVSETPYASYYGNMRKKFGLKRGAESDWTALGQKVPRFDNRIIDKCRLIPRMNVCKIRPLNEARNEKDLLYYEVTLALKLLNLRFFRNSNIEQLTFEEFKKAFEIAAGAKYKMTKTAMKKFLKSISATALGDDYAEIEPPKESGRASFSRPAMEILKELIFSGMPPREFYGRKISEISNTDKNKGVVSSDLDFIKLMGDCPWGGIFIPDVQTYQFANAAFPDPDAQINKLIGSQNNPIVRHRLTFFFERIKFLESKYGVPDKVVLEFVRDDFMGEKEKKEMRIAMKKRAEEKMRIAKDLDEHGFKGGNLLLKMELYRKQNGICLYTGDALPLSELATLEIEHIVPRSRGGPDAQYNYVITREKTNKLKGDKTPYEWLSSDAKEWASYTDRVNACAKALGKKRCRLLLEKDAEELVEKYTALAETAHIAKLAQKIVCMHFGFQFGGLSGTKRVFTVPGALTSRIRKFYGLDRILHNSAAESENLSFEEFLKFSEDLEKKNRKNKKHHALDAMCLCFAPTGVDSRRAKLGEILPEKLRSEKAAREFFKSYLDKIMPVDVAPKKPRLEDGIYSKRIIGGKACMVKRNNLVDLAYKSGLKPVFDIPTLIKLVDKKEKGIINPQIRKMIGEFAATNPDESAWRKWCEEVRLPSKSGLGARIMRVLVYYGEADEYKDLSKDGCGAYRKGDGHKGQVIWESVDGKYYVEPVYVHASKAGVMAALNANPKKKRICGMFNSHCTVDVGDVYNDKGDFILPAGRYMVNTIRSDNQCVLTNADGEKRNPININYLMRAGMRRVDLSEL

SEQ ID NO: 205 - protein, 1059 aa, unidentified; identical to SEQ ID NO: 106
  REGION 1..1059: note = Description of Unknown: uncultivated organism with predicted taxonomy: unclassified Verrucomicrobia (miscellaneous)
  REGION 1..1059: note = MG1-209 effector

SEQ ID NO: 206 - protein, 1059 aa, unidentified
  REGION 1..1059: note = Description of Unknown: uncultivated organism with predicted taxonomy: unclassified Verrucomicrobia (miscellaneous)
  REGION 1..1059: note = MG1-210 effector
MEKEKNNHVWGFDIGKGSLGEAVRIGGDFKHIASVLLDPEFGEIKTAALARRQMRTRKAHKAREKWLEECLEGTGVEILKRREVGIVDGQWQLISKGDERLEREFPPSGEDVCYNSIALRCKLLLGEKLEGWQVFKALNSAIQKRGYDENIPWGEAEEKSSKKDDDDYAQKLSQYEKEKSELFESFADGEKYDFPCFFKAYKMGLWSPENPTRVEVRIDCRAQKAKSYVIARKYVEREFECLVEAAAKFFPKLKGRAKFILYGVSETPYASYYGNMRKKFGLKRGAESDWTALGQKVPRFDNRIIDKCRFIPRMNVCKIRPLNEARNEKDLLYYEVTLALKLLNLRFFRNSNIEQLTFEEFKKAFEIAAGAKYKMTKTAMKKFLKSISATALGDDYAEIEPPKESGRASFSRPAMEILKELIFSGMPPREFYGRKISEISNTDKNKGVVSSDLDFIKLMGDCPWGGIFIPDVQTYQFANAAFPDPDAQINKLIGSQNNPIVRHRLTFFFERIKFLESKYGVPDKVVLEFVRDDFMGEKEKKEMRIAMKKRAEEKMRIAKDLDEHGFKGGNLLLKMELYRKQNGICLYTGDALPLSELATLEIEHIVPRSRGGPDAQYNYVITREKTNKLKGDKTPYEWLSSDAKEWASYTDRVNACAKALGKKRCRLLLEKDAEELVEKYTALAETAHIAKLAQKIVCMHFGFQFGGLSGTKRVFTVPGALTSRIRKFYGLDRILHNSAAESENLSFEEFLKFSEDLEKKNRKNKKHHALDAMCLCFAPTGVDSRRAKLGEILPEKLRSEKAAREFFKSYLDKIMPVDVAPKKPRLEDGIYSKRIIGGKACMVKRNNLVDLAYKSGLKPVFDIPTLIKLVDKKEKGIINPQIRKMIGEFAATNPDESAWRKWCEEVRLPSKSGLGARIMRVLVYYGEADEYKDLSKDGYGAYRKGDGHKGQVIWESVDGKYYVEPVYVHASKAGVMAALNANPKKKRICGMFNSHCTVDVGDVYNDKGDFILPAGRYMVNTIQKNGQCVLTNADGEKRNPININYLMRAGMRRVDLSEL

SEQ ID NO: 207 - protein, 1062 aa, unidentified; identical to SEQ ID NO: 83
  REGION 1..1062: note = Description of Unknown: uncultivated organism with predicted taxonomy: Coraliomargarita sp. CAG:312
  REGION 1..1062: note = MG1-211 effector

SEQ ID NO: 208 - protein, 1059 aa, unidentified; identical to SEQ ID NO: 85
  REGION 1..1059: note = Description of Unknown: uncultivated organism with predicted taxonomy: unclassified Verrucomicrobia (miscellaneous)
  REGION 1..1059: note = MG1-212 effector

SEQ ID NO: 209 - protein, 798 aa, unidentified
  REGION 1..798: note = Description of Unknown: uncultivated organism with predicted taxonomy: unclassified Verrucomicrobia (miscellaneous)
  REGION 1..798: note = MG1-213 effector
MEKEKNNHVWGFDIGKGSLGEAVRIGGDFKHIASVLLDPEFGEIKTAALARRQMRTRKAHKAREKWLEECLEGTGVEILKRREVGIVDGQWQLISKGDERLEREFPPSGEDVCYNSIALRCKLLLGEKLEGWQVFKALNSAIQKRGYDENIPWGEAEEKSSKKDDDDYAQKLSQYEKEKSELFESFADGEKYDFPCFFKAYKMGLWSPENPTRVEVRIDCRAQKAKSYVIARKYVEREFECLVEAAAKFFPKLKGRAKFILYGVSETPYASYYGNMRKKFGLKRGAESDWTALGQKVPRFDNRIIDKCRFIPRMNVCKIRPLNEARNEKDLLYYEVTLALKLLNLRFFRNSNIEQLTFEEFKKAFEIAAGAKYKMTKTAMKKFLKSISATALGDDYAEIEPPKESGRASFSRPAMEILKELIFSGMPPREFYGRKISEISNTDKNKGVVSSDLDFIKLMGDCPWGGIFIPDVQTYQFANAAFPDPDAQINKLIGSQNNPIVRHRLTFFFERIKFLESKYGVPDKVVLEFVRDDFMGEKEKKEMRIAMKKRAEEKMRIAKDLDEHGFKGGNLLLKMELYRKQNGICLYTGDALPLSELATLEIEHIVPRSRGGPDAQYNYVITREKTNKLKGDKTPYEWLSSDAKEWASYTDRVNACAKALGKKRCRLLLEKDAEELVEKYTALAETAHIAKLAQKIVCMHFGFQFGGLSGTKRVFTVPGALTSRIRKFYGLDRILHNSAAESENLSFEEFLKFSEDLEKKNRKNKKHHALDAMCLCFAPTGVDSRRAKLGEILPEKLR

SEQ ID NO: 210 - protein, 920 aa, unidentified
  REGION 1..920: note = Description of Unknown: uncultivated organism with predicted taxonomy: unclassified Verrucomicrobia (miscellaneous)
  REGION 1..920: note = MG1-214 effector
MLEVAAYAHGLAERAFSDVKSPKKDDDDYAQKLSQYEKEKSELFESFADGEKYDFPCFFKAYKMGLWSPENPTRVEVRIDCRAQKAKSYVIARKYVEREFECLVEAAAKFFPKLKGRAKFILYGVSETPYASYYGNMRKKFGLKRGAESDWTALGQKVPRFDNRIIDKCRFIPRMNVCKIRPLNEARNEKDLLYYEVTLALKLLNLRFFRNSNIEQLTFEEFKKAFEIAAGAKYKMTKTAMKKFLKSISATALGDDYAEIEPPKESGRASFSRPAMEILKELIFSGMPPREFYGRKISEISNTDKNKGVVSSDLDFIKLMGDCPWGGIFIPDVQTYQFANAAFPDPDAQINKLIGSQNNPIVRHRLTFFFERIKFLESKYGVPDKVVLEFVRDDFMGEKEKKEMRIAMKKRAEEKMRIAKDLDEHGFKGGNLLLKMELYRKQNGICLYTGDALPLSELATLEIEHIVPRSRGGPDAQYNYVITREKTNKLKGDKTPYEWLSSDAKEWASYTDRVNACAKALGKKRCRLLLEKDAEELVEKYTALAETAHIAKLAQKIVCMHFGFQFGGLSGTKRVFTVPGALTSRIRKFYGLDRILHNSAAESENLSFEEFLKFSEDLEKKNRKNKKHHALDAMCLCFAPTGVDSRCAKLGEILPEKLRSEKAAREFFKSYLDKIMPVDVAPKKPRLEDGIYSKRIIGGKACMVKRNNLVDLAYKSGLKPVFDIPTLIKLVDKKEKGIINPQIRKMIGEFAATNPDESAWRKWCEEVRLPSKSGLGARVMRVLVYYGEADEYKDLSKDGCGAYRKGDGHKGQVIWESVDGKYYVEPVYVHASKAGVMAALNANPKKKRICGMFNSHCTVDVGDVYNDKGDFILPAGRYMVNTIRSDNQCVLTNADGEKRNPININYLMRAGMRRVDLSEL

SEQ ID NO: 211 - protein, 1059 aa, unidentified; identical to SEQ ID NO: 137
  REGION 1..1059: note = Description of Unknown: uncultivated organism with predicted taxonomy: unclassified Verrucomicrobia (miscellaneous)
  REGION 1..1059: note = MG1-215 effector

SEQ ID NO: 212 - protein, 1059 aa, unidentified
  REGION 1..1059: note = Description of Unknown: uncultivated organism with predicted taxonomy: unclassified Verrucomicrobia (miscellaneous)
  REGION 1..1059: note = MG1-216 effector
MEKEKNNHVWGFDIGKGSLGEAVRIGGDFKHIASVLLDPEFGEIKTAALARRQMRTRKAHKAREKWLEECLEGTGVEILKRREVGIVDGQWQLISKGDERLEREFPPSGEDVCYNSIALRCKLLLGEKLEGWQVFKALNSAIQKRGYDENIPWGEAEEKSSKKDDDDYAQKLSQYEKEKSELFESFADGEKYDFPCFFKAYKMGLWSPENPTRVEVRIDCRAQKAKSYVIARKYVEREFECLVEAAAKFFPKLKGRAKFILYGVSETPYASYYGNMRKKFGLKRGAESDWTALGQKVPRFDNRIIDKCRLIPRMNVCKIRPLNEARNEKDQLYYEVTLALKLLNLRFFRNSNIEQLTFEEFKKAFEIAAGAKYKMTKTAMKKFLKSISATALGDDYAEIEPPKESGRASFSRPAMEILKELIFSGMPPREFYGRKISEISNTDKNKGVVSSDLDFIKLMGDCPWGGIFIPDVQTYQFANAAFPDPDAQINKLIGSQNNPIVRHRLTFFFERIKFLESKYGVPDKVVLEFVRDDFMGEKEKKEMRIAMKKRAEEKMRIAKDLDEHGFKGGNLLLKMELYRKQNGICLYTGDALPLSELATLEIEHIVPRSRGGPDAQYNYVIIREKTNKLKGDKTPYEWLSSDAKEWASYTDRVNACAKALGKKRCRLLLEKDAEELVEKYTALAETAHIAKLAQKIVCMHFGFQFGGLSGAKRVFTVPGALTSRIRKFYGLDRILHNSAAESENLSFEEFLKFSEDLEKKNRKNKKHHALDAMCLCFAPTGVDSRRAKLGEILPEKLRSEKAAREFFKSYLDKIMPVDVAPKKPRLEDGIYSKRIIGGKACMVKRNNLVDLAYKSGLKPVFDIPTLIKLVDKKEKGIINPQIRKMIGEFAATNPDESAWRKWCEEVRLPSKSGLGARIMRVLVYYGEADEYKDLSKDGCGAYRKGDGHKGQVIWESVDGKYYVEPVYVHASKAGVMAALNANPKKKRICGMFNSHCTVDVGDVYNDKGDFILPAGRYMVNTILTTGRCVLTNADGEKRNPININYLMRAGMRRVELSEL

SEQ ID NO: 213 - protein, 777 aa, unidentified
  REGION 1..777: note = Description of Unknown: uncultivated organism with predicted taxonomy: Coraliomargarita sp. CAG:312
  REGION 1..777: note = MG1-217 effector
GSDSDWTALGQKIPRFDNRMIGKCKLIPRLNTCKIKSPDKIKSEEDLLHYDITLALKLLNLRFFKDSEICALSFEEFKKLFEIGKSNKYKISKTDLKKFLKSIGASVLSQDHSEIEAPRTSGRSSFSRPAMKILKELIFSGEPPSKFLKAKIDKIANTDPNKGIIREDLDFIRIMGDCPWNGIFIPDVETYKYASQTQESSEAQINKLIGSQNDPIVRHRLSFFYERIKALSEKFGVPDKIVLEFVREDFMGKQAKKDLSLSMKKRFEEKIDIAKKLDDIGYKGNKMLLKMELLQKQGFACLYTGEALQETDLPILEIEHIVPRSLGGPDAAYNYVLTSESTNKAKGNQTPYKWLSPDRDKWRAYTERVRARAAELGSKRCRLLLSENAEELINKYTALAETAWISKLAQRIVCMHFGFQFGGNTGEKRVFTVPGNITAKIRSAFGLNKILHNIDADKKNMSEFDIVKLDYELDKKNRKNKKHHALDAMCLCFAPTGPNAQKLGIGALLPPEIAAKAEEFFRGYIEKVVPNEVAPKKPKLEESIYSKRTINGKECIVRKFNLVDLAYKSGLKPVYDISAIEKLLEDKPKKIPPIINPTVRRIVRDFVSTNPNEDEWRNWCKTVRMPSKNRNGTRIIRVLVYVGTPEEYKDLSKDGCGAFRKGDSHKGQIIWMDKNGRYKVSPVYVHSSKSQTMESIKSNPDFIKIAGFFKSHCLVEIESPVVNGKGDVLLSPGTYMINTIMAAGMAILSDTNGVKSPAININYLMNAGMRRVSIKYK

SEQ ID NO: 214 - protein, 1059 aa, unidentified; identical to SEQ ID NO: 125
  REGION 1..1059: note = Description of Unknown: uncultivated organism with predicted taxonomy: unclassified Verrucomicrobia (miscellaneous)
  REGION 1..1059: note = MG1-218 effector

SEQ ID NO: 215 - protein, 1059 aa, unidentified
  REGION 1..1059: note = Description of Unknown: uncultivated organism with predicted taxonomy: unclassified Verrucomicrobia (miscellaneous)
  REGION 1..1059: note = MG1-219 effector
MEKEKNNHVWGFDIGKGSLGEAVRIGGDFKHIASVLLDPEFGEIKTAALVRRQMRTRKAHKAREKWLEECLEGTGVEILKRREVGIVDGQWQLISKGDERLEREFPPSGEDVCYNSIALRCKLLLGEKLEGWQVFKALNSAIQKRGYDENIPWGEAEEKSPKKDDDDYAQKLSQYEKEKSELFESFADGEKYDFPCFFKAYKMGLWSPENPTRVEVRIDCRAQKAKSYVIARKYVEREFECLVEAAAKFFPKLKGRAKFILYGVSETPYASYYGNMRKKFGLKRGAESDWTALGQKVPRFDNRIIDKCRFIPRMNVCKIRPLNEARNEKDLLYYEVTLALKLLNLRFFRNSNIEQLTFEEFKKAFEIAAGAKYKMTKTAMKKFLKSISATALGDDYAEIEPPKESGRASFSRPAMEILKELIFSGMPPREFYGRKISEISNTDKNKGVVSSDLDFIKLMGDCPWGGIFIPDVQTYQFANAAFPDPDAQINKLIGSQNNPIVRHRLTFFFERIKFLESKYGVPDKVVLEFVRDDFMGEKEKKEMRIAMKKRAEEKMRIAKDLDEHGFKGGNLLLKMELYRKQNGICLYTGDALPLSELATLEIEHIVPRSRGGPDAQYNYVITREKTNKLKGDKTPYEWLSSDAKEWASYTDRVNACAKALGKKRCRLLLEKDAEELVEKYTALAETAHIAKLAQKIVCMHFGFQFGGLSGTKRVFTVPGALTSRIRKFYGLDRILHNSAAERENLSFEEFLKFSEDLEKKNRKNKKHHALDAMCLCFAPTGVDSRRVKLGEILPEKLKSEKAAREFFKSYLDKIMPVDVAPKKPRLEDGIYSKRIIGGKACMVKRNNLVDLAYKSGLKPVFDIPTLIKLVDKKEKGIINPQIRKMIGEFAATNPDESAWRKWCEEVRLPSKSGLGARIMRVLVYYGEADEYKDLSKDGCGAYRKGDGHKGQVIWESVDGKYYVEPVYVHASKAGVMAALNANPKKKRICGMFNSHCTVDVGDVYNDKGDFILPAGRYMVNTIRSDNQCVLTNADGEKRNPININYLMRTGMRRVDLSEL

SEQ ID NO: 216 - protein, 1059 aa, unidentified
  REGION 1..1059: note = Description of Unknown: uncultivated organism with predicted taxonomy: unclassified Verrucomicrobia (miscellaneous)
  REGION 1..1059: note = MG1-220 effector
MEKEKNNHVWGFDIGKGSLGEAVRIGGDFKHIASVLLDPEFGEIKTAALARRQMRTRKAHKAREKWLEECLEGTGVEILKRREVGIVDGQWQLISKGDERLEREFPPSGEDVCYNSIALRCKLLLGEKLEGWQVFKALNSAIQKRGYDENIPWGEAEEKSSKKDDDDYAQKLSQYEKEKSELFESFADGEKYDFPCFFKAYKMGLWSPENPTRVEVRIDCRAQKAKSYVIARKYVEREFECLVEAAAKFFPKLKGRAKFILYGVSETPYASYYGNMRKKFGLKRGAESDWTALGQKVPRFDNRIIDKCRLIPRMNVCKIRPLNEARNEKDLLYYEVTLALKLLNLRFFRNSNIEQLTFEEFKKAFEIAAGAKYKMTKTAMKKFLKSISATALGDDYAEIEPPKESGRASFSRPAMEILKELIFSGMPPREFYGRKISEISNTDKNKGVVSSDLDFIKLMGDCPWGGIFIPDVQTYQFANAAFPDPDAQINKLIGSQNNPIVRHRLTFFFERIKFLESKYGVPDKVVLEFVRDDFMGEKEKKEMRIAMKKRAEGKMRIAKDLDEHGFKGGNLLLKMELYRKQNGICLYTGDALPLSELATLEIEHIVPRSRGGPDAQYNYVITREKTNKLKGDKTPYEWLSSDAKEWASYTDRVNACAKALGKKRCHLLLEKDAEELVEKYTALAETAHIAKLAQKIVCMHFGFQFGGLSGTKRVFTVPGALTSRIRKFYGLDRILHNSAAESENLSFEEFLKFSEDLEKKNRKNKKHHALDAMCLCFAPTGVDSRRAKLGEILPEKLRSEKAAREFFKSYLDKIMPVDVAPKKPRLEDGIYSKRIIGGKACMVKRNNLVDLAYKSGLKPVFDIPTLIKLVDKKEKGIINPQIRKMIGEFAATNPDESAWRKWCEEVRLPSKSGLGARVMRVLVYYGEADEYKDLSKDGCGAYRKGDGHKGQVIWESVDGKYYVEPVYVHASKAGVMAALNANPKKKRICGMFNSHCTVDVGDVYNDKGDFILPAGRYMVNTIQKNGQCVLTNADGEKRNPININYLMRAGMRRVELSEL

SEQ ID NO: 217 - protein, 759 aa, unidentified
  REGION 1..759: note = Description of Unknown: uncultivated organism with predicted taxonomy: unclassified Verrucomicrobia (miscellaneous)
  REGION 1..759: note = MG1-221 effector
FNNNKEFNKNMEKEKNNHVWGFDIGKGSLGEAVRIGGDFKHIASVLLDPEFGEIKTAALARRQMRTRKAHKAREKWLEECLEGTGVEILKRREVGIVDGQWQLISKGDERLEREFPPSGEDVCYNSIALRCKLLLGEKLEGWQVFKALNSAIQKRGYDENIPWGEAEEKSSKKDDDDYAQKLSQYEKEKSELFESFADGEKYDFPCFFKAYKMGLWSPENPTRVEVRIDCRAQKAKSYVIARKYVEREFECLVEAAAKFFPKLKGRAKFILYGVSETPYASYYGNMRKKFGLKRGAESDWTALGQKVPRFDNRIIDKCRLIPRMNVCKIRPLNEARNEKDLLYYEVTLALKLLNLRFFRNSNIEQLTFEEFKKAFEIAAGAKYKMTKTAMKKFLKSISATALGDDYAEIEPPKESGRASFSRPAMEILKELIFSGMPPREFYGRKISEISNTDKNKGVVSSDLDFIKLMGDCPWGGIFIPDVQTYQFANAAFPDPDAQINKLIGSQNNPIVRHRLTFFFERIKFLESKYGVPDKVVLEFVRDDFMGEKEKKEMRIAMKKRAEEKMRIAKDLDEHGFKGGNLLLKMELYRKQNGICLYTGDALPLSELATLEIEHIVPRSRGGPDAQYNYVITREKTNKLKGDKTPYEWLSSDAKEWASYTDRVNACAKALGKKRCRLLLEKDAEELVEKYTALAETAHIAKLAQKIVCMHFGFQFGGLSGTKRVFAVPGALTSRIRKFYGLDRILHNSEAESENLSFEE

SEQ ID NO: 218 - protein, 1059 aa, unidentified
  REGION 1..1059: note = Description of Unknown: uncultivated organism with predicted taxonomy: unclassified Verrucomicrobia (miscellaneous)
  REGION 1..1059: note = MG1-222 effector
MEKEKNNHVWGFDIGKGSLGEAVRIGGDFKHISSVLLDPEFGEIKTAALARRQMRTRKAHKAREKWLEECLEGTGVEILKRREVGIVDGQWQLISKGDERLEREFPPSDEDVCYNSIALRCKLLLGEKLEGWQVFKALNSAIQKRGYDENIPWGEAEEKSSKKDDDDYAQKLSQYEKEKSELFESFADGEKYDFPCFFKAYKMGLWSPENPTRVEVRIDCRAQKAKSYVIARKYVEREFECLVEAAAKFFPKLKGRAKFILYGVSETPYASYYGNMRKKFGLKRGAESDWTALGQKVPRFDNRIIDKCRLIPRMNVCKIRPLNEARNEKDLLYYEVTLALKLLNLRFFRNSNIEQLTFEEFKKAFEIAAGAKYKMTKTAMKKFLKSISATALGDDYAEIEPPKESGRASFSRPAMEILKELIFSGMPPREFYGRKISEISNTDKNKGVVSSDLDFIKLMGDCPWGGIFIPDVQTYQFANAAFPDPDAQINKLIGSQNNPIVRHRLTFFFERIKFLESKYGVPDKVVLEFVRDDFMGEKEKKEMRIAMKKRAEEKMRIAKDLDEHGFKGGNLLLKMELYRKQNGICLYTGDALPLSELATLEIEHIVPRSRGGPDAQYNYVITREKTNKLKGDKTPYEWLSSDAKEWASYTDRVNACAKALGKKRCRLLLEKDAEELVEKYTALAETAHIAKLAQKIVCMHFGFQFGGLSGTKRVFTVPGALTSRIRKFYGLDRILHNSAAESENLSFEEFLKFSEDLEKKNRKNKKHHALDAMCLCFAPTGVDSRRAKLGEILPEKLRSEKAAREFFKSYLDKIMPVDVAPKKPRLEDGIYSKRIIGGKACMVKRNNLVDLAYKSGLKPVFDIPTLIKLVDKKEKGIINPQIRKMIGEFAATNPDESAWRKWCEEVRLPSKSGLGARIMRVLVYYGEADEYKDLSKDGCGAYRKGDGHKGQVIWESVDGKYYVGPVYVHASKAGVMAALNANPKKKRICGMFNSHCTVDVGDVYNDKGDFILPAGRYMVNTIQKNGQCVLTNADGEKRNPININYLMRAGMRRVELSEL

SEQ ID NO: 219 - protein, 1059 aa, unidentified
  REGION 1..1059: note = Description of Unknown: uncultivated organism with predicted taxonomy: unclassified Verrucomicrobia (miscellaneous)
  REGION 1..1059: note = MG1-223 effector
MEKEKNNHVWGFDIGKGSLGEAVRIGGDFKHIASVLLDPEFGEIKTAALVRRQMRTRKAHKAREKWLEECLEGMGVEILKRREVGIVDGQWQLISKGDERLEREFPPSGEDVCYNSIALRCKLLLGEKLEGWQVFKALNSAIQKRGYDENIPWGEAEEKSSKKDDDDYAQKLSQYEKEKSELFESFADGEKYDFPCFFKAYKMGLWSPENPTRVEVRIDCRAQKAKSYVIARKYVEREFECLVEAAAKFFPKLKGRAKFILYGVSETPYASYYGNMRKKFGLKRGAESDWTALGQKVPRFDNRIIDKCRLIPRMNVCKIRPLNEARNEKDLLYYEVTLALKLLNLRFFRNSNIEQLTFEEFKKAFEIAAGAKYKMTKTAMKKFLKSISATALGDDYAEIEPPKESGRASFSRPAMEILKELIFSGMPPREFYGRKISEISNTDKNKGVVSSDLDFIKLMGDCPWGGIFIPDVQTYQFANAAFPDPDAQINKLIGSQNNPIVRHRLTFFFERIKFLESKYGVPDKVVLEFVRDDFMGEKEKKEMRIAMKKRAEEKMRIAKDLDEHGFKGGNLLLKMELYRKQNGICLYTGDALPLSELATLEIEHIVPRSRGGPDAQYNYVITREKTNKLKGDKTPYEWLSSDAKEWASYTDRVNACAKALGKKRCRLLLEKDAEELVEKYTALAETAHIAKLAQKIVCMHFGFQFGRLSGTKRVFTVPGALTSRIRKFYGLDRILHNSAAESENLSFEEFLKFSEDLEKKNRKNKKHHALDAMCLCFAPTGVDSRRAKLGEILPEKLRSEKAAREFFKSYLDKIMPVDVAPKKPRLEDGIYSKRIIGGKACMVKRNNLVDLAYKSGLKPVFDIPTLIKLVDKKEKGIINPQIRKMIGEFAATNPDESAWRKWCEEVRLPSKSGLGARVMRVLVYYGEADEYKDLSKDGCGAYRKGDGHKGQVIWESVDGKYYVEPVYVHASKAGVMAALNANPKKKRICGMFNSHCTVDVGDVYNDKGDFILPAGRYMVNTIRSDNQCVLTNADGEKRNPININYLMRAGMRRVDLSEL

SEQ ID NO: 220 - protein, 1025 aa, unidentified; identical to SEQ ID NO: 141
  REGION 1..1025: note = Description of Unknown: uncultivated organism with predicted taxonomy: unclassified Verrucomicrobia (miscellaneous)
  REGION 1..1025: note = MG1-224 effector

SEQ ID NO: 221 - protein, 1062 aa, unidentified; identical to SEQ ID NO: 81
  REGION 1..1062: note = Description of Unknown: uncultivated organism with predicted taxonomy: Coraliomargarita sp. CAG:312
  REGION 1..1062: note = MG1-225 effector

SEQ ID NO: 222 - protein, 1062 aa, unidentified; identical to SEQ ID NO: 114
  REGION 1..1062: note = Description of Unknown: uncultivated organism with predicted taxonomy: Coraliomargarita sp. CAG:312
  REGION 1..1062: note = MG1-226 effector

SEQ ID NO: 223 - protein, 899 aa, unidentified
  REGION 1..899: note = Description of Unknown: uncultivated organism with predicted taxonomy: Coraliomargarita sp. CAG:312
  REGION 1..899: note = MG1-227 effector
MNNNNTQIWGFDIGKASLGEAVWCGGEFKHVESLILDKDFAEIKTSAGRRRQARTRKAHKAREEWLEKCLEDCGIEILKRRKVGIVNGQWKLISKGDARLEKEFPAEGEEVCYNSIALRCKLILGEKLESWQIFKALNSSIQHRGYDENIPWKETQNESKKEDGDYFKKIVLYESEKEDILNRLPQECKREDFDFPCFFKAKKMGIWSEENPYKVGLRISNNAQKAKGYVIPRKYVENEFVRLVQMASLQYPKLKDKQMFILYGISETPYASRFKDARKKFGLKRGADSDWTALGQKIPRFDNRMIGKCKLIPRLNTCKIKSPEKIKSEEDLLHYDITLALKLLNLRFFKDSEICALSFEEFKKLFEIGKSNKYKISKTDLKKFLKSIGASVLSQDHSEIEAPRTSGRSSFSRPAMKILKELIFSGEPPSKFLKAKIDKIANTDPNKGIIREDLDFIRIIGDCPWNGIFIPDVETYKYASQTQESSEAQINKLIGSQNDPIVRHRLSFFYERIKALSEKFGVPDKIVLEFVREDFMGKQAKKDLSLYMKKRFEEKIDIAKKLDDIGYKGNKMLLKMELLQKQGFACLYTGEALQETDLPILEIEHIVPRSLGGPDAAYNYVLTSESTNKAKGNQTPYKWLSPDRDKWRAYTERVRARAAELGSKRCRLLLSENAEELINKYTALAETAWISKLAQRIVCMHFGFQFGGNTGEKRVFTVPGNITAKIRSAFGLNKILHNIDADKKNMSEFDIVKLDYELDKKNRKNKKHHALDAMCLCFAPTGPNAQKLGIGALLPPEIAAKAEEFFRGYIEKVVPNEVAPKKPKLEESIYSKRTINRKECIVRKFNLVDLAYKSGLKPVYDISAIEKLLEDKPKKIPPIINPTVRRIVRDFVSTNPNED

SEQ ID NO: 224 - protein, 1059 aa, unidentified
  REGION 1..1059: note = Description of Unknown: uncultivated organism with predicted taxonomy: unclassified Verrucomicrobia (miscellaneous)
  REGION 1..1059: note = MG1-228 effector
MEKEKNNHVWGFDIGKGSIGEAVRIGGDFKHIASVLLDPEFGEIKTAALARRQMRTRKAHKAREKWLEECLEGTGVEILKRREVGIVDGQWQLISKGDERLEREFPPSGEDVCYNSIALRCKLLLGEKLEGWQVFKALNSAIQKRGYDENIPWGEAEEKSSKKDDDDYAQKLSQYEKEKSELFESFADGEKYDFPCFFKAYKMGLWSPENPTRVEVRIDCRAQKAKSYVIARKYVEREFECLVEAAAKFFPKLKGRAKFILYGVSETPYASYYGNMRKKFGLKRGAESDWTALGQKVPRFDNRIIDKCRLIPRMNVCKIRPLNEARNEKDLLYYEVTLALKLLNLRFFRNSNIEQLTFEEFKKAFEIAAGAKYKMTKTAMKKFLKSISATALGDDYAEIEPPKESGRASFSRPAMEILKELIFSGMPPREFYGRKISEISNTDKNKGVVSSDLGFIKLMGDCPWGGIFIPDVQTYQFANAAFPDPDAQINKLIGSQNNPIVRHRLTFFFERIKFLESKYGVPDKVVLEFVRDDFMGEKEKKEMRIAMKKRAEEKMRIAKDLDEHGFKGGNLLLKMELYRKQNGICLYTGDALPLSELATLEIEHIVPRSRGGPDAQYNYVITREKTNKLKGDKTPYEWLSSDAKEWASYTDRVNACAKALGKKRCRLLLEKDAEELVEKYTALAETAHIAKLAQKIVCMHFGFQFGGLSGTKRVFTVPGALTSRIRKFYGLDRILHNSEAESENLSFEEFLKFSEDLEKKNRKNKKHHALDAMCLCFAPTGVDSRRAKLGEILPEKLRSEKAAREFFKSYLDKIMPVDVAPKKPRLEDGIYSKRIIGGKACMVKRNNLVDLAYKSGLKPVFDIPTLIKLVDKKEKGIINPQIRKMIGEFTATNPDESAWRKWCEEVRLPSKSGLGARVMRVLVYYGEADEYKDLSKDGCGAYRKGDGHKGQVIWESVDGKYYVEPVYVHASKAGVMAALNANPKKKRICGMFNSHCTVDVGDVCNDKGDFILPAGRYMVNTILTTGRCVLTNADGEKRNPININYLMRAGMRRVDLNEL

SEQ ID NO: 225 - protein, 1059 aa, unidentified
  REGION 1..1059: note = Description of Unknown: uncultivated organism with predicted taxonomy: Verrucomicrobia
  REGION 1..1059: note = MG1-229 effector
MEKEKNNHVWGFDIGKGSLGEAVRIGGDFKHIASVLLDPEFGEIKTAALARRQMRTRKAHKAREKWLEECLEGTGVEILKRREVGIVDGQWQLISKGDERLEREFPPSGEDVCYNSIALRCKLLLGEKLEGWQVFKALNSAIQKRGYDENIPWGEAEEKSSKKDDDDYAQKLSQYEKEKSELFESFADGEKYDFPCFFKAYKMGLWSPENPTRVEVRIDCRAQKAKSYVIARKYVEREFECLVEAAAKFFPKLKGRAKFILYGVSETSYASYYGNMRKKFGLKRGAESDWTALGQKVPRFDNRIIDKCRLIPRMNVCKIRPLNEARNEKDLLYYEVTLALKLLNLRFFRNSNIEQLTFEEFKKAFEIAAGAKYKMTKTAMKKFLKSISATALGYDYAEIEPPKESGRASFSRPAMEILKELIFSGMPPREFYGRKISEISNTDKNKGVVSSDLDFIKLMGDCPWGGIFIPDVQTYQFANAAFPDPDAQINKLIGSQNNPIVRHRLTFFFERIKFLESKYGVPDKVVLEFVRDDFMGEKEKKEMRIAMKKRAEEKMRIAKDLDEHGFKGGNLLLKMELYRKQNGICLYTGDALPLSELATLEIEHIVPRSRGGPDAQYNYVITREKTNKLKGDKTPYEWLSSDAKEWASYTDRVNACAKALGKKRCRLLLEKDAEELVEKYTALAETAHIAKLAQKIVCMHFGFQFGGLSGTKRVFTVPGALTSRIRKFYGLDRILHNSAAESENLSFEEFLKFSEDLEKKNRKNKKHHALDAMCLCFAPTGVDSRRAKLGEILPEKLRSEKAAREFFKSYLDKIMPVDVAPKKPRLEDGIYSKRIIGGKACMVKRNNLVDLAYKSGLKPVFDIPTLIKLVDKKEKGIINPQIRKMIGEFAATNPDESAWRKWCEEVRLPSKSGLGARVMRVLVYYGEADEYKDLSKDGCGAYRKGDGHKGQVIWESVDGKYYVEPVYVHASKAGVMAALNANPKKKRICGMFNSHCTVDVGDVYNDKGDFILPAGRYMVNTIRSDNQCVLTNADGEKRNPININYLMRSGMRRVDLNEL

SEQ ID NO: 226 - protein, 1059 aa, unidentified
  REGION 1..1059: note = Description of Unknown: uncultivated organism with predicted taxonomy: Verrucomicrobia
  REGION 1..1059: note = MG1-230 effector
MEKEKNNHVWGFDIGKGSLGEAVCIGGDFKHIASVLLDPEFGEIKTAALARRQMRTRKAHKAREKWLEECLEGTGVEILKRREVGIVDGQWQLISKGDERLEREFPPSGEDVCYNSIALRCKLLLGEKLEGWQVFKALNSAIQKRGYDENIPWGEAEEKSSKKDDDDYAQKLSQYEKEKSELFESFADGEKYDFPCFFKAYKMGLWSPENPTRVEVRIDCRAQKAKSYVIARKYVEREFECLVEAAAKFFPKLKGRAKFILYGVSETPYASYYGNMRKKFGLKRGAESDWTALGQKVPRFDNRIIDKCRFIPRMNVCKIRPLNEARNEKDLLYYEVTLALKLLNLRFFRNSNIEQLTFEEFKKAFEIAAGAKYKMTKTAMKKFLKSISATALGDDYAEIEPPKESGRASFSRPAMEILKELIFSGMPPREFYGRKISEISNTDKNKGVVSSDLDFIKLMGDCPWGGIFIPDVQTYQFANAAFPDPDAQINKLIGSQNNPIVRHRLTFFFERIKFLESKYGVPDKVVLEFVRDDFMGEKEKKEMRIAMKKRAEEKMRIAKDLDEHGFKGGNLLLKMELYRKQNGICLYTGDALPLSELATLEIEHIVPRSRGGPDAQYNYVITREKTNKLKGDKTPYEWLSSDAKEWASYTDRVNACAKALGKKRCRLLLEKDAEELVEKYTTLAETAHIAKLAQKIVCMHFGFQFGGLSGTKRVFTVPGALTSRIRKFYGLDRILHNSAAESENLSFEEFLKFSEDLEKKNRKNKKHHALDAMCLCFAPTGVDSRRAKLGEILPEKLRSEKAAREFFKSYLDKIMPVDVAPKKPRLEDGIYSKRIIGGKACMVKRNNLVDLAYKSGLKPVFDIPTLIKLVDKKEKGIINPQIRKMIGEFAATNPDESAWRKWCEEVRLPSKSGLGARVMRVLVYYGEADEYKDLSKDGCGAYRKGDGHKGQVIWESVDGKYYVEPVYVHASKAGVMAALNANPKKKRICGMFNSHCTVDVGDVYNDKGDFILPAGRYMVNTIQKNGQCVLTNADGEKRNPININYLMRAGMRRVDLSEL

SEQ ID NO: 227 - protein, 1059 aa, unidentified; identical to SEQ ID NO: 87
  REGION 1..1059: note = Description of Unknown: uncultivated organism with predicted taxonomy: unclassified Verrucomicrobia (miscellaneous)
  REGION 1..1059: note = MG1-231 effector

SEQ ID NO: 228 - protein, 1073 aa, unidentified; identical to SEQ ID NO: 126
  REGION 1..1073: note = Description of Unknown: uncultivated organism with predicted taxonomy: Verrucomicrobia
  REGION 1..1073: note = MG1-232 effector

SEQ ID NO: 229 - protein, 1034 aa, unidentified; identical to SEQ ID NO: 110
  REGION 1..1034: note = Description of Unknown: uncultivated organism
  REGION 1..1034: note = MG1-233 effector

SEQ ID NO: 230 - protein, 1058 aa, unidentified
  REGION 1..1058: note = Description of Unknown: uncultivated organism with predicted taxonomy: unclassified Verrucomicrobia (miscellaneous)
  REGION 1..1058: note = MG1-234 effector
MEKEKNNHVWGFDIGKGSLGEAVRIGGDFKHIASVLLDPEFGEIKTAALVRRQMRTRKAHKAREKWLEECLEGTGVEILKRREVGIVDGQWQLISKGDERLEREFPPSGEDVCYNSIALRCKLLLGEKLEGWQVFKALNSAIQKRGYDENIPWGEAEEKSSKKDDDDYAQKLSQYEKEKSELFESFADGEKYDFPCFFKAYKMGLWSPENPTRVEVRIDCRAQKAKSYVIARKYVEREFECLVEAAAKFFPKLKGRAKFILYGVSETPYASYYGNMRKKFGLKRGAESDWTALGQKVPRFDNRIIDKCRLIPRMNVCKIRPLNEARNEKDLLYYEVTLALKLLNLRFFRNSNIEQLTFEEFKKAFEIAAGAKYKMTKTAMKKFLKSISATALGDDYAEIEPPKESGRASFSRPAMEILKELIFSGMPPREFYGRKISEISNTDKNKGVVSSDLDFIKLMGDCPWGGIFIPDVQTYQFANAAFPDPDAQINKLIGSQNNPIVRHRLTFFFERIKFLESKYAVPDKVVLEFVRDDFMGEKEKKEMRIAMKKRAEEKMRIAKDLDEHGFKGGNLLLKMELYRKQNGICLYTGDALPLSELATLEIEHIVPRSRGGPDAQYNYVITREKTNKLKGDKTPYEWLSSDAKEWASYTDRVNACAKALGKKRCRLLLEKDAEELVEKYTALAETAHIAKLAQKIVCMHFGFQFGGLSGTKRVFTVPGALTSRIRKFYGLDRILHNSAAESENLSFEEFLKFSEDLEKKNRKNKKHHALDAMCLCFAPTGVDSGRAKLGEILPEKLRSEKAAREFFKSYLDKIMPVDVAPKKPRLEDGIYSKRIIGGKACMVKRNNLVDLAYKSGLKPVFDIPTLIKLVDKKEKGIINPQIRKMIGEFAATNPDESAWRKWCEEVRLPSKSGLGARVMRVLVYYGEADEYKDLSKDGCGAYRKGDGHKGQVIWESVDGKYYVEPVYVHASKAGAMAALNANPKKKRICGMFNSHCTVDVGDVYNDNGDFILPAGRYMVNTIKKNGQCVLSDANNEKNTININYLMRAGMRRIELSEL

SEQ ID NO: 231 - protein, 1059 aa, unidentified; identical to SEQ ID NO: 115
  REGION 1..1059: note = Description of Unknown: uncultivated organism with predicted taxonomy: unclassified Verrucomicrobia (miscellaneous)
  REGION 1..1059: note = MG1-236 effector

SEQ ID NO: 232 - protein, 1056 aa, unidentified
  REGION 1..1056: note = Description of Unknown: uncultivated organism with predicted taxonomy: Verrucomicrobia
  REGION 1..1056: note = MG1-237 effector
MEKEKNNHVWGFDIGKGSLGEAVRIGGDFKHIASVLLDPEFGEIKTAALVRRQMRTRKAHKAREKWLEECLEGTGVEILKRREVGIVDGQWQLISKGDERLEREFPPSGEDVCYNSIALRCKLLLGEKLEGWQVFKALNSAIQKRGYDENIPWGEAEEKSSKKDDDDYAQKLSQYEKEKSELFESFADGEKYDFPCFFKAYKMGLWSPENPTRVEVRIDCRAQKAKSYVIARKYVEREFECLVEAAAKFFPKLKGRAKFILYGVSETPYASYYGNMRKKFGLKRGAESDWTALGQKVPRFDNRIIDKCRFIPRMNVCKIRPLNEARNEKDLLYYEVTLALKLLNLRFFRNSNIEQLTFEEFKKAFEIAAGAKYKTAMKKFLKSISATALGDDYAEIEPPKESGRASFSRPAMEILKELIFSGMPPREFYGRKISEISNTDKNKGVVSSDLDFIKLMGDCPWGGIFIPDVQTYQFANAAFPDPDAQINKLIGSQNNPIVRHRLTFFFERIKFLESKYGVPDKVVLEFVRDDFMGEKEKKEMRIAMKKRAEEKMRIAKDLDEHGFKGGNLLLKMELYRKQNGICLYTGDALPLSELATLEIEHIVPRSRGGPDAQYNYVITREKTNKLKGDKTPYEWLSSDAKEWASYTDRVNACAKALGKKRCRLLLEKDAEELVEKYTALAETAHIAKLAQKIVCMHFGFQFGGLSGTKRVFTVPGALTSRIRKFYGLDRILHNSASESENLSFEEFLKFSEDLEKKNRKNKKHHALDAMCLCFAPTGVDSRRAKLGEILPEKLRSEKAAREFFKSYLDKIMPVDVAPKKPRLEDGIYSKRIIGGKACMVKRNNLVDLAYKSGLKPVFDIPTLIKLVDKKEKGIINPQIRKMIGEFAATNPDESAWRKWCEEVRLPSKSGLGARIMRVLVYYGEADEYKDLSKDGYGAYRKGDGHKGQVIWESVDGKYYVEPVYVHASKAGVMAALNANPKKKRICGMFNSHCTVDVGDVYNDKGDFILPAGRYMVNTIRSDNQCVLTNADGEKRNPININYLMRAGMRRVDLSEL

SEQ ID NO: 233 - protein, 1062 aa, unidentified; identical to SEQ ID NO: 97
  REGION 1..1062: note = Description of Unknown: uncultivated organism with predicted taxonomy: Coraliomargarita sp. CAG:312
  REGION 1..1062: note = MG1-238 effector

SEQ ID NO: 234 - protein, 1061 aa, unidentified; identical to SEQ ID NO: 131
  REGION 1..1061: note = Description of Unknown: uncultivated organism with predicted taxonomy: unclassified Verrucomicrobia (miscellaneous)
  REGION 1..1061: note = MG1-239 effector

SEQ ID NO: 235 - protein, 1059 aa, unidentified
  REGION 1..1059: note = Description of Unknown: uncultivated organism with predicted taxonomy: unclassified Verrucomicrobia (miscellaneous)
  REGION 1..1059: note = MG1-240 effector
MEKEKNNHVWGFDIGKGSLGEAVRIGGDFKHIASVLLDPEFGEIKTAALARRQMRTRKAHKAREKWLEECLEGTGVEILKRREVGIVDGQWQLISKGDERLEREFPPSGEDVCYNSIALRCKLLLGEKLEGWQVFKALNSAIQKRGYDENIPWGEAEEKSSKKDDDDYAQKLSQYEKEKSELFESFADGEKYDFPCFFKAYKMGLWSPENPTRVEVRIDCRAQKAKSYVIARKYVEREFECLVEAAAKFFPKLKGRAKFILYGVSETPYASYYGNMRKKFGLKRGAESDWTALGQKVPRFDNRIIDKCRLIPRMNVCKIRPLNEARNEKDLLYYEVTLALKLLNLRFFRNSNIEQLTFEEFKKAFEIAAGAKYKMTKTAMKKFLKSISATALGDDYAEIEPPKESGRASFSRPAMEILKELIFSGMPPREFYGRKISEISNTDKNKGVVSSDLDFIKLMGDCPWGGIFIPDVQTYQFANAAFPDPDAQINKLIGSQNNPIVRHRLTFFFERIKFLESKYGVPDKVVLEFVRDDFMGEKEKKEMRIAMKKRAEEKMRIAKDLDEHGFKGGNLLLKMELYRKQNGICLYTGDALPLSELATLEIEHIVPRSRGGPDAQYNYVITREKTNKLKGDKTPYEWLSSDAKEWASYTDRVNACAKALGKKRCRLLLEKDAEELVEKYTALAETAHIAKLAQKIVCMHFGFQFGGLSGTKRVFTVPGALTSRIRKFYGLDRILHNSAAESENLSFEEFLKFSEDLEKKNRKNKKHHALDAMCLCFAPTGVDSRRAKLGEILPEKLRSEKAAREFFKSYLDKIMPVDVAPKKPRLEDGIYSKRIIGGKACMVKRNNLVDLAYKSGLKPVFDIPTLIKLVDKKEKGIINPQIRKMIGEFAATNPDESAWRKWCEEVRLPSKSGLGARIMRVLVYYGEADEYKDLSKDGCGAYRKGDGHKGQVIWESVDGKYYVEPVYVHASKAGVMAALNANPKKKRICGMFNSHCTVDVGDVYNDKGDFILPAGRYMVNTIRSDNQCVLTNADGEKRNPININYLMRAGMRRVDLNEL

SEQ ID NO: 236 - protein, 1062 aa, unidentified; identical to SEQ ID NO: 81
  REGION 1..1062: note = Description of Unknown: uncultivated organism with predicted taxonomy: Verrucomicrobia
  REGION 1..1062: note = MG1-241 effector

SEQ ID NO: 237 - protein, 1062 aa, unidentified
  REGION 1..1062: note = Description of Unknown: uncultivated organism with predicted taxonomy: Coraliomargarita sp. CAG:312
  REGION 1..1062: note = MG1-242 effector
MNNNNTQIWGFDIGKASLGEAVWCGGKFKHVESLILDKDFAEIKTSAGRRRQARTRKAHKAREEWLEKCLEDCGIEILKRRKVGIVNGQWKLISKGDARLEKEFPAEGEEVCYNSIALRCKLILGENLESWQIFKALNSSIQHRGYDENIPWKETQNESKKEDGDYFKKIVLYESEKEDILNRLPQECKREDFDFPCFFKAKKMGIWSEENPYKVGLRISNNAQKAKGYVIPRKYVESEFVRLVQMASLQYPKLKDKQMFILYGISETPYASLFKDARKKFGLKRGADSDWTALGQKIPRFDNRMIGKCKLIPRLNTCKIKSPDKIKSEEDLLHYDITLALKLLNLRFFKDSEICALSFEEFKKLFEIGKSNKYKISKTDLKKFLKSIGASVLSQDHSEIEAPRTSGRSSFSRPAMKILKELIFSGEPPSKFLKAKIDKIANTDPNKGIIREDLDFIRIMGDCPWNGIFIPDVETYKYASQTQESSEAQINKLIGSQNDPIVRHRLSFFYERIKALSEKFGVPDKIVLEFVREDFMGKQAKKDLSLSMKKRFEEKIDIAKKLDDIGYKGNKMLLKMELLQKQGFACLYTGEALQETDLPILEIEHIVPRSLGGPDAAYNYVLTSESTNKAKGNQTPYKWLSPDRDKWRAYTERVRARAAELGSKRCRLLLSENAEELINKYTALAETAWISKLAQRIVCMHFGFQFGGNTGEKRVFTVPGNITAKIRSAFGLNKILHNIDADKKNMSEFDIVKLDYELDKKNRKNKKHHALDAMCLCFAPTGPNAQKLGIGALLPPEIAAKAEEFFRGYIEKVVPNEVAPKKPKLEESIYSKRTINGKECIVRKFNLVDLAYKSGLKPVYDISAIEKLLEDKPKKIPPIINPTVRRIVRDFVSTNPNEDEWRNWCKTVRMPSKNRNGTRIIRVLVYVGTPEEYKDLSKDGCGAFRKGDSHKGQIIWMDKNGRYKVSPVYVHSSKSQTMESIKSNPDFIKIAGFFKSHCLVEIESPVVNGKGDVLLSPGTYMINTIMAAGMAILSDTNGVKSPAININYLMNAGMRRVSIKYK

SEQ ID NO: 238 - protein, 1074 aa, unidentified; identical to SEQ ID NO: 151
  REGION 1..1074: note = Description of Unknown: uncultivated organism with predicted taxonomy: Verrucomicrobia
  REGION 1..1074: note = MG1-243 effector

SEQ ID NO: 239 - protein, 1059 aa, unidentified; identical to SEQ ID NO: 96
  REGION 1..1059: note = Description of Unknown: uncultivated organism with predicted taxonomy: unclassified Verrucomicrobia (miscellaneous)
  REGION 1..1059: note = MG1-244 effector

SEQ ID NO: 240 - protein, 1062 aa, unidentified; identical to SEQ ID NO: 97
  REGION 1..1062: note = Description of Unknown: uncultivated organism with predicted taxonomy: Coraliomargarita sp. CAG:312
  REGION 1..1062: note = MG1-245 effector

SEQ ID NO: 241 - protein, 1061 aa, unidentified
  REGION 1..1061: note = Description of Unknown: uncultivated organism with predicted taxonomy: unclassified Verrucomicrobia (miscellaneous)
  REGION 1..1061: note = MG1-246 effector
MKVMEAENRNHIWGFDIGKGSLGEAVLMGAEFRHVTSLLLDEDFGEIKTAAGLRRQMRTRKAHKAREKWLERCLLEFGIEPLKRREVGIVNGRWMLISKGDERLEREFPPDGEDICYNAIALRCKLLLGEKLESWQIFKALNSAIQNRGYDENIPWKESDVSLPKKDDDDYAKKLSQYSREKGELLESFEDGEKYDYPCFFKAYKMGLWSPENPERVEIRIGNDAQKAKGYVIPRKDVEREFESLVEAASKWHPAMKGKAMYIMYGIAETPYASFKPALRKKFDLKRGAESDWTALGQKIPRFDNRIIDKCRLIPRLNVCKIRPLSEARGEGDLLHYEITLSLKLLNLRFFRNSNVESLSFEEFKAAFEIAKSAKYKMGKAALKKFLKSISASVLSEDQSEIEAPRESGRASFSRPAMLLLKELIFSGMPPTEFYAKKAGEISNADPNKGIVASDLDFIKLMGNCGWSGIFIPDVETYRFANNGADSAKLINGLIGSQNNPIVRHRLAFFYERIKFLESKFGVPDKVVLEFVREDFMGKEQKKRMQIEMKKRASEKMLIAKKLDEAGYKGGNLLLKMELLEKQGGICLYTGEPLLPSELGVLEIEHIVPRSRGGPDAQYNYALTREKTNKEKADRTPFEWLSSDPVKWAGYSDRVKARAGQLGRKRCELLLEKNAEELVEKYTALAETAHISKLAQKIVCLHFGFQFGGLGGTKRVFTVPGALTARIRSFYGLNKILHNEDLAKDALSYEEVLKRGEELDKKNRKNKKHHALDAMCLCFAPTGVNSKRARIDMLLPPDIRGEREAELFFRKYLDRLIPVDVAPKKPRLEDGIYSMRAVGGKKFMARRVNLVDLAYKSGLKPVYDISALIKLLDKKEKGIINAQIRKLVADFARTNPSEDEWRKWCGECRLPSKNGIGTRVIRVLLNYGEPAEYKDLSKDGRGAFRRGDGHKGQIVWESTDGKYYVVPIYVHASKAKLLAELDANPKKKRVCDIFTSHCMVKIGNTYNDKGELLLHEGVYMVNTIQTDGRGKLTNPNGEKSNLININYLMKAGMRKVSVKDL

SEQ ID NO: 242 - protein, 1062 aa, unidentified
  REGION 1..1062: note = Description of Unknown: uncultivated organism with predicted taxonomy: Coraliomargarita sp. CAG:312
  REGION 1..1062: note = MG1-247 effector
MNNNNTQIWGFDIGKASLGEAVWCGGKFKHVESLILDKDFAEIKTSAGRRRQARTRKAHKAREEWLEKCLEDCGIEILKRRKVGIVNGQWKLISKGDARLEKEFPAEGEEVCYNSIALRCKLILGEKLESWQIFKALNSSIQHRGYDENIPWKETQNESKKEDGDYFKKIVLYESEKEDILNRLPQECKREDFDFPCFFKAKKMGIWSEENPYKVGLRISNNAQKAKGYVIPRKYVENEFVRLVQMASLQYPKLKDKQMFILYGISETPYASLFKDARKKFGLKRGADSDWTALGQKIPRFDNRMIGKCKLIPRLNTCKIKSPDKIKSEEDLLHYDITLALKLLNLRFFKDSEICALSFEEFKKLFEIGKSNKYKISKTDLKKFLKSIGASVLSQDHSEIEAPRTSGRSSFSRPAMKILKELIFSGEPPSKFLKAKIDKIANTDPNKGIIREDLDFIRIMGDCPWNGIFIPDVETYKYASQTQESSEAQINKLIGSQNDPIVRHRLSFFYERIKALSEKFGVPDKIVLEFVREDFMGKQAKKDLSLSMKKRFEEKIDIAKKLDDIGYKGNKMLLKMELLQKQGFACLYTGEALQETDLPILEIEHIVPRSLGGPDAAYNYVLTSESTNKAKGNQTPYKWLSPDRDKWRAYTERVRARAAELGSKRCRLLLSENAEELINKYTALAETAWISKLAQRIVCMHFGFQFGGNTGEKRVFTVPGNITAKIRSAFGLNKILHNIDADKKNMSEFDIVKLDYELDKKNRKNKKHHALDAMCLCFAPTGPNAQKLGIGALLPPEIAAKAEEFFRGYIEKVVPNEVAPKKPKLEESIYSKRTINGKECIVRKFNLVDLAYKSGLKPVYDISAIEKLLEDKPKKIPPIINPTVRRIVRDFVSTNPNEDEWRNWCKTVRMPSKNRNGTRIIRVLVYVGTPEEYKDLSKDGCGAFRKGDSHKGQIIWMDKNGRYKVSPVYVHSSKSQTMESIKSNPDFIKIAGFFKSHCLVEIESPVVNGKGDVLLSPGTYMINTIMAAGMAILSDTNGVKSPAININYLMNAGMRRVSIKYK

SEQ ID NO: 243 - protein, 1034 aa, unidentified; identical to SEQ ID NO: 147
  REGION 1..1034: note = Description of Unknown: uncultivated organism with predicted taxonomy: unclassified Verrucomicrobia (miscellaneous)
  REGION 1..1034: note = MG1-248 effector

SEQ ID NO: 244 - protein, 1059 aa, unidentified; identical to SEQ ID NO: 149
  REGION 1..1059: note = Description of Unknown: uncultivated organism with predicted taxonomy: unclassified Verrucomicrobia (miscellaneous)
  REGION 1..1059: note = MG1-249 effector

SEQ ID NO: 245 - protein, 1062 aa, unidentified; identical to SEQ ID NO: 158
  REGION 1..1062: note = Description of Unknown: uncultivated organism with predicted taxonomy: Coraliomargarita sp. CAG:312
  REGION 1..1062: note = MG1-250 effector

SEQ ID NO: 246 - protein, 1062 aa, unidentified; identical to SEQ ID NO: 184
  REGION 1..1062: note = Description of Unknown: uncultivated organism with predicted taxonomy: Coraliomargarita sp. CAG:312
  REGION 1..1062: note = MG1-251 effector

SEQ ID NO: 247 - protein, 1060 aa, unidentified; identical to SEQ ID NO: 139
  REGION 1..1060: note = Description of Unknown: uncultivated organism with predicted taxonomy: unclassified Verrucomicrobia (miscellaneous)
  REGION 1..1060: note = MG1-252 effector

SEQ ID NO: 248 - protein, 1059 aa, unidentified
  REGION 1..1059: note = Description of Unknown: uncultivated organism with predicted taxonomy: unclassified Verrucomicrobia (miscellaneous)
  REGION 1..1059: note = MG1-253 effector
MEKEKNNHVWGFDIGKGSLGEAVRIGGDFKHIASVLLDPEFGEIKTAALARRQMRTRKAHKAREKWLEECLEGTGVEILKRREVGIVDGQWQLISKGDERLEREFPPSGEDVCYNSIALRCKLLLGEKLEGWQVFKALNSAIQKRGYDENIPWGEAEEKSSKKDDDDYAQKLSQYEKEKSELFESFADGEKYDFPCFFKAYKMGLWSPENPTRVEVRIDCRAQKAKSYVIARKYVEREFECLVEAAAKFFPKLKGRAKFILYGVSETPYASYYGNMRKKFGLKRGAESDWTALGQKVPRFDNRIIDKCRLIPRMNVCKIRPLNEARNEKDLLYYEVTLALKLLNLRFFRNSNIEQLTFEEFKKAFEIAAGAKYKMTKTAMKKFLKSISATALGDDYAEIEPPKESGRASFSRPAMEILKELIFSGMPPREFYGREISEISNTDKNKGVVSSDLDFIKLMGDCPWGGIFIPADLTYQFANAAFPDPDAQINKLIGSQNNPIVRHRLTFFFERIKFLESKYGVPDKVVLEFVRDDFMGEKEKKEMRIAMKKRAEEKMRIAKDLDEHGFKGGNLLLKMELYRKQNGICLYTGDALPLSELATLEIEHIVPRSRGGPDAQYNYVITREKTNKLKGDKTPYEWLSSDAKEWASYTDRVNACAKALGKKRCRLLLEKDAEELVEKYTALAETAHIAKLAQKIVCMHFGFQFGGLSGTKRVFTVPGALTSRIRKFYGLDRILHNSAAESENLSFEEFLKFSEDLEKKNRKNKKHHALDAMCLCFAPTGVDSRRAKLGEILPEKLRSEKAAREFFKSYLDKIMPVDVAPKKPRLEDGIYSKRIIGGKACMVKRNNLVDLAYKSGLKPVFDIPTLIKLVDKKEKGIINPQIRKMIGEFAATNPDESAWRKWCEEVRLPSKSGLGARIMRVLVYYGEADEYKDLSKDGCGAYRKGDGHKGQVIWESVDGKYYVEPVYVHASKAGVMAALNANPKKKRICGMFNSHCTVDVGDVYNDKGDFILPAGRYMVNTIQKNGQCVLTNADGEKRNPININYLMRAGMRRVELSEL

SEQ ID NO: 249 - protein, 1059 aa, unidentified; identical to SEQ ID NO: 136
  REGION 1..1059: note = Description of Unknown: uncultivated organism with predicted taxonomy: unclassified Verrucomicrobia (miscellaneous)
  REGION 1..1059: note = MG1-254 effector

SEQ ID NO: 250 - protein, 1059 aa, unidentified; identical to SEQ ID NO: 134
  REGION 1..1059: note = Description of Unknown: uncultivated organism with predicted taxonomy: unclassified Verrucomicrobia (miscellaneous)
  REGION 1..1059: note = MG1-255 effector

SEQ ID NO: 251 - protein, 1059 aa, unidentified; identical to SEQ ID NO: 119
  REGION 1..1059: note = Description of Unknown: uncultivated organism with predicted taxonomy: unclassified Verrucomicrobia (miscellaneous)
  REGION 1..1059: note = MG1-256 effector

SEQ ID NO: 252 - protein, 1059 aa, unidentified; identical to SEQ ID NO: 143
  REGION 1..1059: note = Description of Unknown: uncultivated organism with predicted taxonomy: unclassified Verrucomicrobia (miscellaneous)
  REGION 1..1059: note = MG1-257 effector

SEQ ID NO: 253 - protein, 1074 aa, unidentified; identical to SEQ ID NO: 157
  REGION 1..1074: note = Description of Unknown: uncultivated organism with predicted taxonomy: Verrucomicrobia
  REGION 1..1074: note = MG1-258 effector

SEQ ID NO: 254 - protein, 1059 aa, unidentified; identical to SEQ ID NO: 161
  REGION 1..1059: note = Description of Unknown: uncultivated organism with predicted taxonomy: unclassified Verrucomicrobia (miscellaneous)
  REGION 1..1059: note = MG1-259 effector

SEQ ID NO: 255 - protein, 1059 aa, unidentified
  REGION 1..1059: note = Description of Unknown: uncultivated organism with predicted taxonomy: unclassified Verrucomicrobia (miscellaneous)
  REGION 1..1059: note = MG1-260 effector
MEKEKNNHVWGFDIGKGSLGEAVRIGGDFKHIASVLLDPEFGEIKTAALACRQMRTRKAHKAREKWLEECLEGTGVEILKRREVGIVDGQWQLISKGDERLEREFPPSGEDVCYNSIALRCKLLLGEKLEGWQVFKALNSAIQKRGYDENIPWGEAEEKSSKKDDDDYAQKLSQYEKEKSELFESFADGEKYDFPCFFKAYKMGLWSPENPTRVEVRIDCRAQKAKSYVIARKYVEREFECLVEAAAKFFPKLKGRAKFILYGVSETPYASYYGNMRKKFGLKRGAESDWTALGQKVPRFDNRIIDKCRFIPRMNVCKIRPLNEARNEKDLLYYEVTLALKLLNLRFFRNSNIEQLTFEEFKKAFEIAAGAKYKMTKTAMKKFLKSISATALGDDYAEIEPPKESGRASFSRPAMEILKELIFSGMPPREFYGRKISEISNTDKNKGVVSSDLDFIKLMGDCPWGGIFIPDVQTYQFANAAFPDPDAQINKLIGSQNNPIVRHRLTFFFERIKFLESKYGVPDKVVLEFVRDDFMGEKEKKEMRIAMKKRAEEKMRIAKDLDEHGFKGGNLLLKMELYRKQNGICLYTGDALPLSELATLEIEHIVPRSRGGPDAQYNYVITREKTNKLKGDKTPYEWISSDAKEWASYTDRVNACAKALGKKRCRLLLEKDAEELVEKYTALAETAHIAKLAQKIVCMHFGFQFGGLSGTKRVFTVPGALTSRIRKFYGLDRILHNSAAESENLSFEEFLKFSEDLEKKNRKNKKHHALDAMCLCFAPTGVDSRRAKLGEILPEKLRSEKAAREFFKSYLDKIMPVDVAPKKPRLEDGIYSKRIIGGKACMVKRNNLVDLAYKSGLKPVFDIPTLIKLVDKKEKGIINPQIRKMIGEFAATNPDESAWRKWCEEVRLPSKSGLGARIMRVLVYYGEADEYKDLSKDGCGAYRKGDGHKGQVIWESVDGKYYVEPVYVHASKAGVMAALNANPKKKRICGMFNSHCTVDVGDVYNDKGDFILPAGRYMVNTIRSDNQCVLTNADGEKRNPININYLMRAGMRRVDLSEL

SEQ ID NO: 256 - protein, 1059 aa, unidentified; identical to SEQ ID NO: 94
  REGION 1..1059: note = Description of Unknown: uncultivated organism with predicted taxonomy: unclassified Verrucomicrobia (miscellaneous)
  REGION 1..1059: note = MG1-261 effector

SEQ ID NO: 257 - protein, 1061 aa, unidentified
  REGION 1..1061: note = Description of Unknown: uncultivated organism with predicted taxonomy: unclassified Verrucomicrobia (miscellaneous)
  REGION 1..1061: note = MG1-262 effector
MKVMEDEGGNHIWGFDIGKGSLGEAVLDGSEFKHVASLLLDADFGEIETAAGLRRQMRTRKAHKAREKWLESCLSGFGIETLKRREVGIVNGQWTLISKGDERLEREFPPDGENICYNSIALRCKLLLGEKLEGWQIFKALNSAIQNRGYDENIPWKESDASPSKKEGGDYAQKLSQYSREKSELFESFEGGEKYDYPCFFKAYKMGLWSPDNPERVEVRIGSDAQKAKDYVIPRKDVEREFERLVEAASKWYPAMKGKAMYIMYGIAETPYASYKPLLRKKFDLKRGAESDWTALGQKIPRFDNRIIDKCRLIPRLNVCKIRPLSKIRGEADLLHYEITLSLKLLNLRFFRNSNVESLSFGEFKAAFEIAKGAKYKMGKAALKKFLKSISASVLSEDQSEIEAPRESGRAAFSRPAMLLLKELIFSGMTPAEFYAKKSGEISNADPNKGIVASDLDFIKLMGNCGWSGIFIPDVDTFHFANKGAEPAKLINELIGSQNNPIVRHRLSFFYERIKFLESKFGIPDKVVLEFVREDFMGKEQKKRMQIEMKKRASEKMLIAKKLDEAGYKGGNLLLKMELLEKQGGVCLYTGEPLLPSELGVLEIEHIVPRSRGGPDAQYNYVLTREKTNKEKADRTPFEWLSSDPVKWAGYSDRVKARAGQLGRKRCELLLEKNAEELVEKYTALAETAHISKLAQKIVCLHFGFQFGGLSGTKRVFTVPGALTARIRTFYGLNKILHNEDLAHETLSFEGFLKRGEELDKKNRANKKHHALDAMCLCFAPTGVNSKRARVDMLLPPKIRSEKEAELFFRKYLDKLIPVDVAPKKPKLEDGIYSMRTVGGKKIMARRVNLVDLAYKSGLKPVYDVSVLIKLLDKKERGIINPQIRKLVADFARTNPSEDEWKKWCGECRLPSKNGLGTRVIRVLLNYGEPAEYKDLSKDGRGAFRRGDGHKGQIVWESTDGKYYVLPIYVHASKAKLPAELCANPKKKRICGIFTSHCMVKVGNTYNNKGELLLPEGVYMLNTIRTDGWIQLTSANGDKSKPININYLMKAGMKKVPVKDL

SEQ ID NO: 258 - protein, 1055 aa, unidentified; identical to SEQ ID NO: 153
  REGION 1..1055: note = Description of Unknown: uncultivated organism with predicted taxonomy: Verrucomicrobia
  REGION 1..1055: note = MG1-263 effector

SEQ ID NO: 259 - protein, 1075 aa, unidentified
  REGION 1..1075: note = Description of Unknown: uncultivated organism with predicted taxonomy: unclassified Verrucomicrobia (miscellaneous)
  REGION 1..1075: note = MG1-264 effector
MSLYFIEQISDWKIMKVMEDEGGNHIWGFDIGKGSLGEAVLDGSEFKHVASLLLDADFGEIETAAGLRRQMRTRKAHKAREKWLESCLSGFGIETLKRREVGIVNGQWTLISKGDERLEREFPPDGENICYNSIALRCKLLLGEKLEGWQIFKALNSAIQNRGYDENIPWKESDASPSKKEGGDYAQKLSQYSREKSELFESFEGGEKYDYPCFFKAYKMGLWSPDNPERVEVRIGSDAQKAKDYVIPRKDVEREFERLVEAASKWYPAMKGKAMYIMYGIAETPYASYKPLLRKKFDLKRGAESDWTALGQKIPRFDNRIIDKCRLIPRLNVCKIRPLSKIRGEADLLHYEITLSLKLLNLRFFRNSNVESLSFGEFKAAFEIAKGAKYKMGKAALKKFLKSISASVLSEDQSEIEAPRESGRAAFSRPAMLLLKELIFSGMTPAEFYAKKSGEISNADPNKGIVASDLDFIKLMGNCGWSGIFIPDVDTFHFANKGAEPAKLINELIGSQNNPIVRHRLSFFYERIKFLESKFGIPDKVVLEFVREDFMGKEQKKRMQIEMKKRASEKMLIAKKLDEAGYKGGNLLLKMELLEKQGGVCLYTGEPLLPSELGVLEIEHIVPRSRGGPDAQYNYVLTREKTNKEKADRTPFEWLSSDPVKWAGYSDRVKARAGQLGRKRCELLLEKNAEELVEKYTALAETAHISKLAQKIVCLHFGFQFGGLSGTKRVFTVPGALTARIRTFYGLNKILHNEDLAHETLSFEGFLKRGEELDKKNRANKKHHALDAMCLCFAPTGVNSKRARVDMLLPPKIRSEKEAELFFRKYLDKLIPVDVAPKKPKLEDGIYSMRTVGGKKIMARRVNLVDLAYKSGLKPVYDVSVLIKLLDKKERGIINPQIRKLVADFARTNPSEDEWKKWCGECRLPSKNGLGTRVIRVLLNYGEPAEYKDLSKDGRGAFRRGDGHKGQIVWESTDGKYCVLPIYVHASKAKLLAELCANPKKKRICGIFTSHCMVKVGNTYNNKGELLLPEGVYMLNTIRTDGWIQLTSANGDKSKPININYLMKAGMKKVPVKDL

SEQ ID NO: 260 - protein, 1063 aa, unidentified; identical to SEQ ID NO: 159
  REGION 1..1063: note = Description of Unknown: uncultivated organism with predicted taxonomy: unclassified Verrucomicrobia (miscellaneous)
  REGION 1..1063: note = MG1-265 effector

SEQ ID NO: 261 - protein, 1022 aa, unidentified
  REGION 1..1022: note = Description of Unknown: uncultivated organism with predicted taxonomy: Coraliomargarita sp. CAG:312
  REGION 1..1022: note = MG1-266 effector
NNNNTQIWGFDIGKASLGEAVWCGGKFKHVESLILDKDFAEIKTSAGRRRQARTRKAHKAREEWLEKCLEDCGIEILKRRKVGIVNGQWKLISKGDARLEKEFPAEGEEVCYNSIALRCKLILGEKLESWQIFKALNSSIQHRGYDENIPWKETQNESKKEDGDYFKKIVLYESEKEDILNRLPQECKREDFDFPCFFKAKKMGIWSEENPYKVGLRISNNAQKAKGYVIPRKYVENEFVRLVQMASLQYPKLKDKQMFILYGISETPYASLFKDARKKFGLKRGADSDWTALGQKIPRFDNRMIGKCKLIPRLNTCKIKSPEKIKSEEDLLHYDITLALKLLNLRFFKDSEICALSFEEFKKLFEIGKSNKYKISKTDLKKFLKSIGASVLSQDHSEIEAPRTSGRSSFSRPAMKILKELIFSGEPPSKFLKAKIDKIANTDPNKGIIREDLDFIRIMGDCPWNGIFIPDVETYKYASQTQESSEAQINKLIGSQNDPIVRHRLSFFYERIKALSEKFGVPDKIVLEFVREDFMGKQAKKDLSLSMKKRFEEKIDIAKKLDDIGYKGNKMLLKMELLQKQGFACLYTGEALQETDLPILEIEHIVPRSLGGPDAAYNYVLTSESTNKAKGNQTPYKWLSPDRDKWRAYTERVRARAAELGSKRCRLLLSENAEELINKYTALAETAWISKLAQRIVCMHFGFQFGGNTGEKRVFTVPGNITAKIRSAFGLNKILHNIDADKKNMSEFDIVKLDYELDKKNRKNKKHHALDAMCLCFAPTGPNAQKLGIGALLPPEIAAKAEEFFRGYIEKVVPNEVAPKKPKLEESIYSKRTINRKECIVRKFNLVDLAYKSGLKPVYDISAIEKLLEDKPKKIPPIINPTVRRIVRDFVSTNPNEDEWRNWCKTVRMPSKNRNGTRIIRVLVYVGTPEEYKDLSKDGCGAFRKGDSHKGQIIWMDKNGRYKVSPVYVHSSKSQTMESIKSNPDFIKIAGFFKSHCLVEIESPVVNGKRDVLLSPGTYMIN

SEQ ID NO: 262 - protein, 1073 aa, unidentified
  REGION 1..1073: note = Description of Unknown: uncultivated organism with predicted taxonomy: Verrucomicrobia
  REGION 1..1073: note = MG1-267 effector
MHTKDIIWGFDIGKGSLGEAVRVGNEFKHVQSLEIAPDFAETKTTAAARRAWRTREAHKARELWLEKCLSEAGIEVLLRRKVGVVDGAWKLVSKGDVRLEREFPPAGEDLCYNSIALRCKLLLGEKLESWQVFKALNSAIQNRGYDANIPWGDEDAADGGDGSSRKSSDSDASGDGESYAEKLAHYEREFDGILAELDNREKYEFPCFFKAAKMGLWSPENPDFVGVRIDNTAEKAKGYVVPREAVVREFRALVNAAALQYPNLKGKADFIMFGRACEPYASYNPELRKRFGLKRGAATDWTALGQKTPRFDNRVIDKCKLIPRLNVCKIKPLDECKTDDDFLSYTITLSLKLLNLRFFRGAGVDSLSFDEFLRAFELAKNSKFKLGKAALKKFFKTIGAEVMDESQSEIEQPRNGGRAAFSRPAMRILRDLIFSGKSPAEFYATELGKIANTDKNKGLVAGDLDFLKLMSDAPWSGIFIPDVGLSDFADTSEAARAAQINKLIGSQNDPIVRHRLSFFYERIKSLEAKFGVPDKIVLEFVRDDFLGKKAKSDLNKAIKTRFDEKKKLAEDLDSKREEFGLKYASKKMLLKFELYKKQGGECVYTGNALPLSELENLEVEHIVPRSRGGPDAMYNYVLTDEKTNKEKGDRTPYEWHSLKGAEWDSYCDRVRELTKNLGAKRCRLLLAPNAAELVEKYTALAETAWISKLAQRICCLHFGFQFGGLAGAKKVWTVSGNTTAMIRGRYGLNRLLHDEEAAEDLSLFDRICMEKKFEEKNRKNKKHHALDAMCLCFAPTSNAKKASAYKNILPEEITRNPESDEARKFFGRYLATVIPNKVAVEKSKLEQTIYSLRKGRIVKKCNVRDLAYEGINPKYNYTKLVKRIESIVGDVSKRIISDFVLSNPDLKESEWEDWCKYEAAIPSKNGAPTKLLRVLCEVGSPEEYKDLSKDGCGAYRKGDSHKGQFIWKTQKGKYMVAPVYAYASKAKVFAALKSNPDCAEVCGFFRQNCLVEISNDVIDKSGKMLLKSGIYKSNTIMSDGRAKFTNSDGISTNPISIQYLMPAGMKRIKLDTV

SEQ ID NO: 263 - protein, 1059 aa, unidentified; identical to SEQ ID NO: 100
  REGION 1..1059: note = Description of Unknown: uncultivated organism with predicted taxonomy: Verrucomicrobia
  REGION 1..1059: note = MG1-268 effector

SEQ ID NO: 264 - protein, 1078 aa, unidentified
  REGION 1..1078: note = Description of Unknown: uncultivated organism with predicted taxonomy: unclassified Verrucomicrobia (miscellaneous)
  REGION 1..1078: note = MG1-269 effector
VDFCSHCKYFNNNKEFNKNMEKEKNNHVWGFDIGKGSLGEAVRIGGDFKHIASVLLDPEFGEIKTAALARRQMRTRKAHKAREKWLEECLEGTGVEILKRREVGIVDGQWQLISKGDERLEREFPPSGEDVCYNSIALRCKLLLGEKLEGWQVFKALNSAIQKRGYDENIPWGEAEEKSSKKDDDDYAQKLSQYEKEKSELFESFADGEKYDFPCFFKAYKMGLWSPENPTRVEVRIDCRAQKAKSYVIARKYVEREFECLVEAAAKFFPELKGRAKFILYGVSETPYASYYGNMRKKFGLKRGAESDWTALGQKVPRFDNRIIDKCRFIPRMNVCKIRPLNEARNEKDLLYYEVTLALKLLNLRFFRNSNIEQLTFEEFKKAFEIAAGAKYKMTKTAMKKFLKSISATALGDDYAEIEPPKESGRASFSRPAMEILKELIFSGMPPREFYGRKISEISNTDKNKGVVSSDLDFIKLMGDCPWGGIFIPDVQTYQFANAAFPDPDAQINKLIGSQNNPIVRHRLTFFFERIKFLESKYGVPDKVVLEFVRDDFMGEKEKKEMRIAMKKRAEEKMRIAKDLDEHGFKGGNLLLKMELYRKQNGICLYTGDALPLSELATLEIEHIVPRSRGGPDAQYNYVITREKTNKLKGDKTPYEWLSSDAKEWASYTDRVNACAKALGKKRCRLLLEKDAEELVEKYTALAETAHIAKLAQKIVCMHFGFQFGGLSGTKRVFTVPGALTSRIRKFYGLDRILHNSAAESENLSFEEFLKFSEDLEKKNRKNKKHHALDAMCLCFAPTGVDSRRAKLGEILPEKLRSEKAAREFFKSYLDKIMPVDVAPKKPRLEDGIYSKRIIGGKACMVKRNNLVDLAYKSGLKPVFDIPTLIKLVDKKEKGIINPQIRKMIGEFAATNPDESAWRKWCEEVRLPSKSGLGARIMRVLVYYGEADEYKDLSKDGYGAYRKGDGHKGQVIWESVDGKYYVEPVYVHASKAGVMAALNANPKKKRICGMFNSHCTVDVGDVYNDKGDFILPAGRYMVNTIRSDNQCVLTNADGEKRNPININYLMRAGMRRVDLSEL

SEQ ID NO: 265 - protein, 1055 aa, unidentified; identical to SEQ ID NO: 98
  REGION 1..1055: note = Description of Unknown: uncultivated organism with predicted taxonomy: Verrucomicrobia
  REGION 1..1055: note = MG1-270 effector

SEQ ID NO: 266 - protein, 1059 aa, unidentified
  REGION 1..1059: note = Description of Unknown: uncultivated organism with predicted taxonomy: unclassified Verrucomicrobia (miscellaneous)
  REGION 1..1059: note = MG1-271 effector
MEKEKNNHVWGFDIGKGSLGEAVRIGGDFKHIASVLLDPEFGEIKTAALARRQMRTRKAHKAREKWLEECLEGTGVEILKRREVGIVDGQWQLISKGDERLEREFPPSGEDVCYNSIALRCKLLLGEKLEGWQVFKALNSAIQKRGYDENIPWGEAEEKSSKKDDDDYAQKLSQYEKEKSELFESFADGEKYDFPCFFKAYKMGLWSPENPTRVEVRIDCRAQKAKSYVIARKYVEREFECLVEAAAKFFPKLKGRAKFILYGVSETPYASYYGNMRKKFGLKRGAESDWTALGQKVPRFDNRIIDKCRLIPRMNVCKIRPLNEARNEKDLLYYEVTLALKLFNLRFFRNSNIEQLTFEEFKKAFEIAAGAKYKMTKTAMKKFLKSISATALGDDYAEIEPPKESGRASFSRPAMEILKELIFSGMPPREFYGRKISEISNTDKNKGVVSSDLDFIKLMGDCPWGGIFIPDVQTYQFANAAFPDPDAQINKLIGSQNNPIVRHRLTFFFERIKFLESKYGVPDKVVLEFVRDDFMGEKEKKEMRIAMKKRAEEKMRIAKDLDEHGFKGGNLLLKMELYRKQNGICLYTGDALPLSELATLEIEHIVPRSRGGPDAQYNYVITREKTNKLKGDKTPYEWLSSDAKEWASYTDRVNACAKALGKKRCRLLLEKDAEELVEKYTALAETAHIAKLAQKIVCMHFGFQFGGLSGTKRVFTVPGALTSRIRKFYGLDRILHNSASESENLSFEEFLKFSEDLEKKNRKNKKHHALDAMCLCFAPTGVDSRRAKLGEILPEKLRSEKAAREFFKSYLDKIMPVDVAPKKPRLEDGIYSKRIIGGKACMVKRNNLVDLAYKSGLKPVFDIPTLIKLVDKKEKGIINPQIRKMIGEFAATNPDESAWRKWCEEVRLPSKSGLGARVMRVLVYYGEADEYKDLSKDGYGAYRKGDGHKGQVIWESVDGKYYVEPVYVHASKAGVMAALNANPKKKRICGMFNSHCTVDVDDVYNDKGDFILPAGRYMVNTIRSDNQCVLTNADGEKRNPININYLMRAGMRRVDLSEL

SEQ ID NO: 267 - protein, 1273 aa, unidentified
  REGION 1..1273: note = Description of Unknown: uncultivated organism
  REGION 1..1273: note = MG1-272 effector
MKDYVLKAANQSPTNNDSFLTGLVFGFDVGTGSIGYAVRKKDKFLDAGVLICPEGINDLSGRNGLRRGRRTLDHRQNRRDWFAENLAKVLGLSLHKGTRLPNTAWTQNEKAGWIPVSPKFANPVSLRIDALGGKPLTAEQLFTALAHLIKHRGPSEKVPWSKTIAEEQRDLDEKESVSDTIPADQVRAEFEKARKEFTLSNADASGFHPAHYLQQLGEERKLQRKRAWPRDLVETEAAAILEAQANHHQKLKEEIKFVDVSGENRKATVAEWLLHGNSSIKSVREGDAEMSFHVFDRNYPNRERAPFTFQAARIHNRKPGLDLVEPRDEFGRPRYVMSRERPEYGQWQVEVALLNFKVLDLTSLKKDKAKIVPSAEALAELREIITRTGRLSVEDLQTWIKPYKENGIYDLVKEQPALVGEGKGRGRFSRVGLQRATEIIRPLQTEHNAMSKLTPKGQRAKKKLKTPEDKADAYVRQYVNYTPKLRYAWKNPATQITEPEPLPRALRRYILEIRDPVVRHRVELFDRMLDDLLGKYRSDGNPTHIVIECVRELEQDAEAAQDAWERRKKDREENQTARATLKDMGVKAPTDKDVRKFRLLQECKWRCPYTLERFMQTEFDDLVIQRIVPPAGDPRRSAYLEAARSAMQGTQVEHMVPQAAIVCDEWFNVTVTRPTTNTTKGDRTPYDFVLRDGDKDRRKQLLENAEQCFGKDSLKFKIFSSDNARSLIQERDKLQRTAYIARCLRYVCLLKFGWLSPEDRDPGHEKANDATRSYLVTNGGTTRRLRQAWNLDELLRETVSPEKWAGMTDVEKERALAQGARIPTEEWKKLDKAKQDDVLRARRTKNRQDVRHHALDAMVVACTLPWAANLTVWASGWCNLDTDDGSVSSVRCPIFGENDFGEGIYAAIEAKLSELKTALPEATSNAITHYRSHERHKQVFDSGLYGKRTTYGGKPLEKDEPVFFVIAKQLSRLTPAVLSYPAKGGGDSIFSPKLREHIASAWKTYTADNANWQHLLTRSEEDLQRELQDAENSKDNQYKFKTIKALKDRLRRVSQWRVAIPNETLWAELQEYLQQEKARRLKKPEARNNVFPDHFIEGLRHPNYNTPIHSVKVIALTKDEDAYVELRTGSKTFWKYKGGYEAMRVYGSPPKTRTGKGKFICWLVRRFYKRKKKENGQLQTVKEAHAAAMPAVCQGQKLLATFHNGQVVRFKQLAKDMDISHNWIICETNADTRNPRNSKIVVMPAHLAKIVADPENPKRTISLKETEGVPLFL

SEQ ID NO: 268 - protein, 992 aa, unidentified
  REGION 1..992: note = Description of Unknown: uncultivated organism with predicted taxonomy: Rhizobiales
  REGION 1..992: note = MG1-273 effector
MDKTDYVLKNKPEPASNDKFLTGLVFGFDVGTGSIGYAVRKGSEFKDVGVLICDSEGSELEGRRNLRRQRRTIRSRKSRREWFARELVKLGLPKSETALDDPISLRLRALNGEVLKPEELHAALTHLFKRRGYTKVPWANVEAVRKDGEKAKKEEGDTQKAISELEQEMKNAGCDYPCQLLDQRRKKLGERPQTKWGRNFPWGRATLEKEFWKIVEAQKEHCPELAKNAEKLLHGNTHKVTRIIDGQKREFHVYFKTDKEHKAGVLGVRWPKFENRSPGLDALEPFRKDPKTGAWIPQHTMRRDNLLFKEWQLEKSLHDFRVKRRMISSGRSKKEKFEFIPPPPAALAALRKLWNERGHLWAADLQEWAKAYEGQFELHYPDRDLTPRNNFSGRARFSKIGMASIRKVIDEARVRHDVAYEAWELKFKEKNKEAKEEDIFNGYARFLTQQSNAPVLAAGVADNSYARTVAPPPVLILPGETPEAAFQRYLNAIRDPQVRHRVELFGRELRRLMTLHSQNQAPDFIVIEMARDLMMNQEQKDAKEAKDKERRKERDEAAQILRDMGFAPDADNIKKFLLAQEAGWRCPFTLRPFCQSDFSQLTVTQLIQAENKPRFVKEASSVFDRLEIEHLVPRTPVVCNEWFNLTVTLHSTNAQKRKRTPFQWLFADKDGLPADLDWERIRKNAVERFGESSLKYQVFTSPDGAKLVEDNAKKSIQQTAYIARCLREACLIIFGKEWLDWTDGAGRDPRLLTDNRASKNYLTTNGVITSRLRGAWHLNEVLWPKPERLNDTEWDKLTDDEKIPLKAKYKEERELRALKNRQDHRHHAIDAMVISCAMPWQTCKTRTGSQQSDDGLCEVDSETGAITKIWNPVFNDYGYGIKQAAEAKSALLLKFSSERQVDLLRHHKSNNRNAQAFDTTIYGRRENFGGEILPQTLFVARKRLLDLKVSHLDPRGKGGFIFSKLLRDHIEKEWKLFSGDEKNWLRVQSDWM

SEQ ID NO: 269 - protein, 1258 aa, unidentified
  REGION 1..1258: note = Description of Unknown: uncultivated organism
  REGION 1..1258: note = MG1-274 effector
MPKENESSFLNGLVFGFDVGTGSIGYAVRKGAEFLDVGVLICDSKGSDLSKRRELRRQRRTLRSRKYRRQWLANELSELGLTKPVPSPDDPVSLRLRALNGEALKPEELHAALTHLFKRRGYSKVPWAKVEALRKNGEKAKQEDSDTQKGITELEQEMNEKGCTYPCQLLDLRRKDAGTLPKRKWGRNFPWGRQMLETEFRAIAEAQKDHFPELVQNVESLLHRNTLEIRREVDGKKQTFHVFFKTDTGKKPGVLGIRWPKFENRGPGLDALEPFRKDRKTGAWIPQHTLRRDSLFFKEWQSEVALRNFRVKRRLITVGRSKKEKFELIPPPPVALERLRNLWNEHGHLWAEDLREWAKNYEGQFELRDPDFNLTPRNDFSGRARFSKNGMAAIRQIIANAREKHDAAYNTWEQRFKDKNLKANEEDIANGYARFLTQLTNEAASNQATADNSYARTVAPPPVLILPGETTDGAFQRYLNSIRNPQVRHRVELFGRELQRLMNLHSEDQAPDFIIIEMARDLMMNQKQKDAKEAKDRERRDERDKAAQILRDMGYAPTADNIKKFLLAQEVGWRCPFTLQAFCQSDFSRLTITQLAQAENKPRFLKEASSVFRRLEVEHLVPRTPVVCNEWYNLTVTLHSTNAQKGKRTPFQWLSIDKDGVPPDLDWDCACKNAADRFGANSLKYQIFTSPNAAEIIADNAKRSIQQTAYIARCLREACLIHFGKEWLDWTDGAGRDPRLLPDNRASKSYLTTSGATTARLRGAWHLNEILWPKPQRLNDAEWDKLTDEEKTILKAKYKEERAVRALKNRQDHRHHALDAMVISCAVPWQTFKVRLGNQQPEDGLCELDAETGEITKIWNPVFNDYGYGIMRAVESRMDLLLKFSTDRQTDLLRHHKSSQRNAQAFDTTPYGRREKFGGDELGQPLFVARKRILDLKTSHLNPRNTGGFIFSPLIRDHIAKEWESFSGNEKNWIRIESDWIAIFEAQIATLRASGKDDQKTRLGIKARESRIYKLRQMEGCKDWEELLSFIAKELGAQQPQPKFPSQFIETLCHPIYKTPITSVKVTAQSKNDESFSLVRRPTSEKARSGTYVMRKQEDKYREMRVYRLPKPGRSGAYACWLLLPWYGMLDARGKRFKTVEKDLMTRACKGAKFVRAFRRDDIVCFANNLLANKGIKQNESWRIVRTDAKGDCLANVGLLPANLARETSHPITGEKVKLEPVVVALNDFMNALEPRLPTDELSHSPPVKPKSPGAAET

SEQ ID NO: 270 - protein, 1260 aa, unidentified
  REGION 1..1260: note = Description of Unknown: uncultivated organism
  REGION 1..1260: note = MG1-275 effector
VLISAQWKTISTNLSIMDYIIKPAPGSTSSPYDWANDPFYKSAIVLGIDIGIEGIGVWLRKGRNHVFARTFLFNTPEAAPLKGRRLLRGGRRCRQSEQHREVLLKQFCAEFGLPWTEIKDQENEDGPFKLRLRAVRSKLGSKEALVVCLRHIIRHRGYDYHETDGGSFPWGDELKADVATGWAKAAYCSPEDAAEFLHDVSDCGWNDKQLASFRHALTAAVERHKQGIEAALEKHFAQDKNNLRIPARKHNFPRSLIWKHMEKICANHRDFLGGEAGLSAALLKLKPILNYHRKKPGALAERKVNRCPVAIHLFGGTAPKCDPNSNPHIRRFKLLEFLATRSFVAKDGTRLLANADLMKWLLDEVLAEDIRAVVVNKVKGGQKQERRKFGGFRDEFIARFDPNGKIELAGDRVSHNKDFFEQLGDLLRPKLSVLNARASICGKSAEELFKRATKDGYQAEIISRNLKEKQFDGQSFYTLRQAAAAGFGIYPQVEFLLGRRGKKGNQAVPGVLRQMLELPEVSAKLDGQKIPDYVIIETVGDMPRNVVQAKEIQDEQKRRREFKEGLFEKFGVHDKQQDSEARKRVLLYDQQGGNRGEAICPYTGEPLGDPLSPKLQIDHIFPESLGGISEMVNLVLTHETTNNQRKGNQTPYQAFGGQQNTAEWQALVARVQKMGWNKQKRELVLREESSCPEWDNMTRIAQLARQLREEAARWLGVFGDDAKVRQKIGTPTGYQTSVCREAWSENVPKKDRTNLRHHLWDAAVISHIPPDRGMQLSHCGGIFFHAGEKKNGNILMRALPGLGPDLNSFENATKDQCLVEKKKTNRSKKSRFQQWIYGFPDKNGQMWARDSLKSLADKANLLELLRDAGIGENQLPTSHFEEWQEKRKAQFFTREEAWAAVEALALPPEQKIPEPIFEEWWSYRFSGDKRKVDEKLLRILIAKAGVKESVSKERLASVLTNRGDPGPLTRKDGTPINGVSGTAKQMTPMAIIPHRNHKREIIGFKLATESFVRAEIWVTEKPTKDGNAELNYHCRLIPHPRGLANLRQRVMQCTGKQLTWERRLTDEELRELGLLKELAALKREQEKISATHAKAVQKWQKEQQAKTNTLDLASSPSVQPIELKLPWLSLRKCYAGLPLYARRLTNKHGADISRIAKDDLLRVPLNSEGDICKREESAYQTLWYRVSAINKSGKIEMKMAERKQIKPPSERELRDGKRKPLTTDELWRVYAYTKEPSSTDVLAYLLEITRGNDQPPHPVK

SEQ ID NO: 271 - protein, 780 aa, unidentified
  REGION 1..780: note = Description of Unknown: uncultivated organism with predicted taxonomy: Verrucomicrobia bacterium IMCC26134
  REGION 1..780: note = MG1-276 effector
LFGPPARAYASFFVEERKRHGLREGSASDWQGVLSQKIPRFDNRIIGKCVLIPRLNVCKIRTGPDGGLLPQSRVAAEVVFLMKLKNMRLHRDGGARGLTAAEIGKILGDPKRSKLGLTPTQWKKWCVRFGGLPLPGQYEEVEEPRFSGRSRFCRPALEILRRLILSGDAPPLAHEKEVARLNGNTDPLKGLVPDDLRFLKQMGSTWEGIYVPNQKLDALARLTDDPQEAIRRLIGSQNDPIVRHRLALFAKRLDYLAVTKKFGPPDYVVLEFVREDFMGQKAKLEYLKFQRERARARAEAREEAAKAGATENSAGLKMELHKAQGGICLYTGDGLAVTSLDDYDIDHIVPESQGGPDALLNKVLTTRLANREKANRTPYEWLASSDRWDAYVERGKKRLTTLRNKKVQLLTSPEATALVEKYTALAETAWISKLAQTIVGLRFGWPGGIVDGKRKVIVVSGGLTGRIRRKYKLNRLLNPNASSEEEAETKNRDDDRHHALDAMVISFIPNWTRNAKLAGFFRFPEGVHGEFFANEIADVVPKNVALEKAAFEETCYGRRTLQGEQFAVGREDLSGLAVRLVGAKRVLKKRADIETHRIVDARIRSDVEAFLDANVGLTLEAWGAWCSTYKQGGNGPRVAKVMVTKSKADSLEEYKDVSKDGTGQLRRGAKHRGYFVYEHLAATKKDPDRKQLEVRPVYVHESKKAVAAGITGRIYAYFESGCLVRLAKPWVFQGKPYPPGQYICTSIWANRNAKLRHPEYGDIGPVGLRLLLDAGFERVE

SEQ ID NO: 272 - protein, 1068 aa, unidentified
  REGION 1..1068: note = Description of Unknown: uncultivated organism
  REGION 1..1068: note = MG1-277 effector
MKDYVLKNKPEPASNDKFLTGLVFGFDVGTGSIGYAVRRGADFKDVGVLICDSEGSDLSKRRDLRRQRRTLRSKKFRRQWFAKELAKLGLPKSQTALDDPISLRLRALNGEALKPEELHAALTHLFKRRGYSAVPWAKETKETVKPKTEDDDGEILKQAHGLKAEMDKRGCKHPCQYLAQRRKEVGESPTDYWGRKLYWLRELLEAEFRAITEAQQKYFPQLAEKSDWLLYGDSQPKKTKDEETFHVFFKATEARSPGVLGLRWPRFDNRGPALDSLQPVDEQGRTQHVVRKNKEAFTKAQWELALMNFRVIDRASGKLVAPDRKSLVRLREIWESGKRKKKKESASDTEESETIKISEPVLKRWAKDFVGQYKLVDGQQPLTPQTGAGRARYSSPTLERIIAGEQFNPPQPLLRRKNESPEQALNRYMTDIKHPLVRHRLILFQRLLKKLVSQFGEPDTIVMEAVRSLALGKTKKRELIQRIHNNREERDGIRKELSKDGFSSSKNSILRYRLFKEAKGRCPFCLCPFCLQAVLFKEAEIEHIVPRSRVDCNEFYNLTVAHADCNKKKDNRTPWEAFGQTPDWEALRRNAEECFGLGSMKYKLFTNPDAQDLVEEKSDLQHTAYIARVIRQTSLIQLGWLGEDGRDPTGLKDPQKTAWKFQVTNGHLTSRLRKAWGLNQILHPFPSKDEWGAMTPDEQENKKSELQEKNRGDLRHHALDAIVIACTMPWLAHRTVRVKDPETGEDGWWDLDERTQRSVARNPICPNEGQMYGLAKEEIEKVVVRHHVAKGNKRQFFDTTRYGKRGKDLFIARKVLAKMNPKQLAKIYPESQSLYLTEAWNRFTAENPNVDLLLKEENRGKEQGAKVALPGKFISRLCFSEYQRWVESQKTSAPLGFRWPERVKIPFKSVSVIADDGDSAMFETKLGSKTYVSQTEFKEVRVFLPPNGKKFITQFVRPWVRKGIAEQSSIPEGSKHICTLTKGDILVMKNADLEKKIEAGTRWILKKTFSSGRVSILPSHLSPNREVLISLGFDPINFLRISMNDLMRVLGHELPHPPSVKPQSESSD

SEQ ID NO: 273 - protein, 788 aa, unidentified
  REGION 1..788: note = Description of Unknown: uncultivated organism with predicted taxonomy: Pedosphaera sp. Tous-C6FEB
  REGION 1..788: note = MG1-278 effector
MKSAKPQPMKTIWAFDLGKGSIGEAVRLDDKFPHAESLLIPAELARRGPATVSGTPANRYRALKTREAHHERERWLETVWKSAGLIPLYPREVWENPNTGKWELKRNGDHRLEREFAPKLGEKTKDGAPSDEAGAEVCYTSCLLRINLLQGNKLADWQIFKALRAALQCRGYGPVPWATKEARKQGRTAEEIQLEEEKKLQQADARYRDAVGKWPEFKRSVPAQFHFACYYDASKIGLWDVSNPNIFLHRANHLAASTRNVRFDRVDVRAEMIKLGDQAAAILPELRIAFARWQKDGWKFRHPNGKELTYPVRAKTFGEFLCDGPAGKPDETSFEAFLSQRRDVKVQRGSYEEWMAALGQKTPSFDNRILNICVLIPRFHVCKVDVRLETQKDENKKDKFTGNIVPESLLASEVTFLLKLKNLLVADGQRKLTAGEIQFVFNYAHRQLKELKLVTPGGELIKNWPGKIADCFALSKSEWGGKKSLSKLALRPLPGHEEVKAPKTSGRSAYSRVALRILKELILSGEAPSVFHAKLLRRDADLLRRLGSNSDRPLVLFDDSVAKDEKQRERENNENRKHVVLVSEVHFLCQMRKDNSAADSWENIFIPSQTLDALQQRHTNDGKLDADDAIQELLGTINDPIVRHRLGVFAGRLKKLQHGDGKEETPKCGVPDFIVLEFAREDFMGEEAVKKYQRFLNDRADERKKAREEAEKLGLESRSSGLRYELFKAQGGICLYTGKSLGETSLDDYEIDHIVPRSLGVPDAALNYVLTFHDVNHAKEKGKLTPYA

SEQ ID NO: 274 - protein, 1024 aa, unidentified
  REGION 1..1024: note = Description of Unknown: uncultivated organism
  REGION 1..1024: note = MG1-279 effector
MKDYVLKNKPEPASNDKFLTGLVFGFDVGTGSIGYAVRKGADFKDVGVLICDSEGSDLSKRRDLRRQRRTLRSKRFRRQWFAKELVKLGLPKSETALDDPISLRLRALNGEELKPEELHAALTHLFKRRGYSKVPWANEAKIVKETAKSKKDDDEGIIKEAVKEMKAKLGDKHPCQFLAEEKARVGNSPTTNWARKIYWPREVLRAEFLAILKAQQNNFPQLAEKADWLLYGDSQAKEKNGETFHVFFKSTEARNPGVLGLRWPRFDNRGPALDSLQPVDGQGRPLHVVRKNKEAFGNAQWELALMNFRVLDVETRQKRDPRTDFPIFIENVRNEWNKKGKVTEARLKTLAKPFKDKFLLIKDQKPLTPDHGGGRARYSSPTLDLIHKEISEGRRVDPPQPILQRKGENAEQALNRYLADVKHPVVQHRLVLFRRLLMQLVSRYGQPDMIVLEAVRSLALGQKAKNELNQRNEKFRKERENAREQLSSNKESFSRKAIQRYRLWQEAKGRCPFCLQMIERTELGHGADIEHLVPRSIVDCNEFYNLTVAHIKCNRELKGDRTPFAAFSGTSQWPDIKDHAEKTFFGRKLEIFLSPDAEQLIEQKSDLQHTAYIARVIRHISLIQLGWLNDAGRDPTPEKQNPALSFQVTNGQLTSRLRKSWGLNQILHPLPPGKRWDELTDEEQTQFTEKNRGDLRHHSLDAMVIACTLPWLAHRTHGATDQFGHHGWWTQDEKQRSKAANPLFPNEGQMHDVVKKEIEKVIVRHHVSRSNHKRTYDTTIYGKKSSNVYVAREKLTDLKEKDFESVYPKIFGVYIAAAWERFTTETPGLPEMLKATKNKLPEMFARKLCFSHFQNWREKKPVAFDWPDKVRIPIRSVKYIGVHDDKAVAKASSGTHGYVARGGYKEVRIHKTTDGKGWVPVFVPYWKGDRLIHEQPFQAEKPVQTIRLGDLIELKNGYGPNNPPGTYRVVSTMQKQIQLMPPNIADTKEALKASGYLENGINLRWPAFFKAAGYELPHPPSVKP

SEQ ID NO: 275 - protein, 1214 aa, unidentified
  REGION 1..1214: note = Description of Unknown: uncultivated organism
  REGION 1..1214: note = MG1-280 effector
KVLGLSLHKGTRLPNTAWTQNEKAGWIPVSPKFANPVSLRIDALGGKPLTAEQLFTALAHLIKHRGPSEKVPWSKTIAEEQRDLDEKESVSDTIPADQVRAEFEKARKEFTLSNADASGFHPAHYLQQLGEERKLQRKRAWPRDLVETEAAAILEAQANHHQKLKEEIKFVDVSGENRKATVAEWLLHGNSSIKSVREGDAEMSFHVFDRNYPNRERAPFTFQAARIHNRKPGLDLVEPRDEFGRPRYVMSRERPEYGQWQVEVALLNFKVLDLTSLKKDKAKIVPSAEALAELREIITRTGRLSVEDLQTWIKPYKENGIYDLVKEQPALVGEGKGRGRFSRVGLQRATEIIRPLQTEHNAMSKLTPKGQRAKKKLKTPEDKADAYVRQYVNYTPKLRYAWKNPATQITEPEPLPRALRRYILEIRDPVVRHRVELFDRMLDDLLGKYRSDGNPTHIVIECVRELEQDAEAAQDAWERRKKDREENQTARATLKDMGVKAPTDKDVRKFRLLQECKWRCPYTLERFMQTEFDDLVIQRIVPPAGDPRRSAYLEAARSAMQGTQVEHMVPQAAIVCDEWFNVTVTRPTTNTTKGDRTPYDFVLRDGDKDRRKQLLENAEQCFGKDSLKFKIFSSDNARSLIQERDKLQRTAYIARCLRYVCLLKFGWLSPEDRDPGHEKANDATRSYLVTNGGTTRRLRQAWNLDELLRETVSPEKWAGMTDVEKERALAQGARIPTEEWKKLDKAKQDDVLRARRTKNRQDVRHHALDAMVVACTLPWAANLTVWASGWCNLDTDDGSVSSVRCPIFGENDFGEGIYAAIEAKLSELKTALPEATSNAITHYRSHERHKQVFDSGLYGKRTTYGGKPLEKDEPVFFVIAKQLSRLTPAVLSYPAKGGGDSIFSPKLREHIASAWKTYTADNANWQHLLTRSEEDLQRELQDAENSKDNQYKFKTIKALKDRLRRVSQWRVAIPNETLWAELQEYLQQEKARRLKKPEARNNVFPDHFIEGLRHPNYNTPIHSVKVIALTKDEDAYVELRTGSKTFWKYKGGYEAMRVYGSPPKTRTGKGKFICWLVRRFYKRKKKENGQLQTVKEAHAAAMPAVCQGQKLLATFHNGQVVRFKQLAKDMDISHNWIICETNADTRNPRNSKIVVMPAHLAKIVADPENPKRTISLKETEGVPLFLNEFMWALGYETPTKDNELPHPTSVKPQS

SEQ ID NO: 276 - protein, 837 aa, unidentified
  REGION 1..837: note = Description of Unknown: uncultivated organism with predicted taxonomy: Thermoflexibacter ruber
  REGION 1..837: note = MG1-281 effector
ESPTDYWGRKLYWLRELLEAEFRAITEAQQKYFPQLAEKSDWLLYGDSQPKKTKDEETFHVFFKATEARSPGVLGLRWPRFDNPGPALDSLQPVDEQGRTQHVVRKNKEAFTKAQWELALMNFRVIDRASGKLVAPDRKSLVRLREIWESGKRKKKKESASDTEESETIKISEPVLKRWAKDFVGQYKLVDGQQPLTPQTGAGRARYSSPTLERIIAGEQFNPPQPLLRRKNESPEQALNRYMTDIKHPLVRHRLILFQRLLKKLVSQFGEPDTIVMEAVRSLALGKTKKRELIQRIHNNREERDGIRKELSKDGFSSSKNSILRYRLFKEAKGRCPFCLCPFCLQAVLFKEAEIEHIVPRSRVDCNEFYNLTVAHADCNKKKDNRTPWEAFGQTPDWEALRRNAEECFGLGSMKYKLFTNPDAQDLVEEKSDLQHTAYIARVIRQTSLIQLGWLGEDGRDPTGLKDPQKTAWKFQVTNGHLTSRLRKAWGLNQILHPFPSKDEWGAMTPDEQENKKSELQEKNRGDLRHHALDAIVIACTMPWLAHRTVRVKDPETGEDGWWDLDERTQRSVARNPICPNEGQMYGLAKEEIEKVVVRHHVAKGNKRQFFDTTRYGKRGKDLFIARKVLAKMNPKQLAKIYPESQSLYLTEAWNRFTAENPNVDLLLKEENRGKEQGAKVALPGKFISRLCFSEYQRWVESQKTSAPLGFRWPERVKIPFKSVSVIADDGDSAMFETKLGSKTYVSQTEFKEVRVFLPPNGKKFITQFVRPWVRKGIAEQSSIPEGSKHICTLTKGDILVMKNADLEKKIEAGTRWILKKTFSSGRVSILPSHLSP

SEQ ID NO: 277 - protein, 947 aa, unidentified
  REGION 1..947: note = Description of Unknown: uncultivated organism
  REGION 1..947: note = MG1-282 effector
MKDYVLKNKPEPASNDKFLTGLVFGFDVGTGSIGYAVRRGADFKDVGVLICDSEGSDLSKRRDLRRQRRTLRSKKFRRQWFAKELAKLGLPKSQTALDDPISLRLRALNGEALKPEELHAALTHLFKRRGYSAVPWAKETKETVKPKTEDDDGEILKQAHGLKAEMDKRGCKHPCQYLAQRRKEVGESPTDYWGRKLYWLRELLEAEFRAITEAQQKYFPQLAEKSDWLLYGDSQPKKTKDEETFHVFFKATEARSPGVLGLRWPRFDNRGPALDSLQPVDEQGRTQHVVRKNKEAFTKAQWELALMNFRVIDRASGKLVAPDRKSLVRLREIWESGKRKKKKESASDTEESETIKISEPVLKRWAKDFVGQYKLVDGQQPLTPQTGAGRARYSSPTLERIIAGEQFNPPQPLLRRKNESPEQALNRYMTDIKHPLVRHRLILFQRLLKKLVSQFGEPDTIVMEAVRSLALGKTKKRELIQRIHNNREERDGIRKELSKDGFSSSKNSILRYRLFKEAKGRCPFCLCPFCLQAVLFKEAEIEHIVPRSRVDCNEFYNLTVAHADCNKKKDNRTPWEAFGQTPDWEALRRNAEECFGLGSMKYKLFTNPDAQDLVEEKSDLQHTAYIARVIRQTSLIQLGWLGEDGRDPTGLKDPQKTAWKFQVTNGHLTSRLRKAWGLNQILHPFPSKDEWGAMTPDEQENKKSELQEKNRGDLRHHALDAIVIACTMPWLAHRTVRVKDPETGEDGWWDLDERTQRSVARNPICPNEGQMYGLAKEEIEKVVVRHHVAKGNKRQFFDTTRYGKRGKDLFIARKVLAKMNPKQLAKIYPESQSLYLTEAWNRFTAENPNVDLLLKEENRGKEQGAKVALPGKFISRLCFSEYQRWVESQKTSAPLGFRWPERVKIPFKSVSVIADDGDSAMFETKLGSKTYVSQTEFKEVRVFLPPN

SEQ ID NO: 278 - protein, 1319 aa, unidentified
  REGION 1..1319: note = Description of Unknown: uncultivated organism with predicted taxonomy: Verrucomicrobia bacterium IMCC26134
  REGION 1..1319: note = MG1-283 effector
MDKTNYVLKNKPEPAANETVWAFDLGKGSIGEAVRRGNEFLHKASLLIPAELARRGPAKVSGTPANRHRALKTREAHYERERWLETVWRTAKVTSLLTPLRPREVWENPETHKWELKHPADYQLEREFAPAEFRRNSKTGEKEKIVYPNGHAENDGAPASTSEDFNLCYTSCLLRIKLLNGDSDLKAWQIYKALRAAIQCRGYGKVPWAAKEARKQGKTAEELELEEEKKLLQADPRYREAVGRWPDFKRSIQKLKLPLFDGMQPRKADNFYFVPPCYYDASKMGLWNPSAPDKLLSHSNLANSTRNVRFDRFDVRNELIMLGDQAAALLPEIRDAFARWQREGWKIKHPVTGKELTYPVHAKTFGEFFCDGPAGKPDETSFEAFLNQREKAGLHRGSFEEWMAALGQKTPSFDNRILNDCTLIPRFHVCKVDLKLETAKHGEITGKILSESLLASEVTLLLKLKNLLISDPVNGQRKLTVEEVRDVFAYAQRQLKALNLIAADGDLIKGWPEKVADRFALNNSDWEKIAAEAEFFRKMSAFNLSQGGENRRLTEVEIYSLLRAAADSKRKLEHELPDNLKTLFKAAKAEWKKAKVVADTTMLRPLTNHEIVKAPKTSGRSGYSRVALRIIKELILSGQAPSVFHARLLRRESKLLGKLGASPAKPLCLFADSTATSEEQRKKEDTENRKRGLLESELNFLLQMRKDDATEDSWKDISPPSQTIDALQQRHTKGNKLDADAAISELLGSINDPIVRHRLEVFDKRLKKFELGDVKESIPAFGVPDAIVLEFVREDFMGEKAKRELKDFQDKREAARKKAREKATAAGSEEKSAALKFELCEAQGFICLYCGQPFATTKLNECRIEHIVPTAQGGPDAMVNYVAAHDECNEAKGKQTPFQWWHHNTSGKAPTISWDGYKALVDKYATTLRNKKVQLLTREDAVELVGRYTALAETAWVSKLAQTIANLRFNWTNGYDQNRKKRVIVISGGVTARVRRKYGLDKLLYNKDTDAEVFAKKLKNRADKRHHALDAMVLTFVPQWARDPGKEGFFRFPAEFRDANGREDYEQIRKLFGDSIAKVMPRYLTYERPVLRDRAYGQRDNKTMMVQRTPLRELAYKPVQQKLVYDLTYAVDQIKDVRDERIKQELQKFIAASPEEPAWNVFCDRLGKGELESLPGIKVSKVSQNLNGDLSEYKDMSKDGCGAFRRRKERHRGQFVYLDEKGKPRVEVVRVFDSIAKVKTELGAKGQGIKIIGFFQSDCLVKIGKPVAHGTITLAPGTYQLNKIVKEGQGRVQVTSAGGEKSPAISLSKFLEAGFERVD

SEQ ID NO: 279 - protein, 1053 aa, unidentified
  REGION 1..1053: note = Description of Unknown: uncultivated organism
  REGION 1..1053: note = MG1-284 effector
MKFNISTNTDPFLTGLVFGFDVGTGSIGYAVRRGSTFLPDGVGVLICDSEGSKLDERRNFRRQRRTLRSKKFRRQWFAKELVKLGLPKPTKEQLKRANNETNEQFDQRTNPVSLRVRALNEPLEKWQLFIALTHLFKRRGYEKDVPWANKEKDTKANKENDAEEWGSGTVPPEKVQSEFDASGCKYPCEFLARNPKHQRRRVWPRVLLENEFHAIAKAQTENKNFPQLTEKTNWLLYGETKEVKGHHVYFKTTEAQNPGVLGLRWPRFDNRGPALDSLQPLDEQGRPLHVVRKNKETFRKAQWELALINFRVIDRATGNLVRPDDKSLTRLREIWESGKRKKKKESGSNAAESEIIKISEPVLKRWAKDFAGQYKLVDGQQPLTPQTGAGRARYSSPTLERIIAGEQFNPPQPLLRRKNESAEQALNRYMADIKHPLVRHRLTLFQKLLQQLVSRFGEPDMIVLEAIRSLAMGEKKRREHIQRIKENRDERESIRTELKKDNFSSSKNSILRYRLFKEAKGRCPFCLCPFCLQEVVYKEAEIEHIVPRSRVDCNEFYNLTVAHQECNKKKDSRTPWEAYGTTKDWEALRKNAEDCFGLGSLKYRLFTNPDAQNLVEEKSDLQHTAYIARVIRQVSLIQLGWLAEDGRDATGLKDPEMTAWRFQVTNGSLTSRLRKSWGLNQILNPFPSKDAWEAMTPEEQEKKKTEMQEKNRGDLRHHSLDAMVIACTLPWLAHRTHGAKDSFGRPGWWWLDEKKRSQASTPIFPKEGQMHEVVKKEIEKVLVRHHVSRSNHQQSYATTLYAKKAENKYVAREVFTSLTPKNLGNIWPDKFALYCEAAWRRYSDESANLEGELKKTKGNVPASFTNKLCFAHFQKWRADDCPEFYWPKEIKIPIRSVRLISVKDDTAVVPFSPGTHAYVKRTGFKEVQVFLAEDEKSFVPAFIPHWKSDKPICEKPIKADRKPIAVIRRGELVKLLKPTGPKNPPGAYRVSTTMQDNIQLIPAHIAKDKDALLASGFLANGVTISWKSFFAAVGYELPHPPSVKSQPPGAAEA

SEQ ID NO: 280 - protein, 1065 aa, unidentified
  REGION 1..1065: note = Description of Unknown: uncultivated organism with predicted taxonomy: Verrucomicrobia
  REGION 1..1065: note = MG1-285 effector
MITYELKKVALQNQTDEIVWAFDLGKGSIGEAVRRGNEFLHKASLLIPAEFAETRTARDRRRMFRTREAHKAREKWLCKVMHEAGIEILHGRNYDAAGNWKLGEPAEKRLEQEFPAPGDDTCYTSCLLRIKLLRGEKLEPWQVFKAFHSAIQRRGYDKDIPWKTRESRNPKAKDGDDDDAGTEKRMHDFELALEKMAPGKTAFHFPAYFDAHEMGLWSPDKPDGLKLRSDCHAKTTRNQIVPRKLVEAEIRQMVEGAAKHYPALADKADYLLYGIAQQSYASYKPELRQKFKLREGGATDWQGVVGQKIPRFENRIIAKCALIPRLNVCKLREGEKGQPHEKSLVAVEVAFLMKLKNLRVQRPGGNGWLSAEEIRGILEDPKRKDWKITESVWRKYCVRIGAGWLLGHEEVKSPRFSGRSRFCRPALEVLKRLILSGQKPSKFLQEEIVRLNGNKDPLKGLVEADLKFIGDMAAKNDAWEGIYIPNQQLDALVELSSDSAEAITTLIGRQNDPIVRHRLSVFYKGLRELEQTTKSRPDQVVLEFVREDFMGKKAKIEYFSFIKRRAEERIKAREEAANAGATEKSAGLKLELLRAQDGCCLYTNEGLVPSRLDEYQIDHIVPRSKGGPDAVVNYALTTQKANEAKADRTPYDWFHQEMPDKWDAYVNRVRSRATHLRNKKVQLLVALNAAELADKYTALAETAWIAKLAQAIVGLHFGWRNGVDESGNKRVTVISGGLTGRIRRKYALNQILNPNAKTEEEAEKKNRDDDRHHALDAMVISFIPSWVRDAMKEKFFRFPEPIHQNAKGFFEKEIQSVKPRNIALQKAAFEETIYGQRTIDGHKFIVGRESLASLAIKTTQNSQTIKKVSDIEFGRIVDARIQKDVKEFWESNPAATLESWKKWCADYRLGANGPLVNFVLVKKSKEDAVEEYKNVSKAGVSSERGQYKRGAKHRGYYIYERPAPTRKEPNKMQVEVCPVFVFQSKKAVQENLLKQTGIKMHGYFESGCQVRTQREWEFQGKKYPADEFILGSVWANRNAKFRHPIHQEIGPVGLRILLDAGFERI

SEQ ID NO: 281 - protein, 1294 aa, unidentified; identical to SEQ ID NO: 16
  REGION 1..1294: note = Description of Unknown: uncultivated organism with predicted taxonomy: Verrucomicrobia
  REGION 1..1294: note = MG1-287 effector

SEQ ID NO: 282 - protein, 1294 aa, unidentified; identical to SEQ ID NO: 16
  REGION 1..1294: note = Description of Unknown: uncultivated organism
  REGION 1..1294: note = MG1-288 effector

SEQ ID NO: 283 - protein, 808 aa, unidentified
  REGION 1..808: note = Description of Unknown: uncultivated organism with predicted taxonomy: Pedosphaera sp. Tous-C6FEB
  REGION 1..808: note = MG1-289 effector
VGNTQEHVWAFDLGKGSIGEAVRQGNDFKHKESLLIPHELARRGPAAVSGTPANKYRAKKTREAHLERERWLDTIWKVAGLTPLQARAVWENPETQKWELKHKGDYRLEREFAPKQFKKGAGGELVPIKYPNGKATDGAPAEKKADFETCYTSALLRIRLLQGDPSLKDWQIFKALRAALQSRGYGPVPWATKEARKQGRTPEELAREEEKKLQSADPRYREAVNKWQAFKDSVPKAFHFPCYFDAWKLGLWLHAKPDELGCRINHLAESTRNIRFDRADVRVELIRLGDQAAEILPALKKAFSDWQSGGWKYQHPVTGEKLTYPLRAKTFGEFLCDGPAGTPDESSFEAFLDQRHKAGLNRGSFEEWMAALGQKTPSFDNRILNNCVLIPRFHVCKMDVRLVMDEQGKLTGQIVTESLLATEVTLLLKLKNILVADPSAKDGQRKLTVGEVQDILAYAHRRLAELELVAADGTLLNLWPSKVAQRFSISKSSWRDVAVEAEFLRRMTASNIVVGSETRRLTIAEASSLLRAIANPKKGLEAQLPKDLQLLTKTAKSEFKKAKTASDEKTLRPMPGHEEVKAPKSSGRCGYSRVALRILKELILSGQAPSAFHSRLRELDTELLRKLGSSPEKPLVLIDDSKSQDQEQRKKENIENGKRGLLVSELNFLRQMRKERATEDSWENLFIPSQTIDALQQRHTQDGKLDSQSAIRELLGTINDPIVRHRLGVLAERLRKLQCGDEKRDSPGFGVPDAIVLEFVREDFMGEEAKREYQNFINEREKDRKAAREEAGKLGFDSRSSGLRYELW

SEQ ID NO: 284 - protein, 1048 aa, unidentified
  REGION 1..1048: note = Description of Unknown: uncultivated organism with predicted taxonomy: Deltaproteobacteria bacterium RIFOXYA12_FULL_61_11
  REGION 1..1048: note = MG1-290 effector
MTETSVLNERFHHGLVIGLDVGTAGLGWAVRRGPDLLDLGVLVVPEKVGNLEERRTLRRMRRTIRSRRQRMQQLRAMLTEVGLPSPGANAELDSPAVLRLQALNGEPLRPEELHAALFHLWKHRGWLDAWWKKKTVERTADDEPELTAEQKTAQKEAKETAARIAGLLAAMKDRGCRFACHYLALKEGRWDRTMGCLPRPKPGQAIAPEGHKNLIFPRELLREEFLAIVEAQRERWPTLYVARERILYGAWGEDSHHPAPEAAGRQHRLHGGVWHQRQARFDNRKPGKCVACGVNNVCRADAPEFAEAQRAIVLGNYRVFSAVQGKAVPVGQAALPELADILAKHQAGLKELRALAKTGGYTPLEPGIKKKDQARDLLVQQWADRNGYELLPGQQLTARKLSDGRCAFCRPCLRAVRYEYERTGTIRTFQPLLRRPGESLASARARYVRELRNPLVRQRVEALDRLLDRLERDHGSPAVIVVEAVRSLGLGKKANDDLKKKQATQREEREAARQEAAEHHAAGSQAVLRFRLAKEVGKVCPYCHQPFHADLADAEIEHILPRALGGSDQQVNLTVAHTHCNHEKHDQLPHAAWGEADRWPCLERFAREHFKGLKLQLFLHQGNPEEALALLAPPADLTQTAYIARALRGLCLLRQNWLTPEGRDPSDQPGGPGQFFQLTNGYLTAGIRRCWGLDELLPSALDDEGGKNRHDLRHHALDAAVIACTLPWAAHQPLSRGGWREAPPFGSARREQWRTPFDHLRSQIRARVPDIVPTQKVGTSAKQKMMNTTAYGPRPQRDRKGKETTVLVTRVPLVQLKEKQLNDIYPQVLMRYIAAALSEFRRTHGDEHAFQQKAPNTGKLSPAFVATLHNPGTGRPIHKVHVLGKDPAACREVRPNVFVEYTDATAYLVYPDPKKGRTWAVYLVKPWEKLGQLRASFPTPVYVFQKKQLIEFPREVVVSATNKAQAGKYRFMSCNKNGNVRLCPAHIVQGKEGFLSAGLPYYGFELHIRHLMEALGYGASPPPPAEAGVAAHPRPEPPHPQRRRGRRA

SEQ ID NO: 285 - protein, 932 aa, unidentified
  REGION 1..932: note = Description of Unknown: uncultivated organism with predicted taxonomy: Candidatus Termititenax aidoneus
  REGION 1..932: note = MG1-291 effector
ERLLREFPKDGDNTIYTSCLLRIALLQGKKLDGWQIYKAVWSAIQHRGYDKNLPWITRIKRNIEEENEDDSGAKNESTMDEKENIEGVGNYYKYLKDNFGDNKEFWYPCYYEAHKIGIWSPANLNDLSVKIGTNPNSARNKGKDKNYAVIPRELIKKELEELLKKAAEQFHKIKGKEKYIIYGLAEKEYASYIDKTFYKYRGKNWEWQGLLGQKVPRFDNRIISKCALIPRLNVCKAGDQLNKEVTFLMKLKNTKYVSHAGEELSFTSEQINKLFEKYKEKAYITKTQLEKWIKTELNGYSHPVHIKIDKSKTSGRSRFCRPALLIIKEIILSGKSPHDIYKEKITNNIITDSNKGLINGDYYFLLNMPKEWEKFWIPDKRENFSKISENKRIEEIETTIGEINNPIVRHRLNIFCDRLKKLKQKFSEPKKIVIEFIREDFMGDKKRREYIKIMNQRRKAKDEAFNEIKDLVKGKQSLIKQLLLKEQGCKDIYSYETLIPSQLNDYEIDHIVPRSKGGSDAMYNKVLTKASNNQEKGNRIPFEWLSADKEKWNMFYKNVESFRLNWKKKELLLAKDPTLLIEKYTTLAETAYITKLTQKIAHLFFGWDWQTKGSHRKIIVQSGGYTSKIRKIFKLNALLYPEKTGDEIREIVETGKNRDNKRHHALDALVLSITPEIKYDEKKDADVYPVWFNPEYCKNALDKVNPTYIDFEKPVLAETIYGKRTVNENGEKKEYFISKMKTGLEKEWYLDVINAKKYSKDIFDSRINKDFTREIEKNPTQEEWEKFVNIYFKNNRPKKLSLIQSDSPEIFKEINSIKGQYFTDKREHQGQLVYKNEKKWKVEPVFVYESLYLKRKEYEKKYGKVYFFNSLCQVKTNKDISFGRSNQLLSKGFYILRTITEGGQVKLESNNGLEFVIALSILMEEAQMERVD

SEQ ID NO: 286 - protein, 983 aa, unidentified
  REGION 1..983: note = Description of Unknown: uncultivated organism with predicted taxonomy: Candidatus Termititenax aidoneus
  REGION 1..983: note = MG1-292 effector
ERLLREFPKDGDNTIYTSCLLRIALLQGKKLDGWQIYKAVWSAIQHRGYDEKNHWKNDDDSAENKKNVNEYIKYCKDNKFEEKYWLPCYVDAHRMGIWSPEDSNNLYRKRNNETNPAPARNKNHSKYHLVFPRSKVEEELKHLLSQAAKLFPKLAGKENYIVYGPGEVQYASMKKMEFSKYRGKEWDWQGLLGQKIPRFDNRMLNKCCCMSHFNVCRADDMLNQEVMFLMMLKNMRYHSKNKPDEMLTAEQIKELFNKFKDRLKFEKNEKDKVKNRKKEVIPKSLLRKWVIEKLNGEIHPAHSLIPMPNAGGRSRYCRPALEVIREVILSGKTPKQVYEECVAKNKIENPEQNSKKGRIQSDFDFLIKKGTSEKWENFYISDNRYELREMSADERKIEIEKTLNEINNPIVSHRLKWFKKELNKLAFGEPEKKNPGYGIPEKVVLEFARDEFMGKQAKEDYYKFIKEQTKERKIVVEELEKAGFSKPSGEMIRKMMLFRQQDGIDFYSMQNIKLSHLGEYEIDHVIPRSRGGSDAFYNIILTTNKNNSAKGDKTPYEWLGKGDIWDNISEKLKVNKKMGSKKKLLFMASSEEQYKLLIDKYTQLSQTAYISKLAQKVTALTFGWGMQTKDDNRNIVIATGGQTARIRSRFKLDRLLHSGMTDEEFEKALRNGEIEKKNRSNPRHHALDALVLSAVPEIRVDKNRKGKYDDIYPSWLTRDFCEKEVAHVYPKQIKFSKAQLAEVLYGKREVKKEDGLWYTYAITRQNEGTRIEDYYVKKSEKKSDIEDMEKLRNKILKKVNHIFSNDIRTDFKKKLEEKPTEEQWNDFIKNYKVNGTCPHRISVIGNPGVKGFKEKQPLPPNYKEIRPNSKQYYETKTGQKWSYTAQLICLNEKDEWEVHPVYAWDSLYERIKKAEQEFKKVVKFHSRQSVEIKNDCANGKIKKGIYILATIQNGNWGVLESQGEKIDASLNELMNIGEMWPII

SEQ ID NO: 287 - protein, 983 aa, unidentified; identical to SEQ ID NO: 286
  REGION 1..983: note = Description of Unknown: uncultivated organism with predicted taxonomy: Elusimicrobia bacterium HGW-Elusimicrobia-1
  REGION 1..983: note = MG1-293 effector

SEQ ID NO: 288 - protein, 1033 aa, unidentified
  REGION 1..1033: note = Description of Unknown: uncultivated organism with predicted taxonomy: Endomicrobium proavitum
  REGION 1..1033: note = MG1-294 effector
MADEKLIYSFDLGSGSLGICVREGSNIKYLDSLLIDSEYASIKEVANRRRQIRTRLAHKARESWWIQQAQSAGIEVLSTKQPNKNNPNDKADVKMLKQFDKNDNQTIYSSLLLRIALLQGKKLEGWQIFKAVWSAMQRRGYEKVPWANDSDAEKNSKAVTEYEKKLENLFGDKKEYYYPCYYEAYIQGIWSPSEPSNFSKKLSNNPEPIRNKDKENMIVPNRELVYKELKDLLTQAAKQYPKLKGKEDFIIYGPSEEKNASYNNPKYKKYRGTNWDWQGLLGQKIPRFDNRIISKCKLIPRLNVCKANKKLNKEVTFLLMLKNMRFTKDGVTSCSLNHEQIRKLFETYKDNFSTKESRTNKALINSKKWKNYLEEIGAEANPNQKDIPQPKLCGRSKFCRPALNILHSLILSGKNPHDYYKELISVNNNTNPQKGLIKDDYKFLLNMPNDWNSISIQDTREEDKNLNEEERLYKIDRIISATQNRIARHRLLVLFEYLQKLKKQYGEPEKIVFEIAREDFAGEEKRKEYIDTQNKNTKNIELAVKLLKEANKQLNNRNILKARLLIEQNNVDLYEIDEHRKISITNIDDYEIDHIIPRSRGGSDSFSNFVITSINNNQTKLNRTPYEWFHQDKSFDAWNTYIKNIEGIKGLSKHKIKLLISDKAIELENKKTDLQATSQIEKEAQTIASLLFGWGINTKGDKKKILFFTGGNTADVRKNLNLNRLLHPALSDEEYNELKKKKDFKDKNRKNTKHHALDALVLSVLPEITMDKKSIENKPEFFNIKFCEEQLKKVYPIIIKQTKPKLRETIYSLKCRKENGKNLYYFVSRFEKNISMFKILSDAKKQVEKIFSLQIQKDFNDKLNDKNLTQEKWEKFLDEYTLNGRKIKKVSMIDSKSFKENDVFDINGNIKKIIGEYGQNKINGQWIKAKESHQGQIAFKENNKWKIVPIYVFESKYLKLKQYKEKYNDILFFKTGDLVELTKNYDEVKAGIYKLRTLKSSGTTKLTSLDTYEDIEKTISMFIEKCGMKLYKK

SEQ ID NO: 289 - protein, 1049 aa, unidentified
  REGION 1..1049: note = Description of Unknown: uncultivated organism with predicted taxonomy: Verrucomicrobia bacterium 12-59-8
  REGION 1..1049: note = MG1-295 effector
RLRMSEKSERLVFAFDVGTGSLGLAARRGNTMLEARSLLLDENYGKRDEQRKIIRAFRTRKAHLAREKYLQAVCEEVGIPVLKGRENSKKGDPRLEREFPRQGDSTVYNSALLRIMLLQGKKLEPWQVYKALHSAIQRRGFDKSVPWKNRPSNRKDSEEEDSKTAESASAYRQELIAAVGEDTQYQYPCYFAAYKMGLWDPKTHQLKQRINHHADTVRNYIIPRDLVVKELVDLLKAASRQFPRLEGREMRIIYGPSARAYASYYPDARAEYGLKEGGENDWQGLLGQKIPRFDNRLPAPCALIPRFNVARSNDIAIYEATFLMKLKNIRFYRDHLQNKDFNESSLTVEEIHQLLKEARQRAKEARQNGETEEHIAAAYSLNKTEWKKWLKKNCHAPISTHPCIEAPSSTGRSRYSRPAARLIRELVLSGQSPADFYKEAQDLCGKKGTPYYKLSKDDLVFLRYIKGEWQNIYIPVLPLSGDWSGKSTEMDLIREQIKKLIGAQRNVLVVHRIGLFYEQLERMISLYGVPDEIIMEFIREDFMGEEAKKKLQKFQNENRKAWDQARSQARELNLSGGGNVRKLRMLREQNFICPYTGDTLSENEVDTLEVEHIVPRARGGSDNQYNKVVTRTRTNREKGDHTPYEWLTQKEEFAAFCERVEKMGLSRKKKEILTAKDPFTLDQKWDSLAETAYIARVARDVAALRCGWQPGEAGEKRHIHIINGANTAKVRGLYHLNSLLASDQGGLEPDKFMKKVRENKKHHALDAMVLSFIREWIRNPKTRQYEFPAGIDREYFRKCLENVVPYNCILPKASLQETFYGTRLLEGSAGGKTVVVRTKITELGVTFNKFDQKKALKEAASIIDPFLKESIISALESRDFKLNEWQEWCQNFRHPRTEARVLKVQITAQKPDTKEYVNMAKEGEEDGFRGQYKLGAQHQGYFVYLEKDKKGNDIPKVRPVYAFHSHRKVEKELRAQGCDVIGFFQSQCLVEFKNDYEHGNIVIPAGKYILSTILSDGRFKLEGINDIPCPLKKIQDIRHSFRRVDGPDQ

SEQ ID NO: 290 - protein, 1089 aa, unidentified
  REGION 1..1089: note = Description of Unknown: uncultivated organism
  REGION 1..1089: note = MG1-296 effector
MNKIFSFDLGSGSIGECVREGKNILHLNSLLIDNDFASLAEVRKNRRAFRTRIAHKSREDWWRHCAKIGKLEILSTEQPSVKNPYAKPDKRMLTEFSKEGDNTIYTSCLLRIALLQGQKLESWQIYKAVWSALQHRGYDANVPWAKNIREIQKKKKEELTAKEKELLKDLEEENKASKLYSEKISVLPQEYQFPCYFEAYTLGLWNPNNPNNFIRNINCSTKNIRNKENREQIIIPRSFIQKELRQMLDNARKQYPNLPETDFILYGTPKKEYASYYKPAENKKYEREGILGQKIPRFDNRMISKCCCMPRFNVCKANDELSIEVRFLLALLNMRFTKGNTTTAQLSPEELKQIFEKYKGNLSNIKNDNVLVIKQAEWKKEIENKIGGKVNENQKAIPHPNTTGRTKYCRPALEVLKDLILSGKNPHDFYEEQIAKLNNTDPMKGIVKEDLSFLKLMPNKWEKIYIPDQREENKQLSFEEAQVKIEDIIKNITNAVVKHRLTMFYRRLTALTQQYGMPNKVVLELAREEFLGEDKRAQYIKTQNENRKDKDLAKEELMTVIKSADPSYQTKLLKVRLLREQHYKDVYDLTENCALSIQDIDDYDIDHIVPISCGGADSMVNKVLTKKELNETKKQNQTPYEMYFQNASAETWAKYLEHLKDVYGKNISKHLEKKYELLTSDKAIEIESKRNDLQATMYIEKYAQKITALFFGWGEQTKGDERHIFVCNGGLTAKLRKENGLDRLLWSEEEFYKLMASGKLDEKNRENKKHHALDALVISFADDLRTDPKTGRKLFPEFAQNNPAFFSEAMDKVFPKQLRKKAPPLRETIYALRCRKEKGVDKYYMVSRFNTELKTNFGDLKEASKQIDKIFDYQIKKDLQAKLADKPTKEEWLNFLENYKLLGKTPVYKVAMIASKAFSKEEVFDENGNKRHVIGEYKEMGKMKGQYLMPKEGNKGQIIFKQGKKWKVTPIYPFDSVTVKLKAAKQKYGKALFWSSGDTLILQNDIEGSEIYKEETKELVEYKNKKGKILTREKISSKEKTRPATLPKGKYKLNTLKTEGRIIITNLSSSKKYVTNLNIFIEGKVYKEK

SEQ ID NO: 291 - protein, 969 aa, unidentified
  REGION 1..969: note = Description of Unknown: uncultivated organism with predicted taxonomy: Verrucomicrobia bacterium 12-59-8
  REGION 1..969: note = MG1-297 effector
MSEKSERLVFAFDVGTGSLGLAARRGNTMLEARSLLLDENYGKRDEQRKIIRAFRTRKAHLAREKYLQAVCEEVGIPVLKGRENSKKGDPRLEREFPRQGDSTVYNSALLRIMLLQGKKLEPWQVYKALHSAIQRRGFDKSVPWKNRPSNRKDSEEEDSKTAESASAYRQELIAAVGEDTQYQYPCYFAAYKMGLWDPKTHQLKQRINHHADTVRNYIIPRDLVVKELVDLLKAASRQFPRLEGREMRIIYGPSARAYASYYPDARAEYGLKEGGENDWQGLLGQKIPRFDNRLPAPCALIPRFNVARSNDIAIYEATFLMKLKNIRFYRDHLQNKDFNESSLTVAEIHQLLKEARQRAKEARQNGETEEHIAAAYSLNKTEWKKWLKKNCHAPISTHPCIEAPSTTGRSRYSRPAARLIRELVLSGQSPADFYKEAQDLCGKKGTPYYKLSKDDLVFLRYIKGEWQNIYIPVLPLSGDWSGKSTEMDLIREQIKKLIGAQRNVLVVHRIGLFYEQLERMISLYGVPDEIIMEFIREDFMGEEAKEKPKKFQNENRKAWDQARSQARELNLSGGGNVRKLRMLREQNFICPYTGDTLSENEVDTLEVEHIVPRARGGSDNQYNKVVTRSQTNREKGDHTPYEWLTQKGEFAAFCERVEKMGLSRKKKEILTAKDPFTLDQKWDSLAETAYIARVARDVAALRCGWQPGEAGEKRHIHIINGANTAKVRGLYHLNSLLASDQGGLEPDKFMKKVRENKKHHALDAMVLSFIREWIRNPKTRQYEFPAGIDREYFRKCLENVVPYNCILPKALLAETFYGTRELNGKDGGKTVVIRTKIMELGVTFNKFDQMKALREASSIIDPFLRDAVSTALKSRDFKINEWQEWCRNFRHPRTGARVLKVQITAQKPDTKEYVNMAKEGEEDGFRGQYKLGDQHQGYFIYLEKDKKENDVPKVRPVYAFHSRRKVEEE

SEQ ID NO: 292 - protein, 1045 aa, unidentified
  REGION 1..1045: note = Description of Unknown: uncultivated organism
  REGION 1..1045: note = MG1-298 effector
MTKIFAFDLGSGSIGECVREEGKSPIHLNSLLIDSDFASLDLIRAQRRAFRTRLAHKARESWWIQIAQEAGLPIPAADIKKDKFGHYVFTADEKMLREFPKTNDETVYNSALLRIALIEGKKLEGWQIFKAVWSAFQHRGYETNNWKDEELSEEEKKAEQEEQKASELYKEKLSVLPKEYQLPCYYEAYKMGLLNPQTKQIVTRLKTSTGNARNKDGRGEQIIAPRNIVEKELRLLLKQAKKQYAALPDTEYILYGTNRKAHAGLKDHSARKFESEGLLGQKTPRFDNRIIAKCSLIPRLNVCKSKEPLSREVRFLLALKNFRFIKNGQVSAFDFEEINELFNMYKGRLLDKVHANYIDKRDIKNYLKSKQYEIFSEDVIPMPKDGGRSRFCRPALRILKELILSGKNPHDFYRESTENITNTDTTKGLVKEDYKFLLAMPNDWYKIHIPDFREEDKNLSQEERLAKIDNLLNSITNAVVRHRLIMLMHRIEYLHKIYGVPDYCIMEIGRDEFLSEEEKADLNRANKERQKNNKKAYEELKKYGLEISHDNMEKYKLCESQKWTDIYNVFDDKKKISPEDLPNYDIDHIVPVSSGGADSLANKVVTARHLNQSQKSNKTPYQWLFEDKIKWADFLENIKNAGIDKNSKKYLFLTAKDAVSQAKSLNDLQATRYIEKLAQKLISLYFGWGEQTTGDKRKMFVCTGGLTAKIRSQYGLNRLLHKDLSGEEFKKIVAEGKLDEKNRNNKRHHALDALVISFTRDIKYDNKGKPVLPDYACNPAFFADAIEKVFPVTIRSKKPALRETVYALRARQEGKELKYYMVSRFNTRIDELFKKISDAKDNVKKIFDLSVKKAFEDKLNTNPSQEEWEQFLKDFRVSGNPVYKISMINSKGFKKQDVLNPDGSFKNPIGEYRAMGKVKGQYLMPKEGNKGQIIYNNGRKWVVEQIYPFDSIVKKLKAAKEKYGKVLFWNTGITLCLPNTIKGSLITKDENKKQQSIPTDVKVSKYKLNTIKGTTVIITDLSSGLKYSASLTTLIEEGKAYKERS

SEQ ID NO: 293 - protein, 1097 aa, unidentified
  REGION 1..1097: note = Description of Unknown: uncultivated organism
  REGION 1..1097: note = MG1-299 effector
MNSTETVFAFDCGLASLGEAVRQGQSFPLVESWLIPDKFAETKSAAMRRRMMTTRDAHKERELWLLKTFEDLGIEVLRGKEVSKTPAGWSVTRKADPRLTREFPKPGDDTCYTSCLLRIKLLRGEKLAPWQIYKAIRSAIQKRGYDPDIPWKNREEKQQKKEEESAAVLFDETLLRKTVGDHPDWLYPCFLDAFRMGLWSPANPTQLGTRIDHKAQSTRKTIMLRALVEKELRDLLHQAAQQLPALAGKEEFVLYGPNGKYSSSSVRAGALAQKVPRFDNRIIDKCALIPRLNVCKVRMEGTHPHPASQIIFEITFLQKLKNMRVQGSSGIRGLAPAEIALAAFSQKNSLPSKAWAAFCEERGLYPAPAFKKLAFKDVAPVLPPEVFRSALLEKLASVSVLDSGKRVRNLTDDERSALLALMQKPRDSFSFTSSQWANFCEDLGASPLPGHEEIKPPKAAGRARFCRPAAHILKRLILSGQAPATFHAAEILNLGGSADPRKGLVAADLDFLLNMGDSWDAIRIPDGKLDAIACQYTDADEAIRKLIGSQNNPVVRHRLGVFAQRLRELERRFGVPDQVVLEFVREDFMGDKARMELKKFQNDRAKARAEARERVAELGISEKNSLRYELWKAQGGRCLYTDDPLAETELDNYHVDHIVPRAKGGPDSRLNYVLTLNQTNDDKDDRTPFEWLSCNPARWLAYVNRVESRLKAADGISRKTAQLLTLPNAVELAEKYTALAETAWISRLAQKIADLSFGWKNGIDAAGRKRTVVVSGGLTARIRRKYGLNRILNPGASSEEEAEKKNRSDKRHHALDAMTISFIPQWARDPGKTGFFRFPKAIRDNPLPFFQARIDAVVPRQLCYEKAPLAETIYGLRKTPEGNQVVKRTDLRDLAYQTVNMKTVFNIDSAVKNGIPKILDERIQSALLEFARLKPTEEEWNRFVADFTPFGSRVRRVRLVETALPPDTMGEFKNMSKDGTAMLRKPLKANKGQYVFTEPDGKIKVRPVYSFESPFQVRTLLLAEEPGRVIQGFYQTGCLVSLERDVEAGKHKIPKGVYRLSTIRADAFVGIFNTHGNLLGPVGIQHLLRSGFRRIDG

SEQ ID NO: 294 - protein, 1059 aa, unidentified
  REGION 1..1059: note = Description of Unknown: uncultivated organism
  REGION 1..1059: note = MG1-300 effector
MRPTESVFAFDCGLASLGEAVRQDLAFPHVESWLIPEDFAETKSAAGRRRMLVTRQAHKEREAWLRMTFQDLGIETLNGKEVAKTPQGWQEVKKADERLTREFPKPGDDTCYTSCLLRIKLLRGEKLAPWQIFKAIRSAIQKRGYDPDIPWKNRETEKKEEDKEKPAVTYDAETLQKIIGSNESWLYPCYFEAHQMGLWSPERPDHLEARITHMAGSTRKTVMFRSLVEKEVRALLQAAALQIPALKGKEESILYGPDGKYSSSSVREGVLSQKVPRFDNRIIDKCALIPRMNVCKIRMDGTKPHPASRVIFEVTFLQKLKNMRVQSAAGIRGLTHEEIELATVLQKNSAAPKAWAEFCDSRGLTPSPSCKKLVFKETTPTLPPDQFRAAILEKLKSVSVMDGQKMIRDLTGDETLAALELFQKPRESLGFTAAQWTSFCEDLGVSSIPGHEEVKPPKASGRARFCRPAAFILKRLILSGQSPKDLHVAEIKSLNGNTEPNKGLVPSDLDFLLKMGDSWVNIHIPDGKLDAISQQSGSPDEAIRKLIGSQNNPVVRHRLSVFAQRLLSLASRFGTPDHVVLEFVREDFMGEEAKKRYLKFMNDRAKSRAEAREKVAALGISDKNILRYELWKSQGCRCLYTDLPLEETKLDDYKVDHIVPRAQGGPDSRLNYALTHNATNDEKDDRTPYEWLSGDSVKWQAYLNRVNARLKAADGISRKTAQLLTLPNAAELAEKYTALAETAWISRLSQKIIDLTFGWSNGVDASGRKRSIIVSGGLTARIRRKYHLNHILNPDAETDEEAEKKNRKDKRHHALDAMTISFIPQWARDPDKTGFFRLPKEIRDNPLPFFAKRIDTVIPRQLCFEKSPLAETIYGTRSEDGVVQVVKRSDLRDLAYKTENMKTTFNMEFAKEKSIPRIVDERIRNALLHLVEKDLSEEEWNHAITQFAPFGSIVRRVKLIETTLSPGSMGEFKNMSKDGTPMLRKPKKANKGQFVYLEENGEIEVRPVYPFESTHQIKREILSGRKGRSIQGFYQTGCLVELTSEVRSGNTVIPPGVYR

SEQ ID NO: 295 - protein, 1098 aa, unidentified
  REGION 1..1098: note = Description of Unknown: uncultivated organism
  REGION 1..1098: note = MG1-301 effector
MKSKETVFAFDCGVASLGEAVRQGLDFPQVESWLIPDTFAETKTAAMRRRMMTTRDAHKEREMWLLNTFRDLGIEVLRGKEVSKTSAGWAVTRKADPRLTREFPKPGDDTCYTSCLLRIKLLRGEKLAPWQIYKAIRSATQKRGYDPDIPWKNREEKNQKKEEEETAAILFDEKLLRKTVGDNPDWLYPCYLDAFRMGLWNPARPNQLETRINHKAQSTRKTVMLRALVEKELRDLLRQAALQLPALAGREEFILYGPDGKYSSSSVRAGALSQKVPRFDNRIIDKCALIPRLNVCKIRMEGNHPHPASQIIFEITFLQKLKNMRVQGASDIRGLTPAEIALAAFSQKNALTPKVWASFCEDRGLHPAPAYKKLAFKDVSPVLPPETFRTALIEKLNAVSILDSNKRIRNLTEEEHAALLALFQKPRDSFSFSATQWSNFCEDLGVSPLPGHEEVKPPKAAGRARFCRPAAQILKRLILSGQAPAAFHAAEIHNLNGNVDPRKGLVASDLDFLLNMGDSWDAIRIPDGKLDAIANQCSSADEAIRKLIGSQNNPVVRHRLGVFSQRLRQLERRFGAPDHVVLEFVREDFMGEKARMELRNFQNRRAKARAEARERVAELGISEKNSLRYELFKAQGGRCLYTDDPLAETELDNYRVDHIVPRAKGGPDSRLNYALTLNQTNDDKGDRTPYEWLSGNPVRWQAYLNRVEARLKTTDGISRKTAQLLTLPNAVELAEKYTALAETAWISRLAQKIADLTFGWQNGVDAAGRKRTIIVSGGLTARIRRKYGLNRLLNPDASSEEEAEKKNRSDKRHHALDAMTISFIPQWARDPDKTGFFRFPKEIRDNSLPFFKARIDAVVPRQLCYEKAPLAETIYGLRKTPKENQIVKRTDLRDLAYQTVNMKTVYNIDYAVKTSIPKIMDDRIKSALLEFAQSKPPEEDWNRFVAQFAPFGSLVRRVRLVETALPPDSMGEFKNMSKDGTPMLRKPLKANKGQYVFVEPDGKIKVRPVYSFESPFQVQAHLLADNAGRTIQGFYQTGCLVELAKDTEAGKHKIPKGVYRLSTIRADAYVGIFNTSGNLLGPIGIQHLLPSGFKRIDG

SEQ ID NO: 296 - protein, 1098 aa, unidentified
  REGION 1..1098: note = Description of Unknown: uncultivated organism
  REGION 1..1098: note = MG1-302 effector
MKTPETVFAFDCGLASLGEAVRQGLEFPQLESWLIPDTFAETQTAALRRRMMTTRAAHKERELWLQKTFEDLGLEVLYGKEVSKTPAGWAVTREADPRLTREFPKPGDETWYTSCLLRIKLLRGEKLAPWQIYKAIRSAIQKRGYDPDIPWKNREEKQQQKEDKETAAVLFDEKLLRQTVGDNPEWLYPCYLDASRMGLWNPARPDQLETRQDHKAQSTRKTVMLRALVEKELRDLLRQAARQLPVLAGKEEFILYGPNGKYSSSAVRAGVLAQKVPRFDNRIIDKCALIPRLNVCKIRMADNRPHPASQIIFEITFLQKLKNMRVQGSGGIRGLTPAEIALATFSQKNALPPKAWTAFCEERGLHPDPAHKKLAFQDISPVLPPEAFRSALAAKLNGISIMDSGKRVRNLTEEERAALLALFQQPRDSYSFTSSKWADFCEDIGVASLPGHEEVKPPKAAGRARFCRPAAQILKRLILSGQAPAAFHAAEIRALNGNADPRQGLVASDLDFLLNMGDSWDAIRIPDGKLDAIASRCADADEAIRKLIGSQNNPVVRHRLGVFAQRLRELKRRFGEPDHVVLEFVREDFMGDKARKELQKFQNDRAKARAEARERVAELGISEKNSLRYELWKAQGGRCLYNDDPLAETDLDNYHVDHIVPRAKGGPDSRLNYALTLNQTNDDKGDRTPYEWLSGNPVRWQAYLNRVEARLKAADGISRKTAQLLTLPNAAELAEKYTALAETAWISRLAQKIADLAFGWHNGVDAAGRKRTVVVSGGLTARIRRKYGLNRILNPNVATEEEAEKKNRADKRHHALDAMTISFIPQWARDPDKTGFFRLPREIRDNPWPFFQARIDAVVPRQLCYEKAPLAETIYGLRKTPEGDQVVKRTDLRELAYQTVNMKTVYNIDYAVKTSIPKILDERIQSPLLEFARTKPTEEDWNRFVSGFAPFGSLVRRVRLAETALPPDSMGEFKNMSKDGTPMLRKRLKANKGQYVLVEPDGKILVRPVYSFESPFQVRAQLLAEKAGRTIQGFYQTGCLVELEKEVEAGKRILPKGIYRLSTVLADGRAWLFSHEGPLLPRLSLKPLLSAGFKRIDS

SEQ ID NO: 297 - protein, 1098 aa, unidentified
  REGION 1..1098: note = Description of Unknown: uncultivated organism
  REGION 1..1098: note = MG1-303 effector
MKTPETVFAFDCGLASLGEAVRQGLEFPQLESWLIPDTFAETQTAALRRRMMTTRAAHKERELWLQKPFEDLGLEVLYGKEVSKTPAGWAVTREADPRLTREFPKPGDETWYTSCLLRIKLLRGEKLAPWQIYKAIRSAIQKRGYDPDIPWKNREEKQQQKEDKETAAVLFDEKLLRQTVGDNPEWLYPCYLDASRMGLWNPARPDQLETRQDHKAQSTRKTVMLRALVEKELRDLLRQAARQLPVLAGKEEFILYGPNGKYSSSAVRAGVLAQKVPRFDNRIIDKCALIPRLNVCKIRMADNRPHPASQIIFEITFLQKLKNMRVQGSGGIRGLTPAEIALATFSQKNALPPKAWTAFCEERGLHPDPAHKKLAFQDISPVLPPEAFRSALAAKLNGISIMDSGKRVRNLTEEERAALLALFQQPRDSYSFTSSKWADFCEDIGVASLPGHEEVKPPKAAGRARFCRPAAQILKRLILSGQAPAAFHAAEIRALNGNADPRQGLVASDLDFLLNMGDSWDAIRIPDGKLDAIASRCADADEAIRKLIGSQNNPVVRHRLGVFAQRLRELKRRFGEPDHVVLEFVREDFMGDKARKELQKFQNDRAKARAEARERVAELGISEKNSLRYELWKAQGGRCLYNDDPLAETDLDNYHVDHIVPRAKGGPDSRLNYALTLNQTNDDKGDRTPYEWLSGNPVRWQAYLNRVEARLKAADGISRKTAQLLTLPNAAELAEKYTALAETAWISRLAQKIADLAFGWHNGVDAAGRKRTVVVSGGLTARIRRKYGLNRILNPNVATEEEAEKKNRADKRHHALDAMTISFIPQWARDPDKTGFFRLPREIRDNPWPFFQARIDAVVPRQLCYEKAPLAETIYGLRKTPEGDQVVKRTDLRELAYQTVNMKTVYNIDYAVKTSIPKILDERIQSPLLEFARTKPTEEDWNRFVSGFAPFGSLVRRVRLAETALPPDSMGEFKNMSKDGTPMLRKRLKANKGQYVLVEPDGKILVRPVYSFESPFQVRAQLLAEKAGRTIQGFYQTGCLVELEKEVEAGKRILPKGIYRLSTVLADGRAWLFSHEGPLLPRLSLKPLLSAGFKRIDS

SEQ ID NO: 298 - protein, 941 aa, unidentified
  REGION 1..941: note = Description of Unknown: uncultivated organism with predicted taxonomy: Verrucomicrobia
  REGION 1..941: note = MG1-304 effector
VRNDKDNSLEGQKRTQVYQDILKRNEDRRETARKALRASSLPDSDEMVVRWLLYQEQGPFCIYSGQPIRCSELPNLQIEHIVPRALGGPDAYWNWVLCKTDQNVEKGNRVPYQWFHEEKKSGEWEDYRRRVRNRATWLGSRKVDLLLRADAKELVGEKYTALAATSWIARITQSIVRLHFGWQLDDEPGKEKVMTISGGLTARIRRKYLLDSLLGTDKESQKVCEQVDQVLAEMEKLKSQPRSEETKVQWRELSQKRSQLARDSEKNRGDQRHHALDAMLLTFLPNWARDRNKEDFLRLEDIGDNAPYTDEGKRNAEKITDEIKKLVEETKPIYKQIKTARKANDFGEVDRLKHSIFPQRKRMAELFQSRDRLKQPRNIHKVRNWFREQLGGDRPVLPRPAAFKKVNIEATLYRCAYLIRNQTEPRRIPLPMLGRRPDFADDTQELFDLKWLRTRIQSITDADYDRAKLKALLGDRLKAAMSACLTHGHQFGEADWLAIVESKEVRELFSGKGRGKSKALPESADCQVKVFKVEMLPVKRYPLADLAYATGKTDVWNPVYFEDSISKILRRDESQPRGSRGKRRFQQIRPAPELPQGIASRWKGFFLDTDTQQKLKELQGEVAKIAALLPGPKPKKGETEKQNWEAADEKFGEALEEFRKKHDLPRKLFLFTSESDPPPKSPKTSLKRILFEPKDRIFSASVLKGQAADVVDLHFGRSLECFAESLLLVPDEQQRENLWKEFCNVVCIPTKKALQEFVAQKESISAKQWIDFFKSQDGPRVDQAEQEIGTLNEYCDLSKDGTGQFAKAGGMGGKPSYEGYFICKCKTDERIQAFPIRFFESKKTVRDRLNRSGWEMLDNSIWRSGELLHLKNKAVTKPKKQSQKPKEISSGYFMLGSIQKGTGVNLNACLGGEIPKAISLKILWDCGLRRASEPPHPSANV

SEQ ID NO: 299 - protein, 917 aa, unidentified
  REGION 1..917: note = Description of Unknown: uncultivated organism with predicted taxonomy: Verrucomicrobia bacterium IMCC26134
  REGION 1..917: note = MG1-305 effector
VFAFDCGVASLGEAVRRGLEFPQVESWLIPETFAETKTAAMRRRMMKTREAHTEREVWLLKTFEDLGIEVLCGKEVSKTPAGWTVTRKADSRLTREFPKPGDDTCYTSCLLRIKLLRGEKLAPWQIFKAIRSAIQKRGYDPDIPWKNREDAGQKKKDEESTAVLYDEHLLRKTVGDNPDWLYPCYLDAFRMGLWNPDRPEKLETRITHKAQSTRKTVMLRALVEKELRGLLRQAACQLPALAGKEEFILYGPDGKYSSSAVRAGALAQKVPRFDNRIIDKCALIPRLNVCKIRMEGNRPHPASQIIFETTFLQKLKNMRVQGSAGIRGLTAAEIALAAFTQRNSLPTKVWNAFCEERGLHPAPACKKLSFKDVSPALSPDVFRSALAEKLNGVAVMDSSKCVRNLTGEERASLLALFQKPRDSHSFTAAQWANFCEDLGVSPLPGHEEVKPPKASGRARFCRPAAQILKRLILSGQAPTTFHSAENRNIGVNADPRKGLVAADLDFLLNMGDSWDSLRIPDGKLDAIASQCSNADEAIRKLIGSQNNPVVRHRLGVFAQRLRELERRFGTPDQIVLEFVREDFMGDKARMELKKFQNDRAKARAEARERVAELGISEKNSLRYELWKAQGGRCLYMDDPLAETELDNYRIDHIVPRAKCGPDSRLNYALTLNQTNDDKGDRTPYEWLSGNPERWRAYLNRVEARLRAADGISRKTAQLLTLPNAVELAEKFTALAETAWISRLAQKIADLSFGWQNGVDAAGRKRTIVVSGGLTARIRRKYGLNRLLNPNATSEEEAEKKNRADKRHHALDAMTISFIPQWARDPDKTGFFRFPKEIRDNPHPFFQARIEAVVPRQLCYEKAPLAETIYGLRKTPEENQVVKRTDLRDLAYQTVDMKTVYKIDYAVKTGIPKIMDER

SEQ ID NO: 300 - protein, 1037 aa, unidentified
  REGION 1..1037: note = Description of Unknown: uncultivated organism with predicted taxonomy: Verrucomicrobia
  REGION 1..1037: note = MG1-306 effector
MTANETIWAFDLGKGSIGEAVRQGNKFLHKASLLIPADFAETKTAAGRRRMWRTRQAHKAREAWLDEVMRAAGIPVLQGRRVTWNEATKKWDVSLGDPRLEREFPAECDSTCYTSCLLRIKLLRGEKLEPWQIYKALHSAIQRRGYDPDIPWKNRAQRKAGTPDDDEAGTETRMKEFERRLEEMAPGKTEFQWPCYFDAKEMGLWHPAKPDELKLRQDCHAKTTRKQIVPRKLVEKEVRALVEAAAKFHPKLNGRADFILFGPAQRQYASFYADERKKHHLREGGANDWQGVLGQKIPRFDNRIIGKCVLIPRLNVCKIRTDDKGALLTQSRPAAEAVFLMKLKNMRLQCPGGQRGLTAKEIATIFTDPKRKKLGLTPTQWKNWCLLFGGKPLPGQYQEVKEPSFSGRSRFCRPALEILQRLILTGDTPQVAHDKERARLNGNTSPLKGLVPDDLMFLLKMGTTWEGIYIPNQKLDALAQSTDDPSETIRTLIGSQNDPIVRHRLTLFAERLNELAEKFGIPDAVVLEFVREDFMGKKAKIEYFKFQRDRAAQRAKAREEAAKAGAGEGAAGLKMELLEAQGGACLYTGEALAPTSLDDYVIDHIVPRAKGGPDSALNYVLTTRRANDDKADRTPHEWLSATNGWDAYVERVKKRTTALRNKKASLLVSPEAETLVQRYTALAETAWISKLAQTIIGLRFGWPNGIANGERKVIVISGGLTGRIRRKYKLNSLLNPDAKSEEEAEIKNRGDDRHHALDAMVISFLPTWARNSRFTGFFRFPDEVTRELFKREIAEVIPQNVCFERPALAETIYGARHDHGEKVIVQRAELISLAYKPTAPGKSVFDLKYAGKQTQSIRDNSIREGLAEFLSSGPTEIQWREFCGKYCLKNKDGTDGSRVRFVNMTVGDPTEYKDLSKDGTGAYRKALKGHKGQIVYLDEKGKPRVRPIYAFESAAAAKTELLSRNPKFRICGLFQSGCLVELTKPIEHPTNPLLPGTYKLNTILADGRAKVTDKTGKMTLPMSLEKFLAAGMKRIES

SEQ ID NO: 301 - protein, 760 aa, unidentified
  REGION 1..760: note = Description of Unknown: uncultivated organism with predicted taxonomy: Verrucomicrobia bacterium IMCC26134
  REGION 1..760: note = MG1-307 effector
HGHLRSEDLREWAKNYEGQFELRDPDFNLTPRNDFSGRARFSKNGMAAIRQIIANAREKHDAAYNTWEQRFKDKNLKANEEDIANGYARFLTQLTNEAASNQATADNSYARTVAPPPVLILPGETTDGAFQRYLNSIRNPQVRHRVELFGRELQRLMNLHSEDQAPDFIIIEMARDLMMNQKQKDAKEAKDRERRDERDKAAQILRDMGYAPTADNIKKFLLAQEVGWRCPFTLQAFCQSDFSRLTITQLAQAENKPRFLKEASSVFRRLEVEHLVPRTPVVCNEWYNLTVTLHSTNAQKGKRTPFQWLSIDKDGVPPDLDWDCACKNAADRFGANSLKYQIFTSPNAAEIIADNAKRSIQQTAYIARCLREACLIHFGKEWLDWTDGAGRDPLLLPDNRASKSYLTTSGATTARLRGAWHLNEILWPKPQRLNDAEWDKLTDEEKTILKAKYKEERAVRALKNRQDHRHHALDAMVISCAVPWQTFKVRLGNQQPEDGLCELDAETGEITKIWNPVFNDYGYGIMRAVESRMDLLLKFSTDRQTDLLRHHKSSQRNAQAFDTTPYGRREKFGGDELGQPLFVARKRILDLKTSHLNPRNTGGFIFSPLIRDHIAKEWESFSGNEKNWIRIESDWIAIFEAQIATLRASGKDDQKTRLGIKARESRIYKLRQMEGCKDWEELLSFIAKELGAQQPQPKFPSQFIETLCHPIYKTPITSVKVTAQSKNDESFSLVRRPTSEKARSGTYVMRKQEDKYREMR

SEQ ID NO: 302 - protein, 1129 aa, unidentified
  REGION 1..1129: note = Description of Unknown: uncultivated organism
  REGION 1..1129: note = MG1-308 effector
MKMTQKQANNVFQRETVITKWQGAPFYTKDVVLGIDIGIEGIGIAVRRGPELLYCKTLMMKLPEQAPLEARRVLRSSRRARKSRRVRMNRLKQLFQKHGLPWVDDEIMARSDPFLLRDRAVNKNGLASKEALSICIRHLVAHRGYDFYAFLSDGEAPWGECSDFKAAKKWLSSTFVSEDIQEELLQDAENFFAEKDLEVWKALVQERLDWSRQNSMEKNLREYASNKANWRRGRGISYPRPQIEAHLRQIIERHKHLIKSHKKFTGVLFKKCDDDNKDICIFHYNRKTKEECEKVYERKIRTCPFAKYWDGAAQKCASRGDHAVRKWNLLDFLSNRRFRFAEGSIQIMRTMPEDCVKLLIDSLEESFDQKLTWSDHKQKLVESLKQHGLKIANPPKELSGKAKKSDAWKQLQDLLAPGKPLTSRAKLSSESAQKLFDTTTRNGTSFDPAQISARKKEMDYYEILSHTSMDYGVYPQVQKLLGTLRKPKAGEAPSFGTKGFLQRLFETELKDQLKRKTVPDRCIIECIKDPPRNKKEQDARASLNVENREFIENLLKDYGYEGAHSRSLINRLKLYRQQGGEAKDGQVTKEAVCPFTGMPLGKNPLSSDLDLAHLFPDGRGGLAIEDNLVLTKRSVNQDMGQRTPREVAGTRMGKTSFLSWNEMLARSKSFKWNDKKRELFAFEPAKGQPVPDFENLTRTAQLARQLRRMICFWMGIQEDSKETRERIGNPSGLHTAAARRGWKITKDRSDLTHHRMDAAVLSFIPPGAGLNSVMYGGIFEEVHSTKEINGNKFKVVQMRGAPELKPDLSALKKDSLTECPVINIRSKSKCKPLGDSTFWSVDEKGETWQRTTLIPLDKDALKDFTPEKIREKLAAEGIKESDIPGDRKLEAWLQNPKYSLHLKHGQPVRFVHKKGNKGDFRNPVGWSGIRHPNGKIDQLRKLDLVNDRLELWVGYDPKKGWQYYKRVIPSKDSMRGLKRLGIPWHGQEGLSEYTKKLINEENCKDLKEFYCGTLPQYSHKVGEFKLGDTFLIDVSKKKQKKQNAEGTEIFKDTPIPNSKEWFRVSAIILFREKGKKGIKRKVEFKPIITKGDSFTKEIACDLAQLLGKPKSPEKCAQQNGWKAPSNKKG

SEQ ID NO: 303 - protein, 892 aa, unidentified
  REGION 1..892: note = Description of Unknown: uncultivated organism
  REGION 1..892: note = MG1-309 effector
DELKLDSIRAWGKRGVLPEKYGNYLKLLIEDAGDFRGDKQAEALRIIDEAVARYRSDPIRTMLEEHLHERQHVNLRTPARGHNFPRELVKAHLREICERHRHFFPAEGFEEAMRELIGPVKNGAEEYDSKAESIMDWHRRTPGEARRLWERREGHCLLAPHLISTGLLPAGVYRRSPAGAGGIRRWKLVQFLAERRVELATGERTHVTADVVRQALDFVTADNAAVCERRRRPHAPKMPQAIEKAVGALASKKDSRLNADFFDQLGDLLKPSLSKLRGKAPLAEATAEALFQLATNGGANFEPEAIRARLNDSGYYDWRKHPGATRALYHQVDYLLGDARQYDPDTGEPKDHRDGAPRYHGLLRRLFAGQLRLDTGEIVDLRDRLDGRKVPDYVIIESVRDMPRNQDQSREIQKEQKERREERRHIAAIYGLDFDVLTEPQKRRLFLFHEQAGRDGEAVCPYTGESLGRDPLAADLEIEHIYPQRRGGLSIMENLAITRRATNAEKGNRTPVEWLGYEKAAEQASRMRWSKRKLEVFLWREERCPDWENLTRTAQLARELRRRVVEWLGIERRHAGIADPTQRALAREAEERRRVAAPAGALTAACREAWKDRLPEAYFTPIEIRGQTVLTKNRGNLRHHMWDAGVLAHIPPGDGLNHVRYGGIFETADIGGAPRPVPLPELAPDLAEIEKADPLACRVFHLRPRHPRSSRTTQQPVSLPDAEGRSWQRVAIRKTIHEKDGVVKTVEPENLLDAIRRAGLGPDRIADAEIERWKNDPRPIEQHPLRLRDGTPVHGLKIPIAQKKNEFGQYPHLTDAATAPDAPAYRSRDGRRQSRLIGIKGSTDTYDRLEIWRGPDLDRRGERRLDAKGQPKWKYFSFPVPGPRNLAAYRRM

SEQ ID NO: 304 - protein, 1205 aa, unidentified
  REGION 1..1205: note = Description of Unknown: uncultivated organism
  REGION 1..1205: note = MG1-310 effector
MNEYILREPDRKPLAEEWLNHEFYRSAVVLGIDIGLEGIGVYLRRGPQEIFARSIMLELPEAEALAERRQKRAWRHCRKNRKRRLHRLKLLFAKHGLPWLDADRISRAHPFRERYRAINNGVASKEALSICIRHCVVHRGYDYGGTEEGTFPWGESPLLSKAAEWLATAYVTPELKEQIEQLAPGLVPGKNEEEQRNKFAELLRERLEWSQQHDIARVLAEHVKGGHDNLRTRARGYNFPRQKVWEHLETIVRKHAHLIDDVEGFLAVLGLNPNRAANAKEAAKARKRAIFFYNRKTRFDMERHWEKKVNRCPFAGKLGGNPDERCAENGDLNVRRWKALEFATTRRVEIEATEGKGATKKKRRCLHSLSASATRKLIEFIEKHHGAASPATAPKWEEGKAIILDDITAVHGEKAKPVAEKQSEWNKSYFTQLKDLLTPTIANRKKRASLSAFAAGQLFNIATADGSDFTPENVVARLREARFYDWRRNASVDFNPFPQVELLLGRRIKHGKRRGELSPTCQGLLRRIFAEHREALGGATAPDYCVIEVIGDPPRNAQQRAERQKEIEANREKHEKLFEQYGIEDSGVASKRRRIMLYEQQRGKCPYTGKDLPSNPLDPSLEIEHIFPAEMGGLSVDDNLVLTWRSVNAEKGKRTPLQWAGERFDAMLANTRDMRWSARKREIFAWGTIREDKPDKPSHYNADGTLRVPDFGNTTRTAQLARQLRAEIMRWMQVDDKPDEAARRIGTPSGWLAAQARKSWLPAEEYEKVRNNVTHHLIDAAILAHIPPREGMNSVPCKGIFYVESVPVRDPVTGDTTYRLETKALPELSPLPRLKHWLPDNGEYDVCPVWKPRRQSKTQSLGDSTFWKQVRPTEATVAQRTALDADSLTKLRIVDGESLHAHLCRMGIQATKIPNRDALQKWLDEATAATKADKDKPIAPLKLTDGTPVKNLWKFDSKGSFSSPVGWSGKRNPDGKLRELRTISLKYDRLELWLGYDHQKAERARRAKQPDWEQAGWVYQKRLIPDARALRHVKQMGFSFARDKRHKAPAFMQNKPDKPETHQTLRDLVLGGRLLPFSHKVGEIRKGDVFKLHLLPDGSIRKRTPVGQPEPAAALSTFYVVTALKHGRGNPVVELTSQLFKDKEGTPMERFAGDVLSKILSTADDLAYVLGLPPAAEEAQKHGWRIPTSPPPPAAAAKETDGNLL

SEQ ID NO: 305 - protein, 1231 aa, unidentified
  REGION 1..1231: note = Description of Unknown: uncultivated organism
  REGION 1..1231: note = MG1-311 effector
MNELISPNTAWKTQSEYWLQHEFYRTAVVLGIDIGLEGIGLYLRKGPQEIFARSLILDLPQAEALAERRAKRAWRHCRKNRKRRLHRLQLLFAKYRLSWLPAERMSRSNPFKERLRAVTTGVASREALSICLRSCVAHRGFDYGGTEEGQYPWGGSSKLSDATQWLHTAVVTNELKDLIEDKLDELEADKSPEERRAAFRDLLRERLDWSLHHDIEMILREHAKGGHDNLRPRARGVNFPRKEVWKHIEKIVRHPRHREFLPDPEAFLKELGIDPNKAGGASPKERLANAARARRKAIFFYNRKAYPEMERHWAKKVNDCPYGQRLDPGLQGSKITCGEKGELPIRKWSALEFSATRRVEMETIFGKGKEKTIRRSLHSLSGGAVGKILKAIEQHDRALKSGDKSAAPSWDEVKAMLVEDLPPLANAKVKLATSKKGDWNETFLEQLRNLTLPSLANRKQRASLSALAAERLFALATQDGRDIDPAQFAPRLKAIGFYDWRRAATVDFNPYRQVEVLLGRRIKRGKKHGQLAESCQGWLRRIFADQSEALDGCTAPDYCVIEVIGDAPRTSRQAQEIKSAQDERGQKRRELFAAHNLEDSGIASKRRRISLWDQQKGVCPYTGKELPKDPLDPALELEHIFPAEMGGLSTDENLVLTWRTVNGDKGKHTPLQFASKLGVPFDQLVAHTKEMRWSGKKREIFAWGTLREAKDDQKSHYLPDGVTLRVPDFGKTTRTAQLARQLRAEVMRWMQVEDQPDEAARRIGTPSGWLAAQARKSWLAAIDYQKVRNNLTHHLIDAAVLAHIPPREGMNSVICKGIFYVEREPVRDEATGITSHRFVTKALPELSALPRIKQWLPDNGEYAVCPVLKPRRQSKTQSLGDATFWRQVRQGEPTLAQRTVLNPENITDADELKATLQRMRVDWNKQKQQTESKIPSRDALQDWLDAATPTTKADKNRPIPTLKLTDGTPIKSMWKIDSKGSLTSPVGWSGKRNADGKLRELRSISLKYDRLELWLGYDHREAERARKSKTLDWEQSGWVYQKRLIPDARALRHLKQMGFSFGRDKRRKAPAFMQGKPDKPETHLSVRDLVLGGRLLPFSCRVGAIKKGDEFLLHLLPDGSVRKRTPGGEAEPAAAFSTFYAVTALSHEGGNPRVELKSRLFKEKEGTPLERFPGDLTTRKVAVSSDLAFLLGLPPAWIAAQQRGLRPPSPQIEHAKTTTERNSRDPNPRLL

SEQ ID NO: 306 - protein, 923 aa, unidentified
  REGION 1..923: note = Description of Unknown: uncultivated organism
  REGION 1..923: note = MG1-312 effector
MERHWAKKVNDCPYGQRLDPGLQGSKITCGEKGELPIRKWSALEFSATRRVEMETIFGKGKEKTIRRSLHSLSGGAVGKILKAIEQHDRALKSGDKSAAPSWDEVKAMLVEDLPTLANAKVKLATSKKGDWNETFLEQLRNLTLPSLANRKQRASLSALAAERLFALATQDGRDIDPAQFAPRLKAIGFYDWRRAATVDFNPYRQVEVLLGRRIKRGKKHGQLAESCQGWLRRIFADQSEALDGCTAPDYCVIEVIGDAPRTSRQAQEIKSAQDERGQKRRELFAAHNLEDSGIASKRRRISLWDQQKGVCPYTGKELPKDPLDPALELEHIFPAEMGGLSTDENLVLTWRTVNGDKGKHTPLQFASKLGVPFDQLVAHTKEMRWSGKKREIFAWGTLREAKDDQKSHYLPDGVTLRVPDFGKTTRTAQLARQLRAEVMRWMQVEDQPDEAARRIGTPSGWLAAQARKSWLAAIDYQKVRNNLTHHLIDAAVLAHIPPREGMNSVICKGIFYVEREPVRDEATGITSHRFVTKALPELSALPRIKQWLPDNGEYAVCPVLKPRRQSKTQSLGDATFWRQVRQGEPTLAQRTVLNPENITDADELHATLQRMRVDWNKQKQQTESKIPSRDALQDWLDAATPTTKADKNRPIPTLKLTDGTPIKSLWKFDSKGSLSSPVGWSGKRNADGKLRELRSISLKYDRLELWLGYDHREAERARKSKTLDWEQSGWVYQKRLIPDARALRHLKQMGFSFGRDKRRKAPAFMQGKPDKPETHLSVRDLVLGGRLLPFSCRVGAIKKGDEFLLHLLPDGSVRKRTPGGEAEPAAAFSTFYAVTALSHEGGNPRVELKSRLFKEKEGTPLERFPGDLTTRKVAVSSDLAFLLGLPPAWIAAQQRGLRPPSPQIEHAKTTTERNSRDPNPRLL

SEQ ID NO: 307 - protein, 1129 aa, unidentified
  REGION 1..1129: note = Description of Unknown: uncultivated organism
  REGION 1..1129: note = MG1-314 effector
MKMTQKQANNVFQRETVITKWQGAPFYTKDVVLGIDIGIEGIGIAVRRGPELLYCKTLMMKLPEQAPLEARRVLRSSRRARKSRRVRMNRLKQLFQKHGLPWVDDEIMARSDPFLLRDRAVNKNGLASKEALSICIRHLVAHRGYDFYAFLSDGEAPWGECSDFKAAKKWLSSTFVSEDIQEELLQDAENFFAEKDLEVWKALVQERLDWSLQNSMEKNLREYASNKANWRRGRGISYPRPQIEAHLRQIIERHKHLIKSHKKFTDVLFKKCDDDNKDICIFHYNRKTKEECEKVYERKIRTCPFAKYWDGAAQKCASRGDHAVRKWNLLDFLSNRRFRFAEGSIQIMRTMPEDCVKLLIDSLEESFDQKLTWSDHKQKLVESLKQHGLKIANPPKELSGKAKKSDAWKQLQDLLAPGKPLTSRAKLSSESAQKLFDTTTRNGTSFDPAQISARKKEMDYYEILSHTSMDYGVYPQVQKLLGTLRKPKAGEAPSFGTKGFLQRLFETELKDQLKRKTVPDRCIIECIKDPPRNKKEQDARASLNVENREFIENLLKDYGYEGAHSRSLINRLKLYRQQGGEAKDGQVTKEAVCPFTGMPLGKNPLSSDLDLAHLFPDGRGGLAIEDNLVLTKRSVNQDMGQRTPREVAGTRMGKTSFLSWNEMLARSKSFKWNDKKRELFAFEPAKGQPVPDFENLTRTAQLARQLRRMICFWMGIQEDSKETRERIGNPSGLHTAAARRGWKITKDRSDLTHHRMDAAVLSFIPPGAGLNSVMYGGIFEEVHSTKEINGNKFKVVQMRGAPELKPDLSALKKDSLTECPVINIRSKSKCKPLGDSTFWSVDEKGETWQRTTLIPLDKDALKDFTPEKIREKLAAEGIKESDIPGDRKLEAWLQNPKYSLHLKHGQPVRFVHKKGNKGDFRNPVGWSGIRHPNGKIDQLRKLDLVNDRLELWVGYDPKKGWQYYKRVIPSKDSMRGLKRLGIPWHGQEGLSEYTKKLINEENCKDLKEFYCGTLPQYSHKVGEFKLGDTFLIDVSKKKQKKQNAEGTEIFKDTPIPNSKEWFRVSAIILFREKGKKGIKRKVEFKPIITKGDSFTKEIACDLAQLLGKPKSPEKCAQQNGWKAPSNKKG

SEQ ID NO: 308 - protein, 953 aa, unidentified
  REGION 1..953: note = Description of Unknown: uncultivated organism with predicted taxonomy: Verrucomicrobia bacterium
  REGION 1..953: note = MG1-315 effector
AGASKKERLPHAAPPRRKAIFFYNRKSRPEMERHWATKVNECPYAHRLDPGLAGTKITCGENGELPIRKWSALEFSATRRVEMETIFGKGKEKRIRRSLHSLSGRVVGKILETIERHDRALNSGDKAAAPSWDEVKAIIEDDLRTLADAKVKLATSKKGDWNETFLAQLRNLTLPSLANRKQRASLSALAAERLFALATHDASDIDPAQFAPRLKAIGFYDWRRAATVDFNPYRQVEVLLGRRIKRGKKRGQLAESCQGLLRRIFAEHSEALDSSAAPDYCVIEVIGDAPRTTKQAQEIKFAQDERGQKRRELFAARNLEDSGVASKRRRISLWDQQKGVCPYTGNELPKDPLDPSLELEHIFPAEMGGLSTDENLVLTSRTVNSDKGKHTPLQFANKLRVPFDQLVAHTQDMRWSAKKREIFAWGTLREDKDDQKSHYLPDGVSLRVPDFGNTTRTAQLARQLRAEVMRWMHVEDQPDEAARRIGTPSGWLVAQARKSWLAASDYQKVRNNLTHHLIDAAVLAHIPPREGMNSIICKGIFYDVRERVRDEATGITSHRFLTKALPELSPLPRLKQWLPDNGEYAVCPVLKPRHQSKTQSLGDATFWRQVRQGEPALAQRTALNPENITDADELHATLQRMRVDWNKQKQQTENKIPSRDALQNWLDTATPATKADKHKPIPPLKLTDGTPIKSLWKFDSKGSLSSPVGWSGKRNLDGKLRELRSISLKYDRLELWLGYDHKQAERAHKSNTPDWEQSGWVYQKRLIPDARALRHLKQMGFSFGRDKRRKAPAFMQDKPDKPETHLSLRDLVLGGRLLPFSCNVGAIKKGDEFLLHLLPDGSVRKRTPAGQAEPAAAFATFYAVTALSHEGGNLRVELKSRLFKEKEGTPLERFPGDLTTRKVTVSADLAFLLGLPPAAVAAQHHGLRPPPPRIEHPKATTEMIPRDANPRLL

SEQ ID NO: 309 - protein, 993 aa, unidentified
  REGION 1..993: note = Description of Unknown: uncultivated organism with predicted taxonomy: Thiorhodospira sibirica
  REGION 1..993: note = MG1-316 effector
GPGLDALEPFRKDRKTGAWIPQHTLRRDSLFFKEWQSEVALRNFRVKRRLITVGRSKKEKFELIPPPPVALERLRNLWNEHGHLWAEDLREWAKNYEGQFELRDPDFNLTPRNDFSGRARFSKNGMAAIRQIIANAREKHDAAYNTWEQRFKDKNLKANEEDIANGYARFLTQLTNEAASNQATADNSYARTVAPPPVLILPGETTDGAFQRYLNSIRNPQVRHRVELFGRELQRLMNLHSEDQAPDFIIIEMARDLMMNQKQKDAKEAKDRERRDERDKAAQILRDMGYAPTADNIKKFLLAQEVGWRCPFTLQAFCQSDFSRLTITQLAQAENKPRFLKEASSVFRRLEVEHLVPRTPVVCNEWYNLTVTLHSTNAQKGKRTPFQWLSIDKDGVPPDLDWDCACKNAADRFGANSLKYQIFTSPNAAEIIADNAKRSIQQTAYIARCLREACLIHFGKEWLDWTDGAGRDPRLLPDNRASKSYLTTSGATTARLRGAWHLNEILWPKPQRLNDAEWDKLTDEEKTILKAKYKEERAVRALKNRQDHRHHALDAMVISCAVPWQTFKVRLGNQQPEDGLCELDAETGEITKIWNPVFNDYGYGIMRAVESRMDLLLKFSTDRQTDLLRHHKSSQRNAQAFDTTPYGRREKFGGDELGQPLFVARKRILDLKTSHLNPRNTGGFIFSPLIRDHIAKEWESFSGNEKNWIRIESDWIAIFEAQIATLRASGKDDQKTRLGIKARESRIYKLRQMEGCKDWEELLSFIAKELGAQQPQPKFPSQFIETLCHPIYKTPITSVKVTAQSKNDESFSLVRRPTSEKARSGTYVMRKQEDKYREMRVYRLPKPGRSGAYACWLLLPWYGMLDARGKRFKTVEKDLMTRACKGAKFVRAFRRDDIVCFANNLLANKGIKQNESWRIVRTDAKGDCLANVGLLPANLARETSHPITGEKVKLEPVVVALNDFMNALEPRLPTDELSHSPPVKPKSPGAAET

SEQ ID NO: 310 - protein, 1119 aa, unidentified
  REGION 1..1119: note = Description of Unknown: uncultivated organism
  REGION 1..1119: note = MG1-317 effector
AERMSRSLPFRERHRAVNKGVASKEALSICIRHCVEHRGYDYGGTEEGAFPWGDSPLLSKAAAWLSTAYVTPDLADKLQDIEPQLQAGRKEEEQREHFLYLLRDRLAWSGENDIARVLADHSQGGHDNLRTRARGHNFPRTKVWEHLEGIIRRHAHLRADVEGLLAVLGLDPNREPDAKRAVKAKRRAIFFYNRKTRLEMERHWAKKVNICPFAAKLGLDHPEERCAENGDVNIRRWKLLEFAATRRLEIDVAEGKGATKKRRSLLHRLSADAIRKLVETVQKHHAAVVASNRDAEPKWDESKDTILEDITTAWGERAKPIPETKSDWNKSYFSQLKDLLVPTLSNRKQRAALSAASAVRLFDLASADGMSFTPEEVIERLRKAGFYDWRRDASVDFNPYPQVEVLLGRRIKRGAKRGHLSETCQGLLRRIFAEHEEQLEGKTAPDYCVIEVIGDPPRNALQRAERDQEMKERREKRNKLFEQHHLDDSGVASRRRRVTLWEQQKGKCPFTGKELPANPLDPSLELEHIFPEDMGGLSVEENLALTWRTVNADKGKRTPLQFAAKLGVPFDQLMAHTQEMRWSAKKREIFAWGAIKEDRGDQASHYNPDGALRIPDFGNITRMAQLARQLRAEVMRWMKVEGDPDEAARRIGTPSGWLAAQARKSWLAQGDYEKVRNNLTHHLIDAAVLAHIPPREGMNSVLYKGIFYVVREPVRNEITGTTSQRLLTKALPQLSPLPRLNHWLPDNGEYAVCPVLKPRRQSKTQSLGDATFWRQVSPVEGTLAQRTVLNPEKITDADELHATLQRMRVDWNKKQQQTENKIPNRDALQAWLDAATPATRADKDKPVPPLKLTDGTPIKNLWKFDSKGSLSSPVGWSGKRNADGRLRELRSISLKYDRLELWLGYDHQKAERARKAKTPDWEQAGWVYQKRLIPDSRALRHLKQMGFSFGRDKRRKAPAFMQAKPDQPETHLTVRDLVLGGRLLPFSCKVGAIKKGDEFLLHLLPDGSIRKRTPAGQPEPSSAYSTFYAVTALSHEGGNPRVELKSRLFKEKQGTPLERFPGDLITRKVAVPSDLAFLLGLPPAGMAAQQRGLRLPPPQIEQITTTTEMNSRDPNPGLL

SEQ ID NO: 311 - protein, 1000 aa, unidentified
  REGION 1..1000: note = Description of Unknown: uncultivated organism
  REGION 1..1000: note = MG1-318 effector
HRLQLLFAKYRLSWLPAERMSRSNPFKERLRAVTTGVASREALSICLRSCVAHRGFDYGGTEEGQYPWGGSSKLSDATQWLHTAVVTNELKDLIEDKLDELEADKSPEERRAAFRDLLRERLDWSLHHDIEMILREHAKGGHDNLRPRARGVNFPRKEVWKHIEKIVRHPRHREFLPDPEAFLKELGIDPNKAGGASPKERLANAARARRKAIFFYNRKAYPEMERHWAKKVNDCPYGQRLDPGLQGSKITCGEKGELPIRKWSALEFSATRRVEMETIFGKGKEKTIRRSLHSLSGGAVGKILKAIEQHDRALKSGDKSAAPSWDEVKAMLVEDLPTLANAKVKLATSKKGDWNETFLEQLRNLTLPSLANRKQRASLSALAAERLFALATQDGRDIDPAQFAPRLKAIGFYDWRRAATVDFNPYRQVEVLLGRRIKRGKQRGQLAESCQGLLRRIFAEHHEALDGSAAPDYCVIEVIGDAPRTSRQAQEIKSAQDERGQKRRELFAAHNLEDSGIASKRRRISLWDQQKGVCPYTGKELPKDPLDPALELEHIFPAEMGGLSTDENLVLTWRTVNGDKGKHTPLQFASKLGVPFDQLVAHTKEMRWSGKKREIFAWGTLREAKDDQKSHYLPDGVTLRVPDFGKTTRTAQLARQLRAEVMRWMQVEDQPDEAARRIGTPSGWLAAQARKSWLAAIDYQKVRNNLTHHLIDAAVLAHIPPREGMNSVICKGIFYVEREPVRDEATGITSHRFVTKALPELSALPRIKQWLPDNGEYAVCPVLKPRRQSKTQSLGDATFWRQVRQGEPTLAQRTVLNPENITDADELHATLQRMRVDWNKQKQQTESKIPSRDALQDWLDAATPTTKADKNRPIPTLKLTDGTPIKSLWKFDSKGSLSSPVGWSGKRNADGKLRELRSISLKYDRLELWLGYDHREAERARKSKTLDWEQSGWVYQKRLIPDARALRHLKQMGFSFGRDKRRKAPAFMQGKPDKPETHLS

SEQ ID NO: 312 - protein, 1078 aa, unidentified
  REGION 1..1078: note = Description of Unknown: uncultivated organism with predicted taxonomy: Verrucomicrobia bacterium IMCC26134
  REGION 1..1078: note = AKC83434.1 effector
MVLAFDLGKGSIGEAVRLGNDFVHVASWLIPQDLAARGPSAKPGTPASRYRAWRTRVAHRERENALRRICADAGIEVLAAKRVARDAADKKKWIVVSKADERLTREFPKKGDSTCYNSALLRIQLLRGVKLEGWQVFKALHAAIQRRGYDNAVPWKHRAVRDTETEEDGITQQRADSYCLALEQMAPNKPECQLPSYLDAHRLGLWDASRPDEYILRIDHHVAPARNREHPDNTPIVAPRELVIKETRALLTAAAKFFPKLAGREDEILFGRGGKAYASYFDDVRRAHSLRLGGANDWDGILGQKVPRFDNRIIAKCALIPRLNVCKATTRKDKTGAIISESLLPSEVTFLFKLKNVRVQRPDKSITGLKPDEIRTLFNDPKREPEKLSYTKKQWSKEIARFGCEAAAGHEEIAAPSFGGRSRFCRPALEILKKLILSGESPATAHSRELAERVKGNTNPQQGLVVSDLDFLSPARIGETWDGIHVADQQHGALLRLAAEQGPEVAIRALIGKVNNPVVRHRLEAFWGRLRAIEADLKKRFGRGPDEIAIEFIRTDFMGPKAKLALAKFQSERAEAREDARAQVGKIGADGRASPLKYELWKAQGGICLFVGESLAPTDIESLEIEHIVPRSQGGSDAFINYVVTTKATNKLKDNRTPYAWFEANGFTGWDAYVKRVEACATALRNKKVRLLTAPDAIELVERYTALAETAYIARLAQTVAALHFGWPINSQPGERRITIVNGGLTARVRRNYRLNSLLNPCPTGKDQKEWEEDADVEKNRKDDRHHALDAMVISFIPAWTRDPKKEKFFRLPDGVTPETFQERLEEVLPRQLHYERSELEATAFGQRTLGGKLYGVARVDFCNLVVKVALNGNRSLNIKPDGSGEADTIVDQAIRRDVQAFIDQNRATITLAIWDAWVSSYHRGGSNGPLVKKVLVTITNPDSLEEYADLAKDQSGQLRRGKKHKGYWILRILSPTKKDPTKTTLQVRPIYAHANPHALKAEIGEDHGCEIILELESGCLVQIDKPIAHAKTPLAAGIYKLNSVWTQGNVVVSSQSGVTSAPIGLAKFIEAGLRRLK

SEQ ID NO: 313 - protein, 1078 aa, unidentified; identical to SEQ ID NO: 312
  REGION 1..1078: note = Description of Unknown: uncultivated organism with predicted taxonomy: Verrucomicrobia bacterium IMCC26134
  REGION 1..1078: note = AKC83434.1 effector

SEQ ID NO: 314 - protein, 862 aa, unidentified
  REGION 1..862: note = Description of Unknown: uncultivated organism with predicted taxonomy: Verrucomicrobia bacterium 61-8
  REGION 1..862: note = OJV06180.1 effector
MEAYVDELNAMSPLQLEFQLPSYFDAWKMGLWNPKNPTELKDRIDCHAQSTRNKIVPRWLVEKEIRLLAENAGKQIPELAGKSDYLLWGPTRRPYASYDCSVRKEFGLREGSVTDWQGVVGQKTPRFDNRIIEKCTLIPRLNVCKIKSDGKNPLPESRIVFETTFLMKLKNMRVQQGPTEQRGLSAAEINAIFKDEKFRSFKITEAQWNKLCISMGVRPQPGYETVDPPRSGGRSRFCRTSLEILKRLILSGKNPPEFLEEELRRLNGNTDPKRGLIADDLKFIEKMGSTWEEIHIPNQRLEAILQLAGGADAAVRQIIGSQTDPIVRHRLDIFYQRLQSLREAYGTPKSVVIEFVREDFMGKKAVIEYRAFLKKREAERKRAREDAAKTGSTERSAALKLELLREQGGICLYTGSALKETALEQYEIDHIVPRSKGGPDAVINYVLTLRSANDEKGDRTPFEWLSRTNQWDAYVQRVDSRGTVLRNKKTKLLLNENASELAERYTALAETAWIAKLSQAILDAFFGWKNGVDDEGRKRVISVNGGLTARIRRKYQLNSILNPSLNEEEAEKKNRSDKRHHALDAMVINFIPSWTRDTAKEHFFRFPSGIHRETFVQQIANVTPRNLCLEKPTLTETIYGARRGDQGLVIVQRAKIVDLAYRSITPSKSVYDLTYAAKQFKAIRDAHIRRLLEDFLKRNPTEQDWQEFCASFALPRRDGTLGSRVAQVTMNIGSASEYKDLSKDESGSWRRGKRHRGQIVYLTDGKPKVKPIYAFESEQEALKELLLSGAKIVGIFRSTCAVRLTEAVTHPKTPLVAGLYVLNTIREDAFAVLTDRSGARSQPISLNKLLAAGFQRVESLEI

SEQ ID NO: 315 - protein, 862 aa, unidentified; identical to SEQ ID NO: 314
  REGION 1..862: note = Description of Unknown: uncultivated organism with predicted taxonomy: Verrucomicrobia bacterium 61-8
  REGION 1..862: note = OJV06180.1 effector

SEQ ID NO: 316 - protein, 1324 aa, unidentified
  REGION 1..1324: note = Description of Unknown: uncultivated organism with predicted taxonomy: Pedosphaera sp. Tous-C6FEB
  REGION 1..1324: note = PAW75411.1 effector
MLRPCVRKDRLTVLCRPPGRLPSRREFLRLDQPRRAEGQLGIVTSDPCPCAGGKHLICRKAAGNNGSMSAKDYVLRGAVPMDSTLMPNHIWAFDLGKGSEGEAVRHGTDFPHVESLLIPAELARRGPAATSGTPANKYRALKTREAHRARERWLETVWTAAGFTPLHGRQVAKVCSLPVKLDENGEPKFDKGHWAQVAKGDYRLEMEFAPKLGTKTKDGAPSDLAGADICYTSCLLRIKLLTWKESGPKVADWQIYKALRSALQTRGYGRVPWAAKESQREQQTKEEEAKETETATRWAEFKQSVAPEFRFPCYYDAAKMGLWNPAAPNEPTPQNSHLANSTRNVRFDRADVECEIKQLAENADRILEGRLSLAKEKLVQEFMEGRRKRVREINERRALKNLTLPPDKRKQPRKDPAFQRISASVADFFCYGPSGVSCASYDRSLQADLALRAGSAYDWQGALGQKVPRFDNRILNDCVLIPRFHVCKVDVRVAEKDDDKQGVKAGQVFADSLLATEVTFLLKLKNVLVADLEKGQRKLKAHEVRAIFEYAHRQLQSLKLLSQDGGLVKNWPGKVADCFALTKSEWGNKKKGIGLLGLRPLAGHEEVKAPKTGGRSAYSRAALRILKELILSGEAPSVFHARLLKREPELLGRLGSSLAKPLALHADSTAQDAEQSKREDTEHRKCGLLVSELKFLLQMRKEDGQPDSWENLFAPSQTLDALKGRHTTDGKLDSEAAIRELLGTINDPIVRHRLGVFAGRLKKLQFGDAKENIQAFGVPDAIVLEFVREDFMGEKALAELQDFQRRREADRKEAKEMAAAAGATSSLSALKYQLWKAQGGECLYGKEVFNESGVSKAQCLYRGTALPFTKLDDYVIDHIVPRAKGGPDAMVNYVLTTHETNEAKGDRTPFEWLRSAPDWDAYNKRVAARAHTLRNKKVQLLTREDAPELVQRYTALAETAWVSKLAQAIVNLTFGWTNANDEEGRKRVIVVSGGLTARVRRKYSLDKLLYTNTTDPEVLTKQVKNRSDKRHHALDAMVLTYIPQWARDPGKEGFFRFPAEFRDATGREDYSAIQRLFKDKLAKTTPRFLAYERSGLADTAYGRRTDGEKCVVVQRTPLRGLAYKQVKMKSVFSLEYAATQVAAIRDGRIQAEMKRVIAAQPNEAQWRAICDALENGTHSGFEGVRVVKVTVNRNEDPAEFKDLSKDGTGALRMRKKEHQGQFVFLDSKGRPRVEVVRVFDSLRDVKARLAKEHAGLKEVGFFQSMCQVELDQPVKHGNCTLLPGTYLLNTIKQDGRAQLTSAGGDKSPEIGLVKLLPAGFRRKA

SEQ ID NO: 317 - protein, 1324 aa, unidentified; identical to SEQ ID NO: 316
  REGION 1..1324: note = Description of Unknown: uncultivated organism with predicted taxonomy: Pedosphaera sp. Tous-C6FEB
  REGION 1..1324: note = PAW75411.1 effector

SEQ ID NO: 318 - protein, 1086 aa, unidentified
  REGION 1..1086: note = Description of Unknown: uncultivated organism with predicted taxonomy: Verrucomicrobia bacterium IMCC26134
  REGION 1..1086: note = WP_082083265.1 effector
MSQVTGLPLVLAFDLGKGSIGEAVRLGNDFVHVASWLIPQDLAARGPSAKPGTPASRYRAWRTRVAHRERENALRRICADAGIEVLAAKRVARDAADKKKWIVVSKADERLTREFPKKGDSTCYNSALLRIQLLRGVKLEGWQVFKALHAAIQRRGYDNAVPWKHRAVRDTETEEDGITQQRADSYCLALEQMAPNKPECQLPSYLDAHRLGLWDASRPDEYILRIDHHVAPARNREHPDNTPIVAPRELVIKETRALLTAAAKFFPKLAGREDEILFGRGGKAYASYFDDVRRAHSLRLGGANDWDGILGQKVPRFDNRIIAKCALIPRLNVCKATTRKDKTGAIISESLLPSEVTFLFKLKNVRVQRPDKSITGLKPDEIRTLFNDPKREPEKLSYTKKQWSKEIARFGCEAAAGHEEIAAPSFGGRSRFCRPALEILKKLILSGESPATAHSRELAERVKGNTNPQQGLVVSDLDFLSPARIGETWDGIHVADQQHGALLRLAAEQGPEVAIRALIGKVNNPVVRHRLEAFWGRLRAIEADLKKRFGRGPDEIAIEFIRTDFMGPKAKLALAKFQSERAEAREDARAQVGKIGADGRASPLKYELWKAQGGICLFVGESLAPTDIESLEIEHIVPRSQGGSDAFINYVVTTKATNKLKDNRTPYAWFEANGFTGWDAYVKRVEACATALRNKKVRLLTAPDAIELVERYTALAETAYIARLAQTVAALHFGWPINSQPGERRITIVNGGLTARVRRNYRLNSLLNPCPTGKDQKEWEEDADVEKNRKDDRHHALDAMVISFIPAWTRDPKKEKFFRLPDGVTPETFQERLEEVLPRQLHYERSELEATAFGQRTLGGKLYGVARVDFCNLVVKVALNGNRSLNIKPDGSGEADTIVDQAIRRDVQAFIDQNRATITLAIWDAWVSSYHRGGSNGPLVKKVLVTITNPDSLEEYADLAKDQSGQLRRGKKHKGYWILRILSPTKKDPTKTTLQVRPIYAHANPHALKAEIGEDHGCEIILELESGCLVQIDKPIAHAKTPLAAGIYKLNSVWTQGNVVVSSQSGVTSAPIGLAKFIEAGLRRLK

SEQ ID NO: 319 - protein, 1086 aa, unidentified; identical to SEQ ID NO: 318
  REGION 1..1086: note = Description of Unknown: uncultivated organism with predicted taxonomy: Verrucomicrobia bacterium IMCC26134
  REGION 1..1086: note = WP_082083265.1 effector

SEQ ID NO: 320 - protein, 1333 aa, unidentified
  REGION 1..1333: note = Description of Unknown: uncultivated organism
  REGION 1..1333: note = MG2-1 effector
MPTTNPYVITHVTKNWMKDEFYDSALVLGLDIGIEGIGVWLRKGREPLFARTFMVSLPEAAPLKNRRAKRAQRHARQSLRRREAMLREWVVRYGLLPQEKTDGRWWKNPAVFERAFEHRHRAITTGVASPECLVVCIRHLLRHRGFDYHLTDEGAFPWGDELDDKEIIQWAKNSCCAPEYRTHLCNLIEADAAWAKNSDGSFTEKYLKVRQALDDAVREYENRPVERMLEQHMSEKNHPHLRPRARGRNFARELVKQHLYAICEKHRHFFAPGTFDQAMRELLGDQTGPSQWKLTWMDQDGKARQTILDYHRRTREEAEELWKRKVKKCPFAPLLFEKRHPTTPQHDCAVRSDPRIRRFNLLMFLAERRIELETHDAEGRLQNPRVNLDANVVRDLLGDLEQDIRAVEALRNKQSASRPDKPGKKTFEQRWRICNDCGKETGQDETGKSSCCKAKTKPKMPLAGVAKGSFNADFFDQLGDLLRPELRSLKGRASLSGEAAEVLFKLVTRNGTDFEPARIRQALEDCGYYDWRTNLPAGLGIYPQVTFLLGNRGHYDKDGNPRQIDKTTGNPVHHGILRRLFAGQLRLDDGTLVGLKDKLDDKVVPDYVVIETIGEIPKNQKEKKEFQDEIKANRSRKTDIIEKKYGLKLDSLSDWQVKQVLLFDQQANEEGEAFSPYSGVSLGTNPLAHDLEVEHIYPERRGGISVMDNLVITWRTENQTKGDRTPWEWAKDEGWRVDVHLQKMHWSANKRALFVRQESDPPQWDNTTRMAQLARHLRAEVIHWLGLDQIQDQKERNKEIARRIGTPTGFQTSVCRESWTPPHVFPQMYRLLCDKKGVPVRDRNGQERWVKDRTNLRHHLWDAAVLSHIPPGVGLNSADCGGIFVHRRDPQNGEWSVSALADLGPDLVAFEKANADRCLVVRLRQRKSKKSRYKETIFSLPDQQNRVFAREPLSKVVTSLLKSKKKNPDAELRKLLDRPGLLNPLEITNKKTGQTKQIKLLNKADVERWLSCKDVSLDQEGFRKFIEDVGVPTEQIPDDAVKAAFMKRNGETLLRKTFKPNSLVSFIRQKCRIKDSEIEARVEIAIAERNERTVLRAANGRDGQPGQVIRSILIEQDKLPPCGFGLHFNPTAKPKRGSEVAGFKPVDNSNSVVYLRREIWIGQRTKKKGRKTTVETFYKSRLIPHPRHLASYQKLHGQPWKADPLPLGMKLAGKLAVGDLLRIPLKKEKRNRNDNLIAKRGETPLESRFYRVKSMKTNGTIEFQMAEFAEPKLVKGQIPDPATERLLETYELTCSNEADLLWLLEVTTGKRIKLPPPVVENAPTTGKREGELL

SEQ ID NO: 321 - protein, 1080 aa, unidentified
  REGION 1..1080: note = Description of Unknown: uncultivated organism
  REGION 1..1080: note = MG2-7 effector
MKQGQIAFSFDIGHSSIGWAAFQVSDAPGTFHSLLGTGVVLFPKDACLASARRGFRRSRRNIAARRSRIDRLKNYLAGLGVLSRDQLDANSNSYPWLLAARILASDGKKTLTWEELWSVLRWYAHNRGYDGNALWAGDDADAGDKEDTDKVKNSIALMEKHKTATMAETVCKALGLDPMGEVKASRIYFKGNNAAFPRGVVTEEVRRILAAHAGKLPKVDDALSDILLRNAATSGLELPARFKGGLLFGQYVPRFDNRIIPACRITGKNTPLKRCPEYLLYRWGRLLNNLTVFGADGQIRTLLPAERQALHSRMEADGFFTKRTLNAALKDVTGCTPANTESFFLTEEMEEALVLDPVKKLLATNQIMKDLWPQLSAESREKAQSSLSAGKKIRLGDILAEMETAGQDTTAASDALASHQKKAKKKNADLATRRLSADYPKGRAAYCREILAKTFDESISGKDSTKEGGCLYETEEIRNRLLREPLVQQTNNHLVRHRLLVFERLLAHMVEEFAGGDEKRIAATVVEVVRELQEFSGLNSKEITHKLNEKLGNFRSVVKNLEEAIANSEERVAITGSLIRKARILEDQGFVCPYTGTHLSYNHLLADRLEIEHIIPRSLRPSDALSSCVMTFRSVNDMKGQRTAMQFICEEQGREVPGHENIQITTKKAYVDYVAKHKKQYPQKSDDRRRCERRAELMLMERYDQRNADFTERDLTQTSHLNKMAIRLVKQRIGIDAKHLPGNVTAFIRQKLHIDECLFNAVPRLQTAAKGQPKSSKRKKKAEEAPVEPIQDDMPPRKLTKADIRELTYLHHAMDAVTQGLALLLFAPEDWPLLVKRNLPDSEQRHLKARYPFLDFSADKHISIQDLPEDTLHTISERLAECRVVRHIPAKMHGIIVDQTTWGTVAAGAITTLRQKTTEKNARCDENGKRFIKTTEKKRSLLLGGPDAPDGKLAKIKGAILVTENWGCALDPSPTVIPHFKVYPQLRALREKNGGRPIRILRKGSLIQVKAGTYQGIWSVASIKDNADGICLDINAADKVKLENRSDDSKINVRLDSLRKSGLKILKPKLTGACPTTSSP

SEQ ID NO: 322 - protein, 1471 aa, unidentified
  REGION 1..1471: note = Description of Unknown: uncultivated organism
  REGION 1..1471: note = MG2-3 effector
MGNRADLELAFDVGHSSIGWAVLKTQPELEMKGCGTVIFRPDDCLASKRRDYRRQRRHIRSTRLRIERMTNLLLGIGAITQSDVESGKKQHKGEPPPWLLAARVLAARTETEKAKALLTWPELWKVLRWYAHNRGYDANVRWSGESKVEAFSPSPQINTEDVEEQAVEAEESELADVEVAEDSDSDSDKLRAGKHLMSSKYGFHTATFAETVAKILLGPKRDVKPGQAGKTGKLAETTESFSESDFRKLLFDTPTESWSHPRHLSIYFKGIRAAFPRRIVKVIGGQRTLVGGTEWEVRAILRAHFDAPKGKALCDETFEAAICGRLPETREDWRAYAETHPTLYLSSDDQAKLRSLRAPPKASQEKSERIRQQRRNILTGKLFLPSRYEGGLLFGQLGTRFFNRIISRCPFSFARIVAAILSGDENTLRLYGTTLAAVNRSRHSRNGVMETDLDLARRWAAKLSKVPAAKSREFLLYRWAMTLANVIVARPGRERLTGYERRCIHRRLRRTGYFTKDSFKEAVRQTTGCEPANLDQMFDTTTEAENSLFIDPVRKYLATNEVAGVVLPVLSQFLQVRLARLLQKGKGVRVREIAEWLDETAKRELSQRIEQYVQENNAKAKAAKKKPHDTHSPDEDRRKKQNKLTAAAVLRVRLEAPLPKGRASYHRVVLRKAVAEVLKGFDPRKPKRDRSNTDGENKPSHGCLFRTPETNRQLLGNPNNEAEYERWKQRWLSHQKNYQRYIARERLSPGSGEAFVRSEYHAAQSYRWLASQSNNHIVRHRLTILDRLLRDIIADQNYCAGDPKRIRRISIEVANDILTFSGLERKQLSGQVMPSLREHHDHVVRLLQQELKGTQWENKIDGELIWKAKIADDLGWWCPYTGKKYSPCELASGEMDVDHIIPKSRRLTNAMSAVVVTFKTINNLKGDLTAWEFVERYQDQPVGPHGEKVRKLWDYERFVKNPDNEMDKPRLSGETGHSDYPRWPKYLPGSRRKLHPDYVRRKLRRRYLLLKHYEKDKDTFTPRDLTITSHLNRLAQQVLLRSLPHLAEHQITAIPGSVIGVLRDAPGWRLLGCLDGAATADVIRKVLQLDHEGKPMCASDVAPLMKRIPKPKGEIRELTHLHHAVDACAIAIINHLLPKDGKLWELVAKRELTDADKNAYDDLRQKNQSQWQPRRLARLFSIVPNLDDKGQQPKHDHKWRIRPCRLKDVLPDIGAQVNKCLRERRVVEHTPADMSGLAAEETVWRIFDPSDNHPSARRLKQWFEKKIKDGEIQKLPDPTNEADKTVLIVCRKRRDAKSNDKGKTLHDTGNVWRWVYDEVNKVRVVGLNPGKLHRIKAVKLIRENFGIALDPEPTIVPFHKVWQRLMELKAKNGGKMPRVLRNGQLIRVLSGSRAGLWRVTSVKQTEAYGLVLDLAYPDSVHLSRPNAPVEQLLKEGLEILKHSLTGYDASVVAYAPVKRRPRKPKAAQSEQ

SEQ ID NO: 323 - protein, 1196 aa, unidentified
  REGION 1..1196: note = Description of Unknown: uncultivated organism with predicted taxonomy: Verrucomicrobia
  REGION 1..1196: note = MG2-5 effector
MNNKMKIPTMKIAASKADLQLAFDVGHSSLGWAVLQTTPEKASSIELLGCGVVTFRADDCLASARRGYRRQRRHIRSTRQRIKRMKTLLIHLGVLTKAQLDQPGCAWPWLLAARVLHGGKLLSWPELWDVLRWYAHNRGYDGNRRWTKQEVTPDESTDFDDSELERILSDATATEDEKSDAEKVKEAKILMRSHGVKTMAETFCAICGLDPLGQKKSCNLPGDKRPKAMNAAFPRAVVEGEVRRIMRAHFGGKLPKVDEALERMLLGLNSQDKVAWRAIPCPGLKLPKRYQGALLFGQLVPRFDNRIIATCPITHYQEYQRALGAIRDNDPAYLKKHSVNLDNHDPSWWAKHIADKLAKVPSRDCVEFMNFRWGMQLANIRVARFGEKELSPLKVEERKQLDDMMRAAGAMGPGEFKKSVRHVTSAIRDNLDTMLMHPDAKDALVLDAVQKLIRSDDLESIWKLLPERLQKRTRGRWRQGWRISFADLRRQLAELGGDTEAFDAELTRQVDAANVNLKKKGKQTTREELLKKPFFVKKLGQRAAFARHLLKQAYEEVMAGSHPKEKDGCLFISEEMREAQLQREIAQQTNNHLVRHRLLILTGNEKAKPHPKEGLLQHIIKEYAGGDGTRIGKITIEVNRDLREMSGKSNYDKQADLNNRVKNHHSVVEYLHEHLPAKYHNRINGSLIRKARVAADLDWKCPYTNEAIQPIHLITKVVDLDHVVPHALRPSDGLDSLVVTFCAVNKMKGKRTAWQFIKDEETRSVSYRNEQGKEEKVDGMPNLKIRFFSDYKKFVDDLKIKAKGEHKADAERRERRQQLLRLANYEEKAFLPRDLTQTSQLVRLAAQALRRNLPHLGPENVVSLPGSVTGMVRKSWNVTGCLELACPQVMEEVVDQDGKAVRRAKDKGEIRGITHLHHALDACVIGFSSHFIPNNGGLWELMVKRRWTPAEEKELEARRVFSKGMDGRFQMTDLHKRHKEAIRQRLAEKRVVQHIPARMDGLRVEQNMWRVVSVKDGEATLRQRIRHVDGSRPKKAGTEKKTKLLGLEPGKLQTNKGVLIIPDNFGVALVQPEPVIVPFHKVWVRLRDLKKVNSGTKPEIIRNGQIIRIAEGKYKGVWRVFSAKNNSTGMALDIGLPDVVRLKNKTEGHKINVLLSSLVKNGIEAIKAPLTGVPVSAGKGESHSSPLEPRQSSNAS

SEQ ID NO: 324 - protein, 1119 aa, unidentified
  REGION 1..1119: note = Description of Unknown: uncultivated organism with predicted taxonomy: Verrucomicrobia bacterium
  REGION 1..1119: note = MG2-6 effector
MQVENFLNKVENRELEVAFDVGHSSIGWAVLSRKTSQESQNVAEYFYPEIIGCGVVIFEPDTCLAKKRRDYRRQRRHIRSTRQRIKRMKSLLQHLGVLTEAELDKPGNSSPWKLAAKVLQNSGLLTWQELWDVLRWYAHNRGYDENRLWSETLPDDEKEESKRVENARKLMAQFQCGSMAETVCKMLGVDPLSTDKRSSHLRYKGTDIAFPRNVVVREVREILKKHIGKLPQVSEQLVETLTGDKENSWKTIPCPSINLPKRYYGSLLFGQLLPRFNNRNIARCPISGEKLPLKECVEFYRYRWAMLLCNIRVKVNGSKERPLNVNEREYINGIMEKKGFFTKHELRIAVNDAVMQTLKNENYNGTPVILTNISAMFLTEDMEKALTLYPVKKIINSEKVQVFWNIIPERLQKRISGLWRKGKQITPQEFRNQLEKISPEKLLDFDNAVEEFLKKNRKEKNYLESKIPDSPLKDLQGRAPFSKAILKKAYEEVLSGRDPREEGGCLFRSEEIRLRELNKKITEQTNNHLIRHRLLILERLFDDIVKEYANNDKNRIGQVTIEVNRDLREFSGMTAKEIASELTKITSDHRKAVQYLEENLKGKPYKITASLIRKTRIAMDLDWTCPYTGQKYDIYDLLEKRVDLDHIIPQSIRPSNSLESLVITFPEVNRFKAQRLAFQFVKEEQTKTVKGLPNLQIRTLENYKNWGENLKESRFDRNKSPQSKRKKLLLLPEYVQEEFLPRDLTQTSQLVRLAAQVIRKKYVDSKEPKIVSMPGSVTAVFRKSWKVMGCLSKAVPAILDENGEVRPKDEIRNITHLHHAIDACVLALASHLFPNNGRLWELLVKNKLNSSEVDELKKIPLVQVGVDNKINISDLPEFIKEQISNRLLERRVVQHISKDMSGLKCDETVWRVVDQNCDNSYGKKLLRWCKEMNVEIPAPDSDSVLIVSRKRKDKGTTKPTKILHESQSFWWQYDIVKKSKVIGLNPENGDGKLKKLKAVKIIGDNWGLALDPKPQIIRAFKIYQQVREIKNANDGKPPRIIRKGQLIYVPNGRYKGLWKVFSVKDKKTGIYLDIGEVDQVSLRSERKSAKENVDVRTLMKNGLRPLSTPYTGINACLIT

SEQ ID NO: 325 - protein, 1056 aa, unidentified
  REGION 1..1056: note = Description of Unknown: uncultivated organism with predicted taxonomy: Verrucomicrobia
  REGION 1..1056: note = MG2-8 effector
MASRRNAPDLQLAFDVGHSSIGWAVLQANPDVEIAGCGVVIFRADDCLASARRGYRRQRRHIRSTRQRIKRMKALLLHLGVLTQTQLDKSGCAWPWKLAARVLVGGKTLTWPELWDVLRWYAHNRGYDANRRWSAAEAEAEKEDTEKLENAKTLMDKHGVKTMAETFCKELGVDPRGAKSSSMTRFKGLNAAFPRGVVEAEVARILQAHFGKLKGADEKFAAALFSDWRAIPCPKIKLPQRYQGGLLFGQLVPRFDNRIISICPISGQKVPSRNTPEFLNFRWGMLLANVRVARLVDRELKPLTVEERRELDRLTRAEGAMTAKQFTDAVEKVTGAIRHNLATMLMHPDAKDALVLDPVQKLVTTGHRAALWPTLPERIQKRARGQLRRGKPVTLGDLGNEVPAFHAQVQSILDKTAGRGRKKDKALTRDDLLREILQVRKLDGRAAYSRPILRKAFEQVMDGKHPAEDGGCLFVTEQTRQAQLSRSLTQQTNNHLVRHRLLILSRLLNAIVKEYADGDKTRIGKMTIEVNRDLREMSGKTAKEVAQDLGLRLANFKNVVKKLEGDESFMRELNQRGLHHIPPGIIRKARVAEDLGWRCPYTGMEYEPVHLLTRRVDKDHIIPHADRASDSLDSLVITFSAINAMKGKRTALQFVNEEQGKTVEDLPNLSIVSVNRYREFVEGLEAFRGHDDDRRRKKRRKDLLLLPSYEEKEFTPRDLTVTSQLVRLGALTLKREFADVKQPPVIVSLPGAVTGEVRKAWDVLGCLGLACSQVLDVEGKPKTKTEIRDITHLHHALDACVLGLASHFIPNNGRVWELITKRNLTSAEQKELIALNVFATGPQGRVQLRDLRPERKEQIRQRLAEKRVVQHIPKRIAGLRVEQNTWRVRGSKDGDVTLQQRIRQPDGKRPLKQAVERASKLIGLEDGKLHRLSGALVVGENFGVALDPQPTIIPFHKVWPRLQELKKANGGKLPRVLRNGQIIYIPKGTYSGVWKVFSAKNNKSGMALDMGRPDVVRLRNKTDGHKINVLLSSLLKDGMTIVDAPLTGVSSAPKQS

SEQ ID NO: 326 - protein, 985 aa, unidentified
  REGION 1..985: note = Description of Unknown: uncultivated organism with predicted taxonomy: Verrucomicrobia
  REGION 1..985: note = MG2-10 effector
MKALLLHLGVLTQTQLDKSGCAWPWKLAARVLVGGKTLTWPELWDVLRWYAHNRGYDANRRWSAAEAEAEKEDTEKLENAKTLMDKHGVKTMAETFCKELGVDPRGAKSSSMTRFKGLNAAFPRGVVEAEVARILQAHFGKLKGADEKFAAALFSDWRAIPCPKIKLPQRYQGGLLFGQLVPRFDNRIISICPISGQKVPSRNTPEFLNFRWGMLLANVRVARLVDRELKPLTVEERRELDRLTRAEGAMTAKQFTDAVEKVTGAIRHNLATMLMHPDAKDALVLDPVQKLVTTGHRAALWPTLPERIQKRARGQLRRGKPVTLGDLGNEVPAFHAQVQSILDKTAGRGRKKDKALTRDDLLREILQVRKLDGRAAYSRPILRKAFEQVMDGKHPAEDGGCLFVTEQTRQAQLSRSLTQQTNNHLVRHRLLILSRLLNAIVKEYADGDKTRIGKMTIEVNRDLREMSGKTAKEVAQDLGLRLANFKNVVKKLEGDESFMRELNQRGLHHIPPGIIRKARVAEDLGWRCPYTGMEYEPVHLLTRRVDKDHIIPHADRASDSLDSLVITFSAINAMKGKRTALQFVNEEQGKTVEDLPNLSIVSVNRYREFVEGLEAFRGHDDDRRRKKRRKDLLLLPSYEEKEFTPRDLTVTSQLVRLGALTLKREFADVKQPPVIVSLPGAVTGEVRKAWDVLGCLGLACSQVLDVEGKPKTKTEIRDITHLHHALDACVLGLASHFIPNNGRVWELITKRNLTSAEQKELIALNVFATGPQGRVQLRDLRPERKEQIRQRLAEKRVVQHIPKRIAGLRVEQNTWRVRGSKDGDVTLQQRIRQPDGKRPLKQAVERASKLIGLEDGKLHRLSGALVVGENFGVALDPQPTIIPFHKVWPRLQELKKANGGKLPRVLRNGQIIYIPKGTYSGVWKVFSAKNNKSGMALDMGRPDVVRLRNKTDGHKINVLLSSLLKDGMTIVDAPLTGVSSAPKQS

SEQ ID NO: 327 - protein, 952 aa, unidentified
  REGION 1..952: note = Description of Unknown: uncultivated organism
  REGION 1..952: note = MG2-11 effector
WTAADIETLKEDTEKEENAINLMQKNGLTTMAETFCKELGIDPLGSKKSSIVRFKGFNAAFPRKTVEDEVRRILRAHFNKLEKANADLERALLGRDRNDKLAWQAIPCPNLKLPARYQGGLLFGQLIPRFDNRIIVRCPITGQKVPTRHCAEFLNFRWGMQLANIRVACGGERWLHPLNVEERKAIDARMREQGSMTEGELKKAVRTNTGCSRDNLDTMLMHPDAKGALLLDPVRKLTKSEKLKTLWPLLPEPVQRRAANMWRRGKAITLLALRDRIETAGSSPAAFDAEVERLLDAANTKKRRKDQPITREELLAEPLVVRPLDGRAAYARRILRQAFEEVMAGKHPTKEGGCLFRSEEIRAAQLQCRVDEQTNNHLVRHRLLILERLQSDIIKEYANRDPARIGRATIEVNRDLREISGKTAKEKAQELGQRLANFKSVTKKLEEAFEGRNVHISPGLIRKARVAEDLGWTCPYTGQRYDPLDLLNAKVDKDHVIPRTERASDSLDSLVITFPAVNKWKDKRTALKFIEDEQGQPVLDMPNLSIKTFAQYEADVKALRPSFDPRPAKRDGRTKGPIDDDLRRWNRKQLLLNVRKWEEKEFLPRDLTQTSQLVRLGAQILKKGFTGLERQPVITSMPGSVTGVMRKGWNLIGCLSAANPNVLDEIGQPKIKTEIRDITHLHHALDACVLVLASYFIPNKGAVWELIVKRRLDETEQLQLRTATRGIFNFSPGRRFGLADLPNSLKEQIRQRLAERRVVQHVPSEMTGLRTEENSWRVVGIENGEALLRQRIRQPDGSRPVKEMRERTEKLIGPEPRNRTGKLKRNKAALIISDNYGVALDPEPTIIPFHNVWKRLAELKQANGGRPPRVLRNGQLIVVPNGKFKGAWKVFSAKNNKSGMALDIGWPDVVRLRNKVEGHKINVLLASLLRSEMRLAKTPLTGMAACPSTSSA

SEQ ID NO: 328 - protein, 829 aa, unidentified
  REGION 1..829: note = Description of Unknown: uncultivated organism with predicted taxonomy: Verrucomicrobia bacterium
  REGION 1..829: note = MG2-12 effector
MNAKRKNEVAGGTKPDLQLAFDVGHSSLGWAVLQTGEANSFEVSLLGCGVVTFGADDCLASQRRAYRRQRRHSRSTRQRIVRMEKLLLYLKLIEPQQLATKHQQAGGHPAPWLLAARILASNGDPRYLLDWPELWDVIRWYAHNRGYDGNARWANACDRALSDAEQEEKKADTEKEKKADELMENYGKKTMAETVFADLFAPFHLNDPTKVSSLPFFQRRFKANQCAFSRETVEAEVARLLDAHTGNLKGCNKQFIRLLLTRKLMGEDRGMLSEAGIRLPKRFEGGLLFGQLVPRFDNRIIAACPVTGEKVPNKHCLEFLEFRWAMTLANIGVGFGTETYRNREGNESTLRPLTGDERRKVDARARRLGFLKAEPDRPGKDGLVRSGRNELREIVVAATNCDRHNLDTLLLHPDAREGLRLLRVKGDTTAFRVAWGSFGDPLDIQGHYHDDPLRHRFTTQLLRLKKLNLRSILSELERLGKVEVALCLRAAAELQAKGKKVKLDPIKLDGLLDAEFSCDKLKGRARYSRAKLAQAVQEVFNKSEPIHPLQKGGCLEQTNEIKQAALDKPMDQQTNNHLVRHRLLILKRLQEHLFNDYADGDKLRVSRITVEVARDVQTTSGMTNKEKAKELGSKIKHHHETAAWLAERLEDERDENGRRFVIGPSLIRKARIADDLGWECPYTGRKFEPADLIHRRYDKDHIVPRSKRLSDALEAMVITSCEVNREKKNRTALQFIKDMNLPENRAVRERLNIRTEAQFREFVDELKAKGSHADDVRRRKRRKELLLVQKYEEKEFTPADLTKTRFINKLAAQQLQAAFRDLPEQQRPP

SEQ ID NO: 329 - protein, 1083 aa, unidentified
  REGION 1..1083: note = Description of Unknown: uncultivated organism with predicted taxonomy: Verrucomicrobia bacterium
  REGION 1..1083: note = MG2-13 effector
MNTTASPDTTSKKSIGDLSLAFDVGHSSIGWAVLQNIDASAPSILGCGAVIFAADDCLASQRRTFRRQRRHVRSTRQRIARMKALLAHLGVLSREQLDQPGCAWPWQLAARALCGGPLLNWSELWDVLRWYAHNRGYDGNRRWSAADIEMLKEDTEKEENAINLMQKNAVTTMAETFCKELGVDPLGSKKSSTVRFKGFNAAFPRKTVEDEARRILRAHFGKLEKVNTDFKRALLGRDTNDKLAWQAISCPDLKLPKRYQGGLLFGQLVPRFDNRIIMRCPITGEKVPTRHCAEFLNFRWGMQLANIRVASGDGRELRPLNVEERKATDAQMREQGSMTEGELKKAVRSVTGCSRDNLDTMLMHPDAKDALLLDPVPKLTKSDKLKPLWPVLPERVQRRAANIWRRGKAITLLGLRERIQMAGGSLATFDGEVERLLDAANTKRRRKVQPITREEFLAEPLVVRRLEGRAAYARLILRRAFEEVMAGKHPKEEGGCLFRSEEVRAAQLQRRIDEQTNNHLVRHRLLILERLQRDIVKEYLGGKSAHIGRVTIEVNRDLREMSGKTAKEKAQDLGQRLANFKNVAEKLEEAFEGKDVHISPGLIRKARIAEDLGWTCPYTHHSYDAFQLLNRTVDKDHIIPRTERASDSLDSLVITFSAINKWKGKRTAMKFVEDEQGNPVPDMPNLSIVTLTHYKAFVEGLDTFRGHDDDKRRKKNRQRLLLVRDYEKPEFTPRDLTQTSQLVRLGAQVLKKGFTGLERQPVITSMPGSVTGVMRKGWNLIGCLSAANPNVLDEIGQPKIKTEIRDITHLHHALDACVLALVSHFIPNNGGVWELIVKRRLDETEQLQLRAATHGIFNFSPGRRFGLADLPDSLKEQIRQRLAERRVVQHVPTEMTGLRVEQNAWRVVGIADGEALLRQRIRQPDGSRPVKEKRERTEKLIGPEPHNGTGKLKRNKAALIIPDNYGLALDPEPTIIPFHKVWTRLQDLKGANNSKTPRVLRNGQLIRVAESAGEYKGIWRVFSTKNAAVGFLVDMGRPDVVRLKNGVEGHKINVRLSSLLKHGVELVRSNYAGMAACPSTLSA

SEQ ID NO: 330 - protein, 1077 aa, unidentified
  REGION 1..1077: note = Description of Unknown: uncultivated organism with predicted taxonomy: Verrucomicrobia bacterium
  REGION 1..1077: note = MG2-14 effector
MSLALSFDIGHSSIGWAVLDVKGKDPEIVGCGSVVFPAEDCQNQQRASFRRQRRHIAATRNRIKRLEAFFVASGVLSEKDIWECRRRPHPWPWLLAARTIVSGQTLSGVELWAVVRWYAHNRGYDGNALWAGEDSNQDDVMKVQAARQLMDKCGTETMCETICSLLEADPRSDSNPKPKHYFKGENAAFPRQTVTDEARSVLELHIAKIDGVNEAFVSALVDEWRRAKSAGFDVKLPQRYCGGLLFGQLKPRFENRIIPKCRLTGEKTPSKHSREFYRYRWAMFLNNLRVHDLMTGFSRPLDSNERVKLDGIMREAGYFTKTTLTKALVKELQLEPANLEAMLLLPEMENALTLDPALREVSTNKILKTIWPCVDNVWQRVFLNQLFHERRFRGQPVSLNQWRDRLLSDGKSVEDFDKALQSAFETEASFLWNKKNLKVTFEQFLSRPICLTSKHVASGRAPYSKSKLRAAVDAVMQGEDPRMIGGPLEETIEVGQRQRDKEIDQNSNNHLVRHRLKIFARTLNDLVARYASGDASRVNWFAVEVVRDLVQFSGKTAKEKSQILGQQLWHHRKIVSYLEEERENTNGTWDINAGLIKKVRIADDMGWQCPYTGKTYSLNDIIHGEVDREHIIPRSSRPTDALHALTLTFRQINKEKGARTALQYIEDTRGESHTFSPKEFREFVGGLKNKNGPAKDDEVRCKKRKIALLTPIYERRGKVKQTDTGEEVLEAFTDGTLSQTSYLNKLAVQQANHWFRQQLGLDTKLPLVIQLSGSVTAAIRTGWDLFGQLNEVCPATRNKTKTEVREITHLHHALDAIVIGLSAHYFPRDKRLWSLMSRRAVKNSVDQAYMKQQLGDLVCFNSDGKWKLQELDIGIKKQVAARLSEKRVVRHNPRTMRGLRVQQNVWRVEGEDPQDDSKLLISMRPRNEEGSKGFSKQRSEKKSKLLGPSPNIGSGKLKELKGALIVEDNFGLALLASGPVVIPYIGVWKRIKELTQMNNGVRPEILRNGSIVEIPKQEGKPYKYEGRWLVRGIDNSAQGMRIKFDTVDGVGGIAFKSFINPLLKRGMRILSADLSGE

SEQ ID NO: 331 - protein, 1079 aa, unidentified
  REGION 1..1079: note = Description of Unknown: uncultivated organism with predicted taxonomy: Verrucomicrobia bacterium
  REGION 1..1079: note = MG2-15 effector
LRMSLALSFDIGHSSIGWAVLDVKGKDPEIVGCGSVVFPAEDCQNQQRASFRRQRRHIAATRNRIKRLEAFFVASGVLSEKDIWECRRRPHPWPWLLAARTIVSGQTLSGVELWAVVRWYAHNRGYDGNALWAGEDSNQDDVMKVQAARQLMDKCGTETMCETICSLLEADPRSDSNPKPKHYFKGENAAFPRQTVTDEARSVLELHIAKIDGVNEAFVSALVDEWRRAKSAGFDVKLPQRYCGGLLFGQLKPRFENRIIPKCRLTGEKTPSKHSREFYRYRWAMFLNNLRVHDLMTGFSRPLDSNERVKLDGIMREAGYFTKTTLTKALVKELQLEPANLEAMLLLPEMENALTLDPALREVSTNKILKTIWPCVDNVWQRVFLNQLFHERRFRGQPVSLNQWRDRLLSDGKSVEDFDKALQSAFETEASFLWNKKNLKVTFEQFLSRPICLTSKHVASGRAPYSKSKLRAAVDAVMQGEDPRMIGGPLEETIEVGQRQRDKEIDQNSNNHLVRHRLKIFARTLNDLVARYASGDASRVNWFAVEVVRDLVQFSGKTAKEKSQILGQQLWHHRKIVSYLEEERENTNGTWDINAGLIKKVRIADDMGWQCPYTGKTYSLNDIIHGEVDREHIIPRSSRPTDALHALTLTFRQINKEKGARTALQYIEDPRGESHTFSPKEFREFVGRLKNKNGPAKDDEVRCKKRKIALLTPIYERRGKVKQTDTGEEVLEAFTDGTLSQTSYLNKLAVQQANHWFRQQLGLDTKLPLVIQLSGSVTAAIRTGWDLFGQLNEVCPATRNKTKTEVREITHLHHALDAIVIGLSAHYFPRDKRLWSLMSRRAVKNSVDQAYMKQQLGDLVCFNSDGKWKLQELDIGIKKQVAARLSEKRVVRHNPRTMRGLRVQQNVWRVEGEDPQDDSKLLISMRPRNEEGSKGFSKQRSEKKSKLLGPSPNIGSGKLKELKGALIVEDNFGLALLASGPVVIPYIGVWKRIKELTQMNNGVRPEILRNGSIVEIPKQEGKPYKYEGRWLVRGIDNSAQGMRIKFDTVDGVGGIAFKSFINPLLKRGMRILSADLSGE

SEQ ID NO: 332 - protein, 1137 aa, unidentified
  REGION 1..1137: note = Description of Unknown: uncultivated organism with predicted taxonomy: Verrucomicrobia bacterium
  REGION 1..1137: note = MG2-16 effector
MKTSHSSPDLELAFDVGHGSIGWAVLQNGSQTQIKGCGVVIFRPDDCLASKRREFRRQRRHIRSTRQRIKRMKLLLAHLGVLTQEQLDKPGCAWPWKLAAQVLVGGPTLTWPELWDVLRRYAHNRGYDANRRWSTIEIDLDEEQEDTEKLKTAEGLLKKHGVRTMAEAFCKELGVDPLGSKCASKVWFKGVNAAFPREVVEAEVRSILRAHFGKLKAVDELLEKALCDDWRAIECPAIRLPKRYEGGLLFGQLIPRFNNRIISKCPITGKKVPSRNCPEFLKFRWAMLLANVKVAGTADRELRPLTVAERQAVDAKMREKGALTAEEFKHAVRTASGCSRDNLDAMLMHPDAHEALLLDPVQRELSRDELIAALFAKLPVRIQKRARGQLRRGKTITLGQLRDQAIALGESVEAFDNELNRLLEAATIRRRRKKDAALTAESVLKRSLYVEKLTGRAPYSREILVKAYEEVMAGKHPAEEGGCLFVTDQMREAQLQREIDEQTNNHLVRHRLKILDRLLRDIITEYAGNDKTRIAKITIEVNRDLREMSGKTAKEKAQYFRLLTADHHRVAEKLKKALAGQTVDGKPIRISASRIRKARVAEDLNWTCPYTGQKYEPIDLVTERVDEDHIVPRSQRMSDSLESLVISFSAVNKWKGKRTAMRFIKEEQGKPVPGLPNLSIVSLNRYLEFVDSLPPRNDPRKLKRHLKLLQPIDDDLRKWRRKELLKLEEYEQEEFTPRDLTQTSQLARMAAQMVKRTFQDVEQKPVIVSMPGSVTSTVRKGWDLLGCLSKACPEVLDETGQVKTKSEIRDITHLHHALDACVLGLAAHFIPNNGDIWKLIIKQDLNETEKDLLRPLGIFDIGEKRFRLKDLPNELKNQLRERLAELRVVQHIPKRMTGMRVDQTVWRVFDPQDQHPSARRLARWFKKAGVNVPAPDADTVLIVCRKRRSQPDSETGKTLHETKTWRWVYQEIAKSKLIGLQPRPGSEGRLKKLKAVKILADNYGVALDPEPQIIRFHKVWPQLNELRQKNGSKPVRVLRNGQLIRVPRGTYAGIWRIVSTKSTEAFGLALDLALPDRVKLTRGNVPIKRLIEDGLEVVDCPYTGVDASKIEFAPVKKRPRKSKTAPAETTTPPSSSA

SEQ ID NO: 333 - protein, 1471 aa, unidentified
  REGION 1..1471: note = Description of Unknown: uncultivated organism
  REGION 1..1471: note = MG2-17 effector
MGNRADLELAFDVGHSSIGWAVLKTQPELEMKGCGTVIFRPDDCLASKRRDYRRQRRHIRSTRLRIERMTNLLLGIGAITQSDVESGKKQHKGEPPPWLLAARVLAARTETEKAKALLTWPELWKVLRWYAHNRGYDANVRWSGESKVEAFSPSPQINTEDVEEQAVEAEESELADVEVAEDSDSDSDKLRAGKHLMSSKYGFHTATFAETVAKILLGPKRDVKPGQAGKTGKLAETTESFSESDFRKLLFDTPTESWSHPRHLSIYFKGIRAAFPRRIVKVIGGQRTLVGGTEWEVRAILRAHFDAPKGKALCDETFEAAICGRLPETREDWRAYAETHPTLYLSSDDQAKLRSLRAPPKASQEKSERIRQQRRNILTGKLFLPSRYEGGLLFGQLGTRFFNRIISRCPFSFARIVAAILSGDENTLRLYGTTLAAVNRSRHSRNGVMETDLDLARRWAAKLSKVPAAKSREFLLYRWAMTLANVIVARPGRERLTGYERRCIHRRLRRTGYFTKDSFKEAVRQTTGCEPANLDQMFDTTTEAENSLFIDPVRKYLATNEVAGVVLPVLSQFLQVRLARLLQKGKGVRVREIAEWLDETAKRELSQRIEQYVQENNAKAKAAKKKPHDTHSPDEDRRKKQNKLTAAAVLRVRLEAPLPKGRASYHRVVLRKAVAEVLKGFDPRKPKRDRSNPDGENKPSHGCLFRTPETNRQLLGNPNNEAEYERWKQRWLSHQKNYQRYIARERLSPGSGEAFVRSEYHAAQSYRWLASQSNNHIVRHRLTILDRLLRDIIADQNYCAGDPKRIRRISIEVANDILTFSGLERKQLSGQVMPSLREHHDHVVRLLQQELKGTQWENKIDGELIWKAKIADDLGWWCPYTGKKYSPCELASGEMDVDHIIPKSRRLTNAMSAVVVTFKTINNLKGDLTAWEFVERYQDQPVGPHGEKVRKLWDYERFVKNPDNEMDKPRLSGETGHSDYPRWPKYLPGSRRKLHPDYVRRKLRRRYLLLKHYEKDKDTFTPRDLTITSHLNRLAQQVLLRSLPHLAEHQITAIPGSVIGVLRDAPGWRLLGCLDGAATADVIRKVLQLDHEGKPMCASDVAPLMKRIPKPKGEIRELTHLHHAVDACAIAIINHLLPKDGKLWELVAKRELTDADKNAYDDLRQKNQSQWQPRRLARLFSIVPNLDDKGQQPKHDHKWRIRPCRLKDVLPDIGAQVNKCLRERRVVEHTPADMSGLAAEETVWRIFDPSDNHPSARRLKQWFEKKIKDGEIQKLPDPTNEADKTVLIVCRKRRDAKSNDKGKTLHDTGNVWRWVYDEVNKVRVVGLNPGKLHRIKAVKLIRENFGIALDPEPTIVPFHKVWQRLMELKAKNGGKMPRVLRNGQLIRVLSGSRAGLWRVTSVKQTEAYGLVLDLAYPDSVHLSRPNAPVEQLLKEGLEILKHSLTGYDASVVAYAPVKRRPRKPKAAQSEQ

SEQ ID NO: 334 - protein, 1003 aa, unidentified
  REGION 1..1003: note = Description of Unknown: uncultivated organism with predicted taxonomy: Verrucomicrobia
  REGION 1..1003: note = MG2-18 effector
MKTLLRHLGALTQEQLDKPGCAWPWKLAAKVLVSNGAHTLSWPELWDVLRWYAHNRGYDANRRWSGAEVDAQEEQEDAEKLKTAKNLLQKHGVQTVAETFCKELGIDPLGQKSASTVRFKGLNAAFPREIVEEEVRRILRAHFGKLKGVDENLERALCGRDSRDKDAWQAIPCPDIHLPERYEGGLLFGQLVPRFDNRIISKCPITGQKVPARNCREFLEFRWAMQLANVKVAATGNGPLRPLTADERRQVDTKMREKGALTPTEFKEGVRVATGCVRDNLETMLMHPDAREALTLDPVQKALTSDERIAALFAKLPARIQKRARGQLRRGKTITLGQLRDHALAVGESVTDFDEELGRQLNAAAAKKRKKDAGISRESLLARPLHVEKLSGRAAYGREILRKACEEVMAGKHPKEEGGCLFVTEQVRQAQIQRDIDQQINNHLVRHRLKILERLFHDIIAEYAGGDKSRIGRITIEVNRDLREFSGKTAKEKAQDLGLRIADHHRVAEKLQKALAGQTLNGQPIRIGPALIRKARIAEDLGWTCPYTGQKYEPIDLVTRRVDKDHIVPRSQRASDSLDSMVITFSAINKWKGKRTALKFVEDEQGKPVPDLPNLSIVSLSRYRDFVEKLDTFKGHDQDKKRKKRRKALLLVRDYEEEEFTPRDLTQTSQLVRLGAQMLKRPFLREKHQPVITSMPGSVTGEVRKGWNLLGCLSKACPQVLDENGEVRTKTEIREITHLHHALDACVLGLAAHFIPNNGRIWELIVKRNLTDTEKLQLRALGIFDFSPEGFRLKELPDELKNQIRERLAERRVVQHVPKRMTGLRVEQNAWRVVKIEGDEAIIRQRMRQPDGSRPVKETTERVTKLFGLNPVGGSGKLKALKAALIIPENFGIALDPEPTIIPFHKVWPRLQELKKANGGKWPRVLRNGHLIHVPKGRYQGTWRVFSAKNNKSGMAVDMGWPDVVRLRNGVQGHKINVLLASLLRDGMTILDTPLTGVASPVR

SEQ ID NO: 335 - protein, 1125 aa, unidentified
  REGION 1..1125: note = Description of Unknown: uncultivated organism with predicted taxonomy: Verrucomicrobia
  REGION 1..1125: note = MG2-19 effector
MQEKILSTKDGGKNLEVSFDVGHSSIGWAVLKSPDKNGENNPEFPQIELLGCGVVTFEPDTCLAKKRRDYRRQRRHIRSTKMRIKRMKQLLEHLKVLTPSELEKPGSPYPWKLAASVLQGKHLLNWNEIWDVLRWYAHNRGYDENRHWSEVAEKDKDDTESVKKSIELMKEHQTKTMAETICKELGTDPSESDKRASHKSYKEVGAAFPRSVVVNEVREILDKHIGKLPGLSQELVETLVGESKDAWKTIPCPSINLPSHYWGSLLFGQLLPRFNNRNIKKCPFSGDTLPLKECVEFYRYRWGKILTNIRVSANGLFGQKRPLNPEERKYVDSKMRELGSMTETELQKAVEEAVLMTLNKEGILKPGKINTNLETMFLTPEMEKGLVLDPVKNLINSDTVQSFWGVLPPQLQKRLTGKWRRGKQIKIGEIQKELEKIAPEKVEEFISTIKKNLKGKNKNQNYLEIKIPDSPLKQLKGRAPYGRKLLQQAYEEVLEGKDPHEKGGCLYRAENILKEEIQEDIEKQTNNHLVRHRLLILERLFDDIVKEYAGNDKNKIKLITIEVNRDLREFSGMTAKEIESELNARSADFKKAKKQLEDMLLKAGLSNTRITATLIKKARIAQDLDFTCPYTGAKYELIDLINKQVDLEHIIPKSKRPSDSMESLVITFKEVNRWKGNRTALRFIKEEQNKPVQGKGNLMILTEKRYQELVNGLNTKGHPKDTERKKKRKELLLMEDYVEEEFLPRDLTQTSQLVRLAVQVLKKKYIGEKEKPVFVSMPGSITGKFRAAWNLLGCLLKAVPWAADEDNQVKPKDELRNITHLHHAIDACVLALAGHFIPTYKNGKVWELMIKGTVKPSEKSYIEDVPMLQLDSENRLHIKDLPDSIKEQITERLYERRVVQHIPKDMSGVKCDETIYRVVDPNDNHPYAKKLIRWAKEKDIQIPSADDDTALIVAKKRRGADGATGSKILHEGKKYVWQYDIVRKTKLLGIEPIGGNGKLKRLKAAKLIGENYGIALDPKPQIIRHFKVYQTIRELKKLNNGKPPRILRKGSIINVPKGRYKGVWKITSIKDSKDEIKVNILRPQAVKNVGKTNYSKGDVLLRTLIKNGMQVIEAPYTGVNVALYS

SEQ ID NO: 336 - protein, 834 aa, unidentified
  REGION 1..834: note = Description of Unknown: uncultivated organism with predicted taxonomy: Verrucomicrobia bacterium
  REGION 1..834: note = MG2-20 effector
AARQHLTELAARQGAFTKGEFKKAVREAAGWPEKGGHDNLDALLLHPDAEEALVFDPVQAALRKHPLAEAFLTLPPQFLKRLRGKLARGKSVAPGTVRDWLSRAQAPPPSASDPLAAFDAAIQRVLDAANTRKGRKQSALTREQLLEEPLRATYPKGRAPYARPVLRQAYEEVMKGWDPRAEANDHQPRGCLCQTDELKEAQLQRRLEEQTNNHLIRHRLLILGGEQPKPNATPEHERRRLKGLLHDLIQDFANGDKSRIASLTIEVNRELRDLSGKTRKEQEQDLGLRLGDFKRVAAKVEEACRRRGIPCTAGLIRKARVAEDLGWKCPYTGKEFSVDTLLDGVMDKDHIIPHADRQSDSLDSLVITWNEVNKWKGKRTALEFIREEGGKPVPGRPELTVMTLAEFQKHVASLDIRKGHDDDRARKKRRIRRLLTEYYEEKEFTPRDLTVTSHLVRLGAQVLQRAFPPEQRPPVISLPGSVTGEVRKAWKVTACLEAANPAVMEVVEEPDPQTGEMRRIRRAKKKEDIRGITHLHHALDACVLGLASLYFPRHGAVWSAAVKAGQHAATEYDNNEHPLWQAMTKRRPTAQEVVLLKATGLYDGPDSNGRMQLRDLPAELKGQIRRRLAEKRVVQHIPADMSGVKVEENTRGVVAVKDGRVILRQRSARDAKTGLQAVKTTDEAPGKLLGLNPPGGDGKLKRQKGVRVITDNFGVAILDHAPEGEEKFVVIPWHRVWHRVEELKAANGGQRPRLLRNGMLIRVAGLPGKMASKNGVWRVFSVKQTKKLDLGGPDRVAMEDKGLGVWREVSLETLTPARIAILRHGLAGGPQPDP

SEQ ID NO: 337 - protein, 1129 aa, unidentified
  REGION 1..1129: note = Description of Unknown: uncultivated organism
  REGION 1..1129: note = MG2-21 effector
MQEEILNTSDVSKNLEVSFDVGHSSIGWAVLKSPDKNKMNNPEFPQIELLGCGVVTFEPDTCLAKKRRDYRRQRRHIRSTKMRIKRMKQLLEHLKVLTASELEKPGSPYPWKLAASVLQGKRLLNWNEIWDILRWYAHNRGYDENRHWSEVAEKEDEDDTESVKKSIELMKNHQTKTMAETICKELETDPSESDKRALHKSYKEIGAAFPRSVVVNEVREILEKHIGKLPGLSQELVETLAGESKDAWKTIDCPPIKLPSHYWGSLLFGQLLPRFNNRNIKECPFSGDTLPLKECVEFYRYRWGKILTNIRVSADGLFGQKRPLNPDERKYVDSKMQELGSMTKTELRKAVEEAVLMTLNKEGVPQPVKINTNLETMFLTSEMEGGLVLDPVKKLINSDTVQSFWGVLPPQLQKRLAGKWRRGKQITIGEIQKELEKIAPEKVEEFNLAIKSNIKRKKKTENHLNDKIPESPLKMLKGRAPYGRKLLQQAYEEVLAGKDPHEKDGCLYRTENILKKEIRKAIDKQTNNHLIRHRLLILERLFDDIVKEYAGNDKNKIKLITIEVNRDLREFSGMTAKEIESELNARSADFKKAKKQLENMLQEAGLSNTRITATLIKKARIAQDLDFTCPYTGAKYELIDLINKQVDLEHIIPKSKRPSDSMESLVITFKEVNRWKGNRTALRFIKEEQNKPVPGKENLMILTEKRYQELVNGLNTKGHPKDTERKKKRKELLLMEDYVEEKFLPRDLTQTSQLVRLAVQVLMKKYIGEKEKPVFVSMPGSITGKFRAGWNLLGCLLKAVPWAADEDNQVKPKDELRNITHLHHAIDACVLALAAHFIPTYKNGKVWELMFKGTVKPSEKMYIEDVPVLQLDSENRLHIKDLPDSIKEQITERLYERRVVQHIPKDMSGVKCDETIYRVVDPNDNHPYAKKLIRWAKEKDIQIPSADDDTALIVAKKRRGADGATGSKILHEHKGKTKYVWQYDIVKKTKLLGIEPVGGNGKLKRLKAAKLISENYGIALDPKPQIIRHFKVYKTIQELKKLNNGKPPRILRKGSIINVPKGTYKGVWKVISIKEGYSEIKVDILKPQAIKIVDKTDYCKREVLLRTLITSGMQVIEAPYTGVNVALYN

SEQ ID NO: 338 - protein, 1471 aa, unidentified; identical to SEQ ID NO: 333
  REGION 1..1471: note = Description of Unknown: uncultivated organism
  REGION 1..1471: note = MG2-22 effector

SEQ ID NO: 339 - protein, 778 aa, unidentified
  REGION 1..778: note = Description of Unknown: uncultivated organism with predicted taxonomy: Verrucomicrobia bacterium
  REGION 1..778: note = MG2-23 effector
MQLANVRVAGSGNGQMRPLTADERRRVDAKMREKGALTPTEFKDAVRSATGCVRDNLETMLMHPDAKEALTLDPVQKLLTSNECIAALFAKLPARIQKRARGQLRHGKTVTLGQLRGYALAVGESVADFDEELQQQVDAAATKGRKKVAGVSRESLLAQLLRMEKISGRAAYSREILRKACEEVMAGKHPKEEGGCLFVTEQMRQAQIQREIDQQTNNHLVRHRLKILERLFRDIIAEYAGGDKSRIERITIEVNRDLREFSGKTAKEKTQDLGLRVADHHRVAEKLQKALAGQTVNGQPIRIGPGLIRKARIAEDLGWTCPYTGQKYEPIDLVTRRVDKDHIVPRSQRMSDSLDSLVITFSAINKWKGNRTALKFVEDEQGKPVPDLPNLSIVSLSRYREFVEKLETFKGHDDDKKRKKRRKALLLLRDYEEEEFTPRDLTQTSQLVRLGAQMLKRPFLGEKHQPVITSLPGSVTGVVRKGWNLLGCLSKACPQVLDETGEVRTKTDIREITHLHHAVDACVLGLAAHFVPNNGRMELIVKRNLTETEKLQLRALGVFDFSPDGFRLKELPEGLKNQIRDRLAERRVVQHIPKRMSGLRVEQNAWRVLKIEGDEATIRQRVRQPDGSRPLKETTERITKLFGLNPTGGSGKLKALKAALVIPDNFGIALDPEPTIIPFHKVWPRLQALKKANGGKWPRVLRSGQLIHVPKGRYQGTWRVFSTKNNKSGMAVDMGWADVVRLRNGVEGHKINVLLASLLRDGMTILDTPLTGVASPPL

SEQ ID NO: 340 - protein, 1074 aa, unidentified
  REGION 1..1074: note = Description of Unknown: uncultivated organism with predicted taxonomy: Verrucomicrobia bacterium
  REGION 1..1074: note = MG2-24 effector
MTAKQNLADLHLAFDVGHSSIGWAVLRHTPPPALPEILGTGVVIFGADDCLASKRRQYRQQRRHARATRKRIELLARFLFHRLQGETDPATTQFREHLKPYLEQTAATRQLQGDGDSFAWQRAAEILTAARENKPLPDLGWSELWDILRWYAHNRGYFAPPWANRGDESAAPDTDDEVSDTEKVEHANDLMRELGTRTMAETVAAYTARYEREAAEWQQGRRKEKPKHFKGLNAAFLREKIVWPEVCALLTALKGRLPGLDDAFIRTLLGNDVDPLRDRDAWRTIPCPDIQLPKRYHGGLLFGQVIPRFENRIIGVCPIWFSVCQDLCLHHPEITQDDPLRREKEAVVQAFEQWLPRAKKANERLSPEKQKSPEALIAEFAAKQSKLPAKASPEFLRFRWAMQLANVFGAAPGERETRPLTADERKQLTARAEKQGAFTKGEFKQAVREIAGWLEQSSRDNLDALLLHPDAEQALIFEPVQAALRKHSLAEALLALPPQFLKRLRNKLTRGKEVKPQAVRDWLGGAQASTPSASAPLAAFDAEVQRVLEAAATRRAKKQTALTRDTLLAQKLCATYPKGRAPYARPVLRQAYEEVMQGWDPRAEKRADQPRGCLCQTDELKEAQLQRRLEEQTNNHLIRHRLLILERLQRDLIAAPEFANGDKSRIAGMTIEVASDLRDLSGKTRKEQEQDLGLRLGDFKRVAAKVEEACKRRNLRVTAGIIRKARVAEDLGWRCPYTGKEFCIDTLLDGVMDKEHIIPHADRQSDSLDSLVITWNEVNKWKGKRTAMEFIREEGGKPVPGRPELEIMSLAAFQKHVASLDTRKGHDDDRARKKRRIRRLLTEHYEEKEFTPRDLTVTSHLVRLGAQVLQRVFPKDQRPPVVSLPGSVTGEVRKAWRLTGCLEAANPAVMEEVQERNPDTGELQTVRRPKKKDEIRGITHLHHALDACVLGLASLCFPRHGAVWSAMVKAGGDREADDDRRLWLAMTKRRPTPQEATLLKATGRYQQDSEGRLHLADLDEQLKQQIRARLAEKRVVQHVPADMSGVKTEENTRRVLRVREDGRVELRQQAPRDA

SEQ ID NO: 341 - protein, 1337 aa, unidentified
  REGION 1..1337: note = Description of Unknown: uncultivated organism
  REGION 1..1337: note = MG2-25 effector
MGTPTLSSDPNAKLELAFDVGHSSIGWAVLRPVAADVRRLTSTPAKESSQSLVTSAATGIELLGCGVVTFGADDCLASKRRDYRRQRRHARSTRQRIARMEKLLAALNVIPKAELERLHSQAKGHSKQNPHERKGASAPWLLAARVLAARTEEERKKAELDWPELWDVLRWYAHNRGYDGNIRWSGGFRVEAFSETPQVSVSALTEQVDKAKQNEDDPDEDWKKLESAAKRMADYGFTSPTFAEMVAKYLLGPDRTLKPAQPGKPAEVEPTKASFTEADLHKLLFHCEPGFEHHPRHLSNYFKGLRAAFPRRIIKDIDGKPTLVGGTEWEVRYILRAHFGTLTGCDARFEQVVCGGIPEAETDWLALGELLPALYLSDDQKRQLKALRIPKDAFAGDKPGRKREKERLRFLRTAITRDKLVVENRYSGGLLFGQLVPRFDNRIITRCPISGDKVPVKQSPEFLRYRWAMQLANIQVAASAQEKLRKLTADDRAALHKLMQAKGALTEGELKKAVRALPGVARDNLDTMLMHPDAKDALIFDPVQKLLASDELAPFWATLPANLQARFRGKLRHAKAITLADLRTALPDPKAFDVELQRQLDAQNTRKAKKQPAFSRDQFLAQSFDARKALARLSGRAPYARPLLQQAYEQVLAGKDPREEGGCLFRSEEIRQRELHKKLEDQTNNHLVRHRLLILERLLKDLVNAPEFAAGQPERVAQVTIEVNRDLREFSGMTRKAIEMDLGSRLKNFKSVSDKLEKAFDSQTYNGKPVQVTAGLIRKARIAEDLGWQCPYTGQSFEPVHLVSRAVDKDHVIPRSQRPSDSLESLVVTFSEVNKMKGQRTAWQFIQEFGGKPVEGMPNLMIRTPKQFEEFVTKLESFKGHEDDKRRKKRRKDLLLLPKFEDKGFVPRDLTLTSQLVRLGAQVIKRFFAGGARVNNPREAPTDSTARGFVNPRSGPRITSLPGAVTGAVRKGWRVLGCLAQAAPQILEPTGEPKSKTDIRDLTHLHHALDACVLALAAHYFPKDGSLWEAMIVRAPNAAQKQLLHATGFYEFIAEDKPNLKDLPIELKQQIANRLAEKRVVQHIPADMSGMKVEENTRGVVKVENGRATLRQQKRNAEGKLEVKETEEVVGKLVGLHPEPKREAHPSPALRAPSPLAGRGEREESNDAAAGSPPSPFAQRGERDGVRGAAQGKLTPMRGVRVITDNFGVAILDHASNPDDRFVIIPWHKVWHRIEALKEKNGGQPARVLRIGTLIRVPNKSGRSDYRGTWMIRGAQLNQNAGMLVDLSNPDVITYRVSGRKDCKQNVSLKSLVEGGLEILKPSLCGVAQTAQAMAPG

SEQ ID NO: 342 - protein, 853 aa, unidentified
  REGION 1..853: note = Description of Unknown: uncultivated organism with predicted taxonomy: Verrucomicrobia bacterium
  REGION 1..853: note = MG2-26 effector
QRLAKGASAAEATAHARKLAKVPSRNCPEFHRFRWAMQLANVQVASGRSPELRPLTVPERRQVHARMLQRGFLTAAEFKKAVREITGATRDNLDQMLMHPDAQEALILDPVRRLVTTSPILEAVWPQLPEAAQKRAAGQWRRGKTLTLQDVVRHTNAAERARIEAAVKNHLDLENTRRKKKDKTLRADEIMTQPLSIKRLSQRAPYTRVVMDEVWADVMERGLHPKEKGGCLYRDEAIRQAQLQREIDEQTNNHLVRHRLRILERLHRDILQEYAQADPARVARVTIEVNRDLRELSGKTRKEQEQDLGQRLANFKSVVRKLEESFDGKKVKITPGLIRKARVAEDLGWTCPYTGKAYDAFDLLNRAVDKDHIIPRSQRASDSLDSLVITFAEVNKMKGKRTALRFIEEFQGQPVPGAPRLSLRTLRDYQQWVEGLETFKGHPDDQRRKKQRKKLLLLPEYVEKDFVPRDLTQTSQLVRLGAQVLQRAYLGLARPPVVTSLPGSVTGTVRKGWDLLGCLATANPGVLDESGEVKNKTEIRDITHLHHALDACVLALAARAIPNNGRVWELLTRRDNGLNEVERQQLLALGIYARDSEGRLVLRDLSPDLNEQVRQRLAERRVVQHIPSDMTGLAADQTVWRVFDPADSHPSARRLARWFKEAGVKVPPAGADTVLITCRKRRSQAGAETGRLLHQSPTWRWIYQEIPRSKVIGLEPRPGSPARLQRLKAVKILGDNYGLALDPEPQVIRFHKVWSQLQELKRRNEGKPVRVLRNGQLFRVQNGRYRGIWRVFSTKDNSSGMALDMGYADVVRLRNKTEGHKINVLLSTLLRDGLCILQSSYIGVSTCPTTSSA

SEQ ID NO: 343 - protein, 1016 aa, unidentified
  REGION 1..1016: note = Description of Unknown: uncultivated organism
  REGION 1..1016: note = MG2-27 effector
MASLEFSLDVGHSSIGWAVFQSDPFQPLGAGSVIFGADDCLAKKRRDYRRQRRHIRSTRQRIERMKQLLSHVGFLTREQLDQPGTAWPWLKAAEVLKPEGGVKLSAQELWDVLRWYAHNRGYDGNRAWARDETEAQEDTAREQAARQWMQDHNTQTMAETVCAVLDVGPGKRSDGGDKRSSNLRFKGRGVAFPRSVVTSEVRHILENHQGKLPGLDSRTIRILMDDARHENLAAEAGIRLPHRYEGGLLFGQLIPRFDNRIISSCPVTYEREYARALDEGKSEDEAKHQAVRQAKVPAKKSREFLLFRWAMILANVQVADASGTRPLSVEERQSLHQLMVKSGKLTKREFLKTLDATVGSPRHNGSALLMPPDADKALVLRPEKDALKRLSGRAPHARVVMKQAVKDVFAGRHPMAEGGALFRSEELRALQLRRTVEEKTNNHLLRHRLLILRRLVKDMLATYAGNDPSRISQVTIEVNPDLRSFSGMTAEEKKQEMGQRLGDFKKVVQKLRGDLPEVTAISAGLIRKARIAQDMNWTCPYTGMEYDALDLLHGHVDKDHIIPRSLRPSDSLDSLVLTLRTINEMKGQRTAVQFIKEFEGREVQDGKKRSLEILPWSQFQKLVESLDAKGIHDQDRARKKRRKALLLQEHYTEKEFVPKDLTQTSHLVRLAAEELKKEFGGVQCSTRIVSMPGSVTAETRKAWKLEACLAQANPEVAELRERRKTEPAPVSIKQELRDISHLHHALDACVLACAAHYLEKKGNIWKALVQRRKSEAENLELLSTGLFKRGQDGQARLQDLPAQLKNQISRVLAECRVVQHIPSNRRGLKAEETVWRVLDSEDHHPSAEKLRKWAQLAQVELPNPDSGKVLLVKRIRHTAAGAKAPKNLLHQGSEFWWAYEVVALSKLVGPGASGKLRKIKGAKQIGDNFAVTLGPKMEVIPHHQVQERWKGLGCPRYLRNGQIIEMPTGKYSGAWKVFSIKNARQGILLDIARADSPRAKQGNPGTRINVLLKTLV

SEQ ID NO: 344 - protein, 1081 aa, unidentified
  REGION 1..1081: note = Description of Unknown: uncultivated organism with predicted taxonomy: Verrucomicrobia
  REGION 1..1081: note = MG2-28 effector
MTTQRNSSPNASRKFGGQLAFAFDVGHSSIGWSVLTAPERDHPEILGCGVVLFEKDSALACQRRQHRRQRRHIRATRQRIARMEKLFMHIGALTREVIESKHRAGGGNSAPWLLAARVLASNGQKTLSWQELWDVLRWYAHNRGYEPVSDEAEADKEDIEKVENAKREMGRLGTVTMAETITAWLGLDTFGKRAASRENYKARNCAFDRGMVVAEVRRILEAHVDRLPGLDERVVKAILDDVHAIEVPSIRWPRRYRGGFLFGRLATRYHNRIIGKCPISGAKLPKKRCREFLCYRWAMLLANIRVVDSDDGRSRPLSREERSNIHKSMERKGYLTPGDLKRLVGTLPGVKQHNVDQIVVHPDAGEALVFDPIRKLIVSNERVAAVWETLPPQVKKRATGKWRRGKSLNLAALRAEVVELGHDVSGFDSAVTTFVSSRQKTRRRSRTHSKETVDDIIEAPIDARRDLAKLSGRAPYARQLLDQAFKEVMDGKDPRARGGCLEETEEVRRRREERPIAEQTNNHLVRHRLQILGRLLNHLIEDPAYGANRPERIRRITIEVNRDLREMAGRTSQEIAKELGARVANHKKVANRLFGELPEGTRITGSLIRKARIADDLGWRCPYTGVEFEPVDLVEGRVDRDHIIPRSQRMSDSLDSLVITFSAVNKWKGQRTAWQFIQEEGGKPVPDAPNLSIVTPARFRDFVEHLDTKGHRDDYRRKKRRKELLLLERYEERTSGFTPGQLTQTSQLARLAAQILRTPFNDTSNPPEIVSLPGFVTATVRRSWDVLGCLSQAAPGVLNTDGSTRSKTEIRNITHLHHALDACVIGLASHFIPNRGDVWRLLAQRNLRAWEKQQLADLGVFDFDAHGGLRLRDLPQQLKEQLRQRLTERRVVQHVPADMNGMRVEENTRGIVRREDGRVYLRQKTLTSDGRRNVKNSDELDIMVVGLNAGGKLAELKGIRVVKENFGVAILENTSLPSGDRFVIIPHVRVWKQLQELRMRNGGKPPEVWRKGQIVRIPSGNREGKWRIFSVMASNRGIMLKLDRPDSPSFDDSGGASGFKMTLTSLIKRGTIRLETRLTGS

SEQ ID NO: 345 - protein, 1026 aa, unidentified
  REGION 1..1026: note = Description of Unknown: uncultivated organism with predicted taxonomy: Verrucomicrobia bacterium
  REGION 1..1026: note = MG2-29 effector
TVTFESDGCLASKRRVHRGMRRNIRSRRLRIADIEKLFVHQGILSADQIAEKHKPGAGSSSPWLLSAAVLASGGTFVLNAEELFDVVRWYAHNRGYDGNRRWAHNAEDDDGDSDREKAAFSLMDAHHTSTMAETICAQLGLMPGGQKKASMAPYKDSDIGAAFPRKTVVAEVVRVLEAHVGKIEGCSAEFIEALCGENDGAWKTIAVPNLGKPKTFKGGLLFGQKVPRFDNRILPFCPVTNKPTPLKSCIEFMEFRGAMFLSNVRVGSGDGFELRPLSADELNVVWDKIHKKGYLTSRQFKDEIRGLEGVEKDNLQALMTIDSADKNLVVDPALKLISSSTVLKPVMSLLSEASREELLSNLRRKHGVTISEMISDLSISEELTKAIDTSFKKESKKKREKYGTQERWLSERVFSAEFDSGRAPYGRLVMKQAVEEILSGKDPRAKGGCLYLTDEMQKRQESRSLESLTNNHLVRHRLLILKRLFNDMVKEFCEDDKGRILSVVVEVNREVSSMSGKTMKLIKMEEGLKRSDHKKASKIMEAAVEESGENIRVGAGLIRKARVAQDLDWTCPYTGEKFDPLALIHSQVDLDHIIPRSERLSDAMAGLVVTFSEINRWKGARTAYQFISEEQGKQVPGKPNLSIMSLKAYEDFVGKLKISGGHDSDVGRRKARKGYLLLASYQDKEFTPRDLTISSYVAKLAVGQIKKEFSELSKKPPVISLPGRLTGEARKSWKLLGLLSAVNENITSETPKNDIRGLTHLHHAMDAAVMGLMAHCADNLSDGTSWQLLLKRNLRPEEKNLLKANMRNIGFDGNRAHLLDVPNEIKEQLRRCLLERRVVQHVPSSMEGLKVEENTRGIVAFNEERKKVTLRQTGNETEEVSGKLLGYKTEGSKLADQKGVRVINQNFGVALTHPPQIITWHKVYPKLKKIEQETGRWPQVLRNGMLIHVPEGNYAKASKIWKIFSLKNNASGMAVDMGYADSVKPVKINVLLKSLIKDGLQIIGSDFSGEGICHITSSTLEAQPSD

SEQ ID NO: 346 - protein, 1065 aa, unidentified
  REGION 1..1065: note = Description of Unknown: uncultivated organism with predicted taxonomy: Verrucomicrobia bacterium
  REGION 1..1065: note = MG2-30 effector
MKKRDLIFSFDEGHSSIGWNVIQETEAGPNVLALGTVTFTADGCLASKRRIFRGQRRTVRSRRQRIEDIEKLFIHQGILSETQAKEKHEQAGGNACPWLLASAVLASNGKFTLNEKELFDVIRWYAHNRGYDGNKRWAGSADDENKEDSAKEEVAIDLMKNLSTQTMAETICAQLGLQPNGHKKASMKKYKDAGAAFPRKIVEKEVFKILQAHVGKIAGCTETFIETLCGENDSAWKKIPVENIKKTKTFRGGLLFGQKIPRFDNRILSFCPITDKPVPLKSAKEFMEFRCAMFLANIRVKDVIASEMRSLSKNELHIIWELIKEKGYLTASEFKRAVRSLGKFSQDNLDGLMIITESATNLIIDPVQKLIHSNQILSVLWSEIPDFIAKECLFQLGKKRSITLSEIISKMEENLSEGFVTALDKAYKKVQKKNPDKQQWLERKNYRASFDKGRAPYGRDIMKKVVLEVLGGKDPREKGGCLYITEEIREKVNHRKLDELTNNHLVRHRLLILNRLFDDMVDDFADGDKERIKTVVLEVNREISELSGKTTKEIKKEEGLKRAEHKKAREKMEAAVKDSGENIVITAGLIRKARIAQDLNWTCPFTGKEYDPIDLIHKQVDLDHIIPRAERLSDSMGGLVVTFSEVNRMKGKRTAWQFIQDEQGKPVKGKPVLSIRTMKNYETFVSKLKTFGGVKSDEARRKMRKQFLLMPDYKEKGFTPRDLTLTSYVTKLALQQIKNQFDTCRKKPQVIALPGRLTGETRKTWKLMGLLHVVNEKIDGKTLKNDIRSMSHLHHAIDATIMGLLAYYIKDLADGTTWQLLLKRYLTASEIQHLKDNLNHFKIDSKNRAHLCDIPSHVQKQIEQCLKERRVVQHVPSNMGGMHVEENTRGIVGFDSEKGKVLLQQKKDGLKNITTEVAGKLLGYDAEDGSKLKKQKGVRVINKNFGVALTQSTPEIITWHKVYPKLSSIYKRDGVWPNVLRNGMIVYIPDGNYAKVSKVWRILSIKNEKRYMAVDIGFPDSCKSVKRSVNLTTLLKDGMKIVYTKLTGDGICHITSSKSIAPPFD

SEQ ID NO: 347 - protein, 1062 aa, unidentified
  REGION 1..1062: note = Description of Unknown: uncultivated organism with predicted taxonomy: Verrucomicrobia bacterium
  REGION 1..1062: note = MG2-31 effector
MKKRDLIFSFDEGHSSIGWNVIQETEAGPNVLALGTVTFTADGCLASKRRIFRGQRRTVRSRRQRIEDIEKLFIHQGILSETQAKEKHEQAGGNAYPWLLASAVLASNGKFTLNEKELFDVIRWYAHNRGYDGNKRWAGSADDENKEDSAKEEVAIDLMKNLSTQTMAETICAQLGLQPNGHKKASMKKYKDAGAAFPRKIVEKEVLKILQAHVGKIAGCTETFIETLCGENDSAWKKIPVENIKKTKTFRGGLLFGQKIPRFDNRILSFCPITDKPVPLKSAKEFMEFRCAMFLANIRVKDVIASEMRSLSKNELHIIWELIKEKGYLTASEFKRAVRSLGKFSQDNLDGLMIITESATNLIIDPVQKLIHSNQILSVLWSEIPDFIAKECLFQLGKKRSITLSEIISKMEENLSEGFVTALDKAYKKVQKKNPDKQQWLERKNYRASFDKGRAPYGRDIMKKVVLEVLGGKDPREKGGCLYITEEIREKVNHRKLDELTNNHLVRHRLLILNRLFDDMVDDFADGDKERIKTVVLEVNREISELSGKTTKEIKKEEGLKRAEHKKAREKMEAAVKDSGENIVITAGLIRKARIAQDLNWTCPFTGKEYDPIDLIHKQVDLDHIIPRAERLSDSMGGLVVTFSEVNRMKGKRTAWQFIQDEQGKPVKGKPVLSIRTMKNYETFVSKLKTFGGVKSDEARRKMRKQFLLMPDYKEKGFTPRDLTLTSYVTKLALQQIKNQFDTCRKKPQVIALPGRLTGETRKTWKLMGLLHVVNEKIDGKTLKNDIRSMSHLHHAIDATIMGLLAYYIKDLADGTTWQLLLKRYLTASEIQHLKDNLNHFKIDSKNRAHLCDIPSHVQKQIEQCLKERRVVQHVPSNMGGMHVEENTRGIVGFDSEKGKVLLQQKKDGLKKITTEVAGKLLGYDAEDGSKLKKQKGVRVINKNFGVALTQSTPEIITWHKVYPKLSSIYKRDGVWPNVLRNGMLISVFSGRYAGIWRILSIKNNATGINFSIAKPDAIAPFKQNVLLKSLMSAGLKKVETKLTGDGICHITSSKSIAPLFD

SEQ ID NO: 348 - protein, 1062 aa, unidentified; identical to SEQ ID NO: 347
  REGION 1..1062: note = Description of Unknown: uncultivated organism with predicted taxonomy: Verrucomicrobia bacterium
  REGION 1..1062: note = MG2-32 effector

SEQ ID NO: 349 - protein, 789 aa, unidentified
  REGION 1..789: note = Description of Unknown: uncultivated organism with predicted taxonomy: Verrucomicrobia bacterium
  REGION 1..789: note = MG2-33 effector
MKKRDLIFSFDEGHSSIGWNVIQETEAGPNVLALGTVTFTADGCLASKRRIFRGQRRTVRSRRQRIEDIEKLFIHQGILSETQAKEKHEQAGGNACPWLLASAVLASNGKFTLNEKELFDVIRWYAHNRGYDGNKRWAGSADDENKEDSAKEEVAIDLMKNLSTQTMAETICAQLGLQPNGHKKASMKKYKDAGAAFPRKIVEKEVLKILQAHVGKIAGCTETFIETLCGENDSAWKKIPVENIKKTKTFRGGLLFGQKIPRFDNRILSFCPITDKPVPLKSAKEFMEFRCAMFLANIRVKDVIASEMRSLSKNELHIIWELIKEKGYLTASEFKRAVRSLGKFSQDNLDGLMIITESATNLIIDPVQKLIHSNQILSVLWSEIPDFIAKECLFQLGKKRSITLSEIISKMEENLSEGFVTALDKAYKKVQKKNPDKQQWLERKNYRASFDKGRAPYGRDIMKKVVLEVLGGKDPREKGGCLYITEEIREKVNHRKLDELTNNHLVRHRLLILNRLFDDMVDDFADGDKERIKTVVLEVNREISELSGKTTKEIKKEEGLKRAEHKKAREKMEAAVKDSGENIVITAGLIRKARIAQDLNWTCPFTGKEYDPIDLIHKQVDLDHIIPRAERLSDSMGGLVVTFSEVNRMKGKRTAWQFIQDEQGKPVKGKPVLSIRTMKNYETFVSKLKTFGGVKSDEARRKMRKQFLLMPDYKEKGFTPRDLTLTSYVTKLALQQIKNQFDTCRKKPQVIALPGRLTGETRKTWKLMGLLHVVNEKIDGKTLKNDIRS

SEQ ID NO: 350 - protein, 789 aa, unidentified; identical to SEQ ID NO: 349
  REGION 1..789: note = Description of Unknown: uncultivated organism with predicted taxonomy: Verrucomicrobia bacterium
  REGION 1..789: note = MG2-34 effector

SEQ ID NO: 351 - protein, 783 aa, unidentified
  REGION 1..783: note = Description of Unknown: uncultivated organism with predicted taxonomy: Thermogutta terrifontis
  REGION 1..783: note = MG2-35 effector
VVIGGSRPLLKEERFALNSIMEATGYFTKATLKKAFEKSLKLDPVNLDAMFLIPEMEQALTLDPARREVTTNKIIKPVWKTVPAIWKNIFSNQLFHGRNYQGKPPSFSQWRDRIKEKGDSIEEFDDSVASAYKVECQNLSKKGLEVSFEEFCGRPIRVSKRHMASGRAPYSRGKLTEAVHCVFNGDDPKAEGGPLEETEAVRCAQWNLEIDENTNNHLVRHRLKVFVRVLEDLVKRYADNDPRNVSSVCVEVVRDLVEFSGKSAKEKARILGQQLWHHRKISKFLEEEKAKNEGNWEISAGLIKKARIADDLNWICPYTGKQYSLNQIIHGDVDLEHIIPRSKRPTDALHALVLTFSHINREKGARTGLQYIEDTKDSPHTLTPEQYRKFVGRLKKNGPSKDDELRCTKRKIALLTQDYEPRGKAKEKSDSESVSGFTEGSLTQTSYLNKLAAQQVQRWFSDQLDEDVKLPPVVQLSGSVTAAVRRSWDLFDQLQQVCPETRGKSKSDIRGMTHLHHALDAVTVGLAAHLFPKDGHLWALMSKRKITRPSDRDYMRSRLGDLVSFNNDGKWRLEALPESLLFEVAGKLAEQRVVRHMPGTMRGLKVQQNVWRILGEDSRDESKMVIRMRPRGEDGKKTIKQKTEKKSKLLGALPKNASSKLKDLKGALIVEENYGVALDPEPVVMPYRQVWKQLVELRKQNGGQPVRVIRNGNVISVKKGRYAGKWRVHSIKDASMGLVLDMAAPDLVKAENQSHRSKMNVLLKTLLKNGLVVMQSDSALFSL

SEQ ID NO: 352 - protein, 1114 aa, unidentified
  REGION 1..1114: note = Description of Unknown: uncultivated organism with predicted taxonomy: Coraliomargarita sp. CAG:312
  REGION 1..1114: note = MG2-36 effector
LASYSTKKNGAIIRAAEQENSFTFEVPYERAVFKFEPLILSLIPFKINDNNLKMSTTNLSNFNLSFDIGYSSIGWSISSKPANAVFPNWLGAGVVVFDDDSCMAKSRAEFRRMRRNIASKRNRIKRMREVLSGLGVMGKDELDNAKTEHPWFLAAETLASGKILSWSELWSVLRYYAHNRGYDGNSMWAKFGDDSGGDSEREANAEKLMADLGTSTQAETICAYLGVDAKSPKPLRFKKYFKGQNLAFPREIVFKEVERIIDAHIGILPKCDENFKKLMIGNWREVPSNIKLPGRFTSDRGLLFGQYMPRFSNRIITKCPLSGEKTPNCHSREFLDFRWKSLLANMAFPDGTDLMETRRKIDDFMLLYGALSKNALKKILKEVIGELPSNYNGMFLASEMEKALEVDPVRALILRTVYPNISFSLPNAELVEKLWKLIPKFVFTRMFRLKEYSFADICALLSPEKSAELAEFVRVIFDSSPASKKSPKPDFETAFNFKMRVQKISGRSPYSRQLMKSASEEIMRGVDPRSEGGSLYPRSESTKKEVLSNIDTWTNNHLVRHRLKIFKRLYMDIVREYCGADKSLVKSVAIEVVKDITAFSGLDSKKKAAKLNDLVAHHKSVSAYLKKEYPELSPNGSILRKARIADDLGWVCPYTGCHFSPRQLFESGNMEREHIIPRSLRPSDSLESLVITWKEVNDMKGQRTAYEFIKECQGMKVPGRQNLSIVTPERFEAFVRRLKKPMHPAGKADIERIKIRNKLLLTEHYKKREGGFLPSDLTQTSHLNKLAFKVVKSLYADAEKAPELIHVPGIVTSVVRKNWDLLPCMGDACPEIYETLENGDKVLRLKDEIRSITHLHHAVDAVAMGLAASVFPRTRNFYEAVSKRRLNQADRQELLKTGLVLFSGDKWKLVELEKSYLKEISGRISENRVVKFLPRKMSGMDVEQTLWGVVKENENGTVTIRQYGAGKGESRRSIKKAYEPKLKLLGYESKNTAKSKLARNKAVIIIKGNFGVALANPPQIIPHHNVWQRLSELAEKNGGRFPKILRRNQIIEIPSGRYKGIWRITSIKNNSNYIGVDMIHPIYVRIKEKSKINVNLNTIIKDGMKIIDTRLIGA

SEQ ID NO: 353 - protein, 817 aa, unidentified
  REGION 1..817: note = Description of Unknown: uncultivated organism with predicted taxonomy: Coraliomargarita sp. CAG:312
  REGION 1..817: note = MG2-37 effector
MSRSDFCLFKLSFDIGYSSIGWSVFKIAHGDAFPILCGCGSLVFDDDCCMAKSRAAFRRARKNIASRRNRIKRMRKVLLSMGVMGPEELDNAKTDYPWLLASRVLSCGNKLSWGELWSVLRYYAHNRGYDGNSAWAKFDGDDGDSEKEANAIKLMQELGTRSQAETVCAYLGVDPSSSAKPALRKYFKGQNVAFPRQIVISEVGRIIDAHIGHLPGCDENFKKLIMGNWREVPSPIEMPGRFTSDRGLLFGQYVPRFNNRIIPKCPIEGRNVPSCHSREFLNFRWKSLLSNMSFSEGIDIAAARKNIDSAMRLYGSFKKTTLKTIFKSLLGELPLNYESMFLSEEMDKALLLDPVRALILKTIYPNISHSLPSAELVQNLWDLIPKFIFTQMFRLKEYSLEDIYGLLEDKKRARFRSLLLEIFDSSPNSKKTPRGDFENVFKLKMRINKISGRAPYSRIAMKKACAEIMEGRDPRANGGALYRNAENARSELLSNIDTWSNNHLVRHRLKMFKRLYVEIVNRYCGGDLSAVKSVSVEVVKDMGEFSGLDPKERAAKLNDLVCHHKSVSEYLEETYPELKISGSIIRKARIADDLGWVCPYTGRHFSPRELFESGNMELDHIIPYSLRPSNSLESLVATWKAVNEMKGQRCAAEFIKECQGMEVPGMPNVSIVTPERFEKFVSGLKKPQHNARYPDLKRIKKRNKLLLTLKYNKREGEFLPADLTQTSHLNKLAFKVVDSLYVDSEEKPELVHLPGSVTSVLRTNWDLSACMAKACPEIIVTVKSADSASGERGMGGDGLPQGLNGSVTDTAACCGGE

SEQ ID NO: 354 - protein, 1061 aa, unidentified
  REGION 1..1061: note = Description of Unknown: uncultivated organism with predicted taxonomy: Coraliomargarita sp. CAG:312
  REGION 1..1061: note = MG2-38 effector
MSTTNLSNFNLSFDIGYSSIGWSISSKPANAVFPNWLGAGVVVFDDDSCMAKSRAEFRRMRRNIASKRNRIKRMREVLSGLGVMGKDELDNAKTEHPWFLAAETLASGKILSWSELWSVLRYYAHNRGYDGNSMWAKFGDDSDGDSEREANAEKLMADLGTSTQAETICAYLGVDVKSPKPLRFKKYFKGQNLAFPREIVFKEVERIIDAHIGILPKCDENFKKLMIGNWREVPSNIKLPGRFTSDRGLLFGQYMPRFSNRIITKCPLSGEKTPNCHSREFLDFRWKSLLANMAFPDGTDLMETRRKIDDFMLLYGALSKNALKKILKEVIGELPSNYNGMFLASEMEKALEVDPVRALILRTVYPNISFSLPNAELVEKLWKLIPKFVFTRMFRLKEYSFADICALLSPEKSAELAEFVRVIFDSSPASKKSPKPDFETAFNFKMRVQKISGRSPYSRQLMKSASEEIMRGVDPRSEGGSLYPRSESTKKEVLSNIDTWTNNHLVRHRLKIFKRLYMDIVREYCGADKSLVKSVAIEVVKDITAFSGLDSKKKAAKLNDLVAHHKSVSAYLKKEYPELSPNGSILRKARIADDLGWVCPYTGCHFSPRQLFESGNMEREHIIPRSLRPSDSLESLVITWKEVNDMKGQRTAYEFIKECQGMKVPGRQNLSIVTPERFEAFVRRLKKPMHPAGKADIERIKIRNKLLLTEHYKKREGGFLPSDLTQTSHLNKLAFKVVKSLYADAEKAPELIHVPGTVTSVVRKNWDLLPCMGDACPEIYETLENGDKVLRLKDEIRSITHLHHAVDAVAMGLAASVFPRTRNFYEAVSKRRLNQADRQELLKTGLVLFSGDKWKLVELEKSYLKEISGRISENRVVKFLPRKMSGMDVEQTLWGVVKENENGTVTIRQYGAGKGESRRSIKKVYEPKLKLLGYESKNTAKSKLARNKAVIIIKGNFGVALANPPQIIPHHNVWQRLSELAEKNGGRFPKILRRNQIIEIPSGRYKGIWRITSIKNNSNYIGVDMIHPIYARIKEKSKINVNLNTIIKDGMKIIDTRLIGA

SEQ ID NO: 355 - protein, 1108 aa, unidentified
  REGION 1..1108: note = Description of Unknown: uncultivated organism with predicted taxonomy: Verrucomicrobia bacterium
  REGION 1..1108: note = MG2-39 effector
MSRSDFCLFKLSFDIGYSSIGWSVFKIAHGDAFPILCGCGSLVFDDDCCMAKSRAAFRRARKNIASRRNRIKRMRKVLLSMGVMGPEELDNAKTDYPWLLASRVLSCGNKLSWGELWSVLRYYAHNRGYDGNSAWAKFDGDDGDSEKEANAIKLMQELGTRSQAETVCAYLGVDPSSSAKPALRKYFKGQNVAFPRQIVISEVGRIIDAHIGHLPGCDENFKKLIMGNWREVPSPIEMPRRFTSDRGLLFGQYVPRFNNRIIPKCPIEGRNVPSCHSREFLNFRWKSLLSNMSFSEGIDIAAARKNIDSAMRLYGSFKKTTLKTIFKSLLGELPLNYESMFLSEEMDKALLLDPVRALILKTIYPNISHSLPSAELVQNLWDLIPKFIFTQMFRLKEYSLEDIYGLLEDKKRARFRSLLLEIFDSSPNSKKTPRGDFENVFKLKMRINKISGRAPYSRIAMKKACAEIMEGRDPRANGGALYRNAENARSELLSNIDTWSNNHLVRHRLKMFKRLYVEIVNRYCGGDLSAVKSVAVEVVKDMGEFSGLDPKERAAKLNDLVCHHKSVSEYLEETYPELKISGSIIRKARIADDLGWVCPYTGRHFSPRELFESGNMELDHIIPYSLRPSNSLESLVATWKAVNEMKGQRCAAEFIKECQGMEVPGMPNVSIVTPERFEKFVSGLKKPQHNARYPDLKRIKKRNKLLLTLKYNKREGEFLPADLTQTSHLNKLAFKVVDSLYVDSEEKPELVHLPGSVTSVLRTNWDLSACMAKACPEIIVTVKSADSASGERGMGGDGLPQGLNGSVTDTAACCGGEADAPQSGGSSGGEKKVLLMKGKIRSITHLHHAVDAVAIGLAAAVFPHTNRFYELVSKRNLNRSEREELYRTGLFVFSERNWRLKELPAKLINEISDRIAEGRVVKYLPRKMSGMDVEQTLWGVVKEDVGGLVTIRQYHSKANSAKRRERKIEIEKKIKLLGYEPENVAESKLARNKAVIIIKGNFGVALTTPPKIIPRHKVWQRLGKLAAENGGKFPIVLRKNQIIDVACGRYAGRWRITSIKNNAGYIGIDMIPPIYASGAKNRLKVNVNLNTLVRDGMSIKSGCLTGAC

SEQ ID NO: 356 - protein, 1114 aa, unidentified
  REGION 1..1114: note = Description of Unknown: uncultivated organism with predicted taxonomy: Coraliomargarita sp. CAG:312
  REGION 1..1114: note = MG2-40 effector
LASYSTKKNGAIIRAAEQENSFTFEVPYERAVFKFEPLILSLIPFKINDNNLRMSTTNLSNFNLSFDIGYSSIGWSISSKPANAVFPNWLGAGVVVFDDDSCMAKSRAEFRRMRRNIASKRNRIKRMREVLSGLGVMGKDELDNAKTEHPWFLAAETLASGKILSWSELWSVLRYYAHNRGYDGNSMWAKFGDDSDGDSEREANAEKLMDDLGTSTQAETICAYLGVDAKSPKPLRFKKYFKGQNLAFPREIVFKEVERIIDAHIGILPKCDENFKKLMIGNWREVPSNIKLPGRFTSDRGLLFGQYMPRFSNRIITKCPLSGEKTPNCHSREFLDFRWKSLLANMAFPDGTDLMETRRKIDDFMLLYGALSKNALKKILKEVIGELPSNYNGMFLASEMEKALEVDPVRALILRTVYPNISFSLPNAELVEKLWKLIPKFVFTRMFRLKEYSFADICALLSPEKSAELAEFVRVIFDSSPASKKSPKPDFETAFNFKMRVQKISGRSPYSRQLMKSASEEIMRGVDPRSEGGSLYPRSESTKKEVLSNIDTWTNNHLVRHRLKIFKRLYMDIVREYCGADKSLVKSVAIEVVKDITAFSGLDSKKKAAKLNDLVAHHKSVSAYLKKEYPELSPNGSILRKARIADDLGWVCPYTGCHFSPRQLFESGNMEREHIIPRSLRPSDSLESLVITWKEVNDMKGQRTAYEFIKECQGMKVPGRQNLSIVTPERFEAFVRRLKKPMHPAGKADIERIKIRNKLLLTEHYKKREGGFLPSDLTQTSHLNKLAFKVVKSLYADAEKAPELIHVPGIVTSVVRKNWDLLPCMGDACPEIYETLENGDKVLRLKDEIRSITHLHHAVDAVAMGLAASVFPRTRNFYEAVSKRRLNQADRQELLKTGLVLFSGDKWKLVELEKSYLKEISGRISENRVVKFLPRKMSGMDVEQTLWGVVKENENGTVTIRQYGAGKGESRRSIKKVYEPKLKLLGYESKNTAKSKLARNKAVIIIKGNFGVALANPPQIIPHHNVWQRLSELAEKNGGRFPKILRRNQIIEIPSGRYKGIWRITSIKNNSNYIGVDMIHPIYARIKEKSKINVNLNTIIKDGMKIIDTRLIGA

SEQ ID NO: 357 - protein, 1108 aa, unidentified
  REGION 1..1108: note = Description of Unknown: uncultivated organism with predicted taxonomy: Coraliomargarita sp. CAG:312
  REGION 1..1108: note = MG2-41 effector
MSRSDFCLFKLSFDIGYSSIGWSVFKIAHGDAFPILCGCGSLVFDDDCCMAKSRAAFRRARKNIASRRNRIKRMRKVLLSMGVMGPEELDNAKTDYPWLLASRVLSCGNKLSWGELWSVLRYYAHNRGYDGNSAWAKFDGDDGDSEKEANAIKLMQELGTRSQAETVCAYLGVDPSSSAKPALRKYFKGQNVAFPRQIVISEVGRIIDAHIGHLPGCDENFKKLIMGNWREVPSPIEMPGRFTSDRGLLFGQYVPRFNNRIIPKCPIEGRNVPSCHSREFLNFRWKSLLSNMSFSEGIDIAAARKNIDSAMRLYGSFKKTTLKTIFKSLLGELPLNYESMFLSEEMDKALLLDPVRALILKTIYPNISHSLPSAELVQNLWDLIPKFIFTQMFRLKEYSLEDICGLLEDKKRARFRSLLLEIFDSSPNSKKTPRGDFENVFKLKMRINKISGRAPYSRIAMKKACAEIMEGRDPRANGGALYRNAENARSELLSNIDTWSNNHLVRHRLKMFKRLYVEIVNRYCGGDLSAVKSVAVEVVKDMGEFSGLDPKERAAKLNDLVCHHKSVSEYLEETYPELKISGSIIRKARIADDLGWVCPYTGRHFSPRELFESGNMELDHIIPYSLRPSNSLESLVATWKAVNEMKGQRCAAEFIKECQGMEVPGMPNVSIVTPERFEKFVSGLKKPQHNARYPDLKRIKKRNKLLLTLKYNKREGEFLPADLTQTSHLNKLAFKVVDSLYVDSEEKPELVHLPGSVTSVLRTNWDLSACMAKACPEIIVTVKSADSASGERGMGGDGLPQGLNGSVTDTAACCGGEADAPQSGGSSGGEKKVLLMKGKIRSITHLHHAVDAVAIGLAAAVFPHTNRFYELVSKRNLNRSEREELYRTGLFVFSERNWRLKELPAKLINEISDRIAEGRVVKYLPRKMSGMDVEQTLWGVVKEDVGGLVTIRQYHSKANSAKRRERKIEIEKKIKLLGYEPENVAESKLARNKAVIIIKGNFGVALTTPPKIIPRHKVWQRLGKLAAENGGKFPIVLRKNQIIDVACGRYAGRWRITSIKNNAGYIGIDMIPPIYASGAKNRLKVNVNLNTLVRDGMSIKSGCLTGAC

SEQ ID NO: 358 - protein, 1108 aa, unidentified
  REGION 1..1108: note = Description of Unknown: uncultivated organism with predicted taxonomy: Coraliomargarita sp. CAG:312
  REGION 1..1108: note = MG2-42 effector
MSRSDFCLFKLSFDIGYSSIGWSVFKIAHGDAFPILCGCGSLVFDDDCCMAKSRAAFRRARKNIASRRNRIKRMRKVLLSMGVMGPEELDNAKTDYPWLLASRVLSCGNKLSWGELWSVLRYYAHNRGYDGNSAWAKFDGDDGDSEKEANAIKLMQELGTRSQAETVCAYLGVDPSSSAKPALRKYFKGQNVAFPRQIVVPEVGRIIDAHIGHLPGCDENFKKLIMGNWREVPSPIEMPGRFTSDRGLLFGQYVPRFNNRIIPKCPIEGRNVPSCHSREFLNFRWKSLLSNMSFSEGIDIAAARKNIDSAMRLYGSFKKTTLKTIFKSLLGELPLNYESMFLSEEMDKALLLDPVRALILKTIYPNISHSLPSAELVQNLWDLIPKFIFTQMFRLKEYSLEDICGLLEDKKRARFRSLLLEIFDSSPNSKKTPRGDFENVFKLKMRINKISGRAPYSRIAMKKACAEIMEGRDPRANGGALYRNAENARSELLSNIDTWSNNHLVRHRLKMFKRLYVEIVNRYCGGDLSAVKSVAVEVVKDMGEFSGLDPKERAAKLNDLVCHHKSVSEYLEETYPELKISGSIIRKARIADDLGWVCPYTGRHFSPRELFESGNMELDHIIPYSLRPSNSLESLVATWKAVNEMKGQRCAAEFIKECQGMEVPGMPNVSIVTPERFEKFVSGLKKPQHNARYPDLKRIKKRNKLLLTLKYNKREGEFLPADLTQTSHLNKLAFKVVDSLYVDSEEKPELVHLPGSVTSVLRTNWDLSACMAKACPEIIVTVKSADSASGERGMGGDGLPQGLNGSVTDTAACCGGEADAPQSGGSSGGEKKVLLMKGKIRSITHLHHAVDAVAIGLAAAVFPHTNRFYELVSKRNLNRSEREELYRTGLFVFSERNWRLKELPAKLINEISDRIAEGRVVKYLPRKMSGMDVEQTLWGVVKEDVGGLVTIRQYHSKANSAKRRERKIEIEKKIKLLGYEPENVAESKLARNKAVIIIKGNFGVALTTPPKIIPRHKVWQRLGKLAAENGGKFPIVLRKNQIIDVACGRYAGRWRITSIKNNAGYIGIDMIPPIYASGAKNRLKVNVNLNTLVRDGMSIKSGCLTGAC

SEQ ID NO: 359 - protein, 1108 aa, unidentified; identical to SEQ ID NO: 357
  REGION 1..1108: note = Description of Unknown: uncultivated organism with predicted taxonomy: Verrucomicrobia
  REGION 1..1108: note = MG2-43 effector

SEQ ID NO: 360 - protein, 1114 aa, unidentified
  REGION 1..1114: note = Description of Unknown: uncultivated organism with predicted taxonomy: Coraliomargarita sp. CAG:312
  REGION 1..1114: note = MG2-44 effector
LASYSTKKNGAIIRAAEQENSFIFEVPYERAVFKFEPLILSLIPFKINDNNLRMSTTNLSNFNLSFDIGYSSIGWSISSKPANAVFPNWLGAGVVVFDDDSCMAKSRAEFRRMRRNIASKRNRIKRMREVLSGLGVMGKDELDNAKTEHPWFLAAETLASGKILSWSELWSVLRYYAHNRGYDGNSMWAKFGDDSDGDSEREANAEKLMDDLGTSTQAETICAYLGVDAKSPKPLRFKKYFKGQNLAFPREIVFKEVERIIDAHIGILPKCDENFKKLMIGNWREVPSNIKLPGRFTSDRGLLFGQYMPRFSNRIITKCPLSGEKTPNCHSREFLDFRWKSLLANMAFPDGTDLMETRRKIDDFMLLYGALSKNALKKILKEVIGELPSNYNGMFLASEMEKALEVDPVRALILRTVYPNISFSLPNAELVEKLWKLIPKFVFTRMFRLKEYSFADICALLSPEKSAELAEFVRVIFDSSPASKKSPKPDFETAFNFKMRVQKISGRSPYSRQLMKSASEEIMRGVDPRSEGGSLYPRSESTKKEVLSNIDTWTNNHLVRHRLKIFKRLYMDIVREYCGADKSLVKSVAIEVVKDITAFSGLDSKKKAAKLNDLVAHHKSVSAYLKKEYPELSPNGSILRKARIADDLGWVCPYTGCHFSPRQLFESGNMEREHIIPRSLRPSDSLESLVITWKEVNDMKGQRTAYEFIKECQGMKVPGRQNLSIVTPERFEAFVRRLKKPMHPAGKADIERIKIRNKLLLTEHYKKREGGFLPSDLTQTSHLNKLAFKVVKSLYADAEKAPELIHVPGIVTSVVRKNWDLLPCMGDACPEIYETLENGDKVLRLKDEIRSITHLHHAVDAVAMGLAASVFPRTRNFYEAVSKRRLNQADRQELLKTGLVLFSGDKWKLVELEKSYLKEISGRISENRVVKFLPRKMSGMDVEQTLWGVVKENENGTVTIRQYGAGKGESRRSIKKAYEPKLKLLGYESKNTAKSKLARNKAVIIIKGNFGVALANPPQIIPHHNVWQRLSELAEKNGGRFPKILRRNQIIEIPSGRYKGIWRITSIKNNSNYIGVDMIHPIYVRIKEKSKINVNLNTIIKDGMKIIDTRLIGA

SEQ ID NO: 361 - protein, 1101 aa, unidentified
  REGION 1..1101: note = Description of Unknown: uncultivated organism with predicted taxonomy: Coraliomargarita sp. CAG:312
  REGION 1..1101: note = MG2-45 effector
MSRSDFCLFKLSFDIGYSSIGWSVFKIAHGDAFPILCGCGSLVFDDDCCMAKSRAAFRRARKNIASRRNRIKRMRKVLLSMGVMGPEELDNAKTDYPWLLASRVLSCGNKLSWGELWSVLRYYAHNRGYDGNSAWAKFDGDDGDSEKEANAIKLMQELGTRSQAETVCAYLGVDPSSSAKPALRKYFKGQNVAFPRQIVISEVGRIIDAHIGHLPGCDENFKKLIMGNWREVPSPIEMPGRFTSDRGLLFGQYVPRFNNRIIPKCPIEGRNVPSCHSREFLNFRWKSLLSNMSFSEGIDIAAARKNIDSAMRLYGSFKKTTLKTIFKSLLGELPLNYESMFLSEEMDKALLLDPVRALILKTIYPNISHSLPSAELVQNLWGLIPKFIFTQMFRLKEYSLEDICGLLEDKKRARFRSLLLEIFDSSPNSKKTPRGDFENVFKLKMRINKISGRAPYSRIAMKKACAEIMEGRDPRANGGALYRNAENARSELLSNIDTWSNNHLVRHRLKMFKRLYVEIVNRYCGGDLSAVKSVAVEVVKDMGEFSGLDPKERAAKLNDLVCHHKSVSEYLEETYPELKISGSIIRKARIADDLGWVCPYTGRHFSPRELFESGNMELDHIIPYSLRPSNSLESLVATWKAVNEMKGQRCAAEFIKECQGMEVPGMPNVSIVTPERFEKFVSGLKKPQHNARYPDLKRIKKRNKLLLTLKYNKREGEFLPADLTQTSHLNKLAFKVVDSLYVDSEEKPELVHLPGSVTSVLRTNWDLSACMAKACPEIIVTVKSADSASGERGMGGDGLPQGLNGSVTDTAACCGGEADAPQSGGSSGGEKKVLLMKGKIRSITHLHHAVDAVAIGLAAAVFPHTNRFYELVSKRNLNRSEREELYRTGLFVFSERNWRLKELPAKLINEISDRIAEGRVVKYLPRKMSGMDVEQTLWGVVKEDVGGLVTIRQYHSKANSAKRRERKIEIEKKIKLLGYEPENVAESKLARNKAVIIIKGNFGVALTTPPKIIPRHKVWQRLGKLAAENGGKFPIVLRKNQIIDVACGRYAGRWRITSIKNNAGYIGIDMIPPIYASGAKNRLKVNVNLNTLVRDGMSIKS

SEQ ID NO: 362 - protein, 1114 aa, unidentified; identical to SEQ ID NO: 356
  REGION 1..1114: note = Description of Unknown: uncultivated organism with predicted taxonomy: Coraliomargarita sp. CAG:312
  REGION 1..1114: note = MG2-46 effector

SEQ ID NO: 363 - protein, 1108 aa, unidentified; identical to SEQ ID NO: 357
  REGION 1..1108: note = Description of Unknown: uncultivated organism with predicted taxonomy: Verrucomicrobia bacterium
  REGION 1..1108: note = MG2-47 effector

SEQ ID NO: 364 - protein, 1114 aa, unidentified
  REGION 1..1114: note = Description of Unknown: uncultivated organism with predicted taxonomy: Coraliomargarita sp. CAG:312
  REGION 1..1114: note = MG2-48 effector
LASYSTKKNGAIIRAAEQENSFIFEVPYERAVFKFEPLILSLIPFKINDNNLRMSTTNLSNFNLSFDIGYSSIGWSISSKPANAVFPNWLGAGVVVFDDDSCMAKSRAEFRRMRRNIASKRNRIKRMREVLSGLGVMGKDELDNAKTEHPWFLAAETLASGKILSWSELWSVLRYYAHNRGYDGNSMWAKFGDDSDGDSEREANAEKLMADLGTSTQAETICAYLGVDAKSPKPLRFKKYFKGQNLAFPREIVFKEVERIIDAHIGILPKCDENFKKLMIGNWREVPSNIKLPGRFTSDRGLLFGQYMPRFSNRIITKCPLSGEKTPNCHSREFLDFRWKSLLANMAFPDGTDLMETRRKIDDFMLLYGALSKNALKKILKEVIGELPSNYNGMFLASEMEKALEVDPVRALILRTVYPNISFSLPNAELVEKLWKLIPKFVFTRMFRLKEYSFADICALLSPEKSAELAEFVRVIFDSSPASKKSPKPDFETAFNFKMRVQKISGRSPYSRQLMKSASEEIMRGVDPRSEGGSLYPRSESTKKEVLSNIDTWTNNHLVRHRLKIFKRLYMDIVREYCGADKSLVKSVAIEVVKDITAFSGLDSKKKAAKLNDLVAHHKSVSAYLKKEYPEISPNGSILRKARIADDLGWVCPYTGCHFSPRQLFESGNMEREHIIPRSLRPSDSLESLVITWKEVNDMKGQCTAYEFIKECQGMKVPGRQNLSIVTPERFEAFVRRLKKPMHPAGKADIERIKIRNKLLLTEHYKKREGGFLPSDLTQTSHLNKLAFKVVKSLYADAEKAPELIHVPGIVTSVVRKNWDLLPCMGDACPEIYETLENGDKVLRLKDEIRSITHLHHAVDAVAMGLAASVFPRTRNFYEAVSKRRLNQADRQELLKTGLVLFSGDKWKLVELEKSYLKEISGRISENRVVKFLPRKMSGMDVEQTLWGVVKENENGTVTIRQYGAGKGESRRSIKKVYEPKLKLLGYESKNTAKSKLARNKAVIIIKGNFGVALANPPQIIPHHNVWQRLSELAEKNGGRFPKILRRNQIIEIPSGRYKGIWRITSIKNNSNYIGVDMIHPIYVRIKEKSKINVNLNTIIKDGMKIIDTRLIGA

SEQ ID NO: 365 - protein, 1108 aa, unidentified; identical to SEQ ID NO: 357
  REGION 1..1108: note = Description of Unknown: uncultivated organism with predicted taxonomy: Coraliomargarita sp. CAG:312
  REGION 1..1108: note = MG2-49 effector

SEQ ID NO: 366 - protein, 1114 aa, unidentified
  REGION 1..1114: note = Description of Unknown: uncultivated organism with predicted taxonomy: Coraliomargarita sp. CAG:312
  REGION 1..1114: note = MG2-50 effector
LASYSTKKNGAIIRAAEQENSFIFEVPYERAVFKFEPLILSLIPFKINDNNLRMSTTNLSNFNLSFDIGYSSIGWSISSKPANAVFPNWLGAGVVVFDDDSCMAKSRAEFRRMRRNIASKRNRIKRMREVLSGLGVMGKDELDNAKTEHPWFLAAETLASGKILSWSELWSVLRYYAHNRGYDGNSMWAKIGDDSDGDSEREANAEKLMADLGTSTQAETICAYLGVDAKSPKPLRFKKYFKGQNLAFPREIVFKEVERIIDAHIGILPKCDENFKKLMIGNWREVPSNIKLPGRFTSDRGLLFGQYMPRFSNRIITKCPLSGEKTPNCHSREFLDFRWKSLLANMAFPDGTDLMETRRKIDDFMLLYGALSKNALKKILKEVIGELPSNYNGMFLASEMEKALEVDPVRALILRTVYPNISFSLPNAELVEKLWKLIPKFVFTRMFRLKEYSFADICALLSPEKSAELAEFVRVIFDSSPASKKSPKPDFETAFNFKMRVQKISGRSPYSRQLMKSASEEIMRGVDPRSEGGSLYPRSESTKKEVLSNIDTWTNNHLVRHRLKIFKRLYMDIVREYCGADKSLVKSVAIEVVKDITAFSGLDSKKKAAKLNDLVAHHKSVSAYLKKEYPELSPNGSILRKARIADDLGWVCPYTGCHFSPRQLFESGNMEREHIIPRSLRPSDSLESLVITWKEVNDMKGQRTAYEFIKECQGMKVPGRQNLSIVTPERFEAFVRRLKKPMHPAGKADIERIKIRNKLLLTEHYKKREGGFLPSDLTQTSHLNKLAFKVVKSLYADAEKAPELIHVPGIVTSVVRKNWDLLPCMGDACPEIYETLENGDKVLRLKDEIRSITHLHHAVDAVAMGLAASVFPRTRNFYEAVSKRRLNQADRQELLKTGLVLFSGDKWKLVELEKSYLKEISGRISENRVVKFLPRKMSGMDVEQTLWGVVKENENGTVTIRQYGAGKGESRRSIKKVCEPKLKLLGYESKNTAKSKLARNKAVIIIKGNFGVALANPPQIIPHHNVWQRLSELAEKNGGRFPKILRRNQIIEIPSGRYKGIWRITSIKNNSNYIGVDMIHPIYVRIKEKSKINVNLNTIIKDGMKIIDTRLIGA

SEQ ID NO: 367 - protein, 888 aa, unidentified
  REGION 1..888: note = Description of Unknown: uncultivated organism with predicted taxonomy: Coraliomargarita sp. CAG:312
  REGION 1..888: note = MG2-51 effector
VDAKSPKPLRFKKYFKGQNLAFPREIVFKEVERIIDAHIGILPKCDENFKKLMIGNWREVPSNIKLPGRFTSDRGLLFGQYMPRFSNRIITKCPLSGEKTPNCHSREFLDFRWKSLLANMAFPDGTDLMETRRKIDDFMLLYGALSKNALKKILKEVIGELPSNYNGMFLASEMEKALEVDPVRALILRTAYPNISFSLPNAELVEKLWKLIPKFVFTRMFRLKEYSFADICALLSPEKSAELAEFVRVIFDSSPASKKSPKPDFETAFNFKMRVQKISGRSPYSRQLMKSASEEIMRGVDPRSEGGSLYPRSESTKKEVLSNIDTWTNNHLVRHRLKIFKRLYMDIAREYCGADKSLVKSVAIEVVKDITAFSGLDSKKKAAKLNDLVAHHKSVSAYLKKEYPELSPNGSILRKARIADDLGWVCPYTGCHFSPRQLFESGNMEREHIIPRSLRPSDSLESLVITWKEVNDMKGQRTAYEFIKECQGMKVPGRQNLSIVTPERFEAFVRRLKKPMHPAGKADIERIKIRNKLLLTEHYKKREGGFLPSDLTQTSHLNKLAFKVVKSLYADAEKAPELIHVPGIVTSVVRKNWDLLPCMGDACPEIYETLENGDKVLRLKDEIRSITHLHHAVDAVAMGLAASVFPRTRNFYEAVSKRRLNQADRQELLKTGLVLFSGDKWKLVELEKSYLKEISGRISENRVVKFLPRKMSGMDVEQTLWGVVKENENGTVTIRQYGAGKGESRRSIKKVYEPKLKLLGYESKNTAKSKLARNKAVIIIKGNFGVALANPPQIIPHHNVWQRLSELAEKNGGRFPKILRRNQIIEIPSGRYKGIWRITSIKNNSNYIGVDMIHPIYARIKEKSKINVNLNTIIKDGMKIIDTRLIGA

SEQ ID NO: 368 - protein, 1108 aa, unidentified
  REGION 1..1108: note = Description of Unknown: uncultivated organism with predicted taxonomy: Verrucomicrobia bacterium
  REGION 1..1108: note = MG2-52 effector
MSRSDFCLFKLSFDIGYSSIGWSVFKIAHGDAFPILCGCGSLVFDDDCCMAKSRAAFRRARKNIASRRNRIKRMRKVLLSMGVMGPEELDNAKTDYPWLLASRVLSCGNKLSWGELWSVLRYYAHNRGYDGNSAWAKFDGDDGDSEKEANAIKLMQELGTRSQAETVCAYLVVDPSSSAKPALRKYFKGQNVAFPRQIVISEVGRIIDAHIGHLPGCDENFKKLIMGNWREVPSPIEMPGRFTSDRGLLFGQYVPRFNNRIIPKCPIEGRNVPSCHSREFLNFRWKSLLSNMSFSEGIDIAAARKNIDSAMRLYGSFKKTTLKTIFKSLLGELPLNYESMFLSEEMDKALLLDPVRALILKTIYPNISHSLPSAELVQNLWDLIPKFIFTQMFRLKEYSLEDICGLLEDKKRARFRSLLLEIFDSSPNSKKTPRGDFENVFKLKMRINKISGRAPYSRIAMKKACAEIMEGRDPRANGGALYRNAENARSELLSNIDTWSNNHLVRHRLKMFKRLYVEIVNRYCGGDLSAVKSVAVEVVKDMGEFSGLDPKERAAKLNDLVCHHKSVSEYLEETYPELKISGSIIRKARIADDLGWVCPYTGRHFSPRELFESGNMELDHIIPYSLRPSNSLESLVATWKAVNEMKGQRCAAEFIKECQGMEVPGMPNVSIVTPERFEKFVSGLKKPQHNARYPDLKRIKKRNKLLLTLKYNKREGEFLPADLTQTSHLNKLAFKVVDSLYVDSEEKPELVHLPGSVTSVLRTNWDLSACMAKACPEIIVTVKSADSASGERGMGGDGLPQGLNGSVTDTAACCGGEADAPQSGGSSGGEKKVLLMKGKIRSITHLHHAVDAVAIGLAAAVFPHTNRFYELVSKRNLNRSEREELYRTGLFVFSERNWRLKELPAKLINEISDRIAEGRVVKYLPRKMSGMDVEQTLWGVVKEDVGGLVTIRQYHSKANSAKRRERKIEIEKKIKLLGYEPENVAESKLARNKAVIIIKGNFGVALTTPPKIIPRHKVWQRLGKLAAENGGKFPIVLRKNQIIDVACGRYAGRWRITSIKNNAGYIGIDMIPPIYASGAKNRLKVNVNLNTLVRDGMSIKSGCLTGAC

SEQ ID NO: 369 - protein, 1108 aa, unidentified
  REGION 1..1108: note = Description of Unknown: uncultivated organism with predicted taxonomy: Verrucomicrobia bacterium
  REGION 1..1108: note = MG2-53 effector
MSRSDFCLFKLSFDIGYSSIGWSVFKIAHGDAFPILCGCGSLVFDDDCCMAKSRAAFRRARKNIASRRNRIKRMRKVLLSMGVMGPEELDNAKTDYPWLLASRVLSCGNKLSWGELWSVLRYYAHNRGYDGNSAWAKFDGDDGDSEKEANAIKLMQELGTRSQAETVCAYLGVDPSSSAKPALRKYFKGQNVAFPRQIVISEVGRIIDAHIGHLPGCDENFKKLIMGNWREVPSPIEMPGRFTSDRGLLFGQYVPRFNNRIIPKCPIEGRNVPSCHSREFLNFRWKSLLSNMSFSEGIDIAAARKNIDSAMRLYGSFKKTTLKTIFKSLLGELPLNYESMFLSEEMDKALLLDPVRALILKTIYPNISHSLPSAELVQNLWDLIPKFIFTQMFRLKEYSLEDIYGLLEDKKRARFRSLLLEIFDSSPNSKKTPRGDFENVFKLKMRINKISGRAPYSRIAMKKACAEIMEGRDPRANGGALYRNAENARSELLSNIDTWSNNHLVRHRLKMFKRLYVEIVNRYCGGDLSAVKSVAVEVVKDMGEFSGLDPKERAAKLNDLVCHHKSVSEYLEETYPELKISGSIIRKARIADDLGWVCPYTGRHFSPRELFESGNMELDHIIPYSLRPSNSLESLVATWKAVNEMKGQRCAAEFIKECQGMEVPGMPNVSIVTPERFEKFVSGLKKPQHNARYPDLKRIKKRNKLLLTLKYNKREGEFLPADLTQTSHLNKLAFKVVDSLYVDSEEKPELVHLPGSVTSVLRTNWDLSACMAKACPEIIVTVKSADSASGERGMGGDGLPQGLNGSVTDTAACCGGEADAPQSGGSSGGEKKVLLMKGKIRSITHLHHAVDAVAIGLAAAVFPHTNRFYELVSKRNLNRSEREELYRTGLFVFSERNWRLKELPAKLINEISDRIAEGRVVKYLPRKMSGMDVEQTLWGVVKEDVGGLVTIRQYHSKANSAKRRERKIEIEKKIKLLGYEPENVAESKLARNKAVIIIKGNFGVALTTPPKIIPRHKVWQRLGKLAAENGGKFPIVLRKNQIIDVACGRYAGRWRITSIKNNAGYIGIDMIPPIYASGAKNRLKVNVNLNTLVRDGMSIKSGCLTGAC

SEQ ID NO: 370 - protein, 865 aa, unidentified
  REGION 1..865: note = Description of Unknown: uncultivated organism with predicted taxonomy: Coraliomargarita sp. CAG:312
  REGION 1..865: note = MG2-54 effector
MSINILNNLRESNKFELSFDIGYSSIGWSVFKKQSGGIFPTLLGAGTVIFDDDACLAKSRAGFRRMRKNIASRRNRIKRLRDAMLNLDVMAVDELDNAKTAYPWFLSAKVLACGKKLSWSELWSVIRYYAHNRGYDGNSAWAEIESDSDGDFEKEANAKKLMAELGTSTQAETVCAYLGVDVKSDKPLSLRKYFKGQNLAFPRETVVKEVERIIDAHIGVLPKCDGNFKKLMIGNWREVPSNIELPRRFTSDRGLLFGQYIPRFDNRIITKCPISGEKTPNCHSREFLDFRWKSLLANMAFPDGADLIAARAKVDAAMFLYGALKKTVLKKILKEVLGELPSNYNAMFLASEMEKALELDPVKALILKTAYPNISFSLPSAELVEKLWKLIPKFVFTRMFKLKEYSFADICALLDSEKSEELKNVVRAIFDSSASSKKSPKPDFETAFNYKMRVKKISGRSPYSRRLMKLASEEIMRGIDPRSEGGSLYPRRDSTRKELLSNIDSWTNNHLVRHRLKMFKRLYMDIVNEYCGGDISLVKSVAIEVVKDMTAFSGLDSKKKAAKLKDLVAHHESVSKYLKNEYPNLKTNGSILRKARIADDLGWVCPYTGCHFSPRQLFESGNMEKEHIIPRSLRPSDSLESLVVTWKEVNDMKGQRTALEFIKECQGMKVPGRPNLSIVTPARFEEFVSGLRKPMHRAGKADIERIKIRNKLLLTEHYKNREGEFLPSDLTQTSHLNKLAFKLVKSLYVDAGKTPELVHLPGSVTSAVRKNWELLPCMGDVCPEIYETLENGDKVLLLKDKIRSITHLHHAVDAVAMGLAASVFPRTKRFYEAVSKRHLSEADREELLNTGLVLFSDDKWKLVEL

SEQ ID NO: 371 - protein, 1061 aa, unidentified
  REGION 1..1061: note = Description of Unknown: uncultivated organism with predicted taxonomy: Coraliomargarita sp. CAG:312
  REGION 1..1061: note = MG2-55 effector
MSTTNLSNFNLSFDIGYSSIGWSISSKPANAVFPNWLGAGVVVFDDDSCMAKSRAEFRRMRRNIASKRNRIKRMREVLSGLGVMGKDELDNAKTEHPWFLAAETLASGKILSWSELWSVLRYYAHNRGYDGNSMWAKFGDDSDGDSEREANAEKLMADLGTSTQAETICAYLGVDAKSPKPLRFKKYFKGQNLAFPREIVFKEVDRIIDAHIGILPKCDENFKKLMIGNWREVPSNIKLPGRFTSDRGLLFGQYMPRFSNRIITKCPLSGEKTPNCHSREFLDFRWKSLLANMAFPDGTDLMETRRKIDDFMLLYGALSKNALKKILKEVIGELPSNYNGMFLASEMEKALEVDPVRALILRTVYPNISFSLPNAELVEKLWKLIPKFVFTRMFRLKEYSFADICALLSPEKSAELAEFVRVIFDSSPASKKSPKPDFETAFNFKMRVQKISGRSPYSRQLMKSASEEIMRGVDPRSEGGSLYPRSESTKKEVLSNIDTWTNNHLVRHRLKIFKRLYMDIVREYCGADKSLVKSVAIEVVKDITAFSGLDSKKKAAKLNDLVAHHKSVSAYLKKEYPELSPNGSILRKARIADDLGWVCPYTGCHFSPRQLFESGNMEREHIIPRSLRPSDSLESLVITWKEVNDMKGQRTAYEFIKECQGMKVPGRQNLSIVTPERFEAFVRRLKKPMHPAGKADIERIKIRNKLLLTEHYKKREGGFLPSDLTQTSHLNKLAFKVVKSLYADAEKAPELIHVPGTVTSVVRKNWDLLPCMGDACPEIYETLENGDKVLRLKDEIRSITHLHHAVDAVAMGLAASVFPRTRNFYEAVSKRRLNQADRQELLKTGLVLFSGDKWKLVELEKSYLKEISGRISENRVVKFLPRKMSGMDVEQTLWGVVKENENGTVTIRQYGAGKGESRRSIKKVYEPKLKLLGYESKNTAKSKLARNKAVIIIKGNFGVALANPPQIIPHHNVWQRLSELAEKNGGRFPKILRRNQIIEIPSGRYKGIWRITSIKNNSNYIGVDMIHPIYARIKEKSKINVNLNTIIKDGMKIIDTRLIGA

SEQ ID NO: 372 - protein, 1114 aa, unidentified
  REGION 1..1114: note = Description of Unknown: uncultivated organism with predicted taxonomy: Coraliomargarita sp. CAG:312
  REGION 1..1114: note = MG2-56 effector
LASYSTKKNGAIIRAAEQENSFIFEVPYERAVFKFEPLILSLIPFKINDNNLKMSTTNLSNFNLSFDIGYSSIGWSISSKPANAVFPNWLGAGVVVFDDDSCMAKSRAEFRRMRRNIASKRNRIKRMREVLSGLGVMGKDELDNAKTEHPWFLAAETLASGKILSWSELWSVLRYYAHNRGYDGNSMWAKFGDDSDGDSEREANAEKLMADLGTSTQAETICAYLGVDAKSPKPLRFKKYFKGQNLAFPREIVFKEVERIIDAHIGILPKCDENFKKLMIGNWREVPSNIKLPRRFTSDRGLLFGQYMPRFSNRIITKCPLSGEKTPNCHSREFLDFRWKSLLANMAFPDGTDLMETRRKIDDFMLLYGALSKNALKKILKEVIGELPSNYNGMFLASEMEKALEVDPVRALILRTVYPNISFSLPNAELVEKLWKLIPKFVFTRMFRLKEYSFADICALLSPEKSAELAEFVRVIFDSSPASKKSPKPDFETAFNFKMRVQKISGRSPYSRQLMKSASEEIMRGVDPRSEGGSLYPRSESTKKEVLSNIDTWTNNHLVRHRLKIFKRLYMDIVREYCGADKSLVKSVAIEVVKDITAFSGLDSKKKAAKLNDLVAHHKSVSAYLKKEYPELSPNGSILRKARIADDLGWVCPYTGCHFSPRQLFESGNMEREHIIPRSLRPSDSLESLVITWKEVNDMKGQRTAYEFIKECQGMKVPGRQNLSIVTPERFEAFVRRLKKPMHPAGKADIERIKIRNKLLLTEHYKKREGGFLPSDLTQTSHLNKLAFKVVKSLYADAEKAPELIHVPGIVTSVVRKNWNLLPCMGDACPEIYETLENGDKVLRLKDEIRSITHLHHAVDAVAMGLAASVFPRTRNFYEAVSKRRLNQADRQELLKTGLVLFSGDKWKLVELEKSYLKEISGRISENRVVKFLPRKMSGMDVEQTLWGVVKENENGTVTIRQYGAGKGESRRSIKKAYEPKLKLLGYESKNTAKSKLARNKAVIIIKGNFGVALANPPQIIPHHNVWQRLSELAEKNGGRFPKILRRNQIIEIPSGRYKGIWRITSIKNNSNYIGVDMIHPIYARIKEKSKINVNLNTIIKDGMKIIDTRLIGA

SEQ ID NO: 373 - protein, 1108 aa, unidentified
  REGION 1..1108: note = Description of Unknown: uncultivated organism with predicted taxonomy: Coraliomargarita sp. CAG:312
  REGION 1..1108: note = MG2-57 effector
MSRSDFCLFKLSFDIGYSSIGWSVFKIAHGDAFPILCGCGSLVFDDDCCMAKSRAAFRRARKNIASRRNRIKRMRKVLLSMGVMGPEELDNAKTDYPWLLASRVLSCGNKLSWGELWSVLRYYAHNRGYDGNSAWAKFDGDDGDSEKEANAIKLMQELGTRSQAETVCAYLGVDPSSSAKPALRKYFKGQNVAFPRQIVISEVGRIIDAHIGHLPGCDENFKKLIMGNWREVPSPIEMPGRFTSDRGLLFGQYVPRFNNRIIPKCPIEGRNVPSCHSREFLNFRWKSLLSNMSFSEGIDIAAARKNIDSAMRLYGSFKKTTSKTIFKSLLGELPLNYESMFLSEEMDKALLLDPVRALILKTIYPNISHSLPSAELVQNLWDLIPKFIFTQMFRLKEYSLEDICGLLEDKKRARFRSLLLEIFDSSPNSKKTPRGDFENVFKLKMRINKISGRAPYSRIAMKKACAEIMEGRDPRANGGALYRNAENARSELLSNIDTWSNNHLVRHRLKMFKRLYVEIVNRYCGGDLSAVKSVAVEVVKDMGEFSGLDPKERAAKLNDLVCHHKSVSEYLEETYPELKISGSIIRKARIADDLGWVCPYTGRHFSPRELFESGNMELDHIIPYSLRPSNSLESLVATWKAVNEMKGQRCAAEFIKECQGMEVPGMPNVSIVTPERFEKFVSGLKKPQHNARYPDLKRIKKRNKLLLTLKYNKREGEFLPADLTQTSHLNKLAFKVVDSLYVDSEEKPELVHLPGSVTSVLRTNWDLSACMAKACPEIIVTVKSADSASGERGMGGDGLPQGLNGSVTDTAACCGGEADAPQSGGSSGGEKKVLLMKGKIRSITHLHHAVDAVAIGLAAAVFPHTNRFYELVSKRNLNRSEREELYRTGLFVFSERNWRLKELPAKLINEISDRIAEGRVVKYLPRKMSGMDVEQTLWGVVKEDVGGLVTIRQYHSKANSAKRRERKIEIEKKIKLLGYEPENVAESKLARNKAVIIIKGNFGVALTTPPKIIPRHKVWQRLGKLAAENGGKFPIVLRKNQIIDVACGRYAGRWRITSIKNNAGYIGIDMIPPIYASGAKNRLKVNVNLNTLVRDGMSIKSGCLTGAC

SEQ ID NO: 374 - protein, 1108 aa, unidentified; identical to SEQ ID NO: 357
  REGION 1..1108: note = Description of Unknown: uncultivated organism with predicted taxonomy: Verrucomicrobia bacterium
  REGION 1..1108: note = MG2-58 effector

SEQ ID NO: 375 - protein, 1061 aa, unidentified; identical to SEQ ID NO: 354
  REGION 1..1061: note = Description of Unknown: uncultivated organism with predicted taxonomy: Coraliomargarita sp. CAG:312
  REGION 1..1061: note = MG2-59 effector

SEQ ID NO: 376 - protein, 1114 aa, unidentified; identical to SEQ ID NO: 366
  REGION 1..1114: note = Description of Unknown: uncultivated organism with predicted taxonomy: Coraliomargarita sp. CAG:312
  REGION 1..1114: note = MG2-60 effector

SEQ ID NO: 377 - protein, 1114 aa, unidentified
  REGION 1..1114: note = Description of Unknown: uncultivated organism with predicted taxonomy: Coraliomargarita sp. CAG:312
  REGION 1..1114: note = MG2-61 effector
LASYSTKKNGAIIRAAEQENSFIFEVPYERAVFKFEPLILSLIPFKINDNNLRMSTTNLSNFNLSFDIGYSSIGWSISSKPANAVFPNWLGAGVVVFDDDSCMAKSRAEFRRMRRNIASKRNRIKRMREVLSGLGVMGKDELDNAKTEHPWFLAAETLASGKILSWSELWSVLRYYAHNRGYDGNSMWAKFGDDSDGDSEREANAEKLMADLGTSTQAETICAYLGVDAKSPKPLRFKKYFKGQNLAFPREIVFKEVERIIDAHIGILPKCDENFKKLMIGNWREVPSNIKLPGRFTSDRGLLFGQYMPRFSNRIITKCPLSGEKTPNCHSREFLDFRWKSLLANMAFPDGTDLMETRRKIDDFMLLYGALSKNALKKILKEVIGELPSNYNGMFLASEMEKALEVDPVRALILRTVYPNISFSLPNAELVEKLWKLIPKFVFTRMFRLKEYSFADICALLSPEKSAELAEFVRVIFDSSPASKKSPKPDFETAFNFKMRVQKISGRSPYSRQLMKSASEEIMRGVDPRSEGGSLYPRSESTKKEVLSNIDTWTNNHLVRHRLKIFKRLYMDIVREYCGADKSLVKSVAIEVVKDITAFSGLDSKKKAAKLNDLVAHHKSVSAYLKKEYPELSPNGSILRKARIADDLGWVCPYTGCHFSPRQLFESGNMEREHIIPRSLRPSDSLESLVITWKEVNDMKGQRTAYEFIKECQGMKVPGRQNLSIVTPERFEAFVRRLKKPMHPAGKADIERIKIRNKLLLTEHYKKREGGFLPSDLTQTSHLNKLAFKVVKSLYADAEKAPELIHVPGIVTSVVRKNWDLLPCMGDACPEIYETLENGDKVLRLKDEIRSITHLHHAVDAVAMGLAASVFPRTRNFYEAVSKRRLNQADRQELLKTGLVLFSGDKWKLVELEKSYLKEISGRISENRVVKFLPRKMSGMDVEQTLWGVVKENENGTVTIRQYGAGKGESRRSIKKAYEPKLKLLGYESKNTAKSKLARNKAVIIIKGNFGVALANPPQIIPHHNVWQRLSELAEKNGGRFPKILRRNQIIEIPSGRYKGIWRITSIKNNSNYIGVDMIHPIYVRIKEKSKINVNLNTIIKDGMKIIDTRLIGA

SEQ ID NO: 378 - protein, 1101 aa, unidentified
  REGION 1..1101: note = Description of Unknown: uncultivated organism with predicted taxonomy: Verrucomicrobia
  REGION 1..1101: note = MG2-62 effector
MDPANLALSFDIGYASLGWAVFLLKDPFPSLLGSGSVLFQKDSCLASSRRAFRRARRNIAARRSRVARLKKYLASLGVLEREQLDENACAYPWLLAARVLASDGKEKLSWQELWHVLRWYAHSRGYDGNALWAGDALDETGADDEDTQKVKAARALMEKYGKTTMAETVCADLQLEPFGEKRASRRYFKGNNAAFPRETVRDEVRRILLAHAGVLPKVDDALAATLLNDVPENLCAALRLPARFSAKGGLLFGQYVPRFDNRIIGHCRITGKNVPLKNCREYLLYRWGRLLNNLTVFARDGSIRTLSADKPNGRPSEREKLDAEMRSRGFFDKKKLNDLLKEITGCEPANTESYFLIPEMEDALILDPVRKLIATKKLVKDFWGYFSERGKKIFAAELAKGKTLKLSDCIKRMDGWGGWKTKPLFAAALEKLKAAEMKKKPEKRRNLLNLRIKAEFPTGRASYCREILKKTYEEALAGKDSTQPGGCLYETPEIRERLLRGNAVGDDAGTVATEQWLAGQTNNHMVRHRMLIFSRLLRDIIREYAEGDAARVKDVVVEVVRELKEFSGLSAQEIATKLNEKFANFNSVAEKIEAAAQEKGVSVSASLIRKARLLEDQGFACPYTGKNISYNELFSGALEIEHIIPRSLRPSDALSSCVMTFRAVNDMKGQRTAMQFMKECAGKDVPGTNLQIQPLANFKEWVEAHRSQKLRRGFSKEDQARCKRRAELLLVERYEERNADFTERDLTQTSHLNKLAIRLVKRELGIDARHLAGAVTGFVRKNLSIDECLVAAVPRMQRAQRVSEHDSRKLLKSQMRELSHLHHAMDAITQGLTGILFRVEDWKLLVKRHLTERERAVLAAKYPTLLRFSANGEIALKPLPDSLLSEITARLKECRVVQHVPAKMHGLAVEQTTWSIVSQDEATRKVSLEQHTTDLKKGRYKDDGTRFVKNCEEKPALLLGFGVPEEQKSKLQAIKGVVKICENWGCALDPEPVVIPYFKVFPRLRELRERNGGKPVRVLRRGQQIEVLSGKFKGVWTIVSIKDATRDGILLDICAPDKVRQTEHGTTDSKVGVLLKSLLRAGLKILKPPLTGFACPTTSSQ

SEQ ID NO: 379 - protein, 1114 aa, unidentified
  REGION 1..1114: note = Description of Unknown: uncultivated organism with predicted taxonomy: Coraliomargarita sp. CAG:312
  REGION 1..1114: note = MG2-63 effector
LASYSTKKNGATIRAAEQENSFIFEVPYERAVFKFEPLILSLIPFKINDNNLRMSTTNLSNFNLSFDIGYSSIGWSISSKPANAVFPNWLGAGVVVFDDDSCMAKSRAEFRRMRRNIASKRNRIKRMREVLSGLGVMGKDELDNAKTEHPWFLAAETLASGKILSWSELWSVLRYYAHNRGYDGNSMWAKFGDDSDGDSEREANAEKLMADLGTSTQAETICAYLGVDAKSPKPLRFKKYFKGQNLAFPREIVFKEVERIIDAHIGILPKCDENFKKLMIGNWREVPSNIKLPGRFTSDRGLLFGQYMPRFSNRIITKCPLSGEKTPNCHSREFLDFRWKSLLANMAFPDGTDLMETRRKIDDFMLLYGALSKNALKKILKEVIGELPSNYNGMFLASEMEKALEVDPVRALILRTVYPNISFSLPNAELVEKLWKLIPKFVFTRMFRLKEYSFADICALLSPEKSAELAEFVRVIFDSSPASKKSPKPDFETAFNFKMRVQKISGRSPYSRQLMKSASEEIMRGVDPRSEGGSLYPRSESTKKEVLSNIDTWTNNHLVRHRLKIFKRLYMDIVREYCGADKSLVKSVAIEVVKDITAFSGLDSKKKAAKLNDLVAHHKSVSAYLKKEYPELSPNGSILRKARIADDLGWVCPYTGCHFSPRQLFESGNMEREHIIPRSLRPSDSLESLVITWKEVNDMKGQRTAYEFIKECQGMKVPGRQNLSIVTPERFEAFVRRLKKPMHPAGKADIERIKIRNKLLLTEHYKKREGGFLPSDLTQTSHLNKLAFKVVKSLYADAEKAPELIHVPGIVTSVVRKNWDLLPCMGDACPEIYETLENGDKVLRLKDEIRSITHLHHAVDAVAMGLAASVFPRTRNFYEAVSKRRLNQADRQELLKTGLVLFSGDKWKLVELEKSYLKEISGRISENRVVKFLPRKMSGMDVEQTLWGVVKENENGTVTIRQYGAGKGESRRSIKKAYEPKLKLLGYESKNTAKSKLARNKAVIIIKGNFGVALANPPQIIPHHNVWQRLSELAEKNGGRFPKILRRNQIIEIPSGRYKGIWRITSIKNNSNYIGVDMIHPIYVRIKEKSKINVNLNTIIKDGMKIIDTRLIGA

SEQ ID NO: 380 - protein, 888 aa, unidentified; identical to SEQ ID NO: 367
  REGION 1..888: note = Description of Unknown: uncultivated organism with predicted taxonomy: Coraliomargarita sp. CAG:312
  REGION 1..888: note = MG2-64 effector

SEQ ID NO: 381 - protein, 1108 aa, unidentified; identical to SEQ ID NO: 369
  REGION 1..1108: note = Description of Unknown: uncultivated organism with predicted taxonomy: Coraliomargarita sp. CAG:312
  REGION 1..1108: note = MG2-65 effector

SEQ ID NO: 382 - protein, 1046 aa, unidentified
  REGION 1..1046: note = Description of Unknown: uncultivated organism with predicted taxonomy: Coraliomargarita sp. CAG:312
  REGION 1..1046: note = MG2-66 effector
LPSYSTKKNGAIIRAAEQENSFIFEVPYERAVFKFEPLILSLIPFKINDNNLRMSTTNLNNFNLSFDIGYSSIGWSISSKPANAVFPNWLGAGVVVFDDDSCMAKSRAEFRRMRRNIASKRNRIKRMREVLYGLGVMGKDELDNAKTEHPWFLAAETLASGKILSWSELWSVLRYYAHNRGYDGNSMWAKFGDDSDGDFEREANAEKLMADLGTSTQAETICAYLGVDAKSPKPLRFKKYFKGQNLAFPREIVFKEVERIIDAHIGILPKCDENFKKLMIGNWREVPSNIKLPGRFTSDRGLLFGQYMPRFSNRIITKCPLSGEKTPNCHSREFLDFRWKSLLANMAFPDGTDLMETRRKIDDFMLLYGALSKNALKKILKEVIGELPSNYNGMFLASEMEKALEVDPVRALILRTVYPNISFSLPNAELVEKLWKLIPKFVFTRMFRLKEYSFADICALLSPEKSAELAEFVRVIFDSSPASKKSPKPDFETAFNFKMRVQKISGRSPYSRQLMKSASEEIMRGVDPRSEGGSLYPRSESTKKEVLSNIDTWTNNHLVRHRLKIFKRLYMDIVREYCGADKSLVKSVAIEVVKDITAFSGLDSKKKAAKLNDLVAHHKSVSAYLKKEYPELSPNGSILRKARIADDLGWVCPYTGCHFSPRQLFESGNMEREHIIPRSLRPSDSLESLVITWKEVNDMKGQRTAYEFIKECQGMKVPGRQNLSIVTPERFEAFVRRLKKPMHPAGKADIERIKIRNKLLLTEHYKKREGGFLPSDLTQTSHLNKLAFKVVKSLYADAEKAPELIHVPGTVTSVVRKNWDLLPCMGDACPEIYETLENGDKVLRLKDEIRSITHLHHAVDAVAMGLAASVFPRTRNFYEAVSKRRLNQADRQELLKTGLVLFSGDKWKLVELEKSYLKEISGRISENRVVKFLPRKMSGMDVEQTLWGVVKENENGTVTIRQYGAGKGESRRSIKKVYEPKLKLLGYESKNTAKSKLARNKAVIIIKGNFGVALANPPQIIPHHNVWQRLSELAEKNGGRFPKILR

SEQ ID NO: 383 - protein, 1114 aa, unidentified; identical to SEQ ID NO: 352
  REGION 1..1114: note = Description of Unknown: uncultivated organism with predicted taxonomy: Coraliomargarita sp. CAG:312
  REGION 1..1114: note = MG2-67 effector

SEQ ID NO: 384 - protein, 1114 aa, unidentified; identical to SEQ ID NO: 364
  REGION 1..1114: note = Description of Unknown: uncultivated organism with predicted taxonomy: Coraliomargarita sp. CAG:312
  REGION 1..1114: note = MG2-68 effector

SEQ ID NO: 385 - protein, 1114 aa, unidentified; identical to SEQ ID NO: 356
  REGION 1..1114: note = Description of Unknown: uncultivated organism with predicted taxonomy: Coraliomargarita sp. CAG:312
  REGION 1..1114: note = MG2-69 effector

SEQ ID NO: 386 - protein, 1114 aa, unidentified; identical to SEQ ID NO: 360
  REGION 1..1114: note = Description of Unknown: uncultivated organism with predicted taxonomy: Coraliomargarita sp. CAG:312
  REGION 1..1114: note = MG2-70 effector

SEQ ID NO: 387 - protein, 1114 aa, unidentified; identical to SEQ ID NO: 356
  REGION 1..1114: note = Description of Unknown: uncultivated organism with predicted taxonomy: Coraliomargarita sp. CAG:312
  REGION 1..1114: note = MG2-71 effector

SEQ ID NO: 388 - protein, 1114 aa, unidentified
  REGION 1..1114: note = Description of Unknown: uncultivated organism with predicted taxonomy: Coraliomargarita sp. CAG:312
  REGION 1..1114: note = MG2-72 effector
LASYSTKKNGAIIRAAEQENSFIFEVPYERAVFKFEPLILSLIPFKINDNNLRMSTTNLSNFNLSFDIGYSSIGWSISSKPANAVFPNWLGAGVVVFDDDSCMAKSRAEFRRMRRNIASKRNRIKRMREVLSGLGVMGKDELDNAKTEHPWFLAAETLASGKILSWSELWSVLRYYAHNRGYDGNSMWAKFGDDSDGDSEREANAEKLMADLGTSTQAETICAYLGVDAKSPKPLRFKKYFKGQNLAFPREIVFKEVERIIDAHIGILPKCDENFKKLMIGNWREVPSNIKLPGRFTSDRGLLFGQYMPRFSNRIITKCPLSGEKTPNCHSREFLDFRWKSLLANMAFPDGTDLMETRRKIDDFMLLYGALSKNALKKILKEVIGELPSNYNGMFLASEMEKALEVDPVRALILRTVYPNISFSLPNAELVEKLWKLIPKFVFTRMFRLKEYSFADICALLSPEKSAELAEFVRVIFDSSPASKKSPKPDFETAFNFKMRVQKISGRSPYSRQLMKSASEEIMRGVDPRSEGGSLYPRSESTKKEVLSNIDMWTNNHLVRHRLKIFKRLYMDIVREYCGADKSLVKSVAIEVVKDITAFSGLDSKKKAAKLNDLVAHHKSVSAYLKKEYPELSPNGSILRKARIADDLGWVCPYTGCHFSPRQLFESGNMEREHIIPRSLRPSDSLESLVITWKEVNDMKGQRTAYEFIKECQGMKVPGRQNLSIVTPERFEAFVRRLKKPMHPAGKADIERIKIRNKLLLTEHYKKREGGFLPSDLTQTSHLNKLAFKVVKSLYADAEKAPELIHVPGIVTSVVRKNWDLLPCMGDACPEIYETLENGDKVLRLKDEIRSITHLHHAVDAVAMGLAASVFPRTRNFYEAVSKRRLNQADRQELLKTGLVLFSGDKWKLVELEKSYLKEISGRISENRVVKFLPRKMSGMDVEQTLWGVVKENENGTVTIRQYGAGKGESRRSIKKAYEPKLKLLGYESKNTAKSKLARNKAVIIIKGNFGVALANPPQIIPHHNVWQRLSELAEKNGGRFPKILRRNQIIEIPSGRYKGIWRITSIKNNSNYIGVDMIHPIYVRIKEKSKINVNLNTIIKDGMKIIDTRLIGA

SEQ ID NO: 389 - protein, 1108 aa, unidentified; identical to SEQ ID NO: 368
  REGION 1..1108: note = Description of Unknown: uncultivated organism with predicted taxonomy: Verrucomicrobia bacterium
  REGION 1..1108: note = MG2-73 effector

SEQ ID NO: 390 - protein, 1101 aa, unidentified
  REGION 1..1101: note = Description of Unknown: uncultivated organism with predicted taxonomy: Verrucomicrobia
  REGION 1..1101: note = MG2-74 effector
MDPANLALSFDIGYASLGWAVFLLKDPFPSLLGSGSVLFQKDSCLASSRRAFRRARRNIAARRSRVARLKKYLASLGVLEREQLDENACAYPWLLAARVLASDGKEKLSWQELWHVLRWYAHSRGYDGNALWAGDALDETGADDEDTQKVKAARALMEKYGKTTMAETVCADLQLEPFGEKRASRRYLKGNNAAFPRETVRDEVRRILLAHAGVLPKVDDALAATLLNDVPENLCAALRLPARFSAKGGLLFGQYVPRFDNRIIGHCRITGKNVPLKNCREYLLYRWGRLLNNLTVFARDGSIRTLSADKPNGRPSEREKLDAEMRSRGFFDKKKLNDLLKEITGCEPANTESYFLIPEMEDALILDPVRKLIATKKLVKDFWGYFSERGKKIFAAELAKGKTLKLSDCIKRMDGWGGWKTKPLFAAALEKLKAAEMKKKPEKRRNLLNLRIKAEFPTGRASYCREILKKTYEEALAGKDSTQPGGCLYETPEIRERLLRGNAVGDDAGTVATEQWLAGQTNNHMVRHRMLIFSRLLRDIIREYAEGDAARVKDVVVEVVRELKEFSGLSAQEIATKLNEKFANFNSVAEKIEAAAQEKGVSVSASLIRKARLLEDQGFACPYTGKNISYNELFSGALEIEHIIPRSLRPSDALSSCVMTFRAVNDMKGQRTAMQFMKECAGKDVPGTNLQIQPLANFKEWVEAHRSQKLRRGFSKEDQARCKRRAELLLVERYEERNADFTERDLTQTSHLNKLAIRLVKRELGIDARHLAGAVTGFVRKNLSIDECLVAAVPRMQRAQRVSEHDSRKLLKSQMRELSHLHHAMDAITQGLTGILFRVEDWKLLVKRHLTERERAVLAAKYPTLLRFSANGEIALKPLPDSLLSEITARLKECRVVQHVPAKMHGLAVEQTTWSIVSQDEATRKVSLEQHTTDLKKGRYKDDGTRFVKNCEEKPALLLGFGVPEEQKSKLQAIKGVVKICENWGCALDPEPVVIPYFKVFPRLRELRERNGGKPVRVLRRGQQIEVLSGKFKGVWTIVSIKDATRDGILLDICAPDKVRQTEHGTTDSKVGVLLKSLLRAGLKILKPPLTGFACPTTSSQ

SEQ ID NO: 391 - protein, 1089 aa, unidentified
  REGION 1..1089: note = Description of Unknown: uncultivated organism with predicted taxonomy: Coraliomargarita sp. CAG:312
  REGION 1..1089: note = MG2-75 effector
VPYERAVFKFEPLILSLIPFKINDNNLRMSTTNLSNFNLSFDIGYSSIGWSISSKPANAVFPNWLGAGVVVFDDDSCMAKSRAEFRRMRRNIASKRNRIKRMREVLSGLGVMGKDELDNAKTEHPWFLAAETLASGKILSWSELWSVLRYYAHNRGYDGNSMWAKFGDDSDGDSEREANAEKLMADLGTSTQAETICAYLGVDAKSPKPLRFKKYFKGQNLAFPREIVFKEVERIIDAHIGILPKCDENFKKLMIGNWREVPSNIKLPGRFTSDRGLLFGQYMPRFSNRIITKCPLSGEKTPNCHSREFLDFRWKSLLANMAFPDGTDLMETRRKIDDFMLLYGALSKNALKKILKEVIGELPSNYNGMFLASEMEKALEVDPVRALILRTVYPNISFSLPNAELVEKLWKLIPKFVFTRMFRLKEYSFADICALLSPEKSAELAEFVRVIFDSSPASKKSPKPDFETAFNFKMRVQKISGRSPYSRQLMKSASEEIMRGVDPRSEGGSLYPRSESTKKEVLSNIDTWTNNHLVRHRLKIFKRLYMDIVREYCGADKSLVKSVAIEVVKDITAFSGLDSKKKAAKLNDLVAHHKSVSAYLKKEYPELSPNGSILRKARIADDLGWVCPYTGCHFSPRQLFESGNMEREHIIPRSLRPSDSLESLVITWKEVNDMKGQRTAYEFIKECQGMKVPGRQNLSIVTPERFEAFVRRLKKPMHPAGKADIERIKIRNKLLLTEHYKKREGGFLPSDLTQTSHLNKLAFKVVKSLYADAEKAPELIHVPGIVTSVVRKNWDLLPCMGDACPEIYETLENGDKVLRLKDEIRSITHLHHAVDAVAMGLAASVFPRTRNFYEAVSKRRLNQADRQELLKTGLVLFSGDKWKLVELEKSYLKEISGRISENRVVKFLPRKMSGMDVEQTLWGVVKENENGTVTIRQYGAGKGESRRSIKKAYEPKLKLLGYESKNTAKSKLARNKAVIIIKGNFGVALANPPQIIPHHNVWQRLSELAEKNGGRFPKILRRNQIIEIPSGRYKGIWRITSIKNNSNYIGVDMIHPIYVRIKEKSKINVNLNTIIKDGMKIIDTRLIGA

SEQ ID NO: 392 - protein, 876 aa, unidentified
  REGION 1..876: note = Description of Unknown: uncultivated organism with predicted taxonomy: Verrucomicrobia bacterium
  REGION 1..876: note = MG2-76 effector
MSAKQNPPPDLSLSFDVGHSSIGWAVLQTSPDVEIKGCGVVIFRADDCLASARRGYRRQRRHIRSTRQRIKRMKALLLHLCVLTQAQLDKPGCAWQWKLAGRVLAGGKTLTWTELWDVLRWYAHNRGYDGNRRWSAGEAANEKEDQEKVQNAHALMREHDKQTMAETFCAVCGIDPMGAKCSSNIDPAKRFKAKNAAFPRGIVEAEVARLLRTHFVKLKGVDEKFATAMFSDWRALSCPAIKLPIRYQGGLLFGQLVPRFDNRIISKCPITGQKVPSRNTREFLSYRWGMLLANVRVARLADRELKPLTVEERKELDKLMRAEGSMTAKQFTEAVEKVAGSIRHNLSTMLMHPDAKDALVLDAVQECLTTEKPMPVKALFAALPTRIQKRARGQLRRGQSFTFAALYEAAKQAEELVAAFDAAVQQQLDKAAGKGRKKDKPLTRDELLAKSLSVRKLSGRAAYARPILVQAFAEVMNGKHPKEEGGCLFVTEKMREAQLNRTLAQQTNNHLVRHRLLILARVLKDIIEEYAGGDKKRVGKMTIEVNRDLREMSGKTAKEKAQDLGLRLANFKSVVKKLEEAFEGKQIRITPGLIRKARIAEDIGWVCPYTGEHYDAFDLLHKNVDLDHIIPRADRPSNSLDSLVVTFPEVNRMKGKRTALAFMKEAETKQVEGLPRLTLKSLNHFKADIEALRPGSDPRKAKRRGAVTGPIDDDLRRWKRKELLLKVEKWDGGDFLPADLTVTSQLVRLGAQALKREFIDLEEPPVTVSLPGAVTGEVRKAWDVLGCLSKACPEVLDAEGKVKTKTEIRDITHLHHALDACVIGLAAHFIPNRGRVWELITKRRLTAAEQSELVALKVFTPESHGEVRLNDLKPDR

SEQ ID NO: 393 - protein, 1090 aa, unidentified
  REGION 1..1090: note = Description of Unknown: uncultivated organism
  REGION 1..1090: note = MG2-77 effector
MSAKQNPPPDLSLSFDVGHSSIGWAVLQTSPDVEIKGCGVVIFRADDCLASARRGYRRQRRHIRSTRQRIKRMKALLLHLCVLTQAQLDKPGCAWPWKLAGRVLAGGKTLTWHELWDVLRWYAHNRGYDGNRRWSAGEAANEKEDQEKVQNAHALMREHDKQTMAETFCAVCGIDPMGAKCSSNIDPAKRFKAKNAAFPRGIVEAEVARLLRTHFGKLKGVDEKFATAMFSDWRALSCPAIKLPIRYQGGLLFGQLVPRFDNRIISKCPITGQKVPSRNTREFLSYRWGMLLANVRVARLADRELKPLTVEERKELDKLMRAEGSMTAKQFTEAVEKVAGSIRHNLSTMLMHPDAKDALVLDAVQECLTTEKPMPVKALFAALPTRIQKRARGQLRRGQSFTFAALYEAAKQAEELVAAFDAAVQQQLDKAAGKGRKKDKPLTRDELLAKSLSVRKLSGRAAYARPILVQAFAEVMNGKHPKEEGGCLFVTEKMREAQLNRTLAQQTNNHLVRHRLLILARVLKDIIEEYAGGDKKRVGKMTIEVNRDLREMSGKTAKEKAQDLGLRLANFKSVVKKLEEAFEGKQIRITPGLIRKARIAEDIGWVCPYTGEHYDAFDLLHKNVDLDHIIPRADRPSNSLDSLVVTFPEVNRMKGKRTALAFMKEAETKQVEGLPRLTLKSLNHFKADIEALRPGSDPRKAKRRGAVTGPIDDDLRRWKRKELLLKVEKWDGGDFLPADLTVTSQLVRLGAQALKREFIDLEEPPVTVSLPGAVTGEVRKAWDVLGCLSKACPEVLDAEGKVKTKTEIRDITHLHHALDACVIGLAAHFIPNRGRVWELITKRRLTAAEQSELVALKVFTPESHGEVRLNDLKPERKEQIRQRLAERRVVQHIPKRITGLRVEQNTWRVQSIEDGDVTLTQRIRQPDGKRPRKQVIQRSGKLIGLEPGKLQTLKGALVIGENFGVALDPTPTVIHFHKVWSRLRELKKVNGGKMPRVLRNGHLIRVSEGSRAGLWRVTSIKQTEAYGLALDLAYPDSVGLSRPNAPILQLQAEGLAIVGTSLTGFDASAVMYAAIKRRPRKLKTEQSESS

SEQ ID NO: 394 - protein, 1090 aa, unidentified
  REGION 1..1090: note = Description of Unknown: uncultivated organism with predicted taxonomy: Verrucomicrobia bacterium
  REGION 1..1090: note = MG2-78 effector
MSAKQNPPPDLSLSFDVGHSSIGWAVLQTSPDVEIKGCGVVIFRADDCLASARRGYRRQRRHIRSTRQRIKRMKALLLHLCVLTQAQLDKPGCAWPWKLAGRVLAGGKTLTWPELWDVLRWYAHNRGYDGNRRWSAGEAANEKEDQEKVQNAHALMREHDKQTMAETFCAVCGIDPMGAKCSSNIDPAKRFKAKNAAFPRGIVEAEVARLLRTHFGKLKGVDEKFATAMFSDWRALSCPAIKLPIRYQGGLLFGQLVPRFDNRIISKCPITGQKVPSRNTREFLSYRWGMLLANVRVARLADRELKPLTVEERKELDKLMRAEGSMTAKQFTEAVEKVAGSIRHNLSTMLMHPDAKDALVLDAVQECLTTEKPMPVKALFAALPTRIQKRARGQLRRGQSFTFAALYEAAKQAEELVAAFDAAVQQQLDKAAGKGRKKDKPLTRDELLAKSLSVRKLSGRAAYARPILVQAFAEVMNGKHPKEEGGCLFVTEKMREAQLNRTLAQQTNNHLVRHRLLILARVLKDIIEEYAGGDKKRVGKMTIEVNRDLREMSGKTAKEKAQDLGLRLANFKSVVKKLEEAFEGKQIRITPGLIRKARIAEDIGWVCPYTGEHYDAFDLLHKNVDLDHIIPRADRPSNSLDSLVVTFPEVNRMKGKRTALAFMKEAETKQVEGLPRLTLKSLNHFKADIEALRPGSDPRKAKRRGAVTGPIDDDLRRWKRKELLLKVEKWDGGDFLPADLTVTSQLVRLGAQALKREFIDLEEPPVTVSLPGAVTGEVRKAWDVLGCLSKACPEVLDAEGKVKTKTEIRDITHLHHALDACVIGLAAHFIPNRGRVWELITKRRLTAAEQSELVALKVFTPESHGEVRLNDLKPERKEQIRQRLAERRVVQHIPKRITGLRVEQNTWRVQSIEDGDVTLTQRIRQPDGKRPRKQVIQRSGKLIGLEPGKLQTLKGALVIGENFGVALDPTPTVIHFHKVWSRLRELKKVNGGKMPRVLRNGHLIRVSEGSRAGLWRVTSIKQTEAYGLALDLAYPDSVGLSRPNAPILQLQAEGLAIVGTSLTGFDASAVMYAAIKRRPRKLKTEQSESS

SEQ ID NO: 395 - protein, 1087 aa, unidentified
  REGION 1..1087: note = Description of Unknown: uncultivated organism with predicted taxonomy: Verrucomicrobia bacterium
  REGION 1..1087: note = MG2-79 effector
MNATQKIQPATNSDLQLAFDVGHSSLGWAVLQSSAGIPPAAKRTAGDNSINILSCGAVVFRADDCLASSRRTYRRQRRHIRSTKQRIARMKIILRHLGVLKENELNQPGCAWPWQLAARILQGGKLLTWPELWDVLRWYAHNRGYDGNRRWSAAEAEAQKEDSEKEANARTLMGKHGVHSMAETFCKELGVDPLGKKKSSMKRFKGLNAAFPREVVEGEVRKVLQAHSGKLKGVDVNLEKNLFSDWRAIPCPDLKLPKRYEDGLLFGQLVPRFDNRIISICPISGQKVPSRNCPEFLNFRWAMQLANIKVGKTKDRELQPLKTEYRVALDKQMRERGYLTPKELKDTVRSITSCERDNLDTMLMHPDAKEALLLDPVQKLICSNDLQPLWKLLPERLQKRLRGQWRHNKVFTLAQIRKQLESLGDVSAFDAEFQKQLDTQNSKAKKKEKQVTREQLLQQHFPSRPLKLDGRAAFARHLLKQAYEDVLAGKPHPKEEGGCLFITKKIREAQLNRAIADQTNNHLVRHRLLILERLLADIIKEYAAGDKKRVGKITIEVNRDLREMSGKTAKEKAQDLGLRIANHHAVAEKLEKAFAEERNGKSIPITAGLIRKARIAEDLGWRCPYTGIDYEPKDLVTKRVDKDHIVPRSERASDSLDSLVITLSAINKWKGKRTAWQFVEQEQGKPVPDLPNLSIVSLTRYKQFVESLETYKGHDDDKRRKKKRKELMLLPKYEEREFVPRDLTQTSQLVRLGGQVLKRAFANSEEKPTLVSLPGSVTGAVRKAWKVLGCLSLANQQVLDENGDVKTKTDIRDITHLHHALDACVLGLTSHFIPNNGRVWELIVKRNPNDLERQQLMALGVFGFNAEKRFEMRDLDNKLKEQIRQRLAEKRVVQHIPARMDGLRVEQNTWRVVSSDENGNVTIRQRIRQADGSRPEKLGEEKTTKLLGLKPANGNGKLAANKGVLVIPDNYGVALDPLPTIIPFHKVWPRLQELKKANGGKLPRVLRNGQTIKVPEGKYKGVWRIFSAKNNATGMAIDIGQPDVVRLKNKTEGHKINVLLTSLLKNKMEVVKTPFTGISAIPATSST

SEQ ID NO: 396 - protein, 974 aa, unidentified
  REGION 1..974: note = Description of Unknown: uncultivated organism with predicted taxonomy: Verrucomicrobia bacterium
  REGION 1..974: note = MG2-80 effector
DVLRWYAHNRGYDGNRRWSAGEAANEKEDQEKVQNAHALMREHDKQTMAETFCAVCGIDPMGAKCSSNIDPAKRFKAKNAAFPRGIVEAEVARLLRTHFGKLKGVDEKFATAMFSDWRALSCPAIKLPIRYQGGLLFGQLVPRFDNRIISKCPITGQKVPSRNTREFLSYRWGMLLANVRVARLADRELKPLTVEERKELDKLMRAEGSMTAKQFTEAVEKVAGSIRHNLSTMLMHPDAKDALVLDAVQECLTTEKPMPVKALFAALPTRIQKRARGQLRRGQSFTFAALYEAAKQAEELVAAFDAAVQQQLDKAAGKGRKKDKPLTRDELLAKSLSVRKLSGRAAYARPILVQAFAEVMNGKHPKEEGGCLFVTEKMREAQLNRTLAQQTNNHLVRHRLLILARVLKDINEEYAGGDKKRVGKMTIEVNRDLREMSGKTAKEKAQDLGLRLANFKSVVKKLEEAFEGKQIRITPGLIRKARIAEDIGWVCPYTGEHYDAFDLLHKNVDLDHIIPRADRPSNSLDSLVVTFPEVNRMKGKRTALAFMKEAETKQVEGLPRLTLKSLNHFKADIEALRPGSDPRKAKRRGAVTGPIDDDLRRWKRKELLLKVEKWDGGDFLPADLTVTSQLVRLGAQALKREFIDLEEPPVTVSLPGAVTGEVRKAWDVLGCLSKACPEVLDAEGKVKTKTEIRDITHLHHALDACVIGLAAHFIPNRGRVWELITKRRLTAAEQSELVALKVFTPESHGEVRLNDLKPERKEQIRQRLAERRVVQHIPKRITGLRVEQNTWRVQSIEDGDVTLTQRIRQPDGKRPRKQVIQRSGKLIGLEPGKLQTLKGALVIGENFGVALDPTPTVIHFHKVWSRLRELKKVNGGKMPRVLRNGHLIRVSEGSRAGLWRVTSIKQTEAYGLALDLAYPDSVGLSRPNAPILQLQAEGLAIVGTSLTGFDASAVMYAAIKRRPRKLKTEQSESS

SEQ ID NO: 397 - protein, 851 aa, unidentified
  REGION 1..851: note = Description of Unknown: uncultivated organism with predicted taxonomy: Verrucomicrobia bacterium
  REGION 1..851: note = MG2-81 effector
MSPKLEFSFDVGHSSIGWAVLQSSAVVSPVANAPRVNILGCGVVTFGADDCLASKRRDYRRQRRHARSTRHRIAQLEKLLAHLKVLSADQLKQKHQQAGGHAAPWFLAARVLASNGAAKYLLDWPQLWDVLRWYAHNRGYDGNRRWSAQEAEAQSEDTEKEKTANALMEKHGTTTMAETLCKALGLEPLGDKQSSKENFKRLNAAFPRSIVEKEVRRLLELHQKKLPAITDTFLKSLFEDWRAAKISDLKLPDRYQGGLLFGQLVPRFDNRIISTCPITGEKVPSKNCPEFLKFRWAMTLANIRVAGAKEKELRPLAADERKKINVVMESEGALTPRELTKLVRETTGCTRDNLDTMLMHPDAKDGLLLNPIQKLVQGDKLKTLWPTFSPRVQKRARDLWERGKPVTLEHICGIAKKLGESLANFEAKLNKLADSANTKRSKKAGSLDSEALLKEPLTIKKSDGRAAYARPLLVRAYAEVMAGKHPKEDGNSLCVTEEMRQAQLQKQIDQQTNNHLVRHRLLILERLLKDLIADSAFANGDKSRIARTTIEVNRDLREMSGKSAKEIQQDLGRRLANHHGVAAKLDADLDGRTFNGKPIQITAGLIRKARIAEDLGWTCPYTGKTYDAIDLVSRQVDKDHIIPRSLRPSDSLDSLVVTFAEVNKMKGQRTAWKFVSDEQGKVVEGSPQLSIVSLTRFKQWAESLETYKGHDDDKRRKKKRKELLLLPNYEEKGFVPRDLTVTSQLVRLGAQIIKKTFAGSEKPPMVVSLPGSVTGTVRKGWNLLGCLELAAPQVKEADGGIKNKTDIRDVTHLHHALDACVLGLASYYLPNNGGLWEVMIKRNPNDGEKAL

SEQ ID NO: 398 - protein, 1082 aa, unidentified
  REGION 1..1082: note = Description of Unknown: uncultivated organism with predicted taxonomy: Verrucomicrobia bacterium
  REGION 1..1082: note = MG2-82 effector
PDLSLSFDVGLSSIGWAVLQTSPDVEIKGCGVVIFRADDCLASARRGYRRQRRHIRSTRQRIKRMKALLLHLCVLTQAQLDKPGCAWPWKLAGRVLAGGKTLTWPELWDVLRWYAHNRGYDGNRRWSAGEAANEKEDQEKVQNAHALMREHDKQTMAETFCAVCGIDPMGAKCSSNIDPAKRFKAKNAAFPRGIVEAEVARLLRTHFGKLKGVDEKFATAMFSDWRALSCPAIKLPIRYQGGLLFGQLVPRFDNRIISKCPITGQKVPSRNTREFLSYRWGMLLANVRVARLADRELKPLTVEERKELDKLMRAEGSMTAKQFTEAVEKVAGSIRHNLSTMLMHPDAKDALVLDAVQECLTTEKPMPVKALFAALPTRIQKRARGQLRRGQSFTFAALYEAAKQAEELVAAFDAAVQQQLDKAAGKGRKKDKPLTRDELLAKSLSVRKLSGRAAYARPILVQAFAEVMNGKHPKEEGGCLFVTEKMREAQLNRTLAQQTNNHLVRHRLLILARVLKDIIEEYAGGDKKRVGKMTIEVNRDLREMSGKTAKEKAQDLGLRLANFKSVVKKLEEAFEGKQIRITPGLIRKARIAEDIGWVCPYTGEHYDAFDLLHKNVDLDHIIPRADRPSNSLDSLVVTFPEVNRMKGKRTALAFMKEAETKQVEGLPRLTLKSLNHFKADIEALRPGSDPRKAKRRGAVTGPIDDDLRRWKRKELLLKVEKWDGGDFLPADLTVTSQLVRLGAQALKREFIDLEEPPVTVSLPGAVTGEVRKAWDVLGCLSKACPEVLDAEGKVKTKTEIRDITHLHHALDACVIGLAAHFIPNRGRVWELITKRRLTAAEQSELVALKVFTPESHGEVRLKDLKPERKEQIRQRLAERRVVQHIPKRITGLRVEQNTWRVQSIEDGDVTLTQRIRQPDGKRPRKQVIQRSGKLIGLEPGKLQTLKGALVIGENFGVALDPTPTVIHFHKVWSRLRELKKVNGGKMPRVLRNGHLIRVSEGSRAGLWRVTSIKQTEAYGLALDLAYPDSVGLSRPNAPILQLQAEGLAIVGTSLTGFDASAVMYAAIKRRPRKLKTEQSESS

SEQ ID NO: 399 - protein, 1075 aa, unidentified
  REGION 1..1075: note = Description of Unknown: uncultivated organism
  REGION 1..1075: note = MG2-83 effector
MSIKGKISNGADANLQISFDVGHSSIGWAVLEKTGQQVSDIKINGCGSVVFRADDCLASSRRAYRRQRRHIRSTRQRIARMKILLKHLGVLTEKELDKPGCAWPWKLAAQILQGGKLLTWPELWDVLRWYAHNRGYDGNRRWSAAENDAQSEDSEKEENARSLMGKYGTKSMAETFCAISGINPLGEKKSANLSGDKRPKGQNAAFPREIVELEVRQILQKHFGKLKNADENLEKVLFTDWQTISCPDLKLPKRYEGGLLFGQLVPRFDNRIISTCPISGQKVPTRNCTEFLNFRWAMQLANIRIACAGEKELRPLTAAERKIIDQAVSEKGGVTPFQLKLIVREKTKCVRDDLEQMLMLPDFEKALLLNPIQKMISADDFQPYWKLLPDRLQKRLRGKWRRGKVFSLAQIRTQLESLGDASAFDAELQRQLDAHNSNAKKKDKQITRENLLQKHFPSKPLKLDGRAAFARHLLKQAYDEVLAGKDPNGKGGCLFRSEEIRQKELNREISDQTNNHLVRHRLLILERVLNDIIKEYAGGKKDRIGKITIEVNRDLREMSGKTAKEKAQDLGLRIANHHNVAEKLEKAFAEEGIKQTITAGLIRKARIAEDLGWHCPYTGIQYEPKDLITRRVDKDHIVPRSERASDSLDSLVVTFSAINKWKNKRTAWQFVTDEQGKTVPDLPNLSIMSLARYKQFVESLESYKGHDDDKRRKKKRKELMLLPKYEEKEFMPRDLTQTSQLVRLGAQVLKKNLPHLTTGDVTSLPGSVTGTVRKGWKLEACLGLANPQVFDGNGGAKTKTEIRDITHLHHALDACVLGIAANYFQNQKLGASSLWELLIKRKYNEQEKTILRALGIFQFDKEGNSQIKELPKEIREQIRQRLAEKRVVQHIPARMDGLRVEQNTWRVVAVKDGEVILKQRIRQPDGTRPEKIAEEKPGKLLGLNPTNGNGKLAANKGALVIPDNFGVALDPQPIVIPFHKVWTRLQELKKANAGKLPRVLRNGQLIRVKDGTYKGVWRVFSAKNNATGMALDIGSPDVVRLKNKTEGHKINVLLSSLIKGGLEPIQSSFTGITSK

SEQ ID NO: 400 - protein, 938 aa, unidentified
  REGION 1..938: note = Description of Unknown: uncultivated organism with predicted taxonomy: Verrucomicrobia bacterium
  REGION 1..938: note = MG2-84 effector
VYHNGDMASRRNAPDLQLAFDVGHSSIGWAVLQANPDVEIAGCGVVIFRADDCLASARRGYRRQRRHIRSTRQRIKRMKALLLHLGVLTQTQLDKSGCAWPWKLAARVLVGGKTLTWPELWDVLRWYAHNRGYDANRRWSAAEAEAEKEDTEKLENAKTLMDKHGVKTMAETFCKELGVDPRGAKSSSMTRFKGLNAAFPRGVVEAEVARILQAHFGKLKGADEKFAAALFSDWRAIPCPKIKLPQRYQGGLLFGQLVPRFDNRIISICPISGQKVPSRNTPEFLNFRWGMLLANVRVARLVDRELKPLTVEERRELDRLTRAEGAMTAKQFTDAVEKVTGAIRHNLATMLMHPDAKDALVLDPVQKLVTTGHRAALWPTLPERIQKRARGQLRRGKPVTLGDLGNEVPAFHAQVQSILDKTAGRGRKKDKALTRDDLLREILQVRKLDGRAAYSRPILRKAFEQVMDGKHPAEDGGCLFVTEQTRQAQLSRSLTQQTNNHLVRHRLLILSRLLNAIVKEYADGDKTRIGKMTIEVNRDLREMSGKTAKEVAQDLGLRLANFKNVVKKLEGDESFMRELNQRGLHHIPPGIIRKARVAEDLGWRCPYTGMEYEPVHLLTRRVDKDHIIPHADRASDSLDSLVITFSAINAMKGKRTALQFVNEEQGKTVEDLPNLSIVSVNRYREFVEGLEAFRGHDDDRRRKKRRKDLLLLPSYEEKEFTPRDLTVTSQLVRLGALTLKREFADVKQPPVIVSLPGAVTGEVRKAWDVLGCLGLACSQVLDVEGKPKTKTEIRDITHLHHALDACVLGLASHFIPNNGRVWELITKRNLTSAEQKELIALNVFATGPQGRVQLRDLRPERKEQIRQRLAEKRVVQHIPKRIAGLRVEQNTWRVRGSKDGDVTLQQRIRQPDGKRPLKQAVERASKLIGLEDGKLHRL

SEQ ID NO: 401 - protein, 1090 aa, unidentified
  REGION 1..1090: note = Description of Unknown: uncultivated organism with predicted taxonomy: Verrucomicrobia bacterium
  REGION 1..1090: note = MG2-85 effector
MSAKQNPPPDLSLSFDVGHSSIGWAVLQTSPDVEIKGCGVVIFRADDCLASARRVYRRQRRHIRSTRQRIKRMKALLLHLCVLTQAQLDKPGCAWPWKLAGRVLAGGKTLTWPELWDVLRWYAHNRGYDGNRRWSAGEAANEKEDQEKVQNAHALMREHDKQTMAETFCAVCGIDPMGAKCSSNIDPAKRFKAKNAAFPRGIVEAEVARLLRTHFGKLKGVDEKFATAMFSDWRALSCPAIKLPIRYQGGLLFGQLVPRFDNRIISKCPITGQKVPSRNTREFLSYRWGMLLANVRVARLADRELKPLTVEERKELDKLMRAEGSMTAKQFTEAVEKVAGSIRHNLSTMLMHPDAKDALVLDAVQECLTTEKPMPVKALFAALPTRIQKRARGQLRRGQSFTFAALYEAAKQAEELVAAFDAAVQQQLDKAAGKGRKKDKPLTRDELLAKSLSVRKLSGRAAYARPILVQAFAEVMNGKHPKEEGGCLFVTEKMREAQLNRTLAQQTNNHLVRHRLLILARVLKDIIEEYAGGDKKRVGKMTIEVNRDLREMSGKTAKEKAQDLGLRLANFKSVVKKLEEAFEGKQIRITPGLIRKARIAEDIGWVCPYTGEHYDAFDLLHKNVDLDHIIPRADRPSNSLDSLVVTFPEVNRMKGKRTALAFMKEAETKQVEGLPRLTLKSLNHFKADIEALRPGSDPRKAKRRGAVTGPIDDDLRRWKRKELLLKVEKWDGGDFLPADLTVTSQLVRLGAQALKREFIDLEEPPVTVSLPGAVTGEVRKAWDVLGCLSKACPEVLDAEGKVKTKTEIRDITHLHHALDACVIGLAAHFIPNRGRVWELITKRRLTAAEQSELVALKVFTPESHGEVRLNDLKPERKEQIRQRLAERRVVQHIPKRITGLRVEQNTWRVQSIEDGDVTLTQRIRQPDGKRPRKQVIQRSGKLIGLEPGKLQTLKGALVIGENFGVALDPTPTVIHFHKVWSRLRELKKVNGGKMPRVLRNGHLIRVSEGSRAGLWRVTSIKQTEAYGLALDLAYPDSVGLSRPNAPILQLQAEGLAIVGTSLTGFDASAVMYAAIKRRPRKLKTEQSESS

SEQ ID NO: 402 - protein, 985 aa, unidentified; identical to SEQ ID NO: 326
  REGION 1..985: note = Description of Unknown: uncultivated organism
  REGION 1..985: note = MG2-86 effector

SEQ ID NO: 403 - protein, 909 aa, unidentified
  REGION 1..909: note = Description of Unknown: uncultivated organism with predicted taxonomy: Methylococcales bacterium
  REGION 1..909: note = MG2-87 effector
LENAKTLMDKPGVKTMAETFCKELGVDPRGAKSSSMTRFKGLNAAFPRGVVEAEVARILQAHFGKLKGADEKFAAALFSDWRAIPCPKIKLPQRYQGGLLFGQLVPRFDNRIISICPISGQKVPSRNTPEFLNFRWGMLLANVRVARLVDRELKPLTVEERRELDRLTRAEGAMTAKQFTDAVEKVTGAIRHNLATMLMHPDAKDALVLDPVQKLVTTGHRAALWPTLPERIQKRARGQLRRGKPVTLGDLGNEVPAFHAQVQSILDKTAGRGRKKDKALTRDDLLREILQVRKLDGRAAYSRPILRKAFEQVMDGKHPAEDGGCLFVTEQTRQAQLSRSLTQQTNNHLVRHRLLILSRLLNAIVKEYADGDKTRIGKMTIEVNRDLREMSGKTAKEVAQDLGLRLANFKNVVKKLEGDESFMRELNQRGLHHIPPGIIRKARVAEDLGWRCPYTGMEYEPVHLLTRRVDKDHIIPHADRASDSLDSLVITFSAINAMKGKRTALQFVNEEQGKTVEDLPNLSIVSVNRYREFVEGLEAFRGHDDDRRRKKRRKDLLLLPSYEEKEFTPRDLTVTSQLVRLGALTLKREFADVKQPPVIVSLPGAVTGEVRKAWDVLGCLGLACSQVLDVEGKPKTKTEIRDITHLHHALDACVLGLASHFIPNNGRVWELITKRNLTSAEQKELIALNVFATGPQGRVQLRDLRPERKEQIRQRLAEKRVVQHIPKRIAGLRVEQNTWRVRGSKDGDVTLQQRIRQPDGKRPLKQAVERASKLIGLEDGKLHRLSGALVVGENFGVALDPQPTIIPFHKVWPRLQELKKANGGKLPRVLRNGQIIYIPKGTYSGVWKVFSAKNNKSGMALDMGRPDVVRLRNKTDGHKINVLLSSLLKDGMTIVDAPLTGVSSAPKQS

SEQ ID NO: 404 - protein, 985 aa, unidentified; identical to SEQ ID NO: 326
  REGION 1..985: note = Description of Unknown: uncultivated organism
  REGION 1..985: note = MG2-88 effector

SEQ ID NO: 405 - protein, 985 aa, unidentified; identical to SEQ ID NO: 326
  REGION 1..985: note = Description of Unknown: uncultivated organism with predicted taxonomy: Verrucomicrobia
  REGION 1..985: note = MG2-89 effector

SEQ ID NO: 406 - protein, 807 aa, unidentified
  REGION 1..807: note = Description of Unknown: uncultivated organism with predicted taxonomy: Verrucomicrobia bacterium
  REGION 1..807: note = MG2-90 effector
MSIKGKISNGADANLQISFDVGHSSIGWAVLEKTGQQVSDIKINGCGSVVFRADDCLASSRRAYRRQRRHIRSTRQRIARMKILLKHLGVLTEKELDKPGCAWPWKLAAQILQGGKLLTWPELWDVLRWYAHNRGYDGNRRWSAAENDAQSEDSEKEENARSLMGKYGTKSMAETFCAISGINPLGEKKSANLSGDKRPKGQNAAFPREIVELEVRQILQKHFGKLKNADENLEKVLFTDWQTISCPDLKLPKRYEGGLLFGQLVPRFDNRIISTCPISGQKVPTRNCTEFLNFRWAMQLANIRIACAGEKELRPLTAAERKIIDQAVSEKGGVTPFQLKLIVREKTKCVRDDLEQMLMLPDFEKALLLNPIQKMISADDFQPYWKLLPDRLQKRLRGKWRRGKVFSLAQIRTQLESLGDASAFDAELQRQLDAHNSNAKKKDKQITRENLLQKHFPSKPLKLDGRAAFARHLLKQAYDEVLAGKDPNGKGGCLFRSEEIRQKELNREISDQTNNHLVRHRLLILERVLNDIIKEYAGGKKDRIGKITIEVNRDLREMSGKTAKEKAQDLGLRIANHHNVAEKLEKAFAEEGIKQTITAGLIRKARIAEDLGWHCPYTGIQYEPKDLITRRVDKDHIVPRSERASDSLDSLVVTFSAINKWKNKRTAWQFVTDEQGKTVPDLPNLSIMSLARYKQFVESLESYKGHDDDKRRKKKRKELMLLPKYEEKEFMPRDLTQTSQLVRLGAQVLKKNLPHLTTGDVTSLPGSVTGTVRKGWKLEACLGLANPQVFDGNGGAKTKTEIRDITH

SEQ ID NO: 407 - protein, 1075 aa, unidentified; identical to SEQ ID NO: 399
  REGION 1..1075: note = Description of Unknown: uncultivated organism
  REGION 1..1075: note = MG2-91 effector

SEQ ID NO: 408 - protein, 774 aa, unidentified
  REGION 1..774: note = Description of Unknown: uncultivated organism with predicted taxonomy: Verrucomicrobiae bacterium Tous-C5FEB
  REGION 1..774: note = MG2-92 effector
ELWDVLRWYAHNRGYDGNQRWSNREMIRAFNSEGLHQTSKPSADDEKSLVAAAEKADAEAGVQNEADSDVKKVKEAFKQMHDYGTSTMAETMASHIAKFEIQAAEHRLGKRQEKPTRFKGLGAAFPRRIIRVINNEQTLAGGVEWEVRYILRAHFGHLPNCDANFERAICGGLPESKFDWRAYEQSHPTLYLTSKAEKLKLRELRIPRKADKQTKADKKKLRTEFLRNKLVLSSHFEGGVLFGQAVPRFDNRIISICPITGEKVPSKNCREFLKFRWAMMLANIHVAGAKEKELHPLTGDERKKINAVMENEGALTPTTLKRSVRETTNCTRDNLEMMLMHPDAKDALLLNPIQKLVRSEKLKTIWPTFSYPVQKRARDLWLRGKLVTLERICGIAQKLGESLTGFEAELNKLADVANTKRGKKESSFNREALMREPLTIIKLDGRAAYARPLLVRANAEVMAGKHPKEEGGCLEVTDAMRQVQLQKQIDQQTNNHLVRHRLLILERLVKDLVAEPAFASGDKSRIAKCTIEVNRDLREMSGKSSKEIQQDLGRRLANHHGVAAKLEKDLDGRTFNGKPIQITAGLIRKARIAEDLSWMCPYTSKAFDAIDLVSRQVDKDHIIPRSLRPSDSLDSLVVTFAEVNKMKGQRTALQFVSDEQGKTVEGSPQLSIVSLTRFKQWAESLETYKGHDDDKRRKKKRKELLLLQTYEEKGFVPRDLTVTSQLVRLGAQIIKKTFAENEKLPTVVSLPGSVTGTVRKGWNLLGCLATAAPQ

SEQ ID NO: 409 - protein, 1081 aa, unidentified
  REGION 1..1081: note = Description of Unknown: uncultivated organism
  REGION 1..1081: note = MG2-94 effector
MKQDQIAFSFDVGHSSIGWAVFKIADTPESFHTLLGTGVVLFPKDSCLASSRRGFRRSRRNIAARRSRIDRLKNYLVGLGVLSREQLDTNSNSYPWLLAARVLASGGKKALTWEELWSVLRWYAHNRGYDGNALWAGDAADAGDKDDNEKVQNAIALMDKHKTGTMAETVCKELGLDPRGEVKASRIYFKGNKAAFPREVVTEEVRRILAAHVGKLPKVDDALSDVLLKNAAPAGLELPARFKGGLLFGQYVPRFDNRIIPACRITGKNVPLKKCPEYLLYRWGRLLNNLTVFGTDGQIRTLLPAERKALHARMEAEGYFTKRTLNAALKEATGCTPANTESYFLTEEMEEALVLDPVKKLLATNQVLREVWPHLSAESRTQAQSALAAGKKIRLADILAAMESAGQDTAAAREALAHLQKKAKKKDADLVAHYFKANYPTGRAAYCREILAKTFAESMAGKDSTKEGGCLYETEEIRNRLLREPLVKQTNNHLVRHRLLIFERLLDQMVAEFADGDKKRIGATVVEVVRELQEFSGLNAKEVAQKLNEKLGNFRAVVKGLEEAIRGSGEKVAITGSLIRKARILEDQGFICPYTGAPLGYPDLLNDRLEIEHVIPRSLRPSDALSSCVMTFRSVNDMKGQRTAMQFIGEEQGREVPGHGNLQITTKKAYEAYVAKHKKQYRYGTDDRRRCERRAELMLMERYDQRNADFTERDLTQTSHLNKMAISLVKQRIGIDAKHLPGSVTAFIRQKLHIDECLFNAVPRLQKAAKGEGKKLKLKKNTEEPPAEPLLNDLPPRKLTKADIRELTHLHHAMDAVTQGLALLLFAPEDWPLLVKRHLSDSERRLLKSRYPYLVFTENSRMDIQDLPDATLKTISGRLAECRVVRHIPAKMHGIVVDQTTWGIVASGAITKLCQKTTEKNARYDENGRRFVKTAEEKRSLLLGGPNAPEGKLARIKGAILITENWGCALDPAPPTVIPHFKVYPQLRALREKNGGRPVRILRKGSLIQIKTGRFQGIWSVASIKDNADGICLDINAADKIKIENGSVDSKINVRLNSLLNSGLKILKPKLTGTCPTTSSP

SEQ ID NO: 410 - protein, 1081 aa, unidentified; identical to SEQ ID NO: 409
  REGION 1..1081: note = Description of Unknown: uncultivated organism
  REGION 1..1081: note = MG2-95 effector

SEQ ID NO: 411 - protein, 1080 aa, unidentified
  REGION 1..1080: note = Description of Unknown: uncultivated organism
  REGION 1..1080: note = MG2-96 effector
MKQGQIAFSFDIGHSSIGWAAFQVSDAPGTFHSLLGTGVVLFPKDACLASARRGFRRSRRNIAARRSRIDRLKNYLAGLGVLSRDQLDANSNSYPWLLAARILASDGKKTLTWEELWSVLRWYAHNRGYDGNALWAGDDADAGDKEDTDKVKNSIALMEKHKTATMAETVCKALGLDPMGEVKASRIYFKGNNAAFPRGVVTEEVRRILAAHAGKLPKVDDALSDILLRNAATSGLELPARFKGGLLFGQYVPRFDNRIIPACRITGKNTPLKRCPEYLLYRWGRLLNNLTVFGADGQIRTLLPAERQALHSRMEADGFFTKRTLNAALKDVTGCTPANTESFFLTEEMEEALVLDPVKKLLATNQIMKDLWPQLSAESREKAQSSLSAGKKIRLGDILAEMETAGQDTTAASDALASHQKKAKKKNADLATRRLSADYPKGRAAYCREILAKTFDESISGKDSTKEGGCLYETEEIRNRLLREPLVQQTNNHLVRHRLLVFERLLAHMVEEFAGGDEKRIAATVVEVVRELQEFSGLNSKEITHKLNEKLGNFRSVVKNLEEAIANSEERVAITGSLIRKARILEDQGFVCPYTGTHLSYNHLLADRLEIEHIIPRSLRPSDALSSCVMTFRSVNDMKGQRTAMQFICEEQGREVPGHENIQITTKKAYVDYVAKHKKQYPQKSDDRRRCERRAELMLMERYDQRNADFTERDLTQTSHLNKMAIRLVKQRIGIDAKHLPGNVTAFIRQKLHIDECLFNAVPRLQTAAKGQPKSSKRKKKAEEAPVEPIQDDMPPRKLTKADIRELTYLHHAMDAVTQGLALLLFAPEDWPLLVKRNLPDSEQRHLKARYPFLDFSADKHISIQDLPEDTLHTISERLAECRVVRHIPAKMHGIIVDQTTWGIVAAGAITTLRQKTTEKNARCDENGKRFIKTTEKKRSLLLGGPDAPDGKLAKIKGAILVTENWGCALDPSPTVIPHFKVYPQLRALREKNGGRPIRILRKGSLIQVKAGTYQGIWSVASIKDNADGICLDINAADKVKLENRSDDSKINVRLDSLRKSGLKILKPKLTGACPTTSSP

SEQ ID NO: 412 - protein, 953 aa, unidentified
  REGION 1..953: note = Description of Unknown: uncultivated organism with predicted taxonomy: Acidobacteria bacterium RIFCSPLOWO2_12_FULL_68_19
  REGION 1..953: note = MG2-97 effector
MKQDQIAFSFDVGHSSIGWAVFKIADTPESFHTLLGTGVVLFPKDSCLASSRRGFRRSRRNIAARRSRIDRLNNFLVGLGVLSREQLDTNSNSYPWLLAARVLASGGKKALTWEELWSVLRWYAHNRGYDGNALWAGDAADAGDKDDNEKVQNAIALMDKHKTGTMAETVCKELGLDPRGEVKASRIYFKGNKAAFPREVVTEEVRRILAAHVGKLPKVDDALSDVLLKNAAPAGLELPARFKGGLLFGQYVPRFDNRIIPACRITGKNVPLKKCPEYLLYRWGRLLNNLTVFGADGQIRTLLPAERKALHARMEAEGYFTKRTLNAALKEATGCTPANTESYFLTEEMEEALVLDPVKKLLATNQVLREVWPHLSAESRTQAQSALAAGKKIRLADILAAMESAGQDTAAAREALAQLQKKAKKKDADLVAHYFKANYPTGRAAYCREILAKTFAESMAGKDSTKEGGCLYETEEIRNRLLREPLVKQTNNHLVRHRLLIFERLLDQMVAEFADGDKKRIGATVVEVVRELQEFSGLNAKEVAQKLNEKLGNFRAVVKGLEEAIRGSGEKVAITGSLIRKARILEDQGFICPYTGAPLGYPDLLNDRLEIEHVIPRSLRPSDALSSCVMTFRSVNDMKGQRTAMQFIGEEQGREVPGHGNLQITTKKAFEAYVAKHTKQYRYGTDDRRRCERRAELMLMERYDQRNADFTERDLTQTSHLNKMAISLVKQRIGIDAKHLPGSVTAFIRQKLHIDECLFTAVPRLQKTAKGEGKRPKRKNADEVTAEPMQSDMPPRKLTKADIRELTHLHHAMDAVTQGLALLLFAPEDWPLLVKRNLTDSERRLLKSRYPYLVFTENSRMEIQDLPEATLKTISDRLAECRVIRHIPAKMHGIVVDQTTWGIVAAGTITKLRQKTTEKNARCDENGHRFVKTIEEKRSLLLGGPNAPDGKLA

SEQ ID NO: 413 - protein, 1101 aa, unidentified
  REGION 1..1101: note = Description of Unknown: uncultivated organism with predicted taxonomy: Verrucomicrobia bacterium
  REGION 1..1101: note = MG2-98 effector
MTRREKSATAKFITFSFDVGHSSIGWAVLGSGQKRPSIQDAQILGCGVVTFPVDDCLANQRRDFRRQRRHIRSTRLRIERMKRLLLHLGVMTREQLDKPGCAWPWLLAAQAFHGLRTLTWPELWDVLRWFAHNRGYDGNRAWSRFEEEEPEDTERVGQGRALLIEHKTQSMAEVFCHVLGINSRDPAAQKSSRKRIREVLQAAFPRETVKAEVSAILKNHEGKLPKCDDKLATALLTDRKAIDCPTVKFPLRYIWGYLFGQLAPRFENRILTRCPFTDEKVPAKDCPEFYRFRWAMQLANVVVDEDGNSRPLTQTERQAVNARMAECGALTKSEFKKAVADATGGRPNNLETMLMHPDAEKSLVLMPARKTALSGKNKDVFNLLPSALQARLLGKLIRRGSVRLRDIRSWTENDPALLAKFDAVISSWKTKAAGREKTKLDEDETQDPLDRTWKAHPESGRAPFARPILQQAYDDVMAGKDPRMEGGILYRSEEVLRRERDRTLAEQTNNHLIRHRLLILQRLAKDLLKDYAGGKASRIVKAIIEVNSDLRTMSGMTAKERETEMKKRLSNFTSAKIALEKALTGKKIGGKPIPITAGLIRKARLAMDLDMTCPYTGQIYDFIDIAKGRMQRDHVIPYAERASDSLAAQVLTFAEVNKWKDKRTAAQFVREEQGKAVKGKPNLVVLPFEKYKAFVEGLDKGKHPHPDDKARKEKRKKLLLLEEYAEKEFLPADLTITSQLVRLGARTLEKAFTDGNHAPKIVSMPGSVTGRVQRAWSLMGCIAKANPSVLDENGKPKPKGDIRDISHLHHAVDACVLGIAGTLFPNDGSLWKAMAARSPARAEAEQLLATGLYERDSEKHLRLRDLPAALKNQIADRLSERRVYQHVSADMAGLKADQAVWRVVDFKDNHPSAQKLVRAIRIAKLDKDMAEDMAFLAHWKRKGKGVERPKNLLKETESYFVEYDIVPKAKLMGLQPGKLQELKAVKVISENYGLALDPKPEIIPFAQVWRRLAELRAENDGKPVRVLRKGSLFRVGQGKFAGEFKVFSIKKNHNGLSLDIGPRDIPRPLNKMTAQGHYINVLLSSLLKGGLEIMDTDYAMN

SEQ ID NO: 414 - protein, 1080 aa, unidentified; identical to SEQ ID NO: 411
  REGION 1..1080: note = Description of Unknown: uncultivated organism
  REGION 1..1080: note = MG2-99 effector

SEQ ID NO: 415 - protein, 1038 aa, unidentified
  REGION 1..1038: note = Description of Unknown: uncultivated organism with predicted taxonomy: Proteobacteria
  REGION 1..1038: note = MG2-100 effector
MKQDQIAFSFDVGHSSIGWAVFKIADTPESFHTLLGTGVVLFPKDSCLASSRRGFRRSRRNIAARRSRIDRLKNYLVGLGVLSREQLDTNSNSYPWLLAARVLASGGKKALTWEELWSVLRWYAHNRGYDGNALWAGDAADAGDKDDNEKVQNAIALMDKHKTGTMAETVCKELGLDPRGEVKASRIYFKGNKAAFPREVVTEEVRRILAAHVGKLPKVDDALSDVLLKNAAPAGLELPARFKGGLLFGQYVPRFDNRIIPACRITGKNVPLKKCPEYLLYRWGRLLNNLTVFGTDGQIRTLLPAERKALHARMEAEGYFTKRTLNAALKEATGCTPANTESYFLTEEMEEALVLDPVKKLLATNQVLREVWPHLSAESRTQAQSALAAGKKIRLADILAAMESAGQDTAAAREALAHLQKKAKKKDADLVAHYFKANYPTGRAAYCREILAKTFAESMAGKDSTKEGGCLYETEEIRNRLLREPLVKQTNNHLVRHRLLIFERLLDQMVAEFADGDKKRIGATVVEVVRELQEFSGLNAKEVAQKLNEKLGNFRAVVKGLEEAIRGSGEKVAITGSLIRKARILEDQGFICPYTGAPLGYPDLLNDRLEIEHVIPRSLRPSDALSSCVMTFRSVNDMKGQRTAMQFICDCEKHGRDVPGHGNLQITTKKAYEAYVAKHKKQYRYGTDDRRRCERRAELMLMERYDQRNADFTERDLTQTSHLNKMAISLVKQRIGIDAKHLPGSVTAFIRQKLHIDECLFNAVPRLQKAAKGEGKKLKLKKNTEEPPAEPLLNDLPPRKLTKADIRELTHLHHAMDAVTQGLALLLFAPEDWPLLVKRHLSDSERRLLKSRYPYLVFTENSRMDIQDLPDATLKTISGRLAECRVVRHIPAKMHGIVVDQTTWGIVASGAITKLCQKTTEKNARYDENGRRFVKTAEEKRSLLLGGPNAPEGKLARIKGAILITENWGCALDPAPPTVIPHFKVYPQLRALREKNGGRPVRILRKGSLIQIKTGRFQGIWSVAYIKDNADGICLDIN

SEQ ID NO: 416 - protein, 916 aa, unidentified
  REGION 1..916: note = Description of Unknown: uncultivated organism with predicted taxonomy: Bradyrhizobium
  REGION 1..916: note = MG2-101 effector
MKQDQIAFSFDVGHSSIGWAVFKIADTPESFHTLLGTGVVLFPKDSCLASSRRGFRRSRRNIAARRSRIDRLKNYLVGLGVLSREQLDTNSNSYPWLLAARVLASGGKKALTWEELWSVLRWYAHNRGYDGNALWAGDAADAGDKDDNEKVQNAIALMDKHKTGTMAETVCKELGLDPRGEVKASRIYFKGNKAAFPREVVTEEVRRILAAHVGKLPKVDDALSDVLLKNAAPAGLELPARFKGGLLFGQYVPRFDNRIIPACRITGKNVPLKKCPEYLLYRWGRLLNNLTVFGTDGQIRTLLPAERKALHARMEAEGYFTKRTLNAALKEATGCTPANTESYFLTEEMEEALVLDPVKKLLATNQVLREVWPHLSAESRTQAQSALAAGKKIRLADILAAMESAGQDTAAAREALAHLQKKAKKKDADLVAHYFKANYPTGRAAYCREILAKTFAESMAGKDSTKEGGCLYETEEIRNRLLREPLVKQTNNHLVRHRLLIFERLLDQMMAEFADGDKKRIGATVVEVVRELQEFSGLNAKEVAQKLNEKLGNFRAVVKGLEEAIRGSGEKVAITGSLIRKARILEDQGFICPYTGAPLGYPDLLNDRLEIEHVIPRSLRPSDALSSCVMTFRSVNDMKGQRTAMQFIGEEQGREVPGHGNLQITTKKAYEAYVAKHKKQYRYGTDDRRRCERRAELMLMERYDQRNADFTERDLTQTSHLNKMAISLVKQRIGIDAKHLPGSVTAFIRQKLHIDECLFNAVPRLQKAAKGEGKKLKLKKNTEEPPAEPLLNDLPPRKLTKADIRELTHLHHAMDAVTQGLALLLFAPEDWPLLVKRHLSDSEKRLLKARYPFLLFNGDNNISIQDLPEAALQTISDRLAECRVVRHIPAKMHGIDLKQTTWGVVTSGAIKKLRQK

SEQ ID NO: 417 - protein, 1088 aa, unidentified
  REGION 1..1088: note = Description of Unknown: uncultivated organism with predicted taxonomy: Methylococcales bacterium
  REGION 1..1088: note = MG2-102 effector
MNEKQKISPVTVPDLQLAFDVGHSSIGWAVLQNNTGISPATAKPGNDNRSINILGCGSVVFRADDCLASSRRAYRRQRRHIRSTKQRIARMKIILNYLGALTENELNQPGCAWPWQLAARVLQGGKLLTWPELWDVLRWYAHNRGYDGNRRWSAAEAEAQKEDSEKEANARTLMGKYGVHSMAETFCRELGVEPLGKKKSSMKRFKGLNAAFPREVVEGEVRNILQAHSGKLKGVDVNLEKVLFSGWRAIPCPDLKLPKRYEGGLLFGQLVPRFDNRIISICPISGQKVPSRNCPEFLNFRWAMQLANIKVGKVKDRELQPLKVEHRSALDKQMRERGYLTPKELKDAVRSIAGCERDNLDTMLMHPDAKDALLLDPVQKLICSDDLQPFWKLLPERLQKRLRGQWRRGKVFSLTQIRKQLELLDDAGAFDSKLQKQLDTQNTKAKKKDRQVTREELLQKHFPSRPLKLDGRAAFARHLLKQACEDVLAGRPHPKEEGGCLFISEEIRQKQLNREIAEQTNNHLVRHRLLILERLFGDIIKEYAAGKKGRIGKITIEVNRDLREMSGKTAKEKAQDLGLRIANHHAVAEKLEKAFAEERNGKSIRITAGLIRKARIADDLGWKCPYTGQPYEPKHLITRFVDKDHIVPRSDRASDSLDSLVITFSAINKWKGKRTAWQFVSEEQGKPVPDLPNFSILSLARYKQFVETLETYKGHDDDKRRKKKRKELMLLPKYEEKEFVPGDLTQTSQLVRLGAQVLKRVFANSEKKSPVVSLPGSVTGAVRKAWKVLGCLSLANQQVLDENGDVKTKTDIRDITHLHHALDACVLGLTSHFIPNNGRVWELIVKRNPNELEKRELMALGVFGFNAEKRFEMRDLDNKLKEQIRQRLAEKRVVQHIPARMDGLRVEQNTWRVVSSDENGNVTIRQRIRQPDGSRPEKVGEEKATKLLGLKPVNSNGKLAANKGVLIIPDNYGVVLDPVPTIIPFHKVWPRLQELKKANGGKMPRVLRNGQTIKVPEGKYKGVWRVFSAKNNSTGMAVDIGQPDVVRLKNKTEGHKINVLLASLLKNKMQVVKTPFTGIASCPTTSPA

SEQ ID NO: 418 - protein, 961 aa, unidentified
  REGION 1..961: note = Description of Unknown: uncultivated organism with predicted taxonomy: Verrucomicrobia bacterium
  REGION 1..961: note = MG2-103 effector
YDGNQRWSKNASSESESHTLDDASLDKILSDASATEADKDDAKKVKEAKNLMQKNGTHSMAETFCKELGLHPMGKAKASMKRFKGLNAAFPREIVEGEVRRILKAHFGKLPKVDAHFERVLLGKDNQDKLAWQAIPCPELKLPKRYQGGLLFGQLVPRFDNRIISTCPISGEKVPSRNCPEFLNFRWAMQLANVQVARFGEQKLSPLKPDERADLDKQMRAAGGMTAKQFTEAVRSTTSAIRDNLDTMLMHPDAKEALLLDPVQKVVCSDDLAPFWKLLPERLQKRLRGKWRHGKVFTLAQIRTQLELLGDATAFEVELQNQLDTRNTKTKKKDKQVSREELLQKHFPSKPLKLDGRAAFARHLLKKAYEEVLTGKHPKEEGNCLFLTEEIRKKQQEREIADQTNNHLVRHRLLILERLVGDIVKEYAGGDKEQISKATIEVNRDLREMSGKTAKEKAQDLGLRIANHHAVSDKLEKAFAEEGKRTPITAGLIRKARIADDLGWKCPYTGQDYEPKQLVSRYVDKDHIVPRSQRASDSLDSLVITFGAINKWKGNRTAWQFVEQEQSKPVPDLPNLSILTLTRYKQFVESLETYKGHDDDKRRKKRRKDLLLLPKYEEKTFVPRDLTQTSQLVRLGAQVLRNVLPHLKQNDVISLPGSVTGTVRKAWKVLGCLSLANPQVLDENGDVKTKTDIRDITHLHHALDACVLGLVSHFIPNSGQVWELIVKRNPNDTEKKQLTALGVFGFGKDNRFEMRDLDDRLKEQIRQRLAEKRVVQHVPARMDGLRVEQNTWRVVSIKDGEATIQQRIRQADGSRPLKQTEEKVGKLLGLEPGKLSANKGALVIPDNFGVALDPQPTIIPFHKVWTRLQELKKANSGKMPRVLRNGQIIQVPTGRYKGIWRVFSAKATLTLDLGSPDKVRLESKGDGQKREVQIKTLLQDGMVFQKIPLTGIAACPTTSSS

SEQ ID NO: 419 - protein, 1011 aa, unidentified
  REGION 1..1011: note = Description of Unknown: uncultivated organism with predicted taxonomy: Verrucomicrobia bacterium
  REGION 1..1011: note = MG2-104 effector
DAVPDTEKVKNAGELAHDLGTETMAETIAAYTVRYEAAMQAWHRARTAAVTEGKEFKEPKPMVHFKGRNCAFPRESVVWPEVQRLLTALKGKLLNLDDALIRALLGNDVDPLKDREAWKTLPCPALKLPKRYHGGLLFGQMIPRFENRIIGVCPIQFARLEARYLSEGLDAAEAKHRAAKEAKLPAKATPEFLRFRWAMQLANVFGAAPGESKTRPLSAEERRKLTEQAEQRGAFGKVEFKKAVRAVTGWLDKPARDNLDSLLLHPDAERALELDPVQNEIRKSSLRPALDALPDRYRKRLHGKLASGKTVTLAEVRGWLEAGSRRREEAESLAAFDAVLDQEVEKANTKRGKKQEATTRESLLAEKLTAAFPTGRAPYARPILRQAYEEAMSGIDPRAEKSADQPRGVLCQTDELKEAQLHRRLDEQTNNHLIRHRLLILERLLEDLIAAPEFADGDKARVAGLTIEVNRELRDLSGKTRKEQEKDLGIRLKDFKDVAKKVEDACKRRGVSITAGIIRKARVAEDLGWKCPYTGKAFEIDALLGDTMDKDHIIPHADRQSDSLDSLVMTWKEVNTWKGKRTAMQFIREEGGKTVPGRPELSIMPLEPFKKHVASLDTRKGHNDDKARKKRRVQRLLTENYEEKEFTPRDLTVTSHLVRLGAQVLKRHFSDLPREHRIQLEPVSLPGSVTGEIRKAWKLIGCLAVANPQVLNPDGTVKPKQDIRGITHLHHALDACVLGLAAFYFPRHGSLWAAMVKRRPSAEEAALLRQTGFYQTDSEGRFRLIDFPEVLAQQIRQRLAEKRVVQHVPADMGGVLVEENTRGIQGISEDGRRVALRQRAPRDPKTGVRPSAKTTDEAAGKLLGLQPEGGSGKLKRQNGVRVITDNFGVAILDHAPEGEEKFVVIPWHRVWHRLEELKERNGGNRPMLIRNGQLIRVAKGNYAGVWRVFSAKNNTSGMALDIGWPDVVRLQNKTEGHKINVLLASLVKAGLEALPNSLLGLDSRAVCQTAT

SEQ ID NO: 420 - protein, 762 aa, unidentified
  REGION 1..762: note = Description of Unknown: uncultivated organism with predicted taxonomy: Verrucomicrobia bacterium
  REGION 1..762: note = MG2-105 effector
HGGLLFGQMIPRFENRIIGVCPIQFARLEARYLSEGLDAAEAKHRAAKEAKLPAKATPEFLRFRWAMQLANVFGAAPGESKTRPLSAEERRKLTEQAEQRGAFGKVEFKKAVRAVTGWLDKPARDNLDSLLLHPDAERALELDPVQNEIRKSSLRPALDALPDRYRKRLHGKLASGKTVTLAEVRGWLEAGSRRREEAESLAAFDAVLDQEVEKANTKRGKKQEATTRESLLAEKLTAAFPTGRAPYARPILRQAYEEAMSGIDPRAEKSADQPRGVLCQTDELKEAQLHRRLDEQTNNHLIRHRLLILERLLEDLIAAPEFADGDKARVAGLTIEVNRELRDLSGKTRKEQEKDLGIRLKDFKDVAKKVEDACKRRGVSITAGIIRKARVAEDLGWKCPYTGKAFEIDALLGDTMDKDHIIPHADRQSDSLDSLVMTWKEVNTWKGKRTAMQFIREEGGKTVPGRPELSIMPLEPFKKHVASLDTRKGHNDDKARKKRRVQRLLTENYEEKEFTPRDLTVTSHLVRLGAQVLKRHFSDLPREHRIQLEPVSLPGSVTGEIRKAWKLIGCLAVANPQVLNPDGTVKPKQDIRGITHLHHALDACVLGLAAFYFPRHGSLWAAMVKRRPSAEEAALLRQTGFYQTDSEGRFRLIDFPEVLAQQIRQRLAEKRVVQHVPADMGGVLVEENTRGIQGISEDGRRVALRQRAPRDPKTGVRPSAKTTDEAAGKLLGLQPEGGSGKLKRQNGVRVITDNFGVAILDH

SEQ ID NO: 421 - protein, 1134 aa, unidentified
  REGION 1..1134: note = Description of Unknown: uncultivated organism with predicted taxonomy: Rothia
  REGION 1..1134: note = MG3-6 effector
MSTDMKNYRIGVDVGDRSVGLAAIEFDDDGLPIQKLALVTFRHDGGLDPTKNKTPMSRKETRGIARRTMRMNRERKRRLRNLDNVLENLGYSVPEGPEPETYEAWTSRALLASIKLASADELNEHLVRAVRHMARHRGWANPWWSLDQLEKASQEPSETFEIILARARELFGEKVPANPTLGMLGALAANNEVLLRPRDEKKRKTGYVRGTPLMFAQVRQGDQLAELRRICEVQGIEDQYEALRLGVFDHKHPYVPKERVGKDPLNPSTNRTIRASLEFQEFRILDSVANLRVRIGSRAKRELTEAEYDAAVEFLMDYADKEQPSWADVAEKIGVPGNRLVAPVLEDVQQKTAPYDRSSAAFEKAMGKKTEARQWWESTDDDQLRSLLIAFLVDATNDTEEAAAEAGLSELYKSWPAEEREALSNIDFEKGRVAYSQETLSKLSEYMHEYRVGLHEARKAVFGVDDTWRPPLDKLEEPTGQPAVDRVLTILRRFVLDCERQWGRPRAITVEHTRTGLMGPTQRQKILNEQKKNRADNERIRDELRESGVDNPSRAEVRRHLIVQEQECQCLYCGTMITTTTSELDHIVPRAGGGSSRRENLAAVCRACNAKKKRELFYAWAGPVKSQETIERVRQLKAFKDSKKAKMFKNQIRRLNQTEADEPIDERSLASTSYAAVAVRERLEQHFNEGLALDDKSRVVLDVYAGAVTRESRRAGGIDERILLRGERDKNRFDVRHHAVDAAVMTLLNRSVALTLEQRSQLRRTFYEQGLDKLDRNQLKPEEDWRDFTGLAPASQEKFLEWRKAATILGDLLAEAIEDDSIAVVSPLRLRPQNGSVHLETISAVKKQTLGSDWPADAVKRIVDPEIYLAMKDALGKLKELPEDSARSLELPDGRFVEADDEVLFFPENAASILTPRGVAEIGGSIHHARLYGWLTKKGELKVGMLRVYGAEFPWLMRESGSRNVLSMPIHRGSQSFRDMQDTTRKAVESGEAVEFAWITQNDELEFDPDDYIAHGGKDELRQFLGFMPECRWRVDGFKKNYQIRIRPAMLSREQLPSDIQRRLESKTLTKNESLLLKALDTGLVVAIGGLLPLETLKVIRRNNLGFPRWRGNGNLPTSFEVRSSALRALGVEG

SEQ ID NO: 422 - protein, 1131 aa, unidentified
  REGION 1..1131: note = Description of Unknown: uncultivated organism with predicted taxonomy: Rothia
  REGION 1..1131: note = MG3-7 effector
MSEHTKYRIGIDVGDRSVGLAAIEFDDDGFPLSNLAMVTYRHDGGLDPTTNKSPKSRKETRGVALRTMRMRRRKKSRLKDLDKTLRALGYVVPACEEPQTYEAWKSRALLATTKVEGAQELGEHLVRAVRHMARHRGWRNPWWTFNQLEIASTAPSDTFAKIRERAEKEWPGVVPEEATLGMIGALAASNNVLLRPRTYRKDQPRHSKKLNVLGQEPILVDKVRQEDLLAELRTICKKQDIEDQYEKLAQAVFEQTRPYVPLDRVGKDPLQPNKSRASRASLEFQRFRILDAVAHLRVRVGASDRRALTDEEHDKAVHFLMGYSKKDVPTWGDVADEIGVEPAHLIAPVIDDVRLNKAPYDRSSTEFEQKMKKKTRARQWWDEANLESRSQLILLVSDPTDETMRLAEVSGLYEVFESWPDEEKEALEGLKVESGRAAYSTDTLNKLSDHMRLKRIDLHEARKIAFGVDDMWHPPLDRIDEPTGQPTVDRVLTIVRRFIFDCERAWGCPENVVIEHARTGLMGPAQRADVLNEIAKNRKKNDKIREDLRAGGINNPTRADIRRNAIVQDQESQCLYCGATIGVSYSELDHIVPRAGGGSSRRENLAAVCRACNDSKKDTPFAVWAKNTSRPVTLEGTIQRLRELKAFKRPKDRRMVDLIIRRLKQTEKDDPIDERSLASTSYAATAIRERIEQYFNEKAEKLDLAKVHIDVYSGSLTRESRRAGGIDKMVLLRGQSDKNRFDVRHHAIDAAVLTLLNRSVAVTLEQRRLIKQQREYSLEKSRRERDNVWRDFMGLGPAAQEKFAKWKKTAYVLADIIKEAISNDAIPVVSPLRLRPQNGSVHLDTVDAVLERTIGDAWTVDQVHRIVNPQIYLAFAGYLGNQKALDPDSSRVLALNDGRKLTAEDVIYVFPEKAASILTPRGVVKIGESVHHVRLYAWKNRKGKAEVGMLRVFGAEFPWLMRESGVKDVLRVPIHTGSQSYRDLSFTVRKNIEKGEAAEIGWLTQNEELEFNPESYLQEGGKDKLAKFLAFLPETRWRVDGFPMPDKLRIRPALLSREEIPEGVFRTEEQSLLEEALTKGLIIATKGLLSLPDVKVLRRNNLGIPRWRGGSYRPVSLDIQRAALAALDEQE

SEQ ID NO: 423 - protein, 1132 aa, unidentified
  REGION 1..1132: note = Description of Unknown: uncultivated organism with predicted taxonomy: Rothia
  REGION 1..1132: note = MG3-8 effector
MSTDMKNYRIGVDVGDRSVGLAAIEFDDAGFPIQKLALVTFRHDGGLDPTDNPKSRKETRGEARRRMRMTRRRKQRLRDLDKVLENLGYTVPEGPEPETYEAWTSRALLASIKLASADELNEHLVRAVRHIARHRGWVNPWWSLDQLERASQEPSETFEIILARARELFGERVPANPTLGMLGALAANNEVLLRPRAEKKKKTGYVRGTPLLAAQVRQIDQVAELRRICEVQGIEEQYETLRNAIFAHKVAYVPTERVGKDPLAPSKNRTIRASLEFQEFRILDSVANLRVRTDSRAKRELTEGEYDAAVEFLMGYTAKEQPSWADVAEEIGVPGNRLIAPVLEDVQQKTAPFDRSSAAFEKAMSKRTEARQWWEANDDDQLRSLFIMFLADATNDTEEAAAVAGLPELYMSWPAEEREALSNIDFEKGRVAYSHETLSKLSEYMHEHRVGLHEARKAVFGVDDTWRPPLAKLEEPTGQPTVDRVLTILRRFVLDCERQWGRPRAITVEHARIGLVGPAQRQNILKEQEDNRKNNECIRDELRKSGVENPSRTEVRRHLVVQDQESQCLYCGAVIRTDTSELDHIVPRAGGGSSRRENLAAVCRYCNSKKDRTLFYDWAGSVRLQETIDRVRQLKAFKDSKKAKMFKNQIRRLRQTEADEPIDERSLASTSYAAVAVRERLEQHFNEGLAPDDKNRVVLDVYAGSVTRESRRAGGIDERILLRGERDKNRFDVRHHAIDAAVMTLLNRSVALTLEQRSQLRRAFYEQGLDKLDRDQLKPEEDWRNFIGLSLASQEKFLEWKKVTTVLGDLLAEAIEDDSIAVVSPLRLRPQNGRVHKDTIAAVKKQTLGSAWSADAVKRIVDPEIYLAMKDALGKSKVLPEDSARTLELSDGRYLEADDEVLFFPKNAASILTPRGVAEIGGSIHHARLYSWLTKKGELKIGMLRVYGAEFPWLMRESGSHDVLRMPIHPGSQSFRDMQDTTRKAVESSEAVEFAWITQNDELEFEPEDYIAHGGKDELRQFLEFMPECRWRVDGFKKNYQIRIRPAMLSREQLPSDIQRRLESKTLTENESLLLKALDTGLVVAIGGLLPLGTLKVIRRNNLGFPRWRGNGNLPTSFEVRSSALRALGVEG

SEQ ID NO: 424 - protein, 1050 aa, unidentified
  REGION 1..1050: note = Description of Unknown: uncultivated organism with predicted taxonomy: Dermabacter hominis
  REGION 1..1050: note = MG3-1 effector
MRKRKRQRLKALDRYLAEHGYPDVQPQITPYDAWHARARLVSTKVDDPAQLKNDLALALRHIARHRGWRNPWKTLASTRKLPVPSETLLANQARAREHFGDEVNDSTTVGQIGALAASRDYLLRPRNITVTKGVNQKKNVNDLERSSEEALAAGHPTAPILGWQVRQEDQINEVERIWERQGLPSEELPQILTLLFAQTKPHVPSERVGRDALQPKLYRAPIAALEFQDFRILAAIANLRVRTEGGRRLTKDERFTAFQFMSGWREKEPLSWADVAEELGFSAHALAAPTTETNQRLAFAPTNRTLTTLGTFFKGKKIDAGAREWWQSASYAERSLLAQLIADATPDTQEQADASGLSDVLLQWDEDTVADLMELDLQSGRAAYSTDTLLRLNARMENDGTDLFESIQAEFNIDPSRLPRPDWDDQTGQPTVDRVLTIVRRFVGGCERKYGKPESVTVEHVRTGLMGAEQRSSIIAENNRNRRDSDRIRAELQADGLSEPSRLDVRRHRQVQRQNCTCLYCGTPITTTTSELDHIVPRRGGGSSQGSNLVAVCRECNASKAHRIFAEWAEDSQREGVSVKEAAKRVRHWLNASASMKREVTRRLQQKRTDPPIDERDLASTSYAATEITRRILGHFHDEVPVVAFGGSGTREARRAGRVDHIIRLRGSLDKSRLDTRHHAIDAAVLTLQSPAIYRVLLTRVNLKHEHEVTGEAPEWRDYEGADQAEKVLYRRWQKNIATLAELMRQEIENNRVPVTRPIRLRKSRGAVHDATVMKALERDLWGEWDAQAIDRLVDPELHLALRKLFTSTKSKKIDVDATSQGLPERYLANQTVQLFDADAPSVMSPRGILRIGAGTHHARLLTWDDPKKGPQLGIQRVFAAEFGEILKDASSNDLFEAPIPFHTMSHRDLQPKVRAAVEQGLTRQIGWITQGDELEIDPADFVGEANAFGNFLREFPERSWSIAGLKKSNTIVIRPLLLSQEGVTAAISPHAAKIVENGIELSNSTLFTAPGTGIIRRTGLGRPRWDSGPAHLPESFNVHARMTQQSARD

SEQ ID NO: 425 - protein, 1134 aa, unidentified
  REGION 1..1134: note = Description of Unknown: uncultivated organism with predicted taxonomy: Micrococcales
  REGION 1..1134: note = MG3-5 effector
MCINGDSMAAVSGFSPCKFGIGIDVGDRSVGFATIEFDDDGFPLSVLASVSYKHDGGLDPTKNKNPISRKATAGVAHRVRRMRKRRRRRLEMLDVKLRSLGFPVPNGEEPQTYQAWQSRAKLIDGRVDEVRELNDHLVRAVRHIARHRGWRNPWWRFPQLLEASENPSDALVAMRREAAQRWPGQALESATIGQLGWLGAHPDVLVRPRSARSEVPVLSSRVMQQDQCAEIRRYWQLQDLPQEALHPILKAVFHQEPPTVPAERIGRDALPGQDAPRAIRAALEFQEYRIRDAVANLRVRTGGANRKRKLTPEENHAVVKYLMEFRQNPSPSWAEVAEHIDIAPTSLIAPIIDDMRIAAAPTDRSTITAEAVLSNMKKDSGARLWWESADQKMRSLLIRFLADTSDYTQPEAEMAGLVDIVSTWPDSEIEKLSSASWQSGRAAYSLQSLERMNAYMAEYSTGAHEARKGVFGVDDSWKPEADPWDAQTGQPVVDRVMTIVRRFVGACERKWGEPERIVIEHVRTGLMGPAQRAEVLREMASGRRKNDRIRQELRTSGIDEPNLSDVKRHRKIQMQGGVCLYCGTDITSATAELDHIVPRAGGGNSTSTNLVAVCRVCNAAKGRRTFPEFASSDTRDAVSLEAAVERVKLWIDDKGIKNIGESRYARDVIRRLKQSTQDEPIDERSLSATAFAAVEIRRKLENHFKDRTKPVRVDVYRGALTRESRRAGRIDAKIRLRGNIDKDRLDIRHHAIDAAVLTLLDPSVAKTLAMRLDLKREQQDSGRDTRWKEFKGLTPASQERFIKWCQASECLADMLRQQIEADRVPVVVPLRISPSNGAVHDDSVRPLTRQKIDSTWDRKSINRIVDPEIHVAMRRLLNNGTSLPEDKNRVLDLPDGNELGPHDEVELFSTSAASIKLRRGGSAEIGGSIHHARVYAWMGAKGQLEYGMMRVFGAEFPTLTKLSGSKDILRMPIHAGSMSYRDMQDRVRKPIESDIAVELGWITQGDELEILPEAHLETAGGLGDFLKSFPETQWTIDGFNDPSRLRVRPRLMSLEGRDTIDAMGHLSDTEKLKIKQALSKGLMVSASELLSHGAKIIRRDHLGRPRWRGNARPVSIELEQVANQLVNHRSVDGQ

SEQ ID NO: 426 - protein, 1132 aa, unidentified
  REGION 1..1132: note = Description of Unknown: uncultivated organism with predicted taxonomy: Rothia
  REGION 1..1132: note = MG3-6 effector
MSADSLNYRIGVDVGDRSVGLAAIELDDDGFPLKKLAMVTFRHDGGKDPATGKTPKSRKETAGVARRTMRMRRRKKKRLKDLDKKLRDLGYFVPRDEEPQTYEAWSSRARLAESRFEDPHERGEHLVRAVRHMARHRGWRNPWWSFSQLEEASQEPSETFGRILERAQHEWGERVSDNATLGMLGALAANNNILLRPRRYEHNPKTGKNAEKLNVRGQEPILLDKVRQEDVLAELRRICKVQGIEDQYPELAHAVFTQVRPYVPTERVGKDPLQPMKIRASRASLEFQEFRIRDAVANLRIRVGGSERRPLTEEEYDRAVDYLMEYSDTTPPTWGEVADELEIAENTLIAPVIDDVRLNVAPYDRSSAIVEAKLKRKTQARQWWDDDANLDLRSQLILLVSDATDDTARVAENSGLLEVFESWSDEEKQTLQDLKFDSGRAAYSIDTLNKLNAYMHEHRVGLHEARQNVFGVSDTWRPPRDRLDEPTGQPTVDRVLTIVRRFILDCERAWGRPQKIVVEHARTGLMGPSQRADVLKEIARNRNANERIRQELREGGIEAPNRADIRRNSIIQDQESQCLYCGKEIGVLTAELDHIVPRAGGGSSKRENLAAVCRACNASKGSRPFAVWAGPARLERTIQRLRELQAFKTKSKKRTLNAIIRRLKQREEDEPIDERSLASTSYAATSIRERLEQHFNDDLPDGFAPVAVDVYGGSLTRESRRAGGIDKSIMLRGQSDKNRFDVRHHAIDAAVMTLLNPSVAVTLEQRRMLKQENDYSSPRGQHDNGWRDFIGRGEASQSKFLHWKKTAVVLADLISEAIEQDTIPVVNPLRLRPQNGSVHKDTVEAVLERTVGDSWTDKQVSRIVDPNTYIAFLSLLGRKKELDADHQRLVSVSAGVKLLADERVQIFPEEAASILTPRGVVKIGDSIHHARLYGWKNQRGDIQVGMLRVFGAEFPWFMRESGVKDILRVPIPQGSQSYRDLAATTRKFIENGQATEFGWITQNDEIEISAEEYLATDKGDILSDFLGILPEIRWKVTGIEDNRRIRLRPLLLSSEAIPNMLNGRLLTQEEHDLIALVINKGVRVVVSTFLALPSTKIIRRNNLGIPRWRGNGHLPTSLDIQRAATQALEGRD

SEQ ID NO: 427 - protein, 1134 aa, unidentified
  REGION 1..1134: note = Description of Unknown: uncultivated organism with predicted taxonomy: Rothia
  REGION 1..1134: note = MG3-7 effector
MSTDPKNYRIGVDVGDRSVGLAAIEFDDAGFPIQKLALVTFRHDGGLDPTKNKTPVSRKKTRGDARRTMRMNRRRKQRLRDLDMMLTNLGYTVPEGPEPETYEAWTSRALLASIKLANVDELNEHLVRAVRHMARHRGWANPWWSIDRLENASREPSETFEIILARARELFGEKVPADPTLGMLGALAANNEVLLRPRDGKKKKTGYVRGTPLLVAKVRQEDQLAELRRICEIQGIEGQYDALRSAIFTHKMAYVPTERVGKDPLNPSKNRTIRASLEFQEFRILDSVANLRVRTDSRSKRELTEAEYDVAVEFLMSYTANEQPSWADVAEVIGVPGNRLIAPVLEDVQQKTAPFDRSSAAFEKAMGKKTEARQWWESTDDDQLRSLFISFLVDATDDTEEAAAEAGLPELYMSWPAEEREVLSDIDFEKGRVAYSQETLSKLSEYMHEYRVGLHEARKAVFGVDDTWRPPLDKLDEQTGQPTVDRVLTILRRFVLDCERQWGRPRAITVEHARTGLVGPAQRQEILNEQKKNRENNELIRGDLRKSGVENPSRAEVRRHLIVQEQESQCLYCGAVIRTDTSELDHIVPRAGGGSSRRENMAAVCHYCNSKKKRTLFYDWAGPVKLQETVDRVRQLEAFKDSKKAKMFKNQIRRLKQTEADVPIDERSLASTSYAAVAVRERLEQHFNEGLAPDDKSRVVLDVYAGAVTRESRRAGGIDERILLRGERDKNRFDVRHHAIDAAVMTLLNRSVALTLEQRSQLRRAFYELELDKLDRDQLKPGEDWRNFTGLYEASQNKFSEWKKAATVLGDLLAEAIEDDAIAVVSPLRLRPQNGSVHDDTINAVKKLTLGSAWPADAVKRIVDPEIYLAMKDVLGKLKELPEDSARSLELSDGRYIEADDEVLFFPKKAASILTPRGAAEIGNSIHHARLYSWLTKKGELKFGMLRVYGAEFPWLMRESGSRDVLHMPIHPGSQSFRGMQDGVRKAVESGEAVEFGWITQDDELEFDPEDYIAHGGDDELNRLLRVMPERRWRVDGFYNAGTLRIRPALLSAEQLPSELQKKVADKTLSDVELILLRAVQRGLFVAISSFLPLESLKVIRRNNLGFPRWRGNGNLPTSFEVRSSALRALGVEG

SEQ ID NO: 428 - protein, 1132 aa, unidentified; identical to SEQ ID NO: 423
  REGION 1..1132: note = Description of Unknown: uncultivated organism with predicted taxonomy: Rothia
  REGION 1..1132: note = MG3-8 effector

SEQ ID NO: 429 - protein, 1110 aa, unidentified
  REGION 1..1110: note = Description of Unknown: uncultivated organism with predicted taxonomy: Brevibacterium
  REGION 1..1110: note = MG3-42 effector
MNKDYAVGFDVGDRSVGVAFVEFDGDVPVKLLRAVAYRHDGGIDPTTNKTPQSRKATAGVARRVRRMRKERRRRLNELDKFLRQAGYPVEGDDRGETYEPWKARANCVTGFIEDEAQRKLELSRAIRHMARHRGWRNPWHTVSQELREHVPSSQHQKNVANAQEIFPGELDANATVGQLGAVAGKYNRLLRPRTNEKAKESGLIPVLSYKVLQCDQLDELQRMCKMQRLDEDFESELLELVFGQKRPVVRAENIGRDELPGMNGHPRAPRSSLEFQEFRIRDSIANLRVKSSRRDRKGVGLASEVVNNVVDYLLEWREPDDPTWAEVAELIGVDPDLLVAPVFDDVRRMIAPVDRTSRLLEKTLSKKAFKPVLEWWNNTSFEQKSMLVALISDPTDHHEDWAVSAGIADVIASWPDGLLEELNSLNFESGRSAYSLLSLKKMNDCMAIRGCNLHDARKEVFDVDDSWRPTPPKIHEPVGHPTVDRVLPIVRRTIMEAHRRWGVPRSIHIEHTRSSLLGPAARAEYQREVNANRRARERSLESLREQGVADPTVATVRRFSAVQHQNGVCLYCGSAITAKPGDSGCELDHVVPRSGGGSSKRENLVAACRRCNSEKGNLPFSLWAAESTRPEVSVEAALTRLQNFNWERRDRAVKKGLIRRLKQTSEDEPIDERSLESTAYAATEIRRRLQYYFEENCGANSPQPEILVLPGAVTREARRAGGFDSRIKLRGKNDKDRFDARHHALDAAIMTVVDRSVARTLQQRSDLKYSNFLTGAEPRWKDFKGDSPESRKKFERWVQTSNRLADLVSDAIVTDSIPVIFPLRLGTNRGPLHKDTVRCADWKPIAEEWSEKEIERIVSPDVHAAVTEAIGLKGGKLSATSCSNVILQNGKFGEKVALAKSSAACIQVNGGVVEIGESIHHARLFAWRGRRGAIEMGMVRVFTAELPYILKNSTHGDVLTATIPASTFSFRNTPATLRKKLLAGEAVSVGWLTQNDEIEIEVDEFACGNTSFAKFLTEIPEKRWRVDGFYDNRRLRIRPAYLSAEGLTDNHSKVVHETLEKGQFVNAGALLSASRTLLIRRTALGAPRWKLDSSGLPVSFSPLKLAEEAL

SEQ ID NO: 430 - protein, 819 aa, unidentified
  REGION 1..819: note = Description of Unknown: uncultivated organism with predicted taxonomy: Brevibacterium mcbrellneri
  REGION 1..819: note = MG3-68 effector
MNKDYAVGFDVGDRSVGVAFVEFDGDVPVKLLRAIAYRHDGGIDPTTNKTPQSRKATSGVARRVRRMRKERRRRLNELDKFLRQEGYPVEGDDRGETYEPWNARANCVIGFIEDEAQRKLELSRAIRHMARHRGWRNPWHTVAQELREEVPSSQHQKNVANAQEIFPGELDANATVGQLGAVAGKYNRLLRPRTNEKAKESGIIPVLSYKVLQCDQLDELQRICRMQRVGEDFESELLELVFGQKRPVVRAENIGRDELPGMNGHPRAPRSSLEFQEFRIRDSIANLRVKSSRRDRKGVGLASEVVNDVVDYLLEWREPDDPTWAEVAELIGIDPDLLVAPVFDDVRRMSAPVDRTSRLLEKTLSKKAFKPVLEWWNNTSFEQKSMLVALISDPTDHHEDWAVSAGIADVIASWPDGLLEELNSLNFESGRSAYSLLSLKNMNECMATRGCNLHDARKEVFDVDDSWRPTPPKIHEPVGHPTVDRVLPIVRRTIMEAHRRWGVPRSIHIEHTRSSLLGPAARAEYQREVNANRRARERSIESLREQGVADPTVATVRRFSAVQHQNGVCLYCGSTITAKPGDSGCELDHVVPRSGGGSSKRENLVAACRRCNSEKGNLPFSIWAATCTRPEVSVEAALVRLENFNWEKRDRAVKKGLIRRLKQTSEDEPIDERSLESTAYAATEIRRRVQYYFEENCGANVPQPEIFVLPGAVTREARRAGGFDSRIKLRGKGDKDRFDARHHALDAAIMTVVDWSVARTLQQRSDLKYSNFLTGAEPRWKEFKGDSPEARKKFERWIQTSNRLADLVSDAIVAAAIPV

SEQ ID NO: 431 - protein, 1110 aa, unidentified; identical to SEQ ID NO: 429
  REGION 1..1110: note = Description of Unknown: uncultivated organism with predicted taxonomy: Brevibacterium mcbrellneri
  REGION 1..1110: note = MG3-88 effector

SEQ ID NO: 432 - protein, 1055 aa, unidentified
  REGION 1..1055: note = Description of Unknown: uncultivated organism with predicted taxonomy: Planctomycetes
  REGION 1..1055: note = MG4-5 effector
MGDQQTLQATSYCLGLDVGVQGVGWAVIDLDDQGQPLGVRRTGVRCFDSGVGSETEFEKGVDEPPSTKRRQARQQRRQLWRRAQRQRRVFRALQEAGLLPPGPPTPVSRDKILRTLDADLAIQFGSLEDRIAAHLLPYRLRALALDTPLPPYALGRAFYHLAQRRGFLSNKKALKEEKEAGEVKKGIAELQEEMNRAGARALGEYFSSLDPEQRRIRNRWTARQMYLDEFDRVWEAQSRYHPRLTDELKTKVRRAIFFQRPLKSQKGLIGRCELEPRHRRAPLASLLAQRFRYWQKINDLEVIQPDGVVRPLSPEERHKLAHFLETQAEATFARIRKLLDLKKPKGSQEDFAFNLERGGEKRILGNRTAAKMAAVLGQRWAAMDDEDKRRLVNEILSFEKEAPLARRLVRAWNLDEPTAAQLAALDFEPGYAALSARAIRKLLPLMQREGMRFATARKQVYGDHLLGTRAYDALPPVAKAIPSLRNPAVCRALTEVRKVVNALVRAYGKPAMVRIELARDMKRGRKQRKETWQAMRENERCRLDARKLLQDHGIQEPRPADILKVLLAEECNWECPYTGKAISMDALIGSQPQFDVEHIIPFSRSLDNSFLNKTLCYHEENRNVKQNRTPFEAYGGDEQRWHEILQRVRRFRGSAAESKLRKFQLRQLPADFTNRHLNDTRYASRLAADYLALLYGGRVDANGRQRVQVGTGATTGFLRDEWGLNAILGDNDEKERADHRHHAIDAVVIALTGPGTVQALTRAALRAKELGRRLFVPLDPPWADRDSFLRDVRASVEAITVSYRVDRKVSGQLHEESNYSKPHMTVDNKGNLVEHRHIRKPLKDMSVEEVEAIVDDRVRKLVQEKLRQLGQEPKKAFADEANHPYFTTADGRLVPIHKARIRKTVATITVGPPQCPRHVAPGLNHHIEILAVRDPAGAVTHWEGELVSLFEAARRVKAGEPVVRRNHGPNKDFLFSLAKGEYVEMELQPGKRQLFRVTVISAKQIEFRLHHDARPTMLLRKTPGARVIRSPGSLFKAKARKVAVDPLGNVFPAND

SEQ ID NO: 433 - protein, 1026 aa, unidentified
  REGION 1..1026: note = Description of Unknown: uncultivated organism
  REGION 1..1026: note = MG4-11 effector
LVGYEKSFFLGDLSKWQPVSAGMVAKGNLEGGPYLNYPGPLDRGPGRWTARAYSNVGRADHNQVLNKQNRKNLSMNKKNSYVLGLDLGTASIGWSIIPLDSAAIDADNINMGVVIVDEPVDKKKKTPLNVDRRNARQQRRMKDRKNRRKVHLFNCLQRAGLLPSTPCHTPFQRQDLLNELDSTHYGLDMSGNDLDLLLYRLRAMALDEKLELYAIGRILYQLAERRGFKSNRKDTTKDNEDGEVKKAIAGLGEEIDKAGSRTIGEHFAAYDTTQKKIRQTYTSRQWYEDEFDLIWAKQSSYYPDMLTDALRKEIRDIIYYQRPLKAPKRGMCDLEKGQVRVSKSDVAFQRFRYWQVLNNLEVADGHSSFRPLRAKEKAVLVQKLEVTKKVTYKAIKKLLGFSESAVFNYEAMTDTIPGNSTIASVYAVLKDKKTKPSLELCATIAEKILAFEDTGALVKNLVRKYHINRDVAEKLAGLEFEDGVAMHSKQAIERILNKMKHEGKSYATALKELYPDRNRADKVYDLLPPVDEWTKGSTKITNPSVHRILTQLRKLVNALVREYGKPALIRIELARDLKHNVKTKSKIIAQIKSREEEREAARKGLADLGIDNPTPANIKKWVIAERCNWTCVYTGKRADKRVEFGPHPQFDIDHIQPYSRSGNDSLGNKVLCFSAENRHVKKNQTPLECYGDDEERWNEIMGRVSAITGPDRVKTYRYFITTAEENEGFTARSLTDTSYISKKAVEYVSLLFGGSIDAKGKRRVFATKGGITGRLRREWGLNVLLGGEDEKNRADHRHHAIDALVIALSTPAVIKKIGGEDTRPKEDILPPIDNLADVAREVLEKVNVVYRCSQKIRGELHDAGIERYPGRKQKRKGEVYCIGTAERTKRYVHLNSNHHMEVVEGKDGRWEAVTVPRMEVYQRCRAKRPIVNRNHGDKWYVCSLAIGDYFTVDGGEKKLYVVKMLSGQVVGYMEHNDGRLQKTSGDDMSVFRTSINKLRQKGFRKVQLDVMGRLAVGKERCPTPQF

SEQ ID NO: 434 - protein, 1111 aa, unidentified
  REGION 1..1111: note = Description of Unknown: uncultivated organism
  REGION 1..1111: note = MG4-12 effector
MPNSNAPYVLGLDLGIASVGWAIRPINPSDITVDNLKMGARIFDLAVEDDIEKGKDKPKNATRRDARSARRRLWRRRRRKLKIFNLLVRYGLLPEGDYPTPDARQDMLSALDLQLVKEYFPNATHHDQQTFTYALRALALDRELSPHAFGRALYALAQRRGFKSNKKLDGREKEGEKETSQIKQDIAELEKNVAEHARTLAEYFTTVNPEEERIRARWVGRKSYEEEFEAIWTAQARFKPELLTDELKAKIEDAIFFQRPLKSQKGKIAKCELELDENGKRYLPVARKGEPCFQKFRVWEKIINLRVWDDAVDGRYGGGWRPLTHQEQDAAYELAEKSEKVTYKALRKELGFKSIKGVKKGEAVFETGYFNLEVAEDAMIGDRTSARIWKVLNETGDTLTQEEVDQAALYILDYESEDGLRRRLLKSFPTLSDAAATKLAYDVVLEEGYGAYSSVALNKLLAVMTKKRVNQALAKMEVYKAQYGEACDLLPPLEEAVGDIRNPTVTRTLAEMRKVVNAIIRRYGKPAQIYVELARDLKRSRKQRDEIFRKNQARKKERENIEKTLQNEFYIKSPKGRDVLKYRLWKECGGICPYTGMVISPDDLFGPNSRFDIEHIIPFSRSMDDSFANKTLCYAEENRNVKKNQTPIECYGDSPKFREILERVRKTFTGEFKFRKLKLFETQEPESITEFSKACLNDSRYMSKLALRYLGVLYGAVNGCVGGQDEDEGGKRVIFASTGKVTAWIRREWRLNEILCDDDEPTGEGADVEKNRNDHRHHAIDALVISLSTPSYVQQLNRAAQLADNDAKARLFKKGNFMPPVTGFKALVAQVVDGIVVSKRVDSKVRGALHEETNLGAIAYPDPYTKKQRRKKRVFVTGLTSSKLLDSVVDPGVRRAIAEKLEEVGDAKKLADNPPRLPAHNRNFGVLIVKTAIWETNNPIRVGKGRSARFVKSGDNHHMEFYAVLDDKGNEIEWKFNIVSLYEAYERRRKHLPIVSRDFGPKTRFKFSLVKGDAIREKATGKIYFIAGLSTQGEGKGIYITGALNTCAKPVTVIKEEYSKMSKMKRGVAQGDMKGLPKEVAYFRSTNLVDLMKRFEKVRIDPLGNVERSNS

SEQ ID NO: 435 - protein, 1102 aa, unidentified
  REGION 1..1102: note = Description of Unknown: uncultivated organism
  REGION 1..1102: note = MG4-13 effector
MEQKESYILGLDLGANSIGWALLEAHPDPEEKGRLKAHGIKQIGVRIFEAGVEGEIEQGKDQSRAVDRRDARLARRRLDRISRRLSHLFYLLMSAGLLPEHPAYKTELGKKKSAKERKQERDLKAKARHEVINQLDQDLVKKWREKEPLAKETLPYILRAKALDEKLELYELGRALFHLAQRRGFLCNRKAKAKDDEELGKVNQGILELEGKIEGAGARTLGEYFSKLNPKEERIRSRWTSREMYLKEFEQIWNAQEKHYPKILTPEFKKKIWRCIFYQRPLKIQHHLIGECQYEKGKKRAPSACLAFQRFRMLQQLNNSYLISPDGEILNDGRLTKEQRERLIEVLEKKAELKFSKAKKILGLTKEYRFNFEKEDGKGEFLGNETAEKLIKVFGEERWSRFSEQEKNEIVQDLISIQHKSGLVKRGKNKWGLDDENAEEFSKINLEEGYCGLSRLALSKLIPLMETGLTYMEAVKQVYPDRLQNEAFDQLPMVINQMPELKNPVVKRVLTELRKIVNAIIRKYGKPEQIRIELAREMKKTRQQREEIWKKNKQNEEKRKQAAQAIIKEAGENPKPADIEKYLLWDECNGICPYTGKSISLKQLFSGEVDVEHIIPYSICLDNSYFNKTLCFHDENAKVKNNKTPWQAYGSDEKKWNEILERVKRFKGDAAKEKLKKFQIKDLEELDDFISSQLNDTKYASKLAKKFLGLLYPGQEALSRVQATKGGITANLRDVFNLNSILKDGDSVERDGYEPKKTRADHRHHAIDAICIALTEPSTVKMLSEASSRALKERKRRFGKVQPPWENFWEDVKKAIDNTIVSHRVSKKVNGPLHQETFYSPPKEVQGKIICHVRKPLENLSAGDIEDIVDPVVKKKVQEKIKELGGGDPKKLFAGSSTLPPEKLPCMTAKDGRVIPIRKVRIKCVMTPFQVGDKGRERFVTSDTNHHLEIFETKDKKGNVRWDGAIVSQYEAMRRLRAGEPIVKREHGKGKEFKFSLALNECVKLLDEKGQEIVCVVKGISQLSAGPIVITLRHICDARPTSEYQKQIKMRKELKKNYDKKLAEEIEKMLPVFIFKGPDSLREAKGQKILITPLGEIRTAND

SEQ ID NO: 436 - protein, 1047 aa, unidentified
  REGION 1..1047: note = Description of Unknown: uncultivated organism
  REGION 1..1047: note = MG4-14 effector
MAQLPFSDYVLGLDIGANSLGWALVSLKDGIPQSILKVGVRVFEAGVEGDIESGKDQSRAAKRREARLHRRMLERRSRRLAKIAGLLQRAGLLPDGDLKSEESRIKVLRELDDSISARHHPTSEKPDPASAHLLPYRLRALALDQKLHPFELGRALYHLAHRRGFLSNRKAPAKDPNEEGKVNQGIHTLRQKIEESGARTLGEYFSRLDPEQERIRQRWTARDMLDQEFEAIWNAQAKHHPTILTHDFKKQLRRAIFHQRPLKIKKNLIADCELEKGQKVAPRCCLLFQRFRLLQQVNNLKVTEPTGKSRPLTRDERETLLHALETQDKLSFSEIKRLLKLRDHRFRMGEGDEEVLTGNKTAAKLREIFGDRWDELSPQERDRVVEDWWSIQKSETLRKHGVKYWRLDPEAAERLGKLALETGYCKLSKKAMRKLLPLMEEGISHAKAQEQLYGNEPPPKPFDKLPPLDRAPLPKPHNPAVHRALTEVRKVVNAIIRRYGRPSLIRVELARDLKKSKEDRKKISDQIARNRRDRERAKKALIDNGIQEPSRDDIEKWLLYEECNGICPYTGKSISLASLFGPNPQFDVEHIIPFSRCLDNSFTNKTLCDIEENRNRKRNQTPYEAYGADPARWEEIIQRVKRFRGKAAAAKLHRFQLESVDSLEEFASKQLNDTAHASRSALRYLGLLYGSNKAGVGPDGRRRVQAGRGQVTAFLRDEWRLNSILGDLQKSRADHRHHAVDALAIALTDSRIIKTLSDAASRALSERRRRFGRVAPPWKSFLEEAKNAIAATIVSHRVSRKVSGALHEETIYSKPHTDKDGRVCHHIRKRLDKYFTRPMLDKIVDPVIRDIVRKHFQANGSDPKKAFSDPGNHPFLCAKDGRHIPIHSVRVREDRSTVQVGSGVSRRQVLTGSNHHVEIVEVEDEKGQPRWEGRIVTLIEAIKRLRNRQPIVQRDHGEGKKWVFSLAGGETIQLTDGGITKLYTVRTITVRRGQYVEIAYVPISDARTKTEIREKKEWRTDLLEPLRKLQCRKVLVTPLGEVRYARD

SEQ ID NO: 437 - protein, 943 aa, unidentified
  REGION 1..943: note = Description of Unknown: uncultivated organism with predicted taxonomy: Thermogutta terrifontis
  REGION 1..943: note = MG4-15 effector
MKTKNGQVDYVLGIDLGVVSLGWAAIEIDNDGGQSLLGAGVRCWELSNASLEEVEKGKEEPPGQSRRQARRLRRQMFRRAQRLRRTYRVLQEMGLFLTGPRSSTARKAYLETLDQKAQEWLRTNVPDANDDGLLAHTFIYRLRAAALDHPLPPELLGRVFFHLAQRRGFLSNRRTLEKNKDEELGVVKQGISQLQDEIQKSGARTLGEFFSRLNPHEQRIRNRYTSRKMFQDEFEQIWNAQRSHHPNSLTDSKKARLYKAIFFQRPLKLQHGLVGRCPLEVLPRKRPNGQVEYIYPFRRAPMASLEAQRIRYMQRINDLEFTDPQGQRRVLSPEERQKLYDLAERNEDLSFTLIKKTLGIPTGKKGEGWECNLERGGEKKLPGNRASAQIRKVIDDATWEDLGRERQKALVDTLIAFLRADTLEEHLHRVWGFNREVASQLAGLPLEQGYHSFSRRAIRRLLPLLEQGERLNAAIQKVYGGTQRKINQHAELPPVRQVLPTVRNPLLIRALTELRKVVNAIIRKYGIPRCIRVEVARELKRSRKEREEISKRMREQQKRREEAAQRVLQELGRTAAPRDIEKYLLAEECNWICPYTGKQITTQALLGDHPEFDVEHIWPLHRSLDDSFMNKTLCYHQENRSVKAGRTPYEAYATDPVRWQEIITRVRNFRGPFARQKLVRFQAEEIPPDFALRQLSDTRWISKAAADYLGHLYGGRIDPTGQQRVFTVAGGLTGLFRRAWNLNAILGGSPEKNRYDHRHHAIDAIVVALTDPSMIQRFAHEASRLLKAWPRVAVRLDPPWSTFLSDVQRHVEGIVVSFRVSRRLSGALHDQTYYAPPTEQGKTKVRKPLREMSSHEVERIVDPTVRDLVKEKLKRLGTSDPKKAFATDANLPIIRGKNNTALPVKSARIWVSSSVIAVGDGPRQRYVVPGNNHHIEIYALLDG

SEQ ID NO: 438 - protein, 1062 aa, unidentified
  REGION 1..1062: note = Description of Unknown: uncultivated organism with predicted taxonomy: Thermogutta terrifontis
  REGION 1..1062: note = MG4-16 effector
MKTKNGQVDYVLGIDLGVVSLGWAAIEIDNDGGQSLLGAGVRCWELSNASLEEVEKGKEEPPGQSRRQARRLRRQMFRRAQRLRRTYRVLQEMGLFLTGPRSSTARKAYLETLDQKAQEWLRTNVPDANDDGLLAHTFIYRLRAAALDHPLPPELLGRVFFHLAQRRGFLSNRRTLEKNKDEELGVVKQGISQLQDEIQKSGARTLGEFFSRLNPHEQRIRNRYTSRKMFQDEFEQIWNAQRSHHPNSLTDSKKARLYKAIFFQRPLKLQHGLVGRCPLEVLPRKRPNGQVEYIYPFRRAPMASLEAQRIRYMQRINDLEFTDPQGQRRVLSPEERQKLYDLAERNEDLSFTLIKKTLGIPTGKKGEGWECNLERGGEKKLPGNRASAQIRKVIDDATWEDLGRERQKALVDTLIAFLRADTLEEHLHRVWGFNREVASQLAGLPLEQGYHSFSRRAIRRLLPLLEQGERLNAAIQKVYGGTQRKINQHAELPPVRQVLPTVRNPLLIRALTELRKVVNAIIRKYGIPRCIRVEVARELKRSRKEREEISKRMREQQKRREEAAQRVLQELGRTAAPRDIEKYLLAEECNWICPYTGKQITTQALLGDHPEFDVEHIWPLHRSLDDSFMNKTLCYHQENRSVKAGRTPYEAYATDPVRWQEIITRVRNFRGPFARQKLVRFQAEEIPPDFALRQLSDTRWISKAAADYLGHLYGGRIDPTGQQRVFTVAGGLTGLFRRAWNLNAILGGSPEKNRYDHRHHAIDAIVVALTDPSMIQRFAHEASRLLKAWPRVAVRLDPPWSTFLSDVQRHVEGIVVSFRVSRRLSGALHDQTYYAPPTEQGKTKVRKPLREMSSHEVERIVDPTVRDLVKEKLKRLGTSDPKKAFATDANLPIIRGKNNTALPVKSARIWVSSSVIAVGDGPRQRYVVPGNNHHIEIYALLDGQGQEVRWKGKIVSLYEAYERKKRGEPVVCRDHGPNTRFKFSLAKSEYIEWINDDGQKQLLRVVGISDDNLELRLPHDARPITLIREQRERIRATYRQLFQRRARKVMVTPLGEVLPAND

SEQ ID NO: 439 - protein, 1060 aa, unidentified
  REGION 1..1060: note = Description of Unknown: uncultivated organism with predicted taxonomy: Thermogutta terrifontis
  REGION 1..1060: note = MG4-17 effector
MNTKNGQVDYVLGIDLGVVSLGWAAIQIEGNGGRSLLGAGVRCWDLSSGSLEKVEKGKEEPPGQLRRQARQLRRQMYRRAQRLRRTFRVLQDMGLFPAGSCSSMARKAYLEKLDRQAQQWLRQHVPNSDGGGLLAHTFIYRLRAVALDHPLPAELLGRVFFHLAQRRGFLSNRRDSQKEEERGVVKQAISQLRADIEKLGARTLGEFLSKLNPHEQRIRNRYTSRRMFQDEFEQIWNTQRRHHPNSLTDSNKARLYKALFFQRPLKSQRGLVGRCPLEVLTRNHSNGQVAYIHAFRRAPMACLEAQRIRYMQRINDLEFTDPQGGARLLSPDERQKLYDLAERNEDLSFTVIRKALGIPTGKKDQGWQCNLERGGEKKLPGNRTAARIRKIIGDVAWENLGSVKQKPLVDTLIALLSPDALTEHLRTVWGFDCKIASQLAELQLEQGYHSFSRRAIRRLLPLLEQGERLNAAIQKVYGGTRLRITQHLKLPPVRQVLPTTRNPLLVRALTELRKVVNAIIQKYGIPQFIRVELARELKRSRKERAEISKRMREQQKRREEAAQKVLEELGRTATPRDIEKYLLAQECNWQCPYTGRQITVQSLLGDDPQFDVEHIWPLHRSLDDSFMNKTLCYHHENRSVKAGRTPYEAYATDPLRWQEILSRVRSFRGPFARQKLDRFQAVEIPPDFAMRQLNDTRWISKAAADYFGYLYGGRIAPTGQQRVFTVTGGLTALFRRAWNLNAVLGGNPEKNRYDHRHHAIDAIVVALTEPSMIQRFSNEAEKLIKAFPRVAVRLDPPWDTFLSDVQQHVERIVVSFRVNRRLSGALHDQTHYSPPVEEGKTKVRKRLNALSAHEVERIVDPEVRRLVQEKLKQLKMSDPKKAFATDVNLPIIHGKNHTALPVKSVRIWVNSLVIPVGDGPRRRYVVRGNNHHIEIYAVLDGQGYEIEWKGKIVSLYEAYERKKRGEPVVCRDHGPNTRFKFSLAKSEYIEWIRIDGQKELVRVVAISDNKLEFRLPYDARPSTLIREAHERIFATYRQLFERRARKVLVTPLGEVLPAND

SEQ ID NO: 440 - protein, 1062 aa, unidentified
  REGION 1..1062: note = Description of Unknown: uncultivated organism with predicted taxonomy: Thermogutta terrifontis
  REGION 1..1062: note = MG4-18 effector
MKTKNGQVDYVLGIDLGVVSLGWAAIEIDNDGGQSLLGAGVRCWELSNASLEEVEKGKEEPPGQSRRQARQLRRQMFRRAQRLRRTYRVLQEMGLFLTGPRSSTARKAYLETLDQKAQEWLRTNVPGANNDGLLAHTFIYRLRAAALDHPLPPELLGRVFFHLAQRRGFLSNRRTLEKNKDEELGVVKQGISQLQDEIQKSGARTLGEFFSRLNPHEQRIRNRYTSRKMFQDEFEQIWNAQRSHHPNSLTDSKKARLYKAIFFQRPLKLQHGLVGRCPLEVLPRKRPNGQVEYIYPFRRAPMASLEAQRIRYMQRINDLEFTDPQGQRRVLSPEERQKLYDLAERNEDLSFTLIKKTLGIPTGKKGEGWECNLERGGEKKLPGNRTSAQIRKVIGDATWEDLGRERQKALVDTLIAFLRADTLEEHLHRVWGFNREVASQLAGLPLEQGYHSFSRRAIRRLLPLLEQGERLNAAIQKVYGGTQRKINQHAELPPVRQVLPTVRNPLLIRALTELRKVVNAIIRKYGIPRCIRVEVARELKRSRKEREEISKRMREQQKRREEAAQRVLQELGRTAAPRDIEKYLLAEECNWICPYTGKQITTQALLGDHPEFDVEHIWPLHRSLDDSFMNKTLCYHQENRSVKAGRTPYEAYATDPVRWQEIITRVRNFRGPFARQKLDRFQAEEIPPDFALRQLSDTRWISKAAADYLGHLYGGRIDPTGQQRVFTVAGGLTGLFRRAWNLNAILGGSPEKNRYDHRHHAIDAIVVALTEPSMIQRFAHEASRLLKAWPRVAVRLDPPWSTFLSDVQRHVEGIVVSFRVSRRLSGALHDQTYYAPPTEQGKTKVRKPLREMSSHEVERIVDPTVRDLVKEKLKQLGTSDPKKAFATDANLPIIRGKNNTALPVKSARIWVSSSVIAVGDGPRQRYVVPGNNHHIEIYALLDGQGQEVRWKGKIVSLYEAYERKKRGEPVVCRDHGPNTRFKFSLAKSEYIEWINDDGQKQLLRVVGISDDNLELRLPHDARPITLIREQRERIRATYRQLFQRRARKVMVTPLGEVLPAND

SEQ ID NO: 441 - protein, 1081 aa, unidentified
  REGION 1..1081: note = Description of Unknown: uncultivated organism
  REGION 1..1081: note = MG4-19 effector
MGETNTQTGSYILGIDLGSASLGWAAISLDGAGMATGLLRSGVRLFNPAVTGDIEKGQDESNAVARRTARLIRRQLRRRAARQSELFQLLQRYTLLPPYKGAEADASQQRHSILNALDQELTAKWVKPGNAGAQAAIELPLYLLRKTALDAALEPFELGRVFYHLSQRRGYRSNRKDQASDKGTPGKAKKADDLGAVQGGIKELEDAIRSSGTRTLGEYFTSLDPHSQKVRGRWTARRMYEEEFAAIWAKQVTFHPALLTEELHYKIKHLLFYQRPIKAQSHLIGDCELEPGERRAAWATLEAQQFRVLQKVNDLEIILPGNVTGIPLTPEQRQTVLNLLESSSEATFKKIRKALGLGENIGFNLQRGGETKLKGNLTNSHMADVFAERWLEMSEEDKKQVVEDWRTIEREESLIRRATEHWKLDETGAKWLASRPAPSGYCSISRKAIRKLLPLMMEGKRFKEAENEIWGSRFSGGQVYDRIPPVRQALKSLRNPAVERALTELRKVVNALIRELGKPTEVRIELARDLKKPRHERAKAVSQNRDREKQRSAAKVKMLQEIGPGFEHPSRADVEKALLWEECQGECPYTGKRFPLSSLFGENPPLQVEHIIPFSRIPDDSFQNKTLCYHEENQIKGNRTPFEAYKDAEQFETILNRVRNWRTPNPGKQRRFELRTLEELEGFSSRQLNDTRYASKLACELVGTLFGGRDIPTESGSRQVVFASSGMVTATLRKGWGLEAILREAAPSANGQNRGKPRTDHRHHAIDAITIALSAPRMIAALSRNNAQDPYWPRNGRTAPKLQSPWNGFVDSIRPHFEQMLVSHRPEHRLTGALHDETNYGRPHKEGGKDVVHIRKQVVGMSAGDIENIVDPAVRESVREKAASFGGDLKKWTPKEGSEDWPLLRTKTGKEIPIKRVRIKKSLGVETIAKGDRARHVALSSNHHVAIFALLDERGGERRWEPMIVSLFEAMERKRKGQPLIQTRYPVVGEFIFKFSLMGGDTVLLHKDCDHKNNHCNPSVWRLRTIGSNGQLSLVRINDARLKAEIQKAKEWWSPTQDALRKLDAVKVVIDSLGRIHQSGG

SEQ ID NO: 442 - protein, 1081 aa, unidentified; identical to SEQ ID NO: 441
  REGION 1..1081: note = Description of Unknown: uncultivated organism
  REGION 1..1081: note = MG4-20 effector

SEQ ID NO: 443 - protein, 1081 aa, unidentified; identical to SEQ ID NO: 441
  REGION 1..1081: note = Description of Unknown: uncultivated organism
  REGION 1..1081: note = MG4-21 effector

SEQ ID NO: 444 - protein, 895 aa, unidentified
  REGION 1..895: note = Description of Unknown: uncultivated organism with predicted taxonomy: Planctomyces sp. SH-PL14
  REGION 1..895: note = MG4-22 effector
MGETNTQTGSYILGIDLGSASLGWAAISLDGAGMATGLLRSGVRLFNPAVTGDIEKGQDESNAVARRTARLIRRQLRRRAARQSELFQLLQRYTLLPPYKGAEADASQQRHSILNALDQELTAKWVKPGNAGAQAAIELPLYLLRKTALDAALEPFELGRVFYHLSQRRGYRSNRKDQASDKGTPGKAKKADDLGAVQGGIKELEDAIRSSGTRTLGEYFTSLDPHSQKVRGRWTARRMYEEEFAAIWAKQVTFHPALLTEELHYKIKHLLFYQRPIKAQSHLIGDCELEPGERRAAWATLEAQQFRVLQKVNDLEIILPGNVTGIPLTPEQRQTVLNLLESSSEATFKKIRKALGLGENIGFNLQRGGETKLKGNLTNSHMADVFAERWLEMSEEDKKQVVEDWRTIEREESLIRRATEHWKLDETGAKWLASRPAPSGYCSISRKAIRKLLPLMMEGKRFKEAENEIWGSRFSGGQVYDRIPPVRQALKSLRNPAVERALTELRKVVNALIRELGKPTEVRIELARDLKKPRHERAKAVSQNRDREKQRSAAKVKMLQEIGPGFEHPSRADVEKALLWEECQGECPYTGKRFPLSSLFGENPPLQVEHIIPFSRIPDDSFQNKTLCYHEENQIKGNRTPFEAYKDAEQFETILNRVRNWRTPNPGKQRRFELRTLEELEGFSSRQLNDTRYASKLACELVGTLFGGRDIPTESGSRQVVFASSGMVTATLRKGWGLEAILREAAPSANGQNRGKPRTDHRHHAIDAITIALSAPRMIAALSRNNAQDPYWPRNGRTAPKLQSPWNGIVDSIRPHFEQMLVSHRPEHRLTGALHDETNYGRPHKEGGKDVVHIRKQVVGMSAGDIENIVDPTVRESVREKAASFGGDLKKWTPK

SEQ ID NO: 445 - protein, 1081 aa, unidentified
  REGION 1..1081: note = Description of Unknown: uncultivated organism
  REGION 1..1081: note = MG4-23 effector
MGETNTQTGSYILGIDLGSASLGWAAISLDGAGMATGLLRSGVRLFNPAVTGDIEKGQDESNAVARRTARLIRRQLRRRAARQSELFQLLQRYTLLPPYKGAEADASQQRHSILNALDQELTAKWVKPGNAGAQAAIELPLYLLRKTALDAALEPFELGRVFYHLSQRRGYRSNRKDQASDKGTPGKAKKADDLGAVQGGIKELEDAIRSSGTRTLGEYFTSLDPHSQKVRGRWTARRMYEEEFAAIWAKQVTFHPALLTEELHYKIKHLLFYQRPIKAQSHLIGDCELEPGERRAAWATLEAQQFRVLQKVNDLEIILPGNVTGIPLTPEQRQTVLNLLESSSEATFKKIRKALGLGENIGFNLQRGGETKLKGNLTNSHMADVFAERWLEMSEEDKKQVVEDWRTIEREESLIRRATEHWKLDETGAKWLASRPAPSGYCSISRKAIRKLLPLMMEGKRFKEAENEIWGSRFSGGQVYDRIPPVRQALKSLRNPAVERALTELRKVVNALIRELGKPTEVRIKLARDKKNPRHERAKAVSQNRDREKQRSAAKVKMLQEIGPGFEHPSRADVEKALLWEECQGECPYTGKRFPLSSLFGENPPLQVEHIIPFSRIPDDSFQNKTLCYHEENQIKGNRTPFEAYKDAEQFETILNRVRNWRTPNPGKQRRFELRTLEELEGFSSRQLNDTRYASKLACELVGTLFGGRDIPTESGSRQVVFASSGMVTATLRKGWGLEAILREAAPSANGQNRGKPRTDHRHHAIDAITIALSAPRMIAALSRNNAQDPYWPRNGRTAPKLQSPWNGFVDSIRPHFEQMLVSHRPEHRLTGALHDETNYGRPHKEGGKDVVHIRKQVVGMSAGDIENIVDPAVRESVREKAASFGGDLKKWTPKEGSEDWPLLRTKTGKEIPIKRVRIKKSLGVETIAKGDRARHVALSSNHHVAIFALLDERGGERRWEPMIVSLFEAMERKRKGQPLIQTRYPVVGEFIFKFSLMGGDTVLLHKDCDHKNNHCNPSVWRLRTIGSNGQLSLVRINDARLKAEIQKAKEWWSPTQDALRKLDAVKVVIDSLGRIHQSGG

SEQ ID NO: 446 - protein, 1081 aa, unidentified; identical to SEQ ID NO: 441
  REGION 1..1081: note = Description of Unknown: uncultivated organism
  REGION 1..1081: note = MG4-24 effector

SEQ ID NO: 447 - protein, 1081 aa, unidentified; identical to SEQ ID NO: 441
  REGION 1..1081: note = Description of Unknown: uncultivated organism
  REGION 1..1081: note = MG4-25 effector

SEQ ID NO: 448 - protein, 1081 aa, unidentified; identical to SEQ ID NO: 441
  REGION 1..1081: note = Description of Unknown: uncultivated organism
  REGION 1..1081: note = MG4-26 effector

SEQ ID NO: 449 - protein, 1081 aa, unidentified; identical to SEQ ID NO: 441
  REGION 1..1081: note = Description of Unknown: uncultivated organism
  REGION 1..1081: note = MG4-27 effector

SEQ ID NO: 450 - protein, 1081 aa, unidentified; identical to SEQ ID NO: 441
  REGION 1..1081: note = Description of Unknown: uncultivated organism
  REGION 1..1081: note = MG4-28 effector

SEQ ID NO: 451 - protein, 1081 aa, unidentified; identical to SEQ ID NO: 441
  REGION 1..1081: note = Description of Unknown: uncultivated organism
  REGION 1..1081: note = MG4-29 effector

SEQ ID NO: 452 - protein, 770 aa, unidentified
  REGION 1..770: note = Description of Unknown: uncultivated organism with predicted taxonomy: Alphaproteobacteria bacterium
  REGION 1..770: note = MG4-30 effector
LNLERDYVFSIERGGEKTLKGNPTNADFRKALGERWDKMTPEERDRAVEYVHAFQRPDKIKVAAMKKWGLDEQSAEELAKISLEPDYLNLSRVAIEKLMPLLEGGFPYGALAPRYSAIGAEAVQKLLASAEAGTPFKETCETILGEPTVSSQEHDLLPPVGQALSEIRNPAVMRSLTELRKVVNGVLRHFGKPAQIRIELARELKKSKKQREAESKRNRENEAVRVKAKQTIKEITGDEHPSTDDVRRVQLFNDCRGTCVYCGETIAARNFLGRESQVDIDHIIPFSRSMDNSYANLVICHARCNRNKGDRTPFEAFSVDPESYGQIRDRVKIFAGDGRTVSEKIKRFEMDEGELEKFLGDFRNRQLNDTAYASRLAADYLGILYGGRTDREHRLRVQATAGQATARLRARWNLDSILDDGPTKHGGRASKERTDHRHHAIDAVVIGVTDQGMMERLSDAAKRGQEVGKRFARLDEPWNGFLEQVRKEVGQIVVSHRVSKKVSGALHEETIYSRPFPVGAGFKPAPTKAKPRCTDAEATEVRVRRGLSPSAKSTKQISAPEVEDIADPAVRKLVVAKLAELGGDLKKFADEKNLPFFETKDGRRIPIKRVRVSKALPTFTLGHGRSARHVASESNHHVEIYAELDQNGTEGEWDGEVISMYEAYQRLKAGRPVVQRDHGPLARFKFSLAPGEVVECDDKNGARSLFVMRKASQISSGQLQIGFAPPNDARKAREIQTSRAWLWANPNTLGDRNSRKVVVNPLGEVSESHE

SEQ ID NO: 453 - protein, 866 aa, unidentified
  REGION 1..866: note = Description of Unknown: uncultivated organism
  REGION 1..866: note = MG4-31 effector
DKEDDKNETEFKQDMAELSQLVKQHDPPYLGAYLACLNPDEQRLRGKRTSRQMYLDEFDAIWDEQSKHHGDLLTAEVQKTLHNTIFYQRPLKSQRHLRGKCSLTGKTRAPIALRIVQRFRAIQKLNDLQIVFADGTKRKLDEQERAKVFELQMTKGDVTFHSLKAKKVLGLPKDATFNLAEIDKKLIGHRTDAKLRKALGDRFDGLSEDQRDAIVQDIRSYRDTGPLAKRLKATYDLPSDIAADLSKVKLEKDRAAHATEAIRALLPLMERGIQYATARKQVYPESFASNTKTYDLLPSVNDWLKQHEKAVAIRNPAVMRGLTELRKVVNAIIRRYGKPKCIRIELARDLKNSRKKRADISKQNMERRGQREKAAELLAKQFGIEQPSHHDREKVLLHWECGGFCPYTGKPIELNDLFGPNPSFQVEHIWPLSASMDDSFMNKTLCHVDENARKGGRSPVDCYDQKTLDLIKERIGRFNCDWKVREAKRRRFTEPIPEDFHQRHLNDTRYLARESANYLGCLFTAEETEGPNPLRVFVVTGGLTNMMRGLWGLNTLAGGPANEKDRIDHRHHAIDALVVALTKQAHTQKLMSAAARAERQHLLRNFQDVAHPWADFAEQAKVAVDKIVVSYRPDRKLRGKLHQDTLYSEEIHGTRRIRRELHSLKPNEVEKIIDPRIRSVVSKKLAELKESNPAKAFADPTNLPTLTDHNGRTTRLRKARVRVSAKPTKIGKGASERSVNLGSNYHTVISQDERGRWCETTVSLIEAMRRKEDGEPVIQTPEGHTFLYSLVKNDHVEIPNGNGMGRIMRVESISQGFVEFGEHNDARTQAERGSERFYLRSGKKWTEVRPRKVAVTHLGEVKHAGG

SEQ ID NO: 454 - protein, 1036 aa, unidentified
  REGION 1..1036: note = Description of Unknown: uncultivated organism
  REGION 1..1036: note = MG4-32 effector
MASEFILGLDVGVASIGWAIIDWDGAPCGIRLAGTHLFEAGVDPGKSDPETAMLLGREQSRAKPRRDARAMRRQTWRRARRKKKVLGALIRADLLPPGDIRTPAAIDAYMKSLDASLRDRWESKGASHRDRQLLPYRLRAAAVTREVERHELGRGLYHLAQRRGFLSNRKAPDRADEDRSEMKKAIGDLATQIAAHDPPTLGAYLASLDPDDARLRGRWTSRQMYLDEFDRIWDTQAERIGLTQAQREEIHNAIFHQRPLKDQSHLVGRCSLVDGAKRCPIGERIAQRFRVLQQVNHLRVVLDDRTERPLTPGERQAMLDALLTKGDLKVAAARRAAGLPRSATLSIERGGEKRLVGHRTDAKLRKVFGDERWASMSEEEKDAAVHDLRSVRLPATLRRIGLTRWGLDTESAEEFAGLSLEEGHAAHSREALRRLVPRMEQDGLSYSEARKDEFPGSFESDEPHDLLPALDQWDRDLRNPSVARALTELRKLVNAIVRRYGKPVRIHIELARDLKSGRGRRERIANRMRDREKEREAAASAIAREIGVADPPRWMIEKHLLAEECGWRCPYTGKGFGIHDLLGRNSQFDLEHIWPFSRSLDNSYANKTICYHEENRNRKQGRTPAEAYSEEELQAILERVRAFKGDPFLIQAKLRRFTDPIEEGFTERHLQETRYIGRLACDYLGLLYGGQVEAQGTAVSERRILTPTGGLVAWLRRGWGLNSVLSDRDEKERNDHRHHAVDAIVIACADQRAIQRLSESAERMEREGRERPYESVDPPWEGFEQSVQEAIHAVVVSHRQSRKVRGPLHKETLYSKEHNGRRRVRKRVETLSKTDVEKGRIVDERALAAIRAKLDELGEPNPAKAFKDPANLPTVRGHDGRSVTLRKVRVEVGVQPRAFGKGAKRRYAQTARNHHMAFYKRSLPGGRMERTTKLVALADMVDRSSVVDREADDGFEFAFSLAPNEFVVIKDDQGDDRLCRVLSISADDLELVEHTDGRTSTDRKGERIRFRRRALSEDPIRKVHVNYLGEVHDAGG

SEQ ID NO: 455 - protein, 787 aa, unidentified
  REGION 1..787: note = Description of Unknown: uncultivated organism with predicted taxonomy: Insolitispirillum peregrinum
  REGION 1..787: note = MG4-33 effector
MLDYTLGLDLGAASVGWAVVKEPTTDQDTDSVLHLGVHRFEAGVADPGKMGHGGEESSAKPRRDARQMRRQLWRRKRRRRLLLARLQEHGLLPAGELDTPEAIHVYLRELDQAILDRNYPSATHEQQLKLPYLLRAKAVSERIEIDELGRVLYHLAHRRGFLSNRKTDKEDDKNETEFKQDMAELSQLVKQHDPPYLGAYLACLNPDEQRLRGKRTSRQMYLDEFDAIWDEQSKHHGDLLTAEVQKTLHNTIFYQRPLKSQRHLRGKCSLTGKTRAPIALRIVQRFRAIQKLNDLQIVFADGTKRKLDEQERAKVFELQMTKGDVTFHSLKAKKVLGLPKDATFNLAEIDKKLIGHRTDAKLRKALGDRFDGLSEDQRDAIVQDIRSYRDTGPLAKRLKATYDLPSDIAADLSKVKLEKDRAAHATEAIRALLPLMERGIQYATARKQVYPESFASNTKTYDLLPSVNDWLKQHEKAVAIRNPAVMRGLTELRKVVNAIIRRYGKPKCIRIELARDLKNSRKKRADISKQNMERRGQREKAAELLAKQFGIEQPSHHDREKVLLHWECGGFCPYTGKPIELNDLFGPNPSFQVEHIWPLSASMDDSFMNKTLCHVDENARKGGRSPVDCYDQKTLDLIKERIGRFNCDWKVREAKRRRFTEPIPEDFHQRHLNDTRYLARESANYLGCLFTAEETEGPNPLRVFVVTGGLTNMMRGLWGLNTLAGGPANEKDRIDHRHHAIDALVVALTKQAHTQKLMSAAARAERQHLLRNFQDVAHPWADFAEQA

SEQ ID NO: 456 - protein, 1066 aa, unidentified
  REGION 1..1066: note = Description of Unknown: uncultivated organism with predicted taxonomy: Planctomycetes bacterium
  REGION 1..1066: note = MG4-34 effector
MIAERRREREFILGLDLGVASIGWALLEVDESMRPTGVIRAGAHLFEAGVEGAIEQGRDESRAAPRRGARAMRKGHWRRQRRRRQVLLALQRHGLLPPGDVSTPSAVDRYIKSVDERLRETWCSNGDHRAQLVFPLQLRAAAATQDLGPHDIGRAIYHLAQRRGFLSNRRTEAVRGDEEDEGKVKSAIKDLAQAIDHSEQPTLGAYLATLDPDTERIRGRWTGRQMLLDEFETIWSRQAPKHEAMTDTAYEEIRHAIFHQRPLRKQQHLIGRCSLIPDKRRAPVAHRLYQRFRLLQKLNDLEILEPGRLQRPISAQERAIALALLEKNESVRFTTLRKKKGGLGLPKGTTFNFETDGESSLIGHRTDAKLRDVFGDDYDALSEREKDQIVEDLRSIREPAALKQRGVQRWGLAEEQAIRFASVRLEEGYGSHSLAAIRRLLPHMEEGARYAAARLAEFPESFTAVEPVDALAPVESALGKIRNPAVERALTELRKVVNAIIAEHGKPQLIRIELGRDLKRGRKEREKQSKRMAARRKQREEAKRRLLKETGIADPRRSDIERVLLADECNWICPFTGVKFGWSDLFGPTPRFDVEHIWPYSRSLDDSFLNKTICDQRENRTRKRNQTPHEAYGATPEVYERILQRVRAFSGDPWVLAAKLSRFEAESIPEGHVDRHLNDTRYMSRVACEYLGALYGGLSDEYHRRRVQSTTGGLTFELRRGWSLNSILGIGDEKNRADHRHHAVDAIVVALTGPKAIQQASRAAQRAETRGGARLFEEFEDPWPGFRDDVKAIVKSIVVSHRQSRKLSGALHAETNYSRPIHPAGAHHVRKELHKLTASDVDRIIDPRIRELVRQKLETIGEPNPKKAFAAPEHLPTITGSDGRTRTVRKARVRTGVKAKPIGKGVNRRYVAPTQGSNHHTVIVAHLNDAGEEVRWTDHPVTLLEAQQRKSNGEPVVQRDWGPGKRFKFSFASNEFIEMDADDGVRRIYRVLSLSEGNYELSEHIDGRKKTDRIQDQKRVKTEWERSKKVGTLIRERIVESAESMRRRKAGKISVSHLGEVRRAGG

SEQ ID NO: 457 - protein, 1036 aa, unidentified; identical to SEQ ID NO: 454
  REGION 1..1036: note = Description of Unknown: uncultivated organism
  REGION 1..1036: note = MG4-35 effector

SEQ ID NO: 458 - protein, 1053 aa, unidentified
  REGION 1..1053: note = Description of Unknown: uncultivated organism with predicted taxonomy: Proteobacteria
  REGION 1..1053: note = MG4-36 effector
MTYVLGLDIGARSVGWALLEKEGDTFTRIVRAGVRVFEAGTEGDIERGRDESRGATRRLKRLARRQIRRRRQRARALYRELANAGLLPAIKPSPGSPMALLIQDEINRLDHELRERYAGERAVSQLPYLLRARALDHRLEPYELGRAVYHLGQRRGFRSNRKAESGKKATEDPSKAKEEKSLVYRGIDDLKEQIRQAGARTLGEYFATLDPAEQRIRNRYTHRSMYEEEFEAIWEAQRPHHAALTRELKDRLREILFGQRPLRDTEDLVGECEWIPGEKRAPVWSLEYQRFRLLQTVNHLRVTENRSSPRPLTPEERQCLLEELEKKPKVTIAQAKRVLGLQRAEFTIEEGGQKDLPGDKVASQFHEILGQRWLELRPEQQRALVECVASAGSDEQLLEDLKQQWRLSDDQATQIVRNVHLPSGYASLSLKAIQKVMPYLEQGMDVQRARLEARIPLDRPVPVRELLPPLADSGVAVFNPAVKRALTEMRKVVNAVIRRYGKPDEIHLETARELRKSREERMNESKRMRGREKEREEILRRIRDEVGIPEEKISRDDVLKGLLWQECDGKCPYCGESLGGFASLYGGNSPAQIEHIIPFSRSLDNSFVNLTLAHVSDNNYKGDRTPWEAYGSNPERWDQILQRVSVFRGSYSKAKLNRFKMDENAVRELSEQFSSRALNDTRAASVAAARYLALLYGGEIVDGKRKILKITGQVTAYLRDVWGLNGLIPSIHREARGEAADAEAESRTLKSRDDHRHHAVDAVVVALCNQRWIQRLSEANRGALAARRRWFAPVEPPWVGFKEQLKDTLKSMNISFRPDHRVTGALHKETFYTRIGQNEKGGDVVRVRMPVTNLGSKEVEAIADPAVRQIVQAELKEVGGDARKLENNWPLLPNRHGKPVPIRKVRVNLNRAVVSVGKGPWQRWAEPSETHHIEIYEVEENGRRVWRGDVVSMREAIERATRGEPVTRRRGGAGVRYLFSVSKEDTLRLHGKYEGLWVVKKIAQKGQITLVSQFDARSEQNRTVFSPRVGGLQGYSAEKVVVLPIGDVVPCNE

SEQ ID NO: 459 - protein, 754 aa, unidentified
  REGION 1..754: note = Description of Unknown: uncultivated organism with predicted taxonomy: Solemya velesiana gill symbiont
  REGION 1..754: note = MG4-37 effector
MPYVLGLDIGARSVGWALLEKEGDSFTRILRAGVRVFEAGTEGDIEQGRDESRGATRRAKRLARRQIRRRRQRARALYRELSGAGLLPPITPVPGSPMAVLIQEAINRLDCELRRKYAGERAVNQLPYLLRARALDHRLEPHELGRALYHLGQRRGFKSNRKAESGKKAMEDSSKAGEEKSLVYRGIDDLKRQIREAGARTLGEYFATLDPAEQRIRNRYTHRSMYEEEFEAIWEAQRRHHAALTRELKDRLWQILFEQRPLRDTEDLVGECAWIPREKRAPVWSLDYQRYRVLQTVNHLRVAENRCAPRPLTHEERWRLLEELEKKPKVTVAQAKRVLGLQKAEFTVEEGGEKELPGDKVAAQFYEKLGESWSRLNPEERRALVECVATAESDEQLSETLQQQWGLSADQANKVVREVHLPSGYAPLSLKAIRAVMPYLEQGMDVQRARLAAGIPLDRPVPVHALLPPVADSRVAVFNPAVKRALTEMRKVVNAIIRRYGKPDEIHLETARELRKSREERMKESRRMRDREKEREEIIRRIRDEVGIPEEKISRDDVLKGLLWQECEGRCPYCGESLGGFASLFGGNSPAQIEHIIPFSRSLDNSFVNLTLAHVSDNAYKGDRTPREAYGSDPERWNEILQRVEVFKGSYSKAKLNRFKMDESAVGELFEQFSSRALNDTRASAVAAARYLSLLYGGETVDGKRKILKVTGQVTAYLRDVWGLNGLIPSIHREARGEAEDGQAEARPVKSRDD

SEQ ID NO: 460 - protein, 1032 aa, unidentified
  REGION 1..1032: note = Description of Unknown: uncultivated organism with predicted taxonomy: Acidobacteria
  REGION 1..1032: note = MG4-38 effector
VDYVLGLDLGARSVGWALIELQGDEPKRVVAAGVRVFEAGAEGNIEEGREESRGVKRRQARLARRQTRRRRQRLRQLYRELAGAGLLPAVQASPGRPFAVAVQEAINVLDGQCRLQYQHDPCANRIPYLLRARALDEPLAPWELGRVFYHIGQRRGFKSNRKAEARDPEERSLVYDGIRRLEEEIQRTGARTLGEYLSKLDPRQERIRCRYTQRSMYEREFDAIWAAQSPHHPCLTTELRERLAAVLFSQRPLKDGAELVGSCSWDPSQKRAPAWSLEYQRFRVLQEVAHLRYADESQVWQPLDAEQRSKLVAALSTTRELDFRAIRKLLGFAGKVRFSVEAGGEKKLRGNVVAAEFIRAIGEEWNALGAERQAELVRQVALAEDDDKLREELITNWRLTPEQAGRLVADVRLPRGYAALSLKAIRAALPYLEQGMSVQQAREAAGYELMPPVPARDLLPPLASSGIEVFNPAVKRSLTELRKVVNAVVRKYGKPAEIHIEVARELRKSREERQKESRRMREREAERERMRQKIHKEVGIPLEQIREEDVRKGLLYEECCRTCPYTGKPLGGFAGLFSGTSPVQIEHIIPYSISLDDSFANLTLCLASENAVKHNRTPYQAYSADPGRWEDIQARVRAFRGPYAAEKLRRFLMDEQAAAALLQRFSARHLNDTRYAAVVAGRYLSLLYGGEVIDGKRKILKVTGQITAHLRRVWGMNEILGRAGVKSRDDHRQHAIDAALVAVADQRSVQRLSQAAARAELQHRRRLPALEPPFVGFKEGLQCLVQTMNISFRPDHRVSGPLHKETFYAVSGAPAAPTGTIRTRKPVFRLTEEDVDRIADPAVRCLVKQKLAGVGEARKLEKDWPVLPNAHGQPVPIKRVRLELRDAVRAVGQGHRRRWAEVGESHHVAVFEVTKRSRQGTRTAWEGEVVSLWEALERLRLGKPVIDRAGGPDRRFLFSLCKNDTLQLNGPRPGIYVVRKIRQNKQITLVPQHDARPEKQREQFSPTVSGLLEYAARKVVVTPLGELVESHE

SEQ ID NO: 461 - protein, 784 aa, unidentified
  REGION 1..784: note = Description of Unknown: uncultivated organism with predicted taxonomy: Planctomycetes
  REGION 1..784: note = MG4-39 effector
VLQPMRVPYVLGLDIGVQSVGWALAQLDEEGNPCGILRLGVRSFESSSGSEQEIEKGTDEPASRQRREKRLMRRQLFRRQQRLRRTARVLQQAGLLPQFSLEPASRDAAITQLDAQLRSQFIGSGNHVDAQLLPYRIRAAALDEVLPAYALGRAFYHLAQRRGFLSNKKASAKKDDEDKGKVKAGIAELTRQIEVAGARTLGEFFARLDPHQQRIRSRWTSRKMYQQEFDAIWEAQAPHHPQTLTAELKARLYRAIFFQRPLKSQKGLIGRCSLEKGRRRAPLACLEAQRLRYWQKLNDLRLKDARRILNAIPEAERLIDWLPQEGQGRLTLYAKQLLAQEFETNEELTFNRIRQILGLKKKKDSDLDFTFNLEEGDEKKLPGNRTAAKLLKALGQRWQDMPEDQRQRLVDEILSFEKEEPLARRLEKAWGFSPSEAANVAAIDFEQGYHSFSRQAIRKILPHLQQGQALATIIKQLYKDTQPQATVWDRLPPLRDVFPQVNNPVVRRALTEVRKVVNAILRVYGKPQRVHIELARDLKKSRHERQQLSKGMRQQQKQREDARNWLQHEMGISNPTAHDILKYRLWIECEKLCPYTGKPISKEALFGSEPQFDVEHIIPYSRCLDNSFANKTLCEVAENRAAKKNRTPYEAYGNAPQRWHEILQRVSRFRGDAAKAKLRRFQLTEIPADFANRHLNDTRYSSRLASEYLSLLYGGRSDAQGNLRVQASTGAVTSLLRDQWGLNAILAELGRQLGVSGLDDDVEKARFDHRHHAVDALVIALTTP

SEQ ID NO: 462 - protein, 1106 aa, unidentified
  REGION 1..1106: note = Description of Unknown: uncultivated organism with predicted taxonomy: Thermogutta terrifontis
  REGION 1..1106: note = MG4-40 effector
VDHLEVHVSDSAGGHVSEIPEYLLGIDLGVLSLGWAAVKLQDGRPIGLLDAGVRAWDLQNIAESDIAVGKEEPPSQTRRQMRQMRRQLFRRAQRLRRTWRALQQLGLFPPGSRHCAARKAFLDQLDGQAKAWLCQHRFGSADPPPHWEDTWIYHLRAAALDQPLPPELLGRVFFHLAQRRGFQSTAKTRSAGDQKDGEDRKNKKNKKGKKSEKSERERIRAAISQLQQAMQTSGARTLGEYFARLDPHQERIRGRWTSRRMYKEEFEAIWTAQAPFHPEWTAADKDRLFRALFFQRPLKSQRGLVGLCPLESKVLPPAQPGQKAKVLYRHRRAPLASLEAQRIRYMQRINDLEIIAPDGTHWVLRDPAYQLMRSKLYDLAEHHEELTFPAIRKALGIPTGKKGEDWKFNLEAGGEKKLPGNTTAARIRRILGDQRWDSLGPDGQKQLVDTLLAFLSEEALQQHLEAHWHLDPPTAQALAHLELEPGYHSYSRRAIRKLLPLLEQGLRLNEARRKLYPQKEADAGGWDRLPPVCQVLPQVRNPLLVRALTELRKVVNALLHKYGKPVQIRIELARDIKRSRREREALSRRMRKQEDSRKKAAQIAREHLGREPSPFEITKVLLAEECNWKCPYTGREKIELAALLGPEPQFDVEHIWPFDRSLDDSFANKTLCYHEENRLRKSNRTPWEAYGSDPHRWGEIIARVKQFKGEWAKEKLRRFLAQELPEDFPQRHLSDTRWISRTAADYLGLLYGGRIDPTGKQRIQTTAGRLTALLRRAWDLDSILGPGTEKNRADHRQHAIDAVVIALTDPAVVHRLSRWASHRPSWVRITPQLDSPWPGFFDQVKHRILSILVSFRQHRRLSGPLHDQTFYAPPVPSPEDPKKLRTKVRKKLSELSDNAVEDIVDPEVRRLVQEKLRALSEHDPKKAFASPENLPYLRSRRTGQIIPIKSVRIWVTAHLEKIGSGMRQRYVIPGTNHHLEIFAHLDAQGNETRWDGHVVSLLEAVRRKRLGQPVVCRDHGPNTRFKFTLAKGDYIQWTDDQGQPQILRVIGISHNNIEFRLPSDARPITIIKQEKQRIRARYQTLFQRRARKVAVSPLGEVYPAGD

SEQ ID NO: 463 - protein, 811 aa, unidentified
  REGION 1..811: note = Description of Unknown: uncultivated organism with predicted taxonomy: Planctomycetes
  REGION 1..811: note = MG4-41 effector
VLQPMRVPYVLGLDIGVQSVGWALAQLDEEGNPCGILRLGVRSFESSSGSEQEIEKGTDEPASRQRREKRLMRRQLFRRQQRLRRTARVLQQAGLLPQFSLEPASRDAAITQLDAQLRSQFIGSGNHVDAQLLPYRIRAAALDRPLPVYALGRAFYHLAQRRGFLSNKKASAKKDDEDKGKVKAGIAELTRQIEAADARTLGEFFARLDPHQQRIRSRWTSRKMYQQEFDAIWEAQAPHHPQTLTAELKARLYRAIFFQRPLKSQKGLIGRCSLEKGRRRAPLACLEAQRLRYWQKLNDLRLKDARRILNAIPEAERLIDWLPQEGQGRLTLYAKQLLAQEFETNEELTFNRIRQILGLKKKKDSDLDFTFNLEEGDEKKLPGNRTAAKLLKALGQRWQDMPEDQRQRLVDEILSFEKEEPLARRLEKAWGFSPSEAANVAAIDFEQGYHSFSRQAIRKILPHLQQGQALATIIKQLYKDTQPQATVWDRLPPLRDVFPQVNNPVVRRALTEVRKVVNAILRVYGKPQRVHIELARDLKKSRHERQQLSKGMRQQQKQREDARNWLQHEMGISNPTAHDILKYRLWIECEKLCPYTGKPISKEALFGSEPQFDMEHIIPHSRCLDDSFANKTLCELAENRAAKKNRTPYEAYGHDPQRWHEILQRVSRFQGDAAKAKLRRFQLTEIPADFANRHLNDTRYSSRLAAEYLSLLYGGRYDAQGNLRVQASTGTVTAQLRGQWGLNAILAELGRQLGVRDLDNDVEKARFDHRHHAVDALVIALTTPAMIKRFSDESQRARQYGRQFRCFFDPP

SEQ ID NO: 464 - protein, 1111 aa, unidentified
  REGION 1..1111: note = Description of Unknown: uncultivated organism with predicted taxonomy: Thermogutta terrifontis
  REGION 1..1111: note = MG4-42 effector
VDHLEVHVSDSAGGHVSEIPEYLLGIDLGVLSLGWAAVKLQDGRPIGLLDAGVRAWDLQNIAESDIAVGKEEPPSQTRRQMRQMRRQLFRRAQRLRRTWRALQQLGLFPPGSRHCAARKAFLDQLDGQAKAWLCQHRFGSADPPPHWEDTWIYHLRAAALDQPLPPELLGRVFFHLAQRRGFQSTAKTRSGGEQKDGEDRKNKKNKKGKKSEKSERERIRAAISQLQQAMQTSGARTLGEYFARLDPHQERIRGRWTSRRIYKEEFEAIWAAQAPFHPEWTAADKDRLFRALFFQRPLKSQRGLVGLCPLESKVLPPAQPGQKAKVLYRHRRAPLASLEAQRIRYMQRINDLEIIAPDGTHWVLRDPAYQLMRSKLYDLAEHHEELTFPAIRKALGIPTGKKGEDWKFNLEAGGEKKLPGNTTAARIRRILGDQRWDSLGPDGQKQLVDTLLAFLSEEALQQHLEAHWHLDPPTAQALAHLELEPGYHSYSRRAIRKLLPLLEQGLRLNEARRKLYPQKEADAGGWDRLPPVCQVLPQVRNPLLVRALTELRKVVNALLHKYGKPVQIRIELARDIKRSRREREALSRRMRKQEDSRKKAAQIAREHLGREPSPFEITKVLLAEECNWKCPYTGREKIELAALLGPEPQFDVEHIWPFDRSLDDSFANKTLCYHEENRLRKSNRTPWEAYGSDPHRWGEIIARVKQFKGEWAKEKLRRFLAQELPEDFPQRHLSDTRWISRTAADYLGLLYGGRIDPTGKQRIQTTAGRLTALLRRAWDLDSILGPGTEKNRADHRQHAIDAVVIALTDPAVVHRLSRWASHRPSWVRITPQLDSPWPGFFDQVKHRILSILVSFRQHRRLSGPLHDQTFYAPPVPSPEDPKKLRTKVRKKLSELSDNAVEDIVDPEVRRLVQEKLQALSQHDPKLADPKKAFASPENLPYLRSRRTGQIIPIKSVRIWVTAHLEKIGSGMRQRYVIPGTNHHLEIFAHLDAQGNETRWDGHVVSLLEAVRRKRLGQPVVCRDHGPNTRFKFTLAKGDYIQWTDDQGQPQILRVIGISHNNIEFRLPSDARPITIIKQEKQRIRARYQTLFQRRARKVAVSPLGEVYPAGD

SEQ ID NO: 465 - protein, 1111 aa, unidentified; identical to SEQ ID NO: 464
  REGION 1..1111: note = Description of Unknown: uncultivated organism
  REGION 1..1111: note = MG4-43 effector

SEQ ID NO: 466 - protein, 1056 aa, unidentified
  REGION 1..1056: note = Description of Unknown: uncultivated organism with predicted taxonomy: Proteobacteria
  REGION 1..1056: note = MG4-44 effector
MSGENIETILGLDLGANSVGWALIECVDGKARRILGMGSRIFEAAIEGDLEKGQEEPRAVERRMARQMRRQHKRRVMRMIRVGELLQQAGWFPPGNLRDSVERDRILKELDKSLRQQYADRGFHLSGIDAIRGIAYFLRARALDEPLEPYALGRAIYHLAMRRGFLSNRKAPMKKDEELGAVKKGISDLESEMKQCQARTLGEYFYKVDPVHEKRIRKRWTARQMYKDEFDTILQQQVKLGAIRDDPKFFRKLRKAIFRQRPLKSQCGLIGPCQFEKNEKRAPWHNLLAQEFRLLQKINDLRLIDPSTREERPLNAEERKILYDWLMEHGEATFAELRKKLGFNPRDGQKFNLEAGDETRLKGNEVAARLIAVLGEERWRGITDQEKAQLISELNSDITEERLRYRAEKVWGITDPERVDKLVKLTLPKGYCSLSKIALKKLVPLMREGKDYVTAAREVYGDLQYKNQTFDRLPPFLKVDRTLRSPVVIRTLSETRKVVNEILRVFGRPNRIHIELAREMKQSRIQRQKRYQTMRDREKMRNQARQSLQAELGWDPNDIKGRDIEKWLLAEECSWVCPYSGKPINYHNLFGEKAEFDIEHIIPYSKSLDDSFVNKTLCHREWNQKKGNRTPAQAFKNTPEWEAMLQRVRAFKPLHAVHMKKGESSKRNPKYDLFCMEEIPPDYVDNKLNDTRHAAKVAMGYLGLLYPKEERLKRVKAFAGGVTGELRKCWKLNSILGDPDSVEPKKNRADHRHHAIDALVLALATPGMVQYLSKAAAQQLACQRSIRGYQKFMEDPWPHFLEDVRKAVNAIVVSHRVDHRLQGRLHNDTLYSPPRVDENGKTYHVVRKPLDGNFKKVGDIEDPEVRRIVQEHLADHDGDPKKAFNDPDNHPKINDIPIHAVRVRDYVKPEKIGKDFCPRYALTDSNHHMEIIEEKDKKGNPRWTAIVVSRFEAMQRKIRGEPIVQREHGEGRRFVCSIASGDTFSYREKEDGPGIFARVRSIWKQNVEFVQINDARLKAEIKKENEWYVRSVNELRKMGFQKVSVSPIGEVYPAND

SEQ ID NO: 467 - protein, 1056 aa, unidentified; identical to SEQ ID NO: 466
  REGION 1..1056: note = Description of Unknown: uncultivated organism
  REGION 1..1056: note = MG4-45 effector

SEQ ID NO: 468 - protein, 1111 aa, unidentified; identical to SEQ ID NO: 464
  REGION 1..1111: note = Description of Unknown: uncultivated organism
  REGION 1..1111: note = MG4-46 effector

SEQ ID NO: 469 - protein, 1056 aa, unidentified
  REGION 1..1056: note = Description of Unknown: uncultivated organism with predicted taxonomy: Proteobacteria
  REGION 1..1056: note = MG4-47 effector
MPYVLGLDIGARSVGWALLEKEGDSFTRILRAGVRVFEAGTEGDIEQGRDESRGATRRAKRLARRQIRRRRQRARALYRELSGAGLLPPITPVPGSPMAVLIQEAINRLDCELRRKYAGERAVNQLPYLLRARALDHRLEPHELGRALYHLGQRRGFKSNRKAESGKKAMEDSSKAGEEKSLVYRGIDDLKRQIREAGARTLGEYFATLDPAEQRIRNRYTHRSMYEEEFEAIWEAQRRHHAALTRELKDRLWQILFEQRPLRDTEDLVGECAWIPDEKRAPVWSLDYQRYRVLQTVNHLRVAENRSAPRPLTHEERWRLLEELEKKPKVTIAQAKKLLGLKKAEFTVEEGGEKELPGDKVAAQFYEKLGESWSRLNPEERRALVECVATAESDEQLSETLQQQWGLSADQANKVVREVHLPSGYAPLSLKAIRAVMPYLEQGMDVQRARLAAGIPLDRPVTVHPLLPPVADSGVAVFNPAVKRALTEMRKVVNAIIRRYGKPDEIHLETARELRKSREERMKESRRMRDREKEREEIIRRIRDEVGIPEEKISRDDVLKGLLWQECEGRCPYCGESLGGFASLFGGNSPAQIEHIIPFSRSLDNSFVNLTLAHVSDNAYKGDRTPREAYGSDPERWDEILQRVEVFKGSYSKAKLNRFKMDESAVGELFEQFSSRALNDTRASAVAAARYLSLLYGGETVDGKRKILKVTGQVTAYLRDVWGLNGLIPSIHREARGEAEDRQAEARPVKSRDDHRHHAVDAVVVALCNQGWIQRLSEANRGALAARRRLFAPVEPPWVGFKEQLKDILKSMNISFRPDHRVTGALHKESHYGYSKVSESDNPVFKIRKPVYELTKSMVQKIVDPAVRSAVQEKLAAVGGKVEALKGNWPVLQSKNGQSRPIKKVRIQVALSPIEVGKNHRKRFVEVEDTHHMEVFEVPGRLSKWKARVVKMHEAAARLVCGANIFDRHLDSKSRYLFSLMKGDCLQMHGEMSGIWIIKTIRANTQIELVSQYDARPVGSSKGGARVTRKCISEFQKFSPRKVVVLPIGDVVRCNE

SEQ ID NO: 470 - protein, 1026 aa, unidentified
  REGION 1..1026: note = Description of Unknown: uncultivated organism
  REGION 1..1026: note = MG4-48 effector
VRQDEHGTVHIVDSGVRVFPWTIEEDTLKSRNIERRTARHRRRQLERRARRRRVLARLLHHYGFLPPWPADWRTFDFHRDPAWGPLLAKDPYELRAKALDQLLEPWEFGQVIYHLAHRRGFAGFRKVRDDEELGNIRREIEQLDQEIKRSGARTLGEYLAQLDPRERRRRGRHTSRDWYRAEFELIVATQQRLGLPLTPDMVRTLRRAIFHPRPLKVVPSAIGRCPLVRGRRRAPQGLREAQEFRYLQNLANLRIILPNGVQRGLTPPERKTVIQHLEQVEEMTFNELRKLLFADRVESARSRSQTAPERSHTPAAVTADGRTPAAMPVDTTVPSTMEQWNPGWKLQDIRFNLEEGEREEIEGNVTAARIRKAIGAKWDPATPDIRRAMVEMWIGIEDEDVCKQVALRQTEWGLTESEAEALSQVAFEGGRCRFSSTALRRLLPHLRQGRSLYDAIQQEFPEHGEQVALDEVPPLGEEIPNPLVRRALSETRRIVNAILTTYGKPSEIHIELARDLRRPLCEVREMIKQMRKREKMRREAERKLCEEHGIRKPTAREIEKYLLWKECNARCPYTNQDIRAEALFGSHPRFDVEHIIPWSRCLDDSFANKTLCEAKHNREQKRNRMPTEAYSREALEQIWERVRRFQGDYAAEKLRRFQMDPPPELHLIHRGDQLHATAYAARVAARELARLYPNQERAHRIWVSSGRATACLRDAWQLNQLLGRKDEKNRADHRHHMVDAVVVALTTPKIVQDLTHAAQNAVRARRFQGMEPPSGLHEALRQRLEKVIVSHRVERKVQGPLHEETFYGLIRSPETGEIRPVVRKRIDTLTLNEVKNIVDPNIRQIVLERCGEKDPKTVFKDPQQIPWLDFGSKRVRLRRVRIYVNQEPIEIGQNPPRRCFTGSNHHLEIFDCRGQWRCEVVSRWEAMRRLRAGEPVVRRQDAHGCPLVFSLARGDTVELKWKSGTLIAVVQKFSERDYTFRAHDDGRMDKEIREDRIRIRSDRRLQEVLVRKLSVDVLGRAYVSRE

SEQ ID NO: 471 - protein, 1088 aa, unidentified
  REGION 1..1088: note = Description of Unknown: uncultivated organism
  REGION 1..1088: note = MG4-49 effector
VLQPMRVPYVLGLDIGVQSVGWALAQLDEEGNPCGILRLGVRSFESSSGSEQEIEKGTDEPASRQRREKRLMRRQLFRRQQRLRRTARVLQQAGLLPQFSLEPASRDAAITQLDAQLRSQFIGSGNHVDAQLLPYRIRAAALDEVLPAYALGRAFYHLAQRRGFLSNKKASAKKDDEDKGKVKAGIAELTRQIEAADARTLGEFFARLDPHQQRIRSRWTSRKMYQQEFDAIWEAQAPHHPQTLTAELKARLYRAIFFQRPLKSQKGLIGRCSLEKGRRRAPLACLEAQRLRYWQKLNDLRLKDARRILNAIPEAERLIDWLPQEGQGRLTLYAKQLLAQEFETNEELTFNRIRQILGLKKKKDSDLDFTFNLEEGDEKKLPGNRTAAKLLKALGQRWQDMPEDQRQRLVDEILSFEKEEPLARRLEKAWGFSPSEAANVAAIDFEQGYHSFSRQAIRKILPHLQQGQALATIIKQLYKDTQPQATVWDRLPPLRDVFPQVNNPVVRRALTEVRKVVNAILRVYGKPQRVHIELARDLKKSRHERQQLSKGMRQQQKQREDARNWLQHEMGISNPTAHDILKYRLWIECEKLCPYTGKPISKEALFGSEPQFDMEHIIPHSRCLDDSFANKTLCELAENRAAKKNRTPYEAYGHDPQRWHEILQRVSRFQGDAAKAKLRRFQLTEIPADFANRHLNDTRYSSRLAAEYLSLLYGGRYDAQGNLRVQASTGTVTAQLRGQWGLNAILAELGRQLGVRDLDNDVEKARFDHRHHAVDALVIALTTPAMIKRFSDESQRARQYGRQFRCFFDPPWGTRAQFVADVRNAVLAINVSRRVDRRLKGPLHEETIYGKPKQCVDEKGKTIQVAHVRKPLESLSPNNVDHIVDPVIRELVKKKLQELGTTDPKKAFQAKDNHPYMKARDGRIIPIHKVRIRVPTETLMAIGHGPTLRHVKPGVNHHMEIVATLDAAGNEIRWEGITVSLFEALQRLRNKQPVVQRDHGPGKRFKFSLSGGEYLEFVENGRNKLVRVSVISGDDVEFRLHNDARPNTMLRGVKGARAGLVRSADALRKLKARKVLVDPLGNILPAND

SEQ ID NO: 472 - protein, 770 aa, unidentified
  REGION 1..770: note = Description of Unknown: uncultivated organism with predicted taxonomy: Solemya velesiana gill symbiont
  REGION 1..770: note = MG4-51 effector
MALVLGLDLGARSVGWALLEKQGDNWTRIVRAGVRVFEAGTEGNIEQGRDQSRGATRRIARLARRQIRRRRQRARALYRELASAGLLPEVTPSPGSPLAVLIQQAINDLDEHLRQKYAQESAVSQLPYFLRARALDHRLEPHELGRVIYHLGQRRGFKSNRKAEAREKADGDPLKEQKDKSVVYREIEELKAQIQDTGARTLGEYLSRVDPAVERIRHRYTQRRMYEEEFEAIWEAQRPHHAALTRDLKDRLWDILFKQRPLRATDDLVGECDWIPGEKRAPVWSMDYQRFRLLQAVNHLRVSENHSAPRPLSSEERLRLLDVLETQSKISFAQAKKILGLRKAEFTIEEGGETNLPGNAVAAQFYEKLGQDWIRLKPEDRQALVECVAVAESDEQLLEALKQQWGLSEDQARRIVQEVSLPSGYARLSLKAIRAVMPYLEEGWDVQRARIEAGIPLHRPVELHDLLPPLADSGVAVYNPAVKRVLTEMRKVVNAIITHYGKPDEIHLETARELRKSREEREKDSKRMREHEKEREAIIRRICEEIGIPETGISRDDVRKAMLWEECNGMCPYSGRSLGGFASLFSGNSPAQIEHIIPFSRSLDNSFVNLTLAHVSENAYKGDKTPWEAYGSNPEQWDRILQRVALFKGSYKKAKLNRFKMDSNAVGEFLEQFSSRALNDTRAAAVAAARYLALLFGGETVGGKLKILKITGQVTAHLRDAWDLNGLIPSIHRETRGEAADKEPKTPPLKSRDDHRHHAVDAVVVALCDQ

SEQ ID NO: 473 - protein, 1053 aa, unidentified
  REGION 1..1053: note = Description of Unknown: uncultivated organism
  REGION 1..1053: note = MG4-52 effector
MPYVLGLDIGARSVGWALLEKEGDSFTRILRAGVRVFEAGTEGDIEQGRDESRGATRRAKRLARRQIRRRRQRARALYRELSGAGLLPPITPVPGSPMAVLIQEAINRLDCELRRKYAGERAVNQLPYLLRARALDHRLEPHELGRALYHLGQRRGFKSNRKAESGKKAMEDSSKAGEEKSLVYRGIDDLKRQIREAGARTLGEYFATLDPAEQRIRNRYTHRSMYEEEFEAIWEAQRRHHAALTRELKDRLWQILFEQCPLRDTEDLVGECAWIPGEKRAPVWSLDYQRYRVLQTVNHLRVAENRSAPRPLTHEERWRLLEELEKKPKVTIAQAKKLLGLKKAEFTIEEGGEKELPGDKVAAQFYEKLGESWSRLNPEERRALVECVATAETDEQLSETLQQQWGLSADQANKVVREVHLPSGYAPLSLKAIRAVMPYLEQGMDVQRARLAAGIPLDHPVSVHALLPPVADSRVAVFNPAVKRALTEMRKVVNAIIRRYGKPDEIHLETARELRKSREERMKESRRMRDREKEREEIIRRIRDEVGIPEEKISRDDVLKGLLWQECEGRCPYCGESLGGFASLFGGNSPAQIEHIIPFSRSLDNSFVNLTLAHVSDNAYKGDRTPREAYGSDPERWDEILQWVEVFKGSYSKAKLNRFKMDESAVGELFEQFSSRALNDTRASAVAAARYLSLLYGGETVDGKRKILKVTGQVTAYLRDVWGLNGLIPSIHREARGEAEDGQAEARPVKSRDDHRHHAVDAVVVALCNQGWIQRLSEANRGALAARRRLFAPVEPPWVGFKEQLKDILKSMNISFRPDHRVTGALHKETFYTRIGKNEKGGDVVRVRVPVTGLGSKDVEAIADPAVRAIVRAKLEEVGGNAKKLENNWPLLPNRNGKPVPIKKVRVNLNRAVVSVGKGRWQRWAEPSETHHIEIYEVDEKGKKVWRGDVVSMREATERAARGTPITHRRGGVNTRYLFSVSKEDTLRLHGEHEGLWVVKKIAQKGQITLVSQYDARPEQGRTVFSPRLGGLQVHSAEKVVVLPIGDVVRCNE

SEQ ID NO: 474 - protein, 1055 aa, unidentified
  REGION 1..1055: note = Description of Unknown: uncultivated organism
  REGION 1..1055: note = MG4-53 effector
MSSYILGLDVGANSIGWAVVPLQNGAPAGVTRAGVRVFAAAVANLEEAQPETANAQRRLARLTRRRLDRLARRLEHLFRLLQRHGLLPPDPAPSPPASRLEAAHRRHDLLRRLDADLLSEWAARGARGEVPLPDPATLPHVLPYLLRARALDEKLSPYALGRALYHLGQRRGFLSNRRAGAKEEEGEVKKGIDSLAAEMAAAGARTLGEYFSRLDPQSARIRGRYTSRRMHEDEFALIWAAQCVHYPDRLTDDLKKQVHHAIFYQRPLRFRKDAIGPCQFELNRRRAPMALLACQRFRLLQSVNHLQVLLPDGRPRPLAESERQALIAALEEQGDLKFAQVRKLLALPRDTAFNLERGGEKKLPGNRTAAALRAVFGAARWAQLTPADRDRLVDDLRSIQQDEALVRRAMRVWGLDAAAAQQLAAVRLEQGYLNLSRQAVAKLLPLLEAGKPYATAVAEVYGPRPAPPPVDQLPLVSAALPHLTNPVVQRALTEVRRVVNALIRQYGKPECIRVELAREVKKNARQRHQIALRNRENERLRRAAAERIVREVGIANPSRADIEKVLLAEECNWHCPYTGKPISMAALFGEHPQFDVEHIIPFARSLDDSFMNKTLCDAEENRRVKRGRTPFEAYGSQPERWAEILRRVRAFKGSAADAKLERFRCESPPDATELCSRLLNDTRYAARAAAEYLGRLYGGQSDAGHRRRIQVATGQVTAFLRREWGLNAILGDGDEKSRDDHRHHAVDALCVALTDAGIVQALAAAAARAPAEGRRCFARLAPPWPSFLADARRAVLEITVSHRVRRKVSGPLHAESFYSRPHRDPQGRECRHIRKPVEALSPDEVAAIVDDKVRECVRAALRAKNLDPDAIRNSRAIAQAFASPADHPCLVARDGRRIPIHRVRIRKVVNAFTLGDRHVVTETNHHVEIFARLNPDGEVARWEGKVVTLLEAVQRLRAGLPIVNRDHGPDTRFLFSLALREAVRMDDGQGGRMLCVVVVVSQTQQGRIDLEFRRHHDARPGMQGERIRKTPNSLRLAHAEKVVVDPLGRVWPAHD

SEQ ID NO: 475 - protein, 813 aa, unidentified
  REGION 1..813: note = Description of Unknown: uncultivated organism
  REGION 1..813: note = MG4-54 effector
EFDAIWAAQSPHHPCLTTELRERLAAVLFSQRPLKDGAELVGSCSWDPSQKRAPAWSLEYQRFRVLQEVAHLRYADESQVWQPLDAEQRSKLVAALSTTRELDFRAIRKLLGFAGKVRFSVEAGGEKKLRGNVVAAEFIRAIGEEWNALGAERQAELVRQVALAEDDDKLREELITNWRLTPEQAGRLVADVRLPRGYAALSLKAIRAALPYLEQGMSVQQAREAAGYELMPPVPARDLLPPLASSGIEVFNPAVKRSLTELRKVVNAVVRKYGKPAEIHIEVARELRKSREERQKESRRMREREAERERMRQKIHKEVGIPLEQIREEDVRKGLLYEECCRTCPYTGKPLGGFAGLFSGTSPVQIEHIIPYSISLDDSFANLTLCLASENAVKHNRTPYQAYSADPGRWEDIQARVRAFRGPYAAEKLRRFLMDEQAAAALLQRFSARHLNDTRYAAVVAGRYLSLLYGGEVIDGKRKILKVTGQITAHLRRVWGMNEILGRAGVKSRDDHRQHAIDAALVAVADQRSVQRLSQAAARAELQHRRRLPALEPPFVGFKEGLQCLVQTMNISFRPDHRVSGPLHKETFYAVSGAPAAPTGTIRTRKPVFRLTEEDVDRIADPAVRCLVKQKLAGVGEARKLEKDWPVLPNAHGQPVPIKRVRLELRDAVRAVGQGHRRRWAEVGESHHVAVFEVTKRSRQGTRTAWEGEVVSLWEALERLRLGKPVIDRAGGPDRRFLFSLCKNDTLQLNGPRPGIYVVRKIRQNKQITLVPQHDARPEKQREQFSPTVSGLLEYAARKVVVTPLGELVESHE

SEQ ID NO: 476 - protein, 950 aa, unidentified
  REGION 1..950: note = Description of Unknown: uncultivated organism with predicted taxonomy: Flavobacterium hercynium
  REGION 1..950: note = MG4-55 effector
LKELDKSLRQQYADRGFHLSGIDAIRGIAYFLRARALDEPLEPYALGRAIYHLAMRRGFLSNRKAPMKKDEELGAVKQGISELEREMKQCQARTLGEYFYKVDPVYEKRIRKRWTARQMYKDEFDTILQQQVKLGAIRDDPKFFRKLRKAIFRQRPLKSQCGLIGPCQFEKNEKRAPWHNLLAQEFRLLQKINDLRLIDPSTREERPLNAEERKILYDWLMEHGEATFAELRKKLGFNPRDGQKFNLEAGDETRLKGNEVAARLIAVLGEERWRGITDQKKAQLISELNSDITEERLRYRAKKVWGITDPERVDKLVKLTLPKGYCSLSKKALKKLVPLMREGKDYVTAAREVYGDLQYKNQTFDRLPPFLKVDRTLRSPVVIRTLSETRKVVNEILRVFGRPDRIHIELAREMKQSRIQRQKRYQTMRDREKMRNQARQSLQAELGWDPNDIKGRDIEKWLLAEECGWVCPYSGKPINYHNLFGEKAEFDIEHIIPYSKSLDDSFVNKTLCHREWNQKKGNRTPAQAFKNTPEWETMLQRVRAFKPLHAVHMKKGESSKHNPKYDLFCMEEIPPDYVDNKLNDTRHAAKVAMGYLGLLYPKEERLKRVKAFAGGVTGELRKCWKLNSILGDPDSVEPKKNRADHRHHAIDALVLALATPGMVQYLSKAAEQQLACQRSIRGYQKFMEDPWPHFLEDVRKAVNAIVVSHRVDHRLQGRLHNDTLYSPPRVDENGKTYHVVRKPLDGNFKKVGDIEDPEVRRIVQEHLAAHDGDPKKAFNDPDKHPKINDIPIHAVRVRDYVKPEKIGKDFCPRYALTDSNHHMEIIEEKDKKGNPRWTAVVVSRFEAMQRKIRGEPIIQRNHGEGKIFVCSIATGDMALVDLEPTNPNVLVRVRGISFNEVSLVRANDARQKKEIVSSGDFIRKTPLMLQKMNFRKVSVSPIGEVYPAND

SEQ ID NO: 477 - protein, 878 aa, unidentified
  REGION 1..878: note = Description of Unknown: uncultivated organism with predicted taxonomy: Pseudoxanthobacter soli
  REGION 1..878: note = MG4-56 effector
SGAGLLPPITPVPGSPMAVLIQEAINRLDCELRRKYAGERAVSQMPYLLRARALDHRLEPYELGRAVYHLGQRRGFRSNRKAESGKKATEDPSKAKEEKSLVYRGIDDLKEQIRQAGARTLGEYFATLDPAEQRIRNRYTHRSMYEEEFEAIWEAQRPHHAALTRELKDRLREILFGQRPLRDTEDLVGECEWIPGEKRAPVWSLEYQRSRLLQTVNHLRVAENRCAPRPLTPEERQCLLEELEKKPKVTIAQAKRVLGLQRAEFTIEEGGQKDLPGDKVASQFHEILGQRWLELRPEQQRALVECVASAGSDEQLLEDLKQQWRLSDDQATQIVRNVHLPSGYASLSLKAIQKVMPYLEQGMDVQRARLEARIPLDRPVRVRELLPPLADSGVAVFNPAVKRALTEMRKVVNAVIRRYGKPDEIHLETARELRKSREERMNESKRMRGREKEREEILRRIRDEVGIPEEKISRDDVLKGLLWQECDGKCPYCGESLGGFASLYGGNSPAQIEHIIPFSRSLDNSFVNLTLAHVSDNNYKGDRTPWEAYGSNPERWDQILQRVSVFRGSYSKAKLNRFKMDENAVRELSEQFSSRALNDTRAASVAAARYLALLYGGEIVDGKRKILKITGQVTAYLRDVWGLNGLIPSIHREARGEAADAEAESRTLKSRDDHRHHAVDAVVVALCNQRWIQRLSEANRGALAARRRWFAPVEPPWVGFKEQLKDTLKSMNISFRPDHRVTGALHKETFYTRIGQNEKGGDVVRVRMPVTNLGSKEVEAIADPAVRQIVQAELKEVGGDARKLENNWPLLPNRHGKPVPIRKVRVNLNRAVVSVGKGPWQRWAEPSETHHIEIYEVTSRGKTAWSGDVVTMRDAIGR

SEQ ID NO: 478 - protein, 911 aa, unidentified
  REGION 1..911: note = Description of Unknown: uncultivated organism with predicted taxonomy: candidate division Zixibacteria bacterium CG_4_9_14_3_um_filter_46_8
  REGION 1..911: note = MG4-57 effector
MEGKKVGGYILGLDIGANSVGWAILSQKDGKPTGIVKTGVRVFEAATEGDISAGKDESRNKKRRQMRLQRRQAERRARRKRKVFNLLVKSGLLPPGHITGVINDIDKAAYAKYVASADKSARPILAHVVPYILRARALDHPLSREELGRALYHLCQRRGYKSNAKMQEDEKEKGEVKEGIGKLEQAIKASGARTLGEYFSKINPEEERIRQRWTSREMYENEFEQIWEAQKKHYPELLTDALKEKMRDAIFHQRKVTWDKNTIGDCELEPGQKRAVAALLICQRFRFLQRLNDLKIISPLGEIVDLTPEQRRALAEKLDVEGDLSWTKVRKILQLTKEHHFNLEKVSDKGLIGNRTAGKLHKIFGDKWLSFTEEQRNRIVDDVRSFEDRRALALRAMKTWGLTDEKAADLAAVAFEPDYFNLSLRAIRKLLPLLENGMPFATARDQVYGKPKPVEPVDALPVVNEALPALRNPVVARSLTQLRKVVNNIIREYGKPAAIRVELARDLKRSKKQRQTLTERIRSREKLREDARKRLENEKLVERPTRNDIDKVLLADECNWICPYTGRQIGWKTLFGPSPQFDIEHIIPFSRCLDDSLANKTLCDIEENRNVKRNRTPWEAYGSNPEKWGQILDRVRRFKGDDAILKLQRFQLKDVGDFEEFSSRQLNDTRYASVLAAKYLGALYGGAIDAEHTRRIQVSAGMVTAYLRNEYGLNPILGDGGEKSRDDHRHHAIDAICVALTDAATVKMLSDAASRALSERRRQFGHIDPPWPSFLADVRKHIDDLIVSHAVSRKVNGPLHEETLYTKPRIDKDGNQVVCVRKPLDALSESEAKQIVDPVIRKMVLDRIEKEGAPPKKVFADKSRHPVICGKNGTRIPVHSVRIAKTGSVIPIASGGRSRNIMPGSNHHMEI

SEQ ID NO: 479 - protein, 976 aa, unidentified
  REGION 1..976: note = Description of Unknown: uncultivated organism
  REGION 1..976: note = MG4-58 effector
SGAGLLPPITPVPGSPMAVLIQEAINRLDCELRRKYAGERAVNQLPYLLRARALDHRLEPHELGRALYHLGQRRGFKSNRKAESGKKAMEDSSKAGEEKSLVYRGIDDLKRQIREAGARTLGEYFATLDPAEQRIRNRYTHRSMYEEEFEAIWEAQRRHHAALTRELKDRLWQILFEQRPLRDTEDLVGECAWIPREKRAPVWSLDYQRYRVLQTVNHLRVAENRCAPRPLTHEERWRLLEELEKKPKVTVAQAKRVLGLQKAEFTVEEGGEKELPGDKVAAQFYEKLGESWSRLNPEERRALVECVATAESDEQLSETLQQQWGLSADQANKVVREVHLPSGYAPLSLKAIRAVMPYLEQGMDVQRARLAAGIPLDRPVPVHALLPPVADSRVAVFNPAVKRALTEMRKVVNAIIRRYGKPDEIHLETARELRKSREERMKESRRMRDREKEREEIIRRIRDEVGIPEEKISRDDVLKGLLWQECEGRCPYCGESLGGFASLFGGNPPAQIEHIIPFSRSLDNSFVNLTLAHVSDNAYKGDRTPREAYGSDPERWNEILQRVEVFKGSYSKAKLNRFKMDESAVGELFEQFSSRALNDTRASAVAAARYLSLLYGGETVDGKRKILKVTGQVTAYLRDVWGLNGLIPSIHREARGEAEDGQAEARPVKSRDDHRHHAVDAVVVALCNQGWIQRLSEANRGALAARRRLFAPVEPPWVGFKEQLKDILKSMNISFRPDHRVTGALHKETFYTRIGKNEKGGDVVRVRVPVTGLGSKDVEAIADPAVRAIVRAKLEEVGGNAKKLENNWPLLPNRNGKPVPIKKVRVNLNRAVVSVGKGRWQRWAEPSETHHIEIYEVTSRGKTAWSGDVVTMRDAIGRASRGEPVVRRDGGPNSRFLFSLAKEDTLRLQGEKPGIWVVKKIRANTQMMLVPQYDARKEKDSSNGRESFSPTPGGLQKYSAEKVLVLPIGDVVRCNE

SEQ ID NO: 480 - protein, 1057 aa, unidentified
  REGION 1..1057: note = Description of Unknown: uncultivated organism with predicted taxonomy: Proteobacteria
  REGION 1..1057: note = MG4-60 effector
MPYVLGLDIGARSVGWALLEKEGDSFTRILRAGVRVFEAGTEGDIEQGRDESRGATRRAKRLARRQIRRRRQRARALYRELSGAGLLPPITPVPGSPMAVLIQEAINRLDCELRRKYAGERAVNQLPYLLRARALDHRLEPHELGRALYHLGQRRGFKSNRKAESGKKAMEDSSKAGEEKSLVYRGIDDLKRQIREAGARTLGEYFATLDPAEQRIRTRYTHRSMYEEEFEAIWEAQRRHHAALTRELKDRLWQILFEQRPLRDTEDLVGECAWIPGEKRAPVWSLDYQRYRVLQTVNHLRVAENRCAPRPLTHEERWRLLEELEKKPKVTIAQAKKLLGLKKAEFTIEEGGEKELPGDKVAAQFYEKLGESWSRLNPEERRALVECVATAETDEQLSETLQQQWGLSADQANKVVREVHLPSGYAPLSLKAIRAVMPYLEQGMDVQRARLAAGIPLDRPVSVHALLPPVADSRVAVFNPAVKRALTEMRKVVNAIIRRYGKPDEIHLETARELRKSREERMKESRRMRDREKEREEIIRRIRDEVGIPEEKISRDDVLKGLLWQECEGRCPYCGESLGGFASLFGGNSPAQIEHIIPFSRSLDNSFVNLTLAHVSDNAYKGDRTPREAYGSDPERWDEILQRVEVFKGSYSKAKLNRFKMDESAVGELFEQFSSRALNDTRASAVAAARYLSLLYGGETVDGKRKILKVTGQVTAYLRDVWGLNGLIPSIHREARGEAEDGQAEARPVKSRDDHRHHAVDAVVVALCNQGWIQRLSEANRGALAARRRLFAPVEPPWVGFKEQLKDILKSMNISFRPDHRVTGALHKETFYTRIGKNEKGGDVVRVRVPVTGLGSKDVEAIADPAVRAIVRAKLEEVGGNAKKLENNWPLLPNRNGKPVPIKKVRVNLNRAVVSVGKGRWQRWAEPSETHHIEIYEVTSRGKTAWSGDVVTMRDAIGRASRGEPVVRRDGGPNSRFLFSLAKEDTLRLQGEKPGIWVVKKIRANTQMMLVPQYDARKEKDSSNGRESFSPTPGGLQKYSAEKVLVLPIGDVVRCNE

SEQ ID NO: 481 - protein, 1111 aa, unidentified; identical to SEQ ID NO: 464
  REGION 1..1111: note = Description of Unknown: uncultivated organism with predicted taxonomy: Thermogutta terrifontis
  REGION 1..1111: note = MG4-61 effector

SEQ ID NO: 482 - protein, 1054 aa, unidentified
  REGION 1..1054: note = Description of Unknown: uncultivated organism
  REGION 1..1054: note = MG4-62 effector
MSTPSNVPYVLGLDLGVASIGWAVLDTDAKGRPTSIRAAGSHLFEAGVGGGSQSTPEMAMARGKEESKAAPRREARAMRRQTMRRARRKKKLLGALIRHGLLPEGDIRTPAAIDAYVKALDAALRATWCPPGSSHVEYQNMAYRLRAEAAQRPLDAHAVGRALYHLAQRRGFESNRKTPKRDDEDTSDFQNKLDDLGDAIRSHTTQTLGAYLASLDPDEKRLRGRWTHRSMYEQEFETIWDAQAGALGLDGGAKQDIHHAIFYQRPLKDQSHLVGRCSLVPGKKRAPIAMRIAQDFRVLERVNHLRIVHDDHSERPLSKDERDNLLAALRREEKLTMHQAKKAAGLPTKHVKFSIEAGGETKLVGHRTDAKLCKIFGDRWDEMSEQEKDTVVEDVRCVRLPDTLRRIGEVRWGLSREKAQELADVQLEEGHSAHCLRALRKLVARMDADGLAYSTARKDEYPASFQSVEPMDLLPPVDAWEKDLRNPAVSRALTELRKLVNAIIDRHGKPVRIHLELARDLKQSRKKRKTASDRMRTREKEREKAAQRIITQPGLGIQHPKRWQIEKVLLAEECNWRCPFTDRGFCMADLLGSTPQVDVEHIWPYSRSMDDSFLNKTLCYHEENRNRKRGHTPMEAYGPTPEQYEAILDRVRRFKGDHFAVREKLRRFTDALDEDFPLRHLQDTRYITTLARDFVSLLYGKDASAIVTPSGPLTAWLRRGWHLNSVLGFTDEKEREDHRHHAVDAIVIALATRSNIKRLSDAAERVEREGREKAFGTVDPPWDGFEHEVRSIIDGVVVSHRQSQRVRGPLHKDTIYSPKIDGKHRVRKELHKLTAKEVQSGKIVDTRALAAIQAKLAELAKTDPALADPAKAFKAPENAPLVPGPNGSKVRLRRVRIDTGDKPTRFGGAKGKGSARYAKNELNHHVAFYDQPLPGGGVERTAEVVPLHEAMRRHASGEPIVDRTPRGKKGEYAFAFSLAKNGYVWYRQKNSDEPVLCMVDGIADGDIELKRHTDGRGRPQRGKDRIRLRSKSIREGLFEKAHVTYLGEVRRAGG

SEQ ID NO: 483 - protein, 787 aa, unidentified
  REGION 1..787: note = Description of Unknown: uncultivated organism with predicted taxonomy: Planctomyces sp. SH-PL14
  REGION 1..787: note = MG4-63 effector
PAGPASITQAKTAVNKLSDADKKDVAIVAITLDPEGDTRTDQWKRIRGRRTHRAMYVEEFEHIVQRQADFHPVLKDKAFVRRLSHAIFDQRPLKSQASLIGVCDLVPGRRRAAIASLPYQRFRLLQKLNDLSYVDHDGQKKRPTENQIRPLREKLQTEGDLTWATVGRLLGLDRKSKETGLPRLSHEEGGDKKLIGDRTSAKLRRVMAQKLDALSVAEQTAIIDEILSYGDVEEKLAERLRKAWQLTDAEAAEVAALRFEPGYGSVSRTAIARLMPHLEQGTPYATARKIEFGEVEESVPWPLLPPQGDNAKLWKENKKPDRLVYQSFSNPTVARCLSEMRKVVNALIRRYGKPAYIRVELARDLKNSRSRRADLTTRRNRNQARRERAKEAIEKECNNSRPSRFDIEKWLLAEECGFQCPYTGQSIPRHRVLSAEFEVEHIVPFSRSLDNSFTNKTLSHRDANAKKGNRTPMEAFGQPEEKWEQILARVKRFDGPFARRKLDLFQQRTPPEADFYERQLSETRYIARQAADYLGLLYGGRIEQRAGDEVGRRRVLVTPGRATALLRNGWQLASVTGGLKNRQDHRHHAIDALIVGLTQDGFLKQLSEAAARADELQLTRLTTEMDSPWETFLDDVGKGYERIHVSTRPTRKLNGPLHKETVFSKPHEASGSAKVFHAVRRPLQLMTKSEVGNIVDKRVREAVLEHLDRHDGDLTAAFGDPNNHPQLPCKDGRTIPIHRARVQRREKPWPIGKKSSKRYVVPGANHRLEIIARLNEEGEEIRWLGNI

SEQ ID NO: 484 - protein, 1054 aa, unidentified; identical to SEQ ID NO: 482
  REGION 1..1054: note = Description of Unknown: uncultivated organism
  REGION 1..1054: note = MG4-64 effector

SEQ ID NO: 485 - protein, 1041 aa, unidentified
  REGION 1..1041: note = Description of Unknown: uncultivated organism
  REGION 1..1041: note = MG4-65 effector
MPEQPKMTYVLGLDLGAESLGWAILETRDGEPVRIERTGVHTFEAGVEGDIESGKDESRAKARRDARLPRRQLWRRAARRRKVLHILQRHGLLPPGEARTPEQIHDLLLKLDADLRAAYLPAGDEVAAHLLPYRLRAKALDEKLEPWALGRVFYHLAQRRGFLSNRRSPERKDEDEGKVKAAIGELAADMKARGARTLGEYLAGLDPRCQGVRRRWTARTMFLEEFDRIWAAQAPHHPCLTEELRGQLRRALFFQRPLKSQKALVGRCELIPDRRRVALALPIAQRFRLLQKVNDLKVREPEGTERFLTPQEREKLARELDDKGDLKFDKVRKCLGLPRGVTFNLQEGGEEKLPGNRTYAKLKAVLGARWGGLSAADREQIVVELLSFQKPEALARRLMKVWNLDEPSATKLAEVRLEQGYARHCRKAIARLLPLMESGVPYATARKEVFPESFAAGTPVDRLPPVTDVLKDLRNPAVCRALTELRKVVNAIVRRYGKPECIRIELANDLKRPRKQREEISKRNRGRQKDREEAAEAIRSALPGLEPRRADIEKWLLAEECNWRCPYTGRSINAAALLGSTPQFDVEHIWPMSRSLDNTFANKTLCYHEENRARKGNRTPLEAYGSDPQRWEEILQSVRRFNGPLAWEKLRRFMAREIPQDFTDRQLQDTRYACRLAADYLGRLYGGRVDAQGKMRIEVRPGGLTAHVRNELMLHAILDDGGAKTRADHRHHAVDALAVGLTSQSMVQQLQTAAGRALQAGRRLFAPVPEPWTGFLEDARRSIGQIIVSRRPDRKVAGKLHAETFYSKPIPGADGDVRHVRKELRKLTLGEIQGDRIVDPVIRRLVQERHRQLGGGKPDSVFADPASHPVLRTRDGREVPIHKVRIRSKEKPWPIASGSRLRYVVAGGGTNHHLAIVARPGRRGRGEYWEDHIVSRYTAQQRLARGEPVIQKDWGPGRRLVMVLMPNDFIVMPDDRGVQQVYRVLSISEGDTELRLHCDARRAEDLKKARERVRVSGEKLRKLGGRRVEVSLLGELIGAHD

SEQ ID NO: 486 - protein, 1088 aa, unidentified
  REGION 1..1088: note = Description of Unknown: uncultivated organism
  REGION 1..1088: note = MG4-66 effector
MLQPLQVPYILGLDIGVQSIGWALVRLDEEGNPCGILRLGVRSFESSSGSEQEIEKGTDEPASRQRREKRLMRRQLFRRQQRLRRTARVLQQAGLLPPFPLQPASRDAAITQLDAQLRSQFIDSGNHVDAQLLPYRIRAAALDQPLPAYALGRAFYHLAQRRGFLSNKKAGGKKDEEEKGKVKAGIAELAKQIEAAGARTLGEFFARLDPHQQRIRSRWTSRKMYQQEFDAIWAAQEPHHPQILTAELKAKLYRAIFFQRPLKSQKGLIGRCSLEKGRRRAPLACLEAQRLRYWQKLNDMRLKDARRILNAIPEAEGLIDWLPQEGQGRLSLYAKQLLAQHLETSEELTFNQIRHILGLKKKKNSDLDFTFNLEEGDEKKLLGNRTAARLLKALGQRWQDMPEDQRQRLVDEILSFEKEEPLARRLEKAWGFTPAEAANVAALDFEQGYHSFSRQAIRKILPHLQQGQSLASIIKQLYKDTQPQATAWDRLPPLRDVFPHVNNPVVRRALTEVRKVVNAILRVYGKPQQVHIELARDLKKSRYERQQLFKGMRQQQKQREEAKSWLQCQMGITNPTAHDILKYRLWIECNQQCPYTGKPISKEALFGREPQFDVEHIIPFSRCLDNSFTNKTLCEIAENRNVKKNRTPYEAYGHDPQRWHEILQRVSRFQGDAAKAKLRRFQLTEIPADFANRHLNDTRYSSRLAAEYLALLYGGRSDAQGNLRVRAITGAVTAQLRDQWGLNAVLAELGRQLGVRDLDDNVEKARFDHRHHAVDALVIALTTPGMVKRFSDESQRARQYGRQLRCFFDPPWGTRTEFVADVRNAVLAINVSRRLDRRLKGPLHEETIYGKPKQYVDEKGKTIQVAHVRKPLESLSPKNVDDIVDPVIRELVKKKLQDLNTTDPKKAFQKKENHPYMIARDGRIIPIHKVRIRVTTETIMTVGHGPTLRHVKPGTNHHMEIVATLDAAGNEIRWEGITVSLFEALHRLRNKQPVVQRDHGPGKRFKFSLAGGEYLEFVENGQKKLVRVTTVYHSNVEFRLHNDARPITMLLGVKGARAGLGHSVDALRKLKARKVLVDPLGNILPAND

SEQ ID NO: 487 - protein, 1042 aa, unidentified
  REGION 1..1042: note = Description of Unknown: uncultivated organism with predicted taxonomy: Proteobacteria
  REGION 1..1042: note = MG4-67 effector
MSISDLSPSYILGIDLGAESIGWLLLDVDGDRPTAIRRAGTHCFDAAVEGDLESGKDESKAKARRDARSPRRQHWRRARRRRRVLRTLQQAGLIPPGPLASPIDIHELILRLDQALREKFIPADDRVAAHLLPYRLRAKALDERLEPFEVGRALYHLAQRRGFLSNRKAGKKGDDEGMVKAAISELSDRMTAAGARTLGEYFSGMDPEEERIRKRWTSRQMYLDEFEKIWTKQAEFHPQMTDEVKAQIHAAIFFQRPLKPQTHLIGVCDCDPPHRRAPVALRLAQRFRLLQKVNDLEVLEPTGFPRPLSSDERAKLIAALEQSGDLTFAKIRGKSILALPKETSFNLEKGGEKKLPGHRTDAKLAEIFGDKWPRLSEAERDQIVEDILTFEKSEALAARAQRAYGLDREAALRLAELELEPGYAMHCRKVLRQLVAKMEGGTRYAAARRELYPDQFQAKPAVDLLPPVKDALRNLRNPAVCRALTELRKLINAIIRRYGKPAEIHIELARDLKRSRKDRQELSKVIRENEKLREKAKERILRELGDQQPTRADIEKVLLAEECGWECPYTGKRFGMQELLGQNPQFDVEHIIPLSRSLDNSFGNKTLCYHEENRNHKRNRTPWEAYHADEQRWHQILERVRRFQGASARGKMRRFLMEAIPDDFTSRQLNDTRYASRLAAEYVGLLYGGRADAEHRQRVYVCTGGTTAFLRNEWKLNTILGDGGPKTRDDHRHHAVDALVIALTGPATVKMLADAADNPWQHRRRLFAPIQEPWVGFLDQAREAILRINVSHRVNRRVAGPLHDESIYSPPQRGVGSSPKVVPSYHIRKPLASLSIHEVEDIVDPIIRARVKAVLDEKGGDPKKVFSVAANLPALRTRDGRTIPIRKARIRKSQNMVAIGKGPTQRYVAPGSNHHMAIVAKVDSEGNDREWEGVLVSRLEAAERARRRVPVVQREWGEGRVFRFSLAPGEMFTLEDGNGKGLYIVRSISQNRVEFVKANDARKKVDIKAAKHWLTHPPSVLFRKRCQKVSVGYLGDIVPAND

SEQ ID NO: 488 - protein, 1061 aa, unidentified
  REGION 1..1061: note = Description of Unknown: uncultivated organism with predicted taxonomy: Thermogutta terrifontis
  REGION 1..1061: note = MG4-68 effector
MSAECQVRANEKNYVLGIDLGVLSLGWAVVEYAGDKPVGILKTGARIWEYSDASTLTVQKGQETPPGQERRQARQQRRQIFRRAQRLRRTCSVLQAMGLLDPGRRNSRARKQLWETVDQQAKEWLKSNIPGLADDPQLDHKFVYHLRAAALDHPLPKILLARVFFHLAQRRGFQSNRRVVSRSEEEGEVKKAISLLEHEISESGCRTLGEYFATLDPYTTRIRGRWTSRKMYQDEFERIWSAQIAINPGILDLSQKSRLFKAIFYQRPLKSQKRLVGRCSLEVIVRRGPDGPREVRPRQAALASLEAQRIRYMQRINDLEFTDPEGERRTPTQLEREQLYQLAETVEEISFSQIRKALGIPTGKKGAEWECNLERGGETKIPGNKTAARLRKILGNKTWDGFSESDQKKLVDTILAYLSPEALQSHLENVWKFDSDTARQLSNIELEQGYHSFSRRAIRKLLPLMHQGKRLNEAIKAVYGHTGRLRSVQERLPPVWKVMPELRNPLLVRALTELRKVINNLIRKFGKPQYIRIELGRELKLGKKRRQELAKEMRKREAERERAAKVIEETLHRKARPNEILKYLLADECDWECPYTGKKISVLTLLGDQPQFDVEHIWPFDRTLDDSFGNKTLCYHEENRQVKGNKTPFEAYSDSPDRWREILERVKRFKGPFAKEKLRRFLAADIPQDFPMRHLSDTRWITTAAADYLGYLYGGRIDSEGRQRVFTVTGPLTALIRRGWNLDGILGGPEKNRFDYRQHAIDAIVIALIDQAIVQQISLLSSRLWGTDRPTAVQLPEPWPSFYHDAKNAILNIVVSHRISRRLSGALHEQTHYAPPDNNGRTKIRKPLAALSAKEVENIVDDTIRKYVQHALANAEKKSPKEFFGNPENLPVLKGKNNHVAVVKSVRVWVSAKPVAVGNGDRVRYVKPGNNHHIEIYAIVDEHGNPVKYDGRCVTLLEAVQRKRRGEPVVCRNHGPNTRFLFSLSKNECIEWTNENGEKELLRVVGIADNDIEFRLLYDARPSNLVREAKDRIRGGYSKLFERRARKVLVTPLGEVLPAHD

SEQ ID NO: 489 - protein, 1059 aa, unidentified
  REGION 1..1059: note = Description of Unknown: uncultivated organism with predicted taxonomy: Planctomycetes bacterium
  REGION 1..1059: note = MG4-70 effector
MALVLGLDLGARSVGWALLEKQGDNWTRIVRAGVRVFEAGTEGNIEQGRDQSRGATRRIARLARRQIRRRRQRARALYRELASAGLLPEVTPSPGSPLAVLIQQAINDLDEHLRQKYAQESAVSQLPYFLRARALDHRLEPHELGRVIYHLGQRRGFKSNRKAEAREKADGDPLKEQKDKSVVYREIEELKAQIQDTGARTLGEYLSRVDPAVERIRHRYTQRRMYEEEFEAIWEAQRPHHAALTRELKDRLWDILFKQRPLRATDDLVGECDWIPGEKRAPVWSMDYQRFRLLQAVNHLRVSENHSAPRPLSSEERLRLLDVLETQSKISFAQAKKILGLRKAEFTIEEGGEKNLPGNAVAAQFYEKLGQDWIRLKPEDRQALVECVAVAESDEQLLEALKQQWGLSEDQARRIVQEVSLPSGYARLSLKAIRAVMPYLEEGWDVQRARIEAGIPLHRPVELHDLLPPLADSGVAVYNPAVKRVLTEMRKVVNAIITHYGKPDEIHLETARELRKSREEREKDSKRMREHEKEREAIIRRICEEIGIPETRISRDDVRKAMLWEECNGMCPYSGRSLGGFASLFSGNSPAQIEHIIPFSRSLDNSFVNLTLAHVSENAYKGDKTPWEAYGANPEQWDRILQRVALFKGSYKKAKLNRFKMDSNAVGEFLEQFSSRALNDTRAAAVAAARYLALLFGGETVGGKLKILKITGQVTAHLRDAWDLNGLIPSIHRETRGEAADKEPKTPPLKSRDDHRHHAVDAVVVALCDQGSIHRLSEASKTAVAARRRLLAPMAPPWVGFREQLKDILKSMNISFRPDHRVTGALHKETFYTKLGQNQKGGDMVRLRVPVTSLSSKDIENIADPTVREIVRAKLEEVGGDAAKLEKNWPLLPNRNGNPVPIKKVRVNLNRAVVSVGKGRWQRWAEPSETHHIEIYEVTANGKTTWSGDVVTMRDAISRASRGELVVRRSREPNSRFLFSLAKEDMLRLQGDKSGIWVVKKIKSNTQIVLVPQHDARKEKEKDKSNGRETLNPTASGLRKYYAEKVVVLPIGDVVVCHE

SEQ ID NO: 490 - protein, 1127 aa, unidentified
  REGION 1..1127: note = Description of Unknown: uncultivated organism
  REGION 1..1127: note = MG4-71 effector
MFSRANSVSDNDCSSVNAPAAPRDTASEAQPQPSQPSAGTNVPYVLGLDIGATSVGWAVLDLDAQGEPCCVRAMGARCFEAGVDGDIEHGKDSSRAVARRQARMARRILRRRARRLKKVFHLLQRHGLLPAGPSRTPEERHRLLADLDRQLFPKYAPGGDRVAAHVVCYRLRAAALDRALEDHELGRALYHLAQRRGFLSNRRDDRRASEKGEKSQDTKVIEKEIASLKEQITASGARTLGEYLSRIDPEQQRIRKRWTSRQMYIDEFEAIWSAQSQHRPGRLTEALKRELRQAIFHQRPLKPQTQLIGRCELEPPRHPGALPPRRAPLALPVAQRFRLLQKVNDLQVIEPDGRIRPLTAEERNKLLQALSEQARMEFDDVRKLLGLSAPRKRKDKATGQQICTPGHRFNLEEGGETSIPGDTTTARLLPVLGDKWRTMPEPLRESLVRDLLDFNYPAALAEHLQRVHRFDRHEAEALSEISLEDGYAPYCRMALRKLVARMENGTPFATARKLEYPQSFAAKPPCELLPPVRRAVPDLRNPAVIRALTEVRRVVNALIRRWGKPEIIRVELARDLKKPRKEREKAWKGNREREKERKAAADRLLKEAGITNPSPADIEKVLLMEECGGICPYTGRPITIPALFGDSPQFDVEHIIPFSVSLDDSFVNKTLCWHEENRHHKRNKTPYEAYSGNRERYEEILRRVSRFSGRFRKEKLRRFQMTLADVKAEYGDDFTARHLTDTRYASRLAADYLGLLYGGTVDAAGRRRVQTSSGTATWYLRSEWDMNAVIPGLSGSPTGSASGTFIEKVRTDHRHHAIDAVAIALTSARVVKMLADAARNPEQHRRRRFAPVPPPWPNFKDEVSAAAEKIIVSHRVDRRVAGPLHAETNYSPPIVHENREYRHRRVPLSSITRSQIAQIVDDVIRQLVEQKVGSAGDPAKVFSDPRNLPVLRSRDGTRCIPIKKVRVREHVAATTVGAGPRQRHVVSGKDTLHHTVIVARQTPSGEVWEDNPVDRLEVHRRLRNGQPVIQTDWGSDARYVFHLCKNDCIEMDVESGNPSAGRQIYVVRSISKRDIAVRLHYDARTLEQIVRAKERGKFRISSADLLRRRNARKVMVSPLGEVLPCRE

SEQ ID NO: 491 - protein, 1069 aa, unidentified
  REGION 1..1069: note = Description of Unknown: uncultivated organism with predicted taxonomy: Acidobacteria
  REGION 1..1069: note = MG4-72 effector
VSEHLDYVLGIDLGSNSLGWAVIGLIDGEPAQLVRAGVRVFDAGMEGDLESGREESRNLKRREARLHRRLLWRRQRRLTKLFNLLQRFDLLPPAPSISEHLPNGHRRPITPEQRQDLLNQLDRRILSSAWFQTKVNSGAFPEPEHTMPYILRAAALDEPLEPHMFGRALYHLGQRRGFLSNRKQAPKKNDDEGAVKEGIAELRKAMQTSGARTLGEYFSRLNPSTERIRCRWTARDMYEKEFNAIWDAQAPHHADLLTPERKKQIYDAIFFQRPLWLDPGTVGNCELEPGEKRAPAYLLVSQRFRLLQTVNNLRVLPPDDVDMPLTPTDRKKLVDALEMKGDLTFKEISKLLKLEKGYKFNLESGGEKRIKGNRTNADFYAVFGERWLAMSPEERDRAVEYVHSFQKAEKLKDAARKKYDLTEEQAEQLAGISLEADYINLSRKAIEKFLPLLEEGVTYGEARKKLYPESFEAREAMPLLPPVETALAQIRNPAVMRSLTELRKVVNALVRRYGKPSCVHLELARDLKKSKKQRQAISENNRRNESARAKAAEAIIKADVGISAPSPDDIRKVLLAEECHWTCPYTGRSISMRSLLGPEPQFDIEHIVPFSRSMDNSFQNLTLCYVPENRSVKGNRTPWQAYHGDPERYQAILDRVRKFAGDRQTVAAKLRRFTMTDDELEGFLEDFRNRQLNDTAYATSLAAKYLGLLYGGVNDADGRKRVQATSGQATAYFRSLWKLNSILNDGPTSDGGAVPKSRDDHRHHAVDAVVIGLTDAAMIKRLSDAAQRAQLEHRRRFASLEAPWPNFVDSVRTEIDRIIVSHRVSKKVSGALHEETIYSRPMGKDGEVRVRKPLDSLSRPEVEKIADEGVRKLVQQKLEQLGGIEPKKAFPNPENLPRFPSSGVVIKNVRITKPLPIFTLSEGRRARHVTSESNHHVEIYAELDEHGNEKKWGGEVVSMAEAYQRLKTGKPIVQRDHGPLVKFKFSLAPGEVVECEGKDGMRGLFVMRKASQLTSGQLQIGFAPLADARKAREIQTSRAWLWASPNTLGERNPRKVVVSPIGEVTETHD

SEQ ID NO: 492 - protein, 824 aa, unidentified
  REGION 1..824: note = Description of Unknown: uncultivated organism
  REGION 1..824: note = MG4-73 effector
MFSRANSVSDNDCSSVNAPAAPRDTASEAQPQPSQPSAGTNVPYVLGLDIGATSVGWAVLDLDAQGEPCCVRAMGARCFEAGVDGDIEHGKDSSRAVARRQARMARRILRRRARRLKKVFHLLQRHGLLPAGPSRTPEERHRLLADLDRQLFPKYAPGGDRVAAHVVCYRLRAAALDRALEDHELGRALYHLAQRRGFLSNRRDDRRASEKGEKSQDTKVIEKEIASLKEQITASGARTLGEYLSRIDPEQQRIRKRWTSRQMYIDEFEAIWSAQSQHRPGRLTEALKRELRQAIFHQRPLKPQTQLIGRCELEPPRHPGALPPRRAPLALPVAQRFRLLQKVNDLQVIEPDGRIRPLTAEERNKLLQALSEQARMEFDDVRKLLGLSAPRKRKDKATGQQICTPGHRFNLEEGGETSIPGDTTTARLLPVLGDKWRTMPEPLRESLVRDLLDFNYPAALAEHLQRVHRFDRHEAEALSEISLEDGYAPYCRMALRKLVARMENGTPFATARKLEYPQSFAAKPPCELLPPVRRAVPDLRNPAVMRALTEVRRVVNALIRRWGKPEIIRVELARDLKKPRKEREKAWKGNREREKERKAAADRLLKEAGITNPSPADIEKVLLMEECGGICPYTGRPITIPALFGDSPQFDVEHIIPFSVSLDDSFVNKTLCWHEENRHHKRNKTPYEAYSGNRERYEEILRRVSRFSGRFRKEKLRRFQMTLADVKAEYGDDFTARHLTDTRYASRLAADYLGLLYGGTVDAAGRRRVQTSSGTATWYLRSEWDMNAVIPGLSGSPTGSASGTFIEKVRTDHRHHAIDAVAIA

SEQ ID NO: 493 - protein, 1069 aa, unidentified
  REGION 1..1069: note = Description of Unknown: uncultivated organism with predicted taxonomy: Acidobacteria
  REGION 1..1069: note = MG4-74 effector
VSEHLDYVLGIDLGSNSLGWAVIGLIDGEPAQLVRAGVRVFDAGMEGDLESGREESRNLKRREARLHRRLLWRRQRRLTKLFNLLQRFDLLPPAPSISEHLPNGHRRPITPEQRQDLLNQLDRRILSSAWFQTKVNSGAFPEPEHTMPYILRAAALDEPLEPHMFGRALYHLGQRRGFLSNRKQAPKKNDDEGAVKEGIAELRKAMQTSGARTLGEYFSRLNPSTERIRCRWTARDMYEKEFNAIWDAQAPHHADLLTPERKKQIYDAIFFQRPLWLDPGTVGNCELEPGEKRAPAYLLVSQRFRLLQTVNNLRVLPPDDVDMPLTPTDRKKLVDALEMKGDLTFKEISKLLKLEKGYKFNLESGGEKRIKGNRTNADFYAVFGERWLAMSPEERDRAVEYVHSFQKAEKLKDAARKKYDLTEEQAEQLAGISLEADYINLSRKAIEKFLPLLEEGVTYGEARKKLYPESFEAREAMPLLPPVETALAQIRNPAVMRSLTELRKVVNALVRRYGKPSCVHLELARDLKKSKKQRQAISENNRRNESARAKAAEAIIKADVGISAPSPDDIRKVLLAEECHWTCPYTGRSISMRSLLGPEPQFDIEHIVPFSRSMDNSFQNLTLCYVPENRSVKGNRTPWQAYHGDPERYQAILDRVRKFAGDRQTVAAKLRRFTMTDDELEGFLEDFRNRQLNDTAYATSLAAKYLGLLYGGVNDADGRKRVQATSGQATAYFRSLWKLNSILNDGPTSDGGAVPKSRDDHRHHAVDAVVIGLTDAAMIKRLSDAAQRAQLEHRRRFASLEAPCPNFVDSVRTEIDRIIVSHRVSKKVSGALHEETIYSRPMGKDGEVRVRKPLDSLSRPEVEKIADEGVRKLVQQKLEQLGGIEPKKAFPNPENLPRFPSSGVVIKNVRITKPLPIFTLSEGRRARHVTSESNHHVEIYAELDEHGNEKKWGGEVVSMAEAYQRLKTGKPIVQRDHGPLVKFKFSLAPGEVVECEGKDGMRGLFVMRKASQLTSGQLQIGFAPLADARKAREIQTSRAWLWASPNTLGERNPRKVVVSPIGEVTETHD

SEQ ID NO: 494 - protein, 1059 aa, unidentified
  REGION 1..1059: note = Description of Unknown: uncultivated organism with predicted taxonomy: Proteobacteria
  REGION 1..1059: note = MG4-76 effector
MALVLGLDLGARSVGWALLEKQGDNWTRIVRAGVRVFEAGTEGNIEQGRDQSRGATRRIARLARRQIRRRRQRSRALYRELASAGLLPEVTPSPGSPLAVLIQQAINDLDEHLRQKYAQESAVSQLPYFLRARALDHRLEPHELGRVIYHLGQRRGFKSNRKAEAREKADGDPLKEQKDKSVVYREIEELKAQIQDTGARTLGEYLSRVDPAVERIRHRYTQRRMYEEEFEAIWEAQRPHHAALTRELKDRLWDILFKQRPLRATDDLVGECDWIPGEKRAPVWSMDYQRFRLLQAVNHLRVSENHSAPRPLSSEERLRLLDVLETQSKISFAQAKKILGLRKAEFTIEEGGEKNLPGNAVAAQFYEKLGQDWIRLKPEDRQALVECVAVAESDEQLLEALKQQWGLSEDQARRIVQEVSLPSGYARLSLKAIRAVMPYLEEGWDVQRARIEAGIPLHRPVELHDLLPPLADSGVAVYNPAVKRVLTEMRKVVNAIITHYGKPDEIHLETARELRKSREEREKDSKRMREHEKEREAIIRRICEEIGIPETRISRDDVRKAMLWEECNGMCPYSGRSLGGFASLFSGNSPAQIEHIIPFSRSLDNSFVNLTLAHVSENAYKGDKTPWEAYGANPEQWDRILQRVALFKGSYKKAKLNRFKMDSNAVGEFLEQFSSRALNDTRAAAVAAARYLALLFGGETVGGKLKILKITGQVTAHLRDAWDLNGLIPSIHRETRGEAADKEPKTPPLKSRDDHRHHAVDAVVVALCDQGSIHRLSEASKTAVAARRRLLAPMAPPWVGFREQLKDILKSMNISFRPDHRVTGALHKETFYTKLGQNQKGGDMVRLRVPVTSLSSKDIENIADPTVREIVRAKLEEVGGDAAKLEKNWPLLPNRNGNPVPIKKVRVNLNRAVVSVGKGRWQRWAEPSETHHIEIYEVTANGKTTWSGDVVTMRDAISRASRGELVVRRSREPNSRFLFSLAKEDMLRLQGDKSGIWVVKKIKSNTQIVLVPQHDARKEKEKDKSNGRETLNPTASGLRKYYAEKVVVLPIGDVVVCHE

SEQ ID NO: 495 - protein, 1057 aa, unidentified
  REGION 1..1057: note = Description of Unknown: uncultivated organism
  REGION 1..1057: note = MG4-77 effector
MALVLGLDIGARSVGWALLEKQGDEWKRIVRAGVRVFEAGTEGDIESGRDHSRGATRRIKRLARRQIRRRRQRARALYCALAEAGLLPEISPQPGSPMSLLIQQQINRLDGQFRIKYAAHPAVQQLPYLLRARALDQPLELFELGRVIYHLGQRRGFKSNRKAESRKAGAGDHSRAKEEKGKVYEGIDALRTLIDQAGARTLGEYFSRIDPAKQRIRGRYTHRSMYEQEFDAIWAAQKPHHPALTQELKDRLWNILFQQRPLQDKEEFVGECSWFPGEKRAPVWSLEFQRYRIWATLNHLRITGNRSAPRPLSPEERALLFTSLDAAEKLTIAQAKKALGLRRTAGFTLEEGGENHLPGNKVGAKFHAILGNRWTSLPPEKQNELVTVVARASTDEELEEALQRDWGLDGEMSRRIVREIVLPSGYALLSLRAIREVMPFLQQGYSVQEARQKAGIPLERQVPVHPLLPPLADSGVAVFNPAVKRTLTELRKVVNAIIRHYGKPDEIHIETARELRKSREERAEDSKRMRGREREREAVRDQIHKEIGIPLDQISREDVLKGLLYRECEGMCPYCGQSLGGFASLFGGNSPVQIEHIIPFSRSLDNSFVNLTLAHVSDNAEKGNRTPWEAYGHDPGKWEQILQRVGAFKGSYAKAKLNRFKMDEQAVADLLQQFSSRHLNDTRAAAVAAARYLALLYGGETVDGKRKILKPTGQVTAYLREVWGLNGLIPSIHREAAGAEESDDGRTIRKSRDDHRHHAIDAVAVALCDQGTIQMLSEANRGAAAARRRRFAPVPPPWVGFKDELRQVLRSMNISFRPDHRVTGALHKETLYKYVGRNERDGDVVRVRVPVHTLSVRELGQIVDPNVRVIVQAKLAEIGGDLKKLENNWPCLPNRNGAPVPIRTVRVDLNRAVVTVGTGFRQRWAEPSETHHIEIYEISENGRTVWTGDVVSMREAILRAARGEPVVRRSAGANGRFLFSLAKEDTIRLFGDRAGIWVVKKIKGNEQIILVPQHDARKEGSGAASRTEFAPTAGGLRRYSAEKVTTLPIGDVVPCHE

SEQ ID NO: 496 - protein, 1031 aa, unidentified
  REGION 1..1031: note = Description of Unknown: uncultivated organism
  REGION 1..1031: note = MG4-78 effector
MLIPNDSLVLGLDIGSSSVGWSLIQNRGEAVEIVASGVRVFPWTVDEQTLMSRSVERRRARQRRRQLERRARRRRLVASLLQRQGFLPPGPPDHRDPSWKAVLAMDPYELRGRALETRLEPWEFGRVMYHLAHRRGFAGSGRGADDSETGVIQEQIEKTAREMQKVNARTLGEFLAQLDPRERRRRGWHTAREWYRTEFEAIVQAQQRMGLNLDPDWVKRLRRAIFFQRPLRTSPRAVGRCGLVPGRLRAAWGLLEAQRFRYLQKLNDLRVLLPDGQVRPLTPQERELVRGELERSERLTFDRLRRLLSSCDPSEALGEPSTGKAGNCDEDPGARSTSDFSRQKAGLAFNLECGGQDCLPGNTTAARIRSAIGQKWDQASEDVRRAMVELLLGVKDRKLRARLALRRKEWALSDLEAERLAQVNLEPGRCRFSSAALRRLVPHLEAGCALTEAIAREFPEHEARFRTEADPPPETPVTNPLVRRALAETRRVVNAIVRTWGLPGRIHIELARELRKPLRRLRELLRRNEERQRQRKHAIKYLIEKGIQDPRPDQIEKFLLWVECKQICPYTGQSISDVDLFGPLPRFDVEHIIPWSRCLDDSFANKTLCEVDHNRNRKRNRMPTEVYSQDELSQILRRVRAFQGPYRFEKLRRFQMTEADLTTETGWLLRGDQLQATAHAARLAGRLLGRWYPAEERLSRIQITNGAVTSWLRVAWGLNQLLGVADEKNRSDHRHHLVDATVIALTTAATVKALTEAARRSARPRRFVDMPVPPGLVDSLRQQLETVIVSHRVDRRVQGPLHEETFYGRIQTPPTGESRTVVRKRIDALSATEAQRIVDPRVRELVAQVCNGRAPKEVFRDPSLIPEVPFGSRKVRIRHVRIWVSENPISLKDGDPRLVLPGSNHHLEIFDCREGPRPGWRCVVVSRWEAMRRLRAGKPVVRRFDEHGCPLVCSLARGETVRLNLPGGPVIAVVQKLSQDDYNFRLHTDGRRAADIPASERIRIRSSKALKKCLGCKLVVDVLGRCHVSRD

SEQ ID NO: 497 - protein, 1031 aa, unidentified; identical to SEQ ID NO: 496
  REGION 1..1031: note = Description of Unknown: uncultivated organism
  REGION 1..1031: note = MG4-79 effector

SEQ ID NO: 498 - protein, 1063 aa, unidentified
  REGION 1..1063: note = Description of Unknown: uncultivated organism with predicted taxonomy: Planctomycetes
  REGION 1..1063: note = MG4-80 effector
MLAGKTHPSGSRTAASEYLLGLDIGTTSIGWALIALKNEEPCGILRAGVRCFEAGVEGDIEEGKDSSRAKPRRIARLARRQIWRRAARARKVFRVLQELDLLPPGEARSPHARHALLHALDQKLLQKYDLARDHVKAHLLPYLLRAWAVKRRLERYELGRALYHLAQRRGYQTNRRAEADNDDEDNEKQRKIVQGSIETLQQDLAGRTLGQFLATLDPCQRRIRQRWTSRSMYQDELARIWQRQAAALGLTEEDRKQLYKAIFFQRPLRSARGLIGQCDLETGQRRAPLASLVAQEFRILQQVNHLRVRLPDHTERPLTDQERATLSQILMHQEELSCAEARKLLGLTKHGTKFTIELAREKSLRGNRTQARLVAVLGPRWDTFTPQERNELIWDVIHYEKAAALARRAQKRWGLDPQTAEKLANVRLETGYAAHSAAALEKLNERMRAGEAYATAKQAVYPHAHQPDRVVSRLPPVKEALGELRNPAVLRALTELRKVVNAILRRYGKPKAIHLELARDLRRSRKEREKISAEQAKREKARRDALQKMLREFPNYQPKRGYDPAIEKILLAEECDWECPFTGKKINMQTLLGKSPQFDVAHIYPRRYLDDSFANKTLCYHEENRHRMLDRLPMEAYAGNPQRWQEILARVKRFQGPYAAEKLRRFQTEKVPDDFVSRQLNDTRHSTKLAAQYLGLLYGGPYDAQGHRRLVAVSGSITAHLRRAWRLGVHPGPDQAGPGKNRDDHRHHALDAIVVALTSHATIQKLSTFAARSQPGQQRLITGDLQEPWPSFQRDVRQALMAIYVSFRAEHKLAGPLHAETNYSPPIPTPDGKFVHHVRKSLSKLTETEIRGDAIVDPVIRALVQKKFEELGGKQPEKVFADPANHPYLTARDGRRIPIHKVRIRARANPVRIADDPARQRWVAPSGNHHAVIVAQLDPQGRESRWEDHVVTRLEAHQRLRQAGPRPRNQLIQRDWGPGKRFKFSLMLNDMLELDAPGGGRQVCRVLGISKGDYELCLHYDARSQTEIARQKQRIRVNAEKLRLLRARKVVVTPLGDIQPAGG

SEQ ID NO: 499 - protein, 806 aa, unidentified
  REGION 1..806: note = Description of Unknown: uncultivated organism with predicted taxonomy: Rhodobacteraceae
  REGION 1..806: note = MG4-81 effector
MALVLGLDIGARSVGWALLEKQGDEWKRIVRAGVRVFEAGTEGDIESGRDKSRGATRRIKRLARRQIRRRRQRARALYRALAEAGLLPGISPQPGSPMSLLIQQQINALDAQFRARYAAETGVHQLPYLLRARALDHPLEPFELGRVIYHLGQRRGFRSNRKAESRKAGAGDESKANEDRGKVYEGIDSLRTAMQQAGARTLGEYFSRLNPAEKRIRGRYTHRSMYEQEFDAIWTAQKAHHPALTREFKDRISDILFRQRPLQDKEEFVGECSWLPGEKRAPVWSLEFQRYRIWATLNHLRITGNRSAPRPLSPEERALLFTSLDAAEKLTIAQAKKALGLRRTAGFTLEEGGENHLPGNKVGAKFHAILGNRWTSLPPEKQNELVTVVARASTDEELEEALQRDWGLDGEMSRRIVREIVLPSGYALLSLRAIREVMPFLQQGYSVQEARQKAGIPLERQVPVHPLLPPLADSGVAVFNPAVKRTLTELRKVVNAIIRHYGKPDEIHIETARELRKSREERAEDSKRMRGREREREAVRDQIHKEIGIPLDQISREDVLKGLLYRECEGMCPYCGQSLGGFASLFGGNSPVQIEHIIPFSRSLDNSFVNLTLAHVSDNAEKGNRTPWEAYGHDPGKWEQILQRVGAFKGSYAKAKLNRFKMDEQAVADLLQQFSSRHLNDTRAAAVAAARYLALLYGGETVDGKRKILKPTGQVTAYLREVWGLNGLIPSIHREAAGAEESDDGRTIRKSRDDHRHHAIDAVAVALCDQGTIQMLSEANRGAAAARRRRFAPVPPPWVGFKDELR

SEQ ID NO: 500 - protein, 1081 aa, unidentified
  REGION 1..1081: note = Description of Unknown: uncultivated organism
  REGION 1..1081: note = MG4-82 effector
MESKRLKQPFVLGIDLGVQSLGWAMLSLDDDDNPTGVVRLGVRCFDSGVGSEEEVAQGKEQSQNVERRGARLLRRQTWRRARRIAKVFHALQRFGLLPAEPAPTPEQRDALIKQLDADLRAEFLPAGDRAAFHLLPYRLRALGLDQPLPPFAFGRALLHIAQRRGFLSNRKAEGKENEKERSVVKESISFLQNELVRTGARTIGEYFAGIDPEEQRIRGRYTARQMYLDEFEKLWAVQAPHHQLDESAKKAIHQAVFFQRPLKSQSGLIGLCELEPGQRRAPAASLEAQRFRYLQKVNDLQIITPDGFILAPSEEQRRSLIDYLEHHAEITFDKLRTLWGLKLPRKSKKKSPAASGSDGDSDLASDAAQSDERPGYNFNLERGGEKKLKGNVTRARIEAALGCDLDELPAHVREPLVADVLEYENADALQRRLVQRYGLAEEQAAALAETHFEDGYASLSLAALRKFLPLMEQGMPFATARKELYKDSRQFQPHDILPPLFMVKAQLRNPAVSRGLNELRKVVNAVIRRYGKPKYIRIELARDLKQPRKVREERSKSMRKNEALRQQIIDDIRRFGIANPSETDILKVRLADECNWQCPYTGKAISMETLLGPHPQFDIEHIQPYSRSLDNSFTNKTLCDVHENRIAKRNLTPFEAYSGDEQRWHEIIARVRRFRGPASPAKLRKFLAKAIDSDFVERQLVDTRYMSRAAAEYVGLLYGGAVDSQGTRRVQVSPGGVTADLRRLWGLNRVLPRDPGDDERPGKKSRSDHRHHALDAAVIALTSPAMVQQLSRCAQDALLIGSRRFVALELPFPSLIDDLKKAIDEIVVSYRVKRKVRGRLHDQTYYSPPKPACDENGRTVEYRHVRKPLASISADRIEKIVDPVVRKTVQEHLARHGGDLKKAFGNPNNLPYLTAGDGRIIPIRRVRIRENISVLPIGKPPQLRFAAPGTNHHMEIVEVTDARGRVRWEGKLVNMFEAYQRRRQHLPVVCRDHGPNANFLFSLACGEYVEMEHVPGQRKVYRVTTISGERLEFRLHCDARPITVLKKLPKARINRSASTLLEAKARKVFVDPLGNVYPAGD

SEQ ID NO: 501 - protein, 1045 aa, unidentified
  REGION 1..1045: note = Description of Unknown: uncultivated organism
  REGION 1..1045: note = MG4-83 effector
MKTEYQKSGSVLGLDIGPTSVGWALIEENEQQPCRLIDMGVRIFEAGVEGDIESGRDESRAAKRRMARLHRRQLERASRRLKVLAEELQRRGLLPPGDVSTPDARKRFFDELDKLLAQGLDNPALLPFILRARALHERLDPHETGRALYHLAHKRGFLSNRKSQPKEDEELNTIAQAVGQLRQAMQETGAQTPGEHFAALLRNNGRVRGHHTFRNMNAQEFDLIWDTQRAFHPDVLSDEARKSIGKKIFFQRPLKSNKGLTGRCELEGARRAPLALLVSQRFRMLQKVNDLRLVSPDGLQRELTASERAELLRHLELQQNMKFTAIRKKLKLQGKFNFEIGGEESLPGNRTAARMASVFGQQRWQSMTPGEQDLAVQHVRSIRKPEALERAAADYWKLDPNAARAFAKISLEEGHVMLSQKAMSKLLPLMERGMPFATARKELYGAAPPPRAYDKLPPVHSPEMPAVTNPAVRRALTEMRKVVNAVTAKYGKPGLIRIELARDMKRPRKARQQISKRIRANKNKRDAARQQLLKEASGALGSAWEPKRSDIEKWLLRDECGGICPYTGKPISFHSLFVEPEFDIEHIIPFSRSLDNSFLNKTLCCATENRIKSKRTPWEAYGGTARWDEIIGRVRKFTGDANVAKLQRFQIRDADKEIDGFAARELNDTRYISRLAVQYAGLLYGAGADGVDPSGRRRVQAARGQITAHLRDVYELNSLLGDGGEKYRGDHRHHAVDALCVALTTPRAVKQLSDAAAAGEDRRRAWYDTRLITDPWPGFLDDARNAVNAIVVSHCPSRKVNSAMHDETVYSKPHADPMGRACVHVRKPLAALTDKMVDNIVDDRVREKVRQALNGRAPKDAFKDSASLPFFETRDHRRIPIKTARIRVYQSVNSLGRNAAARNVVPGSNHHVEIFAVEQEKGGVKWEGRMVTTIEAMARLHPKSRIPVVNRAHENGGKFLFSLSPGDTVRVTLDGEQKLLRLRTISKNNQGRLRLDAVCIREARKKAEIMQDKKWIIFPTLHALADMQFQKVTVTPLGEVFPCND

SEQ ID NO: 502 - protein, 1077 aa, unidentified
  REGION 1..1077: note = Description of Unknown: uncultivated organism
  REGION 1..1077: note = MG4-84 effector
MADPGLLKYVLGLDIGANSIGWALLTARGDERLTPTGIVQTGVRIFEAGVEGDLERGREESRGIQRRLARQARRRLDRTARRLAKVFGLLQDAGLLPRADTPASLPGVGVPREHMTARERRDERLRASAERDALLAQLDRELVAQCQDGLRAAGASQGEIWLVPHRLPYLLRARALDNKLPAHQLGRALYHLAQRRGFLSNRKAAPKKDEDQGVVDQGIQKIVAGMRETGARTLGEYFSRLDPTGERIRGRWTSRAMYQDEFDAIWAAQAPHHPEILTADLRKRLKRAIFYQRPLKVQKELIGECEFEKGRKRAPMALLVAQRFRLLQQVNNTRILTPDAVERGLTAEEAGKLIDALDTLGDITFKKAKRLLGLSQQHVFKFESGGEDKFIGNRTATKLIRVFGLDRWKTLKPSDRDRIVDDLLTIQKPETLARRAQRVWGLSPEAARELARTSLEDTHCRLSRLAIKNLLPLMETGMPYMTAARQVYGEKPAEPPRDSLPAVSEALPALRNPAVHRALTELRKVVNAIVRTYGKPAAIRIELARDLRKSPKQREQTWKKNRDNEALRKDAAEKLFREMGIQNPKRSDIEKMLLLQECGCMCPYTGKHISMRDLFGDAPQFDVEHIVPFSRSLDDSFLNKTLCEVAENRNVKGNRTPWEAYGHDLVRWNQILQRVSHFQGSAQREKLRRFQLQTIESPEQFASSQLNDTRYAAVEAMDFLKLLYGEEAQRKVIVQAARGGTTRFLREEFGLNQILGDGGEKSRDDHRHHAVDAICVALTDPATVKMLSDAAARALSEGRRRFASVPFPWGRFLDDVRASIQGINVSFRVSRKVGGALHEATFYSPPKKDPKTGQEHVHVRKPVTALSEQRVGNIVDPVVRAAVQAKLKEVGGDVRKLADNPPTLRAKDGREIPIRKVRLRESITPFGIGQGGARQVVTDTNHHVEIVQVPGKAGQPKWEGCVVSQYEALRRLRAKEPVVRRDHGNGRTFVFSLALGETVQMKGDDGQLALFKVAGVSQTGRGQIMLEFRRNADARPATVLRKIKGGRVFRTPDSLRSAMGTKVLLTPLGELRRVGRD

SEQ ID NO: 503 - protein, 1031 aa, unidentified; identical to SEQ ID NO: 496
  REGION 1..1031: note = Description of Unknown: uncultivated organism
  REGION 1..1031: note = MG4-85 effector

SEQ ID NO: 504 - protein, 1031 aa, unidentified; identical to SEQ ID NO: 496
  REGION 1..1031: note = Description of Unknown: uncultivated organism
  REGION 1..1031: note = MG4-86 effector

SEQ ID NO: 505 - protein, 1045 aa, unidentified
  REGION 1..1045: note = Description of Unknown: uncultivated organism
  REGION 1..1045: note = MG4-87 effector
MSSGYVMGIDIGVASIGWSVVEPGSEERPGRIVRLGTHLFEPGVDGTQTAIEQGKDEPKGAARRGARQVRRQLWRRAHRKRKLLFALMKHGIMPHATVPDGAAIDAYIKALDSRLRAAWCRAGDHQAHQIMPYLIRSAGVQRKITLEEFGRALYHLAQRRGFLSNRKAKKKKDEDTSQVKAEINELQSLIDRHVPATLGAYLASLNPDEQRLRDWWTARSMYLHEFEALWTEQSRHHRELTDEAKAAIHRAIFHQRPLKSQAHLIGRCSLEPGRKRAPLAHREFQYYRVLQGVNHLTIAPPGEAARKLDAAQRKVLTDALLAQGDLTIAKVRTLLKLPKGTDIAGERGEEEKKIVGHRTDAKLRDAIGPRFDAMSDRERDQLVLDLRSFRETEPLIGRLKSHWGLSDEQARKVADADLEEGYASYSLAAIRRLIPHLERGLSVSEARKAEYPESFRATQVHDLLPPVTDVMGDLRNPSVMRALTEARKVVNAIIRRYGKPEKIHVELARDLKHGRDRRAAITKQIRQREKQHADAKHRILAEIKGYEPTRIDREKVLLADECDWRCPYTGKKFGMKELIGEHPQVDVEHIWPFSRSFDNSFMNKTLCWHDENRRVKRGRTPYEAYSASPERYQEILGRVLAFKSDRRTVSEKFRRFTAEAIDEDFTNRHLSDTRYIARAVSEYLGVLYGGRTDADGKQRIVACSGGLTSWLRREWGLDALLSPTGDDAEAEKNRIDHRHHAVDALVVALTTPRTQAMLQAAAARQEQEGRFRLFGRIEPLWSAFPREAKAAVEAIVVSHRQQRAVSGKLHAESNYSKPIHGGHRIRKELHKLTRNEVSRIVDPRCRALVEAQLEKLGVDDPAKAFSKRENCPVIKGRDGVERRLRRVRLFSTASPTIVGQNARIRYVEPDSNHHCIVWAKRTKEGEEGPWEFEPVRLLDAYDRVCRGLPVVNRDGGSDRIFKFSVSINEFIEMDDPDSGGRQLYRIKKTSLREIGVQLHHDARTVDEVRKAGDLNKYRISPSALKSRNARKVFVNHLGEVSGAGG

SEQ ID NO: 506 - protein, 834 aa, unidentified
  REGION 1..834: note = Description of Unknown: uncultivated organism with predicted taxonomy: Planctomycetes bacterium
  REGION 1..834: note = MG4-88 effector
PREERIRQRWTSRPMYLNEFARIWSVQADAHGLTEEDRQRVFKAIFFQRPLKSQKGLIGRCELEPKHRRAALAMLVAQEFRILQKVIDLRVRFPDGTTRPLTADERQTLIDALQQVGEMTSASARKLLGLNKKGITFSIEEWGEKNLPGNRTNAKLAAIFGRRWLQFTPEERDQIVLEVLHYQKPAALVRRAMKHWGLDRQAAEKLSETRLEAGYARHSLAALTKLNASMRTGMPYMTAVKEAYPARFQAGKPMKLLPPVVKALRDLRNPAVCRALSELRKVVNAIVRLYGKPEKIRLELARDLRRSRKDRKRIAEQQREQETRRRKALERMMREFPNYQAKAGFDPAIEKILLAEECNWECPFTGRKIEMATLLGKNAQFDVAHLFPRRYLDDSFLNKTLCYHDENRHRMHDLLPKQAYGGDPQRWAEIIARVKAFKGSAATLKLERFLAAEVPEDFVESQLNDTRHNSKVAAEYLGLLYGGLWDASGKRRIEAITGGITALLRNAWRLRKDRADHRHHALDAIVLALVDPAQVKSLQESAERASEGSARFRLGELDEPWPGFRDAVRSALEEINVSIRADRKVGGALHAATNYSKPVRAANGSAVHHVRKPLHKLSVTEIEGDAIVDPVVRAAVQQRFADLGGKDPQKSFSDKANHPTLTAKDGRSIPIHKVRVRVREKAKMIAKGTVRQRFVTAGANSNHHCVIVAVLDAAGKETKWEEHIVDRLEANKRRASAPPGGMIQRDWGPARRFKFSLMPNDMLEMADESGTRQLYRVANISKGDYELRLHTDARESKELRSLKQRIRVHAEDLRRGRARKVTVTPLGEIQPAGD

SEQ ID NO: 507 - protein, 795 aa, unidentified
  REGION 1..795: note = Description of Unknown: uncultivated organism with predicted taxonomy: Planctomicrobium piriforme
  REGION 1..795: note = MG4-89 effector
MGFLMDASVSYGLGLDQGVASIGWAIVRLDAKGKAIGVERLGVHLFEAGTEGDIEGGRDESRAGPRRMARQARKQYRRRVLRKKRLLRWLQELGLMPAGDISTAEGRDKLLKDLDADLRTRWEADASIDHRLRQLLPYRLRAAGLTRRLEPFELGRALYHLAQRRGYLSNRKAQGASADPCAAGDATKPKKAGKGKKGTPAPPAEHAPAQPGASASPGEDQAGKGSGEAGGKEDPGVVRAAIVELERQMRGAGCTTLAEYFSKLDPTGTLGDRLRGRWTAREMFLEEFGRIMAEQAKHHPALTNEVQRKLHRAIFFQRPLQSMSHLIGTCDLVKGAKRCPLGHRLAQRFRLLQRVNDLDIRLPDFTRRPLTTEERGRLLAALDREGDIAFSTLKRKDWFGLPKGSTFNLEEGGEKKLVGNRTEAKCRCIFGDERWDAMSEADRDAVVHDLIVFEKPSALARRGESVWKLSPQRARALGDCVLEPGFAAHSKEALAVLVPCMEEGTPYAKAVQDKFKKVDATAEVRDRLPPVEKALGNLRNPTVTRALTELRKLVNAVVRKYGKPAWIRLELARDLKRARKQRERLSKEMREQEARRDSARAAIVRKAGLAGPSRSDIERYILAEECGFICPYTGKPMDRERLTDLVGRTPQFDVEHIWPLSRSLDDSYLNKTLCHVEENKAKGNRTPFEAYSQSPERWEQILDRVKRFGGTAARIKLERFTAKEIPDGFAERHLAETRKIGAASAGFLGLLYGGEIDAAHKRRVFVTTGGLTAHLRREWHLNGILGTEGEKARDD

SEQ ID NO: 508 - protein, 1097 aa, unidentified
  REGION 1..1097: note = Description of Unknown: uncultivated organism
  REGION 1..1097: note = MG4-90 effector
MSTPSNVPYVLGLDLGVASIGWAVLDTDAKGRPTSIRAAGSHLFEAGVGGGSQSTPEMAMARGKEESKAAPRREARAMRRQTMRRARRKKKLLGALIRHGLLPEGDIRTPAAIDAYVKALDAALRATWCPPGSSHVEYQNMAYRLRAEAAQRPLDAHAVGRALYHLAQRRGFESNRKTPKRDDEDTSDFQNKLDDLGDAIRSHTTQTLGAYLASLDPDEKRLRGRWTHRSMYEQEFETIWDAQAGALGLDGGAKQDIHHAIFYQRPLKDQSHLVGRCSLVPGKKRAPIAMRIAQDFRVLERVNHLRIVHDDHSERPLSKDERDNLLAALRREEKLTMHQAKKAAGLPTKHVKFSIEAGGETKLVGHRTDAKLCKIFGDRWDEMSEQEKDTVVEDVRCVRLPDTLRRIGEVRWGLSREKAQELADVQLEEGHSAHCLRALRKLVARMDADGLAYSTARKDEYPASFQSVEPMDLLPPVDAWEKDLRNPAVSRALTELRKLVNAIIDRHGKPVRIHLELARDLKQSRKKRKTASDRMRTREKEREKAAQRIITQPGLGIQHPKRWQIEKVLLAEECNWRCPFTDRGFCMADLLGSTPQVDVEHIWPYSRSMDDSFLNKTLCYHEENRNRKRGHTPMEAYGPTPEQYEAILDRVRRFKGDHFAVREKLRRFTDALDEDFPLRHLQDTRYITTLARDFVSLLYGKDASAIVTPSGPLTAWLRRGWHLNSVLGFTDEKEREDHRHHAVDAIVIALATRSNIKRLSDAAERVEREGREKAFGTVDPPWDGFEHEVRSIIDGVVVSHRQSQRVRGPLHKDTIYSPKIDGKHRVRKELHKLTAKEVQSGKIVDTRALAAIQAKLAELAKTDPALADPAKAFKAPENAPLVPGPNGSKVRLRRVRIDTGDKPTRFGGAKGKGSARYAKNELNHHVAFYDQPLPGGGVERTAEVVPLHEAMRRHASGEPIVDRTPRGKKGEYAFAFSLAKNGYVWYRQKNSDEPVLCMVDGIADGDIELKRHTDGRGRPQRGKDRIRLRSKSIREGLFEKAHVTYLGEVRRAGGWARARLRRSARAPFRSPRAAGHPRRRRTRGHHAIGRGRHRRGR

SEQ ID NO: 509 - protein, 930 aa, unidentified
  REGION 1..930: note = Description of Unknown: uncultivated organism with predicted taxonomy: Deltaproteobacteria bacterium
  REGION 1..930: note = MG4-91 effector
VSSQPRRQGYILGLDLGIASVGWACLEHDGQGKPTGILAAGTHVFEAAVENGQAADQTPAAKRRAVRSQRRLLWRRRQRRRKTARLLQQAGLLPVGPMDTSEELDKLIKDLDADLAKRWSGRVPPSRRDRLVYHIRAAAAQGPVEPDELGRAIYHLAQRRGFKSNRRTDRKADDKEIGKVKEGINELRRLMHEAGARTLGAYFATVDPHERRIRNRYTHRAMYEEEFEAIWSAQQPHHAVLTPELHDALHDALFFQRPIRKQPGLVGMCSLVQGKRRAPKALRAYQRFRMLQGVNHLRVDEPGRSARPLTAEERKKVIEALEREGDLTFAKLRQKKLLALPKEVEFDLAQAQFDRGEDKKGDRKIIGHRTDAKLRKVLGDRFDALTEEEKDQLVHELRSIPTEEGLIRRATRHWHFTMEQAEQLADLQLEDGYAALSLTAINRLLPHLEQGLSYAEARKREFPESFKSEDALDALPPVDKAIDNLNNPSVRRAMRELRMVVNALIREHGKPGRIHIELARELKHGRSRREQTERRMRERAKQREAAAETIIRETTARGFRIDKPRRDDIEKYLLAEECGWICPYTGRSIGWESLFGPHPEFDIEHIWPFSRSLDNRFLNKRLCHAATNRSVKKNRTPYEAFGQDTEQWEQILDRVRRFKGDPYARREKLRRFEAQEIDEGFLERHLRETSYFARLAQEYVGLLYGGIVDAEGTRRVIASSGGATHWLRRELGLDSILSDDEEKNRSDHRHHAVDAITTALLDSRTIQLLARAAQEAEERGSRRLFLSLQEEPWQGCRRDVEEAVARINVSHRQRRRVRGPLHEETNLSELINGGHRVRKALASLSPAEIKSDRIVDPRARELIRRALEEHAGGEITKKTITQVFSDENNLPLVPGPGGRLVRIRHVRVEVRDKPTLFGRDASRRWANTGS

SEQ ID NO: 510 - protein, 1062 aa, unidentified
  REGION 1..1062: note = Description of Unknown: uncultivated organism with predicted taxonomy: Alphaproteobacteria
  REGION 1..1062: note = MG4-92 effector
MTNGNLGKERFILGLDLGTNSIGWAMVGLDDNDKPCSVIRTGVHVFPAGTQGTDEDFAQGRDESRAQRRRMKRLLRRQIYRRKARARDAYKHLAEYGLLPKLEGYKGQNRDKAIKRLDVELLDRYLTAHPELIDEYELRDRVTAQTLVYRLRKEALDRQLQPDELGRILYHLSQRRGFKSNRKAPMKEDEKPGEVKAAIESLADEIKSAGARTLGEYFAGLDPEQRAIRRRKTDRSMYEQEFELIKKAQAPHHQRLDEKFWGRMRRILFYQRPLKSTKGLVGRCPLEPPRRRAPMASPAYQEFRLLQKLNDLCWIEVETGDSFALVDHPEHYETLYDALHKTDYLKFTEIAKLLKLKRNGKERTRFNLEAGGEKGLYGNRYASLMYQLFGENWQKEPSSCLSGIWQDLRSIQNETLLKRRAEEKWGLDASQIEILLQADIEEGYAAYSAKALQKLNQEMAQKIPFATALKSCYPEQAAEECVDLLPPYAEVGSDLRNPVVNRTLTELRKVVNAIVRRYGKPEKIRLEIVRDIKLGRKRRAEISKKMRTRQSEREDAKEQLRQWGVPVTHDAIERELLRRECNGVCPYTGREISPSQLFGESPQFDIEHIIPYSRSLDNSFANKTLCWHATNRNRKRGKTPYEVFSQDGDWEVILRRVAAFKGGYRDEKLRRFKLADLSEFDDFERRQLTDTAYAARLARDYLGVLYGAESLRRIQVLPGRLTSLLRGAWQLNRILGDPERNTKSRADHRHHAIDALVAAVTDRSMVQKICTRAKQLEDLKQVRLLPEIDPPWAGLLNDTREALARTIPSSRVDRKANGKLHEETIYGRILHKGEERTVLRRPLEALSSKEIDNIVDECIKDRVVQALEASGEKNPNKAFANPANLPRMVVRDRNGRSREVFIRRVRVFRSDNPVPVGRDRRLVKTGGNHHMELYEVRKKGERRMVGVIVTTLVAAQRKAARRSVYNCRLIPNGSYMFSIHKGDVLRLEHPRKGEVLVTIRKISRLPGGNYVEGTEIKDARLDKDIKPKSIENGWFKLSDKQLGEMQARVVRITPLGEELDRV

SEQ ID NO: 511 - protein, 1062 aa, unidentified
  REGION 1..1062: note = Description of Unknown: uncultivated organism with predicted taxonomy: Proteobacteria
  REGION 1..1062: note = MG4-93 effector
MTNGNLGKERFILGLDLGTNSIGWAMVGLDDNDKPCSVIRTGVHVFPAGTQGTDEDFAQGRDESRAQRRRMKRLLRRQIYRRKARARDAYKHLAEYGLLPKLEGYKGQNRDKAIKRLDVELLDRYLTAHPELIDEYELRDRVTAQTLVYRLRKEALDRPLQPDELGRILYHLSQRRGFKSNRKAPMKEDEKPGEVKAAIESLADEIKSAGARTLGEYFAGLDPEQRAIRRRKTDRSMYEQEFELIKKAQAPHHQRLDEKFWGRMRRILFYQRPLKSTKGLVGRCPLEPPRRRAPMASPAYQEFRLLQKLNDLCWIEVETGDSFALVDHPELYETLYDALHKTDYLKFTEIAKLLKLKRNGKERTRFNLEAGGEKGLYGNRYASLMYQLFGENWQKEPSSCLSGIWQDLRSIQNETLLKRRAEEKWGLDASQIEILLQTDIEEGYAAYSAKALQKLNQEMAQKIPFATALKSCYPEQAAEECVDLLPPYAEVGSDLRNPVVNRTLTELRKVVNAIVRRYGKPEKIRLEIVRDIKLGRKRRAEISKKMRTRQSEREDAKEQLRQWGVPVTRDAIERELLRRECNGVCPYTGREISPSHLFGESPQFDIEHIIPYSRSLDNSFANKTLCWHATNRNRKRGKTPYEVFSQDGDWEVILRRVAAFKGGYRDEKLRRFKLADLSEFDDFERRQLTDTAYAARLARDYLGVLYGAESLRRIQVLPGRLTSLLRGAWQLNRILGDPERNTKSRADHRHHAIDALVAAVTDRSMVQKICTRAKQLEELKQARLLPEIDPPWAGLLNDTREALARTIPSSRADRKANGQLHEETIYGRILFKGEEKTVLRRPLEALSSKEIDNIVDECIKDRVVQALEASGEKNPNKAFANPANLPRMVVRDRNGRSREVFIRRVRVFRSDNPVPVGRDRRLVKTGGNHHMELYEVRKKGERRMVGVIVTTLVAAQRKAARRSVYNCRLIPNGSYMFSIHKGDVLRLEHPRKGEVLVTIRKISRLPGGNYVEGTEIKDARLDKDIKPKSIENGWFKLSDKQLGEMQARVVRITPLGEELDRV

SEQ ID NO: 512 - protein, 1039 aa, unidentified
  REGION 1..1039: note = Description of Unknown: uncultivated organism with predicted taxonomy: Planctomycetales bacterium 4484_113
  REGION 1..1039: note = MG4-94 effector
MEDSPALLGIDIGPNSIGWALLDSEGKAIDDMGARVFEAGLADIEQDGKGKSRNVERRDARCIRRRLERTGRRLSKLARILQDAGLLPPGDVLSDEKRHQLVKRLDAQMDSPYSLRAKALDEKLKPYELGRALYHLAQRRGFLSNRKSAPKDEKEEGVVKEGIGQLRRDIDEAGARTLGEYFAKLDPHQQRIRGRYTSRKMYEDEFKMIWQEQRQYYPDLLTDDLKKAIHSAIFYQRPLKSAKHLIGGCQLENGKRRAPWALLIAQRYRYLSVLNNLTIRLPDGSERELTADERSKLIDYLEKNAELKFTTARGKKLLALPRGTKFNLEEGGEKRMLGNATAAKLRKIFGDRWDSFSEEEQDQIVEDIRSIVKDEALVKRGITKWGLDEESARKLTEVQLPDGYCRFSRKALEKLVPLLEQGKRLQTAIRELYPEKWARGSQPLDSLPPLSQCEDPALSELRNPIVSRALTEIRRVVNGVIAKHGKPDVIRVELARDVAQPAKRRQQAWKQNRQQERARKDAAERITKEAGIEKPSRDDILKVLLADECNWECPYTGRRINITELFGEHPQFDIEHIIPFDRCLDDSYVNKTLCEANENRNIKKGKTPYEAYYGTDKWENIISRVSRFNGRDRIKQAKLRRFKMHGEELEEFLDNFTNRQLNDTRYGSKLAKKYLGLLYGGVDNDGIDASRKRRVQATIGAVTAKLRDAMGLNAVLGKGAKSRDDHRHHAVDAVVIALTSPGTIKGISDASQHPALTDVRKIKLAEPWQGFLAEVRQAVDRIVVSHRVDRRVRGPLHEETFYGKPRKDESGKSYVHTRKPLSGISAKDVDSIVDPVIRRIVQQKLSELGESDPKKAFKDAANLPLDPQGRVVRRVRLKRNLEVFPIAKEEHRRRYVVLGNNHHMEIVGVGEPDEHGEHPKWEAHVVSMFEAYQRKKNKEPIVKRDWSDETEKDGKPRKFLFSLAGGDTIELQKEEGKRELFIVRTVPQMKQVRFVPINDARRLKDIGKVGFTAYPETLRKWHCRKVAVNPIGEVHYQND

SEQ ID NO: 513 - protein, 1072 aa, unidentified
  REGION 1..1072: note = Description of Unknown: uncultivated organism with predicted taxonomy: Planctomycetes bacterium
  REGION 1..1072: note = MG4-95 effector
MTNQEAEEKYILGLDLGSNSVGWTLLAARQGKPDTPLRPVGLVAAGTRVFDAGVEGDIEKGREKSRAVQRREARLARRGTDRRARRMHLVYSILERAGLLPSLDPPSNSSEGNSRGIREQESQLRHETLVTLDRELAEKWREKLRSEGADKDKLRQINHTIPYILRARALDEKLEPYEVGRAIYHLAQRRGFLSNRKSPLKKDEDLGKVKGDINKLQEKIEETGSRTLGEYFSKLDPEEERIRQRWTGRKMYEEEFGKIWAVQQKHHPNILTEDLKKQLIGSKRHPAIFYQRPLKSQKHLIGKCELEKDRRRAPMAILDFQRFRMIQMLNDTRVITPMGELREMTAEEREKLLAELDIKGDLTFAKAKKVLGLSREHHFNWEGGIEKRIIGNRTAAKLVEIFGIERWKGFSEEERNRIIEDVLSIQKEDTLFRRGINAWGLDEESAKKFSELQLKPDYARFSRRALKKLLPLMQQGIPYKTAEKQVYGDRLAADAHASLPAVADVLPELRNPIVNRTLNELRKVVNAVIRKYGKPALIRIELARDLRNSAKQRKNIMKKIEDNRKAREKAAEGILKEMPHFGEPKRADREKWLLADECNWECPYTGRQISVSALFGENPQFDVEHIIPFSRSLDDSFLNKTICEIAENRNVKRNYTPYEAYGRDEEKWNQILHRVKNFRGRAGNLKLERFQVKEAKFEDFASQQLNDTRYASKLAKKYLGLLYGKDAAKHVQAGRGGVTKFIRDELCLNAILGDGGDEKKRTDHRHHAVDAIAIALTSPGVVKMLSDAARYNEEKGLRRRFGNIKSPWPGFFEDVRKAVENIVASHRVSRRVNGPLHEETNYSPIKKDENGRDCVHIRKPVESLDKKNLKDIVDPVVRERVREWMEQANEHRPYPVHKTKDGREIPIKKVRIRKYDKPMTIGRDHRSRNVLSGSNHHLDIFEVTDKKGRPKWEGRLVSAFEAMQLKRQGKSVYSRERKEGGKFLFSLSQGEIIELDEKDGNRGLYRVRILSQLNQRGIKYPRVSYVRINDARLKADILKAKEWNTKLLEPLRKLNCRKVTITPLGEVRRAND

SEQ ID NO: 514 - protein, 835 aa, unidentified
  REGION 1..835: note = Description of Unknown: uncultivated organism with predicted taxonomy: Planctomycetales bacterium 4484_113
  REGION 1..835: note = MG4-96 effector
MEDSPALLGIDIGPNSIGWALLDSEGKAIDDMGARVFEAGLADIEQDGKGKSRNVERRDARCIRRRLERTGRRLSKLARILQDAGLLPPGDVLSDEKRHQLVKRLDAQMDSPYSLRAKALDEKLKPYELGRALYHLAQRRGFLSNRKSAPKDEKEEGVVKEGIGQLRRDIDEAGARTLGEYFAKLDPHQQRIRGRYTSRKMYEDEFKMIWQEQRQYYPDLLTDDLKKAIHSAIFYQRPLKSAKHLIGGCQLENGKRRAPWALLIAQRYRYLSVLNNLTIRLPDGSERELTADERSKLIDYLEKNAELKFTTARGKKLLALPRGTKFNLEEGGEKRMLGNATAAKLRKIFGDRWDSFSEEEQDQIVEDIRSIVKDEALVKRGITKWGLDEESARKLTEVQLPDGYCRFSRKALEKLVPLLEQGKRLQTAIRELYPEKWARGSQPLDSLPPLSQCEDPALSELRNPIVSRALTEIRRVVNGVIAKHGKPDVIRVELARDVAQPAKRRQQAWKQNRQQERARKDAAERITKEAGIEKPSRDDILKVLLADECNWECPYTGRRINITELFGEHPQFDIEHIIPFDRCLDDSYVNKTLCEANENRNIKKGKTPYEAYYGTDKWENIISRVSRFNGRDRIKQAKLRRFKMHGEELEEFLDNFTNRQLNDTRYGSKLAKKYLGLLYGGVDNDGIDASRKRRVQATIGAVTAKLRDAMGLNAVLGKGAKSRDDHRHHAVDAVVIALTSPGTIKGISDASQHPALTDVRKIKLAEPWQGFLAEVRQAVDRIVVSHRVDRRVRGPLHEETFYGKPRKDESGKSYVHTRKPLSGISAKDVDSIVDP

SEQ ID NO: 515 - protein, 889 aa, unidentified
  REGION 1..889: note = Description of Unknown: uncultivated organism with predicted taxonomy: Planctomycetes bacterium
  REGION 1..889: note = MG4-97 effector
MSTTRVLGLDIGTSSVGWALIEGRDPDHVRIIAAGVRVFPMGVDEATLESRNIQRRQARLRRRQIERRARRKTKARHILQSHGFLPPGDPSHADPAWASVLALDPYKVRAEGLHRRLQPYEFGRAIYHICQRRGFKSNRKRPLTKKEKGAVHEDIAGLKREMDAAHAETLGEYLNRLDPRQQRRRGRHTNREWYREEFRQLCERQRDFGLPLSPALQKELEETIFSQRKVWWKRGSIGRCSLEPGKQRAARALPVCQRFRMLQRVNDLQIILPDGTTRQLSDEEREKLLARLDWEENLSFKSIRKLLRLPAEARFNLEEGGETKLPGNSTAYRISRAIGKREWERCSPESKAQILEALMSIEDEDLFKRVALRKQWGLNEEQAERLSEVALEEGRLDLSTKAIRKLLPLMEKQRLSYAEAAWRVYGDRGPAQAYESVPPVEDLRNPTVQRSLAETRRIVNAVIRRYGKPDRIHIELARDLKAPKQIRLRRSRQMRRNEAERKSARKELIEQGLPEPTGRDIEKYRLWKECGKRCPYTGKMISFSDLFGPHPKFDIEHIIPWHRCLLDSFANKTLCEVQENRSRKGNRTPYEAYSGDPDRYEEIKQRVREFTGPFGKAKLRRFRCEDIQKLPESLPLYGGEQLNATAYAARYAARHLALLYPQEERRKRVQVSAGRTTAYLRRAWNLNRLIGLADEKNRADYRHHAVDAVVIALTTPKLTGELSKAAARSVRPGTFQGLTPPPGLTRQLEEILDQMVVSHRVDRRVNGQLHEETFYGRIDNDSVTVVRKPLADLTDRDVAHIVDKKVQRLVREKLSGGAPPSKVFANPANLPAFVSPSGRTMRIRHVRVRVDASPVRIGSGAKTRLVLTGGNHHLEVFRVVEDGREKWRG

SEQ ID NO: 516 - protein, 1034 aa, unidentified
  REGION 1..1034: note = Description of Unknown: uncultivated organism
  REGION 1..1034: note = MG4-98 effector
METAENNSVLLGLDIGPNSIGWSLLQPDNGTSPDVNLISGVHIFEGGLDDLETDGKGKSRNLDRRNARAVRRLLWRRAHRLQKLAVSLQGAGLLPDNSDLENPQQRNALFDKLDKEFKSPYQLRARSLDSKLEPYELGRALYHLGQRRGFLSNRKTPVKDEKELGVVKGGINDLSKKISEAGARTLGEYFANKVIPEGGRVRGHYTSRQMYEDEFELIWNKQKEYYPDLLNDEFKEKIHHHIFYQRPLKSQKHLIGECSLERGRRRAPWALLIAQRFRYLQRLNDLSYFDRDEMRERKIEGDQRKILIELFETKEKVSFGAIRKALKLRGIKFNLELGGEKNLPGNKTTARIIKAIGKTKWFSLSEREKEALVVDLRCIRKEETLKRRGIKAWGLDEEAAEKFGTIQLEDGYCNYSRQALQKLLPLLEKGVPLQTAIKELYPEQFENTGKPMDSLPPILESGLPELRNPVVMRSLTEIRKLVNAIIKRYGKPDIIRIELARELKQSPKQRQETTKRMRRNEKERNDIREQIRNETGIENPTYTDILKVRLAKECNWECPYTGTHISMQQLIGPHPQFDIEHIIPHYRSLDNSFTNLTLCEARENREVKRNRTPYEAYHDTAKWEDIIRRVERFDGPMRNAKLRRFLLQGEELEKFLDGFTNRQLNDTAWASKWAKKYLGLLYGDIKSKGIDSAGKLRVQAVSGRLTSELRRIWGLNNILGDGNTKSRDDHRHHAIDAIVIALSNPAVVKQLAEASKRAVNIGDKLLKDFPQPWEGFHNDVKRVIDGIIASHRVSKRVRGALHQGSNYGKPRKDKNGNQYVHIRKPIDGISKKEVENIVHPTTRKLVMDKLAELGESDPKKAFKEKDNHPRLMTKSGEFPIHRVTVRMNLSATFPVGKNYRTRYVISDRNHHIEIVEKPDGKWDGYVVSMFEAYQRKKNGEPIVKREFENDEKFLFSLANGEIIELDGPDNKSRALYVIRTIPQSKQLYFVPINDARKSGDIGRTGLTAIPNALKSRNCKKMLVTKLGEVRFAND

SEQ ID NO: 517 - protein, 1050 aa, unidentified
  REGION 1..1050: note = Description of Unknown: uncultivated organism with predicted taxonomy: Planctomycetes bacterium
  REGION 1..1050: note = MG4-99 effector
WTLLAARQGKPDTPLRPVGLVAAGTRVFDAGVEGDIEKGREKSRAVQRREARLARRGTDRRARRMHLVYSILERAGLLPSLDPPSNSSEGNSRGIREQESQLRHETLVTLDRELAEKWREKLRSEGADKDKLRQINHTIPYILRARALDEKLEPYEVGRAIYHLAQRRGFLSNRKSPLKKDEDLGKVKGDINKLQEKIEETGSRTLGEYFSKLDPEEERIRQRWTGRKMYEEEFGKIWAVQQKHHPNILTEDLKKQLIGSKRHPAIFYQRPLKSQKHLIGKCELEKDRRRAPMAILDFQRFRMIQMLNDTRVITPMGELREMTAEEREKLLAELDIKGDLTFAKAKKVLGLSREHHFNWEGGIEKRIIGNRTAAKLVEIFGIERWKGFSEEERNRIIEDVLSIQKEDTLFRRGINAWGLDEESAKKFSELQLKPDYARFSRRALKKLLPLMQQGIPYKTAEKQVYGDRLAADAHASLPAVADVLPELRNPIVNRTLNELRKVVNAVIRKYGKPALIRIELARDLRNSAKQRKNIMKKIEDNRKAREKAAEGILKEMPHFGEPKRADREKWLLADECNWECPYTGRQISVSALFGENPQFDVEHIIPFSRSLDDSFLNKTICEIAENRNVKRNYTPYEAYGRDEEKWNQILHRVKNFRGRAGNLKLERFQVKEAKFEDFASQQLNDTRYASKLAKKYLGLLYGKDAAKHVQAGRGGVTKFIRDELCLNAILGDGGDEKKRTDHRHHAVDAIAIALTSPGVVKMLSDAARYNEEKGLRRRFGNIKSPWPGFFEDVRKAVENIVASHRVSRRVNGPLHEETNYSPIKKDENGRDCVHIRKPVESLDKKNLKDIVDPVVRERVREWMEQANEHRPYPVHKTKDGREIPIKKVRIRKYDKPMTIGRDHRSRNVLSGSNHHLDIFEVTDKKGRPKWEGRLVSAFEAMQLKRQGKSVYSRERKEGGKFLFSLSQGEIIELDEKDGNRGLYRVRILSQLNQRGIKYPRVSYVRINDARLKADILKAKEWNTKLLEPLRKLNCRKVTITPLGEVRRAND

SEQ ID NO: 518 - protein, 1050 aa, unidentified; identical to SEQ ID NO: 517
  REGION 1..1050: note = Description of Unknown: uncultivated organism with predicted taxonomy: Planctomycetes bacterium
  REGION 1..1050: note = MG4-100 effector

SEQ ID NO: 519 - protein, 1034 aa, unidentified; identical to SEQ ID NO: 516
  REGION 1..1034: note = Description of Unknown: uncultivated organism
  REGION 1..1034: note = MG4-101 effector

SEQ ID NO: 520 - protein, 1056 aa, unidentified
  REGION 1..1056: note = Description of Unknown: uncultivated organism
  REGION 1..1056: note = MG4-102 effector
VFKDDMILGIDIGSNSVGWALLGYDADSREVTGITDAGVRIFEAGMDGDISTGNATSRCAERRAKRLIRRNLDRRRRRMLKLQHILQRAGLLPEGDDIEKIILDLDAEVRKFCLAVPEGERPSREVLAHTYPYFLRALAINGKLPPHLLGRAVYHLAQRRGFWSNRKSLVDEKELGQVKQGISELRGKMEETGARTLGEYFAYRDPTRDRIRGLWTSRDMYRHEFDLIMNNHPHLVTPDLRKSIEKAIFFQRKLKSVKSLIGHCALEKNKRRCPWYRFEAQEFRILQTITNLKVIEPDGELRELSAEEWENLYRVMMGETGDLDRHGNIKISKAKKLLGLPKGSKFTIEDGGEKTLKGNKTLSSLLAVFGDSWNEFSPRDKEDILHDLRSFEKREPLVRKAMRKWNLEQEEAEAFADIKLPEDYCNLSYKALCKLLPLLREGWSYGSAVKEIYPEAFKSDGIVHELLPGLDTSSIDLRNPVVERSLTELRRVVNAVIRKYGKPGIIRLEMAREMKLSANRKKEIIKRNRDLEKQREKAAEKIRDVFPGMTPGRTDTTKVLLAEECGWRCPYTGRSISIRTLFGPHPQFDIEHIIPRSRSLDDSFLNKTLCYHEENRNVKRNRTPYEAYHGTPRYDEILDRVAKFNGRLAKEKLRRFRMTPEEVEDRFADFTQRQLNDTRYAAKEAAAYLGMLYGGSVTSIDGRKRVQVLSGGLTYKVRSAYNLNGILNDGDVKTRNDHRHHAVDAIAIGMTSPGMVKKLTEIAKELENRRDYIRFGTGKGILPDKWNTFDEDVRRVIGKIKVSHKIPRKVRGAFHEETFYSKEYEHKVNGKTGMYRHVRIPLENLEKNKIPKVVDKGVREAIIRKLDELGIDDPRRAFRNGENLPEIVSADGAKRIPIKKVKIIRKQNTIRVGEGRRARNVVPGNNHHMMIYAVLDKRGEVKKWDGEVVTLLEARRRLMNGEPLVNKVNTPTARYVMTVQRGDVFEMDIKGKRELVITRDVPQTKQMSFVRLNDARLKKEIKSSGEWFTKRPNSMRTSNVKKFTITPLGELRNSNA

SEQ ID NO: 521 - protein, 1056 aa, unidentified; identical to SEQ ID NO: 520
  REGION 1..1056: note = Description of Unknown: uncultivated organism
  REGION 1..1056: note = MG4-103 effector

SEQ ID NO: 522 - protein, 867 aa, unidentified
  REGION 1..867: note = Description of Unknown: uncultivated organism with predicted taxonomy: Planctomycetes bacterium
  REGION 1..867: note = MG4-104 effector
LYHLGQRRGYKSNRKQEAKDSEAGVVLSQIAELKEAIRNSGARTLGEYFSTLDPEQRRIRTRYTERGMFEEEFRKICAAQRPLISEALERALYHAIFFQRKLKSCKHLIGFCRLEPEERRCSFQDPLAQRFRILQEVNHLRVDGRGVLRPLTEEERQKVLTVLDGLSGELNAQGTIALSALGRLAGLRRGEKFTLGDEDKKVYGNELHAILFRVFGARAAAMKEEERQAFFHHLACMEKDDALRRILRTRWGLSEEAAEKAAHISLPDDYCGFSRKALKQLLPDLESGIALSTVIKLKYPEQFQASERVLEFLPPLDETGLQLRNPVVHRTLTEMRQVVNAVIRKYGKPDLIRLELARDLKNSSKDRENITRRNRLREKERERIAREIAQEAGVEKPSRRDILKVMLAEECDYTCPYTGRRFSMRDLLHGGLVHIEHIVPYSRSMDDSFINKTLSCRDANAEKGNRLPFEVFSPEAYREILERVRRFKGPFAEAKLERFKMQKAESRDFIERNLNDTRYASKLATEYLALLYGGRWDRNGVLRLQCSAGGCTAVVRRAWGGNYLLGEGEKERGDFRHHAIDALTVAVVSPAIVKAVAEMPKETVRKAIEEKQPLIVNSLYTQARAKLDAAGISHHTINRARGAFHKETIYSKSHGGDLRHVRRRLDTLEPKTVAEIVDVAIRRAVEEKLAELKMTDPRKAFKDGGNLPVLRDRQGRFVNTIRSVRVRQNVKTRSIGEGDRKREVANGANLVLAIYARHDADGREIGWDGEVVTVLDARLRLQRNEPVFPKVKEGNPLKFTLRKGDVVRWSKDGQEYLCVIRGISLPQFSCMPINDARDVKTLKAAGLWFTPTLSAAFRGKMEKFHTT

SEQ ID NO: 523 - protein, 1021 aa, unidentified
  REGION 1..1021: note = Description of Unknown: uncultivated organism
  REGION 1..1021: note = MG4-105 effector
MKQRILGLDLGINSVGWAIVDDDNDAQVDLLDWGSRIFAPGLAATTEEIVSGKGESRCAERRLKRAQRIAYRRRRQHKDELTRVLSGSGLLPEQVSPEFFLQIDRAFLAGLPEDEQKRAAHVVPYLLRAAALDRPLAPMQLGRALYHLGQRRGYKSNRKQEAKDSEAGVVLSQIAELKEAIRNSGARTLGEYFSTLDPEQRRIRTRYTERGMFEEEFRKICAAQRPLISEALERALYHAIFFQRKLKSCKHLIGFCRLEPEERRCSFQDPLAQRFRILQEVNHLRVDGRGVLRPLTEEERQKVLTVLDGLSGELNAQGTIALSALGRLAGLRRGEKFTLGDEDKKVYGNELHAILFRVFGARAAAMKEEERQAFFHHLACMEKDDALRRILRTRWGLSEEAAEKAAHISLPDDYCGFSRKALKQLLPDLESGIALSTVIKLKYPEQFQASERVLEFLPPLDETGLQLRNPVVHRTLTEMRQVVNAVIRKYGKPDLIRLELARDLKNSSKDRENITRRNRLREKERERIAREIAQEAGVEKPSRRDILKVMLAEECDYTCPYTGRRFSMRDLLHGGLVHIEHIVPYSRSMDDSFINKTLSCRDANAEKGNRLPFEAFSPEAYREILERVRRFKGPFAEAKLERFKMQKAESRDFIERNLNDTRYASKLATEYLALLYGGRWDRNGVLRLQCSAGGCTAVVRRAWGGNYLLGEGEKERGDFRHHAIDALTVAVVSPAIVKAVAEMPKETVRKAIEEKQPLIVNSLYTQARAKLDAAGISHHTINRARGAFHKETIYSKSHGGDLRHVRRRLDTLEPKTVAEIVDVAIRRAVEEKLAELKMTDPRKAFKDGGNLPVLRDRQGRFVNTIRSVRVRQNVKTRSIGEGDRKREVANGANLVLAIYARHDADGREIGWDGEVVTVLDARLRLQRNEPVFPKVKEGNPLKFTLRKGDVVRWAKDGQEYLCVIRGISLPQFSCMPINDARDVKTLKAAGLWFTPTLSAAFRGKMEKFHTTPLGELRRAND

SEQ ID NO: 524 - protein, 1022 aa, unidentified
  REGION 1..1022: note = Description of Unknown: uncultivated organism
  REGION 1..1022: note = MG4-106 effector
MKQRVLGLDLGISSVGWAVIDDDNTNRIELIDWGSRIFEPGVDATEDEIRAGKGESRCSVRRQKRSLRRMYQRRRRHKEEVTAILMREGMLPEKLTPEFFVKVDRDFLLTLPENERKRAAHVVPYLLRSLALDRPLDRYQLGRALYQLAQRRGYKSNRKQEAKDSESGKVLSGIADLKQAMADSGARTLGEYFSMLDPEESRIRTRYTERGMFEDEFHKICVAQRHIISVEVEAELHHAIFFQRKLRSCKHLIGNCRLEPDKKRCSYSTMAAQRFRLVQGVNNLKVSNKSGVIRELTEDERKMLLWCLDGLSGHLNSKGRIALSKLGKLVGLDKGEKFTLGDDDKDICGNELNAILFRAFGDKAVELSEAERNIFLNTLNSVENNAVMRKILMEKWHFNEETAEELSHIVLPDDYCNYSRKAIENLLPDMEAGIALNTIIKLKYPEQYQPSDVVEPVLPRLEEVDLDIRNPIVQRTLSELRRVVNAVIRKYGKPDLIRVELARDLKNSSKDRENISRKNSEREKERKKIAEKIAREAGIENPSPRDILKVMLAEECDYTCPYTGKSFSLNQLLHGGEIHIEHIVPYSRSMDDSYANKTLSYRDANMAKSDKLPFEAFDSAKYVEIIERVRHFKGSFAKIKLEKFELETAEVQDFINRNLNDTRYASKLATEYLALLYGGMNDRNRVQRIQCSAGGCTAVVRRAWGGNYLLGEGEKVRGDHRHHAIDALTIAVTSPAIVKLIAGLKGEDRRRAIEEKRPLVVTDLYTQAKAKLDSAGISHHTVNKLRGALHKETIYSKSYGGDVRHARKALEDLEADKVKDIVDDAIRKAVEEKLDDLGIADPKKAFKGGTNLPVLRDRNGNIVNIIKRVRVLQTQSTRTIGSGDGQREVANGANHVLAIYSVLDKDGNEIGWDGEIVSLMDARLRMLKGEAVYPLEKNGNPLKFTLRKGDIVRWTKDGEELLCVIRGVALPQFQCVPVYEARDVKALKSAKKWFTPTLSAAFKGKMEKYTTTALGELRRAND

SEQ ID NO: 525 - protein, 992 aa, unidentified
  REGION 1..992: note = Description of Unknown: uncultivated organism
  REGION 1..992: note = MG4-107 effector
IDWGSRIFEPGVDATEDEIRAGKGESRCSVRRQKRSLRRMYQRRRRHKEEVTAILMREGMLPEKLTPEFFVKVDRDFLLTLPENERKRAAHVVPYLLRSLALDRPLDRYQLGRALYQLAQRRGYKSNRKQEAKDSESGKVLSGIADLKQAMADSGARTLGEYFSMLDPEESRIRTRYTERGMFEDEFHKICVAQRHIISVEVEAELHHAIFFQRKLRSCKHLIGNCRLEPDKKRCSYSTMAAQRFRLVQGVNNLKVSNKSGVIRELTEDERKMLLWCLDGLSGHLNSKGRIALSKLGKLVGLDKGEKFTLGDDDKDICGNELNAILFRAFGDKAVELSEAERNIFLNTLNSVENNAVMRKILMEKWHFNEETAEELSHIVLPDDYCNYSRKAIENLLPDMEAGIALNTIIKLKYPEQYQPSDVVEPVLPRLEEVDLDIRNPIVQRTLSELRRVVNAVIRKYGKPDLIRVELARDLKNSSKDRENISRKNSEREKERKKIAEKIAREAGIENPSPRDILKVMLAEECDYTCPYTGKSFSLNQLLHGGEIHIEHIVPYSRSMDDSYANKTLSYRDANMAKSDKLPFEAFDSAKYVEIIERVRHFKGSFAKIKLEKFELETAEVQDFINRNLNDTRYASKLATEYLALLYGGMNDRNRVQRIQCSAGGCTAVVRRAWGGNYLLGEGEKVRGDHRHHAIDALTIAVTSPAIVKLIAGLKGEDRRRAIEEKRPLVVTDLYTQAKAKLDSAGISHHTVNKLRGALHKETIYSKSYGGDVRHARKALEDLEADKVKDIVDDAIRKAVEEKLDDLGIADPKKAFKGGTNLPVLRDRNGNIVNIIKRVRVLQTQSTRTIGSGDGQREVANGANHVLAIYSVLDKDGNEIGWDGEIVSLMDARLRMLKGEAVYPLEKNGNPLKFTLRKGDIVRWTKDGEELLCVIRGVALPQFQCVPVYEARDVKALKSAKKWFTPTLSAAFKGKMEKYTTTALGELRRAND

SEQ ID NO: 526 - protein, 1021 aa, unidentified
  REGION 1..1021: note = Description of Unknown: uncultivated organism
  REGION 1..1021: note = MG4-108 effector
MKQRILGLDLGINSVGWAIVDDDNDAQVDLLDWGSRIFAPGLAATTEEIVSGKGESRCAERRLKRAQRIAYRRRRQHKDELTRVLSGSGLLPEQVSPDFFLQIDRAFLAGLPEDEQKRAAHVVPYLLRAAALDRPLEPMQLGRALYHLGQRRGYKSNRKQEAKDSEAGVVLSQIAELKEAIRNSGARTLGEYFSTLDPEQRRIRTRYTERGMFEEEFRKICAAQRPLISEALERALYHAIFFQRKLKSCKHLIGFCRLEPEERRCSFQDPLAQRFRILQEVNHLRVDGRGVLRPLTEEERQKVLTVLDGLSGELNAQGTIALSALGRLAGLRRGEKFTLGDEDKKVYGNELHAILFRVFGARAAAMNEEERQAFFHHLACMEKDDALRRILRTRWGLSEEAAEKAAHISLPDDYCGFSCKALKQLLPDLESGIALSTVIKLKYPEQFQASERVLAFLPPLDETGLQLRNPVVHRTLTEMRQVVNAVIRKYGKPDLIRLELARDLKNSSKDRENITRRNRLREKERERIAREIAQEAGVEKPSRRDILKVMLAEECDYTCPYTGRRFSMRDLLHGGLVHIEHIVPYSRSMDDSFINKTLSCRDANAEKGNRLPFEAFSPEAYREILERVRRFKGPFAEAKLERFKMQKAESRDFIERNLNDTRYASKLATEYLALLYGGRWDRNGVLRLQCSAGGCTAVVRRAWGGNYLLGEGEKERGDFRHHAIDALTVAVVSPAIVKAVAEMPKETVRKAIEEKQPLIVNSLYTQARAKLDAAGISHHTINRARGAFHKETIYSKSHGGDLRHVRRRLDTLEPKTVAEIVDVAIRRAVEEKLAELKMTDPRKAFKDGGNLPVLRDRQGRFVNTIRSVRVRQNVKTRSIGEGDRKREVANGANLVLAIYARHDADGREIGWDGEVVTVLDARLRLQRNEPVFPKVKEGNPLKFTLRKGDVVRWSKDGQEYLCVIRGISLPQFSCMPINDARDVKALKAAGLWFTPTLSAAFRGKMEKFHTTPLGELRRAND

SEQ ID NO: 527 - protein, 883 aa, unidentified
  REGION 1..883: note = Description of Unknown: uncultivated organism with predicted taxonomy: Planctomycetes bacterium
  REGION 1..883: note = MG4-109 effector
MQLGRALYHLGQRRGYKSNRKQEAKDSEAGVVLSQIAELKEAIRNSGARTLGEYFSTLDPEQRRIRTRYTERGMFEEEFRKICAAQRPLISEALERALYHAIFFQRKLKSCKHLIGFCRLEPEERRCSFQDPLAQRFRILQEVNHLRVDGRGVLRPLTEEERQKVLTVLDGLSGELNAQGTIALSALGRLAGLRRGEKFTLGDEDKKVYGNELHAILFRVFGARAAAMKEEERQAFFHHLACMEKDDALRRILRTRWGLSEEAAEKAAHISLPDDYCGFSRKALKQLLPDLESGIALSTVIKLKYPEQFQASERVLEFLPPLDETGLQLRNPVVHRTLTEMRQVVNAVIRKYGKPDLIRLELARDLKNSSKDRENITRRNRLREKERERIAREIAQEAGVEKPSRRDILKVMLAEECDYTCPYTGRRFSMRDLLHGGLVHIEHIVPYSRSMDDSFINKTLSCRDANAEKGNRLPFEVFSPEAYREILERVRRFKGPFAEAKLERFKMQKAESRDFIERNLNDTRYASKLATEYLALLYGGRWDRNGVLRLQCSAGGCTAVVRRAWGGNYLLGEGEKERGDFRHHAIDALTVAVVSPAIVKAVAEMPKETVRKAIEEKQPLIVNSLYTQARAKLDAAGISHHTINRARGAFHKETIYSKSHGGDLRHVRRRLDTLEPKTVAEIVDVAIRRAVEEKLAELKMTDPRKAFKDGGNLPVLRDRQGRFVNTIRSVRVRQNVKTRSIGEGDRKREVANGANLVLAIYARHDADGREIGWDGEVVTVLDARLRLQRNEPVFPKVKEGNPLKFTLRKGDVVRWSKDGQEYLCVIRGISLPQFSCMPINDARDVKTLKAAGLWFTPTLSAAFRGKMEKFHTTPLGELRRAND

SEQ ID NO: 528 - protein, 1021 aa, unidentified
  REGION 1..1021: note = Description of Unknown: uncultivated organism
  REGION 1..1021: note = MG4-110 effector
MKQRILGLDLGINSVGWAIVDDDNDAQVDLLDWGSRIFAPGLAATTEEIVSGKGESRCAERRLKRAQRIAYRRRRQHKDELTRVLSGSGLLPEQVSPDFFLQIDRAFLAGLPEDEQKRAAHVVPYLLRAAALDRPLEPMQLGRALYHLGQRRGYKSNRKQEAKDSEAGVVLSQIAELKEAIRNSGARTLGEYFSTLDPEQRRIRTRYTERGMFEEEFRKICAAQRPLISEALERALYHAIFFQRKLKSCKHLIGFCRLEPEERRCSFQDPLAQRFRILQEVNHLRVDGRGVLRPLTEEERQKVLTVLDGLSGELNAQGTIALSALGRLAGLRRGEKFTLGDEDKKVYGNELHAILFRVFGARAAAMKEEERQAFFHHLACMEKDDALRRILRTRWGLSEEAAEKAAHISLPDDYCGSSRKALKQLLPDLESGIALSTVIKLKYPEQFQASERVLEFLPPLDETGLQLRNPVVHRTLTEMRQVVNAVIRKYGKPDLIRLELARDLKNSSKDRENIARRNRLREKERERIAREIAQEAGVEKPSRRDILKVMLAEECDYTCPYTGRRFSMRDLLHGGLVHIEHIVPYSRSMDDSFINKTLSCRDANAEKGNRLPFEAFSPEAYREILERVRRFKGPFAEAKLERFKLQKAESRDFIERNLNDTRYASKLATEYLALLYGGRWDRNGVLRLQCSAGGCTAVVRRAWGGNYLLGEGEKERGDFRHHAIDALTVAVVSPAIVKAVAEMPKETVRKAIEEKQPLIVNSLYTQARAKLDAAGISHHTINRARGAFHKETIYSKSHGGDLRHVRRRLDTLEPKTVAEIVDVAIRRAVEEKLAELKMTDPRKAFKDGGNLPVLRDRQGRFVNTIRSVRVRQNVKTRSIGEGDRKREVANGANLVLAIYARHDADGREIGWDGEVVTVLDARLRLQRNEPVFPKVKEGNPLKFTLRKGDVVRWSKDGQEYLCVIRGISLPQFSCMPINDARDVKTLKAAGLWFTPTLSAAFRGKMEKFHTTPLGELRRAND

SEQ ID NO: 529 - protein, 879 aa, unidentified
  REGION 1..879: note = Description of Unknown: uncultivated organism with predicted taxonomy: Planctomycetes bacterium
  REGION 1..879: note = MG4-111 effector
KEEVTAILMREGMLPEKLTPEFFVKVDRDFLLTLPENERKRAAHVVPYLLRSLALDRPLDRYQLGRALYQLAQRRGYKSNRRQEAKDSESGKVLSGIADLKQAMADSGARTLGEYFSMLDPEESRIRTRYTERGMFEDEFHKICVAQRHIISVEVEAELHHAIFFQRKLRSCKHLIGNCRLEPDKKRCSYSTMAAQRFRLVQGVNNLKVSNKSGVIRELTEDERENALVVLDGLSGHLNSKGRIALSKLGKLVGLDKGEKFTLGDDDKDICGNELNAILFRAFGDKAVELSEAERNIFLNTLNSVENNAVMRKILMEKWHFSEETAEELSHIVLPDDYCNYSRKAIENLLPDMEAGIALNTIIKLKYPEQYQSSDVVEPDLPRLEEVDLDIRNPIVQRTLSELRRVVNAVIRKYGKPDLIRVELARDLKNSSKDRENISRKNSEREKERKKIAEKIAREAGIENPSPRDILKVMLAEECDYTCPYTGKSFSLNQLLHGGEIHIEHIVPYSRSMDDSYANKTLSYRDANMAKSDKLPFEAFDSAKYAEIIERVRHFKGSFAKIKLEKFELETAEVQDFINRNLNDTRYASKLATEYLALLYGGRNDRNGVQRIQCSAGGCTAVVRRAWGGNYLLGEGEKVRGDHRHHAIDALTIAVTSPAIVKLIAGVKGEDRRRAIEEKRPLVVTDLYTQAKAKLDSAGISHHTVNKLRGALHKETIYSKSYGGDVRHARKALEDLEADKVKDIVDDAIRKAVEEKLDDLGIADPKKAFKGGTNLPVLRDRNGNIVNIIKRVRVLQTQSTRTIGSGDGQREVANGANHVLAIYSVLDKDGNEIGWDGEIVSLMDARLRMLKGEAVYPLEKNGNPLKFTLRKGDIVRWTK

SEQ ID NO: 530 - protein, 1021 aa, unidentified; identical to SEQ ID NO: 526
  REGION 1..1021: note = Description of Unknown: uncultivated organism
  REGION 1..1021: note = MG4-112 effector

SEQ ID NO: 531 - protein, 992 aa, unidentified; identical to SEQ ID NO: 525
  REGION 1..992: note = Description of Unknown: uncultivated organism
  REGION 1..992: note = MG4-113 effector

SEQ ID NO: 532 - protein, 1021 aa, unidentified
  REGION 1..1021: note = Description of Unknown: uncultivated organism
  REGION 1..1021: note = MG4-114 effector
MKQRILGLDLGINSVGWAIVDDDNDAQVDLLDWGSRIFAPGLAATTEEIVSGKGESRCAERRLKRAQRIAYRRRRQHKDELTRVLSGSGLLPEQVSPEFFLQIDRAFLAGLPEDEQKRAAHVVPYLLRAAALDRPLEPMQLGRALYHLGQRRGYKSNRKQEAKDSEAGVVLSQIAELKEAIRNSGARTLGEYFSTLDPEQRRIRTRYTERGMFEEEFRKICAAQRPLISEALERALYHAIFFQRKLKSCKHLIGFCRLEPEERRCSFQDPLAQRFRILQEVNHLRVDGRGVLRPLTEEERQKVLTVLDGLSGELNAQGTIALSALGRLAGLRRGEKFTLGDEDKKVYGNELHAILFRVFGARAAAMKEEERQAFFHHLACMEKDDALRRILRTRWGLSEEAAEKAAHISLPDDYCGFSRKALKQLLPDLESGIALSTVIKLKYPEQFQASERVLEFLPPLDETGLQLRNPVVHRTLTEMRQVVNAVIRKYGKPDLIRLELARDLKNSSKDRENITRRNRLREKERERIAREIAQEAGVEKPSRRDILKVMLAEECDYTCPYTGRRFSMRDLLHGGLVHIEHIVPYSRSMDDSFINKTLSCRDANAEKGNRLPFEAFSPEAYREILERVRRFKGPFAEAKLERFKMQKAESRDFIERNLNDTRYASKLATEYLALLYGGRWDRNGVLRLQCSAGGCTAVVRRAWGGNYLLGEGEKERGDFRHHAIDALTVAVVSPAIVKAVAEMPKETVRKAIEEKQPLIVNSLYTQARAKLDAAGISHHTINRARGAFHKETIYSKSHGGDLRHVRRRLDTLEPKTVAEIVDVAIRRAVEEKLAELKMTDPRKAFKDGGNLPVLRDRQGRFVNTIRSVRVRQNVKTRSIGEGDRKREVANGANLVLAIYARHDADGREIGWDGEVVTVLDARLRLQRNEPVFPKVKEGNPLKFTLRKGDVVRWSKDGQEYLCVIRGISLPQFSCMPINDARDVKTLKAAGLWFTPTLSAAFRGKMEKFHTTPLGELRRAND

SEQ ID NO: 533 - protein, 1015 aa, unidentified
  REGION 1..1015: note = Description of Unknown: uncultivated organism
  REGION 1..1015: note = MG4-115 effector
GLDLGINSVGWAIVDDDNDAQVDLLDWGSRIFAPGLAATTEEIVSGKGESRCAERRLKRAQRIAYRRRRQHKDELTRVLSGSGLLPEQVSPDFFLQIDRAFLAGLPEDEQKRAAHVVPYLLRAAALDRPLEPMQLGRALYHLGQRRGYKSNRKQEAKDSEAGVVLSQIAELKEAIRNSGARTLGEYFSTLDPEQRRIRTRYTERGMFEEEFRKICAAQRPLISEALERALYHAIFFQRKLKSCKHLIGFCRLEPEERRCSFQDPLAQRFRILQEVNHLRVDGRGVLRPLTEEERQKVLTVLDGLSGELNAQGTIALSALGRLAGLRRGEKFTLGDEDKKVYGNELHAILFRVFGARAAAMNEEERQAFFHHLACMEKDDALRRILRTRWGLSEEAAEKAAHISLPDDYCGFSCKALKQLLPDLESGIALSTVIKLKYPEQFQASERVLAFLPPLDETGLQLRNPVVHRTLTEMRQVVNAVIRKYGKPDLIRLELARDLKNSSKDRENITRRNRLREKERERIAREIAQEAGVEKPSRRDILKVMLAEECDYTCPYTGRRFSMRDLLHGGLVHIEHIVPYSRSMDDSFINKTLSCRDANAEKGNRLPFEAFSPEAYREILERVRRFKGPFAEAKLERFKMQKAESRDFIERNLNDTRYASKLATEYLALLYGGRWDRNGVLRLQCSAGGCTAVVRRAWGGNYLLGEGEKERGDFRHHAIDALTVAVVSPAIVKAVAEMPKETVRKAIEEKQPLIVNSLYTQARAKLDAAGISHHTINRARGAFHKETIYSKSHGGDLRHVRRRLDTLEPKTVAEIVDVAIRRAVEEKLAELKMTDPRKAFKDGGNLPVLRDRQGRFVNTIRSVRVRQNVKIRSIGEGDRKREVANGANLVLAIYARHDADGREIGWDGEVVTVLDARLRLQRNEPVFPKVKEGNPLKFTLRKGDVVRWSKDGQENLCVIRGISLPQFSCMPINDARDVKTLKAAGLWFTPTLSAAFRGKMEKFHTTPLGELRRAND

SEQ ID NO: 534 - protein, 1071 aa, unidentified
  REGION 1..1071: note = Description of Unknown: uncultivated organism
  REGION 1..1071: note = MG4-116 effector
MAHGLSEENDYILGIDLGSASLGWALVALSESGDPTGIIKLGVRIFEPAVSGDVEKGQDESNSVARRGARLIRRQRRRRAARQAALFRLLQKQNLLPGTTGVERDSSAQRHVILNELDSALSLKWRQRDSENGFVDLPIYHLRKAALYHALDPFELGRVFYHLSQRRGFRSNRKAERIEKKGEDQGAVKTAISELDEAIRAAGAQTIGEYFAGLDPHTQKVRRIWTGRSMYEEEFGKIWAIQSRFHPTLLTEELHREIWRLLFYQRPIKAQKNLIGECELEPGERRASWATLEAQRFRLLQKVNDLEIIYPGKLMGVALSADQRQHVYRLLDEHGDQTFKAIREHLGLDKNIGFNLERGGERSLKGNIVQRRMIEAFGPRWQALADEEKRQVVDDWRSIESPESLQRKLIAKWRLVPEAASRLAKSSPPSGYCMLSRKAIRRVLPLMFDGKRFMAARQEIPEYVPKLEAPLDRIPPVLDALRNLRNPAVERALTEVRKVVNALVGEYGKPSEVRIELARDLKKPRQERARATDLNRKRQRERDSVKERIVREGGLERPSRDDIEKVLLWEECGGICPYTGKSIAFASLFGEHPQFGVEHIIPFSRLPDNSFQNKTLCDHEQGRNVKRNKTPFEAYPNTEEYDAILTRIKAWETPNLGKQKRFELRTLEELEGFSTRQLNDTRYSSRLACDLIAKLYGGRVIETETGTRQVVFASSGMVTATLRKGLGLEAVLCEASGSSNGETRGKSRTDHRHHAIDALTIALTRQSMIQTMSRTASLEPNWAITSRSLRTIPSPWSNFIDSVRPHVQELLVSHRPEHRLTGALHDETNYSKPRKVNGKSVVHIRKPVNGLSANDIENIVDPVIRDAVRRKAIDLGGDLKRCNPNAGVDDWPQLVTKTGKHVPIKRVRISKSLEVETIATGNRTRYVATSSNHHLAIFAQIDSQGREKHWEPRIVSLYAAMDRKRKGLPVVQRFHPETGDFTFKFSLMGGDTVLLHKDCDHSKGICNASVWRLRTIASNGQLSLVRINDARLKADIQKAKEWWSPATDSLRKFSAIKVSIDSLGRLHGAND

SEQ ID NO: 535 - protein, 1062 aa, unidentified
  REGION 1..1062: note = Description of Unknown: uncultivated organism with predicted taxonomy: Acidobacteriales bacterium 59-55
  REGION 1..1062: note = MG4-117 effector
MSAALEQQKYVLGLDLGSASLGWALIALNDADDPVSLIRAGVRIFEPGVDGTSIEIEQGKDQSKAVERRTARLHRRQLRRRAARQRDLFRLLQRHSLLPTPEGVIGSPEEQRHLILNSLDQQLTDKWQSAFPINRFAELPIYFLRKAALDQPLEAHEIGRILFHLIQRRGFLSNRRENKQNPDQKKELGQVKAEIHSLEQEIQNAGARTLGEFFAGLDPHAQKVRRRWTARKMFQDEFEKIWEAQTAHRPELLTQELHDKIAHLLFFQRPIAAQTHLIGKCELETGKQRAPWAAMEAQRFRILQKVNDLRLINPGSLISDPLTEEGRQRLYHLLDREGDQTFKAIRKYLSFSAEVQFNLEKGDEKRLRGNRTQAAMRKVFGERWDTIGEGKQHQIIENWRNSESDEVLIREAMEQWSLDAAAATLLSEQTPEPGYCAVSLAAISKLLPLMASGKSFKVAETELYGARFSGGTIFETLPEVRKQLESLRNPAVERSLTELRKVVNAIVREYGKPHEIRIELARELKKPRQERIEATKKNRNRQREREDVAVRILRECGLSNPSRRDIEKARLHEECGGYCPYTGRHIPFSTLFDNSEFDVEHIIPRSRYPDDSFQNKTLCYLPENRDVKKGQTPWEAYGKDEQRWAEIMTRVSSWKNRGKMARFAIQTEEALGDFSARQMNDTRYASVLASRFLGALYGGRDLVDAEKVRQVIFASSGAVTATLRSSWGLEAILREIVPTEPGESRGKPRTDHRHHAIDAITIALTRPKVIQSMALAASLEPWQRDSRAWRKIESPWRDFVLSIRPHIEQMLVSHRPEHKMSGELHKGTNYPAPHNYKGKPTVHTRCALSALSAADIADDEVIVDPAVRDAVRAKLEKLGGNPKLFDRPENAPCLESRDGRFIPIRKVRIREAKKPILVGTGVRERYVASGGIHHIGLFVVRDARRREVWESEVVQITDAYERHREHLPVVCRTHDAEEVAFLFSLMKDDTVELEKDGTRGIYRVKKFEATGKITFVPVNNAMLDKMQYTTGAAWSRMPATLKPMSPRKIVIDLLGKVHPAND

SEQ ID NO: 536 - protein, 1071 aa, unidentified; identical to SEQ ID NO: 534
  REGION 1..1071: note = Description of Unknown: uncultivated organism
  REGION 1..1071: note = MG4-118 effector

SEQ ID NO: 537 - protein, 1062 aa, unidentified
  REGION 1..1062: note = Description of Unknown: uncultivated organism
  REGION 1..1062: note = MG4-119 effector
MSSALEQQKYVLGLDLGSASLGWALIALNDADDPVSLIRAGVRIFEPGVDGTSIEIEQGKDQSKAVERRTARLHRRQLRRRAARQRDLFRLLQRHSLLPTPEGVIGSPEEQRHLILNSLDQQLTDKWQSAFPINRFAELPIYFLRKAALDQPLEAHEIGRILFHLIQRRGFLSNRRENKQNPDQKKELGQVKAEIHSLEQEIQNAGARTLGEFFAGLDPHAQKVRRRWTARKMFQDEFEKIWEAQTAHRPELLTQELHDKIAHLLFFQRPIAAQTHLIGKCELETGKQRAPWAAMEAQRFRILQKVNDLRLINPGSLISDPLTEEGRQRLYHLLDREGDQTFKAIRKYLSFSAEVQFNLEKGDEKRLRGNRTQAAMRKVFGERWDTIGEGKQHQIIENWRNSESDEVLIREAMEQWSLDAAAATLLSEQTPEPGYCAVSLAAISKLLPLMASGKSFKVAETELYGARFSGGTIFETLPEVRKQLESLRNPAVERSLTELRKVVNAIVREYGKPHEIRIELARELKKPRQERIEATKKNRNRQREREDVAVRILRECGLSNPSRRDIEKARLHEECGGYCPYTGRHIPFSTLFDNSEFDVEHIIPRSRYPDDSFQNKTLCYLPENRDVKKGQTPWEAYGKDEQRWAEIMTRVSSWKNRGKMARFAIQTEEALGDFSARQMNDTRYASVLASRFLGALYGGRDLVDAEKVRQVIFASSGAVTATLRSSWGLEAILREIVPTEPGESRGKPRTDHRHHAIDAITIALTRPKVIQSMALAASLEPWQRDSRAWRKIESPWRDFVLSIRPHIEQMLVSHRPEHKMSGELHKGTNYPAPHNYKGKPTVHTRCALSALSAADIADDEVIVDPAVRDAVRAKLEKLGGNPKLFDRPENAPCLESRDGRFIPIRKVRIREAKKPILVGTGVRERYVASGGIHHIGLFVVRDARRREVWESEVVQITDAYERHREHLPVVCRTHDAEEVAFLFSLMKDDTVELEKDGTRGIYRVKKFEATGKITFVPVNNAMLDKMQYTTGAAWSRMPATLKPMSPRKIVIDLLGKVHPAND

SEQ ID NO: 538 - protein, 1071 aa, unidentified; identical to SEQ ID NO: 534
  REGION 1..1071: note = Description of Unknown: uncultivated organism
  REGION 1..1071: note = MG4-120 effector

SEQ ID NO: 539 - protein, 972 aa, unidentified
  REGION 1..972: note = Description of Unknown: uncultivated organism with predicted taxonomy: Acidobacteriales bacterium 59-55
  REGION 1..972: note = MG4-121 effector
LLQRHSLLPTPEGVIGSPEEQRHLILNSLDQQLTDKWQSAFPINRFAELPIYFLRKAALDQPLEAHEIGRILFHLIQRRGFLSNRRENKQNPDQKKELGQVKAEIHSLEQEIQNAGARTLGEFFAGLDPHAQKVRRRWTARKMFQDEFEKIWEAQTAHRPELLTQELHDKIAHLLFFQRPIAAQTHLIGKCELETGKQRAPWAAMEAQRFRILQKVNDLRLINPGSLISDPLTEEGRQRLYHLLDREGDQTFKAIRKYLSFSAEVQFNLEKGDEKRLRGNRTQAAMRKVFGERWDTIGEGKQHQIIENWRNSESDEVLIREAMEQWSLDAAAATLLSEQTPEPGYCAVSLAAISKLLPLMASGKSFKEAETELYGARFSGGTIFETLPEVRKQLESLRNPAVERSLTELRKVVNAIVREYGKPHEIRIELARELKKPRQERIEATKKNRNRQREREDVAVRILRECGLSNPSRRDIEKARLHEECGGYCPYTGRHIPFSTLFDNSEFDVEHIIPRSRYPDDSFQNKTLCYLPENRDVKKGQTPWEAYGKDEQRWAEIMTRVSSWKNRGKMSRFAIQTEEALGDFSARQMNDTRYASVLASRFLGALYGGRDLVDAEKVRQVIFASSGAVTATLRSSWGLEAILREIVPTEPGEPRGKPRTDHRHHAIDAITIALTRPKVIQSMALAASLEPWQRDSRAWRKIESPWRDFVLSIRPHIEQMLVSHRPEHKMSGELHKGTNYPAPHNYKGKPTVHTRCALSALSAADIADDEVIVDPAVRDAVRAKLEKLGGNPKLFDRPENAPCLESRNGRFIPIRKVRIREAKKPILVGTGVRERYVASGGIHHIGLFVVRDARRREVWESEVVQITDAYERHREHLPVVCRIHDAEEAAFLFSLMKDDTVELEKDGTRGIYRVKKFEATGKITFVPVNNAMLDKMQYTTGAAWSRMPATLKPMSPRKIVIDLLGKVHPAND

SEQ ID NO: 540 - protein, 853 aa, unidentified
  REGION 1..853: note = Description of Unknown: uncultivated organism with predicted taxonomy: uncultured bacterium
  REGION 1..853: note = MG4-122 effector
MSSALERPQKYVLGLDLGSASLGWALIALNDADNPTSLIRAGVRIFEPGVDGTSMEIEQGKDQSKAVERRTARLHRRQLRRRAARQRDLFRLLQRHSLLPAPGTLDGSPEEQRHSILNELDQALARKWQSAFPDNRFAQLPLYYLRKRALDEPLEAYEIGRILFHLIQRRGFLSNRRENKQNPDQKKELGQVKAEIHSLEQEIQNAGARTLGEFFAGLDPHAQKVRRRWTARKMFQDEFEKIWETQVIHCPNLLTPELHDKIAHLLFFQRPIAAQSHLVGKCELESGKQRAPWAAMEAQRFRILQKVNDLRLVNPGSLISDPLTEEDRQRLNSLLDREGDQTFKAIKKYLSFPADVQFNLEKGDEKRLRGNRTQAAMRKVFADRWDTMSAGKQHQIVENWRNSESDEALIREAEEQWSLDDTAATLLSEQIPEPGYCAVSLTAISKLLPLMQCGKSFKEAETEVYGARFSGGVVFDTLPEVRKQLESLRNPAVERALTELRKVVNAIVREYGKPYEIRIELARELKKPRQERLEATKKNRTRQREREDIAGRILRECGLSNPSRKDIEKARLHEECGGICPYTGRPIPFSTLFDNSEFDVEHIIPRSRYPDDSFQNKTLCYLPENRDVKKGQTPWEAYGKDEQRWAEIMTRVGSWKNRGKMARFSIQTEEALGEFSARQMNDTRYASVLAARFLGSLYGGRDVVDGDNARQVIFASSGAVTASLRSSWGLEAILHEIVPAESGESRGKPRTDHRHHAIDAITIALTRPKVIQSMARTASLEPWQIDSRAWRKIELPWRDFVPSIRPHIEQMLVSHRPEHKMSGELHKGTNYSAPYNYKGKPTVHTRCLLSALS

SEQ ID NO: 541 - protein, 1071 aa, unidentified; identical to SEQ ID NO: 534
  REGION 1..1071: note = Description of Unknown: uncultivated organism
  REGION 1..1071: note = MG4-123 effector

SEQ ID NO: 542 - protein, 1071 aa, unidentified; identical to SEQ ID NO: 534
  REGION 1..1071: note = Description of Unknown: uncultivated organism
  REGION 1..1071: note = MG4-124 effector

SEQ ID NO: 543 - protein, 1071 aa, unidentified; identical to SEQ ID NO: 534
  REGION 1..1071: note = Description of Unknown: uncultivated organism
  REGION 1..1071: note = MG4-125 effector

SEQ ID NO: 544 - protein, 1079 aa, unidentified
  REGION 1..1079: note = Description of Unknown: uncultivated organism
  REGION 1..1079: note = MG4-126 effector
MNESGSLAQDYVLGIDLGSVSLGWAVIGLDKTDMPVVLLRAGVRLFDPAVTGDIEKGQDESNAVARRVARLLRRQLRRRAARQSELFRLLQGHALLPPYEGNEADASQQRHAILNALDLEIAAKWAKSGGAGAQAAIDLPLYMLRKTALDEALEPYELGRVFYHLSQRRGYRSNRKEQAEKKEAAIKGKKDDDLGTVESGIKELGEAMRSFRTLGEYYASLDPHTHNVRRRWTSRKMYEDEFAAIWEKQAALHPTLLTEELHRQIKHLLFYQRPIKAQSHLIGGCELEPGEPRAAWAALEAQQFRVLQQVNELEVISPGRVTGIPLTAEQRQTVLDLLENSSEITFKKISKALGLADYIGFNLQRGGDTKLKGNLTNTHMAEVFAERWTEMSEEEKKQVVEDWRTIDQEDSLIRRAIEYWNLDESSAKWLASRPAPNGYCMYSRKSIRKLLPLMATGARFRAAEKEVYGIRLTGGLVYDSIPPVRDTLKTLRNPAVERALTELRKVVNALVREYGKPTEVRIELANDLKKPRHERAEAFKYKRKWEKQRIDTKEKMLRELGPGFEYPSRADVEKALLWEECQGECPYTGKRFPFSSLYGENPPLQVEHIIPFSRIPDDSFQNKILCYHEDNQHKANRTPFEAYTDPAQYETILSRVRNWRTPNPGKQCRFELRTLEELEGFSERQLNDTRYACKLACELVGTLYGGRDEKTDTDSRQVVFASSGMVTATLRKSWGLEAIMRETAPSANGQNHGKPRTDHRHHAIDAITIALSRPKMIATLSRNNAQDSYRPSNGHTAPRIQSPWEDFVDSIRPHFEKMLVSHRPDHRLTGALHDETNYGRPHKEEGKDVVHIRKPVEGLSARDINNIVDPAVREAVRAKAAQLGGDLKKWTPKEGRGDWPQLGTKNGKQIPVKRVRIKKALSVETIGKDERTRHVALSSNHHVAIFAMLDKRGIEKRWKSIIVSLFEAMDRKRKGQPIVQTSYPEAGDYVFKFSLMGGDTVLLHKDCDHNQNPCNPSVWRLRSIAANGQLSLVRINDARPKSEIIKAKEWWSPIEDTLRELDAVKVVIDSLGRIHQAGG

SEQ ID NO: 545 - protein, 1076 aa, unidentified
  REGION 1..1076: note = Description of Unknown: uncultivated organism
  REGION 1..1076: note = MG4-127 effector
MSSALERPQKYVLGLDLGSASLGWALIALNDADNPTSLIRAGVRIFEPGVDGTSMEIEQGKDQSKAVERRTARLHRRQLRRRAARQRDLFRLLQRHSLLPAPGTLDGSPEEQRHSILNELDQALARKWQSAFPDNRFAQLPLYYLRKRALDEPLEAYEIGRILFHLIQRRGFLSNRRENKQNPDQKKELGQVKAEIHSLEQEIQNAGARTLGEFFAGLDPHAQKVRRRWTARKMFQDEFEKIWETQVIHCPNLLTPELHDKIAHLLFFQRPIAAQSHLVGKCELESGKQRAPWAAMEAQRFRILQKVNDLRLVNPGSLISDPLTEEDRQRLYSLLDREGDQTFKAIKKYLSFPTDVQFNLEKGDEKRLRGNRTQAAMRKVFADRWDTMSAGKQHQIVENWRNSESDEALIREAEEQWSLDDTAATLLSEQIPEPGYCAVSLTAISKLLPLMQCGKSFKEAETEVYGARFSGGVVFDTLPEVRKQLESLRNPAVERALTELRKVVNAIVREYGKPYEIRIELARELKKPRQERLEATKKNRTRQREREDIAGRILRECGLSNPSRKDIEKARLHEECGGICPYTGRPIPFSTLFDNSEFDVEHIIPRSRYPDDSFQNKTLCYLPENRDVKKGQTPWEAYGKDEQRWAEIMTRVGSWKNRGKMARFSIQTEEALGEFSARQMNDTRYASVLAARFLGSLYGGRDVVDGDNARQVIFASSGAVTASLRSSWGLEAILHEIVPAESGESRGKPRTDHRHHAIDAITIALTRPKVIQSMARTASLEPWQIDSRAWRKIELPWRDFVPSIRPHIEQMLVSHRPEHKMSGELHKGTNYSAPYNYKGKPTVHTRCLLSALSAAKIADDEVIIDTAVRDAVRKKLAELGGNPKLFDRPENAPCLCARDGRLIPIRKVRIRETKNPVKVGKGVRERFTSSGGIHHVALFVTRDEKRREKWDSEVAQVTEIYRRCPRNDRRKSRSQPVVIESPISRQLKSDPEAQFLFSVMKDDTIEVTDPNGIYILRVKKFSDNKQMWFVPVNDAHDDTQQMKLGITWSKTPNSLKELRPRKVVVDLLGKVHPAND

SEQ ID NO: 546 - protein, 1062 aa, unidentified
  REGION 1..1062: note = Description of Unknown: uncultivated organism with predicted taxonomy: Acidobacteriales bacterium 59-55
  REGION 1..1062: note = MG4-128 effector
MSAALEQQKYVLGLDLGSASLGWALIALNDADDPVSLIRAGVRIFEPGVDGTSIEIEQGKDQSKAVERRTARLHRRQLRRRAARQRDLFRVLQRHCLLPAPETLVGSPEEQRHSVLNELDQELAQKWQSTYQGKRFAELPLYYLRKMALDERLEAHEIGRILFHLIQRRGFLSNRRENKQNPDQKKELGQVKAEIHSLEQEIQNAGARTLGEFFAGLDPHAQKVRRRWTARKMFQDEFEKIWEAQKAHRPELLTQELHDKIAHLLFFQRPIAAQTHLIGKCELETGKQRAPWAAMEAQRFRILQKVNDLRLINPGSLISDPLTEEGRQRLYHLLDREGDQTFKAIRKYLSFSAEVQFNLEKGDEKRLRGNRTQAAMRKVFGERWDTIGEGKQHQIIENWRNSESDEVLIREAMEQWSLDAAAATLLSEQTPEPGYCAVSLAAISKLLPLMASGKSFKEAETELYGARFSGGTIFETLPEVRKQLESLRNPAVERSLTELRKVVNAIVREYGKPHEIRIELARELKKPRQERIEATKKNRNRQREREDVAVRILRECGLSNPSRRDIEKARLHEECGGYCPYTGRHIPFSTLFDNSEFDVEHIIPRSRYPDDSFQNKTLCYLPENRDVKKGQTPWEAYGKDEQRWAEIMTRVSSWKNRGKMARFAIQTEEALGDFSARQMNDTRYASVLASRFLGALYGGRDLVDAEKVRQVIFASSGAVTATLRSSWGLEAILREIVPTEPGESRGKPRTDHRHHAIDAITIALTRPKVIQSMALAASLEPWQRDSRAWRKIESPWRDFVLSIRPHIEQMLVSHRPEHKMSGELHKGTNYPAPHNYKGKPTVHTRCALSALSAADIADDEVIVDPAVRDAVRAKLEKLGGNPKLFDRPENAPCLESRDGRFIPIRKVRIREAKKPILVGTGVRERYVASGGIHHIGLFVVRDARRREVWESEVVQITDAYERHREHLPVVCRTHDAEEAAFLFSLMKDDTVELEKDGTRGIYRVKKFEATGKITFVPVNNAMLDKMQYTTGAAWSRMPATLKPMSPRKIVIDLLGKVHPAND

SEQ ID NO: 547 - protein, 973 aa, unidentified
  REGION 1..973: note = Description of Unknown: uncultivated organism
  REGION 1..973: note = MG4-129 effector
MSESGVSTQPYVLGLDLGSASLGWALVGIDAMERPSSLIRAGVRIFEPGVDGSALDIQQGKDQSKAVDRREARLRRRQLRRRVARQRELFGVLQGAGLLPTDDTQGTGIGSEQRHRILNNLDVTLSNRYRNGADQEIFAQMPLYALRKKALYEPLALDELGRVFFHLSQRRGFQSNRKDVKKKTKDSEDQGQVKSAIHELEQAIEAAGAQTLGEYLAGLDPHEQKVRRQWTGRKMFEKEFQMIWDKQKEYHTDLLTPELHDRIWNLLFFQRPVAAQKHLVGKCELEPDKRRAPWAALLAQQFRLLQKVNDLRLIGEDGNELPLNEDGRAAVFDLLENHGTQSFAKIKQHLGLPKTAQFNLERGKAKELKGNVTAQSMRKVFGERWKEFSEGKQNQIIENWRNSEKDEELKREAMEHWGLDEAGANALVNEKAPGDYCSLSLVALGKILPLMRAGKSFKEAETEIYGNRFSGAAVHSIIPVLRPNRKHFRNGTPPPQDPLMASIANGLRNPAVERSITEMRKVVNAIVREYGKPCEIRIELARELKKPRSKRLDETARNRKREAENKALAERMHNECGTPQNPSRNDLEKAKLWVEQQGECPYTGRSLPFSRLFDDNNGFDVDHILPRSRHPDDSYQNKVLCWGDTNRMVKRNQTPYEAFAEQDPENWHQILARVARWKNPGKLRKFEIRSTDDLAEFSSRQLNDTRYTSLLAARLLSTLYGGRDVAENGGKRQIIFASTGAVTATLRRNWGFEQILRNIIPPEPSESTGKPRTDHRHHAIDAIVIALTRNDVIQSMARASALEPWQPGTRSWRHVPQPWCTPDFFRSVEEQVREMLTSHRPEHKVSGELHQGSNYARPYMYKGKSIVHSRTLVSELKVEQIEADDVIVDRAVRDILRAKLKEIGGTLKGSDKVKTFEKPENTPYILTPAGKRIPIRKVRIRETKNPLLVGAGSNERFVASGGIHHVDLFVTRD

SEQ ID NO: 548 - protein, 951 aa, unidentified
  REGION 1..951: note = Description of Unknown: uncultivated organism with predicted taxonomy: Planctomycetes
  REGION 1..951: note = MG4-130 effector
MAAAKKPYILGLDLGVQSAGWAMIDVDDHGRPCGIRRSGVRCFDSGVGSETEIASGKDESQNIKRRQMRLQRRQLWRRGRRLKKVFLVLQKAGILPPGETRSPEQRHELLKLLDAELAKTHLPEHDRVAGHLLPYRLRALALDQALPPFAFGRALFHLAQRRGFLSNRKSASKDGDDEGAVKAGIAELQQNMQEAGVRTLGEYFSKLDPEAEKQRIRKRWTARSMYLDEFEKIWVAQSPHHPMLGEEWKTRVYDAIFHQRPLKSQKGLVGVCELEPTCRRAPRASVEAQRFRYLQKVNDLEIVTPDGEIWALTDPEHVDLRKKLIELLDTQAEVKFASLRSKLGLWAKLGRKKPKGTDKDFTFNLEAGGESKLKGNTTATKIRGVLGDDYGKLSPEQLAGLVDDLLEYEKKEALARRLTKNYEIAPAKADQLADVTLEPNYASLSREAMHKLLPIMENGRRFASLTQEELEKLFPNRRKGGITYDLLPPVLGIIDLRNPVVCRGLTELRKVLNALIRQYGKPELIRVELARDLKKSRQQREDLTKQNRDNEKARDAARTKIAERLHCDENAVSNLDILKVRLAEECNWECPYTGKSIAIEALVGKHAQFDIEHIIPFSRSLDNSFLNKTLCDNHFNRHVKKNGTPHETCSSNEREWQEIIGRVKRFRGSAAHAKLRKFQQEKPDEDFAARMLQDTRYMSRLATEYLGLLYGGTIDADHTRRVQVSAGRVTAYLRDEWGLNAILADGGEEEKNRDDHRHHAVDASVIALTNAGTVELLSHSAEVAAERGRRLFVREEIQQPWPTFLDDVRRAIEAINISYRVNRRVTGALHEETNYSKPHKSRDGNGNGKEVEYRHVRKPLQNMSANEVENIVDDIIRKLVQTKLDQIGGEPKKVFADPGNHPYLTAKDGRRIFIHKARIRKTVAVIPLGKSSSPRYAAPGSNHHMELFATL

SEQ ID NO: 549 - protein, 1062 aa, unidentified
  REGION 1..1062: note = Description of Unknown: uncultivated organism
  REGION 1..1062: note = MG4-131 effector
MSAALEQQKYVLGLDLGSASLGWALIALNDADDPVSLIRAGVRIFEPGVDGTSIEIEQGKDQSKAVERRTARLHRRQLRRRAARQRDLFRVLQRHSLLPAPETLVGSPEEQRHSVLNELDQELAQKWQSTYQGKRFAELPLYYLRKMALDERLEAHEIGRILFHLIQRRGFLSNRRENKQNPDQKKELGQVKAEIHSLEQEIQNAGARTLGEFFAGLDPHAQKVRRRWTARKMFQDEFEKIWEAQKAHRPELLTQELHDKIAHLLFFQRPIAAQTHLIGKCELETGKQRAPWAAMEAQRFRILQKVNDLRLINPGSLISDPLTEEGRQRLYHLLDREGDQTFKAIRKYLSFSAEVQFNLEKGDEKRLRGNRTQAAMRKVFGERWDTIGEGKQHQIIENWRNSESDDVLIREAMEQWSLDAAAATLLSEQTPEPGYCAVSLAAISKLLPLMASGKSFKEAETELYGARFSGGTIFETLPEVRKQLESLRNPAVERSLTELRKVVNAIVREYGKPHEIRIELARELKKPRQERIEATKKNRNRQREREDVAVRILRECGLSNPSRRDIEKARLHEECGGYCPYTGRHIPFSTLFDNSEFDVEHIIPRSRYPDDSFQNKTLCYLPENRDVKKGQTPWEAYGKDEQRWAEIMTRVSSWKNRGKMARFAIQTEEALGDFSARQMNDTRYASVLASRFLGALYGGRDLVDAEKVRQVIFASSGAVTATLRSSWGLEAILREIVPTEPGESRGKPRTDHRHHAIDAITIALTRPKVIQSMALAASLEPWQRDSRAWRKIESPWRDFVLSIRPHIEQMLVSHRPEHKMSGELHKGTNYPPPHNYKGKPTVHTRCALSALSAADIADDEVIVDPAVRDAVRAKLEKLGGNPKLFDRPENVPCLESRDGRFIPIRKVRIREAKKPILVGTGVRERYVASGGIHHIGLFVVRDARRREVWESEVVQITDAYERHREHLPVVCRTHDAEEAAFLFSLMKDDTVELEKDGTRGIYRVKKFEATGKITFVPVNNAMLDKMQYTTGAAWSRMPATLKPMSPRKIVIDLLGKVHPAND

SEQ ID NO: 550 - protein, 835 aa, unidentified
  REGION 1..835: note = Description of Unknown: uncultivated organism with predicted taxonomy: Planctomycetes bacterium
  REGION 1..835: note = MG4-132 effector
MSVSAGSEHPYVLGLDLGSASLGWALIGIDAIETPVSLIRAGVRIFEPGVDGSALDIQQGKDQSKAVDRREARLHRRQLRRRVARQRELFGVLQGAGLLPTCDVPGAGIGSEQRHRILNALDMALTVRYRTGADKATFDQMPLYVLRKKALYEPLAFDELGRVFFHLSQRRGFQSNRKDVKKKTKEDEDQGQVKSAIYELEQAIQASDAQTLGEYLAGLDPHEQKVRRQWTGRRMFKEEFERIWVAQQAYHPSLLTPELHDRVWGLLFDQRPVSAQKHLVGKCELEPDKRRSPWAALPAQQFRVLQKVNDLRLLQENGKETPLYPQQRAAVFDLLENHGTQSFVKIKQHLGLPKTAQFNLERGKAKELKGNVTAQSMRKVFGVRWEEFSEGKQNQIIENWRNCEKDEDLKREAIEHWGLDEASANVLLAEKAPADYCALSLTALSKILPLMRAGKSFKEAETEVYDNRFSGAAVHPFIPVLRPHRKHFHNSTPPPQDPLMASIANGLRNPAVERAITEMRKVVNAIVREHGRPYEIRIELARELKKPRSKRLDETANNRKREAENRALAKRMHEECGIPQPPSRKDLEKAKLWVEQATGAGVCECPYTGKKLPFSRLFDDDNGFDVDHILPRSRHPDDSFQNKVLCWGEENRMHKRNQTPYEAYAEQDQERWQEILARVTRWKNPGKLRKFEIRSTDELEAFSSRQLNDTRYTSLLAARLLSTLYGGRDVTENGKNRQVIFASTGAVTATLRRNWGFEQILRGIIPAEPGESSGKPRTDHRHHAIDAIVIALTRNNVIQAMARASALEAWQSGTRSWRHVPQPWRTPDFFRSVEQ

SEQ ID NO: 551 - protein, 785 aa, unidentified
  REGION 1..785: note = Description of Unknown: uncultivated organism
  REGION 1..785: note = MG4-133 effector
MNESGSLAQDYVLGIDLGSVSLGWAVIGLDKTDMPVVLLRAGVRLFDPAVTGDIEKGQDESNAVARRVARLLRRQLRRRAARQSELFRLLQGHALLPPYEGNEADASQQRHAILNALDLEIAAKWAKSGGAGAQAAIDLPLYMLRKTALDEALEPYELGRVFYHLSQRRGYRSNRKEQAEKKEAAIKGKKDDDLGTVESGIKELGEAMRSFRTLGEYYASLDPHTHNVRRRWTSRKMYEDEFAAIWEKQAALHPTLLTEELHRQIKHLLFYQRPIKAQSHLIGGCELEPGEPRAAWAALEAQQFRVLQQVNELEVISPGRVTGIPLTAEQRQTVLDLLENSSEITFKKISKALGLADYIGFNLQRGGDTKLKGNLTNTHMAEVFAERWTEMSEEEKKQVVEDWRTIDQEDSLIRRAIEYWNLDESSAKWLASRPAPNGYCMYSRKSIRKLLPLMATGARFRAAEKEVYGIRLTGGLVYDSIPPVRDTLKTLRNPAVERALTELRKVVNALVREYGKPTEVRIELANDLKKPRHERAEAFKYKRKWEKQRIDTKEKMLRELGPGFEYPSRADVEKALLWEECQGECPYTGKRFPFSSLYGENPPLQVEHIIPFSRIPDDSFQNKILCYHEDNQHKANRTPFEAYTDPAQYETILSRVRNWRTPNPGKQCRFELRTLEELEGFSERQLNDTRYACKLACELVGTLYGGRDEKTDTDSRQVVFASSGMVTATLRKSWGLEAIMRETAPSANGQNHGKPRTDHRHHAIDAITIALSRPKMIATLSRNNA

SEQ ID NO: 552 - protein, 1062 aa, unidentified
  REGION 1..1062: note = Description of Unknown: uncultivated organism with predicted taxonomy: Acidobacteriales bacterium 59-55
  REGION 1..1062: note = MG4-134 effector
MSAALEQQKYVLGLDLGSASLGWALIALNDADDPVSLIRAGVRIFEPGVDGTSIEIEQGKDQSKAVERRTARLHRRQLRRRAARQRDLFRVLQRHSLLPAPETLVGSPEEQRHSVLNELDQELAQKWQSTYQGIRFAELPLYYLRKMALDERLEAHEIGRILFHLIQRRGFLSNRRENKQNPDQKKELGQVKAEIHSLEQEIQNAGARTLGEFFAGLDPHAQKVRRRWTARKMFQDEFEKIWEAQKAHRPELLTQELHDKIAHLLFFQRPIAAQTHLIGKCELETGKQRAPWAAMEAQRFRILQKVNDLRLINPGSLISDPLTEEGRQRLYHLLDREGDQTFKAIRKYLSFSAEVQFNLEKGDEKRLRGNRTQAAMRKVFGERWDTIGEGKQHQIIENWRNSESDDVLIREAMEQWSLDAAAATLLSEQTPEPGYCAVSLAAISKLLPLMASGKSFKEAETELYGARFSGGTIFETLPEVRKQLESLRNPAVERSLTELRKVVNAIVREYGKPHEIRIELARELKKPRQERIEATKKNRNRQREREDVAVRILRECGLSNPSRRDIEKARLHEECGGYCPYTGRHIPFSTLFDNSEFDVEHIIPRSRYPDDSFQNKTLCYLPENRDVKKGQTPWEAYGKDEQRWAEIMTRVSSWKNRGKMARFAIQTEEALGDFSARQMNDTRYASVLASRFLGALYGGRDLVDAEKVRQVIFASSGAVTATLRSSWGLEAILREIVPTEPGESRGKPRTDHRHHAIDAITIALTRPKVIQSMALAASLEPWQRDSRAWRKIESPWRDFVLSIRPHIEQMLVSHRPEHKMSGELHKGTNYPPPHNYKGKPTVHTRCALSALSAADIADDEVIVDPAVRDAVRAKLEKLGGNPKLFDRPENVPCLESRDGRFIPIRKVRIREAKKPILVGTGVRERYVASGGIHHIGLFVVRDARRREVWESEVVQITDAYERHREHLPVVCRTHDAEEAAFLFSLMKDDTVELEKDGTRGIYRVKKFEATGKITFVPVNNAMLDKMQYTTGAAWSRMPATLKPMSPRKIVIDLLGKVHPAND

SEQ ID NO: 553 - protein, 1062 aa, unidentified; identical to SEQ ID NO: 549
  REGION 1..1062: note = Description of Unknown: uncultivated organism with predicted taxonomy: Acidobacteriales bacterium 59-55
  REGION 1..1062: note = MG4-135 effector

SEQ ID NO: 554 - protein, 1062 aa, unidentified; identical to SEQ ID NO: 549
  REGION 1..1062: note = Description of Unknown: uncultivated organism with predicted taxonomy: Acidobacteriales bacterium 59-55
  REGION 1..1062: note = MG4-136 effector

SEQ ID NO: 555 - protein, 1105 aa, unidentified
  REGION 1..1105: note = Description of Unknown: uncultivated organism with predicted taxonomy: Acidobacteriales bacterium 59-55
  REGION 1..1105: note = MG4-137 effector
MSVSAGSEHPYVLGLDLGSASLGWALIGIDAIETPVSLIRAGVRIFEPGVDGSALDIQQGKDQSKAVDRREARLHRRQLRRRVARQRELFGVLQGAGLLPTCDVPGAGIGSEQRHRILNALDMALTVRYRTGADKATFDQMPLYVLRKKALYEPLAFDELGRVFFHLSQRRGFQSNRKDVKKKTKEDEDQGQVKSAIYELEQAIQASDAQTLGEYLAGLDPHEQKVRRQWTGRRMFKEEFERIWVAQQAYHPSLLTPELHDRVWGLLFDQRPVSAQKHLVGKCELEPDKRRSPWAALPAQQFRVLQKVNDLRLLQENGKETPLYPQQRAAVFDLLENHGTQSFVKIKQHLGLPKTAQFNLERGKAKELKGNVTAQSMRKVFGVRWEEFSEGKQNQIIENWRNSEKDEDLKREAIEHWGLDEASANVLLAEKAPADYCALSLTALSKILPLMRAGKSFKEAETEVYDNRFSGAAVHPFIPVLRPHRKHFHNSTPPPQDPLMASIANGLRNPAVERAITEMRKVVNAIVREHGRPYEIRIELARELKKPRSKRLDETANNRKREAENRALAKRMHEECGIPQPPSRKDLEKAKLWVEQATGAGVCECPYTGKKLPFSRLFDDDNGFDVDHILPRSRHPDDSFQNKVLCWGEENRMHKRNQTPYEAYAEQDQERWQEILARVTRWKNPGKLRKFEIRSTDELEAFSSRQLNDTRYTSLLAARLLSTLYGGRDVTENGKNRQVIFASTGAVTATLRRNWGFEQILRGIIPAEPGESSGKPRTDHRHHAIDAIVIALTRNNVIQAMARASALEAWQSGTRSWRHVPQPWRTPDFFRSVEQQVAEVLTSHRPEHKVGGELHRGSNYGRPYMYNGASTIHTRKLISALKIEDIDADDVIVDRVIRDILRAKLAELGGNPKAFEKPENTPYMTTPAGKRIPIRKVRIRETRNPLRVGEGPRERYVASGGIQHVELFVARDEKRREHWLSHVVQTTEMYDLFPKRDHRPGRPKAVTKSIPIRRQMPGQPEAEFLFSLLKNDTIELEKAGCREIFRVKKFEATGKITFVPINNAMPDTLQYGTGSAWSKMPTTLKVMSPQKVVIDLLGRVHPAND

SEQ ID NO: 556 - protein, 1001 aa, unidentified
  REGION 1..1001: note = Description of Unknown: uncultivated organism with predicted taxonomy: uncultured bacterium
  REGION 1..1001: note = MG4-138 effector
DESNAVARRTARLIRRQLRRRAARQSELFRLLQTRGLLPSYQGSEADASQQRHTILNALDLKLAAKWAKSGSNEEQTAIELPLYLLRKTALDAALEPYELGRVFYHLSQRRGYRSNRKEQASGKEASGKAKKADDLGAVEGGIKELEEAMHPFRTLGEYFASLDPHIQKVRRRWTGRKMYEDEFAAIWAKQAAFHPDLLPEELHHQIKRLLFYQRPIKAQSNLIGGCELEPGERRAAWATLEAQQFRVLQKVNDLEIILPGNVTGIPLTPEQRKIVLDLLENSAEATFKKIRKALGLAENIGFNLQRGGDTRLKGNLTNTLMAEAFAERWPEMSNEEKMQAVEDWRTIEQKESLVRRAIEHWKLDETGAQWLAEKPAPNGYCMYSRKAIRKLLPLMATGTRFKAAEKEIYGNRLAGGKVYDRIPPVRDALKTLRNPAIERALTELRKVINALVHEHGKPAEVRIELARDLKKPRHERAKAVSYNRDREKQRTTAKEKMLREVGPGFQHPSRADVEKALLWEECQGECPYTGKRFPFSSLFGENPPLQVDHIIPFSRIPDDSFQNKTLCYHEENQHKGNRTPFEAYTDPAQYEAILNRVRSWRTPNPGKQRRFELRTLEELEGFSERQLNDTRYASKLACELVGTLYGGRDVPLKDGKSRQVVFASSGMVTSTLRKGWGLEAILREAAPSANGQNRGKPRTDHRHHAIDAITIALSRPKMIAALSRNNAQDPYWPNNGRTTPKIQSPWKDFVDSIRPHFEQMLVSHRPEHRLTGALHDETNYGRPRKEGGKDVVHIRKPLVGKNKGEGLSSEDIENIVDPAVREAVKEKAVQFGGSLKTWTPNAAQDDWPLLKTKTGKQIPIKRVRIRKAIKVFPVGETAYRTRHVAPGADSIHHIAVYVTKDKHGRDKWISEIVRIFEEKQRWQAWKKKGGAVVPLVYSTHSEDKDAEFLFYLMKKDTLELEVNGKRAVYLVTSFESDGRINLIPINSSGKREDQKDSKIV

SEQ ID NO: 557 - protein, 1067 aa, unidentified
  REGION 1..1067: note = Description of Unknown: uncultivated organism
  REGION 1..1067: note = MG4-139 effector
MTESGSSQSNYVLGIDLGTTYAGWAAISLNQSGKPTGVLRAGVRVFDTTVTGNVEKGQDESNAIARRNARLVRRQLRRHVARQKALFQLLQQHGLLPPYQGTESDSSRQRHQILNALDHELVIKRASTGDANAKAAVELPLYLLRKIALDAALEPFELGRVFYHLSQRRGYKSNRKEKPTDKKKVAELGVVESGIEDLTEEMHRAHARTLGEYFASLDPHAQKIRGRWTARKMYEEEFALIWEKQATFRPDLLTEELHHQVKHLLFYQRPLKAQSHLIGRCELEPGERRAAWATLEAQEFRLLQEVNNLEIILPGSVIGVPLTAQQRQTVLDLLENSAEVTFKQIRKALGLANNAGFNLQHGGETRLKGNATNAYMNEVFGERWSAMPDGDKKQVVEDWRTIEQEDSLVRRAVSHWHLDEANAQWLASRSAPNGYCAFSRKAISKMLPFLAAGKSGQEAEIKIYGSRLSGGKVYDRIPPVRDFLKNLRNPAVERSLTELRKVVNALVQEYGKPVEIRIQLARELKKSRRERMESVSTNRDREKQRNAAKEKLLKELGLQHPSRADIEKALLWEECQGVCPYTGKQFPFSSLFGENPSMQVQHIIPFSRIPDDSFQNKTLCSVEENQYKANRTPFEAYADPAQYEAILDRVKNWPRPNRGKQRRFELRTLEELEGFSSRQLNCIRYASQMACKLMGTLYGGRDMETAGRSRQIIFASTGMLTGTLRRAWGLEAILREETPSSIEGKPRNDYRHHAIDAIAVALSHPKLIAALSRSDDSYAWATRALLKIESPWKNFIDSIRPHFDQMLISHRPEHRLTGEIHKATNYSMPHEEDGKQVVHLRRPVPGLTMKDIENIVDPATREAVRAKAVEYGNELVKWTPNQGGTDWPQLVNKSGKHIPIKKVRVKEVLNVRAIGKGESTRYVALKNNHHVAIFALLNEVADEKRWVPVVVSLFDAMQRKNKSEAVIQTTYSGSGKAAFKFSLMGGDTLLLHKDCDHGNSKCNPSVWQVRTIAASGQLSLVRINDARQKADILKAKEWWSPSVETLRKLEAIKVTIDSLGGIHQAGG

SEQ ID NO: 558 - protein, 1114 aa, unidentified
  REGION 1..1114: note = Description of Unknown: uncultivated organism with predicted taxonomy: Planctomycetes bacterium
  REGION 1..1114: note = MG4-140 effector
FQGLDRSKAVGRRIARQMRRQIDRKGIRLKALFKLLQSKSLLPIYPELKGEPLAAERHHLFTRLDKELTDALCAEKRKRGTDGLMLEADQALPYVLRKEALERKLELHELGRALYHLCQRRGYRPSAADDSEKEETASTEEEIESKRGRRKKPEPEDKGDKDSESPKKVAEWISDLQAKMDAAHTPTIGAYFADFKHNNPHQERIRHRWTGREMFVKEFDLIWERQSEFYRDSRPGLLNDDLRNRVYDCLFFQRPLASAEHLIGMCDLERGERRAPWATLEAQRFRLLQKVNDLAYIPSGLFNERKLSLEQCATLAAALQDKGDMPFPEIAKLLGLPPKTEFNLMRGKKKKIEGNRINQVMLQVFGDRWRAFTEQERSSAVALWTKTEGFEERKNVAISQCGLDAWKAKEWAENRPPKDCCRHSRKALVKLIKRMEEGVPYATAKLEIYDSQLAGKAPLDFVPKVIETLPSINNPAVLRALTELRKVVNAIIRTYGDKPYEIRIELARELRKNRKQRQNATEAGDKQHLRRIDAARTILRECRNYDAQGRDAERLVRERRDDVTKMLLLMECRCLCPYTGDSISYLDLFGGEVEVEHIIPQSLMVDNSFNNLTLCYRKVNHEKLDKTPRQAFCRAEDDQQWIDIIGRVQKFGNKEKLHRFLLSSREDIDRFSNRRLNDTRYTSKLAGRLLMSLYGGRDIVPAETLDELDEFKDRTGRRAICVSSGMVTSLLRDAWHLNLSGVIGDDAFKCPKKSEDDEESGKRRKGQSNKKDRCDHRHHALDAVVIALTSEKVIREINMLASRLYRERQTPLKYRDLKSIQNPWHNFMDDHFRDIFRRIVVSRRPEHKLSGALHEATSYGKVRYYNAKGDPVRYQRIAIGKLLTDKQIEKIVDEEVKKSVVKLGETIGGYKKWSQEKHGWPKMPNRNGEPVPIKKVRIKITKNAKEIEAERFRGFGTGRPESNVEDKEIAYASFFTVQDRKGTKTVWEIVKLFEAAQRVRALPKSERGHEKICWKYPKYPDATFFRFSLMKGDLVELVLNGKPAIFIVRRFEFDSRLWVAPINAAGKDEEMEAAGHLLRLGFSRFLTMGAGDDKIPRPVFVDLLGQPHYINIGA

SEQ ID NO: 559 - protein, 1079 aa, unidentified; identical to SEQ ID NO: 544
  REGION 1..1079: note = Description of Unknown: uncultivated organism
  REGION 1..1079: note = MG4-141 effector

SEQ ID NO: 560 - protein, 764 aa, unidentified
  REGION 1..764: note = Description of Unknown: uncultivated organism with predicted taxonomy: Polaribacter sp. ALD11
  REGION 1..764: note = MG4-142 effector
MSESGVSTQPYVLGLDLGSASLGWALVGIDAMERPSSLIRAGVRIFEPGVDGSALDIQQGKDQSKAVDRREARLRRRQLRRRVARQRELFGVLQGAGLLPTDDTQGTGIGSEQRHRILNNLDVTLSNRYRNGADQEIFAQMPLYALRKKALYEPLALDELGRVFFHLSQRRGFQSNRKDVKKKTKDSEDQGQVKSAIHELEQAIEAAGAQTLGEYLAGLDPHEQKVRRQWTGRKMFEKEFQMIWDKQKEYHTDLLTPELHDRIWNLLFFQRPVAAQKHLVGKCELEPDKRRAPWAALLAQQFRLLQKVNDLRLIGEDGNELPLNEDGRAAVFDLLENHGTQSFAKIKQHLGLPKTAQFNLERGKAKELKGNVTAQSMRKVFGERWKEFSEGKQNQIIENWRNSEKDEELKREAMEHWGLDEAGANALVNEKAPGEYCSLSLVALGKILPLMRAGKSFKEAETEIYGNRFSGAAVHSIIPVLRPNRKHFRNGTPPPQDPLMASIANGLRNPAVERSITEMRKVVNAIVREYGKPCEIRIELARELKKPRSKRLDETARNRKREAENKALAERMHNECGTPQNPSRNDLEKAKLWVEQQGECPYTGRSLPFSRLFDDNNGFDVDHILPRSRHPDDSYQNKVLCWGDTNRMVKRNQTPYEAFAEQDPENWHQILARVARWKNPGKLRKFEIRSTDDLAEFSSRQLNDTRYTSLLAARLLSTLYGGRDVAENGGKRQIIFASTGAVTATLRRNWGFEQILRNIIPPEP

SEQ ID NO: 561 - protein, 1062 aa, unidentified
  REGION 1..1062: note = Description of Unknown: uncultivated organism
  REGION 1..1062: note = MG4-143 effector
MSSALEQQKYVLGLDLGSASLGWALIALNGADDPVSLIRAGVRIFEPGVDGTSIEIEQGKDQSKAVERRTARLHRRQLRRRAARQRDLFRVLQRHCLLPAPETLVGSPEEQRHSVLNELDQELTQKWQSTYQGIRFAELPLYYLRKMALDERLEAHEIGRILFHLIQRRGFLSNRRENKQNPDQKKELGQVKAEIHSLEQEIQNAGARTLGEFFAGLDPHAQKVRRRWTARKMFQDEFEKIWEAQKAHRPELLTQELHDKIAHLLFFQRPIAAQTHLIGKCELETGKQRAPWAAMEAQRFRILQKVNDLRLINPGSLISDPLTEEGRQRLYHLLDREGDQTFKAIRKYLSFSAEVQFNLEKGDEKRLRGNRTQAAMRKVFGERWDTIGEGKQHQIIENWRNSESDDVLIREAMEQWSLDAAAATLLSEQTPEPGYCAVSLAAISKLLPLMASGKSFKEAETELYGARFSGGTIFETLPEVRKQLESLRNPAVERSLTELRKVVNAIVREYGKPHEIRIELARELKKPRQERIEATKKNRNRQREREDVAVRILRECGLSNPSRRDIEKARLHEECGGYCPYTGRHIPFSTLFDNSEFDVEHIIPRSRYPDDSFQNKTLCYLPENRDVKKGQTPWEAYGKDEQRWAEIMTRVSSWKNRGKMARFAIQTEEALGDFSARQMNDTRYASVLASRFLGALYGGRDLVDAEKVRQVIFASSGAVTATLRSSWGLEAILREIVPTEPGESRGKPRTDHRHHAIDAITIALTRPKVIQSMALAASLEPWQRDSRAWRKIESPWRDFVLSIRPHIEQMLVSHRPEHKMSGELHKGTNYPPPHNYKGKPTVHTRCALSALSAADIADDEVIVDPAVRDAVRAKLEKLGGNPKLFDRPENVPCLESRDGRFIPIRKVRIREAKKPILVGTGVRERYVASGGIHHIGLFVVRDARRREVWESEVVQITDAYERHREHLPVVCRTHDAEEAAFLFSLMKDDTVELEKDGTRGIYRVKKFEATGKITFVPVNNAMLDKMQYTTGAAWSRMPATLKPMSPRKIVIDLLGKVHPAND

SEQ ID NO: 562 - protein, 1076 aa, unidentified; identical to SEQ ID NO: 545
  REGION 1..1076: note = Description of Unknown: uncultivated organism
  REGION 1..1076: note = MG4-144 effector

SEQ ID NO: 563 - protein, 752 aa, unidentified
  REGION 1..752: note = Description of Unknown: uncultivated organism
  REGION 1..752: note = MG4-145 effector
MNESGSLAQDYVLGIDLGSVSLGWAVIGLDKTDMPVVLLRAGVRLFDPAVTGDIEKGQDESNAVARRVARLLRRQLRRRAARQSELFRLLQGHALLPPYEGNEADASQQRHAILNALDLEIAAKWAKSGGAGAQAAIDLPLYMLRKTALDEALEPYELGRVFYHLSQRRGYRSNRKEQAEKKEAAIKGKKDDDLGTVESGIKELGEAMRSFRTLGEYYASLDPHTHNVRRRWTSRKMYEDEFAAIWEKQAALHPTLLTEELHRQIKHLLFYQRPIKAQSHLIGGCELEPGEPRAAWAALEAQQFRVLQQVNELEVISPGRVTGIPLTAEQRQTVLDLLENSSEITFKKISKALGLADYIGFNLQRGGDTKLKGNLTNTHMAEVFAERWTEMSEEEKKQVVEDWRTIDQEDSLIRRAIEYWNLDESSAKWLASRPAPNGYCMYSRKSIRKLLPLMATGARFRAAEKEVYGIRLTGGLVYDSIPPVRDTLKTLRNPAVERALTELRKVVNALVREYGKPTEVRIELANDLKKPRHERAEAFKYKRKWEKQRIDTKEKMLRELGPGFEYPSRADVEKALLWEECQGECPYTGKRFPFSSLYGENPPLQVEHIIPFSRIPDDSFQNKILCYHEDNQHKANRTPFEAYTDPAQYETILSRVRNWRTPNPGKQCRFELRTLEELEGFSERQLNDTRYACKLACELVGTLYGGRDEKTDTDSRQVVFASSGMVTATLRKSWGLEAIMRETAPSANGQNH

SEQ ID NO: 564 - protein, 1035 aa, unidentified
  REGION 1..1035: note = Description of Unknown: uncultivated organism with predicted taxonomy: Acidobacteriales bacterium 59-55
  REGION 1..1035: note = MG4-146 effector
LNGADDPVSLIRAGVRIFEPGVDGTSMEIEQGKDQSKAVERRTARLHRRQLRRRAARQRDLFRVLQRHCLLPAPETLVGSPEEQRHSVLNELDQELAQKWQSTYQGKRFAELPLYYLRKMALDERLEAHEIGRILFHLIQRRGFLSNRRENKQNPDQKKELGQVKAEIHSLEQEIQNAGARTLGEFFAGLDPHAQKVRRRWTARKMFQDEFEKIWEAQKAHRPELLTQELHDKIAHLLFFQRPIAAQTHLIGKCELETGKQRAPWAAMEAQRFRILQKVNDLRLINPGSLISDPLTEEGRQRLYHLLDREGDQTFKAIRKYLSFSAEVQFNLEKGDEKRLRGNRTQAAMRKVFGERWDTIGEGKQHQIIENWRNSESDDVLIREAMEQWSLDAAAATLLSEQTPEPGYCAVSLAAISKLLPLMASGKSFKEAETELYGARFSGGTIFETLPEVRKQLESLRNPAVERSLTELRKVVNAIVREYGKPHEIRIELARELKKPRQERIEATKKNRNRQREREDVAVRILRECGLSNPSRRDIEKARLHEECGGYCPYTGRHIPFSTLFDNSEFDVEHIIPRSRYPDDSFQNKTLCYLPENRDVKKGQTPWEAYGKDEQRWAEIMTRVSSWKNRGKMARFAIQTEEALGDFSARQMNDTRYASVLASRFLGALYGGRDLVDAEKVRQVIFASSGAVTATLRSSWGLEAILREIVPTEPGESRGKPRTDHRHHAIDAITIALTRPKVIQSMALAASLEPWQRDSRAWRKIESPWRDFVLSIRPHIEQMLVSHRPEHKMSGELHKGTNYPPPHNYKGKPTVHTRCALSALSAADIADDEVIVDPAVRDAVRAKLEKLGGNPKLFDRPENVPCLESRDGRFIPIRKVRIREAKKPILVGTGVRERYVASGGIHHIGLFVVRDARRREVWESEVVQITDAYERHREHLPVVCRTHDAEEAAFLFSLMKDDTVELEKDGTRGIYRVKKFEATGKITFVPVNNAMLDKMQYTTGAAWSRMPATLKPMSPRKIVIDLLGKVHPAND

SEQ ID NO: 565 - protein, 1079 aa, unidentified; identical to SEQ ID NO: 544
  REGION 1..1079: note = Description of Unknown: uncultivated organism
  REGION 1..1079: note = MG4-147 effector

SEQ ID NO: 566 - protein, 1062 aa, unidentified; identical to SEQ ID NO: 549
  REGION 1..1062: note = Description of Unknown: uncultivated organism
  REGION 1..1062: note = MG4-148 effector

SEQ ID NO: 567 - protein, 1062 aa, unidentified
  REGION 1..1062: note = Description of Unknown: uncultivated organism
  REGION 1..1062: note = MG4-149 effector
MSAALEQQKYVLGLDLGSASLGWALIALNDADDPVSLIRAGVRIFEPGVDGTSIEIEQGKDQSKAVERRTARLHRRQLRRRAARQRDLFRVLQRHSLLPAPETLVGSPEEQRHSVLNELDQELAQKWQSTYQGKRFAELPLYYLRKMALDERLEAHEIGRILFHLIQRRGFLSNRRENKQNPDQKKELGQVKAEIHSLEQEIQNAGARTLGEFFAGLDPHAQKVRRRWTARKMFQDEFEKIWEAQKAHRPELLTQELHDKIAHLLFFQRPIAAQTHLIGKCELETGKQRAPWAAMEAQRFRILQKVNDLRLINPGSLISDPLTEEGRQRLYHLLDREGDQTFKAIRKYLSFSAEVQFNLEKGDEKRLRGNRTQAAMRKVFGERWDTIGEGKQHQIIENWRNSESDDVLISEAMEQWSLDAAAATLLSEQTPEPGYCAVSLAAISKLLPLMASGKSFKEAETELYGARFSGGTIFETLPEVRKQLESLRNPAVERSLTELRKVVNAIVREYGKPHEIRIELARELKKPRQERIEATKKNRNRQREREDVAVRILRECGLSNPSRRDIEKARLHEECGGYCPYTGRHIPFSTLFDNSEFDVEHIIPRSRYPDDSFQNKTLCYLPENRDVKKGQTPWEAYGKDEQRWAEIMTRVSSWKNRGKMARFAIQTEEALGDFSARQMNDTRYASVLASRFLGALYGGRDLVDAEKVRQVIFASSGAVTATLRSSWGLEAILREIVPTEPGESRGKPRTDHRHHAIDAITIALTRPKVIQSMALAASLEPWQRDSRAWRKIESPWRDFVLSIRPHIEQMLVSHRPEHKMSGELHKGTNYPAPHNYKGKPTVHTRCALSALSAADIADDEVIVDPAVRDAVRAKLEKLGGNPKLFDRPENVPCLESRDGRFIPIRKVRIREAKKPILVGTGVRERYVASGGIHHIGLFVVRDARRREVWESEVVQITDAYERHREHLPVVCRTHDAEEAAFLFSLMKDDTVELEKDGTRGIYRVKKFEATGKITFVPVNNAMLDKMQYTTGAAWSRMPATLKPMSPRKIVIDLLGKVHPAND

SEQ ID NO: 568 - protein, 901 aa, unidentified
  REGION 1..901: note = Description of Unknown: uncultivated organism with predicted taxonomy: Polaribacter sp. ALD11
  REGION 1..901: note = MG4-150 effector
SASLGWALIALDESDNPVSLIRAGVRIFEPGVDGAKPGTPASAQEIQFGKDQSTAVARRQERLRRRQLRRRVARQRKLFGVLQGAGLLPTGDVLGAGIGSEQRHRVLNNLDADLMNRYRSSADKANFGQMPLYALRKKALYEPLALDELGRVFFHLSQRRGFQSNRKDVQKKTKGSEDQGQVKSAIHELEQAIQVAGAQTLGEYLAGLDPHEQKVRRQWTGRKMFEKEFQMIWDKQKEYHTDLLTSELHGRIWDLLFFQRPVAAQKHLVGKCELEPDKRRAPWAALLAQQFRLLQKVNDLRLIEEDGNELPLNEDGRIAVFNLLENHGTQTFAKIKQHLGLPKTAEFNLERGKAKELKGNITAQSMRKVFGERWTQFSAGKQNQIVENWRNSEKDEELRREAMEHWGLDEAGANALVNEKAPGDYCSLSLMALGKILPLMRAGKSFKEAETEIYGNRFSGAAVHSLIPVLRPNRKHFRNSTPPPQDPLMASIANGLRNPAVERSITEMRKVVNAIVREYGKPCEIRIELARELKKPRSKRLDETARNRKREAENKALAERMHNECGMPQNSSRNDLEKAKLWVEQQGQCPYTGRSLPFSRLFDDNNGFDVDHILPRSRHPDDSYQNKVLCWGDTNRMVKRNQTPYEAFAEQDPENWHQILARVARWKNPGKSRKFEIRSTDELAEFSSRQLNDTRYTSLLAARLLSTLYGGRDLAENGRKRQIIFASSGAVTATLRRNWGFEQILRNIIPPEPNESSGKPRTDHRHHAIDAIVIALTRNDVIQAMARASALEPWQPGTRSWRHVPQPWHTPNFFRSVEEQVREMLTSHRPEHKVSGELHKGSNYGRPYLYNGKPTVHSRVSISALRSQDIEDDDVIVDRRVRDILRTKLAEIGGNPKAFEK

SEQ ID NO: 569 - protein, 1105 aa, unidentified; identical to SEQ ID NO: 555
  REGION 1..1105: note = Description of Unknown: uncultivated organism with predicted taxonomy: Acidobacteriales
  REGION 1..1105: note = MG4-151 effector

SEQ ID NO: 570 - protein, 1079 aa, unidentified; identical to SEQ ID NO: 544
  REGION 1..1079: note = Description of Unknown: uncultivated organism
  REGION 1..1079: note = MG4-152 effector

SEQ ID NO: 571 - protein, 1062 aa, unidentified; identical to SEQ ID NO: 549
  REGION 1..1062: note = Description of Unknown: uncultivated organism
  REGION 1..1062: note = MG4-153 effector

SEQ ID NO: 572 - protein, 1076 aa, unidentified
  REGION 1..1076: note = Description of Unknown: uncultivated organism with predicted taxonomy: Acidobacteriales bacterium 59-55
  REGION 1..1076: note = MG4-154 effector
MSSALERPQKYVLGLDLGSASLGWALIALNDADNPTSLIRAGVRIFEPGVDGTSMEIEQGKDQSKAVERRTARLHRRQLRRRAARQRDLFRLLQRHSLLPAPETLGGSPEEQRHSILNGLDQALARKWQSAFPDNRFAQLPLYYLRKRALDEPLEAHEIGRILFHLIQRRGFLSNRRENKQNPDQKKELGQVKAEIHSLEQEIQNAGARTLGEFFAGLDPHAQKVRRRWTARKMFQNEFEKIWEAQVIHCPNLLMPELHDKIAHLLFFQRPIATQSHLVGKCELEPGKQRAPWAAMEAQRFRILQKVNDLRLVNPGSLISDPLTEEDRQRLNSLLDREGDQTFKAIKKYLSFPADVQFNLEKGDEKRLRGNRTQAAMRKVFGDRWDRMSAGKQHQIVENWRNSESDEALIREAEEQWALDDTAATLLSEQIPEPGYCAVSLTAISKLLPLMQCGKSFKEAETVVYGARFSGGVVFDTLPEVRKQLESLRNPAVERALTELRKVVNAIVREYGKPYEIRIELARELKKPRQERLEATKKNRTRQREREDIAGKILRECGLSNPSRKDIEKARLHEECGGICPYTGRHIPFSTLFDNSEFDVEHIIPRSRYPDDSFQNKTLCYLPENRDVKKGQTPWEAYGKDEQRWAEIMTRVGSWKNRGKMARFSIQTEEALGEFSARQMNDTRYASVLAARFLGSLYGGRDVVDGDNARQVIFASSGAVTATLRSSWGLEAILHEIVPAESGESRGKPRTDHRHHAIDAITIALTRSKVIQSMARTASLEPWQIDSRAWRKIELPWRDFVPSIRPHIEQMLVSHRPEHKMSGELHKGTNYSTPYNYKGKPTVHTRCLLSALSAADIAGDEVIVDTAVRDAVRKKLAELGGNPKLFDRPENAPCLSARDGRLIPIRKVRVRETKNPVKVGKGVRERFTSSGGIHHVALFVTRDEKRREKWDSEVAQVTEIYRRCPRNDHRKGRSQPVVTESPISRQLKSDPEAQFLFSVMKDDTIEVTDPNGIHILRVKKFSDNKQMWFVPVNDAHDDTQQMKLGITWSKTPNSLKELRPRKVVVDLLGKVHPAND

SEQ ID NO: 573 - protein, 1026 aa, unidentified
  REGION 1..1026: note = Description of Unknown: uncultivated organism with predicted taxonomy: Deltaproteobacteria
  REGION 1..1026: note = MG4-155 effector
MEIQVAVPYVLGIDLGANSVGWAALLHEHGESVGILDLGVRIFAAGVTGLEAGRDESHAAARRVARLQRRQTDRRRRRIHKIYGILADYGLLPAKATPADRAKALSALDNELSARYGAHDNLPYVLRARALGEALSPFELGRALFHLAQRRGFLSNRKSTKEPDDEKGKVKSGITILAHAIAESGSRTLGEHLSRLDPHEARIRGRYTSRQMYLDEFDKIWESQAANHPELLNPERKRELLQAMFHQRPLRDQSDLIGDCELEEGEKRAPAWHPLAQRFRLLQEVNHLRLIDPAGVSRALSAEERQAVVPLLEKGDLPIRELRKLLEIKRNVEINLDRGGKKALIGDRTEEKMRGAFGAAWDALSQEEKLEAITDLAGDLGDTQLARKAQDRWGLSAEQAERYSSTSLEVGRYLGFSLKAIAKMLPLLESGADATTARDAAYPAGTFRTDLLGALPPVAERLKDLRNPAVLRSLTELRKVVNALIGRYGKPLEIHVELARDLKASRPEREDRWARMRRNEKARAEAAAKIQSEIGIHTPGRADTEKWLLAEECHWRCPYSGRGFSATQLYQSGEIQVEHIIPFSRSLDDSFANKTLAYSWVNKAKGNRSPREAFQEQSQWEAILTEVGSFHGPYAKHKLQRFQWTSEQIAELLDDFTKRQLNDTRYASKLAARYMACLYGGLSDSCGQRIFVSPGQVTAFLRRLWAIEGLLSGGGGKSRDDHRHHAIDAVVVALTGPAWVKALSDAASRAREEGRRRFASLEAPWPGFAAAVQDRLQGLTVSHRANLKVGGAMHDETFYGVIQHPELGPTAVCRKLVHRLSKEDLEHIVDPRVRERVALQLGLQGGDFKQLEAHPPTIPTHDGREVPIRKVRIMKAEHTRRIGQGARARNVMGDDYHHLEVIRQTDPRTGKTKWALAAVTCQQAMERVRDHKPLVSRDHGPHAEFVCSVAKDDTLEINEAGNKRLVVVKALEAGRNVVGFKDLRDARPYSATTKNRERVAVARLMDALKCRKVTVSPLGETHYAND

SEQ ID NO: 574 - protein, 1037 aa, unidentified
  REGION 1..1037: note = Description of Unknown: uncultivated organism with predicted taxonomy: Planctomycetes bacterium
  REGION 1..1037: note = MG4-156 effector
SMLGVDLGSAALGWAVVGVADGKPACHVDGGVRIFPEAVENLEQGKDDPKSAQRRLARQMRRQTDRRARRVASVFRVLQKAGLLPRFSEGADPADPLARHELINRLDEDLACTVPGLIDPAAEHRSRSVFHYRLRALAIHQDLPPYAIGRAFLHIAQRRGFKSGRIEEASGSEKAKERESDSRKERRQVAARIESLPAEFLRLGACTIGEYWSKLDPNQKRIRGIGNWSGRQMHVDEFDRIWERQAPRQQEIMTPLLYRIVKRRIFFQRPLKSAAGLIGHCELERESQRRRAPLAHPLYQRFRILQTVNDLRIVEGSGLSRPLTVEQRIKALDTLSRQQTVTFKSLHKKLGLVPGETFSHEEGDRKDLPGNRTECKLREVFGEQWDSLPEQQKNVIAGYVRSMDDSAVLARIAETRWGLGHLRAARLAGIQLEQGYGRLSVAALRKLLPLMEEGLPYMTAVERIYPDRAFAPTQELLPKVLDLKNVRNPAVVRALTELRKVVNGVIREYGRPERIQIELARELKKPAKARERIAQENRQREDLRKKTIERIFRECGLGKPSNADIEKAILWEECQHHDPYTGGSINFHDLFGSDAKWEIEHIIPHSRSQDDSLTNKTLCSRETNRQKGNRTPFEVFGNTPEWEAMVERVTKFQGDKRAMTRKLARFTMEGGVEELFGEFTQRQLNDTKYASLLAMEFLGQLYGGVCDERGIRRVNAVSGGVTAQIRKGWRLHSILRDGPSQGEAKPRDDHRHHAIDALVIAMTDAGAVQAVSRASERSRLDHRHGFRVDDPWNGFLEQVQAVIRAIRVSHRPDHHLRGALHAESLYSPPRSERGAAPRHRIRKWLSSLTPEQVRDIVDTKVREAVEAKLKELGQTDPRDAFKNNADPPTLGNRHGDPVPIRRVRVYVSVSPQRIGTGATARHVVSKDNHHLAIYRLSADKKGTARWTGEAVSLLEALKRMNLPGRPVIAPVNESGAPLVMALYKGDLVEMTVPKSQPPERDLFVVRGFSIEKRGGPEINFARHTLAAEMASQKKRGG

SEQ ID NO: 575 - protein, 1062 aa, unidentified
  REGION 1..1062: note = Description of Unknown: uncultivated organism
  REGION 1..1062: note = MG4-157 effector
MSAALEQQKYVLGLDLGSASLGWALIALNDADDPVSLIRAGVRIFEPGVDGTSIEIEQGKDQSKAVERRTARLHRRQLRRRAARQRDLFRVLQRHCLLPAPETLVGSPEEQRHSVLNELDQELAQKWQSTYQGKRFAELPLYYLRKMALDERLEAHEIGRILFHLIQRRGFLSNRRENKQNPDQKKELGQVKAEIHSLEQEIQNAGARTLGEFFAGLDPHAQKVRRRWTARKMFQDEFEKIWEAQKAHRPELLTQELHDKIAHLLFFQRPIAAQTHLIGKCELETGKQRAPWAAMEAQRFRILQKVNDLRLINPGSLISDPLTEEGRQRLYHLLDREGDQTFKAIRKYLSFSAEVQFNLEKGDEKRLRGNRTQAAMRKVFGERWDTIGEGKQHQIIENWRNSESDDVLIREAMEQWSLDAAAATLLSEQTPEPGYCAVSLAAISKLLPLMASGKSFKEAETELYGARFSGGTIFETLPEVRKQLESLRNPAVERSLTELRKVVNAIVREYGKPHEIRIELARELKKPRQERIEATKKNRNRQREREDVAVRILRECGLSNPSRRDIEKARLHEECGGYCPYTGRHIPFSTLFDNSEFDVEHIIPRSRYPDDSFQNKTLCYLPENRDVKKGQTPWEAYGKDEQRWAEIMTRVSSWKNRGKMARFAIQTEEALGDFSARQMNDTRYASVLASRFLGALYGGRDLVDAEKVRQVIFASSGAVTATLRSSWGLEAILREIVPTEPGESRGKPRTDHRHHAIDAITIALTRPKVIQSMALAASLEPWQRDSRAWRKIESPWRDFVLSIRPHIEQMLVSHRPEHKMSGELHKGTNYPPPHNYKGKPTVHTRCALSALSAADIADDEVIVDPAVRDAVRAKLEKLGGNPKLFDRPENVPCLESRDGRFIPIRKVRIREAKKPILVGTGVRERYVASGGIHHIGLFVVRDARRREVWESEVVQITDAYERHREHLPVVCRTHDAEEAAFLFSLMKDDTVELEKDGTRGIYRVKKFEATGKITFVPVNNAMLDKMQYTTGAAWSRMPATLKPMSPRKIVIDLLGKVHPAND

SEQ ID NO: 576 - protein, 1062 aa, unidentified; identical to SEQ ID NO: 549
  REGION 1..1062: note = Description of Unknown: uncultivated organism
  REGION 1..1062: note = MG4-158 effector

SEQ ID NO: 577 - protein, 1062 aa, unidentified; identical to SEQ ID NO: 549
  REGION 1..1062: note = Description of Unknown: uncultivated organism with predicted taxonomy: Acidobacteriales bacterium 59-55
  REGION 1..1062: note = MG4-159 effector

SEQ ID NO: 578 - protein, 1075 aa, unidentified
  REGION 1..1075: note = Description of Unknown: uncultivated organism with predicted taxonomy: Planctomycetes
  REGION 1..1075: note = MG4-160 effector
MAAAKKPYILGLDLGVQSAGWAMIDVDDHGRPCGIRRSGVRCFDSGVGSETEIASGKDESQNIKRRQMRLQRRQLWRRGRRLKKVFLVLQKAGILPPGETRSPEQRHELLKLLDAELAKTHLPEHDRVAGHLLPYRLRALALDQALPPFAFGRALFHLAQRRGFLSIRKSASKDGDDEGAVKAGIAELQQNMQEAGVRTLGEYFSKLDPEAEKQRIRKRWTARSMYLDEFEKIWVAQSPHHPMLGEEWKTRVYDAIFHQRPLKSQKGLVGVCELEPTCRRAPRASVEAQRFRYLQKVNDLEIVTPDGEIWALTDPEHVDLRKKLIELLDTQAEVKFASLRSKLGLWAKLGRKKPKGTDKDFTFNLEAGGESKLKGNTTATKIRGVLGDDYGKLSPEQLAGLVDDLLEYEKKEALARRLTKNYEIAPAKADQLADVTLEPNYASLSREAMHKLLPIMENGRRFASLTQEELEKLFPNRRKGGITYDLLPPVLGIIDLRNPVVCRGLTELRKVLNALIRQYGKPELIRVELARDLKKSRQQREDLTKQNRDNEKARDAARTKIAERLHCDENAVSNLDILKVRLAEECNWECPYTGKSIAIEALVGKHAQFDIEHIIPFSRSLDNSFLNKTLCDNHFNRHVKKNGTPHETCSSNEREWQEIIGRVKRFRGSAAHAKLRKFQQEKPDEDFAARMLQDTRYMSRLATEYLGLLYGGTIDADHTRRVQVSAGRVTAYLRDEWGLNAILADGGEEEKNRDDHRHHAVDASVIALTNAGTVELLSHSAEVAAERGRRLFVREEIQQPWPTFLDDVRRAIEAINISYRVNRRVTGALHEETNYSKPHKSRDGNGNGKEVEYRHVRKPLQNMSANEVENIVDDIIRKLVQTKLDQIGGEPKKVFADPGNHPYLTAKDGRRIFIHKARIRKTVAVIPLGKSSSPRYAAPGSNHHMEIFATLDQEGKENRWESKIVSLFEAHRRVRAGEPVIQRDHGSNTEFKFSLAGGEYLELDDDGGGRRLVRITVISGKIAEFRLHTDARPITILRQTKGGRAGLSKPVDSLRKANARKVVVDPLGNILPAND

SEQ ID NO: 579 - protein, 780 aa, unidentified
  REGION 1..780: note = Description of Unknown: uncultivated organism with predicted taxonomy: Acidobacteriales bacterium 59-55
  REGION 1..780: note = MG4-161 effector
LETGKQRAPWAAMEAQRFRILQKVNDLRLINPGSLISDPLTEEGRQRLYHLLDREGDQTFKAIRKYLSFSAEVQFNLEKGDEKRLRGNRTQAAMRKVFGERWDTIGEGKQHQIIENWRNSESDEVLIREAMEQWSLDAAAATLLSEQTPEPGYCAVSLAAISKLLPLMASGKSFKEAETELYGARFSGGTIFETLPEVRKQLESLRNPAVERSLTELRKVVNAIVREYGKPHEIRIELARELKKPRQERIEATKKNRNRQREREDVAVRILRECGLSNPSRRDIEKARLHEECGGYCPYTGRHIPFSTLFDNSEFDVEHIIPRSRYPDDSFQNKTLCYLPENRDVKKGQTPWEAYGKDEQRWAEIMTRVSSWKNRGKMARFAIQTEEALGDFSARQMNDTRYASVLASRFLGALYGGRDLVDAEKVRQVIFASSGAVTATLRSSWGLEAILREIVPTEPGESRGKPRTDHRHHAIDAITIALTRPKVIQSMALAASLEPWQRDSRAWRKIESPWRDFVLSIRPHIEQMLVSHRPEHKMSGELHKGTNYPAPHNYKGKPTVHTRCALSALSAADIADDEVIVDPAVRDAVRAKLEKLGGNPKLFDRPENVPCLESRDGRFIPIRKVRIREAKKPILVGTGVRERYVASGGIHHIGLFVVRDARRREVWESEVVQITDAYERHREHLPVVCRTHDAEEAAFLFSLMKDDTVELEKDGTRGIYRVKKFEATGKITFVPVNNAMLDKMQYTTGAAWSRMPATLKPMSPRKIVIDLLGKVHPAND

SEQ ID NO: 580 - protein, 792 aa, unidentified
  REGION 1..792: note = Description of Unknown: uncultivated organism
  REGION 1..792: note = MG4-162 effector
LHYKIKHLLFYQRPIKAQSHLIGDCELEPGERRAAWATLEAQQFRVLQKVNDLEIILPGNVTGIPLTPEQRQTVLNLLESSSEATFKKIRKALGLGENIGFNLQRGGETKLKGNLTNSHMADVFAERWLEMSEEDKKQVVEDWRTIEREESLIRRATEHWKLDETGAKWLASRPAPSGYCSISRKAIRKLLPLMMEGKRFKEAENEIWGSRFSGGQVYDRIPPVRQALKSLRNPAVERALTELRKVVNALIRELGKPTEVRIDLDRDLKKPRHERAKAVSQNRDREKQRSAAKVKMLQEIGPGFEHPSRADVEKALLWEECQGECPYTGKRFPLSSLFGENPPLQVEHIIPFSRIPDDSFQNKTLCYHEENQIKGNRTPFEAYKDAEQFETILNRVRNWRTPNPGKQRRFELRTLEELEGFSSRQLNDTRYASKLACELVGTLFGGRDIPTESGSRQVVFASSGMVTATLRKGWGLEAILREAAPSANGQNRGKPRTDHRHHAIDAITIALSAPRMIAALSRNNAQDPYWPRNGRTAPKLQSPWNGFVDSIRPHFEQMLVSHRPEHRLTGALHDETNYGRPHKEGGKDVVHIRKQVVGMSAGDIENIVDPAVRESVREKAASFGGDLKKWTPKEGSEDWPLLRTKTGKEIPIKRVRIKKSLGVETIAKGDRARHVALSSNHHVAIFALLDERGGERRWEPMIVSLFEAMERKRKGQPLIQTRYPVVGEFIFKFSLMGGDTVLLHKDCDHKNNHCNPSVWRLRTIGSNGQLSLVRINDARLKAEIQKAKEWWS

SEQ ID NO: 581 - protein, 1106 aa, unidentified
  REGION 1..1106: note = Description of Unknown: uncultivated organism with predicted taxonomy: Acidobacteriales bacterium 59-55
  REGION 1..1106: note = MG4-163 effector
MSESGVSTQPYVLGLDLGSASLGWALVGIDAMERPSSLIRAGVRIFEPGVDGSALDIQQGKDQSKAVDRREARLRRRQLRRRVARQRELFGVLQGAGLLPTDDTQGTGIGSEQRHRILNNLDVTLSNRYRNGADQEIFAQMPLYALRKKALYEPLALDELGRVFFHLSQRRGFQSNRKDVKKKTKDSEDQGQVKSAIHELEQAIEAAGAQTLGEYLAGLDPHEQKVRRQWTGRKMFEKEFQMIWDKQKEYHTDLLTPELHDRIWNLLFFQRPVAAQKHLVGKCELEPDKRRAPWAALLSQQFRLLQKVNDLRLIGEDGNELPLNEDGRAAVFDLLENHGTQSFAKIKQHLGLPKTAQFNLERGKAKELKGNVTAQSMRKVFGERWKEFSEGKQNQIIENWRNSEKDEELKREAMEHWGLDEAGANALVNEKAPGDYCSLSLVALGKILPLMRAGKSFKEAETEIYGNRFSGAAVHSIIPVLRPNRKHFRNGTPPPQDPLMASIANGLRNPAVERSITEMRKVVNAIVREYGKPCEIRIELARELKKPRSKRLDETARNRKREAENKALAERMHNECGTPQNPSRNDLEKAKLWVEQQGECPYTGRSLPFSRLFDDNNGFDVDHILPRSRHPDDSYQNKVLCWGDTNRMVKRNQTPYEAFAEQDPENWHQILARVARWKNPGKLRKFEIRSTDDLAEFSSRQLNDTRYTSLLAARLLSTLYGGRDVAENGGKRQIIFASTGAVTATLRRNWGFEQILRNIIPPEPSESTGKPRTDHRHHAIDAIVIALTRNDVIQSMARASALEPWQPGTRSWRHVPQPWRTPDFFRSVEEQVREMLTSHRPEHKVSGELHQGSNYARPYMYKGKSIVHSRTLVSELKVEQIEADDVIVDRAVRDILRAKLKEIGGTLKGSDKVKTFEKPENTPYILTPAGKRIPIRKVRIRETKNPLLVGAGSNERFVASGGIHHVDLFVTRDEKRRETWDSKVIQTTEMYDRFPKHDRRPGRPHTESKNLSRLRQNDDDDESRFLFSLMKSDTIQLEQDGHRQIFKVKKFEATGKMTFIPINNAMPDKLQYSTGAAWSKMPATLKSMSPQKVVVDLLGRVHPAND

SEQ ID NO: 582 - protein, 1015 aa, unidentified
  REGION 1..1015: note = Description of Unknown: uncultivated organism
  REGION 1..1015: note = MG4-164 effector
ARRVARLLRRQLRRRSARQSELFRLLQGHALLPPYEGNEADASQQRHAILNALDLEIAAKWAKSGGAGAQAAIDLPLYMLRKTALDEALEPYELGRVFYHLSQRRGYRSNRKEQAEKKEAAIKGKKDDDLGTVESGIKELGEAMRSFRTLGEYYASLDPHTHNVRRRWTSRKMYEDEFAAIWEKQAALHPTLLTEELHRQIKHLLFYQRPIKAQSHLIGGCELEPGEPRAAWAALEAQQFRVLQQVNELEVISPGRVTGIPLTAEQRQTVLDLLENSSEITFKKISKALGLADYIGFNLQRGGDTKLKGNLTNTHMAEVFAERWTEMSEEEKKQVVEDWRTIDQEDSLIRRAIEYWNLDESSAKWLASRPAPNGYCMYSRKSIRKLLPLMATGARFRAAEKEVYGIRLTGGLVYDSIPPVRDTLKTLRNPAVERALTELRKVVNALVREYGKPTEVRIELANDLKKPRHERAEAFKYKRKWEKQRIDTKEKMLRELGPGFEYPSRADVEKALLWEECQGECPYTGKRFPFSSLYGENPPLQVEHIIPFSRIPDDSFQNKILCYHEDNQHKANRTPFEAYTDPAQYETILSRVRNWRTPNPGKQCRFELRTLEELEGFSERQLNDTRYACKLACELVGTLYGGRDEKTDTDSRQVVFASSGMVTATLRKSWGLEAIMRETAPSANGQNHGKPRTDHRHHAIDAITIALSRPKMIATLSRNNAQDSYRPSNGHTAPRIQSPWEDFVDSIRPHFEKMLVSHRPDHRLTGALHDETNYGRPHKEEGKDVVHIRKPVEGLSARDINNIVDPAVREAVRAKAAQLGGDLKKWTPKEGRGDWPQLGTKNGKQIPVKRVRIKKALSVETIGKDERTRHVALSSNHHVAIFAMLDKRGIEKRWKSIIVSLFEAMDRKRKGQPIVQTSYPEAGDYVFKFSLMGGDTVLLHKDCDHNQNPCNPSVWRLRSIAANGQLSLVRINDARPKSEIIKAKEWWSPIEDTLRELDAVKVVIDSLGRIHQAGG

SEQ ID NO: 583 - protein, 1062 aa, unidentified; identical to SEQ ID NO: 549
  REGION 1..1062: note = Description of Unknown: uncultivated organism
  REGION 1..1062: note = MG4-165 effector

SEQ ID NO: 584 - protein, 1076 aa, unidentified; identical to SEQ ID NO: 572
  REGION 1..1076: note = Description of Unknown: uncultivated organism with predicted taxonomy: Candidatus Sulfotelmatomonas gaucii
  REGION 1..1076: note = MG4-166 effector

SEQ ID NO: 585 - protein, 1105 aa, unidentified; identical to SEQ ID NO: 555
  REGION 1..1105: note = Description of Unknown: uncultivated organism with predicted taxonomy: Acidobacteriales bacterium 59-55
  REGION 1..1105: note = MG4-167 effector

SEQ ID NO: 586 - protein, 890 aa, unidentified
  REGION 1..890: note = Description of Unknown: uncultivated organism
  REGION 1..890: note = MG4-168 effector
MNESGSLAQDYVLGIDLGSVSLGWAVIGLDKTDMPVVLLRAGVRLFDPAVTGDIEKGQDESNAVARRVARLLRRQLRRRAARQSELFRLLQGHALLPPYEGNEADASQQRHAILNALDLEIAAKWAKSGGAGAQAAIDLPLYMLRKTALDEALEPYELGRVFYHLSQRRGYRSNRKEQAEKKEAAIKGKKDDDLGTVESGIKELGEAMRSFRTLGEYYASLDPHTHNVRRRWTSRKMYEDEFAAIWEKQAALHPTLLTEELHRQIKHLLFYQRPIKAQSHLIGGCELEPGEPRAAWAALEAQQFRVLQQVNELEVISPGRVTGIPLTAEQRQTVLDLLENSSEITFKKISKALGLADYIGFNLQRGGDTKLKGNLTNTHMAEVFAERWTEMSEEEKKQVVEDWRTIDQEDSLIRRAIEYWNLDESSAKWLASRPAPNGYCMYSRKSIRKLLPLMATGARFRAAEKEVYGIRLTGGLVYDSIPPVRDTLKTLRNPAVERALTELRKVVNALVREYGKPTEVRIELANDLKKPRHERAEAFKYKRKWEKQRIDTKEKMLRELGPGFEYPSRADVEKALLWEECQGECPYTGKRFPFSSLYGENPPLQVEHIIPFSRIPDDSFQNKILCYHEDNQHKANRTPFEAYTDPAQYETILSRVRNWRTPNPGKQCRFELRTLEELEGFSERQLNDTRYACKLACELVGTLYGGRDEKTDTDSRQVVFASSGMVTATLRKSWGLEAIMRETAPSANGQNHGKPRTDHRHHAIDAITIALSRPKMIATLSRNNAQDSYRPSNGHTAPRIQSPWEDFVDSIRPHFEKMLVSHRPDHRLTGALHDETNYGRPHKEEGKDVVHIRKPVEGLSARDINNIVDPAVREAVRAKAAQLGGDLKKW

SEQ ID NO: 587 - protein, 1062 aa, unidentified; identical to SEQ ID NO: 575
  REGION 1..1062: note = Description of Unknown: uncultivated organism
  REGION 1..1062: note = MG4-169 effector

SEQ ID NO: 588 - protein, 1079 aa, unidentified; identical to SEQ ID NO: 544
  REGION 1..1079: note = Description of Unknown: uncultivated organism
  REGION 1..1079: note = MG4-170 effector

SEQ ID NO: 589 - protein, 902 aa, unidentified
  REGION 1..902: note = Description of Unknown: uncultivated organism
  REGION 1..902: note = MG4-171 effector
ILFHLIQRRGFLSNRRENKQNPDQKKELGQVKAEIHSLEQEIQNAGARTLGEFFAGLDPHAQKVRRRWTARKMFQDEFEKIWEAQKAHRPELLTQELHDKIAHLLFFQRPIAAQTHLIGKCELETGKQRAPWAAMEAQRFRILQKVNDLRLINPGSLISDPLTEEGRQRLYHLLDREGDQTFKAIRKYLSFSAEVQFNLEKGDEKRLRGNRTQAAMRKVFGERWDTIGEGKQHQIIENWRNSESDEVLIREAMEQWSLDAAAATLLSEQTPEPGYCAVSLAAISKLLPLMASGKSFKEAETELYGARFSGGTIFETLPEVRKQLESLRNPAVERSLTELRKVVNAIVREYGKPHEIRIELARELKKPRQERIEATKKNRNRQREREDVAVRILRECGLSNPSRRDIEKARLHEECGGYCPYTGRHIPFSTLFDNSEFDVEHIIPRSRYPDDSFQNKTLCYLPENRDVKKGQTPWEAYGKDEQRWAEIMTRVSSWKNRGKMARFAIQTEEALGDFSARQMNDTRYASVLASRFLGALYGGRDLVDAEKVRQVIFASSGAVTATLRSSWGLEAILREIVPTEPGESRGKPRTDHRHHAIDAITIALTRPKVIQSMALAASLEPWQRDSRAWRKIESPWRDFVLSIRPHIEQMLVSHRPEHKMSGELHKGTNYPAPHNYKGKPTVHTRCALSALSAADIADDEVIVDPAVRDAVRAKLEKLGGNPKLFDRPENAPCLESRDGRFIPIRKVRIREAKKPILVGTGVRERYVASGGIHHIGLFVVRDARRREVWESEVVQITDAYERHREHLPVVCRTHDAEEAAFLFSLMKDDTVELEKDGTRGIYRVKKFEATGKITFVPVNNAMLDKMQYTTGAAWSRMPATLKPMSPRKIVIDLLGKVHPAND

SEQ ID NO: 590 - protein, 1062 aa, unidentified
  REGION 1..1062: note = Description of Unknown: uncultivated organism
  REGION 1..1062: note = MG4-172 effector
MSAALEQQKYVLGLDLGSASLGWALIALNDADDPVSLIRAGVRIFEPGVDGTSIEIEQGKDQSKAVERRTARLHRRQLRRRAARQRDLFRVLQRHSLLPAPETLVGSPEEQRHSVLNELDQELAQKWQSTYQGIRFAELPLYYLRKMALDERLEAHEIGRILFHLIQRRGFLSNRRENKQNPDQKKELGQVKAEIHSLEQEIQNAGARTLGEFFAGLDPHAQKVRRRWTARKMFQDEFEKIWEAQKAHRPELLTQELHDKIAHLLFFQRPIAAQTHLIGKCELETGKQRAPWAAMEAQRFRILQKVNDLRLINPGSLISDPLTEEGRQRLYHLLDREGDQTFKAIRKYLSFSAEVQFNLEKGDEKRLRGNRTQAAMRKVFGERWDTIGEGKQHQIIENWRNSESDDVLIREAMEQWSLDAAAATLLSEQTPEPGYCAVSLAAISKLLPLMASGKSFKEAETELYGARFSGGTIFETLPEVRKQLESLRNPAVERSLTELRKVVNAIVREYGKPHEIRIELARELKKPRQERIEATKKNRNRQREREDVAVRILRECGLSNPSRRDIEKARLHEECGGYCPYTGRHIPFSTLFDNSEFDVEHIIPRSRYPDDSFQNKTLCYLPENRDVKKGQTPWEAYGKDEQRWAEIMTRVSSWKNRGKMARFAIQTEEALGDFSARQMNDTRYASVLASRFLGALYGGRDLVDAEKVRQVIFASSGAVTATLRSSWGLEAILREIVPTEPGESRGKPRTDHRHHAIDAITIALTRPKVIQSMALAASLEPWQRDSRAWRKIESPWRDFVLSIRPHIEQMLVSHRPEHKMSGELHKGTNYPPPHNYKGKPTVHTRCALSALSAADIADDEVIVDPAVRDAVRAKLEKLGGNPKLFDRPENVPCLESRDGRFIPIRKVRIREAKKPILVGTGVRERYVASGGIHHIGLFVVRDARRREVWESEVVQITDAYERHREHLPVVCRIHDAEEAAFLFSLMKDDTVELEKDGTRGIYRVKKFEATGKITFVPVNNAMLDKMQYTTGAAWSRMPATLKPMSPRKIVIDLLGKVHPAND

SEQ ID NO: 591 - protein, 766 aa, unidentified
  REGION 1..766: note = Description of Unknown: uncultivated organism with predicted taxonomy: Ignavibacteriales bacterium CG_4_9_14_3_um_filter_30_11
  REGION 1..766: note = MG4-173 effector
LRLRLDDGNERKLTPNERAVLLDLCEKREKLTIAKARSEIGISKGQKFTIEEGGEKNVPVNLTATRLRAALGQTWDGLTPLQKDDLVEDVGDGKRNPTDEGLERCGRDKWGLPQEIAEALGKVRLPDAYGRYSLRALVALLPAIEEGLTVEDAIRALYAGARKSAEPLPLLPPVRDEKMKTLLGEIRSPAVQRSLTELRKTVNAIIRRYGLPEKIHIELARDLKKSKKERQKQTEINRDREKLRQEATGELRKHDVVRFANPRNSDIEKYLLATEARWQCPYTSKKYGVTDVFGDHPQVDVEHIIPRSRSLDDSYLNKTLAYRSANMEKGNRTPREWLFESDQEQYDRMIGVVSGFDPRFEVGKKLRRFSMELSDPDSLLKEFTERQLQDTRYASKLACRYLGVLYGGTSDASGNQRVFASAGQVTAKLRRAWDLDRILSPDKPEKSRDDHRHHAIDALTVALSSTTLIRALATAAGEADRLFRRKIILPVPWVGFGEQARSAVENIQPSHRPMRKLSGPLHKETFYSRPRKHAVGTDRKGKPIEEECVHYRVPVTSLSSAKSFESIVDSRVRAAVEERAAQLGGGGNRFEKNWPELVTRKGQTVPIKRVRIRKVEGVVSIGKNGRERFVIPGSNHHAEILAELDANGRVKRYLCETVTMLEAVERKRQSVPVVNRDHGPGYKFHCTLSEGDLVEARGPGDEASRIWKVRTVRESQQLALTPALDARPKAVVQKDGMWSPSVNPLFRGGARKVLITPLGEVIPAND

SEQ ID NO: 592 - protein, 764 aa, unidentified
  REGION 1..764: note = Description of Unknown: uncultivated organism with predicted taxonomy: uncultured bacterium
  REGION 1..764: note = MG4-174 effector
MSDNGSLAQDYILGVDLGSASLGWAAIRQDENGMATRLLRAGVRIFDPAVSGDVEKGQDESNAVARRTARLIRRQLRRRAARQSELFRLLQTRGLLPSYQGSEADASQQRHTILNALDLKLAAKWAKSGSNEEQTAIELPLYLLRKTALDAALEPYELGRVFYHLSQRRGYRSNRKEQASGKEASGKAKKADDLGAVEGGIKELEEAMHPFRTLGEYFASLDPHIQKVRRRWTGRKMYEDEFAAIWAKQAAFHPDLLPEELHHQIKRLLFYQRPIKAQSNLIGGCELEPGERRAAWATLEAQQFRVLQKVNDLEIILPGNVTGIPLTPEQRKIVLDLLENSAEATFKKIRKALGLAENIGFNLQRGGDTRLKGNLTNTLMAEAFAERWPEMSNEEKMQAVEDWRTIEQKESLVRRAIEHWKLDETGAQWLAEKPAPNGYCMYSRKAIRKLLPLMATGTRFKAAEKEIYGNRLAGGKVYDRIPPVRDALKTLRNPAIERALTELRKVINALVHEHGKPAEVRIELARDLKKPRHERAKAVSYNRDREKQRTTAKEKMLREVGPGFQHPSRADVEKALLWEECQGECPYTGKRFPFSSLFGENPPLQVDHIIPFSRIPDDSFQNKTLCYHEENQHKGNRTPFEAYTDPAQYEAILNRVRSWRTPNPGKQRRFELRTLEELEGFSERQLNDTRYASKLACELVGTLYGGRDVPLKDGKSRQVVFASSGMVTSTLRKGWGLEAILREAAPSANGQNRGKPRTDHRHHA

SEQ ID NO: 593 - protein, 1079 aa, unidentified; identical to SEQ ID NO: 544
  REGION 1..1079: note = Description of Unknown: uncultivated organism
  REGION 1..1079: note = MG4-175 effector

SEQ ID NO: 594 - protein, 1062 aa, unidentified
  REGION 1..1062: note = Description of Unknown: uncultivated organism with predicted taxonomy: Acidobacteriales bacterium 59-55
  REGION 1..1062: note = MG4-176 effector
MSAALEQQKYVLGLDLGSASLGWALIALNDADDPVSLIRAGVRIFEPGVDGTSIEIEQGKDQSKAVERRTARLHRRQLRRRAARQRDLFRVLQRHSLLPAPETLVGSPEEQRHSVLNELDQELAQKWQSTYQGKRFAELPLYYLRKMALDERLEAHEIGRILFHLIQRRGFLSNRRENKQNPDQKKELGQVKAEIHSLEQEIQNAGARTLGEFFAGLDPHAQKVRRRWTARKMFQDEFEKIWEAQTAHRPELLTQELHDKIAHLLFFQRPIAAQTHLIGKCELETGKQRAPWAAMEAQRFRILQKVNDLRLINPGSLISDPLTEEGRQRLYHLLDREGDQTFKAIRKYLSFSAEVQFNLEKGDEKRLRGNRTQAAMRKVFGERWDTIGEGKQHQIIENWRNSESDDVLIREAMEQWSLDAAAATLLSEQTPEPGYCAVSLAAISKLLPLMASGKSFKEAETELYGARFSGGTIFETLPEVRKQLESLRNPAVERSLTELRKVVNAIVREYGKPHEIRIELARELKKPRQERIEATKKNRNRQREREDVAVRILRECGLSNPSRRDIEKARLHEECGGYCPYTGRHIPFSTLFDNSEFDVEHIIPRSRYPDDSFQNKTLCYLPENRDVKKGQTPWEAYGKDEQRWAEIMTRVSSWKNRGKMARFAIQTEEALGDFSARQMNDTRYASVLASRFLGALYGGRDLVDAEKVRQVIFASSGAVTATLRSSWGLEAILREIVPTEPGESRGKPRTDHRHHAIDAITIALTRPKVIQSMALAASLEPWQRDSRAWRKIESPWRDFVLSIRPHIEQMLVSHRPEHKMSGELHKGTNYPPPHNYKGKPTVHTRCALSALSAADIADDEVIVDPAVRDAVRAKLEKLGGNPKLFDRPENVPCLESRDGRFIPIRKVRIREAKKPILVGTGVRERYVASGGIHHIGLFVVRDARRREVWESEVVQITDAYERHREHLPVVCRTHDAEEAAFLFSLMKDDTVELEKDGTRGIYRVKKFEATGKITFVPVNNAMLDKMQYTTGAAWSRMPATLKPMSPRKIVIDLLGKVHPAND

SEQ ID NO: 595 - protein, 948 aa, unidentified
  REGION 1..948: note = Description of Unknown: uncultivated organism
  REGION 1..948: note = MG4-177 effector
MSFPDGVRQKYILGLDLGSASIGWAVIDLDGNLDPCGLLAAGSHIFDPGVEVPPAAGKMARDEAVFQGLDRSKAVGRRIARQMRRQIDRKGIRLKALFKLLQSKSLLPIYPELKGEPLAAERHHLFTRLDKELTDALCAEKRKRGTDGLMLEADQALPYVLRKEALERKLELHELGRALYHLCQRRGYRPSAADDSEKEETASTEEEIESKRGRRKKPEPEDKGDKDSESPKKVAEWISDLQAKMDAAHTPTIGAYFADFKHNNPHQERIRHRWTGREMFVKEFDLIWERQSEFYRDSRPGLLNDDLRNRVYDCLFFQRPLASAEHLIGMCDLERGERRAPWATLEAQRFRLLQKVNDLAYIPSGLFNERKLSLEQCATLAAALQDKGDMPFPEIAKLLGLPPKTEFNLMRGKKKKIEGNRINQVMLQVFGDRWRAFTEQERSSAVALWTKTEGFEERKNVAISQCGLDPWKAKEWAENRPPKDCCRHSRKALVKLIKRMEEGVPYATAKLEIYDSQLAGKAPLDFVPKVIETLPSINNPAVLRALTELRKVVNAIIRTYGDKPYEIRIELARELRKNRKQRQNATEAGDKQHLRRIDAARTILRECRNYDAQGRDAERLVRERRDDVTKMLLLMECRCLCPYTGDSISYLDLFGGEVEVEHIIPQSLMVDNSFNNLTLCYRKVNHEKLDKTPRQAFCRAEDDQQWIDIIGRVQKFGNKEKLHRFLLSSREDIDRFSNRRLNDTRYTSKLAGRLLMSLYGGRDIVPAETLDELDEFKDRTGRRAICVSSGMVTSLLRDAWHLNLSGVIGDDAFKCPKKSEDDEESGKRRKGQSNKKDRCDHRHHALDAVVIALTSEKVIREINMLASRLYRERQTPLKYRDLKSIQNPWHNFMDDHFRDIFRGMLVSHRPEHKLSGALHEATSYGKVRYYNAKGDPVRYQRIAIGKLL

SEQ ID NO: 596 - protein, 878 aa, unidentified
  REGION 1..878: note = Description of Unknown: uncultivated organism with predicted taxonomy: Acidobacteriales bacterium 59-55
  REGION 1..878: note = MG4-178 effector
KKELGQVKAEIHSLEQEIQNAGARTLGEFFAGLDPHAQKVRRRWTARKMFQDEFEKIWEAQKAHRPELLTQELHDKIAHLLFFQRPIAAQTHLIGKCELETGKQRAPWAAMEAQRFRILQKVNDLRLINPGSLISDPLTEEGRQRLYHLLDREGDQTFKAIRKYLSFSAEVQFNLEKGDEKRLRGNRTQAAMRKVFGERWDTIGEGKQHQIIENWRNSESDEVLIREAMEQWSLDAAAATLLSEQTPEPGYCAVSLAAISKLLPLMASGKSFKEAETELYGARFSGGTIFETLPEVRKQLESLRNPAVERSLTELRKVVNAIVREYGKPHEIRIELARELKKPRQERIEATKKNRNRQREREDVAVRILRECGLSNPSRRDIEKARLHEECGGYCPYTGRHIPFSTLFDNSEFDVEHIIPRSRYPDDSFQNKTLCYLPENRDVKKGQTPWEAYGKDEQRWAEIMTRVSSWKNRGKMARFAIQTEEALGDFSARQMNDTRYASVLASRFLGALYGGRDLVDAEKVRQVIFASSGAVTATLRSSWGLEAILREIVPTEPGESRGKPRTDHRHHAIDAITIALTRPKVIQSMALAASLEPWQRDSRAWRKIESPWRDFVLSIRPHIEQMLVSHRPEHKMSGELHKGTNYPAPHNYKGKPTVHTRCALSALSAADIADDEVIVDPAVRDAVRAKLEKLGGNPKLFDRPENAPCLESRDGRFIPIRKVRIREAKKPILVGTGVRERYVASGGIHHIGLFVVRDARRREVWESEVVQITDAYERHREHLPVVCRTHDAEEAAFLFSLMKDDTVELEKDGTRGIYRVKKFEATGKITFVPVNNAMLDKMQYTTGAAWSRMPATLKPMSPRKIVIDLLGKVHPAND

SEQ ID NO: 597 - protein, 1106 aa, unidentified
  REGION 1..1106: note = Description of Unknown: uncultivated organism with predicted taxonomy: Acidobacteria
  REGION 1..1106: note = MG4-179 effector
MSESGVSTQPYVLGLDLGSASLGWALVGIDAMERPSSLIRAGVRIFEPGVDGSALDIQQGKDQSKAVDRREARLRRRQLRRRVARQRELFGVLQGAGLLPTDDTQGTGIGSEQRHRILNNLDVTLSNRYRNGADQEIFAQMPLYALRKKALYEPLALDELGRVFFHLSQRRGFQSNRKDVKKKTKDSEDQGQVKSAIHELEQAIEAAGAQTLGEYLAGLDPHEQKVRRQWTGRKMFEKEFQMIWDKQKEYHTDLLTPELHDRIWNLLFFQRPVAAQKHLVGKCELEPDKRRAPWAALLAQQFRLLQKVNDLRLIGEDGNELPLNEDGRAAVFDLLENHGTQSFAKIKQHLGLPKTAQFNLERGKAKELKGNVTAQSMRKVFGERWKEFSEGKQNQIIENWRNSEKDEELKREAMEHWGLDEAGANALVNEKAPGDYCSLSLVALGKILPLMRAGKSFKEAETEIYGNRFSGAAVHSIIPVLRPNRKHFRNGTPPPQDPLMASIANGLRNPAVERSITEMRKVVNAIVREYGKPCEIRIELARELKKPRSKRLDETARNRKREAENKALAERMHNECGTPQNPSRNDLEKAKLWVEQQGECPYTGRSLPFSRLFDDNNGFDVDHILPRSRHPDDSYQNKVLCWGDTNRMVKRNQTPYEAFAEQDPENWHQILARVARWKNPGKLRKFEIRSTDDLAEFSSRQLNDTRYTSLLAARLLSTLYGGRDVAENGGKRQIIFASTGAVTATLRRNWGFEQILRNIIPPEPSESTGKPRTDHRHHAIDAIVIALTRNDVIQSMARASALEPWQPGTRSWRHVPQPWCTPDFFRSVEEQVREMLTSHRPEHKVSGELHQGSNYARPYMYKGKSIVHSRTLVSELKVEQIEADDVIVDRAVRDILRAKLKEIGGTLKGSDKVKTFEKPENTPYILTPAGKRIPIRKVRIRETKNPLLVGAGSNERFVASGGIHHVDLFVTRDEKRRETWDSKVIQTTEMYDRFPKHDRRPGRPHTESKNLSRLRQNDDDDESRFLFSLMKSDTIQLEQDGHRQIFKVKKFEATGKMTFIPINNAMPDKLQYSTGAAWSKMPATLKSMSPQKVVVDLLGRVHPAND

SEQ ID NO: 598 - protein, 1076 aa, unidentified; identical to SEQ ID NO: 545
  REGION 1..1076: note = Description of Unknown: uncultivated organism
  REGION 1..1076: note = MG4-180 effector

SEQ ID NO: 599 - protein, 1079 aa, unidentified; identical to SEQ ID NO: 544
  REGION 1..1079: note = Description of Unknown: uncultivated organism
  REGION 1..1079: note = MG4-181 effector

SEQ ID NO: 600 - protein, 1062 aa, unidentified; identical to SEQ ID NO: 549
  REGION 1..1062: note = Description of Unknown: uncultivated organism
  REGION 1..1062: note = MG4-182 effector

SEQ ID NO: 601 - protein, 766 aa, unidentified
  REGION 1..766: note = Description of Unknown: uncultivated organism
  REGION 1..766: note = MG4-183 effector
MSDNGSLAQDYILGVDLGSASLGWAAIRQDENGMATRLLRAGVRIFDPAVSGDVEKGQDESNAVARRTARLIRRQLRRRAARQSELFRLLQTRGLLPSYQGSEADASQQRHTILNALDLKLAAKWAKSGSNEEQTAIELPLYLLRKTALDAALEPYELGRVFYHLSQRRGYRSNRKEQASGKEASGKAKKADDLGAVEGGIKELEEAMHPFRTLGEYFASLDPHIQKVRRRWTGRKMYEDEFAAIWAKQAAFHPDLLPEELHHQIKRLLFYQRPIKAQSNLIGGCELEPGERRAAWATLEAQQFRVLQKVNDLEIILPGNVTGIPLTPEQRKIVLDLLENSAEATFKKIRKALGLAENIGFNLQRGGDTRLKGNLTNTLMAEAFAERWPEMSNEEKMQAVEDWRTIEQKESLVRRAIEHWKLDETGAQWLAEKPAPNGYCMYSRKAIRKLLPLMATGTRFKAAEKEIYGNRLAGGKVYDRIPPVRDALKTLRNPAIERALTELRKVINALVHEHGKPAEVRIELARDLKKPRHERAKAVSYNRDREKQRTTAKEKMLREVGPGFQHPSRADVEKALLWEECQGECPYTGKRFPFSSLFGENPPLQVDHIIPFSRIPDDSFQNKTLCYHEENQHKGNRTPFEAYTDPAQYEAILNRVRSWRTPNPGKQRRFELRTLEELEGFSERQLNDTRYASKLACELVGTLYGGRDVPLKDGKSRQVVFASSGMVTSTLRKGWGLEAILREAAPSANGQNRGKPRTDHRHHAID

SEQ ID NO: 602 - protein, 1076 aa, unidentified; identical to SEQ ID NO: 545
  REGION 1..1076: note = Description of Unknown: uncultivated organism
  REGION 1..1076: note = MG4-184 effector

SEQ ID NO: 603 - protein, 1062 aa, unidentified
  REGION 1..1062: note = Description of Unknown: uncultivated organism
  REGION 1..1062: note = MG4-185 effector
MSAALEQQKYVLGLDLGSASLGWALIALNDADDPVSLIRAGVRIFEPGVDGTSIEIEQGKDQSKAVERRTARLHRRQLRRRAARQRDLFRVLQRHCLLPAPETLVGSPEEQRHSVLNELDQELAQKWQSTYQGIRFAELPLYYLRKMALDERLEAHEIGRILFHLIQRRGFLSNRRENKQNPDQKKELGQVKAEIHSLEQEIQNAGARTLGEFFAGLDPHAQKVRRRWTARKMFQDEFEKIWEAQKAHRPELLTQELHDKIAHLLFFQRPIAAQTHLIGKCELETGKQRAPWAAMEAQRFRILQKVNDLRLINPGSLISDPLTEEGRQRLYHLLDREGDQTFKAIRKYLSFSAEVQFNLEKGDEKRLRGNRTQAAMRKVFGERWDTIGEGKQHQIIENWRNSESDEVLIREAMEQWSLDAAAATLLSEQTPEPGYCAVSLAAISKLLPLMASGKSFKEAETELYGARFSGGTIFETLPEVRKQLESLRNPAVERSLTELRKVVNAIVREYGKPHEIRIELARELKKPRQERIEATKKNRNRQREREDVAVRILRECGLSNPSRRDIEKARLHEECGGYCPYTGRHIPFSTLFDNSEFDVEHIIPRSRYPDDSFQNKTLCYLPENRDVKKGQTPWEAYGKDEQRWAEIMTRVSSWKNRGKMARFAIQTEEALGDFSARQMNDTRYASVLASRFLGALYGGRDLVDAEKVRQVIFASSGAVTATLRSSWGLEAILREIVPTEPGESRGKPRTDHRHHAIDAITIALTRPKVIQSMALAASLEPWQRDSRAWRKIESPWRDFVLSIRPHIEQMLVSHRPEHKMSGELHKGTNYPAPHNYKGKPTVHTRCALSALSAADIADDEVIVDPAVRDAVRAKLEKLGGNPKLFDRPENVPCLESRDGRFIPIRKVRIREAKKPILVGTGVRERYVASGGIHHIGLFVVRDARRREVWESEVVQITDAYERHREHLPVVCRTHDAEEAAFLFSLMKDDTVELEKDGTRGIYRVKKFEATGKITFVPVNNAMLDKMQYTTGAAWSRMPATLKPMSPRKIVIDLLGKVHPAND

SEQ ID NO: 604 - protein, 1079 aa, unidentified; identical to SEQ ID NO: 544
  REGION 1..1079: note = Description of Unknown: uncultivated organism
  REGION 1..1079: note = MG4-186 effector

SEQ ID NO: 605 - protein, 794 aa, unidentified
  REGION 1..794: note = Description of Unknown: uncultivated organism with predicted taxonomy: Polaribacter sp. ALD11
  REGION 1..794: note = MG4-187 effector
MSESGVSTQPYVLGLDLGSASLGWALVGIDAMERPSSLIRAGVRIFEPGVDGSALDIQQGKDQSKAVDRREARLRRRQLRRRVARQRELFGVLQGAGLLPTDDTQGTGIGSEQRHRILNNLDVTLSNRYRNGADQEIFAQMPLYALRKKALYEPLALDELGRVFFHLSQRRGFQSNRKDVKKKTKDSEDQGQVKSAIHELEQAIEAAGAQTLGEYLAGLDPHEQKVRRQWTGRKMFEKEFQMIWDKQKEYHTDLLTPELHDRIWNLLFFQRPVAAQKHLVGKCELEPDKRRAPWAALLAQQFRLLQKVNDLRLIEKDGNELPLNEDGRAAVFDLLENHGTQSFAKIKQHLGLPKTAQFNLERGKAKELKGNVTAQSMRKVFGERWKEFSEGKQNQIIENWRNSEKDEELKREAMEHWGLDEAGANALVNEKAPGDYCSLSLVALGKILPLMRAGKSFKEAETEIYGNRFSGAAVHSIIPVLRPNRKHFRNGTPPPQDPLMASIANGLRNPAVERSITEMRKVVNAIVREYGKPCEIRIELARELKKPRSKRLDETARNRKREAENKALAERMHNECGTPQNPSRNDLEKAKLWVEQQGECPYTGRSLPFSRLFDDNNGFDVDHILPRSRHPDDSYQNKVLCWGDTNRMVKRNQTPYEAFAEQDPENWHQILARVARWKNPGKLRKFEIRSTDDLAEFSSRQLNDTRYTSLLAARLLSTLYGGRDVAENGGKRQIIFASTGAVTATLRRNWGFEQILRNIIPPEPSESTGKPRTDHRHHAIDAIVIALTRNDVIQ

SEQ ID NO: 606 - protein, 1062 aa, unidentified
  REGION 1..1062: note = Description of Unknown: uncultivated organism with predicted taxonomy: Acidobacteriales bacterium 59-55
  REGION 1..1062: note = MG4-188 effector
MSAALEQQKYVLGLDLGSASLGWALIALNGADDPVSLIRAGVRIFEPGVDGTSMEIEQGKDQSKAVERRTARLHRRQLRRRAARQRDLFRVLQRHCLLPAPETLVGSPEEQRHSVLNELDQELTQKWQSTYQGKRFAELPLYYLRKMALDERLEAHEIGRILFHLIQRRGFLSNRRENKQNPDQKKELGQVKAEIHSLEQEIQNAGARTLGEFFAGLDPHAQKVRRRWTARKMFQDEFEKIWEAQTAHRPELLTQELHDKIAHLLFFQRPIAAQTHLIGKCELETGKQRAPWAAMEAQRFRILQKVNDLRLINPGSLISDPLTEEGRQRLYHLLDREGDQTFKAIRKYLSFSAEVQFNLEKGDEKRLRGNRTQAAMRKVFGERWDTIGEGKQHQIIENWRNSESDDVLIREAMEQWSLDAAAATLLSEQTPEPGYCAVSLAAISKLLPLMASGKSFKEAETELYGARFSGGTIFETLPEVRKQLESLRNPAVERSLTELRKVVNAIVREYGKPHEIRIELARELKKPRQERIEATKKNRNRQREREDVAVRILRECGLSNPSRRDIEKARLHEECGGYCPYTGRHIPFSTLFDNSEFDVEHIIPRSRYPDDSFQNKTLCYLPENRDVKKGQTPWEAYGKDEQRWAEIMTRVSSWKNRGKMARFAIQTEEALGDFSARQMNDTRYASVLASRFLGALYGGRDLVDAEKVRQVIFASSGAVTATLRSSWGLEAILREIVPTEPGESRGKPRTDHRHHAIDAITIALTRPKVIQSMALAASLEPWQRDSRAWRKIESPWRDFVLSIRPHIEQMLVSHRPEHKMSGELHKGTNYPPPHNYKGKPTVHTRCALSALSAADIADDEVIVDPAVRDAVRAKLEKLGGNPKLFDRPENVPCLESRDGRFIPIRKVRIREAKKPILVGTGVRERYVASGGIHHIGLFVVRDARRREVWESEVVQITDAYERHREHLPVVCRTHDAEEAAFLFSLMKDDTVELEKDGTRGIYRVKKFEATGKITFVPVNNAMLDKMQYTTGAAWSRMPATLKPMSPRKIVIDLLGKVHPAND

SEQ ID NO: 607 - protein, 1106 aa, unidentified; identical to SEQ ID NO: 597
  REGION 1..1106: note = Description of Unknown: uncultivated organism with predicted taxonomy: Polaribacter sp. ALD11
  REGION 1..1106: note = MG4-189 effector

SEQ ID NO: 608 - protein, 1076 aa, unidentified; identical to SEQ ID NO: 545
  REGION 1..1076: note = Description of Unknown: uncultivated organism
  REGION 1..1076: note = MG4-190 effector

SEQ ID NO: 609 - protein, 1079 aa, unidentified; identical to SEQ ID NO: 544
  REGION 1..1079: note = Description of Unknown: uncultivated organism
  REGION 1..1079: note = MG4-191 effector

SEQ ID NO: 610 - protein, 983 aa, unidentified
  REGION 1..983: note = Description of Unknown: uncultivated organism
  REGION 1..983: note = MG4-192 effector
RRAARQRDLFRVLQRHCLLPAPETLVGSPEEQRHSVLNELDQELTQKWQSTYQGIRFAELPLYYLRKMALDERLEAHEIGRILFHLIQRRGFLSNRRENKQNPDQKKELGQVKAEIHSLEQEIQNAGARTLGEFFAGLDPHAQKVRRRWTARKMFQDEFEKIWEAQKAHRPELLTQELHDKIAHLLFFQRPIAAQTHLIGKCELETGKQRAPWAAMEAQRFRILQKVNDLRLINPGSLISDPLTEEGRQRLYHLLDREGDQTFKAIRKYLSFSAEVQFNLEKGDEKRLRGNRTQAAMRKVFGERWDTIGEGKQHQIIENWRNSESDEVLIREAMEQWSLDAAAATLLSEQTPEPGYCAVSLAAISKLLPLMASGKSFKEAETELYGARFSGGTIFETLPEVRKQLESLRNPAVERSLTELRKVVNAIVREYGKPHEIRIELARELKKPRQERIEATKKNRNRQREREDVAVRILRECGLSNPSRRDIEKARLHEECGGYCPYTGRHIPFSTLFDNSEFDVEHIIPRSRYPDDSFQNKTLCYLPENRDVKKGQTPWEAYGKDEQRWAEIMTRVSSWKNRGKMARFAIQTEEALGDFSARQMNDTRYASVLASRFLGALYGGRDLVDAEKVRQVIFASSGAVTATLRSSWGLEAILREIVPTEPGESRGKPRTDHRHHAIDAITIALTRPKVIQSMALAASLEPWQRDSRAWRKIESPWRDFVLSIRPHIEQMLVSHRPEHKMSGELHKGTNYPAPHNYKGKPTVHTRCALSALSAADIADDEVIVDPAVRDAVRAKLEKLGGNPKLFDRPENAPCLESRDGRFIPIRKVRIREAKKPILVGTGVRERYVASGGIHHIGLFVVRDARRREVWESEVVQITDAYERHREHLPVVCRIHDAEEAAFLFSLMKDDTVELEKDGTRGIYRVKKFEATGKITFVPVNNAMLDKMQYTTGAAWSRMPATLKPMSPRKIVIDLLGKVHPAND

SEQ ID NO: 611 - protein, 1062 aa, unidentified; identical to SEQ ID NO: 549
  REGION 1..1062: note = Description of Unknown: uncultivated organism with predicted taxonomy: Acidobacteriales bacterium 59-55
  REGION 1..1062: note = MG4-193 effector

SEQ ID NO: 612 - protein, 1022 aa, unidentified
  REGION 1..1022: note = Description of Unknown: uncultivated organism
  REGION 1..1022: note = MG4-194 effector
MNESGSLAQDYVLGIDLGSVSLGWAVIGLDKTDMPVVLLRAGVRLFDPAVTGDIEKGQDESNAVARRVARLLRRQLRRRAARQSELFRLLQGHALLPPYEGNEADASQQRHAILNALDLEIAAKWAKSGGAGAQAAIDLPLYMLRKTALDEALEPYELGRVFYHLSQRRGYRSNRKEQAEKKEAAIKGKKDDDLGTVESGIKELGEAMRSFRTLGEYYASLDPHTHNVRRRWTSRKMYEDEFAAIWEKQAALHPTLLTEELHRQIKHLLFYQRPIKAQSHLIGGCELEPGEPRAAWAALEAQQFRVLQQVNELEVISPGRVTGIPLTAEQRQTVLDLLENSSEITFKKISKALGLADYIGFNLQRGGDTKLKGNLTNTHMAEVFAERWTEMSEEEKKQVVEDWRTIDQEDSLIRRAIEYWNLDESSAKWLASRPAPNGYCMYSRKSIRKLLPLMATGARFRAAEKEVYGIRLTGGLVYDSIPPVRDTLKTLRNPAVERALTELRKVVNALVREYGKPTEVRIELANDLKKPRHERAEAFKYKRKWEKQRIDTKEKMLRELGPGFEYPSRADVEKALLWEECQGECPYTGKRFPFSSLYGENPPLQVEHIIPFSRIPDDSFQNKILCYHEDNQHKANRTPFEAYTDPAQYETILSRVRNWRTPNPGKQCRFELRTLEELEGFSERQLNDTRYACKLACELVGTLYGGRDEKTDTDSRQVVFASSGMVTATLRKSWGLEAIMRETAPSANGQNHGKPRTDHRHHAIDAITIALSRPKMIATLSRNNAQDSYRPSNGHTAPRIQSPWEDFVDSIRPHFEKMLVSHRPDHRLTGALHDETNYGRPHKEEGKDVVHIRKPVEGLSARDINNIVDPAVREAVRAKAAQLGGDLKKWTPKEGRGDWPQLGTKNGKQIPVKRVRIKKALSVETIGKDERTRHVALSSNHHVAIFAMLDKRGIEKRWKSIIVSLFEAMDRKRKGQPIVQTSYPEAGDYVFKFSLMGGDTVLLHKDCDHNQNPCNPSVWRLR

SEQ ID NO: 613 - protein, 1062 aa, unidentified; identical to SEQ ID NO: 594
  REGION 1..1062: note = Description of Unknown: uncultivated organism
  REGION 1..1062: note = MG4-195 effector

SEQ ID NO: 614 - protein, 862 aa, unidentified
  REGION 1..862: note = Description of Unknown: uncultivated organism with predicted taxonomy: Acidobacteriales bacterium 59-55
  REGION 1..862: note = MG4-196 effector
DKQKEYHTDLLTPELHDRIWNLLFFQRPVAAQKHLVGKCELEPDKRRAPWAALLAQQFRLLQKVNDLRLIGEDGNELPLNEDGRAAVFDLLENHGTQSFAKIKQHLGLPKTAQFNLERGKAKELKGNVTAQSMRKVFGERWKEFSEGKQNQIIENWRNSEKDEELKREAMEHWGLDEAGANALVNEKAPGDYCSLSLVALGKILPLMRAGKSFKEAETEIYGNRFSGAAVHSIIPVLRPNRKHFRNGTPPPQDPLMASIANGLRNPAVERSITEMRKVVNAIVREYGKPCEIRIELARELKKPRSKRLDETARNRKREAENKALAERMHNECGTPQNPSRNDLEKAKLWVEQQGECPYTGRSLPFSRLFDDNNGFDVDHILPRSRHPDDSYQNKVLCWGDTNRMVKRNQTPYEAFAEQDPENWHQILARVARWKNPGKLRKFEIRSTDDLAEFSSRQLNDTRYTSLLAARLLSTLYGGRDVAENGGKRQIIFASTGAVTATLRRNWGFEQILRNIIPPEPSESTGKPRTDHRHHAIDAIVIALTRNDVIQSMARASALEPWQPGTRSWRHVPQPWCTPDFFRSVEEQVREMLTSHRPEHKVSGELHQGSNYARPYMYKGKSIVHSRTLVSELKVEQIEADDVIVDRAVRDILRAKLKEIGGTLKGSDKVKTFEKPENTPYILTPAGKRIPIRKVRIRETKNPLLVGAGSNERFVASGGIHHVDLFVTRDEKRRETWDSKVIQTTEMYDRFPKHDRRPGRPHTESKNLSRLRQNDDDDESRFLFSLMKSDTIQLEQDGHRQIFKVKKFEATGKMTFIPINNAMPDKLQYSTGAAWSKMPATLKSMSPQKVVVDLLGRVHPAND

SEQ ID NO: 615 - protein, 1062 aa, unidentified
  REGION 1..1062: note = Description of Unknown: uncultivated organism
  REGION 1..1062: note = MG4-197 effector
MSAALEQQKYVLGLDLGSASLGWALIALNDADDPVSLIRAGVRIFEPGVDGTSIEIEQGKDQSKAVERRTARLHRRQLRRRAARQRDLFRVLQRHSLLPAPETLVGSPEEQRHSVLNELDQELAQKWQSTYQGKRFAELPLYYLRKMALDERLEAHEIGRILFHLIQRRGFLSNRRENKQNPDQKKELGQVKAEIHSLEQEIQNAGARTLGEFFAGLDPHAQKVRRRWTARKMFQDEFEKIWEAQKAHRPELLTQELHDKIAHLLFFQRPIAAQTHLIGKCELETGKQRAPWAAMEAQRFRILQKVNDLRLINPGSLISDPLTEEGRQRLYHLLDREGDQTFKAIRKYLSFSAEVQFNLEKGDEKRLRGNRTQAAMRKVFGERWDTIGEGKQHQIIENWRNSESDDVLIREAMEQWSLDAAAATLLSEQTPEPGYCAVSLAAISKLLPLMASGKSFKEAETELYGARFSGGTIFETLPEVRKQLESLRNPAVERSLTELRKVVNAIVREYGKPHEIRIELARELKKPRQERIEATKKNRNRQREREDVAVRILRECGLSNPSRRDIEKARLHEECGGYCPYTGRHIPFSTLFDNSEFDVEHIIPRSRYPDDSFQNKTLCYLPENRDVKKGQTPWEAYGKDEQRWAEIMTRVSSWKNRGKMARFAIQTEEALGDFSARQMNDTRYASVLASRFLGALYGGRDLVDAEKVRQVIFASSGAVTATLRSSWGLEAILREIVPTEPGESRGKPRTDHRHHAIDAITIALTRPKVIQSMALAASLEPWQRDSRAWRKIESPWRDFVLSIRPHIEQMLVSHRPEHKMSGELHKGTNYPPPHNYKGKPTVHTRCALSALSAADIADDEVIVDPAVRDAVRAKLEKLGGNPKLFDRPENAPCLESRDGRFIPIRKVRIREAKKPILVGTGVRERYVASGGIHHIGLFVVRDARRREVWESEVVQITDAYERHREHLPVVCRTHDAEEAAFLFSLMKDDTVELEKDGTRGIYRVKKFEATGKITFVPVNNAMLDKMQYTTGAAWSRMPATLKPMSPRKIVIDLLGKVHPAND

SEQ ID NO: 616 - protein, 1084 aa, unidentified
  REGION 1..1084: note = Description of Unknown: uncultivated organism
  REGION 1..1084: note = MG4-198 effector
MSAKSEELKGAPYILGLDLGAASLGWAVVGLADGKPACHVDGGVRIFPEAVENLEQGKDDPKSAQRRLARQMRRQTDRRARRVASVFRVLQKAGLLPRFSEGADPADPLARHELINRLDEDLACTVPGLIDPAAEHRSRSVFHYRLRALAIHQDLPPYAIGRAFLHIAQRRGFKSGRIEEASGSEKAKERESDSRKERRQVAARIESLPAEFLRLGACTIGEYWSKLDPNQKRIRGIGNWSGRQMHVDEFDRIWERQAPRQQEIMTPLLYRIVKRRIFFQRPLKSAAGLIGHCELERESQRRRAPLAHPLYQRFRILQTVNDLRIVEGSGLSRPLTVEQRIKALDTLSRQQTVTFKSLHKKLGLVPGETFSHEEGDRKDLPGNRTECKLREVFGEQWDSLPEQQKNVIAGYVRSMDDSAVLARIAETRWGLGHLRAARLAGIQLEQGYGRLSVAALRKLLPLMEEGLPYMTAVERIYPDRAFAPTQELLPKVLDLKNVRNPAVVRALTELRKVVNGVIREYGRPERIQIELARELKKPAKARERIAQENRQREDLRKKTIERIFRECGLGKPSNADIEKAILWEECQHHDPYTGGSINFHDLFGSDAKWEIEHIIPHSRSQDDSLTNKTLCSRETNRQKGNRTPFEVFGNTPEWEAMVERVTKFQGDKRAMTRKLARFTMEGGVEELFGEFTQRQLNDTKYASLLAMEFLGQLYGGVCDERGIRRVNAVSGGVTAQIRKGWRLHSILRDGPSQGEAKPRDDHRHHAIDALVIAMTDAGAVQAVSRASERSRLDHRHGFRVDDPWNGFLEQVQAVIRAIRVSHRPDHHLRGALHAESLYSPPRSERGAAPRHRIRKWLSSLTPEQVRDIVDTKVREAVEAKLKELGQTDPRDAFKNNADPPTLGNRHGDPVPIRRVRVYVSVSPQRIGTGATARHVVSKDNHHLAIYRLSADKKGTARWTGEAVSLLEALKRMNLPGRPVIAPVNESGAPLVMALYKGDLVEMTVPKSQPPERDLFVVRGFSIEKRGGPEINFVRHNLAAEIADLKDAGEWQRIRSWDELRLLNPRIVRLGAMGRVMPDDSQPNS

SEQ ID NO: 617 - protein, 1079 aa, unidentified; identical to SEQ ID NO: 544
  REGION 1..1079: note = Description of Unknown: uncultivated organism
  REGION 1..1079: note = MG4-199 effector

SEQ ID NO: 618 - protein, 1079 aa, unidentified; identical to SEQ ID NO: 544
  REGION 1..1079: note = Description of Unknown: uncultivated organism
  REGION 1..1079: note = MG4-200 effector

SEQ ID NO: 619 - protein, 1106 aa, unidentified
  REGION 1..1106: note = Description of Unknown: uncultivated organism with predicted taxonomy: Acidobacteriales bacterium 59-55
  REGION 1..1106: note = MG4-201 effector
MSESGVSTQPYVLGLDLGSASLGWALVGIDAMERPSSLIRAGVRIFEPGVDGSALDIQQGKDQSKAVDRREARLRRRQLRRRVARQRELFGVLQGAGLLPTDDTQGTGIGSEQRHRILNNLDVTLSNRYRNGADQEIFAQMPLYALRKKALYEPLALDELGRVFFHLSQRRGFQSNRKDVKKKTKDSEDQGQVKSAIHELEQAIEAAGAQTLGEYLAGLDPHEQKVRRQWTGRKMFEKEFQMIWDKQKEYHTDLLTPELHDRIWNLLFFQRPVAAQKHLVGKCELEPDKRRAPWAALLAQQFRLLQKVNDLRLIGEDGNELPLNEDGRAAVFDLLENHGTQSFAKIKQHLGLPKTAQFNLERGKAKELKGNVTAQSMRKVFGERWKEFSEGKQNQIIENWRNSEKDEELKREAMEHWGLDEAGANALVNEKAPGDYCSLSLVALGKILPLMRAGKSFKEAETEIYGNRFSGAAVHSIIPVLRPNRKHFRNGTSPPQDPLMASIANGLRNPAVERSITEMRKVVNAIVREYGKPCEIRIELARELKKPRSKRLDETARNRKREAENKALAERMHNECGTPQNPSRNDLEKAKLWVEQQGECPYTGRSLPFSRLFDDNNGFDVDHILPRSRHPDDSYQNKVLCWGDTNRMVKRNQTPYEAFAEQDPENWHQILARVARWKNPGKLRKFEIRSTDDLAEFSSRQLNDTRYTSLLAARLLSTLYGGRDVAENGGKRQIIFASTGAVTATLRRNWGFEQILRNIIPPEPSESTGKPRTDHRHHAIDAIVIALTRNDVIQSMARASALEPWQPGTRSWRHVPQPWCTPDFFRSVEEQVREMLTSHRPEHKVSGELHQGSNYARPYMYKGKSIVHSRTLVSELKVEQIEADDVIVDRAVRDILRAKLKEIGGTLKGSDKVKTFEKPENTPYILTPAGKRIPIRKVRIRETKNPLLVGAGSNERFVASGGIHHVDLFVTRDEKRRETWDSKVIQTTEMYDRFPKHDRRPGRPHTESKNLSRLRQNDDDDESRFLFSLMKSDTIQLEQDGHRQIFKVKKFEATGKMTFIPINNAMPDKLQYSTGAAWSKMPATLKSMSPQKVVVDLLGRVHPAND

SEQ ID NO: 620 - protein, 1062 aa, unidentified; identical to SEQ ID NO: 549
  REGION 1..1062: note = Description of Unknown: uncultivated organism with predicted taxonomy: Acidobacteriales bacterium 59-55
  REGION 1..1062: note = MG4-202 effector

SEQ ID NO: 621 - protein, 1062 aa, unidentified
  REGION 1..1062: note = Description of Unknown: uncultivated organism with predicted taxonomy: Acidobacteriales bacterium 59-55
  REGION 1..1062: note = MG4-203 effector
MSSALEQQKYVLGLDLGSASLGWALIALNGADDPVSLIRAGVRIFEPGVDGTSMEIEQGKDQSKAVERRTARLHRRQLRRRAARQMDLFRVLQRHFLLPSPETLFGSPEEQMHSVLNELDQELTQKWQSTYQGIRFAELPLYYLRKMALDERLEAHEIGRILFHLIQRRGFLSNRRENKQNPDQKKELGQVKAEIHSLEQEIQNAGARTLGEFFAGLDPHAQKVRRRWTARKMFQDEFEKIWEAQTAHRPELLTQELHDKIAHLLFFQRPIAAQTHLIGKCELETGKQRAPWAAMEAQRFRILQKVNDLRLINPGSLISDPLTEEGRQRLYHLLDREGDQTFKAIRKYLSFSAEVQFNLEKGDEKRLRGNRTQAAMRKVFGERWDTIGEGKQHQIIENWRNSESDEVLIREAMEQWSLDAAAATLLSEQTPEPGYCAVSLAAISKLLPLMASGKSFKEAETELYGARFSGGTIFETLPEVRKQLESLRNPAVERSLTELRKVVNAIVREYGKPHEIRIELARELKKPRQERIEATKKNRNRQREREDVAVRILRECGLSNPSRRDIEKARLHEECGGYCPYTGRHIPFSTLFDNSEFDVEHIIPRSRYPDDSFQNKTLCYLPENRDVKKGQTPWEAYGKDEQRWAEIMTRVSSWKNRGKMARFAIQTEEALGDFSARQMNDTRYASVLASRFLGALYGGRDLVDAEKVRQVIFASSGAVTATLRSSWGLEAILREIVPTEPGESRGKPRTDHRHHAIDAITIALTRPKVIQSMALAASLEPWQRDSRAWRKIESPWRDFVLSIRPHIEQMLVSHRPEHKMSGELHKGTNYPAPHNYKGKPTVHTRCALSALSAADIADDEVIVDPAVRDAVRAKLEKLGGNPKLFDRPENAPCLESRDGRFIPIRKVRIREAKKPILVGTGVRERYVASGGIHHIGLFVVRDARRREVWESEVVQITDAYERHREHLPVVCRIHDAEEAAFLFSLMKDDTVELEKDGTRGIYRVKKFEATGKITFVPVNNAMLDKMQYTTGAAWSRMPATLKPMSPRKIVIDLLGKVHPAND

SEQ ID NO: 622 - protein, 830 aa, unidentified
  REGION 1..830: note = Description of Unknown: uncultivated organism with predicted taxonomy: Acidobacteriales bacterium 59-55
  REGION 1..830: note = MG4-204 effector
MFQDEFEKIWEAQTAHRPELLTQELHDKIAHLLFFQRPIAAQTHLIGKCELETGKQRAPWAAMEAQRFRILQKVNDLRLINPGSLISDPLTEEGRQRLYHLLDREGDQTFKAIRKYLSFSAEVQFNLEKGDEKRLRGNRTQAAMRKVFGERWDTIGEGKQHQIIENWRNSESDEVLIREAMEQWSLDAAAATLLSEQTPEPGYCAVSLAAISKLLPLMASGKSFKEAETELYGARFSGGTIFETLPEVRKQLESLRNPAVERSLTELRKVVNAIVREYGKPHEIRIELARELKKPRQERIEATKKNRNRQREREDVAVRILRECGLSNPSRRDIEKARLHEECGGYCPYTGRHIPFSTLFDNSEFDVEHIIPRSRYPDDSFQNKTLCYLPENRDVKKGQTPWEAYGKDEQRWAEIMTRVSSWKNRGKMARFAIQTEEALGDFSARQMNDTRYASVLASRFLGALYGGRDLVDAEKVRQVIFASSGAVTATLRSSWGLEAILREIVPTEPGESRGKPRTDHRHHAIDAITIALTRPKVIQSMALAASLEPWQRDSRAWRKIESPWRDFVLSIRPHIEQMLVSHRPEHKMSGELHKGTNYPPPHNYKGKPTVHTRCALSALSAADIADDEVIVDPAVRDAVRAKLEKLGGNPKLFDRPENVPCLESRDGRFIPIRKVRIREAKKPILVGTGVRERYVASGGIHHIGLFVVRDARRREVWESEVVQITDAYERHREHLPVVCRTHDAEEAAFLFSLMKDDTVELEKDGTRGIYRVKKFEATGKITFVPVNNAMLDKMQYTTGAAWSRMPATLKPMSPRKIVIDLLGKVHPAND

SEQ ID NO: 623 - protein, 819 aa, unidentified
  REGION 1..819: note = Description of Unknown: uncultivated organism with predicted taxonomy: Acidobacteria
  REGION 1..819: note = MG4-205 effector
MAAIAPPSFRPGLVLGIDLGSNSLGTALIRTDLDLIEFMGVRIFPAGVEGNLEEGKEESRAAKRRQARLARRQTQRRQRRLYKVFHFLQRIGLLPTGDRLEVLGRLQNELEHCYPQTTVLPWFLRARALDQALGPHELGLALYHLAQRRGFLSNRAGGKDNEKERSEVKASIKGLAAAIEAAGKRTLGEYMASLNPREKLRNSAEFSGHYTHRSMFEREFDMIWDSQKAHHPEILTENHGAKLHDAMFHQRPLKDQSYLVGQCELEPTEKRAPLRLLAAQRFRILGFVNNLRLRLEDGNERKLTPNERAVLLDLCEKAEKLSLAAARRVLGLSTAQRFTIEEGGEKNVPVNLTATRLRAALGQAWDGLTAAQKDDLIEDVGDGKRCPTDEDLERCGREKWGWPQEVANALSKVRLPDGYGRYSLRALVALLPALEGGITVEEAIRAIPAYAETRNAAEPLPMLPPVRDLKAMLGEIRNPAVLRSLTELRKTVNAIIRRYGIPEQIHIELARDLKKSKKERQYQAELNREREKMRQEATEELRKYDAVRFANPRNTDIEKYLLAKEARWQCPYTNKKYGFTDVFGDHPQVDVEHIIPRSRSLDDSYVNKTLAYRSANAEKGNRTPREWLFESDQEQYEQMIRVVKQFDPRFEVGKKLRRFSMELSDPDSLLREFTERQLQDTRYASKLACRYLGVLYGGTIDASGKRRVFASAGQVTAKLRRAWDLDRILSPDKPEKCRDDHRHHAIDALTVALSSTTLIRELARAAGEADRLFRRKIILPVPWVGFGEQTRSAVERIQPSHRPMRKLAGPLHEETFYSR

SEQ ID NO: 624 - protein, 1062 aa, unidentified
  REGION 1..1062: note = Description of Unknown: uncultivated organism
  REGION 1..1062: note = MG4-206 effector
MSAALEQQKYVLGLDLGSASLGWALIALNDADDPVSLIRAGVRIFEPGVDGTSIEIEQGKDQSKAVERRTARLHRRQLRRRAARQRDLFRVLQRHSLLPAPETLVGSPEEQRHSVLNELDQELAQKWQSTYQGKRFAELPLYYLRKMALDERLEAHEIGRILFHLIQRRGFLSNRRENKQNPDQKKELGQVKAEIHSLEQEIQNAGARTLGEFFAGLDPHAQKVRRRWTARKMFQDEFEKIWEAQKAHRPELLTQELHDKIAHLLFFQRPIAAQTHLIGKCELETGKQRAPWAAMEAQRFRILQKVNDLRLINPGSLISDPLTEEGRQRLYHLLDREGDQTFKAIRKYLSFSAEVQFNLEKGDEKRLRGNRTQAAMRKVFGERWDTIGEGKQHQIIENWRNSESDEVLIREAMEQWSLDAAAATLLSEQTPEPGYCAVSLAAISKLLPLMASGKSFKEAETELYGARFSGGTIFETLPEVRKQLESLRNPAVERSLTELRKVVNAIVREYGKPHEIRIELARELKKPRQERIEATKKNRNRQREREDVAVRILRECGLSNPSRRDIEKARLHEECGGYCPYTGRHIPFSTLFDNSEFDVEHIIPRSRYPDDSFQNKTLCYLPENRDVKKGQTPWEAYGKDEQRWAEIMTRVSSWKNRGKMARFAIQTEEALGDFSARQMNDTRYASVLASRFLGALYGGRDLVDAEKVRQVIFASSGAVTATLRSSWGLEAILREIVPTEPGESRGKPRTDHRHHAIDAITIALTRPKVIQSMALAASLEPWQRDSRAWRKIESPWRDFVLSIRPHIEQMLVSHRPEHKMSGELHKGTNYPAPHNYKGKPTVHTRCALSALSAADIADDEVIVDPAVRDAVRAKLEKLGGNPKLFDRPENAPCLESRDGRFIPIRKVRIREAKKPILVGTGVRERYVASGGIHHIGLFVVRDARRREVWESEVVQITDAYERHREHLPVVCRIHDAEEAAFLFSLMKDDTVELEKDGTRGIYRVKKFEATGKITFVPVNNAMLDKMQYTTGAAWSRMPATLKPMSPRKIVIDLLGKVHPAND

SEQ ID NO: 625 - protein, 1056 aa, unidentified
  REGION 1..1056: note = Description of Unknown: uncultivated organism
  REGION 1..1056: note = MG4-207 effector
MAAIAPPSFRPGLVLGIDLGSNSLGTALIRTDLDLIEFMGVRIFPAGVEGNLEEGKEESRAAKRRQARLARRQTQRRQRRLYKVFHFLQRIGLLPTGDRLEVLGRLQNELEHCYPQTTVLPWFLRARALDQALGPHELGLALYHLAQRRGFLSNRAGGKDNEKERSEVKASIKGLAAAIEAAGKRTLGEYMASLNPREKLRNSAEFSGHYTHRSMFEREFDMIWDSQKAHHPEILTENHGAKLHDAMFHQRPLKDQSYLVGQCELEPTEKRAPLRLLAAQRFRILGFVNNLRLRLEDGNERKLTPNERAVLLDLCEKAEKLSLAAARRVLGLSTAQRFTIEEGGEKNVPVNLTATRLRAALGQAWDGLTAAQKDDLIEDVGDGKRCPTDEDLERCGREKWGWPQEVANALSKVRLPDGYGRYSLRALVALLPALEGGITVEEAIRAIPAYAETRNAAEPLPMLPPVRDLKAMLGEIRNPAVLRSLTELRKTVNAIIRRYGIPEQIHIELARDLKKSKKERQYQAELNREREKMRQEATEELRKYDAVRFANPRNTDIEKYLLAKEARWQCPYTNKKYGFTDVFGDHPQVDVEHIIPRSRSLDDSYVNKTLAYRSANAEKGNRTPREWLFESDQEQYEQMIRVVKQFDPRFEVGKKLRRFSMELSDPDSLLREFTERQLQDTRYASKLACRYLGVLYGGTIDASGKRRVFASAGQVTAKLRRAWDLDRILSPDKPEKCRDDHRHHAIDALTVALSSTTLIRELARAAGEADRLFRRKIILPVPWVGFGEQTRSAVERIQPSHRPMRKLAGPLHEETFYSRPRKEAVGTDKKGNPIKKEFVHYRVPVTSLASAKDFESIVDSHVRAAVKEKAAQLGGGGNKFEKNWPALVTRKGQTVPIRRVRIRKVQSVVSIGKDERKRFVVPGSNHHAEILKELDANGRVKRYLCETVTMLKALERKRQGVPVVSRDHGPGYKFHCTLSEGDLVEARGPGDEALRIWKVRTVRDSQQLALTPALDARPKADVQKDGMWSPRVNSLFLGGARKVLITPLGEVIPAND

SEQ ID NO: 626 - protein, 1076 aa, unidentified; identical to SEQ ID NO: 545
  REGION 1..1076: note = Description of Unknown: uncultivated organism
  REGION 1..1076: note = MG4-208 effector

SEQ ID NO: 627 - protein, 1079 aa, unidentified; identical to SEQ ID NO: 544
  REGION 1..1079: note = Description of Unknown: uncultivated organism
  REGION 1..1079: note = MG4-209 effector

SEQ ID NO: 628 - protein, 827 aa, unidentified
  REGION 1..827: note = Description of Unknown: uncultivated organism with predicted taxonomy: candidate division Kazan bacterium
  REGION 1..827: note = MG4-210 effector
QMRRQIDRKGIRLKALFKLLQSKSLLPIYPELKGEPLAAERHHLFTRLDKELTDALCAEKRKRGTDGLMLEADQALPYVLRKEALERKLELHELGRALYHLCQRRGYRPSAADDSEKEETASTEEEIESKRGRRKKPEPEDKGDKDSESPKKVAEWISDLQAKMDAAHTPTIGAYFADFKHNNPHQERIRHRWTGREMFVKEFDLIWERQSEFYRDSRPGLLNDDLRNRVYDCLFFQRPLASAEHLIGMCDLERGERRAPWATLEAQRFRLLQKVNDLAYIPSGLFNERKLSLEQCATLAAALQDKGDMPFPEIAKLLGLPPKTEFNLMRGKKKKIEGNRINQVMLQVFGDRWRAFTEQERSSAVALWTKTEGFEERKNVAISQCGLDAWKAKEWAENRPPKDCCRHSRKALVKLIKRMEEGVPYATAKLEIYDSQLAGKAPLDFVPKVIETLPSINNPAVLRALTELRKVVNAIIRTYGDKPYEIRIELARELRKNRKQRQNATEAGDKQHLRRIDAARTILRECRNYDAQGRDAERLVRERRDDVTKMLLLMECRCLCPYTGDSISYLDLFGGEVEVEHIIPQSLMVDNSFNNLTLCYRKVNHEKLDKTPRQAFCRAEDDQQWIDIIGRVQKFGNKEKLHRFLLSSREDIDRFSNRRLNDTRYTSKLAGRLLMSLYGGRDIVPAETLDELDEFKDRTGRRAICVSSGMVTSLLRDAWHLNLSGVIGDDAFKCPKKSEDDEESGKRRKGQSNKKDRCDHRHHALDAVVIALTSEKVIREINMLASRLYRERQTPLKYRDLKSIQNPWHNFMDDHFRDIFRGMLVSH

SEQ ID NO: 629 - protein, 845 aa, unidentified
  REGION 1..845: note = Description of Unknown: uncultivated organism with predicted taxonomy: Acidobacteriales bacterium 59-55
  REGION 1..845: note = MG4-211 effector
RIWNLLFFQRPVAAQKHLVGKCELEPDKRRAPWAALLAQQFRLLQKVNDLRLIGEDGNELPLNEDGRAAVFDLLENHGTQSFAKIKQHLGLPKTAQFNLERGKAKELKGNVTAQSMRKVFGERWKEFSEGKQNQIIENWRNSEKDEELKREAMEHWGLDEAGANALVNEKAPGDYCSLSLVALGKILPLMRAGKSFKEAETEIYGNRFSGAAVHSIIPVLRPNRKHFRNGTPPPQDPLMASIANGLRNPAVERSITEMRKVVNAIVREYGKPCEIRIELARELKKPRSKRLDETARNRKREAENKALAERMHNECGTPQNPSRNDLEKAKLWVEQQGECPYTGRSLPFSRLFDDNNGFDVDHILPRSRHPDDSYQNKVLCWGDTNRMVKRNQTPYEAFAEQDPENWHQILARVARWKNPGKLRKFEIRSTDDLAEFSSRQLNDTRYTSLLAARLLSTLYGGRDVAENGGKRQIIFASTGAVTATLRRNWGFEQILRNIIPPEPSESTGKPRTDHRHHAIDAIVIALTRNDVIQSMARASALEPWQPGTRSWRHVPQPWCTPDFFRSVEEQVREMLTSHRPEHKVSGELHQGSNYARPYMYKGKSIVHSRTLVSELKVEQIEADDVIVDRAVRDILRAKLKEIGGTLKGSDKVKTFEKPENTPYILTPAGKRIPIRKVRIRETKNPLLVGAGSNERFVASGGIHHVDLFVTRDEKRRETWDSKVIQTTEMYDRFPKHDRRPGRPHTESKNLSRLRQNDDDDESRFLFSLMKSDTIQLEQDGHRQIFKVKKFEATGKMTFIPINNAMPDKLQYSTGAAWSKMPATLKSMSPQKVVVDLLGRVHPAND

SEQ ID NO: 630 - protein, 1076 aa, unidentified; identical to SEQ ID NO: 545
  REGION 1..1076: note = Description of Unknown: uncultivated organism
  REGION 1..1076: note = MG4-212 effector

SEQ ID NO: 631 - protein, 1106 aa, unidentified; identical to SEQ ID NO: 597
  REGION 1..1106: note = Description of Unknown: uncultivated organism with predicted taxonomy: Polaribacter sp. ALD11
  REGION 1..1106: note = MG4-213 effector

SEQ ID NO: 632 - protein, 1079 aa, unidentified; identical to SEQ ID NO: 544
  REGION 1..1079: note = Description of Unknown: uncultivated organism
  REGION 1..1079: note = MG4-214 effector

SEQ ID NO: 633 - protein, 1109 aa, unidentified
  REGION 1..1109: note = Description of Unknown: uncultivated organism
  REGION 1..1109: note = MG4-215 effector
RSKAVGRRIARQMRRQIDRKGIRLKALFKLLQSKSLLPIYPELKGEPLAAERHHLFTRLDKELTDALCAEKRKRGTDGLMLEADQALPYVLRKEALERKLELHELGRALYHLCQRRGYRPSAADDSEKEETASTEEEIESKRGRRKKPEPEDKGDKDSESPKKVAEWISDLQAKMDAAHTPTIGAYFADFKHNNPHQERIRHRWTGREMFVKEFDLIWERQSEFYRDSRPGLLNDDLRNRVYDCLFFQRPLASAEHLIGMCDLERGERRAPWATLEAQRFRLLQKVNDLAYIPSGLFNERKLSLEQCATLAAALQDKGDMPFPEIAKLLGLPPKTEFNLMRGKKKKIEGNRINQVMLQVFGDRWRAFTEQERSSAVALWTKTEGFEERKNVAISQCGLDAWKAKEWAENRPPKDCCRHSRKALVKLIKRMEEGVPYATAKLEIYDSQLAGKAPLDFVPKVIETLPSINNPAVLRALTELRKVVNAIIRTYGDKPYEIRIELARELRKNRKQRQNATEAGDKQHLRRIDAARTILRECRNYDAQGRDAERLVRERRDDVTKMLLLMECRCLCPYTGDSISYLDLFGGEVEVEHIIPQSLMVDNSFNNLTLCYRKVNHEKLDKTPRQAFCRAEDDQQWIDIIGRVQKFGNKEKLHRFLLSSREDIDRFSNRRLNDTRYTSKLAGRLLMSLYGGRDIVPAETLDELDEFKDRTGRRAICVSSGMVTSLLRDAWHLNLSGVIGDDAFKCPKKSEDDEESGKRRKGQSNKKDRCDHRHHALDAVVIALTSEKVIREINMLASRLYRERQTPLKYRDLKSIQNPWHNFMDDHFRDIFRGMLVSHRPEHKLSGALHEATSYGKVRYYNAKGDPVRYQRIAIGKLLTDKQIEKIVDEEVKKSVVKLGETIGGYKKWSQEKHGWPKMPNRNGEPVPIKKVRIKITKNAKEIEAERFRGFGTGRPESNVEDKEIAYASFFTVQDRKGTKTVWEIVKLFEAAQRVRALPKSERGHEKICWKYPKYPDATFFRFSLMKGDLVELVLNGKPAIFIVRRFEFDSRLWVAPINAAGKDEEMEAAGHLLRLGFSRFLTMGAGDDKIPRPVFVDLLGQPHYINIGA

SEQ ID NO: 634 - protein, 1062 aa, unidentified
  REGION 1..1062: note = Description of Unknown: uncultivated organism
  REGION 1..1062: note = MG4-216 effector
MSAALEQQKYVLGLDLGSASLGWALIALNDADDPVSLIRAGVRIFEPGVDGTSIEIEQGKDQSKAVERRTARLHRRQLRRRAARQRDLFRVLQRHCLLPAPETLVGSPEEQRHSVLNELDQELAQKWQSTYQGKRFAELPLYYLRKMALDERLEAHEIGRILFHLIQRRGFLSNRRENKQNPDQKKELGQVKAEIHSLEQEIQNAGARTLGEFFAGLDPHAQKVRRRWTARKMFQDEFEKIWEAQKAHRPELLTQELHDKIAHLLFFQRPIAAQTHLIGKCELETGKQRAPWAAMEAQRFRILQKVNDLRLINPGSLISDPLTEEGRQRLYHLLDREGDQTFKAIRKYLSFSAEVQFNLEKGDEKRLRGNRTQAAMRKVFGERWDTIGEGKQHQIIENWRNSESDEVLIREAMEQWSLDAAAATLLSEQTPEPGYCAVSLAAISKLLPLMASGKSFKEAETELYGARFSGGTIFETLPEVRKQLESLRNPAVERSLTELRKVVNAIVREYGKPHEIRIELARELKKPRQERIEATKKNRNRQREREDVAVRILRECGLSNPSRRDIEKARLHEECGGYCPYTGRHIPFSTLFDNSEFDVEHIIPRSRYPDDSFQNKTLCYLPENRDVKKGQTPWEAYGKDEQRWAEIMTRVSSWKNRGKMARFAIQTEEALGDFSARQMNDTRYASVLASRFLGALYGGRDLVDAEKVRQVIFASSGAVTATLRSSWGLEAILREIVPTEPGESRGKPRTDHRHHAIDAITIALTRPKVIQSMALAASLEPWQRDSRAWRKIESPWRDFVLSIRPHIEQMLVSHRPEHKMSGELHKGTNYPAPHNYKGKPTVHTRCALSALSAADIADDEVIVDPAVRDAVRAKLEKLGGNPKLFDRPENVPCLESRDGRFIPIRKVRIREAKKPILVGTGVRERYVASGGIHHIGLFVVRDARRREVWESEVVQITDAYERHREHLPVVCRTHDAEEAAFLFSLMKDDTVELEKDGTRGIYRVKKFEATGKITFVPVNNAMLDKMQYTTGAAWSRMPATLKPMSPRKIVIDLLGKVHPAND

SEQ ID NO: 635 - protein, 754 aa, unidentified
  REGION 1..754: note = Description of Unknown: uncultivated organism with predicted taxonomy: candidate division Zixibacteria bacterium CG_4_9_14_3_um_filter_46_8
  REGION 1..754: note = MG4-217 effector
LSENTPRIAEDLILGLDLGTNSLGWCLLSAPEGNPASIVAIGVRSFDAGGDISAANGKSPCVIRREARVARRVVARRAKRLRDALRALQAAGLLPAGKAKDVIPPLDAAWLEERLSSFPQRDPERLRQAHLLPYLLRKEALDRPLTRQELGRALYHLAQRRGFLTNRKAEPKKDEKPGEVKQSIDSLRGKMEQAHARTLGEYFAGLDPQETRIRRRWTARGMYLDEFECIWTAQAPHHAEVLTSALKADLYRAIFRKRPMSSAASLVGPCAHEPNRRRAPACILPAQRFRLLQQVINCRVIEPNQVGRLLTDEEFAKLVQALEERDEMTVTEAKKVLGLPSRSKFTFEEGGEKKFNGNGTNAGLANVFGPAWETFTPDQRDAVVTEVRSFEDPEALIRRATSGRAFWNLDAQAGKALADVRLQQGYCALSRRALERLLPLMESRVPYQTAVEQIYKESCRKTAVKDLLPRVSELKELRNPVVSRVLTETRKVVNAIIRKYGIPGRVRIELGRDLKQSKDHRLRATKNARDNEESRKAAIRKILAETPVRSPGPDDILRAQLYEECNHECPYTGRKIAFAALFGDSPQFDIEHIIPFSRCLDDSFANKTLCYHEVNRHVKGNRTPLEAFGSTPEWERIVQSVRLFSGKAAEGKLRRFLMTEEEILKLQDFANSQLSDTRYASKLAMRYLALLYGGLSDEGGTQRIQAGSGNVTKHVRQAHRLNGILGDGPGKNRNDHRHHAVDALAIALTDQALV

SEQ ID NO: 636 - protein, 1045 aa, unidentified
  REGION 1..1045: note = Description of Unknown: uncultivated organism with predicted taxonomy: Planctomicrobium piriforme
  REGION 1..1045: note = MG4-218 effector
MANPTGVPYILGLDIGASSIGWALLAANTDRSERLLRCGARVFDAGMEEGDFSAGKENSRSAVRRLARQARKLTSRRMRRQRKLFNLLVKAGLLPAGEPSQVVPALDADLRRKHVAMLPKGSDARRQAEHVLPYRLRALALDQKLEALELGRAIYHLAQRRGFLSNRKAPPRKDEKPGEVKEHITELEKNIKAAGARTLGKYLSGLDPEQERIRRRWTSRPMYLDEFAVLWAAQAAYHPAILTDDLRKRIHRAIFHQRPLKNQSNLIGTCELERGRQRAPKALLLFQRFRTLQQITSARVVARSGAGRELGAAERATLLAALDRQGELAFSKAKKLIGLPPGSTFNWESGGEDKFNGNHTGARLAEIFGDRWHRMCPSGKDQVVEDVLSIHSDAALERRGLKWDLDSEAAARFGHVNLEDGHGGLSRQALQKLVPLMEQGVPYATAVDKVYGRKEHKPLEVLPPPAPTYPHLRNPMVLRVLAELRKVVNAVIAAHGKPDAVRVELARDMRRSKKQRQESWLRMRQNERDRKRAAQKILAEMNNDSPSRQDKEKVLLAEECNWTCPYTGKCISMQSLLGPTPQFDIEHIIPFSRSLDDSFTNKTLCDIAENRDHKRNRTPFEAYAAEPDKWNAILGRVGRFRSNAREEKVRRFRQEEIEGIEDFAARQLNDTRYATRQATDYLALLYGGLYEKGGKRFIQAAKGGTTAYLRNEWQLNSILGDGGTKSRDDHRHHAVDAVAIALTDAGTVKMLSDAAGRAAQEGRRRFGRVEDPWPGFLDDVRQAIEGLNVSHRVSRKVNGPLHEETNYGPGKKRDAAGRPESLSVRKRLDALTPADMKLIADERVRGLVTAKLATLGGDAKKAFSDVKNHPCFELKDGRRIPIHAVRLRRSGTALAVGEGARVRYVLTGSNHHMELYEVTDAKGKTRWKGRVVSRFEAIRRQGRKQPVVDRTPPDGGTFKFSLAPGEIVHLTDEKGEARLYRVRTVSQAASGSIEIAGAKVNDARLKDEIIKGGDWLRITSMDKVAAMSCHKVIITPLGEIRDAND

SEQ ID NO: 637 - protein, 1076 aa, unidentified
  REGION 1..1076: note = Description of Unknown: uncultivated organism with predicted taxonomy: Candidatus Sulfotelmatomonas gaucii
  REGION 1..1076: note = MG4-219 effector
MSSALERPQKYVLGLDLGSASLGWALIALNDADNPTSLIRAGVRIFEPGVDGTSMEIEQGKDQSKAVERRTARLHRRQLRRRAARQRDLFRLLQRHSLLPAPETLGGSPEEQRHSILNGLDQALARKWQSAFPDNRFAQLPLYYLRKRALDEPLEAHEIGRILFHLIQRRGFLSNRRENKQNPDQKKELGQVKAEIHSLEQEIQNAGARTLGEFFAGLDPHAQKVRRRWTARKMFQNEFEKIWEAQVIHCPNLLMPELHDKIAHLLFFQRPIATQSHLVGKCELEPGKQRAPWAAMEAQRFRILQKVNDLRLVNPGSLISDPLTEEDRQRLNSLLDREGDQTFKAIKKYLSFPADVQFNLEKGDEKRLRGNRTQAAMRKVFGDRWDRMSAGKQHQIVENWRNSESDEALIREAEEQWSLDDTAATLLSEQIPEPGYCAVSLTAISKLLPLMQCGKSFKEAETVVYGARFSGGVVFDTLPEVRKQLESLRNPAVERALTELRKVVNAIVREYGKPYEIRIELARELKKPRQERLEATKKNRTRQREREDIAGKILRECGLSNPSRKDIEKARLHEECGGICPYTGRHIPFSTLFDNSEFDVEHIIPRSRYPDDSFQNKTLCYLPENRDVKKGQTPWEAYGKDEQRWAEIMTRVGSWKNRGKMARFSIQTEEALGEFSARQMNDTRYASVLAARFLGSLYGGRDVVDGDNARQVIFASSGAVTATLRSSWGLEAILHEIVPAESGESRGKPRTDHRHHAIDAITIALTRSKVIQSMARTASLEPWQIDSRAWRKIELPWRDFVPSIRPHIEQMLVSHRPEHKMSGELHKGTNYSTPYNYKGKPTVHTRCLLSALSAADIAGDEVIVDTAVRDAVRKKLAELGGNPKLFDRPENAPCLSARDGRLIPIRKVRVRETKNPVKVGKGVRERFTSSGGIHHVALFVTRDEKRREKWDSEVAQVTEIYRRCPRNDHRKGRSQPVVTESPISRQLKSDPEAQFLFSVMKDDTIEVTDPNGIHILRVKKFSDNKQMWFVPVNDAHDDTQQMKLGITWSKTPNSLKELRPRKVVVDLLGKVHPAND

SEQ ID NO: 638 - protein, 1068 aa, unidentified
  REGION 1..1068: note = Description of Unknown: uncultivated organism with predicted taxonomy: Proteobacteria
  REGION 1..1068: note = MG4-220 effector
MSTALVPSDYILGIDLGSNSIGWAMIGLDQGKPTGLIRAGARVFDAGMEGDLESGQEESRNVARRDARMQRRQMARRARRLTKIFHILQRIGLLPPADLKTPEQRQEFLNQLDSNIIGSDWFKTKRAGNNFGEIDQVMPYLLRAAALDEPLDPHQLGRALYHLGQRRGFLSNRKKPMKKGEDEGVVKESIAELRQKMQESGARTLGEYFMRINPFERRIRQRWTHRDMYEGEFEKIWEAQAAHHPLLLTPERKKELKRAIFYQRPLRFPRELVGHCELEPEEIRAPRHYFIAQRFRLLQSLNNLRVAMPGEAERDLTAEERAKLDNELELHGDRTFGQIRKLLGIKRATFNLESGGEKLLRGNRTTAQFYKVFGERWLEMSSVEHEQALQDVRSIVKDETRLRRGSEHWKLDPEHAREFAAISLEPDYFNLSRKAMERLLPLLETGVSYATARRQLYPERFQAREPVPLLPPLHDVFEYLRNPAVERSLTELRKVVNALVRQYGKPAQIRLELARDLRKSRKEREANWKKNRDIEKSRKIMAERITAEAGITDPSREDIRKALLAKECGWVCPYTGRAISMRALVGPDAQFDIEHIIPFSQSLDNSFFNVTLCYHEENRNRKRNQTPYGAYGNEPEKFQEILDRVRRFDSDLADEKLKRFQLTDTADILKGFVDRQLNDTRYASTMAGDYLGFLYGGKIDSQRNLRVRATTGQVTAYLRDEWMLNRILRDGPTEQGGKVAKSREDHRHHAVDAIAIALTDESTIQQLSRAAQQAPQLGRRRFAPVQAPWPDFVDSVRAEIGRIVVSHRPNRKVSGALHEETLYSKSMPVPDSLKSQEKAPRVRKPLERLSKSEVEDIADPIVREMVQKKLEQLDGDPKKFSVAANLPFFKTADGREIPIKSVRVIKKTPTFPLGMGSRMRNVTSESNHHLEIFAELDEHGEEVEWDGVVVPMAEAYKRLAEAKRLRTKVPIVQRDFGAHRHFKFSLAAGDVVQCDNNHEGRRLLVVRGTSIEGGKTGRVALVPINDARKKNEIVASKDYFRFPLEKLRKLHTCKVTLSPLGDLGTAND

SEQ ID NO: 639 - protein, 876 aa, unidentified
  REGION 1..876: note = Description of Unknown: uncultivated organism with predicted taxonomy: Acidobacteriales bacterium 59-55
  REGION 1..876: note = MG4-221 effector
TGRKMFEKEFQMIWDKQKEYHTDLLTPELHDRIWNLLFFQRPVAAQKHLVGKCELEPDKRRAPWAALLAQQFRLLQKVNDLRLIGEDGNELPLNEDGRAAVFDLLENHGTQSFAKIKQHLGLPKTAQFNLERGKAKELKGNVTAQSMRKVFGERWKEFSEGKQNQIIENWRNSEKDEELKREAMEHWGLDEAGANALVNEKAPGDYCSLSLVALGKILPLMRAGKSFKEAETEIYGNRFSGAAVHSIIPVLRPNRKHFRNGTPPPQDPLMASIANGLRNPAVERSITEMRKVVNAIVREYGKPCEIRIELARELKKPRSKRLDETARNRKREAENKALAERMHNECGTPQNPSRNDLEKAKLWVEQQGECPYTGRSLPFSRLFDDNNGFDVDHILPRSRHPDDSYQNKVLCWGDTNRMVKRNQTPYEAFAEQDPENWHQILARVARWKNPGKLRKFEIRSTDDLAEFSSRQLNDTRYTSLLAARLLSTLYGGRDVAENGGKRQIIFASTGAVTATLRRNWGFEQILRNIIPPEPSESTGKPRTDHRHHAIDAIVIALTRNDVIQSMARASALEPWQPGTRSWRHVPQPWCTPDFFRSVEEQVREMLTSHRPEHKVSGELHQGSNYARPYMYKGKSIVHSRTLVSELKVEQIEADDVIVDRAVRDILRAKLKEIGGTLKGSDKVKTFEKPENTPYILTPAGKRIPIRKVRIRETKNPLLVGAGSNERFVASGGIHHVDLFVTRDEKRRETWDSKVIQTTEMYDRFPKHDRRPGRPHTESKNLSRLRQNDDDDESRFLFSLMKSDTIQLEQDGHRQIFKVKKFEATGKMTFIPINNAMPDKLQYSTGAAWSKMPATLKSMSPQKVVVDLLGRVHPAND

SEQ ID NO: 640 - protein, 1062 aa, unidentified
  REGION 1..1062: note = Description of Unknown: uncultivated organism
  REGION 1..1062: note = MG4-222 effector
MSSALEQQKYVLGLDLGSASLGWALIALNDADDPVSLIRAGVRIFEPGVDGTSIEIEQGKDQSKAVERRTARLHRRQLRRRAARQRDLFRVLQRHCLLPAPETLVGSPEEQRHSVLNELDQELAQKWQSTYQGKRFAELPLYYLRKMALDERLEAHEIGRILFHLIQRRGFLSNRRENKQNPDQKKELGQVKAEIHSLEQEIQNAGARTLGEFFAGLDPHAQKVRRRWTARKMFQDEFEKIWEAQTAHRPELLTQELHDKIAHLLFFQRPIAAQTHLIGKCELETGKQRAPWAAMEAQRFRILQKVNDLRLINPGSLISDPLTEEGRQRLYHLLDREGDQTFKAIRKYLSFSAEVQFNLEKGDEKRLRGNRTQAAMRKVFGERWDTIGEGKQHQIIENWRNSESDDVLIREAMEQWSLDAAAATLLSEQTPEPGYCAVSLAAISKLLPLMASGKSFKEAETELYGARFSGGTIFETLPEVRKQLESLRNPAVERSLTELRKVVNAIVREYGKPHEIRIELARELKKPRQERIEATKKNRNRQREREDVAVRILRECGLSNPSRRDIEKARLHEECGGYCPYTGRHIPFSTLFDNSEFDVEHIIPRSRYPDDSFQNKTLCYLPENRDVKKGQTPWEAYGKDEQRWAEIMTRVSSWKNRGKMARFAIQTEEALGDFSARQMNDTRYASVLASRFLGALYGGRDLVDAEKVRQVIFASSGAVTATLRSSWGLEAILREIVPTEPGESRGKPRTDHRHHAIDAITIALTRPKVIQSMALAASLEPWQRDSRAWRKIESPWRDFVLSIRPHIEQMLVSHRPEHKMSGELHKGTNYPPPHNYKGKPTVHTRCALSALSAADIADDEVIVDPAVRDAVRAKLEKLGGNPKLFDRPENVPCLESRDGRFIPIRKVRIREAKKPILVGTGVRERYVASGGIHHIGLFVVRDARRREVWESEVVQITDAYERHREHLPVVCRTHDAEEAAFLFSLMKDDTVELEKDGTRGIYRVKKFEATGKITFVPVNNAMLDKMQYTTGAAWSRMPATLKPMSPRKIVIDLLGKVHPAND

SEQ ID NO: 641 - protein, 1079 aa, unidentified; identical to SEQ ID NO: 544
  REGION 1..1079: note = Description of Unknown: uncultivated organism
  REGION 1..1079: note = MG4-223 effector

SEQ ID NO: 642 - protein, 1076 aa, unidentified; identical to SEQ ID NO: 545
  REGION 1..1076: note = Description of Unknown: uncultivated organism
  REGION 1..1076: note = MG4-224 effector

SEQ ID NO: 643 - protein, 1179 aa, unidentified
  REGION 1..1179: note = Description of Unknown: uncultivated organism
  REGION 1..1179: note = MG4-225 effector
MSFPDGVRQKYILGLDLGSASIGWAVIDLDGNLDPCGLLAAGSHIFDPGVEVPPAAGKMARDEAVFQGLDRSKAVGRRIARQMRRQIDRKGIRLKALFKLLQSKSLLPIYPELKGEPLAAERHHLFTRLDKELTDALCAEKRKRGTDGLMLEADQALPYVLRKEALERKLELHELGRALYHLCQRRGYRPSAADDSEKEETASTEEEIESKRGRRKKPEPEDKGDKDSESPKKVAEWISDLQAKMDAAHTPTIGAYFADFKNNNPHQERIRHRWTGREMFVKEFDLIWERQSEFYRDSRPGLLNDDLRNRVYDCLFFQRPLASAEHLIGMCDLERGERRAPWATLEAQRFRLLQKVNDLAYIPSGLFNERKLSLEQCATLAAALQDKGDMPFPEIAKLLGLPPKTEFNLMRGKKKKIEGNRINQVMLQVFGDRWRAFTEQERSSAVALWTKTEGFEERKNVAISQCGLDAWKAKEWAENRPPKDCCRHSRKALVKLIKRMEEGVPYATAKLEIYDSQLAGKAPLDFVPKVIETLPSINNPAVLRALTELRKVVNAIIRTYGDKPYEIRIELARELRKNRKQRQNATEAGDKQHLRRIDAARTILRECRNYDAQGRDAERLVRERRDDVTKMLLLMECRCLCPYTGDSISYLDLFGGEVEVEHIIPQSLMVDNSFNNLTLCYRKVNHEKLDKTPRQAFCRAEDDQQWIDIIGRVQKFGNKEKLHRFLLSSREDIDRFSNRRLNDTLYTSKLAGRLLMSLYGGRDIVPAETLDELDEFKDRTGRRAICVSSGMVTSLLRDAWHLNLSGVIGDDAFKCPKKSEDDEESGKRRKGQSNKKDRCDHRHHALDAVVIALTSEKVIREINMLASRLYRERQTPLKYRDLKSIQNPWHNFMDDHFRDIFRGMLVSHRPEHKLSGALHEATSYGKVRYYNAKGDPVRYQRIAIGKLLTDKQIEKIVDEEVKKSVVKLGETIGGYKKWSQEKHGWPKMPNRNGEPVPIKKVRIKITKNAKEIEAERFRGFGTGRPESNVEDKEIAYASFFTVQDRKGTKTVWEIVKLFEAAQRVRALPKSERGHEKICWKYPKYPDATFFRFSLMKGDLVELVLNGKPAIFIVRRFEFDSRLWVAPINAAGKDEEMEAAGHLLRLGFSRFLTMGAGDDKIPRPVFVDLLGQPHYINIGA

SEQ ID NO: 644 - protein, 794 aa, unidentified
  REGION 1..794: note = Description of Unknown: uncultivated organism with predicted taxonomy: Polaribacter sp. ALD11
  REGION 1..794: note = MG4-226 effector
MSESGVSTQPYVLGLDLGSASLGWALVGIDAMERPSSLIRAGVRIFEPGVDGSALDIQQGKDQSKAVDRREARLRRRQLRRRVARQRELFGVLQGAGLLPTDDTQGTGIGSEQRHRILNNLDVTLSNRYRNGADQEIFAQMPLYALRKKALYEPLALDELGRVFFHLSQRRGFQSNRKDVKKKTKDSEDQGQVKSAIHELEQAIEAAGAQTLGEYLAGLDPHEQKVRRQWTGRKMFEKEFQMIWDKQNEYHTDLLTPELHDRIWNLLFFQRPVAAQKHLVGKCELEPDKRRAPWAALLAQQFRLLQKVNDLRLIGEDGNELPLNEDGRAAVFDLLENHGTQSFAKIKQHLGLPKTAQFNLERGKAKELKGNVTAQSMRKVFGERWKEFSEGKQNQIIENWRNSEKDEELKREAMEHWGLDEAGANALVNEKAPGDYCSLSLVALGKILPLMRAGKSFKEAETEIYGNRFSGAAVHSIIPVLRPNRKHFRNGTPPPQDPLMASIANGLRNPAVERSITEMRKVVNAIVREYGKPCEIRIELARELKKPRSKRLDETARNRKREAENKALAERMHNECGTPQNPSRNDLEKAKLWVEQQGECPYTGRSLPFSRLFDDNNGFDVDHILPRSRHPDDSYQNKVLCWGDTNRMVKRNQTPYEAFAEQDPENWHQILARVARWKNPGKLRKFEIRSTDDLAEFSSRQLNDTRYTSLLAARLLSTLYGGRDVAENGGKRQIIFASTGAVTATLRRNWGFEQILRNIIPPEPSESTGKPRTDHRHHAIDAIVIALTRNDVIQ

SEQ ID NO: 645 - protein, 1079 aa, unidentified; identical to SEQ ID NO: 544
  REGION 1..1079: note = Description of Unknown: uncultivated organism
  REGION 1..1079: note = MG4-227 effector

SEQ ID NO: 646 - protein, 1059 aa, unidentified
  REGION 1..1059: note = Description of Unknown: uncultivated organism
  REGION 1..1059: note = MG4-247 effector
MKVKQESPQLILGLDIGTNSIGWSLLEDKGQDQGRIVGSGVRVYEAGMEGLIEQGKEESRNKNRRDARLHRRNLQRRARRMGGLWSLLQSSGLLPEGKAEGVLPELDKGLSETWTKKLGLDTKDKVGEKTQFSHVFPYFLRARALDEKLSCHELGRALYHLAQRRGFLSNRKAAPKKKEEEKGMKAEISELGRKIEESEARTLGEYFSRLNPEEGRIRSKHTSRKMYQEEFEAIWNAQTPHYPTILTEELKKKVSHAIFYQRPLKIRKEFIGNCEHEHNPDHPDRSPRRAPWALLDAQRFRLLQKVNDLVLTDTSTGEVRKLTPDERTKLLEALETQGDLTFGKIRKLTGLRKARFNFEAGGNDKLPGNRTASKLIKIFGEEKWKEFSTEQREQIVEDVHSIQSEEAQARRGIRAWGLEGEKAKDFGQLALEDGYCNLSRQALAKLLPRMEKGTAYKTAVKEVYGEPPAEKPLDSLPLVTEHLSSLRNPAVTRTLTELRKVVNNVVRQYGKPNMTRIELARDLKKSKKDREDIWKRNRENEKAREEAAKKILAEIPNLKPSRRDKEKVLLYEECGHKCPYTGKQISMASLLGDHPQFDIEHIIPFPRSLDDSFLNKTLCYAEENRNVKQGKTPHEAYGSNPTRWEEIIQRVKDFKGKARDIKLERFEAHGEKLDKLLGEFANRQLPDTAYASRLAVEYLGRLYGGRGGVDADGNRRVQAGRGQVTAYLRNEWGLNKILNDGGEKSRDDHRHHAVDAICVALTDAGTVKMLSDAASRATIERRRRFGKVNPPWPTFLDDVRKSIEGLIVSHRVSRKVSGPLHKGTNYSKPIRGTDKKGNPCEFRRVRKPLAELSEPEIKDVADPTIRQLVLDKLQALGVKEPKKAFSSNEANHPCLTTKDGREIPIHKVRINKKVTPFTVGEGLRQRHVTTESNHHIEVVEVLDKNGKPKWEGCLVSLKDAYDRLKAGLPVVKLDHGEGRRFVFSLAKGEAIKIDEENGGNRGLYVVKKLGDNRIWFVDTREARKLKEAGYNSKLMEPLRTLNCQKVLITPLGEVRRAND

SEQ ID NO: 647 - protein, 1014 aa, unidentified
  REGION 1..1014: note = Description of Unknown: uncultivated organism with predicted taxonomy: Planctomycetes
  REGION 1..1014: note = MG4-248 effector
MKVKQESPQLILGLDIGTNSIGWSLLEDKGQDQGRIVGSGVRVYEAGMEGLIEQGKEESRNKNRRDARLHRRNLQRRARRMGGLWSLLQSSGLLPEGKAEGVLPELDKGLSETWTKKLGLDTKDKVGEKTQFSHVFPYFLRARALDEKLSCHELGRALYHLAQRRGFLSNRKAAPKKKEEEKGMKAEISELGRKIEESEARTLGEYFSRLNPEEGRIRSKHTSRKMYQEEFEAIWNAQTPHYPTILTEELKKKVSHAIFYQRPLKIRKEFIGNCEHEHNPDHPDRSPRRAPWALLDAQRFRLLQKVNDLVLTDTSTGEVRKLTPDERTKLLEALETQGDLTFGKIRKLTGLRKARFNFEAGGNDKLPGNRTASKLIKIFGEEKWKEFSTEQREQIVEDVHSIQSEEAQARRGIRAWGLEGEKAKDFGQLALEDGYCNLSRQALAKLLPRMEKGTAYKTAVKEVYGEPPAEKPLDSLPLVTEHLSSLRNPAVTRTLTELRKVVNNVVRQYGKPNMTRIELARDLKKSKKDREDIWKRNRENEKAREEAAKKILAEIPNLKPSRRDKEKVLLYEECGHKCPYTGKQISMASLLGDHPQFDIEHIIPFPRSLDDSFLNKTLCYAEENRNVKQGKTPHEAYGSNPTRWEEIIQRVKDFKGKARDIKLERFEAHGEKLDKLLGEFANRQLPDTAYASRLAVEYLGRLYGGRGGVDADGNRRVQAGRGQVTAYLRNEWGLNKILNDGGEKSRDDHRHHAVDAICVALTDAGTVKMLSDAASRATIERRRRFGKVNPPWPTFLDDVRKSIEGLIVSHRVSRKVSGPLHKGTNYSKPIRGTDKKGNPCEFRRVRKPLAELSEPEIKDVADPTIRQLVLDKLQALGVKEPKKAFSSNEANHPCLTTKDGREIPIHKVRINKKVTPFTVGEGLRQRHVTTESNHHIEVVEVLDKNGKPKWEGCLVSLKDAYDRLKAGLPVVKLDHGEGRRFVFSLAKGEAIKIDEENGGNRGLYVVKKLGDNRI

SEQ ID NO: 648 - protein, 1134 aa, unidentified
  REGION 1..1134: note = Description of Unknown: uncultivated organism with predicted taxonomy: Fuerstia marisgermanicae
  REGION 1..1134: note = MG4-249 effector
MADQLEQKPFILGIDLGTNSVGWALIRLEDGKPAGIIRAGARVFDAGMEGSAKDFESGGEKSRNLDRRRMRHQRRQTWRRARRMKKIFGLLQKFGLLPEGRCATPEDRQNFINELDRTIRASPWFQKKHPVCSKQNSELTKDEREEAHRLSQLLPYILRASALSEKLEPYILGRALYNLAQRRGFQSNRKQVAGKKEEDEEKGKVKPAIKALESKIEEQEARTLGSLLSGASPLKERIRGPQRWTGREMFRNEFDEIWKAQSHFHPELLTEDKRNELFDKDYPRHDPRVGAVFYQRPLKIQTHLVGFCELEPNLRRAPIHLLSSQRFRLLQKVNDLRIELPDSGERPLTPEERDKLVRILQDEGNQTVSDVKSKGVLNLRGCTFTLERNREKTIPGNRTAASFRKALGEKWEDMGSEERNDLVAKVYDIDDDESLKKAAVEQWHFTPQEAERLAQIKFEAKYLNLSETAVERLLPLMEIGFSYGSLAPYYSHLSSQEFLAKLFSALEEGVPHAEACRMVFGDLPVPAEAPKDVLPPVVEAFREIRNPAVTRSLTELRKVVNAIVRRYDKPAEIRIELGRELKKPKKRRELISKRNDENRSERETARREITEETGDPYPGKTDIRKVLLRRECGDQCVYCGEQFSGSNFFSDDAPIEIDHIIPRSLHWDDSFLNLALCHAKCNREKGDNTPAQVFSDEVIEQIRDRIRRFSGNEKTKRERFRRFTLAGAELSAYLEEFSRRQLQDTAYASKLAKRYLGLLYGGEIDNLGKRRVTATSGMVTWDLRGGWDLNGILNDGRTSNGSTVVKTRDDHRHHAVDAVVIALTDDRSIQQLNKAAAMGQMQGKRGIIKLPSTWNNFVDTVRAEIGRIIVSHRVSKKVSGALHEETIYSPPIAERGPDGKPNGEAVPHVRKPLFAITKGEIENIADDAVRQRVIARLEELGGGDPKKLFATEANLPFLVTRDGRHIPIKKVRVRKQLSPLVLGAGRVARHVVTEVNHHLEVFAYLDEKGNEYEWDGAVVSMAEAYRRTYSKPPLPPVQRNHGPETQYKFSLSPGEIIQCDPDNKGNSKLLVVRSVSQFETGTVQIGLAEINDARKKSDMTKDRKFIRVVPNKLRQWNARKVAVSPLGEVSEAND

SEQ ID NO: 649 - protein, 1097 aa, unidentified
  REGION 1..1097: note = Description of Unknown: uncultivated organism
  REGION 1..1097: note = MG4-250 effector
MADQLEQKPFVLGIDLGSNSVGWALIRLEDGKPAGIIRAGARAFDAGMKGSIESGREESRNVKRRQMRLQQRQTWRRARRLKKIFRLLQEFKLLPDGEASTPDKRQDLLEALDKNILASAWFKQKESAGSKHEARQVLPYLLRAAALDEKLEPHYLGRALYHLAQRRGFKSNRIQSSVKKKEDDEGPVKQEIKSLGNRMGEATLGQYFSGLSPFVQRIRTQKTLRDWYRKEFDLIWDKQAQHHPELQMTEKKKEELFHAIFDQRPLKDQSHLIGPCELEPGERRAPTYLLSSQRFRLLQKVNDLRVRVPEGSELELLAEDRTKLIQALEEKGNQTFVQVAKKLKLGEPEFNLQRGGEKKLPGDRTGSQFRKVFRKSWDQMTDEERDEKVSVVYDCLDDQKLVGIGEKEWSLDAKFAAKLTEIKFESSYLNLSRAAIGKLLTLMEAGFSYGSLAPFYRHLTPETTASLLSKVQEGMPPKLASQVVFAECINPAGEPKSLLPPVAMEIPWLRNPTVMRSLTELRKVVNAIIRQYGKKPEEIRIELAREMKKPKWRRKQISKRNRENETGRKQAKEEIKRETQNPYPSPYDIRKLILYKECRGQCVYCGAQISRSNLFGDNSDSEVDHIIPFSRLQEDSFTHVVLCHARCNAEKGNRTPSEAFTGEEHERILDRVSRFDNDEATRKAKLRHFTLAGEELANYLNDFSSRQLNDTAYASKLACQYLGVLYGGVEDSTGKKRVKASSGGVTGYLRRLWNLNRILNDGPTKSGGFIPKTRDDHRHHAVDAVVIGLTDESVVHKLSRAAERGFYRGRPFAPLEGLWPNFVPSIKTEIDRVVVSHRVSKKVSGALHEETIYSPSIPERGPDGKPNGEGIPHVRKPLAAITKGEIKDIADDAVRQRVQKRLQELGDGDPKKLFAIEANLPFLIAKDGRHIPIKRVRVKKKLPTFPLGSGRAERNVTTESNHHLEIFSKLDEDGNEVGWDGAVVSMLKVYSRKRLGLPIVQREHGPGTQFKFSLGAGEVVECDIAPGQRGLFVFRKVSRITATDQIQIGFAPLNDARKAKDMQTSRSWLWSGPNRLMERHARKFVVNPLGEVSEAHD

SEQ ID NO: 650 - protein, 1024 aa, unidentified
  REGION 1..1024: note = Description of Unknown: uncultivated organism
  REGION 1..1024: note = MG4-251 effector
MGLTTLGIDLGITSIGWGLITEDAAGIKLNGWGSRIFTPGMDDDIESGKGVSRCAQRRQKRALRIQYRRRRQRKDDLVDLLQRNDLLPTPLTPGFFIDMDKRFLMLFPVAERRVMGHLVPYLYRKKALDTKLEKFELGRTIFHLAQRRGYLSNRKQDLKDEETTGVVKAGIDALKSEMRKVGARTLGEYFCTVDPEKSRIRTRYTDRGMFQEEFRLICSAQRHLISPELEDELYKAIFFQRKLRSAKNLIGRCQIYPEERRCSYAKDEAQRFRIYSTLNHLRVAQKQQIRALTEAERAAAISVLEGFSGHLDRRGKITLAKLAKAVGLGKGEKFTLSDEEKDIHGNVLNAILYHVFGEKASSLTEKERALFFNDLNSIEKTEVLERRLRGFWQLPEDKAAEALKISLPDEYCAYSLRALHEMLPDLEAGIPLSQIRKLSYPTSTGVVYDRLPMLDGDEVDLDLRNPVVHRTLTELRAVVNAVIAKYGKPDRIRVELARDLKSSNKERERRTFEIRKREKARAEIAERIAREAQIEKPSRNDILKVMLADECNFTCPYTGKNFSMKELLYGKDIQIEHIIPYSRSFDDSFRNKTLCFSSANAKKNNRTPFEAFSGAEYEEILQRVGKFKWPFAEDKKDLFKCEKVDSEEFLARNLNDTRYASRLAVKYLGMLYGGVIDAAGKQRVFATTGGATAIVRRAWGANFLLGEGEKVRDDHRHHAIDALTIALTTPDIVKIIAGMPEELRRAKGKTPDDTIIDNAVFKQAKEMLDKAAVSHHIVNKLRGALHRETLYGKNRGGDMRHVRIGVDKLTVKDIPDIVDPVIKKLILERLEIDEDQISTITDKLLKKLVDTENPLFYRNKKGDVVNEIKAVRVKKHVTARTIGAGDGVREVANGANYLLAVFAVQDAQGNESSWEGEIVTLMDAVYRKQHDLPLFERERPGRKFKFTLKKGDIVKWNKDGVEQLCVIRGVSLPQFSCVPVCDARQQKELKNAKCWFTPTLSAAFAGKMTKYRMDILGELRRAND

SEQ ID NO: 651 - protein, 1033 aa, unidentified
  REGION 1..1033: note = Description of Unknown: uncultivated organism with predicted taxonomy: Bdellovibrio exovorus
  REGION 1..1033: note = MG4-252 effector
MRILGLDLGITSIGWALTEQPSASVTDVSEIKLVDWGSRIFEPGMAGTKNDIDTGKGVSRAVERRLARSLRHQYQRRRQRRKELIRIMTEAGFLPQELTPAFFIRMDAKLLSAFPKEDRRILGHVIPYLYRKMALNQDLSPEELGRAIYHLAQRRGYKSNRKKALKENEEEKGKVLQGIQTLKADMEAKGARTLGEYFCMLDPEEERIRGRYTERSMYEHEFHLICERQRELVSEELEKKLYKAIFFQRKLKSVKGLIGACQFEPDEKRCTFACEEAQLYRLYTSIDNLRIQKGGELRKLTDTERVAAIAILNGYSDKLDKSGKISLSALGKELHLLKGEKFTLGDEEKNIYGNALHAMLFYVFGEKSANMTPEEQSKFWHDLNSIEKEEVLQRRLASYWELNDEQVRKAMTLALPDDYCSLSLKALRTILPDLEAGIQLRKILELHYPENFRPSNNELAFLPAVDYSGIELRNPVVHRTLTELQKVVNAIIHRYGKPDYIRIELARDLKNTNKEKERITKQNREKEKERVKIIQQIIKEVGIASPTRNDILKVQLAEECGFECPYTGKHFSMAQLFDGNTIQIEHIIPFSRSFDDSYRNKTLCMATENGRKNNRTPYEAYAKEEYKAILTRVSHFKGPFRESKLQIFETKEFSPDDFLQRNLNDTRYASRLAMNYLGLLYGGAIDRNGKRRIQACSGGCTALIRRAWGANYLLGDGEKKREDHRHHAIDALTIAIITPEIVKTVANISKDEYKRRHMQNLPMLDDALYLQAEGKIDSATVSHHVVNKVRGALHNDTIYSKDGNQTYKRIRLDSISLKDIPKIRDKAIRTAVMKALGIDGDKTEAFMDSSLDPAKVFNDEHNLPWLTDKDGKNINRIKSVKVACNDKTRTIGSGDSRREVKPNDNYGLAIFAKIDANGQDKTWIYQVITLMDACQRLKKQLPIINKELQGFKFRFSLMKGDIVTITKDNHNTLCIVRAISEDEIVCTPVTDARQQKELKAAKVWFRLHPATALQLSLQKYQMNLFGDLRRAND

SEQ ID NO: 652 - protein, 1024 aa, unidentified; identical to SEQ ID NO: 650
  REGION 1..1024: note = Description of Unknown: uncultivated organism
  REGION 1..1024: note = MG4-253 effector

SEQ ID NO: 653 - protein, 1024 aa, unidentified
  REGION 1..1024: note = Description of Unknown: uncultivated organism
  REGION 1..1024: note = MG4-254 effector
MAQTTLGLDLGVASIGWALIREDGTKTTLDGWGSRIFKPGAEDDASDGKGLSLCAIRRQKKALRVQYRRRRKRKDELIRLLQENHLLPDPLTPSFFVNVDRQYLMIFPEEQRKTVGHVIPYLYRRKALDTPLSKEELGRTLYHLAQRRGYLSNRKKDLKDEEESGKVAAGIDTLKKEMEKSGARTLGEYFCLVDPEESRIRTRYTDRAMYQDEFRKICQAQRHLISAELENLLFHVIFFQNKLKSYKHLIGACSVYPEEKRCSYACEEAQIFRIYTTLNHLRIAKADQIRSLTGDEREKVFALLNGFSDLLTRKGSITLRNLGKAIGLGKGEKFTLSDDEKEIYGNVLHAILFSLFGTRAESLSQEEREKFFNDLNSIEKTEVLRRRLKSYWQLPDEKIAAAEKIPVPDDYCAYSLKALKEILPDLAEGIPLATILKLKHPMQAKDEMDQLPILDSDEADIELRNPNVHRVLTELRILINAIIVRYGKPDRIRIELARDLKSSAKERERRMWEMRQREKERTAIAGKIAEEAGIENPSRNDILKVMLAEECGYECPYTGKHFSMRDLLHGKDIHIEHIIPYSRSFDDSYRNKTLCLASANAAKNNRTPFEAFSGKEYQDILQRVARFRGPFAEAKLALFKLEKVEPEEFLERNLNDTRYASRLAMQYLALLYGGIIDKTGKQRIFATSGSCTAMIRRAWGGNYLLGEGEKVRDDHRHHAIDALTIALTTPEMIKVIASMTREERSRKQKSCNDTIIDNEIFRQASADLDNIPVSHHVVNKIRGALHDENPCGKDYGEQIRHKRIELSKLKADSVLKIVDRTVKNIILKRIGCSEKELAGLSEKEFAKRLDAGTPLLFKDKEGGTVNVIKKVRIKAKVTAKTIGSGDSLRNVANGSNYLLAIFAVLDEQGNETAWEGEIVSLMDARYRLTHKMPLFEKDRPGRKFKFTLKKGDIVKFRKDGTEYLCIIRGVSLPQFSCCPVKDARMQRDLKAAKVWFTPTVSAAFQGTMTKYRMNIFGELQRAND

SEQ ID NO: 654 - protein, 1024 aa, unidentified; identical to SEQ ID NO: 650
  REGION 1..1024: note = Description of Unknown: uncultivated organism
  REGION 1..1024: note = MG4-255 effector

SEQ ID NO: 655 - protein, 1024 aa, unidentified; identical to SEQ ID NO: 650
  REGION 1..1024: note = Description of Unknown: uncultivated organism
  REGION 1..1024: note = MG4-256 effector

SEQ ID NO: 656 - protein, 974 aa, unidentified
  REGION 1..974: note = Description of Unknown: uncultivated organism with predicted taxonomy: Planctomycetes
  REGION 1..974: note = MG4-257 effector
VESTGLILGLDIGVRSVGWALLDLKAKEIKGLGVRVFDAGVEGNVERGRDTSKAAARREARLRRRQTERQVRKQVKLAHILQDAGLLPEGKVSKPTERHQLLSVLDRQIGESYSSADRGKLPYILRAAALHVALEPFELGRALYHLAQRRGYKSNRKSDAKVDEKQGKVKPAIHELEKKIISVGAETLGEYLAMQDSPKVALRGPGQYTSRDMYLAEFEAIWSEQAKYYPALLTEKLKANVSDAIFFQRPLKSQAHLVGKCQLETGEKRAPWALPIAQRYRMLQTVNSLKVLAADGKARELSASERAKLLEKLECSKKQSFDEIRKCLKLGDDCSFNLEQLGRKEIPGNKTAALLATAFTKKRWASIPEKDKQRIYAVFNSEEDEDKLILIAQDEWKLDEKQARKIAGVSAEAGYCRFSEKALFRLIPYLEAGSDLESAIHKEYPGSRVASEKRDILPPVLSTVQLRSPAVTRALTEVRKVVNAIVHEYGLPETIRIELARDIKRNREERQNINKKISERTKEREAARTRLQEDFNLADPKSSDIEKYLLWQESGPKCPYCGNPIAGEVLFSGATHIDHIIPRKVSLDNSFVNKVLCCSKCNNDKSDRTPHEAFNGDTQRWEKIAERVGAFRSEYRREKLRRVLMTKKEAQEFYTGFTDSQLNDTKFASREAGDYLGLLYGGRVDADGNTRVQMTKGGITSELRNALQLGSIPSQVEDWICDPEEKRGKDRGDHRHHAIDAIAIALSSPGIIKPLMGAYSSSETAKKEMRRDIWASFAKKAAWPGFSDNVVEAVNSISISRRPKHRVRGKLFDENPLSEKGAARKSGDISEAYIRIGKDEAHSRLLKSAGNHHIEIYETKDAKGRPEWKGKAVTLYEAHNRIIDDEPVVNRHHGPNTRFLFSLAVGDTIELGEKQERKLYNVCSVWEDEPGSCRIEYKPLNSATTDRGVNARLNPIRKLKCKKVEVSPLGEHGS

SEQ ID NO: 657 - protein, 831 aa, unidentified
  REGION 1..831: note = Description of Unknown: uncultivated organism
  REGION 1..831: note = MG4-258 effector
MHSYVLGLDLGSASIGWAILEPNKKVIDCGVRIFDPGVNLEMFNKGQEGSSNNLVRRMARLHRRQLRRRAARQRDLFELLQQHSLLPGNATRDSQQRHDILQHLDSDLRAAWMNRLTAAGVPEQSLIYLVRKQALDAPLEPYEVGRVLYQLAQRRGFKSNRREQAAVEAAEGSKKKSVRAKDEASVVKDGIKELRAEMEAAGARTLGEHFANLSTSGQTIRRHWTDRKWFEAEFEAIWQAQAPHHAALIPELKQQVFQLLFFQRPIATNAHLIGKCELEPTERRAPMANLLAQRFRYLQKLNDLAIDDPLNPQRLTEEQRAVLLSAFECKPDLTFDAIRKLLSFDKAVRFNLERGGEKKLPGNRTNAAMLRAIPDLWPTLSDADKGAIVEQWIDANDDEDLIARLTTHCALSLDDATAICKVHPEDRYHNVSLLAMSRLLPLMEQGVAFKTAENEIYGTRFSGGKPLDLLPPAKDVLASIPNPAVMRALSELRKVVNAIVQKHGKPGQVRIELARDLKRNAKQREMNWRRGRDRETVRTAAVKRILDEAHRPQPWKQDVDRVLLLEECRDLCVYCGQAISFQRLFDGDIDIDHILPRNRFPDDSFANRCLAHRACNQLKLGRTPYEAFGSDEELWPNIIARVKTWDNPDKLERFNLRDDGEFDPEREDSFAARRLNDTRYVSKLAARYVGMLYGGRDVPQPDGAAKRVVFASTGMLTASLRRTWGLEAILREPEPAETSRKPGKQRTDNRHHAIDAIVIALTSNAVIQKASSVAATGSYGDAARAISRVQPPWGDFVGDFVDSIRPAIERMVVSHRPSHKLLGALHEETNY

SEQ ID NO: 658 - protein, 1073 aa, unidentified
  REGION 1..1073: note = Description of Unknown: uncultivated organism with predicted taxonomy: Acidobacteria
  REGION 1..1073: note = MG4-259 effector
MPLRADLPPYVLGLDLGSASLGWALIAIDHQHNPTALIRAGVRIFQPGVEGSAFDIERGKDKSRAADRRTARLHRRQLRRRAARQRDLFNLLQAHALLPGASDGASSSERRHTLLNELDKQLTDCLLRTAADDALAANRIADSLPYQLRKAALDRRLEPHELGRVLYHLIQRRGFKSNRREGKKSKDKQEEQGKVKAGISELQQKIAAAGARTLGEYFAGLDPHQQKIRRLWTARSMFEEEFEQIWRTQEAYAPDLLTQDLKSQIGYLLFYQRPIASQEHLIGRCELEPGEPRAPWATLEAQEFRVLQKVNDLAIVIPGSLHDQSLTREQREKVYLALQDTGDQKFSALRKLFELPRVQFNLERGGEKTLRGNRTHAHMFSVFGARWNEFSTDEKKRAVQVWRTAEDPGDLIAKGMEEFGLEEALARRWADVEPEDGYCSLSLKAIGELLPQMREGVSFKTVEREKYGEPFSGQEPQELLPRIREALPTLRNPAVERAVTEMRNVVNAIIREYGKPYEIRLEMARELRKSRKERENVTKRNRSRERERQQAKARILQECGLQNPSRADIEKALLFEECGGVCPYTGRTIEFSSLFRDSQFDVEHIIPLSRYPDDSFLNKTLCYHEENRSVKRGRTPWEAYGPDSERWDAILSRVQGFNNPAKLTRFKLRTEEELGEFTQRQMNDTRYTTRLAADLLGSLYGGRDETLPDGAKRRAIFATTGQVTATLRRVWNLESILREALPSANGESKGKPRTDHRHHAIDAIVVALTSQRTVQLLSMAAAQSVAGESRSRVFTGIQSPWPNFVDSIRPHIEQMIVSHRPEHKMSGELHDETNYGRPYRDGKKTYVHIRKPIASLSTKDIQAIVDPIVRTAVQKKAEALGGDLSKCEVSQNWPVMPTNKERAVPIRSTRIRKVLDVTAIGEGPRQRFVAESSNHHVEVFASLDAQGRESKWESITVSLLEASERNRKKQKVVQRLYPESEDYTFKFSLMGGDSVDLHRNCDHNLGRCNPALYRVRTIAANGQLSLVKITDARLKQDIQKVSEWWSPMCNALRKLDCRKVVVDLLGRVHPAND

SEQ ID NO: 659 - protein, 815 aa, unidentified
  REGION 1..815: note = Description of Unknown: uncultivated organism with predicted taxonomy: Planctomycetes bacterium
  REGION 1..815: note = MG4-260 effector
KHLLFYQRPIKAQSHLIGGCELEPGERRAPWASLEAQQFRILQKVNDLETILPGNVTGIRLTPEQRKTVLNLLENSPEATFKKIRKALDLAENIGFNLQRGGETRLKGNLTNARMAEAFSDRWPTMSDEEKKQVVEDWRTIEQNESFMRRAIEYWKLDEAGADWLADQSAPQGYCSISRKAIRRLLPLMMEGKRFKEAETEVYGNRLTGGKVYDRIPPVRDVLRTLRNPAVERSLTELRKVVNALVREHGKPAEVRIELARDLKKPRHERAEAITKNRNREKERVAAKTKLLQELGPGFEHPSRADVEKALLHEECGGVCPYTGRHIEFASLFGENPQFDVEHIIPFSRIPDDSFQNKTLCYHEENRLVKRNMTPFEVYKDPAQYEAILNRVRTWKKLNPGKQRRFELRTLEELEGFSARQLNDTRYASKLACELVGSLFGGRDAQTENGSRQIVFASSGMVTATLRKGWGLEAILREAAPSANGQNRGKPRTDHRHHAIDAITIALSRPKMIATLSRNNAQDPYWPQNGRTAPRIQSPWKDFVGSIRPHFEQMLVSHRPEHRLTGALHDETNYGRPRKDGSKDVVHIRKQVAGLSAGDIENIVDPAVRDAVCTKAREFGGDLKKWTPNEDKEDWPLLVTRTGKPIPIKRVRIKKALRVETIAKGERVRHVALSSNHHVAIFALLDERGREKRWESEIVSLLTAMERKRNRQPVIRTRLPEVPEAAFKFSLMWGDILLLHKDCEHSKNICNPSFWRIRSIWEQGTLTLVRINDARLLTEIRAAKDWLLPSPDTLRKLGAVKVVIDSLGRIHQAGG

SEQ ID NO: 660 - protein, 911 aa, unidentified
  REGION 1..911: note = Description of Unknown: uncultivated organism
  REGION 1..911: note = MG4-261 effector
NRIGHVLPYLLRKTALDRPLDKYDLGRALYHLAQRRGYLSNRKQELKDSEDFGVVKSKINELRQAMTSSGARTLGEYFSMVNPEEERIRCRYTDRAMYQDEFRKICNAQRQHISEALETELFQVIFFQRKLKSCKHLIGKCQVYPEQKRCSLCHPEAQLFRICTTVNNLRISCDSQIRSLTDDERLRVTEVLNGFSDLFNKSGKITLAKLKQATGLLSSEKFTFGDDEKEIYGNELHNILYRAFGSEAALMSQEKQSCFINDLRSIEKNEVLKKRLTEYWQLSEEKASEVATIKLPDDYCAYSLKALKQMLPDLQAGVNLADWLKCNNHSTESYIELDQLPLVDECGFELRNPVVHRVLTELRRVVNSIISRYGKPDLIHIELARDLKASNKEREQITKRNQQRERERNAIAERIIKETGLEKISRKDILKVMLADECDFTCPYSGKRFSMTELLNGGLVEVEHIIPFSRSFDDSFANKTLCVRELNAKKNNRTPFEAFGGSPQYSEMLTRVKYFKGHFAEHKLNLFKLAEIESSGFLERNLNDTRYASKLSMRYLAFLYGGIVDKNSIRRIFSVAGGCTALIRRAWGGNYLLGEGEKVRDDHRHHAIDAVTVALTTPELVQKIAKLSQEGRRKLNDSTKNFIDNDFYYQAQGMMDSCAVSHHQTNKMRGALHEETIYSKDYGDGQSIRHKRIALDQLSPKDIENIVDPAVKTIILKALKVSAPGDVTKATLKIFKDEANYPQMLDHNGNAVNTIKKVRIARTVNTRTIGKGDGKREVANGANYILAIFAKLNEKGEETGWEGEVVSLMDAVQRKQRRQEIFSKERPGMKFKFSLQKGDIVKINKNGEEKLCRIRGISLPQFYCCQISDARTQNDLKSAGCWYTPTVSAAFNWKMQKYNMNIFGELQTAND

SEQ ID NO: 661 - protein, 1002 aa, unidentified
  REGION 1..1002: note = Description of Unknown: uncultivated organism with predicted taxonomy: Planctomycetes
  REGION 1..1002: note = MG6-7 effector
MSEITLGLDIGSNSIGWALLNLDENPSIINVGVRVFQEGVNRDTKGAEISKNETRRMARGARRNRFRRNYRKDKLLRLMKRNGLLPKEASTNGEIFLLNPYQLRAKGLDEKLSLHEFGRVLYHLNQRRGFLSNRKSGKAKDDGIVIKSAGELQQKMDAQGARTLGEYFSRIDITQERIRDNYTFRGMYQKEFDLLWEKQSSFYPEILTPELRQTIADETIFYQRPLKPTDELIGDCALEPDHKRCPRGDWHARRFRILQDVNNLMVCEPDGRKRILTEQERSIALKELFGRKEVGFDSLRKKLGLIENQTFNFEEGSLDKKESKLKGDFFASEMSSKKILGKKGWEALDIATQIEINDLLLDDNLADEEVVEMLKQQYGFSDEQAEAAIKISLPRGYMTYSRLAIQKLLPHLERELRTDEAVQAAYGHIHSVQDTGQTVDFLPLPEDLRNPIVNKALIEARKVINAVIQTYGKPGKIVVEMARDVKGNAKEREELRIKMNRNEKENERARHELIHNMGITRPTRDDILKYKLWQECGRECPYTGRPISQQALFGEHPEFQIEHIIPYSRCLDDSFMNKTLCYVDENRRKGDQTPYEFYKNSDQYEHMLQRIRKLPYPKRQKFTQKEVSLDEFIKRQLNDTRYITREILRYLKQLGCTVTGSRGKVTSELRHQWGLNSILESDLPGPKNREDHRHHAIDAVVTALTNQKHLHELAATKYAVAHDGFPVPWEGFRDAVAQAVNKIQVSHRVTRKVSGPLHEETSYGPTGLKDDKGQDIFVYRKKLEALTCPMVEKIVDPVVKEVVKTRLLEFGIDPKKKGSIPKEVWAEPLYMKSTKSAKVPIKKVRIRDVFNNMIPVNDEIGKPYRYVASGNNHHIEIFEYTDAKGNLKRNGKVISMFEAVQRSRQGKPVIYRDYGDGKRFVCSLAKNEMFMLEVEEGRHILHRVQKFGEVGGTIIIVLRPHTFAGKVNDSDKPPYIQRKTPNTLKGYKVTIDPLGRIFPAKD

SEQ ID NO: 662 - protein, 994 aa, unidentified
  REGION 1..994: note = Description of Unknown: uncultivated organism with predicted taxonomy: Planctomycetes bacterium
  REGION 1..994: note = MG6-8 effector
MSDYTLGLDMGSNSIGWALLDTNNRAVVDAGVRVFQEGVDRDTKGAEVSKNETRRTARSARRARKRRNYRKDKLFRMLIRHGLLPKGPDELKEVFELDPYLLRAKGLDEKLDAYEFGRVLYHLNQRRGFWSNRKSGKSKEDGVVVKSATALAEAMDESRSRTIGEYFAGVDSHEKRIRGHYTFRSMYEEEFEALWTKQASFDGELFTDGLKKAIKDETIFFQRPLRWDPETIGDCELEPGEKRCPRADWHARRFRILQTVNNLKLYNPDGREGDLSKYRETIIGELCNRKEVYFDSLRRKLGLIDSQTFNFEEGAAEKKAKLKGDEFVPQLKKAIGAKALKGLEEADIIEINDALIDDNIEDEELVEKLMEQYGFSEEQANGVVNISLPSKYTNFSRLALQKLLPKMEAGLRTDEAIEAVYGKRQAVGEIEKRRRLGSVPDLRNPIVMKALWEVRKVVNGLVREYGIPRKIKIEMARDVKGSVKERDEIRVKQWKNEQENKRAEEELKLMGIRNPSFNDRLKYKLWEECGKECPYTGKPISQHQLFGEHPDIQIEHILPYSRTLDDSYMNKTLCYVNENRLKGNETPYEYYAENRVEQWEEILQRIKVLPYAKRRRFWQKEVVLDNFIQRQLNDTRYISREVVKYLKQLGCIVTGTKGQITSELRHQWGLNNILDYTGAGLKNRDDHRHHAVDAVVTAVTEQKHLGGLAASKYDKSGIEFDPPWEGFREQVAEKINAINVSHRVTRKVSGQLHEETSYGPTGLKDDKGQDIFVYRKPLEALTLPMAAKIVDPVVREIVYERLREFGIDPDGKSKIGKEVWKEPLYMKSKSGKGPQIKKVRIRDVFNNMIYIKDDAGKEYRAVAPGNNHHIEIFEYANKKGRIKRDGKVVTMYEAVRRSVNNKQVIRRDYMDDKKFVCSLSKNEMFMLEVEDGVHVLHRVQKLIQDGRIVLRPHTYAGKVSDSDNPPLVQRKNYNTLRGYKVTVDPIGRIHRAND

SEQ ID NO: 663 - protein, 896 aa, unidentified
  REGION 1..896: note = Description of Unknown: uncultivated organism
  REGION 1..896: note = MG6-9 effector
LNEKLELFEFGRAIYHINQRRGFKSNRKTGKAKEDGKVAKAAGELQKKIEANGCRTLGEYFASINPEEERIREQYTFRTMYEEEFDKLWNRQAEFYKNVLNGDLHKKIRDEIIFYQRPLKPTDDLIGDCELEAGEKRCPRGDWYARRFRLLQDVNNLKVYNPDGTARELEDDESGIILKKLATHKEVKFSSLRKELGLLKTQEFNAEYQIDNKGKKQEKLKGDAFNASMRSKNIFGAKTWDAMDEAEKIKLNEWLVDLDDDELIEKLSSEYGLRDEQIDRVLKISLPQRYMNFSRKAIQKLLSLMEKGKRTDEALAEIYPDRNKRAKGEEKDRLDLPDDLRNPLVNRGLFEVRKLVNAVIREHGKPSGIVIEMARDVKGSLKEREEIQWKMRENEKRNEAARTRLIQDMDILNPSRDDVIKYKLWEECGKRCPYTGKVISLTDLFGSNPVFQVEHILPYSRSLDDSYMNKTLCCVNENRIKGNKTPYEFYSGDEEKYEQVKQQIKVLPWPKRRRFLQKEIKLDECIQREMNDTRYICKEVVKYLKQLGVNVRGSKGRVTAELRHQWGLNSILDLNNSNMKNRDDHRHHAIDAVVTAVTKNEHLRRLAKSKYSKTDSSFSEPWEDFREELAEKVKHINVSHRVRRKVSGKLHEDTSYGLTGAKDDKGQEIFVYRKKIEDLTIPMVSKIADHVVRQIIESRLKKHGIDLDKNQTIPKDVWTKPLYMKNTKSNKKVLIKKVRIRDAFNNMIFLKDKEGKTYRAVAPGSNHHIEIFEYTDKKGKMMRGGEIVTMFEAVKRKREDQPVIKRECGADKKFICSLAMNEMFMLDTNNKEKELHRVQKITQSGNSISIILRPHSYAGKVSDYDKPPIIQRRSPNTLKGHKVTVDMLGRVHLAND

SEQ ID NO: 664 - protein, 996 aa, unidentified
  REGION 1..996: note = Description of Unknown: uncultivated organism with predicted taxonomy: Planctomycetes bacterium
  REGION 1..996: note = MG6-10 effector
MSKYTLGLDIGSNSIGWALLDTGKSPKIIDLGVRVFPEGVDRDTKGAELSKNATRREARGARRNRWRRAYRKDKLVRMLQREGLLPREFDLIQKLMETNPYLLRAKGLDEQLGLHDFGRVLFHINQRRGFKSNRKTGKASDNNKVAKEAGQLQEAIDNTGCRTLGEYYANLNPEKNRIRSQYTFRSMYEKEFALLWAKQSEFYPEILTEQLKEEIKDKTVFYQRPLKPTDDLIGECDLEEGEKRCPRGDWYARKFRLLQDVNNLKIHHSDGSEDPLTDEQRAIVLEQLKKSKAVKFSSLRKKLGLLETDEFNMEYEVNEKGKKKDKIQGDEFNASMQKNIFGLKRWGEMAEGEKIRLNEWLVDLEDDELIEKLASEYGFSDEQTEKVLKISLPSRYMSFSQKAIKKLLPLMEEGKRTDEALDKIYPDRNQKKQVEAERLGLPEDLRNPLVNKALFEVRKVVNAVIREYGKPAKIAIEMARDLKGSLRERKEIHFKQKENERENKRVRERLKNDFNHVSLNRDNIIKYKLWEECNGLCPYTGKKIPQYALFGENPEFQIEHILPYSRSLDDSYMNKTLCEVHENISVKGNQTPYEAYHHDEEKYEQIKQRIKVLPWPKRRKFLQKEIELDEAITRELNDTRYICREAVRYLKQICSNVKGTRGKITSELRHQWGLNSILNLTDPNMKNRDDHRHHAIDAAVVAVTRNKHLRELAESKYAKTGSGVKFEAPWKDFREELAEKIKHINVSHRVTRKVSGQLHEETAYGPTGLKDDKGQDIFVYRKKLEDFTMPMVGRIVDPVVKEIVVDRLKKHGLNPEKKQTIPKEVWREPLYMKSKTGNGPRIKKVRIRDVFNNMIMLKDQNGKPYRAVAPGNNHHIEIFEYKDKDGNIKRDSKVVSMFEAVRRRRKGEPVIQRDHGEGKKFICSLSTNEMVMMPDKEGNNDLFRVQKMSINKQIYFRHHTAATIDNEETLIRKQANLFNGKKVAVDPIGRVFPAND

SEQ ID NO: 665 - protein, 994 aa, unidentified; identical to SEQ ID NO: 662
  REGION 1..994: note = Description of Unknown: uncultivated organism with predicted taxonomy: Planctomycetes bacterium
  REGION 1..994: note = MG6-11 effector

SEQ ID NO: 666 - protein, 896 aa, unidentified; identical to SEQ ID NO: 663
  REGION 1..896: note = Description of Unknown: uncultivated organism
  REGION 1..896: note = MG6-12 effector

SEQ ID NO: 667 - protein, 996 aa, unidentified; identical to SEQ ID NO: 664
  REGION 1..996: note = Description of Unknown: uncultivated organism with predicted taxonomy: Planctomycetes bacterium
  REGION 1..996: note = MG6-13 effector

SEQ ID NO: 668 - protein, 1063 aa, unidentified
  REGION 1..1063: note = Description of Unknown: uncultivated organism
  REGION 1..1063: note = MG6-20 effector
EAFDEANPYTLRKMALYGPLTSEQFGRVLFQQGKRRGLKSNRKAERKADDGDVNRATKRLEAKIADDDCQTLGERLYRIGAGQIADSQNVKPGDLNPHRIRGRYTLRKMYEEEFEKLWNKQEQHIPELRAEGLKSRIRRIIFDQRALRSSKHLIGRCECTGQRRAAKADWYAQEFRLLKDLNHLRIHNSDGSEQDLKKEQRLRLAELLRCTDRLTFDEMRQELGLIDSQIFNLEEGPSATVGQTNEGKKSKVRAGAKRKSLAGNSIESALWKAFGKNWALQTEVRKDEIRQAIVEIEDEEKLMRLAVGLWGLKRTQAEALAKLHLPEGYAKYSLDALKNLVAELRKGLKSERGIAEYEARERCGYNSPVTQSLLDFLPSPVKPDRRPLVNNPIVRQSLFEVRKVVNAIIRQYGRPKRVVVEMIREIKGSLRQRAEIRDQQEASRKDREEIRTMLRDPIEFGKDNPSNDDILAYRLWEQQGHLSPYSGKTICQTDLRRFLNGEGVLEIDHILPYSKSWDNSQSNKCLCFSDENKNKKDFTPRQWLGDGTDAYTSMLQYVAGMKTTGMPFSKRRKFSQLEVDPEDCAKRQLNDTAYIAREVRQYLKCLYSEEELVRDESVVCTRGQVTSDLCWCWELNSILNPDDQRETKNRADLRHHAIDAIVVALTTRQRLFALSQVFAKKHSLAKAKHEPWPHFREDVENAVLAIKVSHRPRKRVSGPLHNDTIYGATDEDGRFVSRKFLTDLTPTMVSRIRDARVREAVVERLRKHGIKAKGADSIRDVGPEETPGDSDKRIPKKIWEEPLILVRKDCTEGPRPTPIMKVRLIGPEKTIRPIRNGAALVKPASTHHLSLFEIRKSNGDPEWIAHFVHLIDAAQIVGERQRRFSMIRKQLGAARLPSSEIKRRLELEQCRLDIELPLIVKTHPDIPSARFLFSLSKGEMLLLSIKGKEQLYRFETAASTTEQMWFLKHNEAAIPKNKRLSKKPDNLRGLKPRKVILDPLGRDVSGTGKVYDRVDSKVGDLAKEIIANGMSNSRGHKLLKQMGLGQLGAQLTAELRRLRSGGL

SEQ ID NO: 669 - protein, 1121 aa, unidentified
  REGION 1..1121: note = Description of Unknown: uncultivated organism with predicted taxonomy: Arcicella aurantiaca
  REGION 1..1121: note = MG7-2 effector
MKKIVGLDIGVSSIGWSYVLESEIETDEETEDIIELGSRIIPLSNDDADQFSKGQSITKNKERTQKRTARKTNNRYKLRKHKLGEVLKNQEIIINPELFDLTAYELYALRVRAIHEPITLAELARLWYQFNQKRGYQSLRGVVDEEADKKSDYLSSINDRSQFLKDNKQTVGQFLFNRLKDYEQNRGVIEPITHIIFNRQDYFNEFNLIWERQKMEYPEVLTDELLANIRDRIIFYQRPLMSQKHLVSDCTFEKNHKAAPKSSPLFQVFKIWQDLNHFEIKTKRGAIVAFTVEMKQKVFEVLDNQFDINKTKFWEILELKASEHRLNFKEIRGNVSKAKLVEAFAELDINRPDLLSFDPHGDPDEQPLFRIWHLLYSINEKNADEILLRTLQNTPYNFSEKEAIGLIQKVSFKNDFGSLSSRAMRKILPHLEQGLNYADACLEVGNRHSHYRTKEENNERVLADKLLPLPKNSLRQPVVEKIVNQVINVMNAILADSNLGRPDEIRIELARELKQNIKQRERTERNNNKRQKARKDVVKEILKTFPDMKEKDVTNRMIQKYELFQETNGICVYTGTEMKLGAVLSGQGFDIEHIIPKSRRFDDSFMNKTLADSSTNRDKNDLTAYDFMRKKGMTSFEKFTEIIHKLHKDKKISDTKLDNLLTTLNPVWIAEQEAKALSTDFINRQLNETQYITKQVKAELDKICRTITVTSGGITDYLRHQWGVDDVLKNINLEKYEAAGKVSDEDYRDRQGHWRTRKKIADWSKRDDHRHHAIDALVIACTKPAYIKRLNDLNQEYDSYKEMKKDGGKMESLTKFPQPKMKGGFIQNVTKATENILISFKAGKKAVSTSKNKKTGQVNIIPRGQLHEETVYGQKFDESGKPYFVIRKKLEFNKQGYFNSLAQIDKIEDEIIKKKVLKRIDEYGGDLQKALSTVIYHNEDQKIPIKKVMIQAQIKKAVPLGNHEGKFVAEGNNHHLALYRNEKGKYLTELVSVWTAVVRKQNDLDIICRNHPEGLKFITCFQQNEMFIYELSPEQVQEAIDRKDRKLLSKYLYRMQKISKKESGGIEVGFRHHLETKIDDSETAKKIKKFFIVQGVETLLKFTKVKINHLGQITKIFAEGE

SEQ ID NO: 670 - protein, 781 aa, unidentified
  REGION 1..781: note = Description of Unknown: uncultivated organism with predicted taxonomy: Flavobacteriales
  REGION 1..781: note = MG7-5 effector
MKKIVGLDIGVSSIGWSYVLESEIETDEETEDVIAMGSRIIPLSQKDTDEFSKGDSITKHKARTQKRTARKTNNRYKLRKHQLGEVLNNQGIIINPELFGLTARELYALRVRAVHEPITLSELARLWYQFNQKRGYQSLRGVVDEEADKKSDYLSSINERSQFLKDNKQTVGQFLFNRLQDYEQNRGVIEPITHIIFNRQDYFNEFNQIWERQKLEYPEILTDELLANIRDRIIFYQRPLMSQKHLVSDCTFEKNHKAAPKSSPLFQVFKIWKDLNHFEIKTKRGAIVEFTVEMKQKVFGVLDNQFDINKTKLWEILGLKASEHRLNFKEIRGNVTKAKLVEAFTELNINRPDLLSFDPHGNPDEQPLFRIWHLLYSINEKNADEILLKTLQNAPYSFTEKEAIGLIQKVSFKNDFGSLSSRAMRKILPHLEQGLPYDKACLEVGIRHSHYRTKEENNERILADKLLPLPKNSLRQPVVEKIVNQVINVMNAILADPNLGRPDEIRIELARELKQNIKQRERTESNNNKRQKARKDVVKEILKTFPDMKEKEVTQRMIQKYELFQETNGICVYTGTEMKLGAVLAGQGYDIEHIIPKSRRFDDSFMNKTLADSSTNRDKNDLTAYDFMRNKGMTAFEKFTEIIHTLHKNKKISDAKLDNLLTTLNPVWIAEKEAKELSTDFISRQLKETQYITKQVKAELDKICRKITVTSGGITDYLRHQWGVDDVLKNINLEKYEAAGKVHDEEYRDRQGHWRTRKKIADWSKREDHRHHAIDALGIAC

SEQ ID NO: 671 - protein, 774 aa, unidentified
  REGION 1..774: note = Description of Unknown: uncultivated organism with predicted taxonomy: Arcicella aurantiaca
  REGION 1..774: note = MG7-6 effector
MKKIVGLDIGVSSIGCSYVLESKIETDEEIEDVIAMGSRIIPLSKEDTDEFSKGQTITKHKARTQKRTARKTNNRYKLRKHQLGEVLNNQGIIINPELFGLTARELYALRVRAIHEPVTLSELARLWYQFNQKRGYQSLRGVVDEEADKKSDYLSSINERSQFLKDNKQTVGQFLFNRLQDYEQNRGVIEPITHIIFNRQDYFNEFNQIWERQKTEYPDILTDELLANIRDRIIFYQRPLMSQKHLVSDCTFEKNHKAAPKSSPLFQVFKIWQDLNHFEIKTKRGAIVDFTVEMKQKVFEILDNQFDINKTKFWEILGLKASEHRLNFKEIRGNVTKAKLVEAFSELNINRPDLLLFDPHGDPDEQPLFRIWHLLYSINEKNADEILLKTLQNAPYSFTEKEAIGLIQKVSFKNDFGSLSSRAMRKILSHLEKSLNYADACLEVGNRHSHYRTKEENDERILADKLLPLPKNSLRQPVVEKIVNQVINVMNAILADPNLGRPNEIRIELARELKQNIKQRERTESNNNKRQKARKDVVKEILKTFPDMKEKEVTQRMIQKYELFQETNGICIYTGTEMKLGAVLSGQGYDIEHIIPKSRRFDDSFMNKTLADSSTNRDKNDLTAYDFMRNKGTTAFEKFTEIIHKLHKDKKISDTKLDNLLTTLNPVWIAEQEAKALSTDFISRQLNETQYITKQVKAELDKICKKITVTSGGITDYLRHQWGVDDVLKNINLEKYEAAEKVHDEEYRDRQGHWRTRKKIADWSKRDDHRHHAI

SEQ ID NO: 672 - protein, 1131 aa, unidentified
  REGION 1..1131: note = Description of Unknown: uncultivated organism
  REGION 1..1131: note = MG7-9 effector
MKKVLGLDLGIASIGWALIAQNSENEEISHIIDCGVRVVPLSTDEHSEFAKGGSVPTNQIRRRARGMRRNLQRYRWRRHRLYCVLGQLGMMPDQRLMTRLSPLELYSLRSRALSEPLSLQEIGRILIHLNNWRGYRSNRREAVKDDEKSRYLKEIKNNEDQLKVEDKTIGQFFAERLHQGDRQRIRGRIFGRNTYIDEFNRIWDAQAQYHPSVLTEEHRRLIRDRIIYYQRPLKSAKGLVGTCALEWYYALYKETRQPKYENGRKKIVRPKCAPKSSPLNQECKVWESIHNLRIYRRDRNGRRESQPIALTLEQKKHLFWYLQESKKNLKAEEALRLLGFSAGAYAVDDHTLENNRTLSRLKEVFKKLGIRRDDLLRFDPAIEEVEWDDLETGERRRRLQVRGDFDREPLYQLWHLIYATEDEGDLIQLLEERYGFTTEQAREIAKIDFTSEGYARKSHRALRRLLPHYREGLDYTKACEAAGYRHADYITKAENEARILSERLELLPKNALRNPVVEKILNQMVHLVNDLMTTYGRPDEVRVELARELKQSAQERKKTHELNQKRRRENERIKKDIADHLAIPPEKVTRAQIEKYRFYKEIDGISLYTGKRFSLADVLNGDTVDVEHIIPRTLRFDDSYHNKTLCERNINQEKGNMTACDYMRSRGAQEYEAYLERVKAFYEKNGREVRLKYKNLTTTQEDLLKDNEFLQRQLRESQYIARKAVEVLREVCRNVYTTTGSITDFLRHRWGWDEVIPYLRLPQFKEAGLTEIIPVQNGQKTKEVIKGWSKRDDHRHHALDALVVACTRQSHIQRINELSPILAGTYGEERRQQLLDIVRDKYIAGKIPFSFRQVCEAMNQVLVSHKQRTRVATRNCPKGSQKVQITLTPRGRLHEETIYGRIRRYKKVSLDGKFSVAMLDDMVHPHQRELVEARLAQYANNPKAAFKDLDKNPIRYGPNGEKHLREVTVWEYIMVSRKALDPKATGKALKGIIDPVVHQVVKQHFEAGNVGGLPFRHVRVENRAEEWIRLPRGYAEPGSNHHIAIYRDADGKKHEHVVTFWEAFQRVHIGLPPIITDVAGALEYLSHLPGELPELHLPENPDWQFVVSLARNDMFVFGLDPADIDLRDLKN

SEQ ID NO: 673 - protein, 1225 aa, unidentified
  REGION 1..1225: note = Description of Unknown: uncultivated organism with predicted taxonomy: Bacteroidetes
  REGION 1..1225: note = MG7-10 effector
MEKVLGLDLGVSSIGWAMTLQDPNNEERSEIIDCGVRIVPLDTDEIKEFGKGGNVPTNVARRQARGMRRNLQRYRWRRQQLFRALKQLGMLPDERLLRQLSPLQLYALRERALSEPLSLPEMGRVLIHLNQWRGYRSNRKEQTESDGKKPSEYLEQIEKNEERLQGQTIGQYFAARLRESGGYRIRQQLFSRETYKQEFDRIWEKQAEYHPQVLTEANRSWIRDRIIYWQRPLKSAKGLVGECALEWCYALDKNQQPIRLPNGQLKIVRPKCAPKSSPLVQVCNVWESIHNLRVYDHFGEERPLSQEEKERLFRILQDRSLTARQIIKDVLLLSPKTHTVDRLIQEKGLEYNRTRARLLEVFKEQKINREDLLEFNPVIEEVEWDNPETGERLRRLQVRGDFTQQPLYQLWHLLYATEDERNLVALLQKRYGFTEAQAKALAKLDFTSAGYARKSHRALRRLLPHYQRGLDYAAAAQAAGYRHANQMTKEENQARPLLDRLEVLPKNSLRNPVVEKVLNQLVHLVNDLIATYGRPDEIRIELARELKQSAQERQQIEKLINKNKKTNEEARKKIAEILGIDPQAVSRTMIEKWKLYEETDGLSLYSGKKIDLPTLLRGNAVDIDHIIPRVSRFDDSFQNKIFCEASLNQAKSNSTAHDFMRDQPVSGLQPYDDYRKMVKDLYEGKKISKAKYDNLMMTAEDLLKDGEFLQRQLRETQYIAKKAVEMLRQVCREVRSTTGSITDFLRHQWGWDEVIKELRLPQFRQAGEDLIEYRPAANGGRDRVVIKDWDKRKDHRHHALDALVVAFTRVSHIQRVTKLNQIMSGKFGEERRKELLRTGRDLYIAGKAPFTFAQVSKAIANILISFKQGLRVATRSRNRPKGSTTVQITLTPRGALHEETVYGRIKRYKKVPLNGKFSPAMVTEIAHPHQRALVEARLAQHNGDPKKAFKDLEKHPITYGPNGSKHLTHVTVWDYVLVARKSVDASLSEKAVEKIADRGVRRAVAERLKAGGGKSKEAFKNVGTDPVQPPRHHPVKRVRVENYAEKAIRLPRGYVEPGSNHHIAIYRDADGNKHEHVVTFWDAFQRVRLGLPAIITDVPAALQYAQDQLPEGVTDLLLPEGWDWQFVVSLAQNDMFVFDLDPSEINFTDPNNRARISKHLFKVRKLSANDYSFLHHLETEIVDDLVSKSINRCKRCSMSALSRSRAVKVKINRLGHVVEVGQPFS

SEQ ID NO: 674 - protein, 1218 aa, unidentified
  REGION 1..1218: note = Description of Unknown: uncultivated organism with predicted taxonomy: Bacteroidetes
  REGION 1..1218: note = MG7-11 effector
MKKVLGLDIGVNSIGWAYIAEPENKNEKYNILGAGSRIIPLNSDETSEFKSGNAISKNSARRIKRGIRRGGHRYKMRKWKLTAKLKELGMFPDKELFSLHSLELYSLRTKAISEKISLQEIGRIFYHLNQKRGYKSNRKANNDENIEVNVSDKPGKKKGYLDLINDRENILTSQKITIGQYFYYKLKEQPFFRIKDNIFTRKSYQQEFKKIWDQQSIYYPNILTEEAFNILFNEIIYFQRPLKSQKHLVTDCRFEFVFAKNNKGELLKDDTGSLRKIKLKAAPKSSPLFQLAKVWQDINNLKIQDTYGNIIEITLEKKKLIADKLQETDKITLKELKKILGLSSKEEYYYNLKKEYIEGNRTFVQLKKILGDNPLLEFNVEINERSISDYNTGETEVRKVINSSIEQSPLYQLWHLLFAAEENENLISTLCKKYSLSPETALALSKLDMTKAGYGALSTKAYRKILPYLMEGSGYSDACQLAGYRHSDYLSKEENESRQLLAKLDLYPINSLRNPVVEKVINQVINLVNAILEDPAYGRPDEIRVELGRELKQNAEERNKTFSRNKKEDAKHKDIIHRLMTECNFKKVSRRDIERYKLWEEFGYVSPYEPSKPISLSELFSGAYEVEHIIPKSRLFDDSFANKTICPRPINAAKDNQTAFDYMSGLGQQKLDEFTDFIQKHKTKKDGISQTKAKYLLCKGSEIPQDFINRQMRETAYISREVKNLLLGICRNVHSTSGTVTNYLRHIWGLDSILQELNIEKYRACGQTVKEIIGSNGSTKENERIVNWSKRDDHRHHAIDAIVIALTKQSHIQKLNNLNQEFQNYRELKQSAYNFPLPWATVHSDVLRTVSNILVSFKSGKKVATKNINRIKKNGKVVKELPTLTPRGFLHKDKFYGKIKRYETVPLTPRFKEWDRIADNNIYNQLKERLSRYKDNTKLAFSENEKDPIPKSLQSITLFQEKFVIRQELNKDFNLARTENIIDERIKRIVKGRLSQNQGNPIKAFGDLENDPIWINKEKAIDIKAVRCFTDLKDLSSLHKNDKGENIHYVSTKNNHHIAIYEDQNGNLAFNAASFWDALNRKLHDLPVIIKDPKSLWNKVLEKGIDNQDVLSNLPPENCSFRTSLQQNEMFIFGMTREEIEDDIRNENYSRISKGLYRVQNISTGKGIDVFFRHHLETKLQDSNNDKEVGKFIRCRTLNSLSLIKVLINYTGSIYLYD

SEQ ID NO: 675 - protein, 1223 aa, unidentified
  REGION 1..1223: note = Description of Unknown: uncultivated organism with predicted taxonomy: Bacteroidetes
  REGION 1..1223: note = MG7-12 effector
MEKVLGLDLGVSSIGWAMTLQDPNNEERNEIIDCGVRIVPLDTDEIKEFGKGGNVPTNVARRQARGMRRNLQRYRWRRQQLFRALKQLGMLPDERLLRQLSPLQLYALRERALSEPLSLPEMGRVLIHLNQWRGYRSNRKEQTESDGKKPSEYLEQIEKNEERLQGQTIGQYFAARLRESGGYRIRQQLFSRETYKQEFDRIWEKQAEYHPQVLTEANRSWIRDRIIYWQRPLKSAKGLVGECALEWCYALDKNQQPIRLPNGQLKIVRPKCAPKSSPLVQVCNVWESIHNLRVYDHFGEERPLSQEEKERLFRILQDRSLTARQIIKDVLLLSPKTHTVDRLIQEKGLEYNRTRARLLEVFKEQKINREDLLEFNPVIEEVEWDNPETGERLRRLQVRGDFTQQPLYQLWHLLYATEDERNLVALLQKRYGFTEAQAKALAKLDFTSAGYARKSHRALRRLLPHYQRGLDYAAAAQAAGYRHANQMTKEENQARPLLDRLEVLPKNSLRNPVVEKVLNQLVHLVNDLIATYGRPDEIRIELARELKQSAQERQQIEKLINKNKKTNEEARKKIAEILGIDPQAVSRTMIEKWKLYEETDGLSLYSGKKIDLPTLLRGNAVDIDHIIPRVSRFDDSFQNKIFCEASLNQAKSNSTAHDFMRDQPVSGLQPYDDYRKMVKDLYEGKKISKAKYDNLMMTAEDLLKDEEFLQRQLRETQYIAKKAVEMLRQVCREVRSTTGSITDFLRHQWGWDEVIKELRLPQFRQAGEDLIEYRPAANGGRDRVVIKDWDKRKDHRHHALDALVVAFTRVSHIQRVTKLNQIMSGKFGEERRKELLRTGRDLYIAGKAPFTFAQVSKAIANILISFKQGLRVATRSRNRPKGSTTVQITLTPRGALHEETVYGRIKRYKKVPLNGKFSPAMVTEIAHPHQRALVEARLAQHNGDPKKAFKDLEKHPITYGPNGSKHLTHVTVWDYVLVARKSVDASLSEKAVEKIADRGVRRAVAERLKAGGGKSKEAFKNVGTDPVQPPRHHPVKRVRVENYAEKAIRLPRGYVEPGSNHHIAIYRDADGNKHEHVVTFWDAFQRVRLGLPAIITDVPAALQYAQDQLPEGVTDLLLPEGWDWQFVVSLARNDMFVFDLDPSEIDFTDPNNRARISRHLFKLRKASKKQYWFLHHLETEVLEDLASKKAYRCKQCSMESLAGAVKVKINRLGHVVEVGQPFS

SEQ ID NO: 676 - protein, 1134 aa, unidentified
  REGION 1..1134: note = Description of Unknown: uncultivated organism with predicted taxonomy: Deltaproteobacteria bacterium
  REGION 1..1134: note = MG7-13 effector
MKKILGLDIGTNSIGWALITEPENGESGEPEILRCGVKVIAMDQKQINAFEGGQALSANQERRLKRQMRRNNWRYKLRREALVARLVELGWFPREWKDDLQARHEALKLHDARYIYGLRDKAARGERITLRELGLIWYHLNQKRGYKSNRKAQDEEESNDSVLLSQIAANDQLLREQGLTVGQYLYQQHKEHPRRPLKGKVFSRKAYLEEFDRIWEAQAAHYPDILTPELREEIRDRIIYYQRPLKSQKHLIAECPFEKRYYKDANGQLQVKGIKVAPRSSPVFQEYKIWQTLANIRITNLALAGQMGFDDRGERPLTEQERELAYQYLIKKKKVKSDTLLKRALRLDPEAGGYSIDNYEEIEGDVTRAAILSAFKKAEQRPPQWLFRFDPTREIEQQPLFQLWHMLYSIEDPAALQRKLQEKFDFDDELAAALTRVTFKEDYGSLSTRAMQRLIPHLKNGLTYDKARVKVYEETGIDSYKTHTLSKDEQLQRALAPAIEQIKVNSLRNPVVERIVQHVINLVNAIIADKSLVSDEERQSGKFEIRMEMARELKQTAKQRQKTSKQIRAREQQREAARNRLIEEGILTRPSRADIDRYLIWLEGNQMCPYTFKPIPISDLFNGRCDVDHIIPRSRLFDDSQLNKVVCYAAANREKGNRTAYEYMEQKGELEKFREHVMNTNYPFPKKKRLLSPEVPEDFIQRQLKETQYITKVVREKLWEVSHEVRTTTGAITGFLRHEWGLSNLLHDLNFPKYEAQGLVEEWVDEETGEVIKRIEDWSKRMDHRHHALDALVVALTRPAHVHYLNNLNKQFGNLARENGWRTPLRSPVTNLYQKARAAMEPILVKHQKKSRVVTSMTHRLKVKGHFSGKTQEVLVPRGPLHKESVYGLIHDNGKEEFVIRYPLDTNFRPEYVPYIVDKKVQQIVAARLRQFGNDPKKAFADLESDPIWFDEERKIPVKRVRCRTGLQAVVPVHHKADGTSVDYVQTRNNHHLAIYQRPDGSRFHRIVTFWEAVERINQGQPLYQPTIEDGQLLLTLSANDMFVFELDPDEIDFTNPANYGLISRHLYRVQKMTGDDRKLDIWFRHHLDPTTEHRKPYGEMGNFRRITSLSKLVGTKVWLDQTGRIVQHLRCIG

SEQ ID NO: 677 - protein, 1134 aa, unidentified
  REGION 1..1134: note = Description of Unknown: uncultivated organism with predicted taxonomy: Deltaproteobacteria bacterium
  REGION 1..1134: note = MG7-14 effector
MKKILGLDIGTNSIGWALITEPENGESGEPEILRCGVKVIAMDQKQINAFEGGQALSANQERRLKRQMRRNNWRYKLRREALVARLVELGWFPREWKDDLQARHEALKLHDARYIYGLRDKAARGERITLRELGLIWYHLNQKRGYKSNRKAQDEEESNDSVLLSQIAANDQLLREQGLTVGQYLYQQYKEHPRRPLKGKVFSRKAYLEEFDRIWEAQAAHYPDILTPELREEIRDRIIYYQRPLKSQKHLIAECPFEKRYYKDANGQLQVKGIKVAPRSSPVFQEYKIWQTLANIRITNLALAGQMGFDDRGERPLTEQERELAYQFLIKKKKVKSDTLLKRALRLDPEAGGYSIDNYEEIEGDVTRAAILSAFKKAEQRPPQWLFRFDPTREIEQQPLFQLWHMLYSIEDPAALQRKLREKFDFDDELAAALTRVTFKEDYGSLSTRAMQRLIPHLKNGLTYDKARVKVYEETGIDSYKTHTLSKDEQLQRALAPAIEQIKVNSLRNPVVERIVQHVINLVNAIIADKSLVSDEERQSGKFEIRMEMARELKQTAKQRQKTSKQIRAREQQREAARNRLIEEGILTRPSRADIDRYLIWLEGNQMCPYTFKPIPISDLFNGRCDVDHIIPRSRLFDDSQLNKVVCYAAANKEKGNRTAYEYMEQKGELEKFREHVMNTNYPFPKKKRLLSPEVPEDFIQRQLKETQYITKVVREKLREVSHEVRTTTGAITGFLRHEWGLSNLLHDLNFPKYEAQGLVEEWVDEETGEVIKRIEDWSKRMDHRHHALDALVVALTRPAHVHYLNNLNKQFGNLARENGWRTPLRSPVTNLYQKARAAMEPILVKHQKKSRVVTSMTHRLKVKGHFSGKTQEVLVPRGPLHKESVYGLIHDNGKEEFVIRYPLDTNFRPEYVPYIVDKKVQQIVAARLRQFGNDPKKAFADLESDPIWFDEERKIPVKRVRCRTGLHAVVPVHHKADGTPLDYVQTRNNHHLAIYQRPDGSRFHRIVTFWEAVERINQGQPLYQPTIEDGQLLLTLSANDMFVFELDPDEIDFTNPANYGLISRHLYRVQKMTGDDRKLDIWFRHHLDPTTEHRKPYGEMGNFRRITSLSKLVGTKVWLDQTGRIVQHLRCIG

SEQ ID NO: 678 - protein, 1003 aa, unidentified
  REGION 1..1003: note = Description of Unknown: uncultivated organism with predicted taxonomy: Collinsella
  REGION 1..1003: note = MG14-1 effector
MEITINREIGKLGLPRHLVLGMDPGIASCGFALIDTANHEILDLGVRLFDSPTHPKTGQSLAVIRRGFRSTRRNIDRTQARLKHCLQVLKAYGLIPQDATKEYFHTTKGDKQPLKLRVDGLDRLLNDREWALVLYSLCKRRGYIPHGEGNQDKSSEGGKVLSALAANKEAIAETSCRTVGEWLAQQPQSRNRGGNYDKYVTHAQLIEETHILFDAQRSFGSKYASPEFEAAYIEVCDWERSRKDFDRRTYDLVGHCSYFPTEKRAARCTLTSELVSAYGALGNITIIHENGTSRALSATERDECIAILFSCEPIRGNKDCAVKFGALRKALDLSSGDYFKGVPAADEKTREVYKPKGWRVLRNTLNAANPILLQRLRDDRDLADAVMEAVAYSSALPVLQEQLQGLPLSEAEIEALCRLPYSSKALNGYGNRSKKALDMLLDCLEEPEVLNLTQAENDCGLLGLRIAGAQLERSDRLMPYETWIERTGRTNNNPVVIRSMSQMRKVVNAICRKWGVPNEIHVELDRELRLPQRAKDEIAKANKKNEKNRERIAGQIAELRGCTADEVTGKQIEKYRLWEEQEYFDLYTGAKIEVDRLISDDTYTQIDHILPFSRTGENSRNNKVLVLAKSNQDKREQTPYEWMSHDGAPSWDAFERRVQENQKLSRRKKNFLLEKDLDTKEGEFLARSFTDTAYMSREVCAYLADCLLFPDDGAKAHVVPTTGRATAWLRRRWGLNFGSNGEKDRSDDRHHATDACVIAACSPSLVIKTARINQETHWSITRGMNETQRRDAIMKALESVMPWETFANEVRAAHDFVVPTRFVPRKGKGELFEQTVYRYAGVNAQGKDIARKASSDKDIVMGNAVVSADEKSVIKVSEMLCLRLWHDPEAKKGQGAWYADPVYKADIPALKDGTYVPRIAKAHTGRKAWKPVPESAMAKPPLEIYFGDLVQIGDFIGRFSGYNINNANWSFTDRLTRLNLSCPTVGQLNNDLSPVVIRESPIK

SEQ ID NO: 679 - protein, 1034 aa, unidentified
  REGION 1..1034: note = Description of Unknown: uncultivated organism
  REGION 1..1034: note = MG14-3 effector
MAKLAPIADPRDFGFDPETVASALMPYEQFSSKPRRLILGIDMGVASIGLALIDVLNGEIVLMASHIFKQPIVDKTKVSLAVSRRGYRSSRRNITREKNRKKAIRKLAADTGIAPAGAAADWFARRKGEPEVLALRVDALTRKLTDRELARILYSFASHRGYIDHGKGDKGDTEDGKVKKALSANLKILDEGGYETYAQYLATQPRSRNKRDDYTFSIDIATVAHEVSRIFAHQREMGNTKATVSLEQSYLAALCWLTDTTKKDKKTYDKVGYCTYLGKPEKRAASSALSYELVRAYQTLANVKIEHRGAAPTCISPKTRNEIVADLFKVTGKPKPLKWSQLRKRLHMAETDTFAGRLKSDEAADCIKLPAWTALCAGLYDKAPKLLEDMHEEPDFADSVCSCLTFASGESSLRSALGNLSADFTPAELAALLDLPYTSKAFSGYGTSGLKALHMLRSAFESEDVVTLYDAEEATGLYEARAALAADRNASLDGLLSPYVEFDPTCTNPVVLRATARLRRMVNSVIKHYGMPDAIRVELARELKHSAHEKRLINASKNKNEKVNAKARQDLIDYYHLPSDAHIKTGDFRKVKLYNEQGGKDPYTGEGIDFARMLAQSDYTEIDHILPISRSCDDSQSNKVLVLTKSNRDKSNRTPYEWMTSGESTAPDFAEFSARMQLWAENCELKRLASSKLKKLLNKDFTDKTQDFIARQLNDTRYMSRAVAKWLDGCLPFPDDGHRHVFAVSGGATAMLRRAWDIAILDEEGKKDRDDDRHHAIDAALIAACTPSIVMKVAKANEMWQSDAERESLFLGSMPFPDFKQKVEAWIPCIVPTLYLPRNATGSLFNDSFYSYRGTDARGKDLLKQNGTVKPKTTVWKDGNGTAKTYDGVYGLHAVFDKDRGKSGRWLFDPIYYVDIPHLSKDRMRVFSKDKAIDYWETTEIDPESPQLMIKMGDVLLQDGRAMRFYNFNVATGGICSYVTGAPHKSLQKTGPLSCESFPTPMKWASDLKIMHEDSLGLCWLRFLVARTESCDGA

SEQ ID NO: 680 - protein, 1005 aa, unidentified
  REGION 1..1005: note = Description of Unknown: uncultivated organism with predicted taxonomy: Coriobacteriales
  REGION 1..1005: note = MG14-4 effector
MQSTVNREIGKLGLPRHLVMGMDPGISSCGFALIDTKNHEILEMGVRLFDSPTHPKTGQSLAVIRRGFRSTRRNIDRTQARLKHCLETLKRYGVVPQDATKDYFHTAKGDKQPLKLRVEGLDRLLTNREWALVLYSLCKRRGYIPHGEGSQDKSSEGGKVLSALAANKEAFDQGSFRTVGEWLASQPQSRNRGGSYDKCVTHAQLVNEAHTLFEKQRAFESKVASTELEAAYIEVCDWERSRKDFDCRTYELVGYCSYFPQEKRAARCTLTSELVSAYGALGNVTIIHEDGSSRSLTAAERDECIAILFSCEPIRGNKDCTVKFGALRKVLDLSSGDYFKGVPTSEEKTREVYKPKAWRVLRNTLNPINPILLHRLRDDRDLADSVMEAVAYSSALPVLEEKLQELPLSEAEVTALCKLPYSSKVLNGYGNRSKKALDILLGCFEEPEVLTLTDAEDASGLLAMRIEGAGLERSDRLMPYEGWIEKTGRTNNNPVVIRAMSQMRKVVNAICRKWGVPNEIHVELDRELRLPQCAKDDIAKANKKNEKNRERIAGQIAELRGCSVEEVTGKQIEKYRLWEEQECFDLYTGDSIDVMRLIQDDSYTQIDHILPFSRTGENSKNNKVLVLAKSNQDKREQTPYEWMHSGKPSAPSWSDFERRVQENQKLSRRKKNFLLEKDLDSKEGEFLARSFTDTAYMSREVCSYLSDCLLFPEDGSKVHVVPTTGRATAWLRRRWGLNFGSTGEKDRTDDRHHATDACVIAACSRSLVIKTAKISQETHWSVTPGLTESQRKDARMKALESVMPWETFANEVRSRHDFVVPTRFVPRKGKGELFEQTTYQYAGVNDKGKDLARRVGSDKDIVMGNAVVSEDGKSVVKVSEMLCLRLWHDPDAKKGKGCWYADPVYKADIPALKDGSYVPRIAKAHSGRKAWKPVPESALKGGTIEIYLGDIVRIGDFIGRFSGYDINSANWSFVDRLTRNPIKCPTVGKLNNLIIPIVTRENIVE

SEQ ID NO: 681 - protein, 1005 aa, unidentified; identical to SEQ ID NO: 680
  REGION 1..1005: note = Description of Unknown: uncultivated organism with predicted taxonomy: Actinobacteria
  REGION 1..1005: note = MG14-5 effector

SEQ ID NO: 682 - protein, 1037 aa, unidentified
  REGION 1..1037: note = Description of Unknown: uncultivated organism with predicted taxonomy: Collinsella
  REGION 1..1037: note = MG14-6 effector
MAKLAPIADPRDFGFDPETVASALMPYEQFSSKPRRLILGIDMGVASIGLALIDVENGEIVLMASHIFKQPIVDKTKVSLAVSRRGYRSSRRNITREKNRKKAIRKLAVKSGIAPAGASADWFARRKGEPEVLALRVDALTRKLTDRELARILYSFASHRGYIDHGKGDKDDIEGGKVKKALSANRKILDEGGYETYAQYLATQPRSRNKKDDYTFSIDIATVAHEVSRIFAHQREMGNTKVTVSLEQSYLAALCWLTDTTKKDKKTYDKVGYCTYLGKPEKRGASSALSYELVRAYQTLANVKIEHRGADATHISPKTRNEIVADLFKVTGKPKPLKWSQLRKRLHMAETDTFAGRLKSDEATDCITLPAWTALCVGLYDKAPKLLEDMHEEPDFADKVCSCLTFASSESSLRGALSQISADFSPVELAALLDLPYTSKVFSGYGTSSLKALHMLRGAFESEDVATLYKAEKATGLYEARAALAANRNASADGLLSPYVEFDPTCTNPVVLRATARLRRMVNSIIKHYGMPDAIRVELARELKHSAHEKRLINASKNKNEKINAKARQDLIDYYHLPSDAHIKTGDFRKVKLYNEQGGKDAYTGEGIDFARMLAQSDYTEIDHILPISRSCDDSQSNKVLVLTKSNRDKSNRTPYEWMTSGESTAPDFAEFSARMQLWAENCELKRLASSKLKKLLNKDFTDKTQDFIARQLNDTRYMSRAVAKWLDGCLPFPDDGHRHVFAVSGGATAMLRRAWDIAILDEEGKKDRDDDRHHAIDAALIAACTPSIVMKVAKANEMWQSDAERESLFLGSMPFPDFKQKVEAWIPCIVPTLYLPRNATGSLFNDSFYSYRGTDARGKDLLKQNGTVKPKTTVWKDGNGTAKTYDGVYGLHAVFDKDSGKSGRWLFDPIYYVDIPHLSKDRMRVFSKDKAIDYWETTEIDSESPQLIIKMGDVLLQDGRAMRFYNFNVATGGICSYVTGAPHKSLQKTGPLSCESFPTPMKWARDLKIMHEDSLGLCWLKFLTDRTDRCALESIQ

SEQ ID NO: 683 - protein, 1003 aa, unidentified
  REGION 1..1003: note = Description of Unknown: uncultivated organism with predicted taxonomy: Collinsella
  REGION 1..1003: note = MG14-7 effector
MEITINREIGKLGIPRHLVLGMDPGIASCGFALIDTANHEILDLGVRLFDSPNHPKTGQSLAVIRRGFRSTRRNIDRTQARLKHCLQTLKAYGVIPQDATKEYFHTTKGDKQPLKLRVQGLDRPLSNREWALVLYSLCKRRGYIPHGEGSQDKSSEGGKVLSALTANQEALAETPCRTVGEWLAQQPQSRNRGGNYDKCVTHAQLIDETHILFEAQRSFGSAYASPEFEAAYIEVCDWERSRKDFDRRTYDLVGHCPYFPTEKRAARCTLTSELVSAYGALGNITIIHENGTSRALSATERDECIAILFSCEPIRGNKDCAVKFGALRKALDLSSGDYFKGVPAADEKTREVYKPKGWRVLRNTLNAANPILLQRLRDDRDLADAVMEVVAYSSALPVLQERLQGLPLSEAEIEALCRLPYSSKALNGYGNRSKKALDMLLDCLEEPEVLNLTQAENDCGLLGLRIAGTQLERSDRLMPYETWIERTGRTNNNPVVIRSMSQMRKVVNAICRKWGVPNEIHVELDRELRLPQRAKDEIAKANKKNEKNRERIARQIAELRGCTADEVTGKQIEKYRLWEEQECFDLYTGAKIEVDRLISDGTYTQIDHILPFSRTGENSRNNKVLVLAKSNQDKREQTPYEWMSHDGAPSWDAFERRVQENQKLSRRKKNFLLEKDLGTKEGEFLARSFTDTAYMSREVCAYLADCLLFPDDGAKAHVVPTTGRTTAWLRRRWGLNFGLTGKKDRSDDRHHATDACVIAACSPSLVIKSAQINQKMHWSMTKGMSKAQRQDAIMKALENVMPWETFANEVRTVHKLIIPTRFVPRKGKGELFEQTVYRYAGVDAKGKTLARRANSTEDIVMGNAVVSDDEKSVIKVSEMLCLRLWHDPKAKKGQGAWYADPVYKADIPALKDGTYVPRIAKAHTGRKAWKPVPESAMKKPPLEIYLGDLVQIGDFVGRFNGYNIDNANWSFVDRLTRIKTSCPTVGKLSNDMSPFVVRESPIK

SEQ ID NO: 684 - protein, 1000 aa, unidentified
  REGION 1..1000: note = Description of Unknown: uncultivated organism with predicted taxonomy: Olsenella
  REGION 1..1000: note = MG14-8 effector
MDVTRPYLVLGLDPGIASCGFCLLDMSNHKILEMGSHLFKAPQEDKTKTSLAVTRRKARSIRRNTARTAARLKHCLELLAGAGLVPADADKTWLQTKKGDKPILKLRAGGLDRLLTDREFAQVLYSLCGRRGYIPHGEGRLGETDEDESRKVLGAIKKNQDAMAAGSYRTVGEMLNTQGRSRNRGGDYSLCVYNSQIQDEAKALFASQRARGNTKATRELEDSYLACLTWEKKSLDHDARIYELVGPCSYFPGEKRAASADVSSELCRAYERLGHIVIVHEDGSEQALTASQIDGYLKILFSTAPIKGNKECKVSYGTIRKDLDISGKSVFKGVAQDKEKDETFAPKAWRCLRRVLPEELLARMFEDRQLGDAICEALTFASSEASLVERLSDLDLSGDERDAILTVPFTGKLFKGYGSRSLKALGLLLGAFEEPEIRILTDAEKVTGLLDLRLSDRGVRGQLLPPYDSYDPTCRNPVVLRAMGRMRHIVNAIIRIHGVPDEIHIELGRELKMSNKEKSLVDKRNRENAANNKKWAATAAGILGCTPEEVPGRIIRKLILREEQGEKDLYTGEPIDLEHLVRDDRYCEIDHILPYSRTCDDGRANKVLVLSKSNQDKRERTPYEWMSSGEAGAPSWDSYRARVMAQVKNPRKRANYLNTDLGPETQAKFLARNLNDDRYMSVAVKNYLEDCLLFPEDGRKRHVTAVAGGATGNLRWVWGLNFGEGNIKDRADDRHHAIDAAIIAACSESTVKKVAEASAKGREAFKQLRKSRLADTQPWPTFATEVAARREFVVPTRMADHGVTGRVFEDTLYHLEGITEDKGKYPLVRAGENTVKKGNVRINPDGSVKLIDGMAFLRLWLDPTARPNGKVKGKWYAEPVYYADIPAIKAGTYVPRAIVQGIARINWEPIPQTALESKPLVLFKNDVLVVDGHIARYSNIGISVCQLLMLNLLTRDRVTDWPSVGSWGKDTQVRILQEDCLGHCYDSIAINPEDSTFQQR

SEQ ID NO: 685 - protein, 1002 aa, unidentified
  REGION 1..1002: note = Description of Unknown: uncultivated organism with predicted taxonomy: Olsenella sp. KH3B4
  REGION 1..1002: note = MG14-9 effector
MDVTRPYLVLGLDPGIASCGFCLLDMTNHKILEMGSHLFKAPQEDKTKTSLAVTRRNARSIRRNTARTAARLKHCMELLVAAGLVPEDADKTWFQTRKGDKPVLKLRAGGLDRLLTDREFAQVLYSLCGRRGYIPHGEGRLGETDDTEGRKVLDAIKKNQAAMAAGSYRTVGEMLNAQGRSRNRGGDYALCVYNSQIQDEVKALFAAQRAHGNAAATEALEDDYLACLTWEKKSLEHDARVYELVGECPYFPGEKRAASADISSELCRAYERLGHIVIVHEDGSEQTLTANQIDGYLKILFSTASIKGNKDCKVTYGAIRKNLDISGKSVFKGIAQDKEKEEVFAPKAWRCLRHALPEELLARMVEDRQLGDAICEALTFASSEASLIERLSDLDLTDDEREAVLGVPFTGKLFKGYGSRSLKALGLLLGAFEEPEVRTLTDAERATGLLDLRQSDRGVRGQYLPPYNSYDETCRNPVVLRAMGRMRHIVNAIIRIHGVPDEIHIELGRELKMSNKEKSLVDKRNRENAAANKKWAEKAAGILGCTPEEVSGRVIRKLILREEQGEKDLYTGQPIDLERLVRDDRYCEIDHILPYSRTCDDSRTNKVLVLSKSNQDKRERTPYEWMTSGETGAPSWDEYHARIMATVKNPRKRANYLNTDLGPETQAKFLARNLNDDRYMSVAVKNYLEDCLLFPEDGRKRHVIAVAGGATGNLRWVWGLNFGDGNVKDRTDDRHHAVDAAIIAACSESTVKKIAEASSKGREAFKKQRESRLADTQPWPTFADEVKARRAFVVPTRMADHGVTGRVFEDTLYHLEGITADKGKYPLVRAGEKTVKKGNVRINSDGSVKLIDGMAFLRLWLDPTARPNGKVKGKWYAEPVYYADIPAIKAGTYVPRACTIHVARVNWEPVPESAMASEPVVVFFGDVLVVDDKIGRYWSMGITNCAMEIRSLLNGSNLASGFPGTLNGWGKDTQVRVLQEDCLGHCYDGISINPEDSTFQQR

SEQ ID NO: 686 - protein, 880 aa, unidentified
  REGION 1..880: note = Description of Unknown: uncultivated organism with predicted taxonomy: Collinsella
  REGION 1..880: note = MG14-10 effector
MLTSREWALVLYSLCKRRGYIPHGEGSQDKSSEGGKVLSALAANKEAIAETSCRTVGEWLAQQPQSRNRGGNYDKCVTHAQLVEETHILFEAQRNFGSQYASAELEEAYVQVCDWERSRKDFDRRSYDLVGYCTYFPTEKRAARCTLTSELVAAYGALGNITIVREDGTTRTLTAAERDKCIAILFSCEPIRGNKDCAVKFGALRRELDLNSGDYFKGVPAADEKTREVYKPKGWRTLRNTLNTISPFLLRRLHDDRDLTDSVMEAVAYSSALPVLEEQLQALPLSPTEIGALCKLPYSSKALNGYGNRSKKALDMLLDCLEDSEVLGLTQAEDDCGLLGLRTQGAQLKRSEHLMPYEMWVELTGRTNNNPVVIRSMSQMRKVVNAICRKWGVPNEIHIELDRELRLPQRAKDDIAKAHKKNEKNRERIAGQIAELRGCSPEDVSGKLIEKYRLWEEQEYFDLYTGTKIEVDRLISDETYTQIDHILPFSRTGENSPSNKVLVLAKSNQDKREQTPFEWMSKEGAPSWDAFKRRVEENQKLGRRKKNFLLEEDLEAKEGEFLTRSFTDTAYMSREVCAYLADCLLFPEDGTKSHVVPTTGRATAWLRRRWGLNFGTNGEKDRSDDRHHATDACVIAACSRSLVIKTAHISEQTHWTVTKNLDKDERNRLRMKALENVMPWETFANEVRASHDFVIPTRFVPRKGKGELFEQTTYRYAGVNDKGKDLARKANSDQDIVMGNAVVSEDGKSIIKVSEMLCLRLWHDPEAKKGQGCWYADPVYKADIPALKDGTYVPKIAKAHTGRKAWKPVPESAMKHAPLEIYLGDLVKIDDFIGRFSGFDINSANWSFSDRLTRQKLNCPTVGRLNNALLPTIIRESTID

SEQ ID NO: 687 - protein, 813 aa, unidentified
  REGION 1..813: note = Description of Unknown: uncultivated organism with predicted taxonomy: Collinsella sp. AF20-14LB
  REGION 1..813: note = MG14-11 effector
MAAFENPRESGFDPELVKTALMSREQFCSKPRKLILGIDMGIADIGICLMDELNYEIVLMATHLFDCPRNPKDQTSLASTRRQARSQRRNIARRAARKKHIRTILMAHGVIPEGTTADWFSVRRGEQDNIQLRVKGLSEVLTDRELARVLYAFASRRGYIDHGKADNDKDAGKVKKALKANAEIMEANGYETFAQYLVTQPRIRNRQNDYTHCIDIDMVVDEVHAIFRHQRELGNELATESLEGEYLATLRWLTDTTRRDRIIYSKVGYCTYLGEPVKRAPKSSISSEMVRAYQTLANVKIEHIGGPATQIAPAVRNQIVHELFKVSKNPKPLKWSQLRKKLDLADTATFAGIRQSDEKNDACVTAPAWNALCSTLHDLNPTLLNRLHDDIDLADAVCAAATFASSSEAFATRIAELTDGLSKEDVEALLELQYGSKLFTGYGSTSLKALQMLRDAFEDAKIERLYDAEVATGLYDAREALAARHNAPDNGFLKPYSSYSPICTNPVVLRSCAQLRRIINSIIRHYGLPDTIRVEVANDLKHTKREKKLITSGNIYNRKVNEKAKDDIVEFLGLANADRVRGRDLEKVRLYNEQGGKDPYTGQGIDFGRMLTEKSYVEVDHVLPFSRSCDNSKTNKVLVLTKSNRDKANRTPYEWMTSGEPTAPNWDEFCIRMDVWASGKEPKHYYSSKLAKLKEDNFTNNIDSFISRNLNDTRYMSKDVAKWLADCLPFPKDGRRHVFCVSGAATGLMRRVWRIGILDENGKKDREDDRHHAVDAAVIAACTPSVVKSIALISEEHATHRDADRLLNRSLPY

SEQ ID NO: 688 - protein, 1005 aa, unidentified
  REGION 1..1005: note = Description of Unknown: uncultivated organism with predicted taxonomy: Collinsella
  REGION 1..1005: note = MG14-12 effector
MEITINREIGKLGLPRHLVLGMDPGIASCGFALIDTANHEILDLGVRLFDSPTHPKTGQSLAVIRRGFRSTRRNIDRTQARLKHCLQVLKAYGLIPQDATKEYFHTTKGDKQPLKLRVDGLERLLNDREWALVLYSLCKRRGYIPHGEGNQDKSSEGGKVLSALAANKEAIAGTSCRTVGEWLAQQPQSRNRGGNYDKCVTHAQLIEETHILFTAQRSFGSKYASPEFEAAYIEVCDWERSRKDFDRRTYDLVGHCSYFPTEKRAARCTLTSELVAAYGALGNITIIHEDGTSRALSATERDECIAILFSCEPIRGNKDCAVKFGALRKALDLSSGDYFKGVPAADEKTREVYKPKGWRTLRNTLDTANPILLQRLRDDRDLADAVMEAVAYSSALPVLQERLQELPLSEAEIEALCKLPYSSKALNGYGNRSKKALDMLLDCLEEPEVLNLTQAENDCGLLGLRIAGAQLERSNRLMPYELWVERTGRTNNNPVVIRSMSQMRKVVNAICRKWGVPNEIHVELDRELRLPQRAKDEIAKANKKNEKNRERIAGQIAELRGCTTEEVTGKQIEKYRLWEEQECFDLYTGAKIEVDRLISDDTYTQIDHILPFSRTGENSRNNKVLVLAKSNQDKRGQTPYEWMSHDGAPSWDAFERRVQENQKLSRRKKNFLLEKDLDAKEGEFLARSFTDTAYMSREVCAYLADCLLFPDDGAKAHVVPTTGRATAWLRRRWGLNFGSNGEKDRSDDRHHATDACVIAACSRSLVIKTARINQETHWSITRGMNETQRHDAIMKALESVMPWETFANEVRAAHDFVVPTRFVPRKGKGELFEQTVYRYAGVNAQGKDIARKASSDKDIVMGNAVVSDDEKSIIKLSEMLCLRLWHDPEAKKGQGAWYADPVYKADIPALKDGTYVPRIARAAIGRKAWKLVPKSAMTKPPLEIYLGDLVQIGNFIGRFSGYNIANGSWSFIDRLTKEALSCPSVAKLNNNLFPTIIRESIIMRK

SEQ ID NO: 689 - protein, 1005 aa, unidentified
  REGION 1..1005: note = Description of Unknown: uncultivated organism with predicted taxonomy: Collinsella
  REGION 1..1005: note = MG14-13 effector
MEITINREIGKLGLPRHLVLGMDPGIASCGFALIDTANHEILDLGVRLFDSPTHPKTGQSLAVIRRGFRSTRRNIDRTQARLKHCLQILKAYGLIPQDATKEYFHTTKGDKQPLKLRVDGLDRLLNDREWALVLYSLCKRRGYIPHGEDNQDKSSEGGKVLSALAANKEAIAETSCRTVGEWLAQQPQSRNRGGNYDKCVTHAQLIEETHILFDAQRSFGSKYASPEFEAAYIEVCDWERSRKDFDRRTYDLVGHCSYFPTEKRAARCTLTSELVSAYGALGNITIIHENGTSRALSATERDECIAILFSCEPIRGNKDCAVKFGALRKAIDLSSGDYFKGVPAADEKTREVYKPKGWRVLRNTLNAANPILLQRLRDDRNLADAVMEAVAYSSALPVLQERLQELPLSEAEIEALCKLPYSSKALNGYGNRSKKALDMLLDCLEEPEVLNLTQAENDCGLLGLRIAGAQLERSNRLMPYELWVERTGRTNNNPVVIRSMSQMRKVVNAICRKWGVPNEIHVELDRELRLPQRAKDEIAKANKKNEKNRERIAGQIAELRGCTTEEVTGKQIEKYRLWEEQECFDLYTGAKIEVDRLISDDTYTQIDHILPFSRTGENSRNNKVLVLAKSNQDKRGQTPYEWMSHDGAPSWDAFERRVQENQKLSRRKKNFLLEKDLDAKEGEFLARSFTDTAYMSREVCAYLADCLLFPDDGAKAHVVPTTGRATAWLRRRWGLNFGSNGEKDRSDDRHHATDACVIAACSRSLVIKTARINQETHWSITRGMNETQRHDAIMKALESVMPWETFANEVRAAHDFVVPTRFVPRKGKGELFEQTVYRYAGVNAQGKDIARKASSDKDIVMGNAVVSDDEKSIIKVSEMLCLRLWHDPEAKKGQGAWYADPVYKADIPALKDGTYVPRIARAAIGRKAWKLVPKSAMTKPPLEIYLGDLVQIGNFIGRFSGYNIANGSWSFIDRLTKEALSCPSVAKLNNNLFPTIIRESIIMRK

SEQ ID NO: 690 - protein, 1000 aa, unidentified
  REGION 1..1000: note = Description of Unknown: uncultivated organism with predicted taxonomy: Olsenella
  REGION 1..1000: note = MG14-14 effector
MDVTRPYLVLGLDPGIASCGFCLLDMSNHKILEMGSHLFKAPQEDKTKTSLAVTRRKARSIRRNTARTAARLKHCLELLAGAGLVPANADKTWLQTKKGDKPILKLRAGGLDRLLTDREFAQVLYSLCGRRGYIPHGEGRLGETDEDESRKVLGAIKKNQDAMAAGSYRTVGEMLNAQGRSRNRGGDYSLCVYNSQIQDEAKALFASQRARGNTKATRELEDSYLACLTWEKKSLDHDTRVYELVGPCSYFPGEKRAASADVSSELCRAYERLGHIVIVHEDGSEQALTASEIDDYLKILFSTAPIKGNKECKVSYGTIRKDLDISGKSVFKGIAQDREKDEPFVPKAWRSLRRVLPKGLLARMLEDRKLGDAVCEALTFASSEASLVERLSDLDLSGDERDAILTVPFTGKLFKGYGSRSLKALGLLLGAFEEPEIRILTDAEKVTGLLDLRLSDRGVRGQLLPPYDSYDPTCRNPVVLRAMGRMRHIVNAIIRIHGVPDEIHIELGRELKMSNKEKSLVDKRNRENAANNKKWAATAAGILGCTPEEVPGRIIRKLILREEQGEKDLYTGEPIDLEHLVRDDRYCEIDHILPYSRTCDDGRANKVLVLSKSNQDKRERTPYEWMTSGEAGAPSWDSYRARVMAQVKNPRKRANYLNTDLGPETQAKFLARNLNDDRYMSVAVKNYLEDCLLFPEDGRKRHVTAVAGGATGNLRWVWGLNFGEGNVKDRADDRHHAIDAAIIAACSESTVKKVAEASAKGREAFKQLRKSRLADTQPWPTFATEVAARREFVVPTRMADHGVTGRVFEDTLYHLEGITDDKGKYPLVRAGEKTAKKGNVHFNPDGSVKLIDGMAFLRLWLDPTARPNGKVKGKWYAEPVYYADIPAIKAGTYVPRAIVQGIARINWEPIPQTALESKPLVLFKNDVLVVDGHIARYSNIGISVCQLLMLNLLTRDRVTDWPSVGSWGKDTQVRILQEDCLGHCYDSIAINPEDSTFQQR

SEQ ID NO: 691 - protein, 1005 aa, unidentified
  REGION 1..1005: note = Description of Unknown: uncultivated organism with predicted taxonomy: Coriobacteriales
  REGION 1..1005: note = MG14-15 effector
MEITINREIGKLGLPRHLVLGMDPGIASCGFALIDTANHEILDLGVRLFDSPTHPKTGQSLAVIRRGFRSTRRNIDRTQARLKHCLQILKAYGLIPQDATKEYFHTTKGDKQPLKLRVDGLDRLLNDREWALVLYSLCKRRGYIPHGEDNQDKSSEGGKVLSALAANKEAIAETSCRTVGEWLAQQPQSRNRGGNYDKCVTHAQLIEETHILFDAQRSFGSKYASPEFEAAYIEVCDWERSRKDFDRRTYDLVGHCSYFPTEKRAARCTLTSELVSAYGALGNITIIHENGTSRALSATERDECIAILFSCEPIRGNKDCAVKFGALRKALDLSSGDYFKGVPAADEKTREVYKPKGWRVLRNTLNAANPILLQRLRDDRNLADAVMEAVAYSSALPVLQERLQELPLSEAEIEALCKLPYSSKALNGYGNRSKKALDMLLDCLEEPEVLNLTQAENDCGLLGLRIAGAQLERSNRLMPYELWVERTGRTNNNPVVIRSMSQMRKVVNAICRKWGVPNEIHVELDRELRLPQRAKDEIAKANKKNEKNRERIAGQIAELRGCTTEEVTGKQIEKYRLWEEQECFDLYTGAKIEVDRLISDDTYTQIDHILPFSRTGENSRNNKVLVLAKSNQDKRGQTPYEWMSHDGAPSWDAFERRVQENQKLSRRKKNFLLEKDLDAKEGEFLARSFTDTAYMSREVCAYLADCLLFPDDGAKAHVVPTTGRATAWLRRRWGLNFGSNGEKDRSDDRHHATDACVIAACSRSLVIKTARINQETHWSITRGMNETQRHDAIMKALESVMPWETFANEVRAAHDFVVPTRFVPRKGKGELFEQTVYRYAGVNAQGKDIARKASSDKDIVMGNAVVSDDEKSIIKVSEMLCLRLWHDPEAKKGQGAWYADPVYKADIPALKDGTYVPRIARAAIGRKAWKLVPKSAMTKPPLEIYLGDLVQIGNFIGRFSGYNIANGSWSFIDRLTKEALSCPSVAKLNNNLFPTIIRESIIMRK

SEQ ID NO: 692 - protein, 1046 aa, unidentified
  REGION 1..1046: note = Description of Unknown: uncultivated organism with predicted taxonomy: Eggerthellales
  REGION 1..1046: note = MG14-16 effector
MDKALGTDIGELGFDPGTFATALMTLEEFRSKDRVIWAGLDIGVASTGLCLVDVLNHEIVLMASHLFKSPVVDKKKATAAPESLASVRRGARSVRRNIMREGRRKKAIRAALSDFGLIPADAGGEWFAARRDERTVVRLRPKALEYLLNSREFARVLYSFASHRGYIDHGKSDKDDDAGKVKKALAANHAALADGGCKTFGQYLAGQPRSRNRPGNYSYTADIDMTVDEVRTIFARQRELGSEIASEALEERYIAELTWLTDTSKRDMSTYLKVSLCTYLGAPYRRGATSTISFEMVRAHQTLCNTVILHADGTSSTIPGNIRIEIVRELFAVKKSVKPLKWSGLRRRLGLAECDSFKGSPAEEEKRDCIALPAWAVLCSGLYEGHRDLLERLHDHIDDADAVCSALTYATSAASLAGRLAPLALTDDEVEAIIDLPYSARLFSGYASASLEALQMLRGTLEDPCVTSLRQAEEDSGLAQARAMLAEERGGAADGLLCAFSDYDPTCKNPVVLRATAQVRRMVNSAIRHYGLPDVIRVEVARELKRSKHEREVVAESNRARRELNEQAKRDIVEFLGLPDDHHVRGRDLDMVKLYREQGGKDPYTGAGIDFRRMLEEHGYAEIDHILPISRTCDDSQANKVLCLTKSNRDKSNRSPYEWMTSGEAAAPDWDEFCGRMDRWAKMCEPRRYVRKKLANLTCENLAEHAEDFIKRNLNDTRYMSAALAKWLRECLPFARDGHEHVFCVAGGATALMRSVWDIGITGPDGKKNRDDDRHHAVDAAVIACCTPGIVKNVALVNEGHARADVRQRLFSDSLPYPEFKEQVNAWIPCIVPTLTLPNTVTGSVLKDTVYPYLGRDEAGKDLYLTVKRDKDGRIVERKVNKATTMWKDGQGGCRAYGSMRALDAVFDASAGKRGRWSFDPVYCIDIPHRDAERRTIRAFSKEKAIDLWDTVEVPEAAPRMTIRRGDVLVCDGKAARFHCFDISVNAIRLFSQRGGKQLQATGPLSAEAFPPPSKWGEGVRVMQEDCLGLCWLSFLAQRAADMQSE

SEQ ID NO: 693 - protein, 1005 aa, unidentified
  REGION 1..1005: note = Description of Unknown: uncultivated organism with predicted taxonomy: Collinsella
  REGION 1..1005: note = MG14-17 effector
MEITINREIGKLGLPRHLVLGMDPGIASCGFALIDTANHEILDLGVRLFDSPTHPKTGQSLAVIRRGFRSTRRNIDRTQARLKHCLQVLKAYGLIPQDATKEYFHTTKGDKQPLKLRVDGLERLLNDREWALVLYSLCKRRGYIPHGEGNQDKSSEGGKVLSALAANKEAIAGTSCRTVGEWLAQQPQSRNRDGNYDKCVTHAQLIEETHILFTAQRSFGSKYASPEFEAAYIEVCDWERSRKDFDRRTYDLVGHCSYFPTEKRAARCTLTSELVAAYGALGNITIIHEDGTSRALSATERDECIAILFSCEPIRGNKDCAVKFGALRKALDLSSGDYFKGVPAADEKTREAYKPKGWRVLRNTLNAANPILLQRLRDDRDLADAVMEAVAYSSALPVLQERLQELPLSEAEIEALCKLPYSSKALNGYGNRSKKALDMLLDCLEEPEVLNLTQAENDCGLLGLRIAGAQLERSNRLMPYELWVERTGRTNNNPVVIRSMSQMRKVVNAICRKWGVPNEIHVELDRELRLPQRAKDEIAKANKKNEKNRERIAGQIAELRGCTTEEVTGKQIEKYRLWEEQECFDLYTGAKIEVDRLISDDTYTQIDHILPFSRTGENSRNNKVLVLAKSNQDKRGQTPYEWMSHDGAPSWDAFERRVQENQKLSRRKKNFLLEKDLDAKEGEFLARSFTDTAYMSREVCAYLADCLLFPDDGAKAHVVPTTGRATAWLRRRWGLNFGSNGEKDRSDDRHHATDACVIAACSRSLVIKTARINQETHWSITRGMNETQRHDAIMKALESVMPWETFANEVRAAHDFVVPTRFVPRKGKGELFEQTVYRYAGVNAQGKDLARKVGSDKDIVMGNAVVSADEKSVVKVSEMLCLRLWHDPEAKKGQGAWYADPVYKADIPALKDGTYVPRIARAAIGRKAWKLVPKSAMTKPPLEIYLGDLVQIGNFIGRFSGYNIANGSWSFIDRLTKEALSCPSVAKLNNNLFPTIIRESIIMRK

SEQ ID NO: 694 - protein, 1000 aa, unidentified
  REGION 1..1000: note = Description of Unknown: uncultivated organism with predicted taxonomy: Olsenella
  REGION 1..1000: note = MG14-18 effector
MDVTRPYLVLGLDPGIASCGFCLLDMSNHKILEMGSHLFKAPQEDKTKTSLAVTRRKARSIRRNTARTAARLKHCLELLAGAGLVPADADKTWLQTKKGDKPILKLRAGGLDRLLTDREFAQVLYSLCGRRGYIPHGEGRLGETDEDESRKVLGAIKKNQDAMAAGSYRTVGEMLNTQGRSRNRGGDYSLCVYNSQIQDEAKALFASQRARGNTKATRELEDSYLACLTWEKKSLDHDARIYELVGPCSYFPGEKRAASADVSSELCRAYERLGHIVIVHEDGSEQALTASQIDGYLKILFSTAPIKGNKECKVSYGTIRKDLDISGKSVFKGVAQDKEKDETFAPKAWRCLRRVLPEELLARMLEDRKLGDAVCEALTFASSEASLIERLSDLGLSDDERDAILAVPFTGKLFKGYGSRSLKALDLLLGAFEEPEIRILTDAEKVTGLLDLRLSDRGVRGQLLPPYDSYDPTCRNPVVLRAMGRMRHIVNAIIRIHGVPDEIHIELGRDLKMSNKEKKQVEKRNRENAANNKKWATTAAGILGCTPEEVPGRIIRKLILREEQGEKDLYTGDSIDLEHLVRDDRYCEIDHILPYSRTCDDSRANKVLVLSKSNQDKRERTPYEWMTSGEAGAPSWDSYRARVMAQVKNPRKRANYLNTDLGPETQAKFLARNLNDDRYMSVAVKNYLEDCLLFPEDGRKRHVTAVAGGATGNLRWVWGLNFGEGNIKDRADDRHHAIDAAIIAACSESTVKKVAEASAKGREAFKQLRKSRLADTQPWPTFATEVAARREFVVPTRMADHGVTGRVFEDTLYHLEGITDDKGKYPLVRAGEKTAKKGNVHFNPDGSVKLIDGMAFLRLWLDPTARPNGKVKGKWYAEPVYYADIPAIKAGTYVPRACAIHIARVNWEPVPEAAMGANPVIVFFGDVLSVDDHVGRFGGFDIFGGRLALLNLLTKQKVSDWPSLGSWGKDTQVRVLQEDCLGHCYDSIAINPEGSTFQQR

SEQ ID NO: 695 - protein, 1005 aa, unidentified
  REGION 1..1005: note = Description of Unknown: uncultivated organism with predicted taxonomy: Coriobacteriales
  REGION 1..1005: note = MG14-19 effector
MEITINREIGKLGLPRHLVLGMDPGIASCGFALIDTANHEILDLGVRLFDSPTHPKTGQSLAVIRRGFRSTRRNIDRTQARLKHCLQVLKAYGLIPQDATKEYFHTTKGDKQPLKLRVDGLERLLNDREWALVLYSLCKRRGYIPHGEGNQDKSSEGGKVLSALAANKEAIAGTSCRTVGEWLAQQPQSRNRGGNYDKCVTHAQLIEETHILFTAQRSFGSKYASPEFEAAYIEVCDWERSRKDFDRRTYDLVGHCSYFPTEKRAAHCTLTSELVAAYGALGNITIVHEDGTSRALSATERDECIAILFSCEPIRGNKDCAVKFGALRKALDLSSGDYFKGVPAADEKTREVYKPKGWRTLRNTLDTANPILLQRLRDDRDLADAVMEAVAYSSALPVLQERLQELPLSEAEIEALCKLPYSSKALNGYGNRSKKALDMLLDCLEEPEVLNLTQAENDCGLLGLRIAGAQLERSNRLMPYELWVERTGRTNNNPVVIRSMSQMRKVVNAICRKWGVPNEIHVELDRELRLPQRAKDEIAKANKKNEKNRERIAGQIAELRGCTTEEVTGKQIEKYRLWEEQECFDLYTGAKIEVDRLISDDTYTQIDHILPFSRTGENSRNNKVLVLAKSNQDKRGQTPYEWMSHDGAPSWDAFERRVQENQKLSRRKKNFLLEKNLDAKEGEFLARSFTDTAYMSREVCAYLADCLLFPDDGAKAHVVPTTGRATAWLRRRWGLNFGSNGEKDRSDDRHHATDACVIAACSRSLVIKTARINQETHWSITRGMNETQRHDAIMKALESVMPWETFANEVRAAHDFVVPTRFVPRKGKGELFEQTVYRYAGVNAQGKDIAHKASSDKDIVMGNAVVSDDEKSIIKVSEMLCLRLWHDPEAKKGQGAWYADPVYKADIPALKDGTYMPRIAKAHTGRKAWKPVPESAMTKPPLEIYLGDLVQIGDFIGRFSGYNIANANWSFVDRLTKEALGCPTVVKLDNKLAPVIIRESIIMRH

SEQ ID NO: 696 - protein, 1005 aa, unidentified; identical to SEQ ID NO: 688
  REGION 1..1005: note = Description of Unknown: uncultivated organism with predicted taxonomy: Coriobacteriales
  REGION 1..1005: note = MG14-20 effector

SEQ ID NO: 697 - protein, 1000 aa, unidentified
  REGION 1..1000: note = Description of Unknown: uncultivated organism with predicted taxonomy: Olsenella sp. KH3B4
  REGION 1..1000: note = MG14-21 effector
MDVTRPYLVLGLDPGIASCGFCLLDMSNHKILEMGSHLFKAPQEDKTKTSLAVTRRKARSIRRNTARTAARLKHCLELLAGAGLVPADADKTWLQTKKGDKPILKLRAGGLDRLLTDREFAQVLYSLCGRRGYIPHGEGRLGETDEDESRKVLGAIKKNQDAMAAGSYRTVGEMLNTQGRSRNRGGDYSLCVYNSQIQDEAKALFASQRARGNTKATRELEDSYLACLTWEKKSLDHDARIYELVGPCSYFPGEKRAASADVSSELCRAYERLGHIVIVHEDGSEQALTASQIDGYLKILFSTAPIKGNKECKVSYGTIRKDLDISGKSVFKGVAQDKEKDETFAPKAWRCLRRVLPEELLARMFEDRQLGDAVCEALTFASSEASLIERLSDLGLSDDERDAILAVPFTGKLFKGYGSRSLKALGLLLGAFEEPEIRILTDAEKVTGLLDLRLSDRGVRGQLLPPYDSYDPTCRNPVVLRAMGRMRHIVNAIIRIHGVPDEIHIELGRELKMSNKEKSLVDKRNRENAANNKKWAATAAGILGCTPEEVPGRIIRKLILREEQGEKDLYTGEPIDLEHLVRDDRYCEIDHILPYSRTCDDGRANKVLVLSKSNQDKRERTPYEWMTSGEAGAPSWDSYRARVMAQVKNPRKRANYLNTDLGPETQAKFLARNLNDDRYMSVAVKNYLEDCLLFPEDGRKRHVTAVAGGATGNLRWVWGLNFGEGNIKDRADDRHHAIDAAIIAACSESTVKKVAEASAKGREAFKQLRKSRLADTQPWPTFATEVAARREFVVPTRMADHGVTGRVFEDTLYHLEGITDDKGKYPLVRAGEKTAKKGNVHFNPDGSVKLIDGMAFLRLWLDPTARPNGKVKGKWHAEPVYYADIPAIKAGTYVPRAIVQGIARINWEPIPQTALESKPLVLFKNDVLVVDGHIARYSNIGISVCQLLMLNLLTRDRVTDWPSVGSWGKDTQVRILQEDCLGHCYDSIAINPEDSTFQQR

SEQ ID NO: 698 - protein, 1005 aa, unidentified; identical to SEQ ID NO: 693
  REGION 1..1005: note = Description of Unknown: uncultivated organism with predicted taxonomy: Collinsella
  REGION 1..1005: note = MG14-22 effector

SEQ ID NO: 699 - protein, 1005 aa, unidentified; identical to SEQ ID NO: 688
  REGION 1..1005: note = Description of Unknown: uncultivated organism with predicted taxonomy: Collinsella
  REGION 1..1005: note = MG14-23 effector

SEQ ID NO: 700 - protein, 1003 aa, unidentified
  REGION 1..1003: note = Description of Unknown: uncultivated organism with predicted taxonomy: Collinsella
  REGION 1..1003: note = MG14-24 effector
MTSTVNREIGKLGLPRHLVLGMDPGIASCGFALIDINNHEILEIGVRLFDSPTHPKTGQSLAVIRRGFRSTRRNIDRTQARLKHCLEVLEKYDVIPQDATKEFFHTTKGDKQPLKLRVEGLDRLLTNREWALVLYSLCKRRGYIPHGEGSQDKSSEGGKVLSALAANKEAFAETSCRTVGEWLAQQPQSRNRGGNYDKCVTHAQLIEETRVLFEAQRNFGSQYASAELEEAYVQVCDWERSRKDFDRRSYDLVGYCTYFPTEKRAARCTLTSELVAAYGALGNITIVHEDGTTRTLTAAERDKCIAILFSCEPIRGNKDCAVKFGALRRELDLNSGDYFKGVPAADEKTREVYKPKGWRALRNTLNTTSPFLLRRLYDDRDLADSVMEAVAYSSALPVLEEQLQALPLSPAEIDALCKLPYSSKALNGYGNRSKKALDMLLDCLEDSEVLGLTQAEDDCGLLGLRIQGSQLERSERLMPYEMWVELTGRTNNNPVVIRSMSQMRKVVNAICRKWGVPNEIHIELDRELRLPQRAKDDIAKAHKKNEKNRERIAGQIAELRGCNPEDVSGRLIEKYRLWEEQECFDLYTGAKIEVDRLISDETYTQIDHILPFSRTGENSPSNKVLVLAKSNQDKREQTPFEWMSKEGAPSWDAFKRRVEENQKLGRRKKNFLLEEDLEAKEGEFLTRSFTDTAYMSREVCAYLADCLLFPEDGTKSHVVPTTGRATAWLRRRWGLNFGTNGEKDRSDDRHHATDACVIAACSRSLVIKTAKISEQTHWTVTKNLDKDERDHLRMKALENVMPWETFANEVRASHDFVIPTRFVPRKGKGELFEQTTYRYAGVNDKGKDLARKANSDQDIVMGNAVVSDDGKSVIKVSEMLCLRLWHDPEAKKGQGCWYADPVYKADIPALKAGTYVPKIAKAHTGRKAWKPVPESAMKHAPLEIYLGDLVKIGDFIGRFSGYNIDNANWSFTDRLTRQKLSCPTVGKLNNALIPVIIRESSIR

SEQ ID NO: 701 - protein, 1002 aa, unidentified
  REGION 1..1002: note = Description of Unknown: uncultivated organism with predicted taxonomy: Olsenella
  REGION 1..1002: note = MG14-25 effector
MDVTRPYLVLGLDPGIASCGFCLLDMSNHKILEMGSHLFKAPQEDKTKTSLAVTRRKARSIRRNTARTAARLKHCLELLAGAGLVPADADKTWLQTKKGDKPILKLRAGGLDRLLTDREFAQVLYSLCGRRGYIPHGEGRLGETDEDESRKVLGAIKKNQDAMAAGSYRTVGEMLNTQGRSRNRGGDYSLCVYNSQIQDEAKALFASQRARGNTKATRELEDSYLACLTWEKKSLDHDARIYELVGPCSYFPGEKRAASADVSSELCRAYERLGHIVIVHEDGSEQALTASQIDGYLKILFSTAPIKGNKECKVSYGTIRKDLDISGKSVFKGVAQDKEKDETFAPKAWRCLRRVLPEELLARMFEDRQLGDAICEALTFASSEASLVERLSDLDLSGDERDAILTVPFTGKLFKGYGSRSLKALGLLLGAFEEPEIRILTDAEKVTGLLDLRLSDRGVRGQLLPPYDSYDPTCRNPVVLRAMGRMRHIVNAIIRIHGVPDEIHIELGRELKMSNKEKSLVDKRNRENAANNKKWAATAAGILGCTPEEVPGRIIRKLILREEQGEKDLYTGEPIDLEHLVRDDRYCEIDHILPYSRTCDDGRANKVLVLSKSNQDKRERTPYEWMTSGETSAPSWDSYRARVMAQVKNPRKRANYLNTDLGPETQAKFLARNLNDDRYMSVAVKNYLEDCLLFPEDGRKRHVTAVAGGATGNLRWVWGLNFGEGNVKDRADDRHHAIDAAIIAACSESTVKKIAEASSKGREAFKKQRESRLADTQPWPTFADEVKARRAFVVPTRMADHGVTGRVFEDTLYHLEGITADKGKYPLVRAGEKTVKKGNVRINSDGSVKLIDGMAFLRLWLDPTARPNGKVKGKWYAEPVYYADIPAIKAGTYVPRACTIHVARVNWEPVPESAMASEPVVVFFGDVLVVDDKIGRYWSMGITNCAMEIRSLLNGSNLASGFPGTLNGWGKDTQVRVLQEDCLGHCYDGISINPEDSTFQQR

SEQ ID NO: 702 - protein, 1005 aa, unidentified
  REGION 1..1005: note = Description of Unknown: uncultivated organism with predicted taxonomy: Coriobacteriia
  REGION 1..1005: note = MG14-26 effector
MEITINREIGKLGLPRHLVLGMDPGIASCGFALIDTANHEILDLGVRLFDSPTHPKTGQSLAVIRRGFRSTRRNIDRTQARLKHCLQVLKAYGLIPQDATKEYFHTTKGDKQPLKLRVDGLERLLNDREWALVLYSLCKRRGYIPHGEGNQDKSSEGGKVLSALAANKEAIAGTSCRTVGEWLAQQPQSRNRGGNYDKCVTHAQLIEETHILFTAQRSFGSKYASPEFEAAYIEVCDWERSRKDFDRRTYDLVGHCSYFPTEKRAARCTLTSELVAAYGALGNITIIHEDGTSRALSATERDECIAILFSCEPIRGNKDCAVKFGALRKALDLSSGDYFKGVPAADEKTREVYKPKGWRTLRNTLDTANPILLQRLRDDRDLADAVMEAVAYSSALPVLQERLQELPLSEAEIEALCKLPYSSKALNGYGNRSKKALDMLLDCLEEPEVLNLTQAENDCGLLGLRIAGAQLERSNRLMPYELWVERTGRTNNNPVVIRSMSQMRKVVNAICRKWGVPNEIHVELDRELRLPQRAKDEIAKANKKNEKNRERIAGQIAELRGCTTEEVTGKQIEKYRLWEEQECFDLYTGAKIEVDRLISDDTYTQIDHILPFSRTGENSRNNKVLVLAKSNQDKRGQTPYEWMSHDGAPSWDAFERRVQENQKLSRRKKNFLLEKDLDAKEGEFLARSFTDTAYMSREVCAYLADCLLFPDDGAKAHVVPTTGRATAWLRRRWGLNFGSNGEKDRSDDRHHATDACVIAACSRSLVIKTARINQETHWSITRGMNETQRHDAIMKALESVMPWETFANEVRAAHDFVVPTRFVPRKGKGELFEQTVYRYAGVNAQGKDIARKASSDKDIVMGNAVVSDDEKSIIKLSEMLCLRLWHDPEAKKGQGAWYADPVYKADIPALKDGTYVPRIARAAIGRKAWKLVPKSAMTKPPLEIYLGDLVQIGNLFGRFSGYNIANGSWSFIDRLTKEALSCPSVAKLNNNLFPTIIRESIIMRK

SEQ ID NO: 703 - protein, 1005 aa, unidentified; identical to SEQ ID NO: 693
  REGION 1..1005: note = Description of Unknown: uncultivated organism with predicted taxonomy: Collinsella
  REGION 1..1005: note = MG14-27 effector

SEQ ID NO: 704 - protein, 1009 aa, unidentified
  REGION 1..1009: note = Description of Unknown: uncultivated organism with predicted taxonomy: Collinsella
  REGION 1..1009: note = MG14-28 effector
MAAFEDPRGHGFDPDLVRTALMSREQFSSKHRKLILGIDMGIADVGVCLMDELNHEIILMAAHLFDCPWNPKTKTSLASARRQARSQRRNIARRAARKKHIREILMAHDVIPEGATAEWFSVRKGDQDNIQLRVKGLSEVLDSRELARVLYGFAGRRGYIDHGKADNDKDAGKVKKALKTNAEIMEANGYETFAQYLITQPKIRNRQDDYTHCVDLDMVVDEVHAIFRHQRELGSNLATESLEGEYLAALRWLTDTTKRDRIIYSKVGYCTYLGEPIKRAPKSSISSEMVRAYQTLANVKIEHIGGPATQIAPAVRNQIVHELFKVSKKPKPLKWSQLRKKLDLDDTATFAGIRQSDEKKDICVKAPGWNTLCSTLHDLNPTLLNRLHDDIDLADAACAAATFASSSESFATRISELTDELSKEDVEALLELPYGSKLFTGYGSTSLKALQMLRDAFEDTSINRLHDAEVATGLYDARKALAAKHNVPDDGLLKPYSSYSPICTNPVVLRSCAQLRRIINSIIRHYGLPDTIRVEVAKELKHTKHEKKLVDDGNKYNKREKEKAADDIVEYLGLSSADQVRGRDIDKVRLYNEQGGKDLYTGQGIDFGRMLTEKGYVEIDHILPYSRSCDNSRTNKVLVLTKSNRDKANRTPYEWMTSGEPTAPNWDEFCIRMDVWASGKEPKHYYSSKLAKLKEDNFTNNIDSFISRNLNDTRYMSKDVAKWLTDCLPFPEDGRKHVFCVSGVATALMRGIWRIGILDDDGKKNREDDRHHAVDAAVIAACTPSIVRGIALISEEHATHRDADRLLNRSLPYPEYRDQVKAWIPCIVPTYSPNRTATGALFEENTYSYRGVNEKGKDLIKKKKGKLGPCTTAWKDGKGSAKAYDKQYSLLAVYDESTLRWLIDPLYYIDVQKRKHEEPFMRKFSKNLSIDYWEKIPLTGTERALFLKPGVVLTQDGLVGRLHSYDISDNKVRMYYARGETSFQKTGPLAGEKFPTFSKWTDNLKVMQE

SEQ ID NO: 705 - protein, 1005 aa, unidentified
  REGION 1..1005: note = Description of Unknown: uncultivated organism with predicted taxonomy: Coriobacteriales
  REGION 1..1005: note = MG14-29 effector
MEITINREIGKLGLPRHLVLGMDPGIASCGFALIDTANHEILDLGVRLFDSPTHPKTGQSLAVIRRGFRSTRRNIDRTQARLKHCLQVLKAYGLIPQDATKEYFHTTKGDKQPLKLRVDGLERLLNDREWALVLYSLCKRRGYIPHGEGNQDKSSEGGKVLSALAANKEAIAGTSCRTVGEWLAQQPQSRNRDGNYDKCVTHAQLIEETHILFTAQRSFGSKYASPEFEAAYIEVCDWERSRKDFDRRTYDLVGHCSYFPTEKRAAHCTLTSELVAAYGALGNITIIHEDGTSRALSATERDECIAILFSCEPIRGNKDCAVKFGALRKALDLSSGDYFKGVPAADEKTREVYKPKGWRTLRNTLDTANPILLQRLRDDRDLADAVMEAVAYSSALPVLQERLQELPLSEAEIEALCKLPYSSKALNGYGNRSKKALDMLLDCLEEPEVLNLTQAENDCGLLGLRIAGAQLERSNRLMPYELWVERTGRTNNNPVVIRSMSQMRKVVNAICRKWGVPNEIHVELDRELRLPQRAKDEIAKANKKNEKNRERIAGQIAELRGCTTEEVTGKQIEKYRLWEEQECFDLYTGAKIEVDRLISDDTYTQIDHILPFSRTGENSRNNKVLVLAKSNQDKRGQTPYEWMSHDGAPSWDAFERRVQENQKLSRRKKNFLLEKDLDAKEGEFLARSFTDTAYMSREVCAYLADCLLFPDDGAKAHVVPTTGRATAWLRRRWGLNFGSNGEKDRSDDRHHATDACVIAACSRSLVIKTARINQETHWSITRGMNETQRHDAIMKALESVMPWETFANEVRAAHDFVVPTRFVPRKGKGELFEQTVYRYAGVNAQGKDIARKASSDKDIVMGNAVVSDDEKSIIKVSEMLCLRLWHDPEAKKGQGAWYADPVYKADIPALKDGTYMPRIAKAHTGRKAWKPVPESAMTKPPLEIYLGDLVQIGDFIGRFSGYNIANANWSFVDRLTKEALGCPTVVKLDNKLAPVIIRESIIMRH

SEQ ID NO: 706 - protein, 1005 aa, unidentified; identical to SEQ ID NO: 695
  REGION 1..1005: note = Description of Unknown: uncultivated organism with predicted taxonomy: Collinsella
  REGION 1..1005: note = MG14-30 effector

SEQ ID NO: 707 - protein, 1001 aa, unidentified
  REGION 1..1001: note = Description of Unknown: uncultivated organism with predicted taxonomy: Coriobacteriia bacterium
  REGION 1..1001: note = MG14-31 effector
MVSPKTTFSERESNYLVLGLDIGIGSCGWCILDKAHNIIVDMGVRLWSPPQENKTKASLASTRRAARSSRRNCKRTKDRKKHCFKLFKAEGIAPSDAEANWVQTKAGEKPTIKLRAAGLNRKLSSREWAQVLYSLCSRRGYIPHGESDDDSEGKAVLAAIKTQQEKLDNNEFRTVGELLANGTHCRNHSGDYSLCVSNNQIRNEVAALFEAQRKLGNKHASETFEQQYLECLTWQKSVTDHDEIIYSKVGPCTYFKQEKRAADSCLSSEMCKAFESICHVTYVDSDGVEGKLPPDIKQRAIDVWFSPTSLPKNKDCKVEYSDLRSWLKAELCIGDDFFFKGVERDDENSKEPFKPSRWRNQRKQLSPSLMLSMRNNRRLADGIDSALAYASSKESLQHQLDELPLSEVDIEELCSLSYSSRLYSGYGTRSLKALDLLIESFESDEVSTLAEAEKASGLLSLRQSSSTEKGFTLPPYIAFDPTCTNPVVLRVMGQVRKVINACIAEYGPFDEVHIELARELKQSAKEKDAILKSNNKTNKSREVLRKKLAEELSCDEDAIPFKLLEKIELWNQQDGRDLYVDEPIQYERLISDDSYCEIDHILPYSRTCDDSRMNKILVLQKSNQNKRESTPFEWMSATGDWDNFKLRILRLAHYPQKKKQRLLNTDLAEKQPEFIARNLNDTRYASLAAKRYIEEYLTFKDNGKSRHVIAVAGGATAALRNAWGIRKDRSEDNLHHAVDASIIAACDESTVIAIAKASERKALTPKDKRKELFSRTEPWQDFANEVLSRKEHIIPSFMTDHKVSGRIFEDTVYRFDGYNEAGTKGILTATKEGMPKSKPSGNYIVRDDGSAVIPDGLAFLRLWWDPTFKVRKGKEPGCYIPEPVFLSDLPKAFDCDYIPLIAPPQKDKKPREKWDSLSEELRNQKPVVLFRNDAIVIGSTVRRFAGFDIDGCSWTLLDPLGKMSQKEATKGLRISSIGPKTRFSVIHEDPLGKCFAPFLED

SEQ ID NO: 708 - protein, 839 aa, unidentified
  REGION 1..839: note = Description of Unknown: uncultivated organism with predicted taxonomy: Olsenella sp. KH3B4
  REGION 1..839: note = MG14-32 effector
MDVTRPYLVLGLDPGIASCGFCLLDMSNHKILEMGSHLFKAPQEDKTKTSLAVTRRKARSIRRNTARTAARLKHCLELLAGAGLVPANADKTWLQTKKGDKPILKLRAGGLDRLLTDREFAQVLYSLCGRRGYIPHGEGRLGETDEDESRKVLGAIKKNQDAMAAGSYRTVGEMLNAQGRSRNRGGDYSLCVYNSQIQDEAKALFASQRARGNTKATRELEDSYLACLTWEKKSLDHDTRVYELVGPCSYFPGEKRAASADVSSELCRAYERLGHIVIVHEDGSEQALTASEIDDYLKILFSTAPIKGNKECKVSYGTIRKDLDISGKSVFKGIAQDREKDEPFVPKAWRSLRRVLPKGLLARMLEDRKLGDAVCEALTFASSEASLIERLSDLGLSDDERDAILAVPFTGKLFKGYGSRSLKALGLLLGAFEEPEIRILTDAEKVTGLLNLRLSDRGVRGQLLPPYDSYDPPCRNPVVLRAMGRMRHIVNAIIRIHGVPDEIHIELGRDLKMSNKEKKQVEKRNRENAANNKKWATTAAGILGCTPEEVPGRIIRKLILREEQGEKDLYTGDSIDLEHLVRDDRYCEIDHILPYSRTCDDSRANKVLVLSKSNQDKRERTPYEWMTSGETSAPSWDSYRARVMAQVKNPRKRANYLNTDLGPETQAKFLARNLNDDRYMSVAVKNYLEDCLLFPEDGRKRHVTAVAGGATGNLRWVWGLNFGEGNVKDRADDRHHAIDAAIIAACSESTVKKVAEASTKGREAFKQLRKSRLADTQPWPTFATEVAARREFVVPTRMADHGVTGRVFEDTLYHLEGITEDKGKYPLVRAGENTVKKGN

SEQ ID NO: 709 - protein, 1005 aa, unidentified; identical to SEQ ID NO: 693
  REGION 1..1005: note = Description of Unknown: uncultivated organism with predicted taxonomy: Collinsella
  REGION 1..1005: note = MG14-33 effector

SEQ ID NO: 710 - protein, 1000 aa, unidentified
  REGION 1..1000: note = Description of Unknown: uncultivated organism with predicted taxonomy: Olsenella
  REGION 1..1000: note = MG14-34 effector
MDVTRPYLVLGLDPGIASCGFCLLDMSNHKILEMGSHLFKAPQEDKTKTSLAVTRRKARSIRRNTARTAARLKHCLELLAGAGLVPANADKTWLQTKKGDKPILKLRAGGLDRLLTDREFAQVLYSLCGRRGYIPHGEGRLGETDEDESRKVLGAIKKNQDAMAAGSYRTVGEMLNAQGRSRNRGGDYSLCVYNSQIQDEAKALFASQRARGNTKATRELEDSYLACLTWEKKSLDHDTRVYELVGPCSYFPGEKRAASADVSSELCRAYERLGHIVIVHEDGSEQALTASEIDDYLKILFSTAPIKGNKECKVSYGTIRKDLDISGKSVFKGIAQDREKDEPFVPKAWRSLRRVLPKGLLARMLEDRKLGDAVCEALTFASSEASLIERLSDLGLSDDERDAILAVPFTGKLFKGYGSRSLKALGLLLGAFEEPEIRILTDAEKVTGLLNLRLSDRGVRGQLLPPYDSYDPTCRNPVVLRAMGRMRHIVNAIIRIHGVPDEIHIELGRDLKMSNKEKKQVEKRNRENAASNKKWATTAAGILGCTPEEVPGRIIRKLILREEQGEKDLYTGDSIDLEHLVRDDRYCEIGHILPYSRTCDDSRANKVLVLSKSNQDKRERTPYEWMTSGETSAPSWDSYRARVMAQVKNPRKRANYLNTDLGPETQAKFLARNLNDDRYMSVAVKNYLEDCLLFPEDGRKRHVTAVAGGATGNLRWVWGLNFGEGNIKDRADDRHHAIDAAIIAACSESTVKKVAEASAKGREAFKQLRKSRLADTQPWPTFATEVAARREFVVPTRMADHGVTGRVFEDTLYHLEGITDDKGKYPLVRAGEKTAKKGNVHFNPDGSVKLIDGMAFLRLWLDPTARPNGKVKGKWYAEPVYYADIPAIKAGTYVPRAIVQGIARINWEPIPQTALESKPLVLFKNDVLVVDGHIARYSNIGISVCQLLMLNLLTRDRVTDWPSVGSWGKDTQVRILQEDCLGHCYDSIAINPEDSTFQQR

SEQ ID NO: 711 - protein, 1002 aa, unidentified
  REGION 1..1002: note = Description of Unknown: uncultivated organism with predicted taxonomy: Olsenella sp. KH3B4
  REGION 1..1002: note = MG14-35 effector
MERNRPYLVLGLDPGIGSCGFCLLDMTNHRILEMGSHLFDVPQEPKTKTSLAVTRRNARSIRRNTLRTRMRLKHCLGLLKDAGLVPQDADKNWLQSTKGDKPILKLRSCGLDRLLTDRELAQVLYSLCTRRGYIPHGEGRFGETDDVEGRKVLAAIKTNNKAMESGNYRTVGEMLHARGKSRNRGGNYDFCVLNSQIQDEVRTIFSAQRTLGNDRASTEFEEKYLDCLTWEKKTLDHDKRTYDLVGKCSYFPEERRAALACLSSELCRAYERLGHLVIVHEDNSEQVLTAQQIDVYLKVLFSPAPLKGNKDCKVTYSAIRRDLDLSGKSVFKGVSQEKEKDEVFAPKSWRRLRKTLPEDLMVRMRNNRELADDICEALTYASSEDSLLTQLEPLDLSENETEAVLGVPFSGKFFKGYGSRSRKALGILLGAFEEPEVRTLTDAEKATGLLDHRLANDTVRSVLLPPYVTYDETCRNPVVLRAMGRMRHVVNAIIRIHGVPDEIHIELGRDLKMSKREKDAVSKRQRQNEATNKKWAKTAAGILGCEPEEVPGKVIRKLAMREEQGEKDAYTNAPIDLERLVREDHYCEIDHILPYSRTSEDSRANKVLVLSKSNQDKRERTPYEWMTQDVGKPGVPNWDEYHARVVATVKHPRKRANLLNTDLGPETEAKFLARNLNDDRYMSVAVKNYLEDCLLFPDSDRKRHVTAIAGGATGNLRWVWGLNSGSNNTKDRSDDRHHAVDAAVIAACSEATVQKVARARSLGRETFKHMRKSRLADTQPWPTFADEVIARKEFVIPTRMADHGVTGRVFEDTLYHLEGFTDDKGKYPLVRAGQKTVKKGNVCISPDGSAKLIDGIAFVRLWLDPTARPNGKVKGKWYVEPVYYADIPAIRRGAYVPKACTIHVARTSWEPVPETALASRPITLYSGDVLRVDDHIGRYSSTDINGCRLVMLNLDSGNRVNDWPSIGSWGTTTQVQVLQEDCLGRCYGNVILHSDGSTFETR

SEQ ID NO: 712 - protein, 1003 aa, unidentified
  REGION 1..1003: note = Description of Unknown: uncultivated organism with predicted taxonomy: Coriobacteriales
  REGION 1..1003: note = MG14-36 effector
MEITINREIGKLGLPRHLVLGMDPGIASCGFALIDTANHEILDLGVRLFDSPTHPKTGQSLAVIRRGFRSTRRNIDRTQARLKHCLQILKAYGLIPQDATKEYFHTTKGDKQPLKLRVDGLDRLLNDREWALVLYSLCKRRGYIPHGEGNQDKSSEGGKVLSALAANKEAIAETSCRTVGEWLAQQPQSRNRGGNYDKCVTHAQLIEETHILFDAQRSFGSKYASPEFEAAYIEVCDWERSRKDFDRRTYDLVGHCSYFPTEKRAARCTLTSELVSAYGALGNITIIHENGTSRALSATERDECIAILFSCEPIRGNKDCAVKFGALRKALDLSSGDYFKGVPAADEKTREVYKPKGWRVLRNTLNAANPILLQRLRDDRNLADAVMEAVAYSSALPVLQEQLQGLPLSEAEIEALCRLPYSSKALNGYGNRSKKALDMLLDCLEEPEVLNLTQAENDCGLLGLRIAGAQLERSDRLMPYETWIERTGRTNNNPVVIRAMSQMRKVVNAICRKWGVPNEIHVELDRELRLPQRAKDEIAKANKKNEKNRERIAGQIAELRGCTADEVTGKQIEKYRLWEEQECFDLYTGAKIEVDRLISDDTYTQIDHILPFSRTGENSRNNKVLVLAKSNQDKREQTPYEWMSHDGAPSWDAFERRVQENQKLSRRKKNFLLEKDLDTKEGEFLARSFTDTAYMSREVCAYLADCLLFPDDGAKAHVVPTTGRATAWLRRRWGLNFGSNGEKDRSDDRHHATDACVIAACSRSLVIKTARINQETHWSITRGMNETQRRDAIMKALESVMPWETFANEVRAAHDFVVPTRFVPRKGKGELFEQTVYRYAGVNAQGKDLARKASSDKNIVMGNAVVSADEKSVIKVSEMLCLRLWHDPEAKKGQGAWYADPVYKADIPALKDGTYVPRIAKAHTGRKAWKPVPESAMKKPPLEIYLGDLVQIGDFVGRFSGYNIDNANWSFVDRLTRIKISCPTVGKLSNDMSPFVVRESPIK

SEQ ID NO: 713 - protein, 1038 aa, unidentified
  REGION 1..1038: note = Description of Unknown: uncultivated organism with predicted taxonomy: Coprococcus comes
  REGION 1..1038: note = MG14-37 effector
MVEYSDPRDFGFRPETVMTALMPYEQYSSKTRRLILGIDMGIASVGVCLIDIRNHEIILMASHIFKAPVEGKQKDISARQSGASIRRDYRSVRRTTKRRKNRKKAVREIEKKYILIPDDADGQWFAIRKGEPDVLHLRGKALLYKLNGRELARILYAFAGRRGYIDHGKGATDNDSGKVKKALSENRKILDENGYETIAQYLLKQPTSRNREGDYRYMVDIEMVTDEVHTIFRHQRDLGSDIATEGLEGEYLSALRWLTDTSARDEKIYSRVGYCTYLGAPEKRAASSLISFEMVRAYEKLSNIKIEHQGREATYISPEKRNEIVESLFAVSKNPKPLKWSQLREKLGMQSSDSFDSRLPTDEKSDCIKIPAWNALCTGLFTSNRALLDRLHDDTDIADAVCSALTYASSGESLRNALENLSLDLSEQDIDSLLDLPYASKLFSGYCSTGVRALQMLRDAFKDPQIEKLYDAEMATGLYEARQALAAERNESKDGLLCPYLEFDPTCTNPVVLRATAQVRRMINSIIRHYGLPDIIRVEVAKDLKRSKHEKAIIAATNKANKDSNEQAKKDLVAFYGLPNDAHVSSADFEKMWLYREQFGQDPYTGKGINLERMLNERDYVEIDHILPFSRSCDDSKSNKVLCLTKSNRDKANRTPYEWMTSGEPSAPDFGDFCRRMDAWAGKGKSAHYTKSKLSKLKNSTFGKEEQKFIDRNLNDTRYMSRQLAMWVRECLPFPDDRRQHVFCVAGAATSLMRRIWGIGIVDEKGKKDRSDDRHHAVDAAVIACCSPEIVKGIARVNSGRSNIKERERLRYESMPYPEFKAQVEAWIPCIVPTRTVSRTATGSLLKDTVYPYVGVDDRGKDLYRRNGKIEPASTLWKDGEGGCKLYDGVYGLAGVFDRTLKKSGSWRFDPIYYIDVPNVRQDFIRDFSKALSIDYWPKVQLKGNEPRIFLKQGDVLLQDGCAMRYYMYDVSYGGVKSYSRIGKESISLQKTGPLAEEPFPKQMKWDSSLTVMQEDCLGLCWLRFLSDRADQFENSPV

SEQ ID NO: 714 - protein, 1003 aa, unidentified
  REGION 1..1003: note = Description of Unknown: uncultivated organism with predicted taxonomy: Coriobacteriia bacterium
  REGION 1..1003: note = MG14-38 effector
MEITINREIGKLGLPRHLVLGMDPGIASCGFALIDTANHEILDLGVRLFDSPTHPKTGQSLAVIRRSFRSTRRNIDRTQARLKHCLQVFKAYGLIPQDATKEYFHTTKGDRQPLKLRVDGLDRPLSAREWALVLYSLCKRRGYIPHGEGNQDKSSEGRKVLSALAANKEAIAETSCRTVGEWLAQQPQSRNRGGNYDKCVTHAQLIEETHILFDAQRSFGSKYASPEFEAAYIEVCDWERSRKDFDRRTYDLVGHCPYFPTEKRAARCTLTSELVSAYGALGNITIIHENGTSRALNATERDECIAILFSCEPIRGNKDCAVKFGALRKALDLSSGDYFKGVPAADEKTREVYKPKGWRVLRNTLNAANPILLQRLRDDRDLADAVMEAVAYSSALPVLQERLQGLPLSEAEIEALCRLPYSSKALNGYGNRSKKALDMLLDCLEEPEVLNLTQAENDCGLLGLRIAGAQLERSDRLMPYETWVELTGRTNNNPVVIRSMSQMRKVVNAICRKWGVPNEIHVELDRELRLPQRAKDEIAKANKKNEKNRERIARQIAELRGCTADEVTGKQIEKYRLWEEQECFDLYTGAKIEVDRLISDDTYTQIDHILPFSRTGENSRSNKVLVLAKSNQDKREQTPYEWMSHDGAPSWDAFERRVQENQKLSRRKKNFLLEKDLDTKEGEFLARSFTDTAYMSREVCAYLADCLLFPDDGAKAHVVPTTGRATAWLRRRWGLNFGSNGEKDRSDDRHHATDACVIAACSRRLVIKTARINQEMHWSMTKGMSKAQRQDAIMKALENVMPWETFANEVRVAHDFVVPTRFVPRKGKGELFEQTVYRYAGVNAQGKDIARKASSDKDIVMGNAVVSADEKSVIKVSEMLCLRLWHDPKAKKGQGAWYADPVYKADIPALKDGTYVPRIAKAHTGRKAWKPVPESAMKKPPLEIYLGDLVQIGDFVGRFSGYNIDNANWSFVDRLTRIKTSCPTVGKLSNDMSPFVVRESPIK

SEQ ID NO: 715 - protein, 1002 aa, unidentified
  REGION 1..1002: note = Description of Unknown: uncultivated organism with predicted taxonomy: Collinsella
  REGION 1..1002: note = MG14-39 effector
MEITINREIGKLGLPRHLVLGMDPGIASCGFALIDTANHEILDLGVRLFDSPTHPKTGQSLAVIRRGFRSTRRNIDRTQARLKHCLQILKAYGLIPQDATKEYFHTTKGDKQPLKLRVDGLDRLLNDREWALVLYSLCKRRGYIPHGEGSQDKSSEGGKVLSALAANKEAIAETSCRTVGEWLAQQPQSRNRGGNYDKCVTHAQLIEETHILFDAQRSFGSKYASPEFEAAYIEVCDWERSRKDFDRRTYDLVGHCSYFPTEKRAARCTLTSELVSAYGALGNITIIHENGTSRALSATERDECIAILFSCEPIRGNKDCAVKFGALRKALDLSSGDYFKGVPAADEKTREVYKPKGWRVLRNTLNAANPILLQRLRDDRNLADAVMEAVAYSSALPVLQEQLQGLPLSEAEIEALCRLPYSSKALNGYGNRSKKALDMLLDCLEEPEVLNLTQAENDCGLLGLRIAGAQLERSDRLMPYETWIERTGRTNNNPVVIRAMSQMRKVVNAICRKWGVPNEIHVELDRELRLPQRAKDEIAKANKKNEKNRERIAGQIAELRGCTADEVTGKQIEKYRLWEEQECFDLYTGAKIEVDRLISDDTYTQIDHILPFSRTGENSRNNKVLVLAKSNQDKREQTPYEWMSHDGAPSWDAFERRVQENQKLSRRKKNFLLEKDLDTKEGEFLARSFTDTAYMSREVCAYLADCLLFPDDGAKAHVVPTTGRATAWLRRRWGLNFGSNGEKDRSDDRHHATDACVIAACSRSLVIKTARINQETHWSITRGMNETQRRDAIMKALESVMPWETFANEVRAAHDFVVPTRFVPRKGKGELFEQTVYRYAGVNAQGKDIARKASSDKDIVMGNAVVSADEKSVIKVSEMLCLRLWHDPEAKKGQGAWYADPVYKADIPALKDGTYVPRIAKAATGRKAWKAIPQNVLNSAPLEIYLGDLVQIGNQKGRFRGINIDTVSWSFVDALSKLPVKMPTIGRLNNETIPTVIRELLI

SEQ ID NO: 716 - protein, 1038 aa, unidentified
  REGION 1..1038: note = Description of Unknown: uncultivated organism
  REGION 1..1038: note = MG14-40 effector
MVEYSDPRDFGFRPETVMTALMPYEQYSSKTRRLILGIDMGIASVGVCLIDIRNHEIILMASHIFKAPVEGKQKDISARQSGASIRRGYRSVRRTTKRRKNRKKAVRDIEKKYVLIPDDADGQWFAIRKGEPDVLHLRGKALLYKLNGRELARILYAFAGRRGYIDHGKGTTDDDSGKVKKALSENRKILDENGYETIAQYLLKQPTSRNREGDYRYMVDIEMVTDEVHTIFRHQRDLGSDIATEELEGEYLSALRWLTDTSARDKKIYSRVGYCTYLGAPEKRAASSLISFEMVRAYEKLSNIKIEHQGREATYISPEKRNEIVESLFAVSKNPKPLKWSQLREKLGMQSSDSFDSRLPTDEKGDCIKIPAWNALCRGLFTSNRALLDWLHDDTDIADAVCSALTYASSGESLRNALENLSLDLSEQDIDSLLDLPYASKLFSGYCNTGVRALQMLRDAFKDPQIEKLYDAEMATGLYEARQALAAERNESKDGLLCPYLEFDPTCTNPVVLRATAQVRRMINSIIRHYGMPDIIRVEVAKDLKRSKHEKAIIAATNKANKDSNEQVKKDLVAFYGLPNDAHVSSTDFEKMWLYREQFGQDPYTGKGINLERMLNDRDYVEIDHILPFSRSCDDSKSNKVLCLTKSNRDKANRTPYEWMTSGEPSAPDFGDFCGRMDAWAGKGKSAHYTKSKLSKLKNSTFGKEEQKFIDRNLNDTRYMSRQLAMWVRECLPFPDDKRQHVFCVAGAATSLMRRIWGIGVVDEKGKTDRSDDRHHAVDGAVIACCSPEIVKGIARVNSGRSNIKERERLRYESMPYPEFKDQVEAWIPCIVPTRTVSRTATGSLLKDTVYPYVGVDDRGKDLYRRNGKIEPASTLWKDGSGGCKLYDGAYGLMAVFDESMKKSGSWRFDPIYYIDVPNVRQDFIREFTKGLSIDYWPKVQLKGDERRIFLKQGDVLLQDGCAMRYYMYNVSNGVVNSYSKIGEKSVPLQKTGPLSDESFPKQAKWDSSLTVMQEDCLGLCWLKFLSDRVGQFENSPV

SEQ ID NO: 717 - protein, 1003 aa, unidentified
  REGION 1..1003: note = Description of Unknown: uncultivated organism with predicted taxonomy: Collinsella
  REGION 1..1003: note = MG14-41 effector
MEITINREIGKLGLPRHLVLGMDPGIASCGFALIDTANHEILDLGVRLFDSPTHPKTGQSLAVIRRGFRSTRRNIDRTQARLKHCLQVFKAHGLIPQDATKEYFHTTKGDKQPLKLRVDGLDRLLSDREWALVLYSLCKRRGYIPHGEGNQDKSSEGGKVLSALAANKEAIAEASCRTVGEWLAQQPQSRNRGGNYDKCVTHAQLIEETHILFDAQRSFGSKYASPELEAAYIEVCDWERSRKDFDRRTYDLVGHCSYFPTEKRAARCTLTSELVSAYGALGNITIIHDDGTSRALSATERDECIAILFSCEPIRGNKDCAVKFGALRKALDLSSGDYFKGVPAADEKTREVYKPKGWRVLRNTLNAANPILLQRLRDDRDLADAVMEAVAYSSALPVLQERLQGLPLSEAEIEALCRLPYSSKALNGYGNRSKKALDMLLDCLEEPEVFNLTQAENDCGLLGLRIAGAQLERSDRLMPYELWAERTGRTNNNPVVIRSMSQMRKVVNAICRKWGVPNEIHVELDRELRLPQRAKDEIAKANKKNEKNRERIAGQIAELRGCTADEVTGKQIEKYRLWEEQECFDLYTGAKIEVDRLISDDTYTQIDHILPFSRTGENSRNNKVLVLAKSNQDKREQTPYEWMSHDGAPSWDAFERRVQENQKLSRRKKNFLLEKDLDAKEGDFLARSFTDTAYMSREVCAYLADCLQFPDDGAKAHVVPTTGRATAWLRRRWGLNFGSNGEKDRSDDRHHATDACVIAACSRSLVIKTARLNQETHWSITRGMNEIQRHDAIMKALESVMPWETFANEVRAAHDFVVPTRFVPRKGKGELFEQTVYRYAGVNAQGKDLARKAGSDKDIVMGNAVVSADEKSVIKVSEMLCLRLWHDPEAKKGQGAWYADPVYKADIPALKDGTYVPRIAKAHTGRKAWKPVPKSAMAKPPLEIYFDDLVQIGDFIGRFSGYNINSANWSFTDRLTRLNLSCPTVGQLNNDLSPVVIRESPIK

SEQ ID NO: 718 - protein, 1003 aa, unidentified
  REGION 1..1003: note = Description of Unknown: uncultivated organism with predicted taxonomy: Collinsella
  REGION 1..1003: note = MG14-42 effector
MEITINREIGKLGLPRHLVLGMDPGIASCGFALIDTANHEILDLGVRLFDSPTHPKTGQSLAVIRRGFRSTRRNIDRTQARLKHCLQVLKAYGLIPQDATKEYFHTTKGDKQPLKLRVDGLDRLLNDREWALVLYSLCKRRGYIPHGEGNQDKSSEGGKVLSALAANKEAIAETSCRTVGEWLAQQPQSRNRGGNYDKCVTHAQLIEETHILFDAQRSFGSKYASPEFEAAYIEVCDWERSRKDFDRRTYDLVGHCSYFPTEKRAARCTLTSELVSAYGALGNITIIHENGTSRALTATERDECIAILFSCEPIRGNKDCAVKFGALRKALDLSSGDYFKGVPAADEKTREVYKPKGWRVLRNTLNAANPILLQRLRDDRNLADAVMEAVAYSSALPVLQEQLQGLPLSEAEIEALCRLPYSSKALNGYGNRSKKALDMLLDCLEEPEVLNLTQAENDCGLLGLRIAGAQLERSDRLMPYETWIERTGRTNNNPVVIRAMSQMRKVVNAICRKWGVPNEIHVELDRELRLPQRAKDEIAKANKKNEKNRERIAGQIAELRGCTADEVTGKQIEKYRLWEEQECFDLYTGTKIEVDRLISDDTYTQIDHILPFSRTGENSRNNKVLVLAKSNQDKREQTPYEWMSHDGAPSWNAFERRVQENQKLSRRKKNFLLEKDLDTKEGEFLARSFTDTAYMSREVCAYLADCLLFPDDGAKAHVVPTTGRATAWLRRRWGLNFGSNGEKDRSDDRHHATDACVIAACSRSLVIKTARINQETHWSITRGMNETQRRDAIMKALESVMPWETFANEVRAAHDFVVPTRFVPRKGKGELFEQTVYRYAGVNAQGKDIARKASSDKDIVMGNAVVSADEKSVIKVSEMLCLRLWHDPEAKKGQGAWYADPVYKADIPALKDGTYVPRIAKAHTGRKAWKPVPKSAMKKPPLEIYLGDLVQIGDFVGRFSGYNIDNANWSFVDRLTRIKISCPTVGKLSNDMSPFVVRESPIK

SEQ ID NO: 719 - protein, 1003 aa, unidentified
  REGION 1..1003: note = Description of Unknown: uncultivated organism with predicted taxonomy: Collinsella
  REGION 1..1003: note = MG14-43 effector
MEITINREIGKLGLPRHLVLGMDPGIASCGFALIDTANHEILDLGVRLFDSPTHPKTGQSLAVIRRGFRSTRRNIDRTQARLKHCLQILKAYGLIPQDATKEYFHTTKGDKQPLKLRVDGLDRLLNDREWALVLYSLCKRRGYIPHGEGSQDKSSEGGKVLSALAANKEAIAETSCRTVGEWLAQQPQSRNRGGNYDKCVTHAQLIEETHILFDAQRSFGSKYASPEFEAAYIEVCDWERSRKDFDRRTYDLVGHCSYFPTEKRAARCTLTSELVSAYGALGNITIIHENGTSRALSATERDECIAILFSCEPIRGNKDCAVKFGALRKALDLSSGDYFKGVPAADEKTREVYKPKGWRVLRNTLNAANPILLQRLRDDRNLADAVMEAVAYSSALPVLQEQLQGLPLSEAEIEALCRLPYSSKALNGYGNRSKKALDMLLDCLEEPEVLNLTQAENDCGLLGLRIAGAQLERSDRLMRYETWIERTGRTNNNPVVIRAMSQMRKVVNAICRKWGVPNEIHVELDRELRLPQRAKDEIAKANKKNEKNSERIAGQIAELRGCTADEVTGKQIEKYRLWEEQECFDLYTGAKIEVDRLISDDTYTQIDHILPFSRTGENSRNNKVLVLAKSNQDKREQTPYEWMSHDGAPSWDAFERRVQENQKLSRRKKNFLLEKDLDTKEGEFLARSFTDTAYMSREVCAYLADCLLFPDDGAKAHVVPTTGRATAWLRRRWGLNFGSNGEKDRSDDRHHATDACVIAACSRSLVIKTARINQETHWSITRGMDETQRRDAIMKALESVMPWETFANEVRAAHDFVVPTRFVPRKGKGELFEQTVYRYAGVNAQGKDIARKASSDKDIVMGNAVVSADEKSVIKVSEMLCLRLWHDPEAKKGQGAWYADPVYKADIPALKDGTYVPRIAKAHTGRKAWKPVPESAMKKPPLEIYLGDLVQIGDFVGRFSGYNIDNANWSFVDRLTRIKISCPTVGKLSNDMSPFVVRESPIK

SEQ ID NO: 720 - protein, 761 aa, unidentified
  REGION 1..761: note = Description of Unknown: uncultivated organism with predicted taxonomy: Olsenella mediterranea
  REGION 1..761: note = MG14-44 effector
DFDRRTYDLVGHCSYFPTGKRAARCTLTSELVSAYGALGNITIIHENGTSRALSATERDECIAILFSCEPIRGNKDCAVKFGALRKALDLSSGDYFKGVPAADEKTREVYKPKGWRVLRNTLNAANPILLQRLRDDRDLADAVMEAVAYSSALPVLQEQLQGLPLSKAEIEALCRLPYSSKALNGYGNRSKKALDMLLDCLEEPEVLNLTQAENDCGLLGLRIAGAQLERSDRLMPYETWIEHTGRTNNNPVVIRSMSQMRKVVNAICRKWGVPNEIHVELDRELRLPQRAKDEIAKANKKNEKNRERIAGQIAELRGCTADEVTGKQIEKYRLWEEQECFDLYTGAKIEVDRLISDDTYTQIDHILPFSRTGENSRNNKVLVLAKSNQDKREQTPYEWMSHDGAPSWDAFERRVQENQKLSRRKKNFLLEKDLDAKEGDFLARSFTDTAYMSREVCAYLADCLQFPDDGAKAHVVPTTGRATAWLRRRWGLNFGSNGEKDRSDDRHHATDACVIAACSRSLVIKTARINQETHWSITRGMNETQRHDAIMKALESVMPWETFANEVRAAHDFVVPTRFVPRKGKGELFEQTVYRYAGVNAQGKDLARKVGSDKDIVMGNAVVSADEKSVVKVSEMLCLRLWHDPEAKKGQGAWYADPVYKADIPALKDGTYVPRIAKQKYGRKVWKAVPNSALTQKPLEIYLGDLIKVGDKLGRYNGYNIATANWSFVDALTKKEIAFPSVGMLSNELQPIIIRESILDN

SEQ ID NO: 721 - protein, 833 aa, unidentified
  REGION 1..833: note = Description of Unknown: uncultivated organism with predicted taxonomy: Collinsella
  REGION 1..833: note = MG14-45 effector
MEITINREIGKLGLPRHLVLGMDPGIASCGFALIDTANHEILDLGVRLFDSPTHPKTGQSLAVIRRGFRSTRRNIDRTQARLKHCLQVFKAHGLIPQDATKEYFHTTKGDKQPLKLRVDGLDRLLSDREWALVLYSLCKRRGYIPHGEGNQDKSSEGGKVLSALAANKEAIAEASCRTVGEWLAQQPQSRNRGGNYDKCVTHAQLIEETHILFDAQRSFGSKYASPELEAAYIEVCDWERSRKDFDRRTYDLVGHCSYFPTEKRAARCTLTSELVSAYGALGNITIIHDDGTSRALSATERDECIAILFSCEPIRGNKDCAVKFGALRKALDLSSGDYFKGVPAADEKTREVYKPKGWRVLRNTLNAANPILLQRLRDDRDLADAVMEAVAYSSALPVLQERLQGLPLSEAEIEALCRLPYSSKALNGYGNRSKKALDMLLDCLEEPEVFNLTQAENDCGLLGLRIAGAQLERSDRLMPYELWAERTGRTNNNPVVIRSMSQMRKVVNAICRKWGVPNEIHVELDRELRLPQRAKDEIAKANKKNEKNRERIAGQIAELRGCTADEVTGKQIEKYRLWEEQECFDLYTGAKIEVDRLISDDTYTQIDHILPFSRTGENSRNNKVLVLAKSNQDKREQTPYEWMSHDGAPSWDAFERRVQENQKLSRRKKNFLLEKDLDAKEGDFLARSFTDTAYMSREVCAYLADCLQFPDDGAKAHVVPTTGRATAWLRRRWGLNFGSNGEKDRSDDRHHATDACVIAACSRSLVIKTARLNQETHWSITRGMNEIQRHDAIMKALESVMPWETFANEVRAAHDFVVPTRFVPRKGKGELFE

SEQ ID NO: 722 - protein, 1003 aa, unidentified; identical to SEQ ID NO: 712
  REGION 1..1003: note = Description of Unknown: uncultivated organism with predicted taxonomy: Collinsella
  REGION 1..1003: note = MG14-46 effector

SEQ ID NO: 723 - protein, 767 aa, unidentified
  REGION 1..767: note = Description of Unknown: uncultivated organism with predicted taxonomy: Collinsella sp. AM13-34
  REGION 1..767: note = MG14-47 effector
YRGAPYRRGATSTTSFEMVRAHQTLANTVILHEDGTSSTIPGNTRIEIVRELFAVKKSVKPLKWSGLRRRLGLSDGDSFKGRPLEEEKRDCIALPAWAVLCSGLYEDHRDLLERLHDHIEDADAVCSALTYASSAASLAGRLSPLALTDDEVEAIIDLPYSARLFSGYASASLEALQMLRGTLEDPCVTSLRQAEEDSGLAQARAMLAEEHGEAADGLLCAFSDYDPTCKNPVVLRATAQVRRMVNSVIRHYGLPDVIRVEVARDLKRSKHEREIVAESNRARHELNEQAKRDIVEFLGLHDDDHVRGRDLDMVKLYREQGGKDPYTGTGIDFGRMLEERGYVEIDHILPISRTCDNSQANKVLCLTKSNRDKSNRSPYEWMTSGEATAPDWDEFCGRMERWAKMCEPRRYARKKLANLTCENLAERAGGFIDRNLNDTRYMSVALAKWLRECLPFARDGHEHVFRVAGGATALMRSVWDIGITGPDGKKNRDDDRHHAVDAAVISCCTPGIVKNVALVNEGHARADVRQRLFRDSLPYPEFKEQVNAWIPCIVPTLTLPNTVTGSVLKDTVYPYLGRDDAGKDLYLTVKRDKDGRIVDRKVNKATTMWKDGQGGWRAYGSMCALDAVFDASVGKRGKWSFDPVYCIDIPHREDEIRTIRAFSKERAIDLWDSIKVPEDAQRMRIRRGDVLVCDGKAARFYCFDISVNAIRLYSQRGGKQLQTTGPLSSEAFPPPSKWGDDIRVMQEDCLGLCWLSFLSNRAIAQMD

SEQ ID NO: 724 - protein, 1003 aa, unidentified
  REGION 1..1003: note = Description of Unknown: uncultivated organism with predicted taxonomy: Collinsella
  REGION 1..1003: note = MG14-48 effector
MEITINREIGKLGLPRHLVLGMDPGIASCGFALIDTANHEILDLGVRLFDSPTHPKTGQSLAVIRRGFRSTRRNIDRTQARLKHCLQILKAYGLIPQDATKEYFHTTKGDKQPLKLRVDGLDRLLNDREWALVLYSLCKRRGYIPHGEGNQDKSSEGGKVLSALAANKEAIAETSCRTVGEWLAQQPQSRNRGGNYDKCVTHAQLIEETHILFDAQRSFGSKYASPEFEAAYIEVCDWERSRKDFDRRTYDLVGHCSYFPTEKRAARCTLTSELVSAYGALGNITIIHENGTSRALSATERDECIAILFSCEPIRGNKDCAVKFGALRKALDLSSGDYFKGVPAADEKTREVYKPKGWRVLRNTLNATNPILLQRLRDDRNLADAVMEAVAYSSALPVLQEQLQGLPLSEAEIEALCRLPYSSKALNGYGNRSKKALDMLLDCLEEPEVLNLTQAENDCGLLGLRIAGAQLERSDRLMPYETWIERTGRTNNNPVVIRAMSQMRKVVNAICRKWGVPNEIHVELDRELRLPQRAKDEIAKANKKNEKNRERIAGQIAELRGCTADEVTGKQIEKYRLWEEQECFDLYTGAKIEVDRLISDDTYTQIDHILPFSRTGENSRNNKVLVLAKSNQDKREQTPYEWMSHDGAPSWDAFERRVQENQKLSRRKKNFLLEKDLDTKEGEFLARSFTDTAYMSREVCAYLADCLLFPDDGAKAHVVPTTGRATAWLRRRWGLNFGSNGEKDRSDDRHHATDACVIAACSRSLVIKTARINQETHRSITRGMNETQRRDAIMKALESVMPWETFANEVRAAHDFVVPTRFVPRKGKGELFEQTVYRYAGVNAQGKDIARKASSDKDIVMGNAVVSADEKSVIKVSGMLCLRLWHDPEAKKGKGAWYADPVYKADIPALKDGTYVPRIAKAHTGRKAWKPVPGSAMKKPPLEIYPGDLVQIGDFVGRFSGYNIDNANWSFVDRLTRIKISCPTVGKLSNDMSPFVVRESPIK

SEQ ID NO: 725 - protein, 755 aa, unidentified
  REGION 1..755: note = Description of Unknown: uncultivated organism with predicted taxonomy: Collinsella sp. AF20-14LB
  REGION 1..755: note = MG14-49 effector
RAASSLISFEMVRAYEKLSNIKIEHQGREATYISPEKRNEIVESLFAVSKNPKPLKWSQLREKLGMQSSDSFDSRLPADEKSDCIKIPAWNTLCTGLFTSNRALLDRFHDDTDVADAVCSALTYASSGESLRNALENLSLDLSEQDIDSLLDLPYASKLFSGYCSTGVRALQMLRDAFKDPQIEKLYDAEKATGLYEARQALAAERNESRDGLLCPYLEFDPTCTNPVVLRATAQVRRMINSIIRHYGLPDVIRVEVAKDLKRSKHEKAIIAATNKANKDSNEQAKKDLVAFYGLPNDAHVSSADFEKMWLYREQFGQDPYTGKGINLERMLNDRDYVEIDHILPFSRSCDDSKSNKVLCLTKSNRDKANRTPYEWMTSGEPSAPDFGDFCRRMDAWAGKGKSAHYTKSKLSKLKNSTFGKEEQKFIDRNLNDTRYMSRQLAMWVRECLPFPDDKRQHVFCVAGAATSLMRRIWGIGIVDEKGKKDRSDDRHHAVDAAVIACCSPEIVKGIARVNSGRSNIKERERLRYESMPYPEFKAQVEAWIPCIVPTRTVSRTATGSLLKDTVYPYVGADDRGKDLYRRNGKNEPASTLWKDGSGGCKLYDGVYGLMAVFDEGMKKFGSWRFDPIYYIDVPNVRQDFIREFTKDLSIDYWTKVQLKGDEPRIFLKQGDVLVQDGCAMRYYKYNVSNGAISSYSKIGEKSVPLQKTGPLSEEKFPKQAKWDSSLTVMQEDCLGLCWLRFLSDRVGKFENFPV

SEQ ID NO: 726 - protein, 1024 aa, unidentified
  REGION 1..1024: note = Description of Unknown: uncultivated organism with predicted taxonomy: Libanicoccus massiliensis
  REGION 1..1024: note = MG14-50 effector
MDSEQPPYTLGHDRDEWQEIKKHLTNRPYLVLGLDPGISSCGFCLIDFNNHLILEMGSHLFKAPQQDKNNVSLAVVRRNARSTRRNNRRTAARLSHCLALLKEAGLVPNDVDKAWLQTRKGDKPVTKLRAVGLDRPLSDREFAQVLYSLCGKRGYIPHGEGRAGETDDAEGKKVLKAIADNTKAMESGGYRTVGEMLYRSDKGRSRNRGGNYDLCVYNSQIQDEVKVVFSAQRELGNNRATQELEKSYFECLTWEKKSADHDAKVYELVGPCTYFPEEKRAANADVSSELCRAYERLGHLVIVHEDGAEQTLTSEQIDKYIGILFSPSPIRGNKDCKVTYNTIRKDLDISAKSMFKGVAKEKEKDEVFAPKAWRKLRIILPTSLLTSMIEDRSFGDDICEAIAYSSTEETLSERLETIDLSEDDRETLLSVPFTSKLFKGYGNRSRKALDLLIGAFEEPEIRTLTEAEVATGLKGKRDEGRFPRSTLLPPYNAYDETCRNPVVLRAMGRMRRIINSIIKIYGVPDEIHVELARELKQSKREKDLATKRRNAREADNKRYAKLAADILGVEPEAVRGNIIRMLALREEQGCKDIYTGDRIDLERLVTDEHYCEIDHVLPYSRTCDDDQSNKTLTFASNNQNKRERTPYEWMTSDEEKAPNWEEYRNRVIAEVKNPRKRAKFLNTILDEDTQEGFINRNLNDTRYMSRAVKSYLEDCLIFPKGKREKHVTAVAGGATGNLRWVWGLNFGAHGEKNRKDDRHHAVDAAVIAACNESAVMKVAKTTSMGREQFRKERKARLSNTQPWPTFADEVAAIRELVIPTRMVSHGVTGRMFEDTLYHIDDYTQDRGKYPLVRAKGKQNKGGNIRFISDDTAQKIDGIAFLRLWLDPDAPATGQTRGKWYAEPVYYADIPSIKHGDYVPRAIEQDVARINWQPIPESAKSSGPITVYPGDVVLVDNRAARFSKIGITKCQLTMLNLLSKERVTDWPSIGSWRQDTEVRVLGEDCLGHCYKHIAITRDSSTYRVE

SEQ ID NO: 727 - protein, 1005 aa, unidentified
  REGION 1..1005: note = Description of Unknown: uncultivated organism with predicted taxonomy: Collinsella
  REGION 1..1005: note = MG14-51 effector
MEITINREIGKLGLPRHLALGMDPGIASCGFALIDTANHEILDLGVRLFDSPTHPKTGQSLAVIRRGFRSTRRNIDRTQARLKHCLQVLKAYGLIPQDATKEYFHTTKGDKQPLKLRVDGLDRLLNDREWALVLYSLCKRRGYIPHGEGNQDKSSEGGKVLSALAANKEAIAETSCRTVGEWLAQQPQSRNRGGNYDKCVTHAQLIEETHILFDAQRSFGSKYASPEFEAAYIEVCDWERSRKDFDRRTYDLVGHCSYFPTEKRAARCTLTSELVSAYGALGNITIIHENGTSRALTATERDECIAILFSCEPIRGNKDCAVKFGALRKALDLSSGDYFKGVPAADEKTREVYKPKGWRVLRNTLNAANPILLQRLRDDRDLADAVMEAVAYSSALPVLQEQLQGLPLSEAEIEALCRLPYSSKALNGYGNRSKKALDMLLDCLEEPEVLNLTQAENDCGLLGLRIAGAQLERSDRLMPYETWIERTGRTNNNPVVIRAMSQMRKVVNAICRKWGVPNEIHVELDRELRLPQRAKDEIAKANKKNEKNRERIAGQIAELRGCTADEVTGKQIEKYRLWEEQKCFDLYTGAKIEVDRLISDDTYTQIDHILPFSRTGENSRNNKVLVLAKSNQDKREQTPYEWMSHDGAPSWDAFERRVQENQKLSRRKKNFLLEKDLDTKEGEFLARSFTDTAYMSREVCAYLADCLLFPDDGAKAHVVPTTGRATAWLRRRWGLNFGSNGEKDRSDDRHHATDACVIAACSRSLVIKTARINQETHWSITRGMNETQRRDAIMKALESVMPWETFANEVRAAHDFVVPTRFVPRKGKGELFEQTVYRYAGVNAQGKDLARKASSDKNIVMGNAVVSADEKSVIKVSEMLCLRLWHDPEAKKGQGAWYADPVYKADIPALKDGTYVPRIAKAHTGRKAWKPVPESAMKKPPLEIYLGDLVQIGDFVGRFSGYNIANANWSFVDRLTKEALGCPTVVKLDNKLAPAIIRESIIMHQ

SEQ ID NO: 728 - protein, 1003 aa, unidentified
  REGION 1..1003: note = Description of Unknown: uncultivated organism with predicted taxonomy: Collinsella
  REGION 1..1003: note = MG14-52 effector
MEITINREIGKLGLPRHLVLGMDPGIASCGFALIDTANHEILDLGVRLFDSPTHPKTGQSLAVIRRSFRSTRRNIDRTQARLKHCLQTLKAYGVIPQDATKEYFHTTKGDKQPLKLRVQGLDRPLSNREWALVLYSLCKRRGYIPHGEGSQDKSSEGGKILSALAANKEALAETPCRTVGEWLAQQPQSRNRGGNYDKCVTHAQLIDETHILFEAQRSFGSAYASPEFEAAYIEVCDWERSRKDFDRRSYDLVGRCSYFPAEKRAARCTLTSELVAAYGALGNITVIHEGGTSRALSATERDECIAILFSCEPIRGNKDCAVKFGALRKALDLSSGDYFKGVPAADEKTREVYKPKGWRVLRNTLNAANPILLQRLRDDRDLADAVMEAVAYSSALPVLQERLQGLPLSEAEIEALCRLPYSSKALNGYGNRSKKALDMLLDCLEEPEVLNLTQAENDCGLLGLRIAGAQLERSDRLMPYETWIEHTGRTNNNPVVIRSMSQMRKVVNAICRKWGVPNEIHIELDRELRLPRRAKDEIAKANKKNEKNRERIARQIAELRGCTADEVTGKQIEKYRLWEEQECFDLYTGAKIEIGRLISDDTYTQIDHILPFSRTGENSRNNKVLVLAKSNQDKREQTPYEWMSHDGAPSWDAFERRVQENQKLSRRKKNFLLEKDLDTKEGEFLARSFTDTAYMSREVCAYLADCLLFPDDGAKAHVVPTTGRATAWLRRRWGLNFGLTGEKDRSDDRHHATDACVIAACSPSLVIKTAQINQKMHWSMTKGMSKAQRQDAIMKALENVMPWETFANEVRAVHKLIIPTRLVPRKGKGELFEQTVYRYAGVDAKGKNLARRANSTEDIVMGNAVVSDDEKSIIKISEMLCLRLWHDPKARKGRGAWYADPVYKAEISALKGGTYVPKIAKAHTGRKAWKPVPESAMVKPPLEIYLDDLVQIGDFVGRFSGFDIDNANWSFSDRLTRKKLRSPTVNKLSNDLPPLVIREPPIR

SEQ ID NO: 729 - protein, 1004 aa, unidentified
  REGION 1..1004: note = Description of Unknown: uncultivated organism with predicted taxonomy: Olsenella sp. KH3B4
  REGION 1..1004: note = MG14-53 effector
MDANRPYLVLGLDPGIASCGFCLLDMTNHKILEMGSHLFKAPQEDKTKVSLAVTRRNARSIRRNTARTAARLKHCLSLLVEADLVPPDADRAWFQTKKGDKPVLKLRATGLDRLLTDREFAQALYSLCGRRGYIPRGEGRLGEADDNDNEGKRVLDAIKKNQEAMEAGAYRTVGEMLNAQGRSRNRGGDYSLCVYNSQVQDEVKTLFKEQRALGNAKATKKLEQAYIDCLTWEKKSLDHDARVYELVGECVYFPEEKRAASADISSELCRAYERLGHLAIVREDGSDQALSAEQIAHYLGILFSTAPIKGNKDCKVTYGTIRKDLDISGKDVFKGVAQDKEKDEVFAPKAWRCLRRTLPQGLLERMFDDRKLGDAVCEALTFASSEASLVERLSGLELSDDEAEAILEVPFTGKLFKGYGSRSLKTLGLLLGAFEEPEIRILTDAEKATGLLDLRLSDRGVRGGLLPPYDEYDRTCRNPVVLRAMGRMRHIVNAIIRIHGVPDEIHIELGRDLKMSNKEKDLVDKRNRENEAAKKKWAKTAADILGIEPEEVPGRIVRKLIMREEQDNWDLYTGDAIDLERLVRDDRYCEIDHILPYSRTCDDSRANKVLVLSKSNQDKRERTPYEWMTSGEAGAPSWDEYRARVMALVKNPHKRANHLNTDLGEEAQAKFLARNLNDDRYMSVAVKNYLEDCLLFPEDGRKRHVTAVAGGATGNLRWVWGLNFGSGNVKDRDDDRHHAVDAAIIAACSEGTVQKVAKASSKGREAFKHLRESRLADTQPWPTFADEVIARREFVVPTRMVDHGVTGRVFEDTLYHLEGITEDKGKYPLVRAGEKVAKQGNVHVNPDGSVKLIDGMAFLRLWLDPTARPNGKVKGKWYAEPVYYADIPAIKAGTYVPRACTIHVARVNWKPVPEAAAQQKPVVLYPGDVLQVGSHVGRYRSFDISNCGLSVNSLVNKDVIAPGFPKTLGGWGKDTQVRVLQEDCLGNCYDHIAINPDDSTFRQR

SEQ ID NO: 730 - protein, 1000 aa, unidentified
  REGION 1..1000: note = Description of Unknown: uncultivated organism with predicted taxonomy: Olsenella sp. KH3B4
  REGION 1..1000: note = MG14-54 effector
MDATRPYLVLGLDPGIASCGFCLLDMTNHKILEMGSHLFKAPQEDKTKTSLAVTRRKARSIRRNTARTSARLKHCLELLAGAGLVPADADKTWLQTKKGDKPILKLRAGGLDRLLTDREFAQVLYSLCGRRGYIPHGEGRLGETDEDESKKVLGAIKKNQDAMAAGSYRTVGEMLNAQGRSRNRGGDYSLCVYNSQIQDEAKALFASQRARGNTKATRELEDSYLACLTWEKKSLDHDTRVYELVGPCSYFPGEKRAASADVSSELCRAYERLGHIVIVHEDGSEQALTAGEIDDYLKILFSTAPIKGNKECKVTYGTIRKDLDISGKSVFKGIAQDKEKDKPFAPKAWRSLRRVLPERLLARMLEDRNLGDAVCEALTFASSEASLIERLSDLDLSDDERDAILAVPFTGKLFKGYGSRSLKALRLLLGAFEEPEIRILTDAEKATGLLDLRLSDRGVRGQLLPPYDSYDPTCRNPVVLRAMGRMRHIVNAIIRIHGVPDEIHIELGRDLKMSNKEKSLVDKRNRENAASNKKWATTAAGILGCTPEEVPGRIIRKLILREEQGEKDLYTGDSIDLEHLVRDDRYCEIDHILPYSRTCDDSRANKTLVLSKSNQDKRERTPYEWMTSGEAGAPSWDSYRARVMAQVKNPRKRANYLNTDLGPETQAKFLARNLNDDRYMSVAVKNFLEDRLLFPEDGRKRHVTAVAGGATGNLRWVWGLNFGEGNIKDRTDDRHHAVDAAIIAACSESTVKKVAKASAKAREAFKQLRKSRLADTQPWPTFAAEVAARREFVVPTRMADHGVMGRVFKDTLYHLEGITEDKGKYPLVRAGEKTVKKGNVRINPDGSVKLIDGMAFLRLWLDPTARPNGKVKGKWYAEPVYYADIPAIKAGAYVPRACTIHVARVNWKPVPEAAMQIEPIMLYAGDVVEINNQLVRYSGFDINGATLYYQSLLNGATTTAIPSLGTWGKDTQVRVLQEDCLGHCYDGIAINPEDSTFQQR

SEQ ID NO: 731 - protein, 1026 aa, unidentified
  REGION 1..1026: note = Description of Unknown: uncultivated organism with predicted taxonomy: Collinsella
  REGION 1..1026: note = MG14-55 effector
MAAFEDPRELGFDTELVKTALMTREQFSSKPRKLVLGIDMGIAGIGICLMDKLNQEIVLMATHLFDCPWNPKNKTSLASARRQARSQRRNTARRAARKKHIREILMARGVIPEGVTAEWFSVRKGEQDNIQLRVKGLSEILSSRELARILYGFASRRGYIDHGKADNDKDAGKVKKALKENAEIMDANGYETFAQYLVTQPRIRNRQNDYSHTIDIDMVVDEVHAIFRHQRELGNELATESLEGEYLAALRWLTDTTKRDRIIYSKVGYCTYLGEPIRRGPKSSISSEMVRAYQTLANVKIEHIGSVATHISPLTRNQIVHDLFKVSKNPKPLKWSQLRKKLDLADTDTFAGVRQSDEAKDVCVKVPAWNVLCSTLHDLNPALLNRLHDDVDLADAVCAAATFASSSESFATRIAERTDGLKQEDMEALLELPYGSKLFTGYGSTSLKALQMLRDAFEDTNINRLYDAEVATGLYDAREALAAKRNASDDGLLMPYSKYSPICTNPVVLRSCAQMRRIINSIIRHYGLPDTIRVEVANDLKRTEHERKLITSGNIYNRRTNEKAKDDIVEYLGLSDADQVRGRDIDKVRLYNEQGGKDPYTGQGIDFGRMLTEKGYVEIDHILPFSRSCDNARTNKVLVLTKSNRNKSNRTPYEWMTSGEPTAPNWDEFCIRMDVWASGKEPKHYYSSKLAKLKEDNFTNNIDSFISRNLNDTRYMSKDVAKWLADCLPFPEDGRKHVFCVSGAATAFMRGIWRIGILDDVGKKNREDDRHYAVDAAVIAACTSSIVKGIALISEEHATNRDADRLLDGSLPYPEYRDQVKAWIPCIVPTYSPTRTATGALFKENTFSYKGIDGKGKDLIKKKKGALGPCTTAWKDGKGTARAYDEQYSLLAVYEESAARWLFDPLYYIDVQKRKTEEPFIRKFSKDLSIDYWEKIPLTGNEPSLLLKRGVVLIQDGIVGRYYGYDIAHNNVKLSPSGKVSFQKTGPLAAEKFPTPTKWTDELRIMQEDCLGLCWLEFLTERANHC

SEQ ID NO: 732 - protein, 1003 aa, unidentified
  REGION 1..1003: note = Description of Unknown: uncultivated organism with predicted taxonomy: Collinsella
  REGION 1..1003: note = MG14-56 effector
MEITINREIGKLGLPRHLVLGMDPGIASCGFALIDTANHEILDLGVRLFDSPNHPKTGQSLAVIRRGFRSTRRNIDRTQARLKHCLQTLKAYGVIPQDATKEYFHTTKGDKQPLKLRVQGLDRPLSNREWALVLYSLCKRRGYIPHGEGSQDKSSEGGKILSALAANKEALAETPCRTVGEWLAQQPQSRNRGGNYDKCVTHAQLIDETHILFEAQRSFGSAYASPEFEAAYIEVCDWERSRKDFDRRSYDLVGRCSYFPAEKRAARCTLTSELVAAYGALGNITVIHEGGTSRALSATERDECIAILFSCEPIRGNKDCAVKFGALRKALDLSSGDYFKGVPAADEKTREVYKPKGWRVLRNTLNAANPILLQRLRDDRDLADAVMEAVAYSSALPVLQERLQGLPLSEAEIEALCRLPYSSKALNGYGNRSKKALDMLLDCLEEPEVLNLTQAENDCGLLGLRIAGAQLERSDRLMPYETWIEHTGRTNNNPVVIRSMSQMRKVVNAICRKWGVPNEIHVELDRELRLPRRAKDEIAKANKKNEKNRERIARQIAELRGCTADEVTGKQIEKYRLWEEQECFDLYTGAKIEVGRLISDDTYTQIDHILPFSRTGENSRNNKVLVLAKSNQDKREQTPYEWMSHDGAPSWDAFERRVQENQKLGRRKKNFLLEKDLDTKEGEFLARSFTDTAYMSREVCAYLADCLLFPNDGAKAHVVPTTGRATAWLRRRWGLNFGLTGEKDRSDDRHHATDACVIAACSPSLVIKTAQINQKMHWSMTKGMSKAQRQDAIMKALENVMPWETFANEVRAVHKLIIPTRFVPRKGKGELFEQTVYRYAGVDAKGKNLARRANSTEDIVMGNAVVSDDEKSIIKISEMLCLRLWHDPKARKGRGAWYADPVYKAEISALKGGTYVPKIAKAHTGRKAWKPVPESAMVKPPLEIYLDDLVQIGDFVGRFSGFDIDNANWSFSDRLTRKKFRSPTVNKLSNDLSPLVIREPPIR

SEQ ID NO: 733 - protein, 1000 aa, unidentified
  REGION 1..1000: note = Description of Unknown: uncultivated organism with predicted taxonomy: Olsenella
  REGION 1..1000: note = MG14-57 effector
MDVTRPYLVLGLDPGIASCGFCLLDMTNHKILEMGSHLFKAPQEDKTKTSLAVTRRKARSIRRNTARTAARLKHCLELLAGAGLVPADADKTWLQTKKGDKPILKLRAGGLDRLLTDREFAQVLYSLCGRRGYIPHGEGRLGETDEDESKKVLGAIKKNQDAMAAGSYRTVGEMLNAQGRSRNRGGDYSLCVYNSQIQDEAKALFASQRARGNTKATRELEDSYLACLTWEKKSLDHDTRVYELVGPCSYFPGEKRAASADVSSELCRAYERLGHTVIVHEDGSEQALTAGEIDGYLKILFSTAPIKGNKECKVTYGTIRKDLDISGKSVFKGIAQDKEKDEPFAPKAWRSLRRVLPERLLARMLEDRNLGDAVCEALTFASSEASLIERLSDLDLSDDERDAILAVPFTGKLFKGYGSRSLKALGLLLGAFEEPEIRILTDAEKVTGLLDLRLSDRDVRGQLLPPYSSYDPTCRNPVVLRAMGRMRHIVNAIIRIHGVPDEIHIELGRDLKMSNKEKSLVDKRNRENAASNKKWATTAAGILGCTPEEVPGRIIRKLILREEQGEKDLYTGDSIDLEHLVRDDRYCEIDHILPYSRTCDDSRANKVLVLSKSNQDKRERTPYEWMTSGEAGAPSWDSYRARVIAQVKNPRKRANYLNTDLGPETQAKFLARNLNDDRYMSVAVKNFLEDRLLFPEDGRKRHVTAVAGGATGSLRWVWGLNFGEGNIKDRTDDRHHAVDAAIIAACSESTVKKVAEASAKGREAFKQLRKSRLADTQPWPSFAAEAAARREFVVPTRMADHGVTGRVFEDTLYHLEGITEDKGKYPLVRAGEKTVKKGNVRINPDGSVKLIDGMAFLRLWLDPTARPNGKVKGKWYAEPVYYADIPAIKAGTYVPRACTIHVARVNWEPVPEAAMEIEPVVLYAGDVVEINNQLVRYSGFNIRGATLYYQSLLNGATTTAIPSLGSWGKDTQVRVLQEDCLGHCYDGIAINPEDSTFQQR

SEQ ID NO: 734 - protein, 1003 aa, unidentified
  REGION 1..1003: note = Description of Unknown: uncultivated organism with predicted taxonomy: Collinsella
  REGION 1..1003: note = MG14-58 effector
MEITINREIGKLGLPRHLVLGMDPGITSCGFALIDTANHEILDLGVRLFDSPTHPKTGQSLAVIRRGFRSTRRNIDRTQARLKHCLQVLKAYGLIPQDATKEYFHTTKGDKQPLKLRVDGLDRLLNDREWALVLYSLCKRRGYIPHGEGNQDKSSEGGKVLSALAANKEAIAETSCRTVGEWLAQQPQSRNRGGNYDKCVTHAQLIEETHILFDAQRSFGSKYASPEFEAAYIEVCDWERSRKDFDRRTYDLVGHCSYFPTEKRAARCTLTSELVSAYGALGNITIIHENGTSRALSATERDECIAILFSCEPIRGNKDCAVKFGALRKALDLSSGDYFKGVPAADEKTREVYKPKGWRVLRNTLNATNPILLQRLRDDRNLADAVMEAVAYSSALPVLQEQLQGLPLSEAEIEALCRLPYSSKALNGYGNRSKKALDMLLDCLEEPEVLNLTQAENDCGLLGLRIAGAQLERSDRLMPYETWIERTGRTNNNPVVIRAMSQMRKVVNAICRKWGVPNEIHVELDRELRLPQRAKDEIAKANKKNEKNRERIAGQIAELRGCTADEVTGKQIEKYRLWEEQECFDLYTGAKIEVDRLISDDTYTQIDHILPFSRTGENSRNNKVLVLAKSNQDKREQTPYEWMSHDGAPSWDAFERRVQENQKLSRRKKNFLLEKDLDTKEGEFLARSFTDTAYMSREVCAYLADCLLFPDDGAKAHVVPTTGRATAWLRRRWGLNFGSNGEKDRSDDRHHATDACVIAACSRSLVIKTARINQETHWSITRGMNETQRRDAIMKALESVMPWETFANEVRAAHDFVVPTRFVPRKGKGELFEQTVYRYAGVNAQGKDIARKASSDKDIVMGNAVVSADEKSVIKVSEMLCLRLWHDPEAKKGQGAWYADPVYKADIPALKDGTYVPRIAKAHTGRKAWKPVPESAMKKPPLEIYLGDLVQIGDFVGRFSGYNIDNANWSFVDRLTRIKISCPTVGKLSNDMSPFVVRESPIK

SEQ ID NO: 735 - protein, 1003 aa, unidentified
  REGION 1..1003: note = Description of Unknown: uncultivated organism with predicted taxonomy: Collinsella
  REGION 1..1003: note = MG14-59 effector
MEITINREIGKLGLPRHLVLGMDPGIASCGFALIDTANHEILDLGVRLFDSPTHPKTGQSLAVIRRSFRSTRRNIDRTQARLKHCLQVFKAYGLIPQDATKEYFHTTKGDRQPLKLRVDGLDRPLSAREWALVLYSLCKRRGYIPHGEGNQDKSSEGRKVLSALAANKEAIAETSCRTVGEWLAQQPQSRNRGGNYAKCVTHAQLIEETHILFDAQRSFGSKYASPEFEAAYIEVCDWERSRKDFDRRTYDLVGHCPYFPTEKRAARCTLTSELVSAYGALGNITIIHENGTSRALNATERDECIAILFSCEPIRGNKDCAVKFGALRKALDLSSGDYFKGVPAADEKTREVYKPKGWRVLRNTLNAANPILLQRLRDDRDLADAVMEAVAYSSALPVLQERLQGLPLSEAEIEALCRLPYSSKALNGYGNRSKKALDMLLDCLEEPEVLNLTQAENDCGLLGLRIAGAQLERSDRLMPYETWVELTGRTNNNPVVIRSMSQMRKVVNAICRKWGVPNEIHVELDRELRLPQRAKDEIAKANKKNEKNRERIARQIAELRGCTADEVTGKQIEKYRLWEEQECFDLYTGAKIEVDRLISDDTYTQIDHILPFSRTGENSRSNKVLVLAKSNQDKREQTPYEWMSHDGAPSWDAFERRVQENQKLSRRKKNFLLEKDLDTKEGEFLARSFTDTAYMSREVCAYLADCLLFPDDGAKAHVVPTTGRATAWLRRRWGLNFGSNGEKDRSDDRHHATDACVIAACSRRLVIKTARINQEMHWSMTKGMSKAQRQDAIMKALENVMPWETFANEVRVAHDFVVPTRFVPRKGKGELFEQTVYRYAGVNAQGKDIARKASSDKDIVMGNAVVSADEKSVIKVSEMLCLRLWHDPKAKKGQGAWYADPVYKADIPALKDGTYVPRIAKAHTGRKAWKPVPESAMKKPPLEIYLGDLVQIGDFVGRFSGYNIDNANWSFVDRLTRIKTSCPTVGKLSNDMSPFVVRESPIK

SEQ ID NO: 736 - protein, 1003 aa, unidentified; identical to SEQ ID NO: 732
  REGION 1..1003: note = Description of Unknown: uncultivated organism with predicted taxonomy: Collinsella
  REGION 1..1003: note = MG14-60 effector

SEQ ID NO: 737 - protein, 1004 aa, unidentified
  REGION 1..1004: note = Description of Unknown: uncultivated organism with predicted taxonomy: Collinsella
  REGION 1..1004: note = MG14-61 effector
MEITINREIGKLGLPRHLVLGMDPGIASCGFALIDTANHEILDLGVRLFDSPTHPKTGQSLAVIRRGFRSTRRNIDRTQARLKHCLQVLKAYGLIPQDATKEYFHTTKGDKQPLKLRVDGLGRLLNDREWALVLYSLCKRRGYIPHGEGNQDKSSEGGKVLSALAANKETIAETSCRTVGEWLAQQPQSRNRGGNYDKCVTHAQLIEETHILFDAQRSFGSKYASPEFEAAYIEVCDWERSRKDFDRRTYDLVGHCSYFPTEKRAARCTLTSELVSAYGALGNITIIHENGTSRALSATERDECIAILFSCEPIRGNKDCAVKFGALRKALDLSSGDYFKGVPAADEKTREVYKPKGWRALRNTLNAANPILLQRLRDDHDLADAVMEAVAYSSALPVLQEQLQGLPLSEAEIEALCRLPYSSKALNGYGNRSKKALDMLLDCLEEPEVLNLTQAENDCGLLGLRIAGSQLERSDRLMPYETWIEHTGRTNNNPVVIRSMSQMRKVVNAICRKWGVPNEIHVELDRELRLPQRAKDEIAKANKKNEKNRERIAGQIAELRGCTADEVTGKQIEKYRLWEEQECFDLYTGAKIEVDRLISDDTYTQIDHILPFSRTGENSRNNKVLVLAKSNQDKREQTPYEWMSHDGAPSWGAFERRVQENQKLSRRKKNFLLEKDLDTKEGEFLARSFTDTAYMSREVCAYLADCLLFPDDGAKAHVVPTTGRATAWLRRRWGLNFGSNGEKDRSDDRHHATDACVIAACSRSLVIKTARINQETHWSITRGMNETQRRDAIMKALESVMPWETFANEVRAAHDFVVPTRFVPRKGKGELFEQTVYRYAGVNAQGKDIARKASSDKDIVMGNAVVSADEKSVIKVSEMLCLRLWHDPEAKKGQGAWYADPVYKADIPALKDGTYVPRIAKQNYGRKVWKAIPDSLLIQKPLEIYLGDLIRVGDKLGRYNGYNIAKANWSFVDALTKKEIAFPSVGMLSNELRPIVIRKSILDN

SEQ ID NO: 738 - protein, 1003 aa, unidentified
  REGION 1..1003: note = Description of Unknown: uncultivated organism with predicted taxonomy: Collinsella
  REGION 1..1003: note = MG14-62 effector
MEITINREIGKLGLPRHLVLGMDPGIASCGFALIDTANHEILDLGVRLFDSPTHPKTGQSLAVIRRGFRSTRRNIDRTQARLKHCLQVFKAHGLIPQDATKEYFHTTKGDKQPLKLRVDGLDRLLSDREWALVLYSLCKRRGYIPHGEGNQDKSSEGGKVLSALAANKEAIAEASCRTVGEWLAQQPQSRNRGGNYDKCVTHAQLIEETHILFDAQRSFGSKFASPELEAAYIEVCDWERSRKDFDRRTYDLVGHCSYFPTEKRAARCTLTSELVSAYGALGNITIIHDDGTSRALSATERDECIAILFSCEPIRGNKDCAVKFGALRKALDLSSGDYFKGVPAADEKTREVYKPKGWRVLRNTLNAANPILLQRLRDDRDLADAVMEAVAYSSALPVLQERLQGLPLSEAEIEALCRLPYSSKALNGYGNRSKKALDMLLDCLEEPEVLNLTQAENDCGLLGLRIAGAQLERSDRLMPYELWAERTGRTNNNPVVIRSMSQMRKVVNAICRKWGVPNEIHVELDRELRLPQRAKDEIAKANKKNEKNRERIAGQIAELRGCTADEVTGKQIEKYRLWEEQECFDLYTGAKIEVDRLISDDTYTQIDHILPFSRTGENSRNNKVLVLAKSNQDKREQTPYEWMSHDGAPSWDAFERRVQENQKLSRRKKNFLLEKDLDAKEGDFLARSFTDTAYMSREVCAYLADCLQFPDDGAKAHVVPTTGRATAWLRRRWGLNFGSNGEKDRSDDRHHATDACVIAACSRSLVIKTARLNQETHWSITRGMNEIQRHDAIMKALENVMPWETFANEVRAAHDFVVPTRFVPRKGKGELFEQTVYRYAGVNAQGKDLARKAGSDKDIVMGNAVVSADEKSVIKVSEMLCLRLWHDPEAKKGQGAWYADPVYKADIPALKDGTYVPRIAKAHTGRKAWKPVPKSAMAKPPLEIYFDDLVQIGDFIGRFSGYNINSANWSFTDRLTRLNLSCPTVGQLNNDLSPVVIRESPIK

SEQ ID NO: 739 - protein, 1046 aa, unidentified
  REGION 1..1046: note = Description of Unknown: uncultivated organism with predicted taxonomy: Collinsella
  REGION 1..1046: note = MG14-63 effector
MDKAPGTDIGELGFDPGAFATALMTPEEFRSKDRVIWAGIDIGVASTGLCLVDILNHEIVLMASHLFKSPVVDKKKATAAPESLASVRRSARSVRRNIMREGRRKKAIRAVLADFGLIPADAGGEWFSARRDERTVVRLRSKALGYLLNPRELARVLYSFASHRGYIDHGKSDKEDDAGKVKKALAANRAELADGGCETFGQYLAAQPRSRNRAGDYSYTADIGMTVDEVRTIFARQRELGSEIASEALENRYIAELTWLTDTSKRDMSTYLKVGFCTYRGAPYRRGATSTISFEMVRAHQTLCNTVIQHADGTSSSIPGDTRIEIVRELFAVKKSVKPLKWSGLRRRLGLSEGDSFKGRPLEEEKRDCIALPAWAVLCSGLYEGHRDLLERLHDHIDDADAVCSALTFASSAASLAGRLAPLALSDDEVEAIIDLPYSARLFSGYANASLEALQMLRGTFEDPRVTSLRQAEEDSGLAQARAILAEERGEADDGLLCAFSDYDPTCKNPVVLRATAQVRRMVNSVIRHYGLPDVIRVEVARDLKRSKHEREIVAESNRARLELNEQAKRDIIEFLGLPDDHHVRGRDLALVKLYREQGGKDPYTGVGIDFRRMLEEHGYAEIDHILPVSRTCDDSQANKVLCLTKSNRDKSNRSPYEWMTSGEASAPDWNGFCGRMERWAKMCEPRRYARKKLANLTCENLAERAGNFIDRNLNDTRYMSVALAKWLMECLPFAKDGHEHVFCVAGGATALMRSVWNIGITGPDGKKNRDDDRHHAVDAAVIACCTPGIVKNVALVNEGHARADVRQRLFRDSLPYPEFKEQVDAWIPCIVPTLTLPSTVTGSVLKDTVYPYLGRDEAGKDLYLTVNRDKDGRIVERKVNKATTMWKDGHGGCRKYDEMCALDAVFDASVGKRGKWAFDPVYCIDIPHRDAERRTMRAFSKEKAIDLWDTVEVPEDALRMTIRRGDVLVCDGKAARFHGFNISDNTIKLFPQRVGKQLQETGPLSDEAFPSPSKWGDGIRVMQEDCLGLCWLSFLAQRAAVTQTE

SEQ ID NO: 740 - protein, 1003 aa, unidentified
  REGION 1..1003: note = Description of Unknown: uncultivated organism with predicted taxonomy: Collinsella
  REGION 1..1003: note = MG14-64 effector
MASTVNREIGKLGLPRHLVLGMDPGIASCGFALIDINNHEILEIGVRLFDSPTHPKTGQSLAVIRRGFRSTRRNIDRTQARLKHCLEVLEKYDVIPQDATKEFFHTTKGDKQPLKLRVEGLDRLLTNREWALVLYSLCKRRGYIPHGEGSQDKSSEGGKVLSALAANKEAFAETSCRTVGEWLAQQPQSRNRGGNYDKCVTHAQLIEETRVLFEAQRSFGSQYASAELEEAYVQVCDWERSRKDFDRRSYDLVGYCTYFPTEKRAARCTLTSELVAAYGALGNITIVHEDGTTRTLTTAERDKCIAILFSCEPIRGNKDCAVKFGALRRELDLNSGDYFKGVPAADEKTREVYKPKGWRALRNTLNTTSPFLLRRLYDDRDLADSVMEAVAYSSALPVLEEQLQALPLSPAEIDALCKLPYSSKALNGYGNRSKKALDMLLDCLEDSEVLGLTQAEDDCGLLGLRIQGSQLERSERLMPYEMWVELTGRTNNNPVVIRSMSQMRKVVNAICRKWGVPNEIHIELDRELRLPQRAKDDIAKAHKRNEKNRERIAGQIAELRGCSPEDVSGRLIEKYRLWEEQECFDLYTGAKIEVDRLISDETYTQIDHILPFSRTGENSPSNKVLVLAKSNQDKREQTPFEWMSKEGAPSWDAFKRRVEENQKLGRRKKNFLLEENLEAKEGEFLARSFTDTAYMSREVCAYLADCLLFPEDGTKSHVVPTTGRATAWLRRRWGLNFGINGEKDRSDDRHHATDACVIAACSRSLVIKTAKISEQTHWAVTKDLDKDERDHLRMKALENVMPWETFANEVRASHDFVIPTRFVPHKGKGELFEQTTYRYAGVNSEGKDLARRANSDQDIVMGNAIVSDDGKSIIKVSEMLCLRLWHDPEAKKGQGCWYADPVYKADIPALKDGTYMPKIAKARTGRKAWKPVPECAMRHAPLEIYLGDLVKIGDFIGRFSGYNIANANWSFTDRLTRQKLSCPTVGKLNNALIPVIIRESSIR

SEQ ID NO: 741 - protein, 1003 aa, unidentified; identical to SEQ ID NO: 732
  REGION 1..1003: note = Description of Unknown: uncultivated organism with predicted taxonomy: Collinsella
  REGION 1..1003: note = MG14-65 effector

SEQ ID NO: 742 - protein, 1004 aa, unidentified
  REGION 1..1004: note = Description of Unknown: uncultivated organism with predicted taxonomy: Collinsella
  REGION 1..1004: note = MG14-66 effector
MEITINREIGKLGLPRHLVLGMDPGIASCGFALIDTANHEILDLGVRLFDSPTHPKTGQSLAVIRRGFRSTRRNIDRTQARLKHCLQVLKAYGLIPQDATKEYLHTTKGDKQPLKLRVDGLDRLLNDREWALVLYSLCKRRGYIPHGEGNQDKSSEGGKVLSALAANKEAIAETSCRTVGEWLAWQPQSRNRGGNYDKCVTHAQLIEETHILFDAQRSFGSKYASPEFEAAYIEVCDWERSRKDFDRRTYDLVGHCSYFPTEKRAARCTLTSELVSAYGALGNITIIHENGTSRALSATERDECIAILFSCEPIRGNKDCAVKFGALRKALDLSSGDYFKGVPAADEKTREVYKPKGWRVLRNTLNAANPILLQRLRDDRNLADAVMEAVAYSSALPVLQEQLQGLPFSEAEIEALCRLPYSSKALNGYGNRSKKALDMLLDCLEEPEVLNLTQAENDCGLLGLRIAGAQLERSDRLMPYETWIELTGRTNNNPVVIRSMSQMRKVVNAVCRKWGVPNEIHVELDRELRLPQRAKDEIAKANKKNEKNRERIAGQIAELRGCTADEVTGKQIEKYRLWEEQECFDLYTGAKIEVDRLISDDTYTQIDHILPFSRTGENSRNNKVLVLAKSNQDKREQTPYEWMSHDGAPSWDAFERRVQENQKLSRRKKNFLLEKDLDTKEGEFLARSFTDTAYMSREACAYLADCLLFPDDGAKAHVVPTTGRATAWLRRRWGLNFGSNGEKDRSDDRHHATDACVIAACSRSLVIKTARINQETHWSITRGMNETQRRDAIMKALESVMPWETFANEVRAAHDFVVPTRFVPRKGKGELFEQTVYRYAGVNAQGKDIARKASSDKDIVMGNAVVSLDEKSVIKVSEMLCLRLWHDPEAKKGQGAWYADPVYKADIPALKDGTYVPRIAKAHTGRKAWKPVPESAMKKPPLEIYLGDLVQIGDFMGRFSGYNIANANWSFVDRLTKEALGCPTVVKLDNKLAPAIIRESIIMH

SEQ ID NO: 743 - protein, 1003 aa, unidentified; identical to SEQ ID NO: 734
  REGION 1..1003: note = Description of Unknown: uncultivated organism with predicted taxonomy: Collinsella
  REGION 1..1003: note = MG14-67 effector

SEQ ID NO: 744 - protein, 1005 aa, unidentified
  REGION 1..1005: note = Description of Unknown: uncultivated organism with predicted taxonomy: Collinsella
  REGION 1..1005: note = MG14-68 effector
MEITINREIGKLGLPRHLVLGMDPGIASCGFALIDTANHEILDLGVRLFDSPTHPKTGQSLAVIRRGFRSTRRNIDRTQARLKHCLQILKAYGLIPQDATKEYFHTTKGDKQPLKLRVDGLDRLLNDREWALVLYSLCKRRGYIPHGEGNQDKSSEGGKVLSALAANKEAIAETSCRTVGEWLAQQPQSRNRGGNYDKCVTHAQLIEETHILFDAQRSFGSKYASPEFETAYIEVCDWERSRKDFDRRTYDLVGHCSYFPTEKRAARCTLTSELVSAYGALGNITIIHENGTSRALSATERDECIAILFSCEPIRGNKDCAVKFGALRKALDLSSGDYFKGVPAADEKTREVYKPKGWRVLRNTLNAANPILLQRLRDDRNLADAVMEAVAYSSALPVLQEQLQGLPLSEAEIEALCRLPYSSKALNGYGNRSKKALDMLLDCLEEPEVLNLTQAENDCGLLGLRIAGAQLERSDRLMPYETWIERTGRTNNNPVVIRSMSQMRKVVNAVCRKWGVPNEIHVELDRELRLPQRAKDEIAKANKKNEKNRERIAGQIAELRGCTADEVTGKQIEKYRLWEEQECFDLYTGAKIEVDRLISDDTYTQIDHILPFSRTGENSRNNKVLVLAKSNQDKREQTPYEWMSHDGAPSWDAFERRVQENQKLSRRKKNFLLEKDLDTKEGEFLARSFTDTAYMSREVCAYLADCLLFPDDGAKAHVVPTTGRATAWLRRRWGLNFGSNGEKDRSDDRHHATDACVIAACSRSLVIKTARINQETHWSITRGMNETQRRDAIMKALESVMPWETFANEVRAAHDFVVPTRFVPRKGKGELFEQTVYRYAGVNAQGKDIARKASSDKDIVMGNAVVSADEKSVIKVSEMLCLRLWHDPEAKKGQGAWYADPVYKADIPALKDGTYVPRIAKAHTGRKAWKPVPESAMKKPPLEIYLGDLVQIGDFVGRFSGYNIANANWSFVDRLTKEALGCPTVVKLDNKLAPAIIRESIIMHQ

SEQ ID NO: 745 - protein, 1000 aa, unidentified
  REGION 1..1000: note = Description of Unknown: uncultivated organism with predicted taxonomy: Olsenella
  REGION 1..1000: note = MG14-69 effector
MAEPYLVLGLDPGISSCGFALLDMNNHKILEMGSHLFDAPQDSQTKVSLAVGRRSARSARRNNLRTKNRQKHCMELLQEAGLVPQGVTKQWFQSTKGDRPLLELRFAALERPLTNREFAQVLYALSARRGYIPHGEGRISKLSDMDTSGSSDAEAGKVLKAIGENNKLMAQGHFRTVGEMLYDQGKSRNKGGSYERCVLNSQIVDEVHIIFQSQRTQQNTAATQELEAQYVQNLTWEKRTLDHDAKVHALVGKCSYFPGEFRAARADLSSELCNAYERIKHLRIVNADGDEVALAPEQVETYIAILFSPEPLKGKKEKVTYARIRKDLDLSAHLFFKGIDPEDEKDHEPYVPKAWRAMRKVLSTELMERLRSDRTLADAVGEALTYASSEDSLVYQLDNLDLSDEERSQILGLPFSGKIFKGYGSRSLKALDMLVDAFEEPEVTTLAEAEESSGLLGLRMSDRGARYPLLPSYSNYDKENRNPVVLRAMGRMRRIVNAIIRIYGVPDEIHVELGRDLKRSKHEKDLINKRNRENERKNKQWRAQIAEEQGIDPDEVRPKLLRKIALWEEQDNFDIYTGHKIEFDRMISDDKYCEIDHVLPYSRTCDDSRNNKVLVLAKSNQDKRERTPYEWMTQDARKGAPNWDEYQARVIANHHISPRKRRYLLDNNLGPDQESDFLSRNLNDDRYMSREVKSYLEDTLIFPEDGRVKHVIAVAGGATGSLRHVWGLNFGANNSKDRSDNRHHAIDACVIAACSESTLQAVAKARKLGAETYKRMRKDRLKDTQPWPTFADEVIARREFVIPTHMVSHGVTGRAFEDTNYRFDGITNDTKKLGILYGNGKTTKKGNFVIGNDGNAHLVDGMAFLRLWLDPTARKGKGKWYAEPVYYADIPAIKNGTYIPRAAKAHVARVAWEPVPENALASAPVVLFSDNVIKVGSAIARYSRFDIGNAALVLENLRTGEECKKFPTLGRWNNELVPIIINEDCLGHCYKELAPNILEG

SEQ ID NO: 746 - protein, 1026 aa, unidentified
  REGION 1..1026: note = Description of Unknown: uncultivated organism with predicted taxonomy: Collinsella tanakaei
  REGION 1..1026: note = MG14-70 effector
MESLVNREVGGLGKPRYLVMGMDPGIKSCGFALLDLNNQEILEMGSRLFDAPTHPKTKQSMAVIRRGYRSTRRNIDRTQDRLKHCLKTLKRFDVVPEDADKEFFHTVKGDKQPILLRTDGLNRLLTSREWALVLYSLCKRRGYIPHGEGSDSGTSEDGKVLAALKANERVFADAGYRTVGEWLASLPQSRNRGGNYDKCVTHAQLTDEVRTLFEAQRGFGSPVASQELEDAYIEVFDWERSREEFDKRAYGLVGTCSYFPNEKRAARCTLTSEMVAAYGALGNITIVKRDGSTHPLSAVERDQCIDILFAVDPMKGNKTCAVKYGFLRKRLDLESGDYFKGVPLDDEKNREVFKPKGWRSLRSVLHETNRELLVKLHDDRDLADAVMEAVAYSSSVDVLKSQLSSLDLSNGEIESICAMPYSSKVLNGYGNRSKKALDILLGCFEDPDVLSLTDAEDASGLGAVRMQGAAIDKGERLIPYETWIALTGRTNNNPVVIRALSQMRKVVNAVCRKWGVPDEIHVELDRELRLPKKAKDEIAKAKKRNEKDRQRVAAQIAELLGCSADDVKGDYIEKYRLWEEQECFDIYSGEKIEVDRLIREETYTQIDHVLPFSRTGDNSRHNKVLVLARSNQLKREQTPYEWMTSNTEGAPSWDAFKRRVEENKKLSRRKKNFLLEEDLVSKEGEFQSRNMTDTAYMSREVCAYLSDCLQFPDDGLKNHIVPIAGRATAWLRRQWGLNFGATGEKDRSDDRHHATDACVIAACSRSLVIKTAKVMKQTHWQVTRDMTREQRRSARMKALEGTMPWSTFANEVRERWKVTVPTRFVPRKGRGELYGQTVYSYLGVDESGKDLGRKKGSNKKIVMGNAVISKDGKSMVKISEMLCLRLWFDPDAKGRGGKKGRWYSDPVYKADLGVIQSNAYIPRVAKAHRGRKAWSPVPQAALRRSPVVIYLGDVVKVGDVVGRFAGFDIDSANWSFVDCLDGKGIAFPTVGSLTSELRPEVIREKVLGNAEVYRSTQDDGTSSGAD

SEQ ID NO: 747 - protein, 862 aa, unidentified
  REGION 1..862: note = Description of Unknown: uncultivated organism with predicted taxonomy: Collinsella
  REGION 1..862: note = MG14-71 effector
MEITINREIGKLGLPRHLVLGMDPGIASCGFALIDTANHEILDLGVRLFDSPTHPKTGQSLAVIRRGFRSTRRNIDRTQARLKHCLQILKAYGLIPQDATKEYFHTTKGDKQPLKLRVDGLDRLLNDREWALVLYSLCKRRGYIPHGEGNQDKSSEGGKVLSALAANKEAIAETSCRTVGEWLAQQPQSRNRGGNYDKCVTHAQLIEETHILFDAQRSFGSKYASPEFEAAYIEVCDWERSRKDFDRRTYDLVGHCSYFPTEKRAARCTLTSELVSAYGAFGNITIIHENGTSRALSATERDECIAILFSCEPIRGNKDCAVKFGALRKALDLSSGDYFKGVPAADEKTREVYKPKGWRVLRNTLNAANPILLQRLRDDRNLADAVMEAVAYSSALPVLQEQLQGLPLSEAEIEALCRLPYSSKALNGYGNRSKKALDMLLDCLEEPEVLNLTQAENDCGLLGLRIAGAQLERSDRLMPYETWIERTGRTNNNPAVIRAMSQMRKVVNAICRKWGVPNEIHVELDRELRLPQRAKDEIAKANKKNEKNRERIAGQIAELRGCTADEVTGKQIEKYRLWEEQECFDLYTGAKIEVDRLISDDTYTQIDHILPFSRTGENSRNNKVLVLAKSNQDKREQTPYEWMSHDGAPSWDAFERRVQENQKLSRRKKNFLLEKDLDTKEGEFLARSFTDTAYMSREVCAYLADCLLFPDDGAKAHVVPTTGRATAWLRRRWGLNFGSNGEKDRSDDRHHATDACVISACSRSLVIKTARINQETHWSITRGMNETQRRDAIMKALESVMPWETFANEVRAAHDFVVPTRFVPRKGKGELFEQTVYRYAGVNAQGKDIARKASSDKSDGAG

SEQ ID NO: 748 - protein, 895 aa, unidentified
  REGION 1..895: note = Description of Unknown: uncultivated organism with predicted taxonomy: Atopobium sp. ICM42b
  REGION 1..895: note = MG14-72 effector
YINRGEETLINGEVSTEVSSESEEAGKVLSAISENKKALKESGYRSFGEYLYKESYVSTRSYRNKAGDYKHCVSHPMVVDEIKELFEQQKKFGNTHTSEEFKYAYLEQLNWLKDTKAFDKLTYQKVGYCVYFDQYSDEPQKRSANADLISEVVKAYEKLGNIRLKFDDKPEQSLTREVRDAVINEMFSVHQGAKVKSVTYKTLRKLIDDDNLIGFKGVKSDLEKNPVFVPKAWNTFCRVLSGSESGIQLLNRMRSDFKFANAIAESLTYASSLDSLERRISMYQEKEDLVISEDELALIESLPYNTKIFKGYGSRSVQALEMLHDQFSDGEAFTLDEAEKQSGLQGFRLREKGIRQSLLPPYSDYDVQCTNPVVLRVLAQARRMINSAIKQYGMPNIIRIELGNDIAKSAKEKSKIAKGQNENRKENERIKDKIAEILHIDQSEVTGKQITKMKLYEEQGGKDIYTGEGLGDIAFAGGRRFLIDDNYCEIDHVLPYSRSADDLKSNKVLVLAKSNQEKGNRTPYEWMNSNDGSHPNWEQFCLRVLSNVRLSDGKKSKLLEENFAEKEVSFIKRNMVDTQYMARAISAWLSDSLNFSTEFNQKQHVYAVNGRMTAKLRRKWGLNFGEDDTKDRSDNRHHAIDAAVIAVCSASMVKEFAISYSRLREVRDSVIAEPWEGFADQVREAREWVIPTMYRPNKKNGLLFEESRYRYVEKKKKHILTSKDGKEKSSGNIRFFENEKDGRHVKIVGNIAYIRLWLDENARKGKGEWLIEPVYFVDLQSIKNGSYVPRYISASHVTSDEWKSIPEEVLSKIPPVVIHIQDVIQVDSSYFRVDGVDIDAKALNLMPVFSDSNNSDPALAKMSKWNKSTEVTRISEDALGLVWFNYLKNQNSSES

SEQ ID NO: 749 - protein, 1003 aa, unidentified
  REGION 1..1003: note = Description of Unknown: uncultivated organism with predicted taxonomy: Collinsella
  REGION 1..1003: note = MG14-73 effector
MEITINREIGKLGLPRHLVLGMDPGIASCGFALIDTANHEILDLGVRLFDSPTHPKTGQSLAVIRRGFRSTRRNIDRTQARLKHCLQILKAYGLIPQDATKEYFHTTKGDKQPLKLRVDGLDRLLNDREWALVLYSLCKRRGYIPHGEGNQDKSSEGGKVLSALAANKEAIAETSCRTVGEWLAQQPQSRNRGGNYDKCVTHAQLIEETHILFDAQRSFGSKYASPEFEAAYIEVCDWERSRKDFDRRTYDLVGHCSYFPTEKRAARCTLTSELVSAYGALGNITIIHENGTSRALSATERDECIAILFSCEPIRGNKDCAVKFGALRKALDLSSGDYFKGVPAADEKTREVYKPKGWRVLRNTLNTANPILLQRLRDDRNLADAVMEAVAYSSALPVLQEQLQGLPLSEAEIEALCRLPYSSKALNGYGNRSKKALDLLLDCLEEPEVLNLTQAENDCGLLGLRIAGAQLERSDRLMPYETWIERTGRTNNNPVVIRAMSQMRKVVNAICRKWGVPNEIHVELDRELRLPQRAKDEIAKANKKNEKNRERIAGQIAELRGCTADEVTGKQIEKYRLWEEQECFDLYTGAKIEVDRLISDDTYTQIDHILPFSRTGENSRNNKVLVLAKSNQDKREQTPYEWMSHDGAPSWDAFERRVQENQKLSRRKKNFLLEKDLDSKEGEFLARSFTDTAYMSREVCAYLADCLLFPDDGAKAHVVPTTGRATAWLRRRWGLNFGSNGEKDRSDDRHHATDACVIAACSRSLVIKTARINQETHWSITRGMNETQRRDAIMKALESVMPWETFANEVRAAHDFVVPTRFVPRKGKGELFEQTVYRYAGVNAQGKDIARKASSDKDIVMGNAVVSADEKSVIKVSEMLCLRLWHDPEAKKGQGAWYADPVYKADIPALKDGTYVPRIAKAHTGRKAWKPVPESAMKKPPLEIYLGDLVQIGDFVGRFSGFDINGANWSFSDRLTKKKLRSPTVNKLGNDPLPLIIRESPVR

SEQ ID NO: 750 - protein, 1026 aa, unidentified
  REGION 1..1026: note = Description of Unknown: uncultivated organism with predicted taxonomy: Collinsella
  REGION 1..1026: note = MG14-74 effector
MAAYEDPRDCGFDPELVKTALMSREQFGSKPRKLVLGIDMGIAGIGICLMDKLNQEIVLMATHLFDCPWNPKNKTSLASARRQARSQRRNIARRTARKKHIREILMARGVIPEGVTAEWFSVRKGEQDNIQLRVKGLSQILSSRELARVLYGFASRRGYIDHGKADNDKDAGKVKKALKENAEIMDANGYETFAQYLVTQPRIRNRQNDYSHTIDIDMVVDEVHAIFRHQRELGNELATESLEGEYLAALRWLTDTTKRDRIIYSKVGYCTYLGEPIRRGPKSSISSEMVRAYQTLANVKIEHIGSVATHISLLTRNQIVHDLFKVSKNPKPLKWSQLRKKLDLADTDTFAGVRQSDEAKDVCVKVPAWNVLCSTLHDLNPTLLNRLHDDVDLADAVCAAATFASSSESFATRIAERTDGLKQEDMEALLELPYGSKLFTGYGSTSLKALQMLRDAFEDTNINRLYDAEVATGLYDAREALAAKRNASDDGLLMPYSKYSPICTNPVVLRSCAQMRRIINSIIRHYGLPDTIRVEVANDLKRTEHEKKLITSGNIYNRRTNEKAKDDIVEYLGLSEADQVRGRDIDKVRLYNEQGGKDPYTGQGIDFGRMLTEKGYVEIDHILPFSRSCDNARTNKVLVLTKSNRDKSNRTPYEWMTSGEPTAPNWDEFCIRMDVWASGKEPKHYYSSKLAKLKEDNFTNNIDSFISRNLNDTRYMSKDVAKWLADCLPFPEDGRKHIFCVSGAATAFMRGIWRIGILDDAGKKNREDDRHYAVDAAVIAACTSSIVKDIALISEEHATNRDADRLLDGSLPYPEYRDQVKAWIPCIVPTYSPTRTATGALFKENTFSYKGIDGKGKDLIKKKKGALGPCTTAWKDGKGTARAYDEQYSLLAVYEESASRWLFDPLYYIDVQKRKTEEPFIRKFSKDLSIDYWEKIPLTGNEPSLLLKRGVVLIQDGIVGRYYGYDIAHNNVKLSPSGKVSFQKTGPLAAEKFPTPTKWTDELRIMQEDCLGLCWLEFLTERANHC

SEQ ID NO: 751 - protein, 1046 aa, unidentified
  REGION 1..1046: note = Description of Unknown: uncultivated organism with predicted taxonomy: Collinsella sp. AM13-34
  REGION 1..1046: note = MG14-75 effector
MDKAKGADIGELGFDPATFATALMTLEEFRSKDRVIWAGLDIGVASTGLCLVDVRNHEIVLMASHLFKSPVVDKKKATAAPESLASVRRGARSIRRNIMREGRRKKAIRAALADFDLIPADADGEWFSARRDERTVVRLRSKALGYLLNSRELARVLYSFASHRGYIDHGKSDKEDDAGKVKKALAANHAALADGGCKTFGQYLAGQPRSRNRAGDYSYTADIGMTVDEVRTIFARQRELGSEIASKALEERYIAELTWLTDTSKRDRSTYLKVGFCTYLGAPYRRGATSTISFEMVRAHQTLCNTVILHADGTSSTIPGDIRIEIVRDLFAVKKSVKPLKWSGLRRRLGLSEGDSFKGRPVEEEKRDCIALPAWAVLCAGLYENHRDLLERLHDHIDDADAVCSALTFASSAASLTGRLAPLALSDDEVEAIIDLPYSARLFSGYANASLEALQMLRGTFEDPRVTSLRQAEEDSGLAQARAILAEERGGSADGLLCAFSDYDPTCRNHVVLRATAQVRRMVNSVIRHYGLPDVIRVEVARDLKRSKHEREIVAESNRARLELNEQAKRDIIEFLGLPDDHHVRGRDLALVKLYREQGGKDPYTGAGIDFRRMLEEHGYAEIDHILPVSRTCDDSQANKVLCLTKSNRDKSNRSPYEWMTSGEASAPDWGEFCGRMERWAKMCEPRRYARKKLANLTCENLTERAGNFIDRNLNDTRYMSVALAKWLRECLPFAKDGHEHVFCVAGGATALMRSVWNIGITGPDGKKNREDDRHHAVDAAVIACCTPGIVRNVALVNEGHARADVRQRLFSDSLPYPEFKEQVDAWIPCIVPTLTLPNAVTGSVLKDTVYPYLGRDEAGKDLYLTVKRDKDGRIVERKVNKATTMWKDGQGGCRAYGSMCALEAVFDASAGKRGRWSFDPVYCIDIPHRDAERRTMRAFSKEKAIDLWDTVAVPEAAPRMTIRRGDVLVCDGKAARFHCFDISVNAIRLFSQRGGKQLQTTGPLSAEAFPPPSKWGEGVRIMQEDCLGLCWLSFLAQRAADVQME

SEQ ID NO: 752 - protein, 1003 aa, unidentified
  REGION 1..1003: note = Description of Unknown: uncultivated organism with predicted taxonomy: Collinsella
  REGION 1..1003: note = MG14-76 effector
MEITINREIGKLGLPRHLVLGMDPGIASCGFALIDTANHEILDLGVRLFDSPTHPKTGQSLAVIRRGFRSTRRNIDRTQARLKHCLQVLKAYGLIPQDATKEYFHTTKGDKQPLKLRVDGLDRLLNDREWALVLYSLCKRRGYIPHGEGNQDKSSEGGKVLSALAANKEAIAETSCRTVGEWLAQQPQSRNRGGNYDKCVTHAQLIEETHILFDAQRSFGSKYASPEFEAAYIEVCDWERSRKDFDRRTYDLVGHCSYFPTEKRAARCTLTSELVSAYGALGNITIIHENGTSRALTATERDECIAILFSCEPIRGNKDCAVKFGALRKALDLSSGDYFKGVPAADEKTREVYKPKGWRVLRNTLNAANPILLQRLRDDRNLADAVMEAVAYSSALPVLQEQLQGLPLSEAEIEALCRLPYSSKALNGYGNRSKKALDMLLDCLEEPEVLNLTQAENDCGLLGLRIAGAQLERSDRLMPYETWIERTGRTNNNPVVIRAMSQMRKVVNAICRKWGVPNEIHVELDRELRLPQRAKDEIAKANKKNEKNRERIAGQIAELRGCTADEVTGKQIEKYRLWEEQECFDLYTGAKIEVDRLISDDTYTQIDHILPFSRTGENSRNNKVLVLAKSNQDKREQTPYEWMSHDGAPSWDAFERRVQENQKLSRRKKNFLLEKDLDTKEGEFLARSFTDTAYMSREVCAYLADCLLFPDDGAKAHVVPTTGRATAWLRRRWGLNFGSNGEKDRSDDRHHATDACVIAACSRSLVIKTARINQETHWSITRGMNETQRRDAIMKALESVMPWETFANEVRAAHDFVVPTRFVPRKGKGELFEQTVYRYAGVNAQGKDIARKASSDKDIVMGNAVVSADEKSVIKVSEMLCLRLWHDPEAKKGQGAWYADPVYKADIPALKDGTYVPRIAKAHTGRKAWKPVPESAMKKPPLEIYLGDLVQIGDFVGRFSGFDINGANWSFSDRLTKKKLRSPTVNKLGNDPLPLIIRESPVR

SEQ ID NO: 753 - protein, 1003 aa, unidentified
  REGION 1..1003: note = Description of Unknown: uncultivated organism with predicted taxonomy: Collinsella
  REGION 1..1003: note = MG14-77 effector
MEITINREIGKLGLPRHLVLGMDPGIASCGFALIDTANHEILDLGVRLFDSPTHPKTGQSLAVIRRGFRSTRRNIDRTQARLKHCLQILKAYGLIPQDATKEYFHTTKGDKQPLKLRVDGLDRLLNDREWALVLYSLCKRRGYIPHGEGNQDKSSEGGKVLSALAANKEAIAETSCRTVGEWLAQQPQSRNRGGNYDKCVTHAQLIEETHILFDAQRSFGSKYASPEFEAAYIEVCDWERSRKDFDRRTYDLVGHCSYFPTEKRAARCTLTSELVSAYGALGNITIIHENGTSRALSATERDECIAILFSCEPIRGNKDCAVKFGALRKALDLSSGDYFKGVPAADEKTREVYKPKGWRVLRNTLNAANPILLQRLRDDRNLADAVMEAVAYSSALPVLQEQLQGLPLSEAEIEALCRLPYSSKALNGYGNRSKKALDMLLDCLEEPEVLNLTQAENDCGLLGLRIAGAQLERSDRLMPYETWIERTGRTNNNPVVIRAMSQMRKVVNAICRKWGVPNEIHVELDRELRLPQRAKDEIAKTNKKNEKNRERIAGQIAELRGCTADEVTGKQIEKYRLWEEQECFDLYTGAKIEVDRLISDDTYTQIDHILPFSRTGENSRNNKVLVLAKSNQDKREQTPYEWMSHDGAPSWDAFERRVQENQKLSRRKKNFLLEKDLDTKEGEFLARSFTDTAYMSREVCAYLADCLLFPDDGAKAHVVPTTGRATAWLRRRWGLNFGSNGEKDRSDDRHHATDACVIAACSPSLVIKTARINQETHWSITRGMNETQRRDAIMKALESVMPWETFANEVRAAHDFVVPTRFVPRKGKGELFEQTVYRYAGVNAQGKDIARKASSDKDIVMGNAVVSADEKSVIKVSEMLCLRLWHDPEAKKGQGAWYADPVYKADIPALKDGTYVPRIAKAHTGRKAWKPVPESAMAKPPLEIYFGDLVQIGDFIGRFSGYNINNANWSFTDRLTRLNLSCPTVGQLNNDLSPVVIRESPIK

SEQ ID NO: 754 - protein, 1004 aa, unidentified
  REGION 1..1004: note = Description of Unknown: uncultivated organism with predicted taxonomy: Collinsella
  REGION 1..1004: note = MG14-78 effector
MEITINREIGKLGLPRHLVLGMDPGIASCGFALIDTANREILDLGVRLFDSPTHPKTGQSLAVIRRGFRSTRRNIDRTQARLKHCLQILKAYGLIPQDATKEYFHTTKGDKQPLKLRVDGLDRLLNDREWALVLYSLCKRRGYIPHGEGNQDKSSEGGKVLSALAANKEAIAETSCRTVGEWLAQQPQSRNRGGNYDKCVTHAQLIEETHILFDAQRSFGSKYASPEFEAAYIEVCDWERSRKDFDRRTYDLVGHCSYFPTEKRAARCTLTSELVSAYGALGNITIIHDDGTSRALSATERDECIAILFSCEPIRGNKDCAVKFGALRKALDLSSGDYFKGVPAADEKTREVYKPKGWRVLRNTLNAANPILLQRLRDDRNLADAVMEAVAYSSALPVLQEQLQGLPLSEAEIEALCRLPYSSKALNGYGNRSKKALDMLLDCLEEPEVLNLTQAENDCGLLGLRIAGTQLERSDRLMPYETWIELTGRTNNNPVVIRSMSQMRKVVNAVCRKWGVPNEIHVELDRELRLPQRAKDEIAKANKKNEKNRERIAGQIAELRGCTADEVTGKQIEKYRLWEEQEYFDLYTGAKIEVDRLISDDTYTQIDHILPFSRTGENSRNNKVLVLAKSNQDKREQTPYEWMSHDGAPSWDAFVRRVQENQKLSRRKKNFLLEKDLDTKEGEFLARSFTDTAYMSREVCAYLADCLLFPDDGAKAHVVPTTGRATAWLRRRWELNFGSNREKDRSDDRHHATDACVIAACSRSLVIKTARINQETHWSITRGMNETQRRDAIMKALESVMPWETFANEVRAAHDFVVPTRFVPRKGKGELFEQTVYRYAGVNAQGKDLARKASSDKDIVMGNAVVSADEKSVIKVSEMLCLRLWHDPEAKKGQGAWYADPVYKADIPALKDGTYIPRIAKQKYGRKVWKAVPNSALTQKPLEIYLGDLIKVGDKLGRYNGYNIATANWSFVDALTKKEIAFPSVGMLSNELQPIIIRESILDN

SEQ ID NO: 755 - protein, 1003 aa, unidentified
  REGION 1..1003: note = Description of Unknown: uncultivated organism with predicted taxonomy: Collinsella
  REGION 1..1003: note = MG14-79 effector
MEITINREIGKLGLPRHLVLGMDPGITSCGFALIDTANHEILDLGVRLFDSPTHPKTGQSLAVIRRGFRSTRRNIDRTQARLKHCLQVLKAYGLIPQDATKEYFHTTKGDKQPLKLRVDGLDRLLNDREWALVLYSLCKRRGYIPHGEGNQDKSSEGGKVLSALAANKEAIAETSCRTVGKWLAQQPQSRNRGGNYDKCVTHAQLIEETHILFDAQRSFGSKYASPEFEAAYIEVCDWERSRKDFDRRTYDLVGHCSYFPTEKRAARCTLTSELVSAYGALGNITIIHENGTSRALSATERDECIAILFSCEPIRGNKDCAVKFGALRKALDLSSGDYFKGVPAADEKTREVYKPKGWRVLRNTLNATNPILLQRLRDDRNLADAVMEAVAYSSALPVLQEQLQGLPLSEAEIEALCRLPYSSKALNGYGNRSKKALDMLLDCLEEPEVLNLTQAENDCGLLGLRIAGAQLERSDRLMPYETWIERTGRTNNNPVVIRAMSQMRKVVNAICRKWGVPNEIHVELDRELRLPQRAKDEIAKANKKNEKNRERIAGQIAELRGCTADEVTGKQIEKYRLWEEQECFDLYTGAKIEVDRLISDDTYTQIDHILPFSRTGENSRNNKVLVLAKSNQDKREQTPYEWMSHDGAPSWDAFERRVQENQKLSRRKKNFLLEKDLDTKEGEFLARSFTDTAYMSREVCAYLADCLLFPDDGAKAHVVPTTGRATAWLRRRWGLNFGSNGEKDRSDDRHHATDACVIAACSRSLVIKTARINQETHWSITRGMNETQRRDAIMKALESVMPWETFANEVRAAHDFVVPTRFVPRKGKGELFEQTVYRYAGVNAQGKDIARKASSDKDIVMGNAVVSADEKSVIKVSEMLCLRLWHDPEAKKGQGAWYADPVYKADIPALKDGTYVPRIAKAHTGRKAWKPVPESAMKKPPLEIYLGDLVQIGDFVGRFSGYNIDNANWSFVDRLTRIKISCPTVGKLSNDMSPFVVRESPIK

SEQ ID NO: 756 - protein, 1003 aa, unidentified
  REGION 1..1003: note = Description of Unknown: uncultivated organism with predicted taxonomy: Coriobacteriales
  REGION 1..1003: note = MG14-80 effector
MEITINREIGKLGLPRHLVLGMDPGIASCGFALIDTANHEILDLGVRLFDSPTHPKTGQSLAVIRRGFRSTRRNIDRTQARLKHCLQVLKAYGLIPQDATKEYFHTTKGDKQPLKLRVDGLDRLLNDREWALVLYSLCKRRGYIPHGEGNQDKSSEGGKVLSALAANKEAIAETSCRTVGEWLAQQPQSRNRGGNYDKYVTHAQLIEETHILFDAQRSFGSKYASPEFEAAYIEVCDWERSRKDFARRTYDLVGHCSYFPTEKRAARCTLTSELVSAYGALGNITIIHENGTSRALSATERDECIAILFSCEPIRGNKDCAVKFGALRKALDLSSGDYFKGVPAADEKTREVYKPKGWRVLRNTLNAANPILLQRLRDDRDLADAVMEAVAYSSALPVLQEQLQGLPLSEAEIEALCRLPYSSKALNGYGNRSKKALDMLLDCLEEPEVLNLTQAENDCGLLGLRIAGAQLERSDRLMPYETWIERTGRTNNNPVVIRSMSQMRKVVNAICRKWGVPNEIHVELDRELRLPQRAKDEIAKANKKNEKNRERIAGQIAELRGCTADEVTGKQIEKYRLWEEQEYFDLYTGAKIEVDRLISDDTYTQIDHILPFSRTGENSRNNKVLVLAKSNQDKREQTPYEWMSHDGAPSWDAFERRVQENQKLSRRKKNFLLEKDLDTKEGEFLARSFTDTAYMSREVCAYLADCLLFPDDGAKAHVVPTTGRATAWLRRRWGLNFGSNGEKDRSDDRHHATDACVIAACSPSLVIKTARINQETHWSITRGMNETQRRDAIMKALESVMPWETFANEVRAAHDFVVPTRFVPRKGKGELFEQTVYRYAGVNAQGKDIARKASSDKDIVMGNAVVSADEKSVIKVSEMLCLRLWHDPEAKKGQGAWYADPVYKADIPALKDGTYVPRIAKAHTGRKAWKPVPESAMAKPPLEIYFGDLVQIGDFIGRFSGYNINNANWSFTDRLTRLNLSCPTVGQLNNDLSPVVIRESPIK

SEQ ID NO: 757 - protein, 1004 aa, unidentified
  REGION 1..1004: note = Description of Unknown: uncultivated organism with predicted taxonomy: Collinsella
  REGION 1..1004: note = MG14-82 effector
MEITINREIGKLGLPRHLVLGMDPGIASCGFALIDTANREILDLGVRLFDSPTHPKTGQSLAVIRRGFRSTRRNIDRTQARLKHCLQILKAYGLIPQDATKEYFHTTKGDKQPLKLRVDGLDRLLNDREWALVLYSLCKRRGYIPHGEGNQDKSSEGGKVLSALAANKEAIAETSCRTVGEWLAQQPQSRNRGGNYDKCVTHAQLIEETHILFDAQRSFGSKYASPEFEAAYIEVCDWERSRKDFDRRTYDLVGHCSYFPTEKRAARCTLTSELVSAYGALGNITIIHDDGTSRALSATERDECIAILFSCEPIRGNKDCAVKFGALRKALDLSSGDYFKGVPAADEKTREVYKPKGWRVLRNTLNAANPILLQRLRDDRNLADAVMEAVAYSSDLPVLQEQLQGLPLSEAEIEALCRLPYSSKALNGYGNRSKKALDMLLDCLEEPEVLNLTQAENDCGLLGLRIAGTQLERSDRLMPYETWIELTGRTNNNPVVIRSMSQMRKVVNAVCRKWGVPNEIHVELDRELRLPQRAKDEIAKANKKNEKNRERIAGQIAELRGCTADEVTGKQIEKYRLWEEQEYFDLYTGAKIEVDRLISDDTYTQIDHILPFSRTGENSRNNKVLVLAKSNQDKREQTPYEWMSHDGAPSWDAFVRRVQENQKLSRRKKNFLLEKDLDTKEGEFLARSFTDTAYMSREVCAYLADCLLFPDDGAKAHVVPTTGRATAWLRRRWGLNFGSNREKDRSDDRHHATDACVIAACSRSLVIKTARINQETHWSITRGMNETQRRNAIMKALESVMPWETFANEVRAAHDFVVPTRFVPRKGKGELFEQTVYRYAGVNAQGKDLARKASSDKDIVMGNAVVSADEKSVIKVSEMLCLRLWHDPEAKKGQGAWYADPVYKADIPALKDGTYIPRIAKQKYGRKVWKAVPNSALTQKPLEIYLGDLIKVGDKLGRYNGYNIATANWSFVDALTKKEIAFPSVGMLSNELQPIIIRESILDN

SEQ ID NO: 758 - protein, 1003 aa, unidentified
  REGION 1..1003: note = Description of Unknown: uncultivated organism with predicted taxonomy: Collinsella
  REGION 1..1003: note = MG14-83 effector
MTSTVNREIGKLGLPRHLVLGMDPGIASCGFALIDINNHEILEIGVRLFDSPTHPKTGQSLAVIRRGFRSTRRNIDRTQARLKHCLEVLKKHGVIPQDATKEFFHTTKGDKQPLKLRVEGLDRMLTSREWALVLYSLCKRRGYIPHGEGSQDKSSEGGKVLSALAANKEAIAETSCRTVGEWLAQQPQSRNRGGNYDKCVTHAQLVEETHILFEAQRNFGSQYASAELEEAYVQVCDWERSRKDFDRRSYDLVGYCTYFPTEKRAARCTLTSELVAAYGALGNITIVREDGTTRTLTAAERDKCIAILFSCEPIRGNKDCAVKFGALRRELDLNSGDYFKGVPAADEKTREVYKPKGWRTLRNTLNTISPFLLRRLHDDRDLTDSVMEAVAYSSALPVLEEQLQALPLSPTEIGALCKLPYSSKALNGYGNRSKKALDMLLDCLEDSEVLGLTQAEDDCGLLGLRTQGAQLKRSEHLMPYEMWVELTGRTNNNPVVIRSMSQMRKVVNAICRKWGVPNEIHIELDRELRLPQRAKDDIAKAHKKNEKNRERIAGQIAELRGCSPEDVSGKLIEKYRLWEEQEYFDLYTGTKIEVDRLISDETYTQIDHILPFSRTGENSPSNKVLVLAKSNQDKREQTPFEWMSKEGAPSWDAFKRRVEENQKLGRRKKNFLLEEDLEAKEGEFLTRSFTDTAYMSREVCAYLADCLLFPEDGTKSHVVPTTGRATAWLRRRWGLNFGTNGEKDRSDDRHHATDACVIAACSRSLVIKTAHISEQTHWTVTKNLDKDERNRLRMKALENVMPWETFANEVRASHDFVIPTRFVPRKGKGELFEQTTYRYAGVNDKGKDLARKANSDQDIVMGNAVVSEDGKSIIKVSEMLCLRLWHDPEAKKGQGCWYADPVYKADIPALKDGTYVPKIAKAHTGRKAWKPVPESAMKHAPLEIYLGDLVKIDDFIGRFSGFDINSANWSFSDRLTRQKLNCPTVGRLNNALLPTIIRESTID

SEQ ID NO: 759 - protein, 1000 aa, unidentified
  REGION 1..1000: note = Description of Unknown: uncultivated organism with predicted taxonomy: Olsenella
  REGION 1..1000: note = MG14-84 effector
MDVTRPYLVLGLDPGIASCGFCLLDMSNHKILEMGSHLFKAPQEDKTKTSLAVTRRKARSIRRNTARTAARLKHCLELLAGAGLVPANADKTWLQTKKGDKPILKLRASGLDRLLTDREFAQVLYSLCGRRGYIPHGEGRLGETDEDESRKVLGAIKKNQDAMAAGSYRTVGEMLNAQGRSRNRGGDYSLCVYNSQIQDEAKALFASQRARGNTKATRELEDSYLACLTWEKKSLDHDTRVYELVGPCSYFPGEKRAASADVSSELCRAYERLGHIVIVHEDGSEQALTASEIDDYLKILFSTAPIKGNKECKVSYGTIRKDLDISGKSVFKGIAQDREKDEPFVPKAWRSLRRVLPKGLLARMLEDRKLGDAVCEALTFASSEASLIERLSDLGLSDDERDAILAVPFTGKLFKGYGSRSLKALGLLLGAFEEPEIRILTDAEKVTGLLDLRLSDRGVRGQLLPPYDSYDPTCRNPVVLRAMGRMRHIVNAIIRIHGVPDEIHIELGRELKMSNKEKSLVDKRNRENAANNKKWAATAAGILGCTPEEVPGRIIRKLILREEQGEKDLYTGEPIDLEHLVRDDRYCEIDHILPYSRTCDDGRANKVLVLSKSNQDKRERTPYEWMTSGEAGAPSWDSYRARVMAQVKNPRKRANYLNTDLGPETQAKFLARNLNDDRYMSVAVKNYLEDCLLFPEDGRKRHVTAVAGGATGNLRWVWGLNFGEGNIKDRADDRHHAIDAAIIAACSESTVKKVAEASAKGREAFKQLRKSRLADTQPWPTFATEVAARREFVVPTRMADHGVTGRVFEDTLYHLEGITDDKGKYPLVRAGEKTAKKGNVHFNPDGSVKLIDGMAFLRLWLDPTARPNGKVKGKWHAEPVYYADIPAIKAGTYVPRAIVQGIARINWEPIPQTALESKPLVLFKNDVLVVDGHIARYSNIGISVCQLLMLNLLTRDRVTDWPSVGSWGKDTQVRILQEDCLGHCYDSIAINPEDSTFQQR

SEQ ID NO: 760 - protein, 1003 aa, unidentified
  REGION 1..1003: note = Description of Unknown: uncultivated organism with predicted taxonomy: Collinsella
  REGION 1..1003: note = MG14-85 effector
MEITINREIGKLGLPRHLVLGMDPGIASCGFALIDTANHEILDLGVRLFDSPTHPKTGQSLAVIRRGFRSTRRNIDRTQARLKHCLQVLKAYGLIPQDATKEYFHTTKGDKQPLKLRVDGLDRLLNDREWALVLYSLCKRRGYIPHGEGNQDKSSEGGKVLSALAANKEAIAETSCRTVGEWLAQQPQSRNRGGNYDKCVTHAQLIEETHILFDAQRSFGSKYASPEFEAAYIEVCDWERSRKDFDRRTYDLVGHCSYFPTEKRAARCTLTSELVSAYGALGNITIIHENGTSRALSATERDECIAILFSCEPIRGNKDCAVKFGALRKALDLSSGDYFKGVPAADEKTREVYKPKGWRVLRNTLNATNPILLQRLRDDRNLADAVMEAVAYSSALPVLQEQLQGLPLSEAEIEALCRLPYSSKALNGYGNRSKKALDMLLDCLEEPEVLNLTQAENDCGLLGLRIAGAQLERSDRLMPYETWIERTGRTNNNPVVIRAMSQMRKVVNAICRKWGVPNEIHVELDRELRLPQRAKDEIAKANKKNEKNRERIAGQIAELRGCTADEVTGKQIEKYRLWEEQECFDLYTGAKIEVDRLISDDTYTQIDHILPFSRTGENSRNNKVLVLAKSNQDKREQTPYEWMSHDGAPSWDAFERRVQENQKLSRRKKNFLLEKDLDTKEGEFLARSFTDTAYMSREVCAYLADCLLFPDDGAKAHVVPTTGRATAWLRRRWGLNFGSNGEKDRSDDRHHATDACVIAACSRSLVIKTARINQETHWSITRGMDETQRRDAIMKALESVMPWETFANEVRAAHDFVVPTRFVPRKGKGELFEQTVYRYAGVNAQGKDIARKASSDKDIVMGNAVVSADEKSVIKVSEMLCLRLWHDPEAKKGQGAWYADPVYKADIPALKDGTYVPRIAKAHTGRKAWKPVPESAMKKPPLEIYLGDLVQIGDFVGRFSGYNIHNANWSFVDRLTRIKISCPTVGKLSNDMSPFVVRESPIK

SEQ ID NO: 761 - protein, 1003 aa, unidentified; identical to SEQ ID NO: 717
  REGION 1..1003: note = Description of Unknown: uncultivated organism with predicted taxonomy: Collinsella
  REGION 1..1003: note = MG14-87 effector

SEQ ID NO: 762 - protein, 1003 aa, unidentified; identical to SEQ ID NO: 717
  REGION 1..1003: note = Description of Unknown: uncultivated organism with predicted taxonomy: Collinsella
  REGION 1..1003: note = MG14-88 effector

SEQ ID NO: 763 - protein, 1002 aa, unidentified
  REGION 1..1002: note = Description of Unknown: uncultivated organism with predicted taxonomy: Collinsella
  REGION 1..1002: note = MG14-89 effector
MEITINREIGKLGLPRHLVLGMDPGIASCGFALIDTANHEILDLGVRLFDSPTHPKTGQSLAVIRRGFRSTRRNIDRTQARLKHCLQILKAYGLIPQDATKEYFHTTKGDKQPLKLRVDGLDRLLNDREWALVLYSLCKRRGYIPHGEGNQDKSSEGGKVLSALAANKEAIAETSCRTVGEWLAQQPQSRNRGGNYDKCVTHAQLIEETHILFDAQRSFGSKYASPELEAAYIEVCDWERSRKDFDRRTYDLVGHCSYFPTEKRAARCTLTSELVSAYGALGNITIIHENGTSRALSATERDECIAILFSCEPIRDNEDCAVKFGALRKALDLSSGDYFKGVPAADEKTREVYKPKGWRVLRNTLNAANPILLQRLRDDRDLADAVMEAVAYSSALPVLQEQLQGLPLSKAEIEALCRLPYSSKALNGYGNRSKKALDMLLDCLEEPEVLNLTQAENDCGLLGLRIAGAQLERSDRLMPYETWIERTGRTNNNPVVIRSMSQMRKVVNAVCRKWGVPNEIHVELDRELRLPQRAKDEIAKANKKNEKNRERIAGQIAELRGCTADEVTGKQIEKYRLWEEQECFDLYTGAKIEVDRLISDDTYTQIDHILPFSRTGENSRNNKVLVLAKSNQDKREQTPYEWMSHDGAPSWDAFERRVQENQKLSRRKKNFLLEKDLDTKEGEFLARSFTDTAYMSREVCAYLADCLLFPDDGAKAHVVPTTGRATAWLRRRWGLNFGSNGEKDRSDDRHHATDACVIAACSRSLVIKTARINQETHWSITRGMNETQRRDAIMKALESVMPWETFANEVRAAHDFVVPTRFVPRKGKGELFEQTVYRYAGVNAQGKDIARKASSDKDIVMGNAVVSADEKSVIKVSEMLCLRLWHDPEAKKGKGAWYADPVYKADIPSLKDGTYVPKIAKAATGRKAWKAIPQNVLNSAPLEIYLGDLVQIGNQKGRFRGINIDTVSWSFVDTLSKLPVKMPTIGRLNNETIPTVIRELLI

SEQ ID NO: 764 - protein, 1003 aa, unidentified
  REGION 1..1003: note = Description of Unknown: uncultivated organism with predicted taxonomy: Coriobacteriia
  REGION 1..1003: note = MG14-90 effector
MEITINREIGKLGLPRHLVLGMDPGIASCGFALIDTANHEILDLGVRLFDSPTHPKTGQSLAVIRRGFRSTRRNIDRTQARLKRCLQVFKAYGLIPQDATKEYFHTTKGDKQPLKLRVDGLDRLLSAREWALVLYSLCKRRGYIPHGEGNQDKSSEGGKVLSALAANKEAIAETSCRTVGEWLAQQPQSRNRGGNYDKCVTHAQLIEETHILFDAQRSFGSKYASPEFEAAYIEVCDWERSRKDFDRRTYDLVGHCPYFPTEKRAARCTLTSELVSAYGALGNITIIHENGTSRALSATEHDECIAILFSCEPIRGNKDCAVKFGALRKALDLSSGDYFKGVPAADEKTREVYKPKGWRVLRNTLNAANPILLQRLRDDRDLADAVMEAVAYSSALPVLQERLQGLPLSEAEIEALCRLPYSSKALNGYGNRSKKALDMLLDCLEEPEVLNLTQAENDCGLLGLRIAGAQLERSDRLMPYETWIERTGRTNNNPVVIRSMSQMRKVVNAICRKWGVPNEIHVELDRELRLPQRAKDEIAKANKKNEENRERIARQIAELRGCTADEVTGKQIEKYRLWEEQECFDLYTGAKIEVDRLISDDTYTQIDHILPFSRTGENSRNNKVLVLAKSNQDKREQTPYEWMSHDGAPSWDAFERRVQENQKLSRRKKNFLLEKDLDTKEGEFLARSFTDTAYMSREVCAYLADCLLFPDDGAKAHVVPTTGRATAWLRRRWGLNFGSNGEKDRSDDRHHATDACVIAACSRRLVIKTARINQEMHWSMTKGMSKAQRQDAIMKALENAMPWETFANEVRVAHDFVVPTRFVPRKGKGELFEQTVYRYAGVNAQGKDIARKASSDKDIVMGNAVVSADEKSVIKVSEMLCLRLWHDPKAKKGQGAWYADPVYKADIPALKDGTYVPRIAKAHTGRKAWKPVPESAMKKPPLEIYLGDLVQIGDFVGRFSGFDIDNANWSFSDRLTRKKLRSPTVNKLSNDLSPLVIRESPIR

SEQ ID NO: 765 - protein, 1026 aa, unidentified; identical to SEQ ID NO: 746
  REGION 1..1026: note = Description of Unknown: uncultivated organism with predicted taxonomy: Collinsella tanakaei
  REGION 1..1026: note = MG14-91 effector

SEQ ID NO: 766 - protein, 1004 aa, unidentified
  REGION 1..1004: note = Description of Unknown: uncultivated organism with predicted taxonomy: Collinsella
  REGION 1..1004: note = MG14-92 effector
MEITINREIGKLGLPRHLVLGMDPGIASCGFALIDTANHEILDLGVRLFDSPTHPKTGQSLAVIRRGFRSTRRNIDRTQARLKHCLQVLKAYGLIPQDATKEYFHTTKGDKQPLKLRVDGLCRLLNDREWALVLYSLCKRRGYIPHGEGNQDKSSEGGKVLSALAANKEAIAETSCRTVGEWLAQQPQSRNRGGNYDKCVTHAQLIEETHILFDAQRSFGSKYASPEFEAAYIEVCDWERSRKDFDRRTYDLVGHCSYFPTGKRAARCTLTSELVSAYGALGNITIIHENGTSRALSATERDECIAILFSCEPIRGNKDCAVKFGALRKALDLSSGDYFKGVPAADEKTREVYKPKGWRVLRNTLNAANPILLQRLRDDRDLADAVMEAVAYSSALPVLQEQLQGLPLSKAEIEALCRLPYSSKALNGYGNRSKKALDMLLDCLEEPEVLNLTQAENDCGLLGLRIAGAQLERSDRLMPYETWIEHTGRTNNNPVVIRSMSQMRKVVNAICRKWGVPNEIHVELDRELRLPQRAKDEIAKANKKNEKNRERIAGQIAELRGCTADEVTGKQIEKYRLWEEQECFDLYTGAKIEVDRLISDDTYTQIDHILPFSRTGENSRNNKVLVLAKSNQDKREQTPYEWMSHDGAPSWDAFERRVQENQKLSRRKKNFLLEKDLDAKEGDFLARSFTDTAYMSREVCAYLADCLQFPDDGAKAHVVPTTGRATAWLRRRWGLNFGSNGEKDRSDDRHHATDACVIAACSRSLVIKTARINQETHWSITRGMNETQRHDAIMKALESVMPWETFANEVRAAHDFVVPTRFVPRKGKGELFEQTVYRYAGVNAQGKDLARKVGSDKDIVMGNAVVSADEKSVVKVSEMLCLRLWHDPEAKKGQGAWYADPVYKADIPALKDGTYVPRIAKQKYGRKVWKAVPNSALTQKPLEIYLGDLIKVGDKLGRYNGYNIATANWSFVDALTKKEIAFPSVGMLSNELQPIIIRESILDN

SEQ ID NO: 767 - protein, 1003 aa, unidentified
  REGION 1..1003: note = Description of Unknown: uncultivated organism with predicted taxonomy: Collinsella
  REGION 1..1003: note = MG14-93 effector
MEITINREIGKLGLPRHLVLGMDPGIASCGFALIDTANHEILDLGVRLFDSPTHPKTGQSLAVIRRGFRSTRRNIDRTQARLKHCLQVFKAHGLIPQDATKEYFHTTKGDKQPLKLRVDGLDRLLSDREWALVLYSLCKRRGYIPHGEGNQDKSSEGGKVLSALAANKEAIAEASCRTVGEWLAQQPQSRNRGGNYDKCVTHAQLIEETHILFDAQRSFGSKYASPELEAAYIEVCDWERSRKDFDRRTYDLVGHCSYFPTEKRAARCTLTSELVSAYGALGNITIIHDDGTSRALSATERDECIAILFSCEPIRGNKDCAVKFGALRKALDLSSGDYFKGVPAADEKTREVYKPKGWRVLRNTLNAANPILLQRLRDDRDLADAVMEAVAYSSALPVLQERLQGLPLSEAEIEALCRLPYSSKALNGYGNRSKKALDMLLDCLEEPEVLNLTQAENDCGLLGLRIAGAQLERSDRLMPYELWAERTGRTNNNPVVIRSMSQMRKVVNAICRKWGVPNEIHVELDRELRLPQRAKDEIAKANKKNEKNRERIAGQIAELRGCTADEVTGKQIEKYRLWEEQECFDLYTGAKIEVDRLISDDTYTQIDHILPFSRTGENSRNNKVLVLAKSNQDKREQTPYEWMSHDGAPSWDAFERRVQENQKLSRRKKNFLLEKDLDAKEGDFLARSFTDTAYMSREVCAYLADCLQFPDDGAKAHVVPTTGRATAWLRRRWGLNFGSNGEKDRSDDRHHATDACVIAACSRSLVIKTARLNQETHWSITRGMNEIQRHDAIMKALESVMPWETFANEVRAAHDFVVPTRFVPRKGKGELFEQTVYRYAGVNAQGKDLARKAGSDKDIVMGNAVVSADEKSVIKVSEMLCLRLWHDPEAKKGQGAWYADPVYKADIPALKDGTYVPRIAKAHTGRKAWKPVPKSAMAKPPLEIYFDDLVQIGDFIGRFSGYNINSANWSFTDRLTRLNLSCPTVGQLNNDLSPVVIRESPIK

SEQ ID NO: 768 - protein, 1003 aa, unidentified
  REGION 1..1003: note = Description of Unknown: uncultivated organism with predicted taxonomy: Collinsella
  REGION 1..1003: note = MG14-94 effector
MEITINREIGKLGLPRHLVLGMDPGIASCGFALIDTANHEILDLGVRLFDSPTHPKTGQSLAVIRRGFRSTRRNIDRTQARLKHCLQILKAYGLIPQDATKEYFHTTKGDKQPLKLRVDGLDRLLNDREWALVLYSLCKRRGYIPHGEGNQDKSSEGGKVLSALAANKEAIAETSCRTVGEWLAQQPQSRNRGGNYDKCVTHAQLIEETHILFDAQRSFGSKYASPEFEAAYIEVCDWERSRKDFDRRTYDIVGHCSYFPTEKRAARCTLTSELVSAYGALGNITIIHENGTSRALTATERDECIAILFSCEPIRGNKDCAVKFGALRKALDLSSGDYFKGVPAADEKTREVYKPKGWRVLRNTLNATNPILLQRLRDDRNLADAVMEAVAYSSALPVLQEQLQGLPLSEAEIEALCRLPYSSKALNGYGNRSKKALDMLLDCLEEPEVLNLTQAENDCGLLGLRIAGAQLERSDRLMPYETWIERTGRTNNNPVVIRAMSQMRKVVNAICRKWGVPNEIHVELDRELRLPQRAKDEIAKANKKNEKNRERIAGQIAELRGCTADEVTGKQIEKYRLWEEQECFDLYTGAKIEVDRLISDDTYTQIDHILPFSRTGENSRNNKVLVLAKSNQDKREQTPYEWMSHDGAPSWDAFERRVQENQKLSRRKKNFLLEKDLDTKEGEFLARSFTDTAYMSREVCAYLADCLLFPDDGAKAHVVPTTGRATAWLRRRWGLNFGSNGEKDRSDDRHHATDACVIAACSRSLVIKTARINQETHWSITRGMNETQRRDAIMKALESVMPWETFANEVRAAHDFVVPTRFVPRKGRGELFEQTVYRYAGVNAQGKDIARKASSDKDIVMGNAVVSADEKSVIKVSEMLCLRLWHDPEAKKGQGAWYADPVYKADIPALKDGTYVPRIAKAHTGRKAWKPVPESAMKKPPLEIYLGDLVQIGDFVGRFSGYNIDNANWSFVDRLTRIKISCPTVGKLSNDMSPFVVRESPIK

SEQ ID NO: 769 - protein, 1046 aa, unidentified
  REGION 1..1046: note = Description of Unknown: uncultivated organism with predicted taxonomy: Collinsella
  REGION 1..1046: note = MG14-95 effector
MDKAKGADIGELGFDPATFATALMTLEEFRSKDRVIWAGLDIGVASTGLCLVDVRNHEIVLMASHLFKSPVVDKKKATAAPESLASVRRGARSVRRNIMREGRRKKAIRAALADFDLIPADTDGEWFSARRDERTVVRLRSKALGYLLNSRELARVLYSFASHRGYIDHGKSDKEDDAGKVKKALAANHAALADGGCKTFGQYLAGQPRSRNRAGDYSYTADIGMTVDEVRTIFARQRELGSEIASKALEERYIAELTWLTDTSKRDRSTYLKVGFCTYLGAPYRRGATSTISFEMVRAHQTLCNTVILHADGTSSTIPGDIRIEIVRELFDVKRSVKPLKWSGLRRRLGLAECDSFKGRPAEEEKRDCIALPAWAVLCSGLYENHRDLLERLHDHIDDADAVCSALTFASSAASLAGRLAPLAITDDEVEAIIDLPYSARLFSGYANASLEALQMLRGTFEDPHVTSLRQAEEDSGLAQARAMLAEERGGSADGLLCAFSDYDPTCRNPVVLRATAQVRRMVNSVIRHYGLPDVIRVEVARDLKRSKHEREIVAESNRARLELNEQAKRDIIEFLGLPDDHHVRGRDLALVKLYREQGGKDPYTGAGIDFRRMLEEHGYAEIDHILPVSRTCDDSQANKALCLTKSNRDKSNRSPYEWMTSGEASAPDWGEFCGRMERWAKMCETRRYARKKLANLTCENLAERAGNFIDRNLNDTRYMSVALAKWLRECLPFTKDGHEHVFCVAGGATALMRSVWDIGITGPDGKKNRDDDRHHAVDAAVIACCTPGIVKNVALVNEGHARADVRQRLFSDSLPYPEFKEQVDAWISCIVPTLTLPNTVTGSVLKDTVYPYLGRDEAGKDLYITVKRDKDGRIVERKVNKATTMWKDGQGGCRAYGSMCALEAVFDASAGKRGRWSFDPVYCIDIPHRDAERRTMRAFSKEKAIDLWDTVAVPEAAPRMTIRRGDVLVCDGKAARFHCFDISVNAIRLFSQRGGKQLQATGPLSAEAFPPPSKWGEGVRIMQEDCLGLCWLSFLAQRAADVQME

SEQ ID NO: 770 - protein, 1002 aa, unidentified
  REGION 1..1002: note = Description of Unknown: uncultivated organism with predicted taxonomy: Collinsella
  REGION 1..1002: note = MG14-96 effector
MEITINREIGKLGLPRYLVLGMDPGIASCGFALIDTANHEILDLGVRLFDSPTHPKTGQSLAVIRRGFRSTRRNIDRTQARLKHCLQVLKAYGLIPQDATKEYFHTTKGDKQPLKLRVDGLDRLLNDREWALVLYSLCKRRGYIPHGEGSQDKSSEGGKVLSALAANKEAIAETSCRTVGEWLAQQPQSRNRGGNYDKCVTHAQLIEETHILFDAQRSFGSKYASPEFEASYIEVCDWERSRKDFDRRTYDLVGHCSYFPTEKRAARCTLTSELVSAYGALGNITIIHENGTSRALSATERDECIAILFSCEPIRGNKDCAVKFGALRKALDLSSGDYFKGVPAADEKTREVYKPKGWRVLRNTLNAANPILLQRLRDDRNLADAVMEAVAYSSALPVLQEQLQGLPLSEAEIEALCRLPYSSKALNGYGNRSKKALDMLLDCLEEPEVLNLTQAENGCGLLGLRIAGAQLERSDRLMPYETWIERTGRTNNNPVVIRAMSQMRKVVNAICRKWGVPNEIHVELDRELRLPQRAKDEIAKANKKNEKNRERIAGQIAELRGCTADEVTGKQIEKYRLWEEQECFDLYTGAKIEVDRLISDDTYTQIDHILPFSRTGENSRNNKVLVLAKSNQDKREQTPYEWMSHDGAPSWDAFERRVQENQKLSRRKKNFLLEKDLDTKEGEFLARSFTDTAYMSREVCAYLADCLLFPDDGAKAHVVPTTGRATAWLRRRWGLNFGSNGEKDRSDNRHHATDACVIAACSRSLVIKTARINQETHWSITRGMNETQRRDAIMKALESVMPWETFANEVRAAHDFVVPTRFVPRKGKGELFEQTVYRYAGVNAQGKDIARKASSDKDIVMGNAVVSADEKSVIKVSEMLCLRLWHDPEAKKGQGAWYADPVYKADIPALKDGTYVPRIAKAATGRKAWKAIPQNVLNSAPLEIYLGDLVQIGNQKGRFRGINIDTVSWSFVDTLSKLPVKMPTIGRLNNETIPTVIRELLI

SEQ ID NO: 771 - protein, 1002 aa, unidentified
  REGION 1..1002: note = Description of Unknown: uncultivated organism with predicted taxonomy: Collinsella
  REGION 1..1002: note = MG14-97 effector
MEITINREIGKLGLPRHLVLGMDPGIASCGFALIDTANHEILDLGVRLFDSPTHPKTGQSLAVIRRGFRSTRRNIDRTQARLKHCLQVLKAYGLIPQDATKEYFHTTKGDKQPLKLRVDGLNRLLNDREWALVLYSLCKRRGYIPHGEGNQDKSSEGGKVLSALAANKEAIAETSCRTVGEWLAQQPQSRNRGGNYDKCVTHAQLIEETHILFDAQRSFGSKYASPEFEAAYIEVCDWERSRKDFDRRTYDLVGHCSYFPTEKRAARCTLTSELVSAYGALGNITIIHENGTSRALSATERDECIAILFSCEPIRGNKDCAVKFGALRKALDLSSGDYFKGVPAADEKTREVYKPKGWRVLRNTLNAANPILLQRLRDDRNLADAVMEAVAYSSALPVLQEQLQGLPLSEAEIEALCRLPYSSKALNGYGNRSKKALDMLLDCLEEPEVLNLTQAENDCGLLGLRIAGAQLERSDRLMPYETWIERTGRTNNNPVVIRSMSQMRKVVNAVCRKWGVPNEIHVELDRELRLPQRAKDEIAKANKKNEKNRERIAGQIAELRGCTADEVTGKQIEKYRLWEEQECFDLYTGAKIEVDRLISDDTYTQIDHILPFSRTGENSRNNKVLVLAKSNQDKREQTPYEWMSHDGAPSWDAFERRVQENQKLSRRKKNFLLEKDLDTKEGEFLARSFTDTAYMSREVCAYLADCLLFPDDGAKAHVVPTTGRATAWLRRRWGLNFGSNGEKDRSDDRHHATDACVIAACSRSLVIKTARINQETHWSITRGMNETQRRDAIMKALESVMPWETFANEVRAAHDFVVPTRFVPRKGKGELFEQTVYRYAGVNAQGKDLARKASSDKNIVMGNAVVSADEKSVIKVSEMLCLRLWHDPEAKKGQGAWYADPVYKADIPALKDGTYVPRIAKAATGRKAWKAIPQNVLNSAPLEIYLGDLVQIGNQKGRFRGINIDTVSWSFVDTLSKLPVKMPTIGRLNNETIPTLIRELLI

SEQ ID NO: 772 - protein, 1003 aa, unidentified
  REGION 1..1003: note = Description of Unknown: uncultivated organism with predicted taxonomy: Collinsella
  REGION 1..1003: note = MG14-98 effector
MEITINREIGKLGLPRHLVLGMDPGIASCGFALIDTANHEILDLGVRLFDSPTHPKTGQSLAVIRRGFRSTRRNIDRTQARLKHCLQVLKAYGLIPQDATKEYFHTTKGDKQPLKLRVDGLDRLLNDREWALVLYSLCKRRGYIPHGEGSQDKSSEGCKVLSALAANKEAIAETSCRTVGEWLAQQPQSRNRGGNYDKCVTHAQLIEETHILFDAQRSFGSKYASPEFEAAYIEVCDWERSRKDFDRRTYDLVGHCSYFPTEKRAARCTLTSELVSAYGALGNITIIHENGTSRALSATERDECIAILFSCEPIRGNKDCAVKFGALRKALDLSSGDYFKGVPAANEKTREVYKPKGWRVLRNTLNAANPILLQRLRDDRDLADAVMEAVAYSSALPVLQEQLQGLPLSEAEIEALCRLPYSSKALNGYGNRSKKALDMLLDCLEEPEVLNLTQAENDCGLLGLRIAGAQLERSDRLMPYETWIELTGRTNNNPVVIRSMSQMRKVVNAICRKWGVPNEIHVELDRELRLPQRAKDEIAKANKKNEKNRERIAGQIAELRGCTADEVTGKQIEKYRLWEEQECFDLYTGAKIEVDRLISDDTYTQIDHILPFSRTGENSRNNKVLVLAKSNQDKREQTPYEWMSHDDAPSWDAFERRVQENQKLSRRKKNFLLEKDLDTKEGEFLARSFTDTAYMSREVCAYLADCLLFPDDGAKAHVVPTTGRATAWLRRRWGLNFGSNGEKDRSDDRHHATDACVIAACSRSLVIKTARINQETHWSITRGMNEAQRRDAIMKALESVMPWETFANEVRAAHDFVVPTRFVPRKGKGELFEQTVYRYAGVNAQGKDIARKASSDKDIVMGNAVVSADEKSVIKVSEMLCLRLWHDPEAKKGQGAWYADPVYKADIPALKDGTYVPRIAKAHTGRKAWKPVPESAMKKQPLEMYLGDLVQIGDFVGRFSGYNIDNANWSFVDRLTRIKISCPTVGKLSNDMSPFVVRESPIK

SEQ ID NO: 773 - protein, 1002 aa, unidentified; identical to SEQ ID NO: 685
  REGION 1..1002: note = Description of Unknown: uncultivated organism with predicted taxonomy: Olsenella
  REGION 1..1002: note = MG14-99 effector

SEQ ID NO: 774 - protein, 1004 aa, unidentified
  REGION 1..1004: note = Description of Unknown: uncultivated organism with predicted taxonomy: Collinsella
  REGION 1..1004: note = MG14-100 effector
MEITINREIGKLGLPRHLVLGMDPGIASCGFALIDTANHEILDLGVRLFDSPTHPKTGQSLAVIRRGFRSTRRNIDRTQARLKHCLQVLKAYGLIPQDATKEYFHTTKGDKQPLKLRVDGLDRLLNDREWALVLYSLCKRRGYIPHGEGNQDKSSEGGKVLSALAANKEAIAETSCRTVGEWLAQQPQSRNRGGNYDKCVTHAQLIEETHILFDAQRSFGSKYASPEFEAAYIEVCDWERSRKDFDRRTYDLVGHCSYFPTEKRAARCTLTSELVSAYGALGNITIIHENGTSRALSATERDECIAILFSCEPIRGNKDCAVKFGALRKALDLSSGDYFKGVPAADEKTREVYKPKGWRVLRNTLNATNPILLQRLCDDRNLADAVMEAVAYSSALPVLQEQLQGLPLSKAEIEALCRLPYSSKALNGYGNRSKKALDMLLDCLEEPEVLNLTQAENDCGLLGLRIAGAQLERSDRLMPYETWIERTGRTNNNPVVIRAMSQMRKVVNAICRKWGVPNEIHVELDRELRLPQRAKDEIAKANKKNEKNRERIAGQIAELRGCTADEVTGKQIEKYRLWEEQECFDLYTGAKIEVDRLISDDTYTQIDHILPFSRTGENSRNNKVLVLAKSNQDKREQTPYEWMSHDGAPSWDAFERRVQENQKLSRRKKNFLLEKDLDTKEGEFLARSFTDTAYMSREVCAYLADCLLFPDDGAKAHVVPTTGRATAWLRRRWGLNFGSNGEKDRSDDRHHATDACVIAACSRSLVIKTARINQETHWSITRGMNETQRRDAIMKALESVMPWETFANEVRAAHDFVVPTRFVPRKGKGELFEQTVYRYAGVNAQGKDIARKASSDKDIVMGNAVVSADEKSVIKVSEMLCLRLWHDPEAKKGQGAWYADPVYKADIPALKDGTYVPRIAKQKYGRKVWKAVPNSALTQKPLEIYLGDLIKVGDKLGRYNGYNIATANWSFVDALTKKEIAFPSVGMLSNELQPIIIRESILDN

SEQ ID NO: 775 - protein, 1045 aa, unidentified
  REGION 1..1045: note = Description of Unknown: uncultivated organism with predicted taxonomy: Eggerthella sp. AM16-19
  REGION 1..1045: note = MG14-101 effector
MDKAQGVDIGELGFDPGTFATALMTLEEFRSKDRVIWAGIDIGVASTGLCLVDVRNHEIVLMTSHLFKSPVVDKKKATAAPESLASVRRGARSVRRNIMREGRRKKAIRAVLADSDLIPADADGEWFAARRDERTVVKLRSKALGHLLNSRELARVLYSFASHRGYIDHGKSDKDDDAGKVKKALAANHAALAGGGCETFGQYLAVQPRSRNRAGDYSFTSDIGMTVDEVRTIFLRQREMGSEIATEALEERYIAELTWLTDTSKRDMSTYLKVGFCTYRGAPYRRGATSTTSFEMVRAHQTLANTVILHEDGTSSTIPGNTRIEIVRELFAVKKSVKPLKWSGLRRRLGLSDGDSFKGRPLEEEKRDCIALPAWAVLCSGLYEDHRDLLERLHDHIEDADAVCSALTYASSAASLAGRLAPLALTDDEVEAIIDLPYSARLFSGYASASLEALQMLRGTLEDPCVTSLRQAEEDSGLAQARAMLAEEHGEAADGLLCAFSDYDPTCKNPVVLRATAQVRRMVNSVIRHYGLPDVIRVEVARDLKRSKHEREIVAESNRARHELNEQAKRDIVEFLGLHDDDHVRGRDLDMVKLYREQGGKDPYTGTGIDFGRMLEERGYVEIDHILPISRTCDNSQANKVLCLTKSNRDKSNRSPYEWMTSGEATAPDWDEFCGRMERWAKMCEPRRYARKKLANLTCENLAERAGGFIDRNLNDTRYMSVALAKWLRECLPFARDGHEHVFCVAGGATALMRSVWNIGITGPDGKKNRDDDRHHAVDAAVIACCTPGIVKNVALVNEGHARADVRQRLFRDSLPYPEFKEQVNAWIPCIVPTLTLPNTVTGSVLKDTVYPYLGRDDAGKDLYLTVKRDKDGRIVDRKVNKATTMWKDGQGGCRAYGSMCALDAVFDASVGKRGKWSFDPVYCIDIPHREDEIRTIRAFSKERAIDLWDSIKVPEDAQRMRIRRGDVLVCDGKAARFYCFDISVNAIRLYSQRGGKQLQTTGPLSSEAFPPPSKWGDDIRVMPEDCLGLCWLSFLSNRAIAQMD

SEQ ID NO: 776 - protein, 1000 aa, unidentified
  REGION 1..1000: note = Description of Unknown: uncultivated organism with predicted taxonomy: Olsenella sp. KH3B4
  REGION 1..1000: note = MG14-102 effector
MDATRPYLVLGLDPGIASCGFCLLDMTNHKILEMGSHLFKAPQEDKTKTSLAVTRRKARSIRRNTARTSARLKHCLELLAGAGLVPADADKTWLQTKKGDKPILKLRAGGLDRLLTDREFAQVLYSLCGRRGYIPHGEGRLGETDEDESKKVLGAIKKNQDAMAAGSYRTVGEMLNAQGRSRNRGGDYSLCVYNSQIQDEAKALFASQRARGNTKATRELEDSYLACLTWEKKSLDHDTRVYELVGPCSYFPGEKRAASADVSSELCRAYERLGHIVIVHEDGSEQALTAGEIDDYLKILFSTAPIKGNKECKVTYGTIRKDLDISGKSVFKGIAQDKEKDEPFAPKAWRSLRRVLPERLLASMLEDRNLGDAVCEALTFASSEASLIERLSDLDLSDDERDAILAVPFTGKLFKGYGSRSLKALRLLLGAFEEPEIRILTDAEKATGLLDLRLSDRGVRGQLLPPYDSYDPTCRNPVVLRAMGRMRHIVNAIIRIHGVPDEIHIELGRDLKMSNKEKSLVDKRNRENAASNKKWATTAAGILGCTPEEVPGRIIRKLILREEQGEKDLYTGDSIDLEHLVRDDRYCEIDHILPYSRTCDDSRANKTLVLSKSNQDKRERTPYEWMTSGEAGAPSWDSYRARVMAQVKNPRKRANYLNTDLGPETQAKFLARNLNDDRYMSVAVKNFLEDRLLFPEDGRKRHVTAVAGGATGNLRWVWGLNFGEGNIKDRTDDRHHAVDAAIIAACSESTVKKVAKASAKGREAFKQLRKSRLADTQPWPTFAAEVAARREFVVPTRMADHGVMGRVFKDTLYHLEGITEDKGKYPLVRAGEKTVKKGNVRINPDGSVKLIDGMAFLRLWLDPTARPNGKVKGKWYAEPVYYVDIPAIKAGAYVPRACTIHVARVNWKPVPEEAMQIEPIMLYAGDVVEINNRLVRYSGFDINGATLYYQSLLNGATTTAIPSLGTWGKDTQVRVLQEDCLGHCYDGIAINPEDSTFQQR

SEQ ID NO: 777 - protein, 1003 aa, unidentified
  REGION 1..1003: note = Description of Unknown: uncultivated organism with predicted taxonomy: Collinsella
  REGION 1..1003: note = MG14-103 effector
MEITINREIGKLGLPRHLVLGMDPGIASCGFALIDTANHEILDLGVRLFDSPTHPKTGQSLAVIRRGFRSTRRNIDRTQARLKHCLQVFKAHGLIPQDATKEYFHTTKGDKQPLKLRVDGLDRLLSDREWALVLYSLCKRRGYIPHGEGNQDKSSEGGKVLSALAANKEAIAEASCRTVGEWLAQQPQSRNRGGNYDKCVTHAQLIEETHILFDAQRSFGSKYASPELEAAYIEVCDWERSRKDFDRRTYDLVGHCSYFPTEKRAARCTLTSELVSAYGALGNITIIHDDGTSRALSATERDECIAILFSCEPIRGNKDCAVKFGALRKALDLSSGDYFKGVPAADEKTREVYKPKGWRVLRNTLNAANPILLQRLRDDRDLADAVMEAVAYSSALPVLQERLQGLPLSEAEIEALCRLPYSSKALNGYGNRSKKALDMLLDCLEEPEVFNLTQAENDCGLLGLRIAGAQLERSDRLMPYELWAERTGRTNNNPVVIRSMSQMRKVVNAICRKWGVPNEIHVELDRELRLPQRAKDEIAKANKKNEKNRERIAGQIAELRGCTADEVTGKQIEKYRLWEEQEYFDLYTGAKIEVDRLISDDTYTQIDHILPFSRTGENSRNNKVLVLAKSNQDKREQTPYEWMSHDGAPSWDAFERRVQENQKLSRRKKNFLLEKDLDAKEGDFLARSFTDTAYMSREVCAYLADCLQFPDDGAKAHVVPTTGRATAWLRRRWGLNFGSNGEKDRSDDRHHATDACVIAACSRSLVIKTARLNQETHWSITRGMNEIQRHDAIMKALESVMPWETFANEVRAAHDFVVPTRFVPRKGKGELFEQTVYRYAGVNAQGKDLARKAGSDKDIVMGNAVVSADEKSVIKVSEMLCLRLWHDPEAKKGQGAWYADPVYKADIPALKDGTYVPRIAKAHTGRKAWKPVPKSAMAKPPLEIYFDDLVQIGDFIGRFSGYNINSANWSFTDRLTRLNLSCPTVGQLNNDLSPVVIRESPIK

SEQ ID NO: 778 - protein, 1003 aa, unidentified
  REGION 1..1003: note = Description of Unknown: uncultivated organism with predicted taxonomy: Collinsella
  REGION 1..1003: note = MG14-104 effector
MEITINREIGKLGLPRHLVLGMDPGIASCGFALIDTANHEILDLGVRLFDSPTHPKTGQSLAVIRRGFRSTRRNIDRTQARLKHCLQVFKAHGLIPQDATKEYFHTTKGDKQPLKLRVDGLDRLLSDREWALVLYSLCKRRGYIPHGEGNQDKSSEGGKVLSALAANKEAIAEASCRTVGEWLAQKPQSRNRGGNYDKCVTHAQLIEETHILFDAQRSFGSKYASPELEAAYIEVCDWERSRKDFDRRTYDLVGHCSYFPTEKRAARCTLTSELVSAYGALGNITIIHDDGTSRALSATERDECIAILFSCEPIRGNKDCAVKFGALRKALDLSSGDYFKGVPAADEKTREVYKPKGWRVLRNTLNAANPILLQRLRDDRDLADAVMEAVAYSSALPVLQERLQGLPLSEAEIEALCRLPYSSKALNGYGNRSKKALDMLLDCLEEPEVLNLTQAENDCGLLGLRIAGAQLERSDRLMPYELWAERTGRTNNNPVVIRSMSQMRKVVNAICHKWGVPNEIHVELDRELRLPQRAKDEIAKANKKNEKNRERIAGQIAELRGCTADEVTGKQIEKYRLWEEQECFDLYTGAKIEVDRLISDDTYTQIDHILPFSRTGENSRNNKVLVLAKSNQDKREQTPYEWMSHDGAPSWDTFERRVQENQKLSRRKKNFLLEKDLDAKEGDFLARSFTDTAYMSREVCAYLADCLQFPDDGAKAHVVPTTGRATAWLRRRWGLNFGSNGEKDRSDDRHHATDACVIAACSRSLVIKTARLNQETHWSITRGMNEIQRHDAIMKALESVMPWETFANEVRAAHDFVVPTRFVPRKGKGELFEQTVYRYAGVNAQGKDLARKAGSDKDIVMGNAVVSADEKSVIKVSEMLCLRLWHVPEAKKGQGAWYADPVYKADIPALKDGTYVPRIAKAHTGRKAWKPVPKSAMAKPPLEIYFDDLVQIGDFIGRFSGYNINSANWSFTDRLTRLNLSCPTVGQLNNDLSPVVIRESPIK

SEQ ID NO: 779 - protein, 1005 aa, unidentified; identical to SEQ ID NO: 695
  REGION 1..1005: note = Description of Unknown: uncultivated organism with predicted taxonomy: Collinsella
  REGION 1..1005: note = MG14-105 effector

SEQ ID NO: 780 - protein, 1003 aa, unidentified; identical to SEQ ID NO: 728
  REGION 1..1003: note = Description of Unknown: uncultivated organism with predicted taxonomy: Collinsella
  REGION 1..1003: note = MG14-106 effector

SEQ ID NO: 781 - protein, 965 aa, unidentified
  REGION 1..965: note = Description of Unknown: uncultivated organism with predicted taxonomy: Collinsella
  REGION 1..965: note = MG14-107 effector
MEITINREIGKLGLPRHLVLGMDPGIASCGFALIDTANHEILDLGVRLFDSPIHPKTKQSLAVIRRGFRSTRRNIDRTQARLKHCLQVLKAYGLIPQDATKEYFHTTKGDKQPLKLRVDGLDRLLNDREWALVLYSLCKRRGYIPHGEGNQDKSSEGGKVLSALAANKEAIAETSCRTVGKWLAQQPQSRNRGGNYDKCVTHAQLIEETHILFDAQRSFGSKYASPEFEAAYIEVCDWERSRKDFDRRTYDIVGHCSYFPTEKRAARCTLTSELVSAYGALGNITIIHENGTSRALTATERDECIAILFSCEPIRGNKDCAVKFGALRKALDLSSGDYFKGVPAADEKTREVYKPKGWRVLRNTLNAANPILLQRLRDDRDLADAVMEAVAYSSALPVLQEQLQGLPLSEAEIEALCRLPYSSKALNGYGNRSKKALDMLLDCLEEPEVLNLTQAENDCGLLGLRIAGAQLERSDRLMPYETWIERTGRTNNNPVVIRSMSQMRKVVNAVCRKWGVPNEIHVELDRELRLPQRAKDEIAKANKKNEKNRERIAGQIAELRGCTADEVTGKQIEKYRLWEEQEYFDLYTGAKIEVDRLISDDTYTQIDHILPFSRTGENSRNNKVLVLAKSNQDKREQTPYEWMSHDGAPSWDAFERRVQENQKLSRRKKNFLLEKDLDTKEGEFLARSFTDTAYMSREVCAYLADCLLFPDDGAKAHVVPTTGRATAWLRRRWGLNFGSNGEKDRSDDRHHATDACVIAACSPSLVIKTARINQETHWSITRGMNETQRRDAIMKALESVMPWETFANEVRAAHDFVVPTRFVPRKGKGELFEQTVYRYAGVNAQGKDIARKASSDKDIVMGNAVVSADEKSVIKVSEMLCLRLWHDPEAKKGQGAWYADPVYKADIPALKDGTYVPRIAKAHTGRKAWKPVPESAMKKPPLEIYLGDLVQIGDFVGRFSGYNID

SEQ ID NO: 782 - protein, 1027 aa, unidentified
  REGION 1..1027: note = Description of Unknown: uncultivated organism with predicted taxonomy: Atopobium sp. ICM42b
  REGION 1..1027: note = MG14-108 effector
MSKSDRGLVFGIDLGKASCGLAIIDYEAKEVKLLSSRIIKAPENRSGKSLAAVRREKRSIRRQIDRRAARKKNVLKVLKQFGITPQDCDCKWFETKKNGNDGIDLPVIVLRSQGLDRQLSNREWARILYWFCSQRGYINRGEETLINGEVSTEVSSESEEAGKVLSAISENKKALKESGYRTFGEYLYKESYVSTRSYRNKAGDYKHCVSHPIVVDEIKELFEQQKKFGNTHTSEEFRDAYLEQLNWLKDTKAFDKLTYQKVGYCVYFDQYSDEPQKRAANADLISEVVKAYEKLGNIRLKFDDKPEQSLTREVRDAVINEMFSVHQGAKVKSVTYKTLRKLIDDDNLVGFKGVKSDLEKNPVFVPKAWNTFCRVLSASESGIQLLNRMKNDFKLANAIAESLTYASSLDSLERRISMYQEKESLEISEDELALIESLPYNIKIFKGYGSRSIQALEMLHDQFLGGKAFTLDEAEKQSGLQGFRLREKGIRQSLLLPYSDYDVQCTNPVVLRVLAQARRMINSAIKQYGMPNIIRIELGNDIAKSAKEKSKIAKGQNENRKENERIKDKIAKLLHIDQSEVTGKQITKMKLYEEQGGKDIYTGESLGDIAFAGGRRFLIDDNYCEIDHVLPYSRSADDLKSNKVLVLAKSNQEKGNRTPYEWMNSNDGNHPNWEQFCLRVTSNVRLSDSKKSKLLEENFAEKETSFIKRNMVDTQYMARAISAWLSDSLNFSSEFDQKQHVYAVNGRMTAKLRRKWGLNFGEDDTKDRSDNRHHAIDAAVIAACSASMVKEFAISYSRLREVRDSVIAEPWEGFADQVREAREWIIPTMYRPNKKNGLIYEETKYKYLGKEVGDKKIVHILKGKKQGVGTVDLFRDPTGGQFARILGDRAYIRLWLDEEGKSGRGEWLIEPVYFADLDKIKRGSYVPRYIPRQKVTTQEWESIPSRITENSIPIVLRNDDIVRIDGIYGRLSGLDINSKRLKFDRILSKDVKTIGSWTKDTSVEVIHEDCLGLMWFNLLKDQNSKES

SEQ ID NO: 783 - protein, 1031 aa, unidentified
  REGION 1..1031: note = Description of Unknown: uncultivated organism with predicted taxonomy: Atopobium sp. ICM42b
  REGION 1..1031: note = MG14-109 effector
MSKSDRGHVFGVDLGKSGNGLASIDYENKDINFLSSRPFKAPENRAGKSLAKVRREARSIRRQLDRKSTRKKQIIKVLKQFSVIAQECDSRWFETKKNGNGGIDLPIIILRSQGLDRKLTNREWARVLYWFCSQRGYINRGEEALSNEEASVEDSSESDEVGKVLSAISDNRKALKKSGYRTFGEYLFKESYEITRSYRNKNGEYRHCVSHPMVVDEINELFKHQQKLGNTYTSEEFREAYLRQLNWLKDTMAFDKLTYQKVGYCVYFDQYSDEPQKRAANADLISEVVKAYEKLGNIRLKFDDKSEQNLTKEVRDAVINEMFSIHQGSRVKSITYKTLRKLIDNENLIEFKGIKSDLEKSSVFAPKAWNFYCRALSISESGLQLLNRMKSDFKFANVISESLTYATSLESLESRILMYQDKESIEISEEELTLIESLPYNSKIFKGYGSRSIEALEMLYDQFTEGEAFTLDEAEKQSGLQSFRLRDKGIKQRLLPPYSDYDPQCTNPVVLRSLSQARKMINSGIKQFGMPDIIRVELAKELTKSPKQREKIAKEQNKNRKENERIRKEIAKYLEIDSSCVTKKQILKKKLYEEQKGLDVYTGESLEPSLHADDLTYLKDDSYCQIDHILPYSRSADDSIANKVLVLAKSNQDKGNRTPYEWMTSGHEHHLSWEEFAIRVSTNLSISDSKKWRLLEEDFNKKEVQFMNRNLSDTQYMSKAIVAWLSDSLDFPSRYGQKQHVYATNGRMTSKLRKEWGLNFGENGIKDRNDKRHHAVDAAVIAACSASMVKEFATSYSRSHETKNSTIAEPWEGFADQVREAREWVIPTMYRPNKKNGLLFEDRRYRYAGKTNKHILIGKEGKEKTSGNIRFFDNEKDGKHVKIVGDVAYIRLWLDVNAREGKGEWLIEPVYFADLQSIKKGTYIPKYIATYNATNDEWKPVPDDVLSKNKPLIVHRQDVIKVDSSFFRVNSVDIAKKTLKLIPVFYDSKNSNPELMITRKWDKSTKIELVYEDVLGMIWFNYLKNQNSSES

SEQ ID NO: 784 - protein, 1003 aa, unidentified; identical to SEQ ID NO: 717
  REGION 1..1003: note = Description of Unknown: uncultivated organism with predicted taxonomy: Collinsella
  REGION 1..1003: note = MG14-110 effector

SEQ ID NO: 785 - protein, 1037 aa, unidentified
  REGION 1..1037: note = Description of Unknown: uncultivated organism
  REGION 1..1037: note = MG14-111 effector
MEYSDPRDFGFRPETVMTALMPYEQFSSKTRRLILGIDMGIASVGVCLIDIRNHEIVLMASHIFKAPVEGKQKDISARQSGASIRRGYRSVRRTTKRRKNRKKAVRDIEKKYILIPDDADGQWFAIRKGEPDVLHLRGKALLYKLNGRELARILYAFADRRGYIDHGKGATDDDSGKVKKALSVNRKILDENGYETIAQYLLKQPTSRNREGDYRYMVDIEMVTDEVHTIFRHQRDLGSDIATEELEGEYLSALRWLTDTSARDKKIYSRVGYCTYLGAPEKRAASSLISFEMVRAYEKLSNIKIEHQGREATYISPEKRNEIVASLFAVSKNPKPLKWSQLREKLDMQSSDSFDSRLPTDEKDDCIKIPAWNALCTGLFMSNRALLDRFHDDTDAADAVCSALTYASSGESLRNALENLSLDLSEQDIDSLLDLPYASKLFSGYCSAGVRALQMLRDAFKDPQIEKLYNAEKATGLYEARQALAAARNESRDGLLCPYLEFDPTCTNPVVLRATAQVRRMINSIIRHYGLPDIIRVEVAKDLKRSKHEKAIIAATNKANKDSNEQAKKDLVAFYGLPNDAHVSSADFEKMWLYREQFGQDPYTGKGINLERMLNDRDYVEIDHILPFSRSCDDSKSNKVLCLTKSNRDKANRTPYEWMTSGEPSAPDFGDFCRRMDAWAGKGKSAHYTKSKLSKLKNSTFGEEEQKFIDRNLNDTRYMSRQLAMWVRECLPFPDDKRQHVFCVAGAATSLMRRIWGIGIVDEKGKKDRSDDRHHAVDAAVIACCDQRIVKGIARVNSGRSNIKERERLRYESMPYPEFKAQVEAWIPCIVPTRTVSRTATGSLLKDTVYPYVGVDDRGKDLYRRNGKIEPASTLWKDGSGGCKLYDGAYGLMAVFDESMKKSGSWRFDPIYYIDVPNVRQDFIREFTKGLSIDYWPKVQLKGDERRIFLKQGDVLLQDGCAMRYYMYNVSNGVVNSYSKIGEKSVPLQKTGPLSDESFPKQAKWDSSLTVMQEDCLGLCWLKFLSDRVGQFENSPV

SEQ ID NO: 786 - protein, 1004 aa, unidentified
  REGION 1..1004: note = Description of Unknown: uncultivated organism with predicted taxonomy: Collinsella
  REGION 1..1004: note = MG14-112 effector
MEITINREIGKLGLPRHLVLGMDPGIASCGFALIDTANHEILDLGVRLFDSPTHPKTGQSLAVIRRGFRSTRRNIDRTQARLKHCLQILKAYGLIPQDATKEYFHTTKGDKQPLKLRVDGLDRLLNDREWALVLYSLCKRRGYIPHGEGNQDKSSEGGKVLSALAANKEAIAETSCRTVGKWLAQQPQSRNRGGNYDKCVTHAQLIEETHILFDAQRSFGSKYASPEFEAAYIEVCDWERSRKDFDRRTYDLVGHCSYFPTEKRAARCTLTSELVSAYGALGNITIIHENGTSRALSATERDECIAILFSCEPIRGNKDCAVKFGALRKALDLSSGDYFKGVPAADEKTREVYKPKGWRVLRNTLNAANPILLQRLRDDRNLADAVMEAVAYSSALPVLQEQLQGLPLSEAEIEALCRLPYSSKALNGYGNRSKKALDMLLDCLEEPEVLNLTQAENDCGLLGLRIAGAQLERSDRLMPYETWIELTGRTNNNPVVIRSMSQMRKVVNAVCRKWGVPNEIHVELDRELRLPQRAKDEIAKANKKNEKNRERIAGQIAELRGCTADEVTGKQIEKYRLWEEQECFDLYTGAKIEVDRLISDDTYTQIDHILPFSRTGENSRNNKVLVLAKSNQDKREQTPYEWMSHDGAPSWDAFVRRVQENQKLSRRKKNFLLEKDLDTKEGEFLARSFTDTAYMSREVCAYLADCLLFPDDGAKAHVVPTTGRATAWLRRRWGLNFGSNGEKDRSDDRHHATDACVIAACSRSLVIKTARINQETHWSITRGMNETQRRGAIMKALESVMPWETFANEVRAAHGFVVPTRFVPRKGKGELFEQTVYRYAGVNAQGKDLARKASSDKDIVMGNAVVSADEKSVIKVSEMLCLRLWHDPEAKKGQGAWYADPVYKADIPALKDGTYIPRIAKQKYGRKVWKAVPNSALTQKPLEIYLGDLIKVGDKLGRYNGYNIATANWSFVDALTKKEIAFPSVGMLSNELQPIIIRESILDN

SEQ ID NO: 787 - protein, 1002 aa, unidentified; identical to SEQ ID NO: 771
  REGION 1..1002: note = Description of Unknown: uncultivated organism with predicted taxonomy: Collinsella
  REGION 1..1002: note = MG14-113 effector

SEQ ID NO: 788 - protein, 1002 aa, unidentified
  REGION 1..1002: note = Description of Unknown: uncultivated organism with predicted taxonomy: Collinsella
  REGION 1..1002: note = MG14-114 effector
MEITINREIGKLGLPRHLVLGMDPGIASCGFALIDTANHEILDLGVRLFDSPTHPKTGQSLAVIRRGFRSTRRNIDRTQARLKHCLQILKAYGLIPQDATKEYFHTTKGDKQPLKLRVDGLDRLLNDREWALVLYSLCKRRGYIPHGEGNQDKSSEGGKVLSALAANKEAIAETSCRTVGEWLAQQPQSRNRGGNYDKCVTHAQLIEETHILFDAQRSFGSKYASPEFEAAYIEVCDWERSRKDFDRRTYDLVGHCSYFPTEKRAARCTLTSELVSAYGALGNITIIHENGTSRALSATERDECIAILFSCEPIRGNKDCAVKFGALRKALDLSSGDYFKGVPAADEKTREVYKPKGWRVLRNTLNATNPILLQRLRDDRNLADAVMEAVAYSSALPVLQEQLQGLPLSEAEIEALCRLPYSSKALNGYGNRSKKALDMLLDCLEEPEVLNLTQAENDCGLLGLRIAGAQLERSDRLMPYETWIERTGRTNNNPVVIRAMSQMRKVVNAICRKWGVPNEIHVELDRELRLPQRAKDEIAKANKKNEKNRERIAGQIAELRGCTADEVTGKQIEKYRLWEEQECFDLYTGAKIEVDRLISDDTYTQIDHILPFSRTGENSRNNKVLVLAKSNQDKREQTPYEWMSHDGAPSWDAFERRVQENQKLSRRKKNFLLEKDLDTKEGEFLARSFTDTAYMSREVCAYLADCLLFPDDGAKAHVVPTTGRATAWLRRRWGLNFGSNGEKDRSDDRHHATDACVIAACSRSLVIKTARINQEAHWSITRGMNETQRRDAIMKALESVMPWETFANEVRAAHDFVVPTRFVPRKGKGELFEQTVYRYAGVNAQGKDIARKASSDKDIVMGNAVVSADEKSVIKVSEMLCLRLWHDPEAKKGQGAWYADPVYKADIPALKDGTYVPRIAKAATGRKAWKAIPQNVLNSAPLEIYLGDLVQIGNQKGRFRGINIDTVSWSFVDTLSKLPVKMPTIGRLNNETIPTVIRELLI

SEQ ID NO: 789 - protein, 1003 aa, unidentified
  REGION 1..1003: note = Description of Unknown: uncultivated organism with predicted taxonomy: Collinsella
  REGION 1..1003: note = MG14-115 effector
MEITINREIGKLGLPRHLVLGMDPGIASCGFALIDTANHEILDLGVRLFDSPTHPKTGQSLAVIRRGFRSTRRNIDRTQARLKHCLQVLKAYGLIPQDATKEYFHTTKGDKQPLKLRVDGLDRLLNDREWALVVYSLCKRRGYIPHGEGNQDKSSEGGKVLSALAANKEAIAETSCRTVGEWLAQQPQSRNRGGNYDKCVTHAQLIEETHILFDAQRSFGSKYASPEFEAAYIEVCDWERSRKDFDRRTYDLVGHCSYFPTEKRAARCTLTSELVSAYGALGNITIIHENGTSRALSATERDECIAILFSCEPIRGNKDCAVKFGALRKALDLSSGDYFKGVPAADEKTREVYKPKGWRVLRNTLNAANPILLQRLRDDRNLADAVMEAVAYSSALPVLQERLQGLPLSEAEIEALCRLPYSSKALNGYGNRSKKALDMLLDCLEEPEVLNLTQAENDCGLLGLRIAGAQLERSDRLMPYETWIERTGRTNNNPVVIRAMSQMRKVVNAICRKWGVPNEIHVELDRELRLPQRAKDEIAKANKKNEKNRERIAGQIAELRGCTADEVTGKQIEKYRLWEEQECFDLYTGAKIEVDRLISDDTYTQIDHILPFSRTGENSRNNKVLVLAKSNQDKREQTPYEWMSHDGAPSWDAFERRVQENQKLSRRKKNFLLEKDLDTKEGEFLARSFTDTAYMSREVCAYLADCLLFPDDGAKAHVVPTTGRATAWLRRRWGLNFGSNGEKDRSDDRHHATDACVIAACSRSLVIKTARINQETHWSITRGMDETQRRDAIMKALESVMPWETFANEVRAAHDFVVPTRFVPRKGKGELFEQTVYRYAGVNAQGKDIARKASSDKDIVMGNAVVSADEKSVIEVSKMLCLRLWHDPEAKKGQGAWYADPVYKADIPALKDGTYVPRIAKAHTGRKAWKPVPESAMKKPPLEIYLGDLVQIGDFVGRFSGYNIDNANWSFVDRLTRIKISCPTVGKLSNDMSPFVVRESPIK

SEQ ID NO: 790 - protein, 1002 aa, unidentified
  REGION 1..1002: note = Description of Unknown: uncultivated organism with predicted taxonomy: Collinsella
  REGION 1..1002: note = MG14-116 effector
MEITINREIGKLGLPRHLVLGMDPGIASCGFALIDTANHEILDLGVRLFDSPTHPKTGQSLAVIRRGFRSTRRNIDRTQARLKHCLQILKAYGLIPQDATKEYFHTTKGDKQPLKLRVDGLDRLLNDREWALVLYSLCKRRGYIPHGEGNQDKSSEGGKVLSALAANKEAIAETSCRTVGEWLAQQPQSRNRGGNYDKCVTHAQLIEETHILFDAQRSFGSKYASPEFETAYIEVCDWERSRKDFDRRTYDLVGHCSYFPTEKRAARCTLTSELVSAYGALGNITIIHENGTSRALSATERDECIAILFSCEPIRGNKDCAVKFGALRKALDLSSGDYFKGVPAADEKTREVYKPKGWRVLRNTLNATNPILLQRLRDDRNLADAVMEAVAYSSALPVLQEQLQGLPLSEAEIEALCRLPYSSKALNGYGNRSKKALDMLLDCLEEPEVLNLTQAENDCGLLGLRIAGAQLERSDRLMPYETWIERTGRTNNNPVVIRSMSQMRKVVNAICRKWGVPNEIHVELDRELRLPQRAKDEIAKANKKNEKNRERIAGQIAELRGCAADEVTGKQIEKYRLWEEQEYFDLYTGAKIEVDRLISDDTYTQIDHILPFSRTGENSRNNKVLVLAKSNQDKREQTPYEWMSHDGAPSWDAFERRVQENQKLSRRKKNFLLEKDLDTKEGEFLARSFTDTAYMSREVCAYLADCLLFPDDGAKAHVVPTTGRATAWLRRRWGLNFGSDGEKDRSDDRHHATDACVIAACSPSLVIKTARINQETHWSITRGMNETQRRDAIMKALESVMPWETFANEVRAAHDFVVPTRFVPRKGKGELFEQTVYRYAGVNAQGKDIARKASSDKDIVMGNAVVSADEKSVIKVSEMLCLRLWHDPEAKKGQGAWYADPVYKADIPSLKDGTYVPKIAKAATGRKAWKAIPQNVLNSAPLEIYLGDLVQIGNQKGRFRGINIATVSWSFVDTLSKLPVKMPTIGRLNNETIPTVIRELLI

SEQ ID NO: 791 - protein, 1003 aa, unidentified
  REGION 1..1003: note = Description of Unknown: uncultivated organism with predicted taxonomy: Collinsella
  REGION 1..1003: note = MG14-117 effector
MEITINREIGKLGLPRHLMLGMDPGIASCGFALIDTANHEILDLGVRLFDSPTHPKTGQSLAVIRRGFRSTRRNIDRTQARLKHCLQILKAYGLIPQDATKEYFHTTKGDKQPLKLRVDGLDHLLNDREWALVLYSLCKRRGYIPHGEGNQDKSSEGGKVLSALAANKEAIAETSCRTVGEWLAQQPQSRNRGGNYDKCVTHAQLIEETHILFDAQRSFGSKYASPEFEAAYIEVCDWERSRKDFDRRTYDLVGHCSYFPTEKRAARCTLTSELVSAYGALGNITIIHENGTSRALSATERDECIAILFSCEPIRGNEDCAVKFGALRKALDLSSGDYFKGVPAADEKTREVYKPKGWRVLRNTLNATNPILLQRLRDDRNLADAVMEAVAYSSALPVLQEQLQGLPLSEAEIEALCRLPYSSKALNGYGNRSKKALDMLLDCLEEPEVLNLTQAENDCGLLGLRIAGAQLERSDRLMPYETWIERTGRTNNNPVVIRAMSQMRKVVNAICRKWGVPNEIHVELDRELRLPQRAKDEIAKANKKNEKNRERIAGQIAELRGCTADEVTGKQIEKYRLWEEQECFDLYTGAKIEVDRLISDDTYTQIDHILPFSRTGENSRNNKVLVLAKSNQDKREQTPYEWMSHDGAPSWDAFERRVQENQKLSRRKKNFLLEKDLDTKEGEFLARSFTDTAYMSREVCAYLADCLLFPDDGAKAHVVPTTGRATAWLRRRWGLNFGSNGEKDRSDDRHHATDACVIAACSRSLVIKTARINQETHRSITRGMNETQRRDAIMKALESVMPWETFANEVRAAHDFVVPTRFVPRKGKGELFEQTVYRYAGVNAQGKDIARKASSDKDIVMGNAVVSADEKSVIKVSEMLCLRLWHDPEAKKGKGAWYADPVYKADIPALKDGTYVPRIAKAHTGRKAWKPVPGSAMKKPPLEIYLGDLVQIGDFVGRFSGYNIDNANWSFVDRLTRIKISCPTVGKLSNDMSPFVVRESPIK

SEQ ID NO: 792 - protein, 1000 aa, unidentified
  REGION 1..1000: note = Description of Unknown: uncultivated organism with predicted taxonomy: Olsenella sp. KCTC 15699
  REGION 1..1000: note = MG14-118 effector
MDVTRPYLVLGLDPGIASCGFCLLDMTNHKILEMGSHLFKAPQEDKTKTSLAVTRRKARSIRRNTARTAARLKHCLELLAGAGLVPADADKTWLQTKKGDKPILKLRAGGLDRLLTDREFAQVLYSLCGRRGYIPHGEGRLGETDEDESRKVLGAIKKNQDAMAAGSYRTVGEMLNAQGRSRNRGGDYSLCVYNSQIQDEAKALFASQRARGNTKATRELEDSYLACLTWEKKSLDHDTRVYELVGPCSYFPGEKRAASADVSSELCRAYERLGHIVIVHEDGSEQALTASQIDDYLKILFSTAPIKGNKECKVTYGTIRKDLDISGKSVFKGIAQDKEKDEPFVPKAWRSLRRVLPERLLARMLEDRNLGDAVCEALTFASSEASLIERLSDLGLSDDERDAILAVPFTGKLFKGYGSRSLKALGLLLGAFEEPEIRILTDAEKATGLLDLRLSDRGVRGQLLPPYDSYDPTCRNPVVLRAMGRMRHIVNAIIRIHGVPDEIHIELGRDLKMSNKEKSLVDKRNRENAASNKKWATTAAGILGCTPEEVPGRIIRKLILREEQGEKDLYTGDSIDLEHLVRDDRYCEIDHILPYSRTCDDSRANKVLVLSKSNQDKRERTPYEWMTSGETSAPSWDSYRARVMAQVKNPRKRANYLNTDLGPETQAKFLARNLNDDRYMSVAVKNYLEDCLLFPEDGHKRHVTAVAGGATGNLRWVWGLNFGEGNVKNRADDRHHAVDAAIIAACSESTVKKVAEASAKGREAFKQLRKSRLADTQPWPTFAAEVAARREFVVPTRMADHGVTGRVFEDTLYHLEGITEDKGKYPLVRAGKNTVKKGNVRINSDGSVKLIDGMAFLRLWLDPTARPNGKVKGKWYAEPVYYADIPAIKAGTYVPRAIVQGIARINWEPIPQMALESKPLVLFKNDVLVVDGHIARYSNIGISVCQLLMLNLLTRDRVTDWPSVGSWGKDTQVRILQEDCLGHCYDSIAINPEDSTFQQR

SEQ ID NO: 793 - protein, 1005 aa, unidentified
  REGION 1..1005: note = Description of Unknown: uncultivated organism with predicted taxonomy: Collinsella
  REGION 1..1005: note = MG14-119 effector
MEITINREIGKLGLPRHLVLGMDPGIASCGFALIDTANHEILDLGVRLFDSPTHPKTGQSLAVIRRGFRSTRRNIDRTQARLKHCLQILKAYGLIPQDATKEYFHTTKGDKQPLKLRVDGLDRQLNDREWALVLYSLCKRRGYIPHGEGNQDKSSEGGKVLSALAANKEAIAETSCRTVGEWLAQQPQSRNRGGNYDKCGTHAQLIEETHILFDAQRSFGSKYASPEFEAAYIEVCDWERSRKDFDHRTYDLVGHCSYFPTEKRAARCTLTSELVSAYGALGNITIIHENGTSRALSATERDECIAILFSCEPIRGNKDCAVKFGALRKALDLSSGDYFKGVPAADEKTREVYKPKGWRVLRNTLNAANPILLQRLRDDRNLADAVMEAVAYSSALPVLQEQLQGLPLSEAEIEALCRLPYSSKALNGYGNRSKKALDMLLDCLEEPEVLNLTQAENDCGLLGLRIAGAQLERSDRLMPYETWIERTGRTNNNPVVIRSMSQMRKVVNAVCRKWGVPNEIHVELDRELRLPQRAKDEIAKANKKNEKNRERIAGQIAELRGCTADEVTGKQIEKYRLWEEQECFDLYTGAKIEVDRLISDDTYTQIDHILPFSRTGENSRNNKVLVLAKSNQDKREQTPYEWMSHDGAPSWDAFERRVQENQKLSRRKKNFLLEKDLDTKEGEFLARSFTDTAYMSREVCTYLADCLLFPDDGAKAHVVPTTGRATAWLRRRWGLNFGSNGEKDRSDDRHHATDACVIAACSRSLVIKTARINQETHWSITRGMNETQRRDAIMKALESVMPWETFANEVRAAHDFVVPTRFVPRKGKGELFEQTVYRYAGVNAQGKDIARKASSDKDIVMGNAVVSADEKSVIKVSEMLCLRLWHDPEAKKGQGAWYADPVYKADIPALKDGTYVPRIARAAIGRKAWKLVPDSAMTKPPLEIYLGDLVQIGNFIGRFSGYNIANGSWSFIDRLTKETLSCPSVAKLNNNLFPTIIRESIIMRK

SEQ ID NO: 794 - protein, 1026 aa, unidentified
  REGION 1..1026: note = Description of Unknown: uncultivated organism with predicted taxonomy: Collinsella tanakaei
  REGION 1..1026: note = MG14-120 effector
MESLVNREVGGLGKPRYLVMGMDPGIKSCGFALLDLNNQEILEMGSRLFDAPTHPKTKQSMAVIRRGYRSTRRNIDRTQDRLKHCLKTLKRFDVVPEDADKEFFHTVKGDKQPILLRTDGLNRLLTSREWALVLYSLCKRRGYIPHGEGSDSGTSEDGKVLAALKANERAFADAGYRTVGEWLASLPQSRNRGGNYDKCVTHAQLTDEVRTLFEAQRGFGSPVASQELEDAYIEVFDWERSREEFDKRTYGLVGTCSYFPNEKRAARCTLTSEMVAAYGALGNITIVKRDGSTHPLSAVERDQCIDILFAVDPMKGNKTCAVKYGFLRKRLDLESGDYFKGVPLDDEKNREVFKPKGWRSLRSVLHETNRELLVKLHDDRDLADAVMEAVAYSSSVDVLKSQLSSLDLSNGEIESICAMPYSSKVLNGYGNRSKKALDILLGCFEDPDVLSLTDAEDASGLGAVRMQGAAIDKGERLIPYETWIALTGRTNNNPVVIRALSQMRKVVNAVCRKWGVPDEIHVELDRELRLPKKAKDEIAKAKKRNEKDRQRVAAQIAELLGCSADDVKGDYIEKYRLWEEQECFDIYSGEKIEVDRLIREETYTQIDHVLPFSRTGDNSRHNKVLVLARSNQLKREQTPYEWMTSNTEGAPSWDAFKRRVEENKKLSRRKKNFLLEEDLVSKEGEFQSRNMTDTAYMSREVCAYLSDCLQFPDDGLKNHIVPIAGRATAWLRRQWGLNFGATGEKDRSDDRHHATDACVIAACSRSLVIKTAKVMKQTHWQVTRDMTREQRRSARMKALEGTMPWSTFANEVRERWKVTVPTRFVPRKGRGELYGQTVYSYLGVDESGKDLGRKKGSNKKIVMGNAVISKDGKSMVKISEMLCLRLWFDPDAKGRGGKKGRWYSDPVYKADLGVIQSNAYIPRVAKAHRGRKAWSPVPQAALRRSPVVIYLGDVVKVGDVVGRFAGFDIDSANWSFVDCLDGKGIAFPTVGSLTSELRPEVIREKVLGNAEVYRSTQDDGTSSGAD

SEQ ID NO: 795 - protein, 1004 aa, unidentified
  REGION 1..1004: note = Description of Unknown: uncultivated organism with predicted taxonomy: Collinsella
  REGION 1..1004: note = MG14-121 effector
MEITINREIGKLGLPRHLVLGMDPGIESCGFALIDTANHEILNLGVRLFDSPTHPKPGQSLAVIRRGFRSTRRNIDRTQARLKHCLQVLKAYDLIPQDATKEYFHTTKGDKQPLKLRVDGLDRLLNDREWALVLYSLCKRRGYIPHGEGNQDKSSEGGKVLSALAANKEAIAETSCHTVGEWLAQQPQSRNRGGNYDKCVTHAQLIEETHILFDAQRSFGSKYASPEFEAAYIEVCDWERSRKDFDRRTYDLVGHCSYFPTEKRAARCTLTSELVSAYGALGNITIIHENGTSRALSAMERDECIAILFSCEPIRGNKDCAVKFGALRKALDLSSGDYFKGIPAADEKTREVYKPKGWRVLRNTLNAANPILLQRLRDDRDLADAVMEAVAYSSALPVLQKQLQGLPLSEAEIEALCRLPYSSKALNGYGNRSKKALDMLLDCLEEPEVLNLTQAENDCGLLGLRIAGAQLERSDRLMPYETWIEHTGRTNNNPVVIRSMSQMRKVVNAICRKWGVPNEIHVELDRELRLPQRAKDEIAKANKKNKKNRERIAGQIAELRGCTIDEVTGKQIEKYRLWEEQECFDLYTGAKIEVDRLISDDTYTQIDHILPFSRTGENSRNNKVLVLAKSNQDKREQTPYEWMSHDGAPSWGAFERRVQENQKLSRRKKNFLLEKDLDTKEGEFLARSFTDTAYMSREVCAYLADCLLFPDDGAKAHVVPTTGRATAWLRRRWGLNFGSNGEKDRLDDRHHATDACVIAACSRSLVIKTARINQETHWSITRGMNEAQRRDAIMKALESVMPWETFANEVRAAHDFVVPTRFVPRKGKGKLFEQTVYRYAGVNAQGKDIARKASSDKDIVMGNAVVSADEKSVIKVSEMLCLRLWHDPEAKKGQGAWYADPVYKADIPALKDGTYVPRIAKQNYGRKVWKAIPHSLLIQKPLEIYLGDLIRVGDKLGRYNGYNIAKANWSFVDALTKKEITFPSVGMLSNELRPIVIRESILDN

SEQ ID NO: 796 - protein, 1002 aa, unidentified
  REGION 1..1002: note = Description of Unknown: uncultivated organism with predicted taxonomy: Olsenella
  REGION 1..1002: note = MG14-122 effector
MDVTRPYLVLGLDPGIASCGFCLLDMTNHKILEMGSHLFKAPQEDKTKTSLAVTRRKARSIRRNTARTAARLKRCLELLAGAGLVPADADKTWLQTKKGDKPILKLRAGGLDRLLTDREFAQVLYSLCGRRGYIPHGEGRLGETDEDESKKVLGAIKKNQDAMAAGSYRTVGEMLNAQGRSRNRGGDYSLCVYNSQIQDEAKVLFASQRAHGNTKATRELEDSYLACLTWEKKSLDHDARVYELVGPCSYFPGEKRAASADISSELCRAYERLGHIVIVHEDGSEQALTASEIDDHLKILFSTAPIKGNKECKVTYGTIRKDLDISGKSVFKGIAQDREKDEPFAPKAWRSLRRVLPEGLLARMFADRKLGDAVCEALTFASSEASLIERLSDLGLSDDERDAILAVPFTGKLFKGYGSRSLKALGLLLGAFEEPEIRILTDAEKVTGLLDLRLSDRGVRGQLLPPYDSYDPTCRNPVVLRAMGRMRHIVNAIIRIHGVPDEIHIELGRDLKMSNKEKSLVDKRNRENAASNKKWATTAAGILGCTPEEVPGRIIRKLILREEQGEKDLYTGDSIDLEHLVRDDRYCEIDHILPYSRTCDDSRANKVLVLSKSNQDKRERTPYEWMTSGEAGAPSWDSYRARVMAQVKNPRKRANHLNTDLGPETQAKFLARNLNDDRYMSVAVKNYLEDCLLFPEDGRKRHVTAVAGGATGNLRWVWGLNFGEGNVKDRADDRHHAVDAAIIAACSESTVKKVAEASAKGREAFKQLRKSRLADTQPWPTFAAEVAARREFVVPTRMADHGVTGRAFQDFSYRLEGLRETGYAEISRQTDPATRERRSDAAGNYALSSNGTVKLLDAIAFVRFWHDPDAGKNGKWYAEPVYCADIPAIQNGSYVPKYQKQKVARNSWLPVPDSAMHNEPLVLFQGDVLIIDSHIGRFWTYAIGGGTLNILSLLDKNEKAECFPPISKWVNSVEVRVLQEDCLGHCYDDISINPEDSTFRQR

SEQ ID NO: 797 - protein, 1003 aa, unidentified
  REGION 1..1003: note = Description of Unknown: uncultivated organism with predicted taxonomy: Olsenella mediterranea
  REGION 1..1003: note = MG14-123 effector
MEITINREIGKLGLPRHLVLGMDPGIASCGFALIDTANHEILDLGVRLFDSPTHPKTGQSLAVIRRGFRSTRRNIDRTQARLKHCLQILKAYGLIPQDATKEYFHTTKGDKQPLKLRVDGLDRLLNDREWALVLYSLCKRRGYIPHGEGNQDKSSEGGKVLSALAANKEAIAETSCRTVGEWLAQQPQSRNRGGNYDKCVTHAQLIEETHILFDAQRSFGSKHASPEFEAAYIEVCDWERSRKDFDRRTYDLVGHCSYFPTEKRAARCTLTSELVSAYGALGNITIIHENGTSRALSATERDECIAILFSCEPIRGNKDCAVKFGALRKALDLSSGDYFKGVPAADEKTREVYKPKGWRVLRNTLNAANPILLQRLRDDRNLADAVMEAVAYSSALPVLQEQLQGLPLSEAEIEALCRLPYSSKALNGYGNRSKKALDMLLDCLEEPEVLNLTQAENDCGLLGLRIAGAQLERSDRLMPYETWIERTGRTNNNPVVIRAMSQMRKVVNAICRKWGVPNEIHVELDRELRLPQRAKDEIAKANKKNEKNRERIAGQIAELRGCTADEVTGKQIEKYRLWEEQECFDLYTGAKIEVDRLISDDTYTQIDHILPFSRTGENSRNNKVLVLAKSNQDKREQTPYEWMSHDGAPSWDAFERRVQENQKLSRRKKNFLLEKDLDTKEGEFLARSFTDTAYMSREVCAYLADCLLFPDDGAKAHVVPTTGRATAWLRRRWGLNFGSNGEKDRSDDRHHATDACVIAACSRSLVIKTARINQETHWSITRGMNETQRRDAIMKALESVMPWETFANEVRAAHDFVVPTRFVPRKGKGELFEQTVYRYAGVNAQGKDIARKTSSDKDIVMGNAVVSADEKSVIKVSEMLCLRLWHDPEAKKGQGAWYADPVYKADIPALKDGTYVPRIAKAHTGRKAWKPVPESAMKKPPLEIYLGDLVQIGDFVGRFSGYNIDNANWSFVDRLTRIKISCPTVGKLSNDMSPFVVRESPIK

SEQ ID NO: 798 - protein, 1005 aa, unidentified
  REGION 1..1005: note = Description of Unknown: uncultivated organism with predicted taxonomy: Collinsella
  REGION 1..1005: note = MG14-124 effector
MEITINREIGKLGLPRHLVLGMDPGIASCGFALIDTANHEILDLGVRLFDSPTHPKTGQSLAVIRRGFRSTRRNIDRTQARLKHCLQVLKAYGLIPQDATKEYFHTTKGDKQPLKLRVDGLDRLLNDREWALVLYSLCKRRGYIPHGEGSQDKSSEGGKVLSALAANKEAIAETSCRTVGEWLAQQPQSRNRGGNYDKCVTHAQLIEETHILFDAQRSFGSKYASPEFEAAYIEVCDWERSRKDFDRRTYDLVGHCSYFPTEKRAARCTLTSELVSAYGALGNITIIHENGTSRALSATERDECIAILFSCEPIRGNKDCAVKFGALRKALDLSSGDYFKGVPAADEKTREVYKPKGWRVLRNTLNAANPILLQRLRDDRDLADAVMEAVTYSSALPVLQEQLQGLPLSEAEIEALCRLPYSSKALNGYGNRSKKALDVLLDCLEEPEVLNLTQAENDCGLLGLRIAGAQLERSDRLMPYETWIERTGRTNNNPVVIRAMSQMRKVVNAICRKWGVPNEIHVELDRELRLPQRAKDEIAKANKKNEKNRERIAGQIAELRGCTADEVTGKQIEKYRLWEEQECFDLYTGAKIEVDRLISDDTYTQIDHILPFSRTGENSRNNKVLVLAKSNQDKREQTPYEWMSHDGAPSWDAFERRVQENQKLSRRKKNFLLEKDLDTKEGEFLARSFTDTAYMSREVCAYLADCLLFPDDGAKAHVVPTTGRATAWLRRRWGLNFGSNGEKDRSDDRHHATDACVIAACSRSLVIKTARINQETHWSITRGMNETQRRDAIMKALESVMPWETFANEVRAAHDFVVPTRFVPRKGKGELFEQTVYRYAGVNAQGKDIARKASSDKDIVMGNAVVSADEKSVIKVSEMLCLRLWHDPEAKKGQGAWYADPVYKADIPALKDGTYVPRIAKAHTGRKAWKPVPESAMKKPPLEIYLGDLVQIGDFVGRFSGYNIANANWSFVDRLTKEALGCPTVVKLDNKLAPAIIRESIIMHQ

SEQ ID NO: 799 - protein, 1003 aa, unidentified
  REGION 1..1003: note = Description of Unknown: uncultivated organism with predicted taxonomy: Collinsella
  REGION 1..1003: note = MG14-125 effector
MEITINREIGKLGLPRHLVLGMDPGIASCGFALIDTANHEILDLGVRLFDSPTHPKTGQSLAVIRRGFRSTRRNIDRTQARLKHCLQVLKAYGLIPQDATKEYFHTTKGDKQPLKLRVDGLDRLLNDREWALVLYSLCKRRGYIPHGEGNQDKSSEGGKVLSALADNKEAIAETSCRTVGKWLAQQPQSRNRGGNYDKCVTHAQLIEETHILFDAQRSFGSKYASPEFEAAYIEVCDWERSRKDFDRRTYDLVGHCSYFPTEKRAARCTLTSELVSAYGALGNITIIHENGTSRALSATERDECIAILFSCEPIRGNKDCAVKFGALRKALDLSSGDYFKGVPAADEKTREVYKPKGWRVLRNTLNATNPILLQRLRDDRNLADAVMEAVAYSSALPVLQEQLQGLPLSEAEIEALCRLPYSSKALNGYGNRSKKALDMLLDCLEEPEVLNLTQAENDCGLLGLRIAGAQLERSDRLMPYETWIERTGRTNNNPVVIRAMSQMRKVVNAICRKWGVPNEIHVELDRELRLPQRAKVEIAKANKKNEKNRERIAGQIAELRGCTADEVTGKQIEKYRLWEEQECFDLYTGAKIEVDRLISDDTYTQIDHILPFSRTGENSRNNKVLVLAKSNQDKREQTPYEWMSHDGAPSWDAFERRVQENQKLSRRKKNFLLEKDLDTKEGEFLARSFTDTAYMSREVCAYLADCLLFPDDGAKAHVVPTTGRATAWLRRRWGLNFGSNGEKDRSDDRHHATDACVIAACSRSLVIKTARINQETHWSITRGMNETQRRDAIMKALESVMPWETFANEVRAAHDFVVPTRFVPRKGKGELFEQTVYRYAGVNAQGKDIARKASSDKDIVMGNAVVSADEKSVITVREMLCLRLWHDPEAKKGQGAWYADPVYKADIPALKDGTYVPRIAKAHTGRKAWKPVPESAMKKPPLEIYLGDLVQIGDFVGRFSGYNIDNANWSFVDRLTRIKISCPTVGKLSNDMSPFVVRESPIK

SEQ ID NO: 800 - protein, 969 aa, unidentified
  REGION 1..969: note = Description of Unknown: uncultivated organism with predicted taxonomy: Libanicoccus massiliensis
  REGION 1..969: note = MG14-126 effector
MDSEQPPYTLGHDRDEWQEIKKHLTNRPYLVLGLDPGISSCGFCLIDFNNHLILEMGSHLFKAPQQDKNNVSLAVVRRNARSTRRNNRRTAARLSHCLALLKEAGLVPNDVDKAWLQTRKGDKPVTKLRAVGLDRPLSDREFAQVLYSLCGKRGYIPHGEGRAGETDDAEGKKVLKAIADNTKAMESGGYRTVGEMLYRSDKGRSRNRGGNYDLCVYNSQIQDEVKVVFSAQRELGNNRATQELEKSYFECLTWEKKSADHDAKVYELVGPCTYFPEEKRAANADVSSELCRAYERLGHLVIVHEDGAEQTLTSEQIDKYIGILFSPSPIRGNKDCKVTYNTIRKDLDISAKSMFKGVAKEKEKDEVFAPKAWRKLRIILPTSLLTSMIEDRSFGDDICEAIAYSSTEETLSERLETIDLSEDDRETLLSVPFTSKLFKGYGNRSRKALDLLIGAFEEPEIRTLTEAEVATGLKGKRDEGRFPRSTLLPPYNAYDETCRNPVVLRAMGRMRRIINSIIKIYGVPDEIHVELARELKQSKREKDLATKRRNAREADNKRYAKLAADILGVEPEAVRGNIIRMLALREEQGCKDIYTGDRIDLERLVTDEHYCEIDHVLPYSRTCDDDQSNKTLTFASNNQNKRERTPYEWMTSDEEKAPNWEEYRNRVIAEVKNPRKRAKFLNTLLDEDTQEGFINRNLNDTRYMSRAVKSYLEDCLIFPKGKREKHVTAVAGGATGNLRWVWGLNFGAHGEKNRKDDRHHAVDAAVIAACNESAVMKVAKTTSMGREQFRKERKARLSNTQPWPTFADEVAAIRELVIPTRMVSHGVTGRMFEDTLYHIDDYTQDRGKYPLVRAKGKQNKGGNIRFISDDTAQKIDGIAFLRLWLDPDAPATGQTRGKWYAEPVYYADIPSIKHGDYVPRAIEQDVARINWQPIPESAKSSGPITVYPGDVVLVDNRAARFSKIGITKC

SEQ ID NO: 801 - protein, 1003 aa, unidentified
  REGION 1..1003: note = Description of Unknown: uncultivated organism with predicted taxonomy: Collinsella
  REGION 1..1003: note = MG14-127 effector
MEITINREIGKLGLPRHLVLGMDPGIASCGFALIDTANHEILDLGVRLFDSPTHPKTGQSLAVIRRGFRSTRRNIDRTQARLKHCLQILKAYGLIPQDATKEYFHTTKGDKQPLKLRVDGLDRLLNDREWALVLYSLCKRRGYIPHGEGNQDKSSEGGKVLSALAANKEAIAETSCRTVGKWLAQQPQSRNRGGNYDKCVTHAQLIEETHILFDAQRSFGSKYASPEFEAAYIEVCDWERSRKDFDRRTYDLVGHCSYFPTEKRAARCTLTSELVSAYGALGNITIIHENGTSRALSATERDECIAILFSCEPIRGNKDCAVKFGALRKALDLSSGDYFKGVPAADEKTREVYKPKGWRVLRNTLNAANPILLQRLRDDRNLADAVMEAVAYSSALPVLQEQLQGLPLSEAEIEALCRLPYSSKALNGYGNRSKKALDMLLDCLEEPEVLNLTQAENDCGLLGLRIAGAQLERSDRLMPYETWIERTGRTNNNPVVIRAMSQMRKVVNAICRKWGVPNEIHVELDRELRLPQRAKDEIAKANKKNEKNRERIAGQIAELRGCTADEVTGKQIEKYRLWEEQECFDLYTGAKIEVDRLISDDTYTQIDHILPFSRTGENSRNNKVLVLAKSNQDKREQTPYEWMSHDGAPSWDAFERRVQENQKLSRRKKNFLLEKDLDTKEGEFLARSFTDTAYMSREVCAYLADCLLFPDDGAKAHVVPTTGRATAWLRRRWGLNFGSNGEKDRSDDRHHATDACVIAACSRSLVIKTARINQETHWSITRGMNETQRRDAIMKALESVMPWETFANEVRAAHDFVVPTRFVPRKGKGELFEQTVYRYAGVNAQGKDLARKASSDKNIVMGNAVVSADEKSVIKVSEMLCLRLWHDPEAKKGQGAWYADPVYKADIPALKDGTYVPRIAKAHTGRKAWKPVPESAMKKPPLEIYLGDLVQIGDFVGRFSGYNIDNANWSFVDRLTRIKISCPTVGKLSNDMSPFVVRESPIK

SEQ ID NO: 802 - protein, 1003 aa, unidentified
  REGION 1..1003: note = Description of Unknown: uncultivated organism with predicted taxonomy: Collinsella
  REGION 1..1003: note = MG14-128 effector
MEITINREIGKLGLPRHLVLGMDPGIASCGFALIDTANHEILDLGVRLFDSPTHPKTGQSLAVIRRGFRSTRRNIDRTQARLKHCLQVFKAHGLIPQDATKEYFHTTKGDKQPLKLRVDGLDRLLSDREWALVLYSLCKRRGYIPHGEGNQDKSSEGGKVLSALVANKEAIAEASCRTVGEWLAQQPQSRNRGGNYDKCVTHAQLIEETHILFDAQRSFGSKYASPELEAAYIEVCDWERSRKDFDRRTYDLVGHCSYFPTEKRAARCTLTSELVSAYGALGNITIIHDDGTSRALSATERDECIAILFSCEPIRGNKDCAVKFGALRKALDLSSGDYFKGVPAADEKTREVYKPKGWRVLRNTLNAANPILLQRLRDDRDLADAVMEAVAYSSALPVLQERLQGLPLSEAEIEALCRLPYSSKALNGYGNRSKKALDMLLDCLEEPEVFNLTQAENDCGLLGLRIAGAQLERSDRLMPYELWAERTGRTNNNPVVIRSMSQMRKVVNAICRKWGVPNEIHVELDRELRLPQRAKDEIAKANKKNEKNRERIAGQIAELRGCTADEVTGKQIEKYRLWEEQECFDLYTGAKIEVDRLISDDTYTQIDHILPFSRTGENSRNNKVLVLAKSNQDKREQTPYEWMSHDGAPSWDAFERRVQENQKLSRRKKNFLLEKDLDAKEGDFLARSFTDTAYMSREVCAYLADCLQFPDDGAKAHVVPTTGRATAWLRRRWGLNFGSNGEKDRSDDRHHATDACVIAACSRSLVIKTARLNQETHWSITRGMNEIQRHDAIMKALESVMPWETFANEVRAAHDFVVPTRFVPRKGKGELFEQTVYRYAGVNAQGKDLARKAGSDKDIVMGNAVVSADEKSVIKVSEMLCLRLWHDPEAKKGQGAWYADPVYKADIPALKDGTYVPRIAKAHTGRKAWKPVPKSAMAKPPLEIYFDDLVQIGDFIGRFSGYNINSANWSFTDRLTRLNLSCPTVGQLNNDLSPVVIRESPIK

SEQ ID NO: 803 - protein, 1003 aa, unidentified; identical to SEQ ID NO: 799
  REGION 1..1003: note = Description of Unknown: uncultivated organism with predicted taxonomy: Collinsella
  REGION 1..1003: note = MG14-129 effector

SEQ ID NO: 804 - protein, 753 aa, unidentified
  REGION 1..753: note = Description of Unknown: uncultivated organism with predicted taxonomy: Olsenella sp. KH3B4
  REGION 1..753: note = MG14-130 effector
MDVTRSYLVLGLDPGIASCGFCLLDMSNHKILEMGSHLFKAPQEDKTKTSLAVTRRKARSIRRNTARTAARLKHCLELLAGAGLVPADADKTWLQTKKGDKPILKLRAGGLDRLLTDREFAQVLYSLCGRRGYIPHGEGRLGETDEDESRKVLGAIKKNQDAMAAGSYRTVGEMLNTQGRSRNRGGDYSLCVYNSQIQDEAKALFASQRARGNTKATRELEDSYLACLTWEKKSLDHDARIYELVGPCSYFPGEKRAASADVSSELCRAYERLGHIVIVHEDGSEQALTASQIDGYLKILFSTAPIKGNKECKVSYGTIRKDLDISGKSVFKGVAQDKEKDETFAPKAWRCLRRVLPEELLARMFEDRQLGDAICEALTFASSEASLVERLSDLDLSGDERDAILTVPFTGKLFKGYGSRSLKALGLLLGAFEEPEIRILTDAEKVTGLLDLRLSDRGVRGQLLPPYDSYDPTCRNPVVLRAMGRMRHIVNAIIRIHGVPDEIHIELGRELKMSNKEKSLVDKRNRENAANNKKWAATAAGILGCTPEEVPGRIIRKLILREEQGEKDLYTGEPIDLEHLVRDDRYCEIDHILPYSRTCDDGRANKVLVLSKSNQDKRERTPYEWMTSGETSAPSWDSYRARVMAQVKNPRKRANYLNTDLGPETQAKFLARNLNDDRYMSVAVKNYLEDCLLFPEDGRKRHVTAVAGGATGNLRWVWGLNFGEGNVKDRADDRHHAIDAAIIAACSESTVKK

SEQ ID NO: 805 - protein, 985 aa, unidentified
  REGION 1..985: note = Description of Unknown: uncultivated organism with predicted taxonomy: Collinsella
  REGION 1..985: note = MG14-131 effector
MEITINREIGKLGLPRHLVLGMDPGIASCGFALIDTANHEILDLGVRLFDSPTHPKTGQSLAVIRRGFRSTRRNIDRTQARLKHCLQVFKAHGLIPQDATKEYFHTTKGDKQPLKLRVDGLDRLLSDREWALVLYSLCKRRGYIPHGEGNQDKSSEGGKVLSALAANKEAIAEASCRTVGEWLAQQPQSRNRGGNYDKCVTHAQLIEETHILFDAQRSFGSKYASPELEAAYIEVCDWERSRKDFDRRTYDLVGHCSYFPTEKRAARCTLTSELVSAYGALGNITIIHDDGTSRALSATERDECIAILFSCEPIRGNKDCAVKFGALRKALDLSSGDYFKGVPAADEKTREVYKPKGWRVLRNTLNAANPILLQRLRDDRDLADAVMEAVAYSSALPVLQERLQGLPLSEAEIEALCRLPYSSKALNGYGNRSKKALDMLLDCLEEPEVFNLTQAENDCGLLGLRIAGAQLERSDRLMPYELWAERTGRTNNNPVVIRSMSQMRKVVNAICRKWGVPNEIHVELDRELRLPQRAKDEIAKANKKNEKNRERIAGQIAELRGCTADEVTGKQIEKYRLWEEQECFDLYTGAKIEVDRLISDDTYTQIDHILPFSRTGENSRNNKVLVLAKSNQDKREQTPYEWMSHDGAPSWDAFERRVQENQKLSRRKKNFLLEKDLDAKEGDFLARSFTDTAYMSREVCAYLADCLQFPDDGAKAHVVPTTGRATAWLRRRWGLNFGSNGEKDRSDDRHHATDACVIAACSRSLVIKTARLNQETHWSITRGMNEIQRHDAIMKALESVMPWETFANEVRAAHDFVVPTRFVPRKGKGELFEQTVYRYAGVNAQGKDLARKAGSDKDIVMGNAVVSADEKSVIKVSEMLCLRLWHDPEAKKGQGAWYADPVYKADIPALKDGTYVPRMAKPPLEIYFDDLVQIGDFIERFSGYNINSANWSFTDRLTRLNLSCPTVGQLNNDLSPVVIRESPIK

SEQ ID NO: 806 - protein, 1003 aa, unidentified
  REGION 1..1003: note = Description of Unknown: uncultivated organism with predicted taxonomy: Collinsella
  REGION 1..1003: note = MG14-132 effector
MEITINREIGKLGLPRHLVLGMDPGIASCGFALIDTANHEILDLGVRLFDSPTHPKTGQSLAVIRRGFRSTRRNIDRTQARLKHCLQILKAYGLIPQDATKEYFHTTKGDKQPLKLRVDGLDRLLNDREWALVLYSLCKRRGYIPHGEGNQDKSSEGGKVLSALAANKEAIAETSCRTVGEWLAQQPQSRNRGGNYDKCVTHAQLIEETHILFDAQRSFGSKYASPEFEAAYIEVCDWERSRKDFDRRTYDLVGHCSYFPTEKRAARCTLTSELVSAYGALGNITIIHENGTSRALSATERDECIAILFSCEPIRGNKDCAVKFGALRKALDLSSGDYFKGVPAADEKTREVYKPKGWRVLRNTLNAANPILLQRLRDDRNLADAVMEAVAYSSALPVLQEQLQGLPLSEAEIEALCKLPYSSKALNGYGNRSKKALDMLLDCLEEPEVLNLTQAENDCGLLGLRIAGAQLERSDRLMPYETWIERTGRTNNNPVVIRAMSQMRKVVNAICRKWGVPNEIHVELDRELRLPQRAKDEIAKANKKNEKNRERIAGQIAELRGCTADEVTGKQIEKYRLWEEQECFDLYTGAKIEVDRLINDDTYTQIDHILPFSRTGENSRNNKVLVLAKSNQDKREQTPYEWMSHDGAPSWDAFERRVQENQKLSRRKKNFLLEKDLDTKEGEFLARSFTDTAYMSREVCAYLADCLLFPDDGAKAHVVPTTGRATAWLRRRWGLNFGSNGEKDRSDDRHHATDACVIAACSRSLVIKTARINQETHWSITRGMNETQRRDAIMKALESVMPWETFANEVRAAHDFVVPTRFVPRKGKGELFEQTVYRYAGVNAQGKDIARKASSDKDIVMGNAVVSADEKSVIKVSEMLCLRLWHDPEAKKGQGAWYADPVYKADIPALKDGTYVPRIAKAHTGRKAWKPVPESAMKKPPLEIYLGDLVQIGDFVGRFSGYNIDNANWSFVDRLTRIKISCPTVGKLSNDMSPFVVRESPIK

SEQ ID NO: 807 - protein, 1004 aa, unidentified
  REGION 1..1004: note = Description of Unknown: uncultivated organism with predicted taxonomy: Collinsella
  REGION 1..1004: note = MG14-133 effector
MEITINREIGKLGLPRHLVLGMDPGIASCGFALIDTANREILDLGVRLFDSPTHPKTGQSLAVIRRGFRSTRRNIDRTQARLKHCLQILKAYGLIPQDATKEYFHTTKGDKQPLKLRVDGLDRLLNDREWALVLYSLCKRRGYIPHGEGNQDKSSEGGKVLSALAANKEAIAETSCRTVGEWLAQQPQSRNRGGNYDKCVTHAQLIEETHILFDAQRSFGSKYASPEFEAAYIEVCDWERSRKDFDRRTYDLVGHCSYFPTEKRAARCTLTSELVSAYGALGNITIIHDDGTSRALSATERDECIAILFSCEPIRGNKDCAVKFGALRKALDLSSGDYFKGVPAADEKTREVYKPKGWRVLRNTLNAANPILLQRLRDDRNLADAVMEAVAYSSALPVLQEQLQGLPLSEAEIEALCRLPYSSKALNGYGNRSKKALDMLLDCLEEPEVLNLTQAENDCGLLGLRIAGTQLERSDRLMPYETWIERTGRTNNNPVVIRAMSQMRKVVNAICRKWGVPNEIHVELDRELRLPQRAKDEIAKANKKNEKNRERIAGQIAELRGCTADEVTGKQIEKYRLWEEQECFDLYTGAKIEVDRLISDDTYTQIDHILPFSRTGENSRNNKVLVLAKSNQDKREQTPYEWMSHDGAPSWDAFERRVQENQKLSRRKKNFLLEKDLDTKEGEFLARSFTDTAYMSREVCAYLADCLLFPDDGAKAHVVPTTGRATAWLRRRWGLNFGSNGEKDRSDDRHHATDACVIAACSRSLVIKTARINQETHWSITRGMNETQRRDAIMKALESVMPWETFANEVRAAHDFVVPTRFVPRKGKGELFEQTVYRYAGVNAQGKDIARKASSDKDIVMGNAVVSADEKSVIKVSEMLCLRLWHDPEAKKGQGAWYADPVYKADIPALKDGTYVPRIAKQKYGRKVWKAVPNSALTQKPLEIYLGDLIKVGDKLGRYNGYNIATANWSFVDALTKKEIAFPSVGMLSNELQPIIIRESILDN

SEQ ID NO: 808 - protein, 1003 aa, unidentified; identical to SEQ ID NO: 712
  REGION 1..1003: note = Description of Unknown: uncultivated organism with predicted taxonomy: Collinsella
  REGION 1..1003: note = MG14-135 effector

SEQ ID NO: 809 - protein, 1004 aa, unidentified
  REGION 1..1004: note = Description of Unknown: uncultivated organism with predicted taxonomy: Collinsella
  REGION 1..1004: note = MG14-136 effector
MEITINREIGKLGLPRHLVLGMDPGIASCGFALIDTANREILDLGVRLFDSPTHPKTGQSLAVIRRGFRSTRRNIDRTQARLKHCLQILKAYGLIPQDATKEYFHTTKGDKQPLKLRVDGLDRLLNDREWALVLYSLCKRRGYIPHGEGNQDKSSEGGKVLSALAANKEAIAETSCRTVGEWLAQQPQSRNRGGNYDKCVTHAQLIEETHILFDAQRSFGSKYASPEFEAAYIEVCDWERSRKDFDRRTYDLVGHCSYFPTEKRAARCTLTSELVSAYGALGNITIIHDDGTSRALSATERDECIAILFSCEPIRGNKDCAVKFGALRKALDLSSGDYFKGVPAADEKTREVYKPKGWRVLRNTLNAANPILLQRLRDDRNLADAVMEAVAYSSALPVLQEQLQGLPLSEAEIEALCRLPYSSKALNGYGNRSKKALDMLLDCLEEPEVLNLTQAENDCGLLGLRIAGTQLERSDRLMPYETWIELTGRTNNNPVVIRSMSQMRKVVNAVCRKWGVPNEIHVELDRELRLPQRAKDEIAKANKKNEKNRERIAGQIAELRGCTADEVTGKQIEKYRLWEEQECFDLYTGAKIEVDRLISDDTYTQIDHILPFSRTGENSRNNKVLVLAKSNQDKREQTPYEWMSHDGAPSWDAFVRRVQENQKLSRRKKNFLLEKDLDTKEGEFLARSFTDTAYMSREVCAYLADCLLFPDDGAKAHVVPTTGRATAWLRRRWGLNFGSNREKDCSDDRHHATDACVIAACSRSLVIKTARINQETHWSITRGMNETQRRNAIMKALESVMPWETFANEVRAAHDFVVPTRFVPRKGKGELFEQTVYRYAGVNAQGKDLARKASSDKDIVMGNAVVSADEKSVIKVSEMLCLRLWHDPEAKKGQGAWYADPVYKADIPALKDGTYIPRIAKQKYGRKVWKAVPNSALTQKPLEIYLGDLIKVGDKLGRYNGYNIATANWSFVDALTKKEIAFPSVGMLSNELQPIIIRESILDN

SEQ ID NO: 810 - protein, 1024 aa, unidentified
  REGION 1..1024: note = Description of Unknown: uncultivated organism with predicted taxonomy: Clostridiales
  REGION 1..1024: note = MG14-137 effector
MMEYSDPRDFGFRPETVMTALMPYEQFSSKTRRLILGIDMGIASVGVCLIDIRNHEIVLMASHIFKAPVEGKQKDISARQSGASIRRGYRSVRRTTKRRKNRKKAVRDIEKKYILIPDDADGQWFAIRKGEPDVLHLRGKALLYKLNGRELARILYAFAGRRGYIDHGKGATDDDSGKVKKALSVNRKILDENGYETIAQYLLKQPTSRNREGDYRYMVDIEMVTDEVHTIFRHQRDLGSDIATEELEGEYLSALRWLTDTSARDKKIYSRVGYCTYLGAPEKRAASSLISFEMVRAYEKLSNIKIEHQGREATYISPEKRNEIVASLFAVSKNPKPLKWSQLREKLDMQSSDSFDSRLPTDEKDDCIKIPAWNALCTGLFMSNRALLDRFHDDTDAADAVCSALTYASSGGSLRNALENLSLDLSEQDIDSLLDLPYASKLFSGYCSAGVRALQMLRDAFKDPQIEKLYNAEKATGLYEARQALAAARNESRDGLLCPYLEFDPTCTNPVVLRATAQVRRMINSIIRHYGLPDIIRVEVAKDLKRSKREKAIIAATNKANKDSNEQAKKDLVAFYGLPNDAHVSSADFEKMWLYREQFGQDPYTGKGINLERMLNDRDYVEIDHILPFSRSCDDSKSNKVLCLTKSNRDKANRTPYEWMTSGEPSAPDFGDFCRRMDAWAGKGKSAHYTKSKLSKLKNSTFGEEEQKFIDRNLNDTRYMSRQLAMWVRECLPFPDDKRQHVFCVAGAATSLMRRIWGIGIVDEKGKKDRSDDRHHAVDAAVIACCDQRIVKGIARVNSGRSNIKERERLRYESMPYPEFKAQVEAWIPCIVPTRTVSRTATGSLLKDTVYPYVGVDDRGKDLYRRNGKIEPASTLWKDGSGGCKLYDGAYGLMAVFDESMKKSGSWRFDPIYYIDVPNVRQDFIREFTKGLSIDYWPKVQLKGDERRIFLKQGDVLLQDGCAMRYYMYNVSNGVVNSYSKIGEKSVPLQKTGPLSDESFPKQAKWDSSLTVMQEDCLGLCWLK

SEQ ID NO: 811 - protein, 1003 aa, unidentified
  REGION 1..1003: note = Description of Unknown: uncultivated organism with predicted taxonomy: Collinsella
  REGION 1..1003: note = MG14-138 effector
MEITINREIGKLGLPRHLVLGMDPGIASCGFALIDTANHEILDLGVRLFDSPIHPKTKQSLAVIRRGFRSTRRNIDRTQARLKHCLQVLKAYGLIPQDATKEYFHTTKGDKQPLKLRVDGLDRLLNDREWALVLYSLCKLRGYVPHGEGNQDKSSEGGKVLSALAANKEAIAETSCRTVGKWLAQQPQSRNRGGNYDKCVTHAQLIEETHILFDAQRSFGSKYASPEFEAAYIEVCDWERSRKDFDRRTYDIVGHCSYFPTEKRAARCTLTSELVSAYGALGNITIIHENGTSRALTATERDECIAILFSCEPIRGNKDCAVKFGALRKALDLSSGDYFKGVPAADEKTREVYKPKGWRVLRNTLNAANPILLQRLRDDRDLADAVMEAVAYSSALPVLQEQLQGLPLSEAEIEALCRLPYSSKALNGYGNRSKKALDMLLDCLEEPEVLNLTQAENDCGLLGLRIAGAQLERSDRLMPYETWIERTGRTNNNPVVIRSMSQMRKVVNAVCRKWGVPNEIHVELDRELRLPQRAKDEIAKANKKNEKNRERIAGQIAELRGCTADEVTGKQIEKYRLWEEQEYFDLYTGAKIEVDRLISDDTYTQIDHILPFSRTGENSRNNKVLVLAKSNQDKREQTPYEWMSHDGAPSWDAFERRVQENQKLSRRKKNFLLEKDLDTKEGEFLARSFTDTAYMSREVCAYLADCLLFPDDGAKAHVVPTTGRATAWLRRRWGLNFGSNGEKDRSDDRHHATDACVIAACSPSLVIKTARINQETHWSITRGMNETQRRDAIMKALESVMPWETFANEVRAAHDFVVPTRFVPRKGKGELFEQTVYRYAGVNAQGKDIARKASSDKDIVMGNAVVSADEKSVIKVSEMLCLRLWHDPEAKKGQGAWYADPVYKADIPALKDGTYVPRIAKAHTGRKAWKPVPESAMKKPPLEIYLGDLVQIGDFVGRFSGYNIDNANWSFVDRLTRIKISCPTVGKLSNDMSPFVVRESPIK

SEQ ID NO: 812 - protein, 1003 aa, unidentified
  REGION 1..1003: note = Description of Unknown: uncultivated organism with predicted taxonomy: Collinsella
  REGION 1..1003: note = MG14-139 effector
MEITINREIGKLGLPRHLVLGMDPGIASCGFALIDTANHEILDLGVRLFDSPTHPKTGQSLAVIRRGFRSARRNIDRTQARLKHCLQVFKAHGLIPQDATKEYFHTTKGDKQPLKLRVDGLDRLLSDREWALVLYSLCKRRGYIPHGEGNQDKSSEGGKVLSALAANKEAIAEASCRTVGEWLAQQPQSRNRGGNYDKCVTHAQLIEETHILFDAQRSFGSKYASPELEAAYIEVCDWERSRKDFDRRTYDLVGHCSYFPTEKRAARCTLTSELVSAYGALGNITIIHDDGTSRALSATERDECIAILFSCEPIRGNKDCAVKFGALRKALDLSSGDYFKGVPAADEKTREVYKPKGWRVLRNTLNAANPILLQRLRDDRDLADAVMEAVAYSSALPVLQERLQGLPLSEAEIEALCRLPYSSKALNGYGNRSKKALDMLLDCLEEPEVFNLTQAENDCGLLGLRIAGAQLERSDRLMPYELWAERTGRTNNNPVVIRSMSQMRKVVNAICRKWGVPNEIHVELDRELRLPQRAKDEIAKANKKNEKNRERIAGQIAELRGCTADEVTGKQIEKYRLWEEQECFDLYTGAKIEVDRLISDDTYTQIDHILPFSRTGENSRNNKVLVLAKSNQDKREQTPYEWMSHDGAPSWDAFERRVQENQKLSRRKKNFLLEKDLDAKEGDFLARSFTDTAYMSREVCAYLADCLQFPDDGAKAHVVPTTGRATAWLRRRWGLNFGSNGEKDRSDDRHHATDACVIAACSRSLVIKTARLNQETHWSITRGMNEIQRHDAIMKALESVMPWETFANEVRAAHDFVVPTRFVPRKGKGELFEQTVYRYAGVNAQGKDLARKAGSDKDIVMGNAVVSADEKSVIKVSEMLCLRLWHDPEAKKGQGAWYADPVYKADIPALKDGTYVPRIAKAHTGRKAWKPVPKSAMAKPPLEIYFDDLVQIGDFIGRFSGYNINSANWSFTDRLTRLNLSCPTVGQLNNDLSPVVIRESPIK

SEQ ID NO: 813 - protein, 1003 aa, unidentified
  REGION 1..1003: note = Description of Unknown: uncultivated organism with predicted taxonomy: Collinsella
  REGION 1..1003: note = MG14-140 effector
MEITINREIGKLELPRHLVLGMDPGIASCGFALIDTANHEILDLGVRLFDSPTHPKTGQSLAVIRRGFRSTRRNIDRTQARLKHCLQVLKAYGLIPQDATKEYFHTTKGDKQPLKLRVDGLDRLLNDREWALVLYSLCKRRGYIPHGEGNQDKSSEGGKVLSALAANKEAIAETSCRTVGEWLAQQPQSRNRGGNYDKCVTHAQLIEETHILFDAQRSFGSKYASPEFEAAYIEVCDWERSRKDFDRRTYDLVGHCSYFPTEKRAARCTLTSELVSAYGALGNITIIHENGTSRALSATERDECIAILFSCEPIRGNKDCAVKFGALRKALDLSSGDYFKGVPAADEKTREVYKPKGWRVLRNTLNAANPILLQRLRDDRNLADAVMEAVAYSSALPVLQERLQGLPLSEAEIEALCRLPYSSKALNGYGNRSKKALDMLLDCLEEPEVLNLTQAENDCGLLGLRIAGAQLERSDRLMPYETWIELTGRTNNNPVVIRSMSQMRKVVNAVCRKWGVPNEIHVELDRELRLPQRAKDEIAKANKKNEKNRERIAGQIAELRGCTADEVTGKQIEKYRLWEEQEYFDLYTGAKIEVDRLISDDTYTQIDHILPFSRTGENSRNNKVLVLAKSNQDKREQTPYEWMSHDGAPSWDAFERRVQENQKLSRRKKNFLLEKDLDTKEGEFLARSFTDTAYMSREVCAYLADCLLFPDDGAKAHVVPTTGRATAWLRRRWGLNFGSNGEKDRSDDRHHATDACVIAACSRSLVIKTARINQETHWSITRGMNETQRRDAIMKALESVMPWETFANEVRAAHDFVVPTRFVPRKGKGELFEQTVYRYAGVNAQGKDIARKASSDKDIVMGNAVVSADEKSVIKVSEMLCLRLWHDPEAKKGQGAWYADPVYKADIPALKDGTYVPRIAKAHTGRKAWKPVPESAMKKPPLEIYLGDLVQIGDFVGRFSGYNIDNANWSFVDRLTRIKISCPTVGKLSNDMSPFVVRESPIK

SEQ ID NO: 814 - protein, 1000 aa, unidentified; identical to SEQ ID NO: 730
  REGION 1..1000: note = Description of Unknown: uncultivated organism with predicted taxonomy: Olsenella sp. KH3B4
  REGION 1..1000: note = MG14-141 effector

SEQ ID NO: 815 - protein, 1004 aa, unidentified
  REGION 1..1004: note = Description of Unknown: uncultivated organism with predicted taxonomy: Collinsella
  REGION 1..1004: note = MG14-142 effector
MEITINREIGKLGLPRHLVLGMDPGIASCGFALIDTANHEILDLGVRLFDSPTHPKTGQSLAVIRRGFRSTRRNIDRTQARLKHCLQVLKAYGLIPQDATKEYFHTTKGDKQPLKLRVDGLDRLLNDREWALVLYSLCKRRGYIPHGEGNQDKSSEGGKVLSALAANKEAIAETSCRTVGEWLAQQPQSRNRGGNYDKCVTHAQLIEETHILFDAQRSFGSKYASPEFEAAYIEVCDWERSRKDFDRRTYDLVGHCSYFPTEKRAARCTLTSELVSAYGALGNITIIHDDGTSRALSATERDECIAILFSCEPIRGNKDCAVKFGALRKALDLSSGDYFKGVPAADEKTREVYKPKGWRVLRNTLNAANPNLLQRLRDDRDLADAVMEAVAYSSALPVLQERLQGLPLSEAEIEALCMLPYSSKVLNGYGNRSKKALDMLLDCLEEPEVLNLTQGENDCGLLGLRIAGAQLERSDRLMPYELWAERTGRTNNNPVVIRSMSQMRKVVNAICRKWGVPNEIHVELDRELRLPQRAKDEIAKANKKNEKNRERIAGQIAELRGCTADEVTGKQIEKYRLWEEQECFDLYTGAKIEVDRLISDDTYTQIDHILPFSRTGENSRNNKVLVLAKSNQDKREQTPYEWMSHDGAPSWDAFERRVQENQKLSRRKKNFLLEKDLDAKEGDFLARSFTDTAYMSREVCAYLADCLQFPDDGAKAHVVPTTGRATAWLRRRWGLNFGSNGEKDRSDDRHHATDACVIAACSRSLVIKTARINQETHWSITRGMNETQRHDAIMKALESVMPWETFANEVRAAHDFVVPTRFVPRKGKGELFEQTVYRYAGVNAQGKDLARKVGSDKDIVMGNAVVSADEKSVVKVSEMLCLRLWHDPEAKKGQGAWYADPVYKADIPALKDGTYVPRIAKQKYGRKVWKAVPNSALTQKPLEIYLGDLIKVGDKLGRYNGYNIATANWSFVDALTKKEIAFPSVGMLSNELQPIIIRESILDN

SEQ ID NO: 816 - protein, 1005 aa, unidentified; identical to SEQ ID NO: 798
  REGION 1..1005: note = Description of Unknown: uncultivated organism with predicted taxonomy: Collinsella
  REGION 1..1005: note = MG14-143 effector

SEQ ID NO: 817 - protein, 1045 aa, unidentified
  REGION 1..1045: note = Description of Unknown: uncultivated organism with predicted taxonomy: Collinsella
  REGION 1..1045: note = MG14-144 effector
MDKAQGVDIGELGFDPGTFATALMTLEEFRSKDRVIWAGIDIGVASTGLCLVDVRNHEIVLMTSHLFKSPVVDKKKATAAPESLASVRRGARSVRRNIMREGRRKKAIRAVLADSDLIPADADGEWFAARRDERTVVKLRSKALGHLLNSRELARVLYSFASHRGYIDHGKSDKDDDAGKVKKALAANHAALAGGGCETFGQYLAGQPRSRNRAGDYSFTSDIGMTVDEVRTIFLRQREMGSEIATEALEERYIAELTWLTDTSKRDMSTYLKVGFCTYRGAPYRRGATSTTSFEMVRAHQTLANTVILHEDGTSSTIPGNTRIEIVRELFAVKKSVKPLKWSGLRRRLGLSDGDSFKGRPLEEEKRDCIALPAWAVLCSGLYEDHRDLLERLHDHIEDADAVCSALTYASSAASLAGRLAPLALTDDEVEAIIDLPYSARLFSGYASASLEALQMLRGTLEDPCVTSLRQAEEDSGLAQARAMLAEEHGEAADGLLCAFSDYDPTCKNPVVLRATAQVRRMVNSVIRHYGLPDVIRVEVARDLKRSKHEREIVAESNRARHELNEQAKRDIVEFLGLHDDDHVRGRDLDMVKLYREQGGKDPYTGTGIDFGRMLEERGYVEIDHILPISRTCDNSQANKVLCLTKSNRDKSNRSPYEWMTSGEATAPDWDEFCGRMERWAKMCEPRRYARKKLANLTCENLAERAGGFIDRNLNDTRYMSVALAKWLRECLPFARDGHEHVFCVAGGATALMRSVWDIGITGPDGKKNRDDDRHHAVDAAVIACCTPGIVKNVALVNEGHARADVRQRLFRDSLPYPEFKEQVNAWIPCIVPTLTLPNTVTGSVLKDTVYPYLGRDDAGKDLYLTVKRDKDGRIVDRKVNKATTMWKDGQGGCRAYGSMCALDAVFDASVGKRGKWSFDPVYCIDIPHREDEIRTIRAFSKERAIDLWDSIKVPEDAQRMRIRRGDVLVCDGKAARFYCFDISVNAIRLYSQRGGKQLQTTGPLSSEAFPPPSKWGDDIRVMQEDCLGLCWLSFLSNRAIAQMD

SEQ ID NO: 818 - protein, 1000 aa, unidentified
  REGION 1..1000: note = Description of Unknown: uncultivated organism with predicted taxonomy: Olsenella sp. KCTC 15699
  REGION 1..1000: note = MG14-145 effector
MDVTRPYLVLGLDPGIASCGFCLLDMTNHKILEMGSHLFKAPQEDKTKTSLAVTRRKARSIRRNTARTAARLKHCLELLAGAGLVPANADKTWLQTKKGDKPILKLRAGGLDRLLTDREFAQVLYSLCGRRGYIPHGEGRLGETDEDESRKVLGAIKKNQDAMAAGSYRTVGEMLNTQGRSRNRGGDYSLCVYNSQIQDEAKALFASQRARGNTKATRELEDSYLACLTWEKKSLDHDARIYELVGPCSYFPGEKRAASADVSSELCRAYERLGHIVIVHEDGSEQALTASQIDGYLKILFSTAPIKGNKECKVSYGTIRKDLDISGKSVFKGVAQDKEKDETFAPKAWRCLRRVLPEELLARMFEDRQLGDAICEALTFASSEASLVERLSDLDLSGDERDAILTVPFTGKLFKGYGSRSLKALGLLLGAFEEPEIRILTDAEKVTGLLDLRLSDRGVRGQLLPPYDSYDPTCRNPVVLRAMGRMRHIVNAIIRIHGVPDEIHIELGRELKMSNKEKSLVDKRNRENAANNKKWAATAAGILGCTPEEVPGRIIRKLILREEQGEKDLYTGEPIDLEHLVRDDRYCEIDHILPYSRTCDDGRANKVLVLSKSNQDKRERTPYEWMTSGEAGAPSWDSYRARVMAQVKNPRKRANYLNTDLGPETQAKFLARNLNDDRYMSVAVKNYLEDCLLFPEDGRKRHVTAVAGGATGNLRWVWGLNFGEGNIKDRADDRHHAIDAAIIAACSESTVKKVAEASAKGREAFKQLRKSRLADTQPWPTFATEVAARREFVVPTRMADHGVTGRVFEDTLYHLEGITDDKGKYPLVRAGEKTAKKGNVHFNPDGSVKLIDGMAFLRLWLDPTARPNGKVKGKWYAEPVYYADIPAIKAGTYVPRAIVQGIARINWEPIPQTALESKPLVLFKNDVLVVDGHIARYSNIGISVCQLLMLNLLTRDRVTDWPSVGSWGKDTQVRILQEDCLGHCYDSIAINPEDSTFQQR

SEQ ID NO: 819 - protein, 1000 aa, unidentified
  REGION 1..1000: note = Description of Unknown: uncultivated organism with predicted taxonomy: Olsenella
  REGION 1..1000: note = MG14-146 effector
MDTTRPYLVLGLDPGIASCGFCLLDMTNHKILEMGSHLFKAPQEDKTKTSLAVTRRKARSIRRNTARTAARLKHCLELLAGAGLVQADADKPWLQTKKGDKPILKLRAGGLDRLLTDREFAQVLYSLCGRRGYIPHGEGRLGETDEDESKKVLGAIKKNQDAMAAGSYRTVGEMLNAQGRSRNRGGDYSLCVYNSQIQDEAKALFASQRARGNTKATRELEDSYLACLTWEKKSLDHDTRVYELVGPCSYFPGEKRAASADVSSELCRAYERLGHIVIVHEDGTEQALTAGEINDYLKILFSTAPIKGNKECKVTYGTIRKDLDISGKSVFKGIAQDKEKDEPFAPKAWRSLRRVLPERLLARMLEDRNLGDAVCEALTFASSEASLIERLSDLGLSDDERDAILAVPFTGKLFKGYGSRSLKALRLLLGAFEEPEIRILTDAEKATGLLDLRLSDRGVRGQLLPPYDSYDPTCRNPVVLRAMGRMRHIVNAIIRIHGVPDEIHIELGRDLKMSNKEKSLVDKRNRENAASNKKWATTAAGILGCTPEEVPGRIIRKLILREEQGEKDLYTGDSIDLEHLVRDDRYCEIDHILPYSCTCDDSRANKVLVLSKSNQDKRERTPYEWMTSGEAGAPSWDSYRARVMAQVKNPRKRANYLNTDLGPETQAKFLARNLNDDRYMSVAVKNYLEDCLLFPEDGRKRHVTAVAGGATGNLRWVWGLNFGEGNIKDRTDDRHHAVDAAIIAACSESTVKKVAEASAKGREAFKQLRKSRLADTQPWPTFAAEVAARREFVVPTHMANHGVTGRVFEDTLYHLEGITEDKGKYPLVRAGEKTVKKGNVRINPDGSVKLIDGMAFLRLWLDPTARPNGKVKGKWYAEPVYYADIPAIKAGTYVPRACTIHVARVNWEPVPEAAMELEPVVLYAGDVVEINNQLVRYSGFNINGATLYYQSLLNGATTTAIPSLGTWGKDTQVRVLQEDCLGHCYDGILINPEDSTFQKR

SEQ ID NO: 820 - protein, 1002 aa, unidentified; identical to SEQ ID NO: 711
  REGION 1..1002: note = Description of Unknown: uncultivated organism with predicted taxonomy: Olsenella sp. KH3B4
  REGION 1..1002: note = MG14-147 effector

SEQ ID NO: 821 - protein, 828 aa, unidentified
  REGION 1..828: note = Description of Unknown: uncultivated organism with predicted taxonomy: Olsenella mediterranea
  REGION 1..828: note = MG14-148 effector
LIDTANHEILDLGVRLFDSPTHPKTGQSLAVIRRGFRSTRRNIDRTQARLKHCLQVLKAYGLIPQDATKEYFHTTKGDKQPLKLRVDGLDRLLNDREWALVLYSLCKRRGYIPHGEGSQDKSSEGGKVLSALAANKEAIAETSCRTVGEWLAQQPQSRNRGGNYDKCVTHAQLIEETHILFDAQRSFGSKYASPEFEAAYIEVCDWERSRKDFDRRTYDLVGHCSYFPTEKRAARCTLTSELVSAYGALGNITIIHENGTSRALSATERDECIAILFSCEPIRGNKDCAVKFGALRKALDLSSGDYFKGVPAADEKTREVYKPKGWRVLRNTLNATNPILLQRLRDDRNLADAVMEAVAYSSALPVLQEQLQGLPLSEAEIEALCRLPYSSKALNGYGNRSKKALDMLLDCLEEPEVLNLTQAENDCGLLGLRIAGAQLERSDRLMPYETWIERTGRTNNNPIVIRAMSQMRKVVNAICRKWGVPNEIHVELDRELRLPQRAKDEIAKANKKNEKNRERIAGQIAELRGCTADEVTGKQIEKYRLWEEQECFDLYTGAKIEVDRLISDDTYTQIDHILPFSRTGENSRNNKVLVLAKSNQDKREQTPYEWMSHDGAPSWDAFERRVQENQKLSRRKKNFLLEKDLDTKEGEFLARSFTDTAYMSREVCAYLADCLLFPDDGAKAHVVPTTGRATAWLRRRWGLNFGSNGEKDRSDDRHHATDACVIAACSRSLVIKTARINQETHWSITRGMNETQRRDAIMKALESVMPWETFANEVRAAHDFVVPTRFVPRKGKGELFEQTVYRYAGVNAQGKDIARKASSDKDIV

SEQ ID NO: 822 - protein, 1003 aa, unidentified
  REGION 1..1003: note = Description of Unknown: uncultivated organism with predicted taxonomy: Collinsella
  REGION 1..1003: note = MG14-149 effector
MEITINREIGKLGLPRHLVLGMDPGIASCGFALIDTANHEILDLGVRLFDSPTHPKTGQSLAVIRRGFRSTRRNIDRTQARLKHCLQVFKAHGLIPQDATKEYFHTTKGDKQPLKLRVDGLDRLLSDCEWALVLYSLCKRRGYIPHGEGNQDKSSEGGKVLSALAANKEAIAEASCRTVGEWLAQQPQSRNRGGNYDKCVTHAQLIEETHILFDAQRSFGSKYASPELEAAYIEVCDWERSRKDFDRRTYDLVGHCSYFPTEKRAARCTLTSELVSAYGALGNITIIHDDGISRALSATERDECIAILFSCEPIRGNKDCAVKFGALRKALDLSSGDYFKGVPAADEKTREVYKPKGWRVLRNTLNAANPILLQRLRDDRDLADAVMEAVAYSSALPVLQERLQGLPLSEAEIEALCRLPYSSKALNGYGNRSKKALDMLLDCLEEPEVLNLTQAENDCGLLGLRIAGAQLERSDRLMPYELWAERTGRTNNNPVVIRSMSQMRKVVNAICRKWGVPNEIHVELDRELRLPQRAKDEIAKANKKNEKNRERIAGQIAELRGCTADEVTGKQIEKYRLWEEQECFDLYTGAKIEVDRLISDDTYTQIDHILPFSRTGENSRNNKVLVLAKSNQDKREQTPYEWMSHDGAPSWDAFERRVQENQKLSRRKKNFLLEKDLDAKEGDFLARSFTDTAYMSREVCAYLADCLQFPDDGAKAHVVPTTGRATAWLRRRWGLNFGSNGEKDRSDDRHHATDACVIAACSRSLVIKTARLNQETHWSITRGMNEIQRHDAIMKALESVMPWETFANEVRAAHDFVVPTRFVPRKGKGELFEQTVYRYAGVNAQGKDLARKAGSDKDIVMGNAVVSADEKSVIKVSEMLCLRLWHDPEAKKGQGAWYADPVYKADIPALKDGTYVPRIAKAHTGRKAWKPVPKSAMAKPPLEIYFDDLVQIGDFIGRFSGYNINSANWSFTDRLTRLNLSCPTVGQLNNDLSPVVIRESPIK

SEQ ID NO: 823 - protein, 863 aa, unidentified
  REGION 1..863: note = Description of Unknown: uncultivated organism with predicted taxonomy: Collinsella
  REGION 1..863: note = MG14-150 effector
MEITINREIGKLGLPRHLVLGMDPGITSCGFALIDTANHEILDLGVRLFDSPTHPKTGQSLAVIRRGFRSTRRNIDRTQARLKHCLQVLKAYGLIPQDATKEYFHTTKGDKQPLKLRVDGLDRLLNDREWALVLYSLCKRRGYIPHGEGNQDKSSEGGKVLSALAANKEAIAETSCRTVGKWLAQQPQSRNRGGNYDKCVTHAQLIEETHILFDAQRSFGSKYASPEFEAAYIEVCDWERSRKDFDRRTYDLVGHCSYFPTEKRAARCTLTSELVSAYGALGNITIIHENGTSRALSATERDECIAILFSCEPIRDNKDCAVKFGALRKALDLSSGDYFKGVPAADEKTREVYKPKGWRVLRNTLNATNPILLQRLRDDRNLADAVMEAVAYSSALPVLQEQLQGLPLSEAEIEALCRLPYSSKALNGYGNRSKKALDMLLDCLEEPEVLNLTQAENDCGLLGLRIAGAQLERSDRLMPYETWIERTGRTNNNPVVIRAMSQMRKVVNAICRKWGVPNEIHVELDRELRLPQRAKDEIAKANKKNEKNRERIAGQIAELRGCTADEVTGKQIEKYRLWEEQECFDLYTGAKIEVDRLISDDTYTQIDHILPFSRTGENSRNNKVLVLAKSNQDKREQTPYEWMSHDGAPSWDAFERRVQENQKLSRRKKNFLLEKDLDTKEGEFLARSFTDTAYMSREVCAYLADCLLFPDDGAKAHVVPTTGRATAWLRRRWGLNFGSNGEKDRSDDRHHATDACVIAACNRSLVIKTARINQETHWSITRGMNETQRRDAIMKALESVMPWETFANEVRAAHDFVVPTRFVPRKGKGELFEQTVYRYAGVNAQGKDIARKASSDKDIVMGN

SEQ ID NO: 824 - protein, 1003 aa, unidentified; identical to SEQ ID NO: 822
  REGION 1..1003: note = Description of Unknown: uncultivated organism with predicted taxonomy: Collinsella
  REGION 1..1003: note = MG14-151 effector

SEQ ID NO: 825 - protein, 1005 aa, unidentified; identical to SEQ ID NO: 688
  REGION 1..1005: note = Description of Unknown: uncultivated organism with predicted taxonomy: Collinsella
  REGION 1..1005: note = MG14-152 effector

SEQ ID NO: 826 - protein, 1005 aa, unidentified; identical to SEQ ID NO: 695
  REGION 1..1005: note = Description of Unknown: uncultivated organism with predicted taxonomy: Coriobacteriales
  REGION 1..1005: note = MG14-153 effector

SEQ ID NO: 827 - protein, 1000 aa, unidentified; identical to SEQ ID NO: 733
  REGION 1..1000: note = Description of Unknown: uncultivated organism with predicted taxonomy: Olsenella
  REGION 1..1000: note = MG14-154 effector

SEQ ID NO: 828 - protein, 1000 aa, unidentified; identical to SEQ ID NO: 710
  REGION 1..1000: note = Description of Unknown: uncultivated organism with predicted taxonomy: Olsenella
  REGION 1..1000: note = MG14-155 effector

SEQ ID NO: 829 - protein, 1024 aa, unidentified
  REGION 1..1024: note = Description of Unknown: uncultivated organism with predicted taxonomy: Libanicoccus massiliensis
  REGION 1..1024: note = MG14-156 effector
MDSEQPPYTLGHDRDEWQEIKKHLTNRPYLVLGLDPGISSCGFCLIDFNNHLILEMGSHLFKAPQQDKNNVSLAVVRRNARSTRRNNRRTAARLSHCLALLKEAGLVPNDVDKAWLQTRKGDKPVTKLRAVGLDRPLSDREFAQVLYSLCGKRGYIPHGEGRAGETDDAEGKKVLKAIADNTKAMESGGYRTVGEMLYRSDKGRSRNRGGNYDLCVYNSQIQDEVKVVFSAQRELGNNRATQELEKSYFECLTWEKKSADHDAKVYELVGPCTYFPEEKRAANADVSSELCRAYERLGHLVIVHEDGAEQTLTSEQIDKYIGILFSPSPIRGNKDCKVTYNTIRKDLDISAKSMFKGVAKEKEKDEVFAPKAWRKLRIILPTSLLTSMIEDRSFGDDICEAIAYSSTEETLSERLETIDLSEDDRETLLSVPFTSKLFKGYGNRSRKALDLLIGAFEEPEIRTLTEAEVATGLKGKRDEGRFPRSTLLPPYNAYDETCRNPVVLRAMGRMRRIINSIIKIYGVPDEIHVELARELKQSKREKDLATKRRNAREADNKRYAKLAADILGVEPEAVRGNIIRMLALREEQGCKDIYTGDRIDLERLVTDEHYCEIDHVLPYSRTCDDDQSNKTLTFASNNQNKRERTPYEWMTSDEEKAPNWEEYRNRVIAEVKNPRKRAKFLNTLLDEDTQEGFINRNLNDTRYMSRAVKSYLEDCLIFPKGKREKHVTAVAGGATGNLRWVWGLNFGAHGEKNRKDDRHHAVDAAVIAACNESAVMKVAKTTSMGREQFRKERKARLSNTQPWPTFADEVAAIRELVIPTRMVSHGVTGRMFEDTLYHIDDYTQDRGKYPLVRAKGKQNKGGNIRFISDDTAQKIDGIAFLRLWLDPDAPATGQTRGKWYAEPVYYADIPSIKHGDYVPRAIEQDVARINWQPIPESAKSSGPITVYPGDVVLVDNRAARFSKIGITKCQLTMLNLLSKERVTDWPSIGSWRQDTEVRVLGEDCLGHCYKHIAITRDSSTYRVE

SEQ ID NO: 830 - protein, 1003 aa, unidentified
  REGION 1..1003: note = Description of Unknown: uncultivated organism with predicted taxonomy: Collinsella
  REGION 1..1003: note = MG14-157 effector
MEITINREIGKLGLPRHLVLGMDPGIASCGFALIDTANHEILDLGVRLFDSPTHPKTGQSLAVIRRGFRSTRRNIDRTQARLKHCLQILKAYGLIPQDATKEYFHTTKGDKQPLKLRVDGLDRLLNDREWALVLYSLCKRRGYIPHGEGSQDKSSEGGKVLSALAANKEAIAETSCRTVGEWLAQQPQSRNRGGNYDKCVTHAQLIEETHILFDAQRSFGSKYASPEFEAAYIEVCDWERSRKDFDRRTYDLVGHCSYFPTEKRAARCTLTSELVSAYGALGNITIIHENGTSRALSATERDECIAILFSCEPIRGNKDCAVKFGALRKALDLSSGDYFKGVPAADEKTREVYKPKGWRVLRNTLNAANPILLQRLRDDRNLADAVMEAVAYSSALPVLQEQLQGLPLSEAEIEALCRLPYSSKALNGYGNRSKKALDMLLDCLEEPEVLNLTQAENDCGLLGLRIAGAQLERSDRLMPYETWIERTGRTNNNPVVIRAMSQMRKVVNAICRKWGVPNEIHVELDRELRLPQRAKDEIAKANKKNEKNRERIAGQIAELRGCTADEVTGKQIEKYRLWEEQECFDLYTGAKIEVDRLISDDTYTQIDHILPFSRTGENSRNNKVLVLAKSNQDKREQTPYEWMSHDGAPSWDAFERRVQENQKLSRRKKNFLLEKDLDTKEGEFLARSFTDTAYMSREVCAYLADCLLFPDDGAKAHVVPTTGRATAWLRRRWGLNFGSNGEKDRSDDRHHATDACVIAACSRSLVIKTARINQETHWSITRGMDETQRRDAIMKALESVMPWETFANEVRAAHDFVVPTRFVPRKGKGELFEQTVYRYAGVNAQGKDIARKASSDKDIVMGNAVVSADEKSVIKVSEMLCLRLWHDPEAKKGQGAWYADPVYKADIPALKDGTYVPRIAKAHTGRKAWKPVPESAMKKPPLEIYLGDLVQIGDFVGRFSGYNIDNANWSFVDRLTRIKISCPTVGKLSNDMSPFVVRESPIK

SEQ ID NO: 831 - protein, 1005 aa, unidentified; identical to SEQ ID NO: 693
  REGION 1..1005: note = Description of Unknown: uncultivated organism with predicted taxonomy: Collinsella
  REGION 1..1005: note = MG14-158 effector

SEQ ID NO: 832 - protein, 1003 aa, unidentified; identical to SEQ ID NO: 768
  REGION 1..1003: note = Description of Unknown: uncultivated organism with predicted taxonomy: Collinsella
  REGION 1..1003: note = MG14-159 effector

SEQ ID NO: 833 - protein, 1003 aa, unidentified; identical to SEQ ID NO: 732
  REGION 1..1003: note = Description of Unknown: uncultivated organism with predicted taxonomy: Collinsella
  REGION 1..1003: note = MG14-160 effector

SEQ ID NO: 834 - protein, 1003 aa, unidentified; identical to SEQ ID NO: 732
  REGION 1..1003: note = Description of Unknown: uncultivated organism with predicted taxonomy: Collinsella
  REGION 1..1003: note = MG14-161 effector

SEQ ID NO: 835 - protein, 1002 aa, unidentified; identical to SEQ ID NO: 701
  REGION 1..1002: note = Description of Unknown: uncultivated organism with predicted taxonomy: Olsenella
  REGION 1..1002: note = MG14-162 effector

SEQ ID NO: 836 - protein, 1003 aa, unidentified; identical to SEQ ID NO: 732
  REGION 1..1003: note = Description of Unknown: uncultivated organism with predicted taxonomy: Collinsella
  REGION 1..1003: note = MG14-163 effector

SEQ ID NO: 837 - protein, 1000 aa, unidentified; identical to SEQ ID NO: 684
  REGION 1..1000: note = Description of Unknown: uncultivated organism with predicted taxonomy: Olsenella
  REGION 1..1000: note = MG14-164 effector

SEQ ID NO: 838 - protein, 1005 aa, unidentified; identical to SEQ ID NO: 688
  REGION 1..1005: note = Description of Unknown: uncultivated organism with predicted taxonomy: Collinsella
  REGION 1..1005: note = MG14-165 effector

SEQ ID NO: 839 - protein, 1003 aa, unidentified; identical to SEQ ID NO: 755
  REGION 1..1003: note = Description of Unknown: uncultivated organism with predicted taxonomy: Collinsella sp. AM17-1
  REGION 1..1003: note = MG14-166 effector

SEQ ID NO: 840 - protein, 1003 aa, unidentified; identical to SEQ ID NO: 717
  REGION 1..1003: note = Description of Unknown: uncultivated organism with predicted taxonomy: Collinsella
  REGION 1..1003: note = MG14-167 effector

SEQ ID NO: 841 - protein, 1000 aa, unidentified; identical to SEQ ID NO: 694
  REGION 1..1000: note = Description of Unknown: uncultivated organism with predicted taxonomy: Olsenella sp. KH3B4
  REGION 1..1000: note = MG14-168 effector

SEQ ID NO: 842 - protein, 1000 aa, unidentified
  REGION 1..1000: note = Description of Unknown: uncultivated organism with predicted taxonomy: Olsenella
  REGION 1..1000: note = MG14-169 effector
MDVTRPYLVLGLDPGIASCGFCLLDMSNHKILEMGSHLFKAPQEDKTKTSLAVTRRKARSIRRNTARTAARLKHCLELLAGAGLVPANADKTWLQTKKGDKPILKLRAGGLDRLLTDREFAQVLYSLCGRRGYIPHGEGRLGETDEDESRKVLGAIKKNQDAMAAGSYRTVGEMLNAQGRSRNRGGDYSLCVYNSQIQDEAKALFASQRARGNTKATRELEDSYLACLTWEKKSLDHDTRVYELVGPCSYFPGEKRAASADVSSELCRAYERLGHIVIVHEDGSEQALTASEIDDYLKILFSTAPIKGNKECKVSYGTIRKDLDISGKSVFKGIAQDREKDEPFVPKAWRSLRRVLPKGLLARMLEDRKLGDAVCEALTFASSEASLVERLSDLDLSGDKQDAILTVPFTAKLFKGYGSRSLKALGLLLGAFEEPEIRILTDAEKVTGLLDLRLSDRGVRGQLLPPYDSYDPTCRNPVVLRAMGRMRHIVNAIIRIHGVPDEIHIELGRELKMSNKEKSLVDKRNRENAANNKKWAATAAGILGCTPEEVPGRIIRKLILREEQGEKDLYTGEPIDLEHLVRDDRYCEIDHILPYSRTCDDGRANKVLVLSKSNQDKRERTPYEWMTSGEAGAPSWDSYRARVMAQVKNPRKRANYLNTDLGPETQAKFLARNLNDDRYMSVAVKNYLEDCLLFPEDGRKRHVTAVAGGATGNLRWVWGLNFGEGNVKDRADDRHHAIDAAIIAACSESTVKKVAEASAKGREAFKQLRKSRLADTQPWPTFATEVAARREFVVPTRMADHGVTGRVFEDTLYHLEGITDDKGKYPLVRAGEKTAKKGNVHFNPDGSVKLIDGMAFLRLWLDPTARPNGKVKGKWYAEPVYYADIPAIKAGTYVPRAIVQGIARINWEPIPQTALESKPLVLFKNDVLVVDGHIARYSNIGISVCQLLMLNLLTRDRVTDWPSVGSWGKDTQVRILQEDCLGHCYDSIAINPEDSTFQQR

SEQ ID NO: 843 - protein, 839 aa, unidentified; identical to SEQ ID NO: 708
  REGION 1..839: note = Description of Unknown: uncultivated organism with predicted taxonomy: Olsenella sp. KH3B4
  REGION 1..839: note = MG14-170 effector

SEQ ID NO: 844 - protein, 1001 aa, unidentified; identical to SEQ ID NO: 707
  REGION 1..1001: note = Description of Unknown: uncultivated organism with predicted taxonomy: Coriobacteriia bacterium
  REGION 1..1001: note = MG14-171 effector

SEQ ID NO: 845 - protein, 1003 aa, unidentified; identical to SEQ ID NO: 740
  REGION 1..1003: note = Description of Unknown: uncultivated organism with predicted taxonomy: Collinsella
  REGION 1..1003: note = MG14-172 effector

SEQ ID NO: 846 - protein, 1003 aa, unidentified; identical to SEQ ID NO: 749
  REGION 1..1003: note = Description of Unknown: uncultivated organism with predicted taxonomy: Collinsella
  REGION 1..1003: note = MG14-173 effector

SEQ ID NO: 847 - protein, 856 aa, unidentified
  REGION 1..856: note = Description of Unknown: uncultivated organism with predicted taxonomy: Collinsella
  REGION 1..856: note = MG14-174 effector
EGSQDKSSEGGKVLSALAANKKALAETPCRTVGEWFAQQPQSRNRGGNYDKCVTHAQLIDETHILFEAQRSFGSAFASPEFEAAYIEVCDWERSRKDFDRRSYDLVGRCSYFPAEKRAARCTLTSELVAAYGALGNITIIHEGGTSRALSATERDECIAILFSCEPIRGNKDCAVKFGALRKALDLSSGDYFKGVPAADEKTREVYKPKGWRTLRNTLNAANPILLQRLRDDRDLADAVMEAVAYSSALPVLQEQLQELPLSEAEIEALCKLPYSSKTLNGYGNRSKKALDMLLDCLEEPEVLNLTQAENDCGLLGLRIAGAQLERSDRLMPYETWVELTGRTNNNPVVIRSMSQMRKVVNAICRKWGVPNEIHVELDRELRLPQRAKDEIAKANKKNEKNRERIARQIAELRGCTADEVTGKQIEKYRLWEEQECFDLYTGAKIEVDRLISDDTYTQIDHILPFSRTGENSRNNKVLVLAKSNQDKREQTPYEWMSHDGAPSWDAFERRVQENQKLSRRKKNFLLEKDLDTKEGEFLARSFTDTAYMSREVCAYLADCLLFPDDGAKAHVVPTTGRATAWLRRRWGLNFGSNGEKDRSDDRHHATDACVIAACSRSLVIKTARINQETHWSIIRGMNETQRRDAIMKALESVMPWETFANEVRVAHDFVVPTRFVPRKGKGELFEQTVYRYAGVNAQGKDIAHKASSDKDIVMGNAVVSADEKSVIKVSEMLCLRLWHDPKAKKGQGAWYADPVYKADIPALKDGTYVPRIAKAHTGRKAWKPVPESATKKPPLEIYLGDLVQIGDFVGRFSGYNIDNANWSFVDRLTRIKTSCPTVGKLSNDMSPFVVRESPIK

SEQ ID NO: 848 - protein, 1003 aa, unidentified; identical to SEQ ID NO: 714
  REGION 1..1003: note = Description of Unknown: uncultivated organism with predicted taxonomy: Collinsella
  REGION 1..1003: note = MG14-175 effector

SEQ ID NO: 849 - protein, 1003 aa, unidentified; identical to SEQ ID NO: 714
  REGION 1..1003: note = Description of Unknown: uncultivated organism with predicted taxonomy: Collinsella aerofaciens
  REGION 1..1003: note = MG14-176 effector

SEQ ID NO: 850 - protein, 1003 aa, unidentified; identical to SEQ ID NO: 734
  REGION 1..1003: note = Description of Unknown: uncultivated organism with predicted taxonomy: Collinsella
  REGION 1..1003: note = MG14-177 effector

SEQ ID NO: 851 - protein, 1000 aa, unidentified
  REGION 1..1000: note = Description of Unknown: uncultivated organism with predicted taxonomy: Olsenella sp. GAM18
  REGION 1..1000: note = MG14-178 effector
MDATRPYLVLGLDPGIASCGFCLLDMTNHKILEMGSHLFKAPQEDKTKTSLAVTRRKARSIRRNTARTSARLKHCLELLAGAGLVPADADKTWLQTKKGDKPILKLRAGGLDRLLTDREFAQVLYSLCGHRGYIPHGEGRLGETDEDESKKVLGAIKKNQDAMAAGSYRTVGEMLNAQGRSRNRGGDYSLCVYNSQIQDEAKALFASQRARGNTKATRELEDSYLACLTWEKKSLDHDTRVYELVGPCSYFPGEKRAASADVSSELCRAYERLGHTVIVHEDGSEQALTAGEIDGYLKILFSTAPIKGNKECKVTYGTIRKDLDISGKSVFKGIAQDKEKDEPFAPKAWRSLRRVLPERLLARMLEDRNLGDAVCEALTFASSEASLIERLSDLDLSDDERDAILTVPFTGKLFKGYGSRSLKALGLLLGAFEEPEIRILTDAEKVTGLLDLRLSDRDVRGQLLPPYSSYDPTCRNPVVLRAMGRMRHIVNAIFRIHGIPDEIHIELGRDLKMSNKEKILVDKRNRENAASNKKWATTAAGILGCTPEEVPGRIIRKLILREEQGEKDLYTGDSIDLEHLVRDDRYCEIDHILPYSRTCDDSRANKVLVLSKSNQDKRERTPYEWMTSGEAGAPSWDSYRARVIAQVKNPRKRANYLNTDLGPETQAKFLARNLNDDRYMSVAVKNYLEDCLLFPEDGRKRHVTAVAGGATGNLRWVWGLNFGEGNIKDRTDDRHHAVDAAIIAACSESTVKKVAEASAKGREAFKQLRKSRLADTQPWPTFATEVAARREFVVPTRMADHGVTGRVFEDTLYHLEGIAEGKGKYPLVRASEKTVKKGNVRINPDGSVKLIDGMAFLRLWLDPTARPNGKVKGKWYAEPVYYADIPAIKAGTYVPRACTIHVARVNWEPVPEAAMGANPVIVFFGDVLSVDNHVGRFGGFDIFGGRLALLNLLTKQEVSDWPSLGSWGKDTQVRVLQEDCLGHCYDSIAINPEGSTFQQR

SEQ ID NO: 852 - protein, 1003 aa, unidentified; identical to SEQ ID NO: 718
  REGION 1..1003: note = Description of Unknown: uncultivated organism with predicted taxonomy: Collinsella
  REGION 1..1003: note = MG14-179 effector

SEQ ID NO: 853 - protein, 1003 aa, unidentified; identical to SEQ ID NO: 791
  REGION 1..1003: note = Description of Unknown: uncultivated organism with predicted taxonomy: Collinsella
  REGION 1..1003: note = MG14-180 effector

SEQ ID NO: 854 - protein, 1000 aa, unidentified; identical to SEQ ID NO: 745
  REGION 1..1000: note = Description of Unknown: uncultivated organism with predicted taxonomy: Olsenella
  REGION 1..1000: note = MG14-181 effector

SEQ ID NO: 855 - protein, 1003 aa, unidentified; identical to SEQ ID NO: 797
  REGION 1..1003: note = Description of Unknown: uncultivated organism with predicted taxonomy: Olsenella mediterranea
  REGION 1..1003: note = MG14-182 effector

SEQ ID NO: 856 - protein, 1002 aa, unidentified; identical to SEQ ID NO: 788
  REGION 1..1002: note = Description of Unknown: uncultivated organism with predicted taxonomy: Collinsella
  REGION 1..1002: note = MG14-183 effector

SEQ ID NO: 857 - protein, 1002 aa, unidentified; identical to SEQ ID NO: 796
  REGION 1..1002: note = Description of Unknown: uncultivated organism with predicted taxonomy: Olsenella
  REGION 1..1002: note = MG14-184 effector

SEQ ID NO: 858 - protein, 1003 aa, unidentified; identical to SEQ ID NO: 752
  REGION 1..1003: note = Description of Unknown: uncultivated organism with predicted taxonomy: Collinsella
  REGION 1..1003: note = MG14-185 effector

SEQ ID NO: 859 - protein, 1002 aa, unidentified; identical to SEQ ID NO: 770
  REGION 1..1002: note = Description of Unknown: uncultivated organism with predicted taxonomy: Collinsella
  REGION 1..1002: note = MG14-186 effector

SEQ ID NO: 860 - protein, 1003 aa, unidentified; identical to SEQ ID NO: 764
  REGION 1..1003: note = Description of Unknown: uncultivated organism with predicted taxonomy: Coriobacteriales
  REGION 1..1003: note = MG14-187 effector

SEQ ID NO: 861 - protein, 1003 aa, unidentified; identical to SEQ ID NO: 806
  REGION 1..1003: note = Description of Unknown: uncultivated organism with predicted taxonomy: Collinsella
  REGION 1..1003: note = MG14-188 effector

SEQ ID NO: 862 - protein, 1003 aa, unidentified; identical to SEQ ID NO: 717
  REGION 1..1003: note = Description of Unknown: uncultivated organism with predicted taxonomy: Collinsella
  REGION 1..1003: note = MG14-189 effector

SEQ ID NO: 863 - protein, 1003 aa, unidentified
  REGION 1..1003: note = Description of Unknown: uncultivated organism with predicted taxonomy: Collinsella
  REGION 1..1003: note = MG14-190 effector
MEITINREIGKLGLPRHLVLGMDPGIASCGFALIDTANHEILDLGVRLFDSPTHPKTGQSLAVIRRGFRSTRRNIDRTQARLKHCLQVLKAYGLIPQDATKEYFHTTKGDKQPLKLRVDGLDRLLNDREWALVLYSLCKRRGYIPHGEGSQDKSSEGGKVLSALAANKEAIAETSCRTVGEWLAQQPQSRNRGGNYDKCVTHAQLIEETHILFDAQRSFGSKYASPEFEAAYIEVCDWERSRKDFDRRTYDLVGHCSYFPTEKRAARCTLTSELVSAYGALGNITIIHENGTSRALSATERDECIAILFSCEPIRGNKDCAVKFGALRKALDLSSGDYFKGVPAADEKTREVYKPKGWRVLRNTLNAANPILLQRLRDDRDLADAVMEAVAYSSALPVLQEQLQGLPLSEAEIEALCRLPYSSKALNGYGNRSKKALDVLLDCLEEPEVLNLTQAENDCGLLGLRIAGAQLERSDRLMPYETWIERTGRTNNNPVVIRAMSQMRKVVNAICRKWGVPNEIHVELDRELRLPQRAKDEIAKANKKNEKNRERIAGQIAELRGCTADEVTGKQIEKYRLWEEQECFDLYTGAKIEVDRLISDDTYTQIDHILPFSRTGENSRNNKVLVLAKSNQDKREQTPYEWMSHDGAPSWDAFERRVQENQKLSRRKKNFLLEKDLDTKEGEFLARSFTDTAYMSREVCAYLADCLLFPDDGAKAHVVPTTGRATAWLRRRWGLNFGSNGEKDRSDDRHHATDACVIAACSRSLVIKTARINQETHWSITRGMNETQRRDAIMKALESVMPWETFANEVRAAHDFVVPTRFVPRKGKGELFEQTVYRYAGVNAQGKDLARKASSDKNIVMGNAVVSADEKSVIKVSEMLCLRLWHDPEAKKGQGAWYADPVYKADIPALKDGTYVPRIAKAHTGRKAWKPVPESAMKKPPLEIYLGDLVQIGDFVGRFSGYNIDNANWSFVDRLTRIKISCPTVGKLSNDMSPFVVRESPIK

SEQ ID NO: 864 - protein, 1003 aa, unidentified; identical to SEQ ID NO: 802
  REGION 1..1003: note = Description of Unknown: uncultivated organism with predicted taxonomy: Collinsella
  REGION 1..1003: note = MG14-191 effector

SEQ ID NO: 865 - protein, 1003 aa, unidentified; identical to SEQ ID NO: 760
  REGION 1..1003: note = Description of Unknown: uncultivated organism with predicted taxonomy: Collinsella
  REGION 1..1003: note = MG14-192 effector

SEQ ID NO: 866 - protein, 1003 aa, unidentified; identical to SEQ ID NO: 777
  REGION 1..1003: note = Description of Unknown: uncultivated organism with predicted taxonomy: Collinsella
  REGION 1..1003: note = MG14-193 effector

SEQ ID NO: 867 - protein, 1004 aa, unidentified; identical to SEQ ID NO: 729
  REGION 1..1004: note = Description of Unknown: uncultivated organism with predicted taxonomy: Olsenella
  REGION 1..1004: note = MG14-194 effector

SEQ ID NO: 868 - protein, 1003 aa, unidentified; identical to SEQ ID NO: 714
  REGION 1..1003: note = Description of Unknown: uncultivated organism with predicted taxonomy: Collinsella
  REGION 1..1003: note = MG14-195 effector

SEQ ID NO: 869 - protein, 1046 aa, unidentified; identical to SEQ ID NO: 739
  REGION 1..1046: note = Description of Unknown: uncultivated organism with predicted taxonomy: Collinsella
  REGION 1..1046: note = MG14-196 effector

SEQ ID NO: 870 - protein, 1003 aa, unidentified; identical to SEQ ID NO: 801
  REGION 1..1003: note = Description of Unknown: uncultivated organism with predicted taxonomy: Collinsella
  REGION 1..1003: note = MG14-197 effector

SEQ ID NO: 871 - protein, 1003 aa, unidentified
  REGION 1..1003: note = Description of Unknown: uncultivated organism with predicted taxonomy: Collinsella
  REGION 1..1003: note = MG14-198 effector
MEITINREIGKLGLPRHLVLGMDPGIASCGFALIDTANHEILDLGVRLFDSPTHPKTGQSLAVIRRGFRSTRRNIDRTQARLKHCLQILKAYGLIPQDATKEYFHTTKGDKQPLKLRVDGLDRLLNDREWALVLYSLCKRRGYIPHGEGNQDKSSEGGKVLSALAANKEAIAETSCRTVGEWLAQQPQSRNRGGNYDKCVTHAQLIEETHILFDAQRSFGSKYASPEFEAAYIEVCDWERSRKDFDRRTYDLVGHCSYFPTEKRAARCTLTSELVSAYGALGNITIIHENGTSRALSATERDECIAILFSCEPIRGNKDCAVKFGALRKALDLSSGDYFKGVPAADEKTREVYKPKGWRVLRNTLNATNPILLQRLRDDRNLADAVMEAVAYSSALPVLQEQLQGLPLSEAEIEALCRLPYSSKALNGYGNRSKKALDMLLDCLEEPEVLNLTQAENDCGLLGLRIAGAQLERSDRLMPYETWIERTGRTNNNPVVIRAMSQMRKVVNAICRKWGVPNEIHVELDRELRLPQRAKDEIAKANKKNEKNRERIAGQIAELRGCTADEVTGKQIEKYRLWEEQECFDLYTGAKIEVDRLISDDTYTQIDHILPFSRTGENSRNNKVLVLAKSNQDKREQTPYEWMSHDGAPSWDAFERRVQENQKLSRRKKNFLLEKDLDTKEGEFLARSFTDTAYMSREVCAYLADCLLFPDDGAKAHVVPTTGRATAWLRRRWGLNFGSNGEKDRSDDRHHATDACVIAACSRSLVIKTARINQETHRSITRGMNETQRRDAIMKALESVMPWETFANEVRAAHDFVVPTRFVPRKGKGELFEQTVYRYAGVNAQGKDIARKASSDKDIVMGNAVVSADEKSVIKVSEMLCLRLWHDPEAKKGKGAWYADPVYKADIPALKDGTYVPRIAKAHTGRKAWKPVPGSAMKKPPLEIYPGDLVQIGDFVGRFSGYNIDNANWSFVDRLTRIKISCPTVGKLSNDMSPFVVRESPIK

SEQ ID NO: 872 - protein, 862 aa, unidentified; identical to SEQ ID NO: 747
  REGION 1..862: note = Description of Unknown: uncultivated organism with predicted taxonomy: Collinsella
  REGION 1..862: note = MG14-199 effector

SEQ ID NO: 873 - protein, 833 aa, unidentified; identical to SEQ ID NO: 721
  REGION 1..833: note = Description of Unknown: uncultivated organism with predicted taxonomy: Collinsella
  REGION 1..833: note = MG14-200 effector

SEQ ID NO: 874 - protein, 1003 aa, unidentified; identical to SEQ ID NO: 813
  REGION 1..1003: note = Description of Unknown: uncultivated organism with predicted taxonomy: Collinsella
  REGION 1..1003: note = MG14-201 effector

SEQ ID NO: 875 - protein, 1003 aa, unidentified; identical to SEQ ID NO: 799
  REGION 1..1003: note = Description of Unknown: uncultivated organism with predicted taxonomy: Collinsella
  REGION 1..1003: note = MG14-202 effector

SEQ ID NO: 876 - protein, 1003 aa, unidentified; identical to SEQ ID NO: 799
  REGION 1..1003: note = Description of Unknown: uncultivated organism with predicted taxonomy: Collinsella
  REGION 1..1003: note = MG14-203 effector

SEQ ID NO: 877 - protein, 1003 aa, unidentified
  REGION 1..1003: note = Description of Unknown: uncultivated organism with predicted taxonomy: Collinsella
  REGION 1..1003: note = MG14-204 effector
MEITINREIGKLGLPRHLVLGMDPGIASCGFALIDTANHEILDLGVRLFDSPTHPKTGQSLAVIRRGFRSTRRNIDRTQARLKHCLQVFKAHGLIPQDATKEYFHTTKGDKQPLKLRVDGLDRLLSDREWALVLYSLCKRRGYIPHGEGNQDKSSEGGKVLSALAANKEAIAEASCRTVGEWLAQQPQSRNRGGNYDKCVTHAQLIEETHILFDAQRSFGSKYASPELEAAYIEVCDWERSRKDFDRRTYDLVGHCSYFPTEKRAARCTLTSELVSAYGALGNITIIHDDGTSRALSATERDECIAILFSCEPIRGNKDCAVKFGALRKALDLSSGDYFKGVPAADEKTREVYKPKGWRVLRNTLNAANPILLQRLRDDRDLADAVMEAVAYSSALPVLQERLQGLPLSEAEIEALCRLPYSSKALNGYGNRSKKALDMLLDCLEEPEVFNLTQAENDCGLLGLRIAGAQLERSDRLMPYELWAERTGRTNNNPVVIRSMSQMRKVVNAICRKWGVPNEIHVELDRELRLPQRAKDEIAKANKKNEKNRERIAGQIAELRGCTADEVTGKQIEKYRLWEEQECFDLYTGAKIEVDRLISDDTYTQIDHILPFSRTGENSRNNKVLVLAKSNQDKREQTPYEWMSHDGAPSWDAFERRVQENQKLSRRKKNFLLEKDLDAKEGDFLARSFTDTAYMSREVCAYLADCLQFPDDGAKAHVVPTTGRATAWLRRRWGLNFGSNGEKDRSDDRHHATDACVIAACSRSLVIKTARLNQETHWSITRGMNEIQRHDAIMKALESVMPWETFANEVRAAHDFVVPTRFVPRKGKGELFEQTVYRYAGVNAQGKDLARKAGSDKDIVMGNAVVSADEKSVIKVSEMLCLRLWHDPEAKKGQGAWYADPVYKADIPALKDGTYVPRIAKAHTGRKAWKPVPKSAMAKPPLEIYFDDLVQIGDFIGRFSGYNINSANWSFTDRLTRLNLSCPIVGQLNNDLSPVVIRESPIK

SEQ ID NO: 878 - protein, 958 aa, unidentified
  REGION 1..958: note = Description of Unknown: uncultivated organism with predicted taxonomy: Olsenella mediterranea
  REGION 1..958: note = MG14-205 effector
MEITINREIGKLGLPRHLVLGMDPGIASCGFALIDTANHEILDLGVRLFDSPTHPKTGQSLAVIRRGFRSTRRNNDRTQARLKHCLQVLKAYGLIPQDATKEYFHTTKGDKQPLKLRVDGLDRLLNDREWALVLYSLCKRRGYIPHGEGNQDKSSEGGKVLSALAANKEAIAETSCRTVGEWLAQQPQSRNRGGNYDKCVTHAQLIEETHILFDAQRSFGSKYASPEFEAAYIEVCDWERSRKDFDRRTYDLVGHCSYFPTEKRAARCTLTNELVSAYGALGNITIIHENGTSRALTATERDECIAILFSCEPIRGNKDCAVKFGALRKALDLSSGDYFKGVPAADEKTREVYKPKGWRVLRNTLNAANPILLQRLRDDRDLADAVMEAVAYSSALPVLQEQLQGLPLSEAEIEALCRLPYSSKALNGYGNRSKKALDMLLDCLEEPEVLNLTQAENDCGLLGLRIAGAQLERSDRLMPYETWIERTGRTNNNPVVIRSMSQMRKVVNAICRKWGVPNEIHVELDRELRLPQRAKDEIAKANKKNEKNRERIAGQIAELRGCTADEVTGKQIEKYRLWEEQECFDLYTGAKIEVDRLISDDTYTQIDHILPFSRTGENSRNNKVLVLAKSNQDKREQTPYEWMSHDGAPSWDTFERRVQENQKLSRRKKNFLLEKDLDTKEGEFLARSFTDTAYMSREVCAYLADCLLFPDDGAKAHVVPTTGRATAWLRRRWGLNFGSNGEKDRSDDRHHATDACVIAACSRSLVIKTARINQETHWSITRGMNETQRRDAIMKALESVMPWETFANEVRAAHDFVVPTRFVPRKGKGELFEQTVYRYAGVNAQGKDIARKASSDKDIVMGNAVVSADEKSVIKVSEMLCLRLWHDPEAKKGKGAWYADPVYKADIPSLKDGTYVPKIAKAATGRKAWKAIPQSVLNSAPLEIYLGDLVQIGNQKGR

SEQ ID NO: 879 - protein, 762 aa, unidentified
  REGION 1..762: note = Description of Unknown: uncultivated organism with predicted taxonomy: Collinsella
  REGION 1..762: note = MG14-206 effector
MEITINREIGKLGLPRHLVLGMDPGIASCGFALIDTANHEILDLGVRLFDSPTHPKTGQSLAVIRRGFRSTRRNNDRTQARLKHCLQVLKAYGLIPQDATKEYFHTTKGDKQPLKLRVDGLDRLLNDREWALVLYSLCKRRGYIPHGEGNQDKSSEGGKVLSALAANKEAIAETSCRTVGEWLAQQPQSRNRGGNYDKCVTHAQLIEETHILFDAQRSFGSKYASPEFEAAYIEVCDWERSRKDFDRRTYDLVGHCSYFPTEKRAARCTLTSELVSAYGALGNITIIHENGTSRALSATERDECIAILFSCEPIRGNKDCAVKFGALRKALDLSSGDYFKGVPAADEKTREVYKPKGWRVLRNTLNAANPILLQRLRDDRNLADAVMEAVAYSSALPVLQEQLQGLPLSEAEIEALCRLPYSSKALNGYGNRSKKALDMLLDCLEEPEVLNLTQAENDCGLLGLRIAGAQLERSDRLMPYETWIERTGRTNNNPVVIRAMSQMRKVVNAICRKWGVPNEIHVELDRELRLPQRAKDEIAKANKKNEKNRERIAGQIAELRGCTADEVTGKQIEKYRLWEEQECFDLYTGAKIEVDRLISDDTYTQIDHILPFSRTGENSRNNKVLVLAKSNQDKREQTPYEWMSHDGAPSWDAFERRVQENQKLSRRKKNFLLEKDLDTKEGEFLARSFTDTAYMSREVCAYLADCLLFPDDGAKAHVVPTTGRATAWLRRRWGLNFGSNGEKDRSDDRHHACHRCLCDCSM

SEQ ID NO: 880 - protein, 1004 aa, unidentified; identical to SEQ ID NO: 809
  REGION 1..1004: note = Description of Unknown: uncultivated organism with predicted taxonomy: Collinsella
  REGION 1..1004: note = MG14-207 effector

SEQ ID NO: 881 - protein, 1000 aa, unidentified; identical to SEQ ID NO: 776
  REGION 1..1000: note = Description of Unknown: uncultivated organism with predicted taxonomy: Olsenella
  REGION 1..1000: note = MG14-208 effector

SEQ ID NO: 882 - protein, 1003 aa, unidentified; identical to SEQ ID NO: 738
  REGION 1..1003: note = Description of Unknown: uncultivated organism with predicted taxonomy: Collinsella
  REGION 1..1003: note = MG14-209 effector

SEQ ID NO: 883 - protein, 1004 aa, unidentified; identical to SEQ ID NO: 754
  REGION 1..1004: note = Description of Unknown: uncultivated organism with predicted taxonomy: Collinsella
  REGION 1..1004: note = MG14-210 effector

SEQ ID NO: 884 - protein, 1002 aa, unidentified; identical to SEQ ID NO: 715
  REGION 1..1002: note = Description of Unknown: uncultivated organism with predicted taxonomy: Collinsella
  REGION 1..1002: note = MG14-211 effector

SEQ ID NO: 885 - protein, 1046 aa, unidentified; identical to SEQ ID NO: 769
  REGION 1..1046: note = Description of Unknown: uncultivated organism with predicted taxonomy: Collinsella
  REGION 1..1046: note = MG14-212 effector

SEQ ID NO: 886 - protein, 1002 aa, unidentified; identical to SEQ ID NO: 771
  REGION 1..1002: note = Description of Unknown: uncultivated organism with predicted taxonomy: Collinsella
  REGION 1..1002: note = MG14-213 effector

SEQ ID NO: 887 - protein, 1002 aa, unidentified; identical to SEQ ID NO: 771
  REGION 1..1002: note = Description of Unknown: uncultivated organism with predicted taxonomy: Coriobacteriales
  REGION 1..1002: note = MG14-214 effector

SEQ ID NO: 888 - protein, 798 aa, unidentified
  REGION 1..798: note = Description of Unknown: uncultivated organism with predicted taxonomy: Olsenella
  REGION 1..798: note = MG14-215 effector
MELVKPYYVLGLDLGPASCGFALIDINNMRILEIGSHLFDAPQENKKQTKVSLAAKRRSARSARRNNQRTKNRQKHCIKLLREAKLIPQDASGVWFQTKKGDRPSLKLRDRGLEERLSDREFAQILYTLSARRGYIPHGEGKLGYSKESSDSDLGKVLKAVSENSNALSNGKSRTVGELLYERGSSRNTAGAYDHCVLNSQIVEEVHALFKAQRDFGNDKASEQLENDYIANLTWEKKTLDIDAASYARVGFCTYFEEEKRAARADYSSELCAAYERLGHLTIVDSDGTETRLDPSRRNRYLSILFSPKALPKNKYCKVRYSDIRRDLDLSSDSAFKGVEADQEKDKEPFEPKAWRCMRENGISENLLERMLSDRDFADAIGEALTYASTKDSLLNQLDTVDLTSAEKESIAGLPFSSKIFKGYGNRSLKALYMLLDAFEDPDILTLADAETATGLKGKRLADNYQRSAFLPLYEIYDNDCNNPVVLRAMSRMRRIVNAIIKIYGVPDEIHIELARELKQSKREKDAISKFQRKKEQANNRYREVAAGILNISPDEVSDRIIEKMAFREQQNDKDAYTGTTINLERLVTDSHYCQVDHVLPYSRTSDNSRNNRVLVLSTTNQNKRERTPFEWMNSGEANAPAWNDYKKHVLANKNYSQRKKQVYLLNENLDSETEAQFISRNLNDTRYMSRATMAFLADTLEYPDDGRKRHVIAVAGSATSALRHVWGLNFGEGNVKDRSDDRHHAVDACVIAACSESTLKKVARARSRGYRSFKKTQESRLSDTQPWPTFADDVIAM

SEQ ID NO: 889 - protein, 1005 aa, unidentified; identical to SEQ ID NO: 744
  REGION 1..1005: note = Description of Unknown: uncultivated organism with predicted taxonomy: Collinsella
  REGION 1..1005: note = MG14-216 effector

SEQ ID NO: 890 - protein, 1004 aa, unidentified; identical to SEQ ID NO: 737
  REGION 1..1004: note = Description of Unknown: uncultivated organism with predicted taxonomy: Collinsella
  REGION 1..1004: note = MG14-217 effector

SEQ ID NO: 891 - protein, 769 aa, unidentified
  REGION 1..769: note = Description of Unknown: uncultivated organism with predicted taxonomy: Olsenella mediterranea
  REGION 1..769: note = MG14-218 effector
AAFGALPPKASARRTYDLVGHCSYFPTEKRAARCTLTSELVSAYGALGNITIIHENGTSRALSATERDECIAILFSCEPIRDNKDCAVKFGALRKALDLSSGDYFKGVPAADEKTREVYKPKGWRVLRNTLNATNPILLQRLRDDRDLADAVMEAVAYSSALPVLQEQLQGLPLSEAEIEALCRLPYSSKALNGYGNRSKKALDVLLDCLEEPEVLNLTQAENDCGLLGLRIAGAQLERSDRLMPYETWIERTGRTNNNPVVIRAMSQMRKVVNAICRKWGVPNEIHVELDRELRLPQRAKDEIAKANKKNEKNRERIAGQIAELRGCTADEVTGKQIEKYRLWEEQECFDLYTGAKIEVDRLISDDTYTQIDHILPFSRTGENSRNNKVLVLAKSNQDKREQTPYEWMSHDGAPSWDAFERRVQENQKLSRRKKNFLLEKDLDTKEGEFLARSFTDTAYMSREVCAYLADCLLFPDDGAKAHVVPTTGRATAWLRRRWGLSFGSNGEKDRSDDRHHATDACVIAACSRSLVIKTARINQETHWSITRGMNETQRRDAIMKALESVMPWETFANEVRAAHDFVVPTRFVPRKGKGELFEQTVYRYAGVNAQGKDLARKASSDKNIVMGNAVVSADEKSVIKVSEMLCLRLWHDPEAKKGQGAWYADPVYKADIPALKDGTYVPRIAKAHTGRKAWKPVPESAMKKPPLEIYLGDLVQIGDFVGRFSGYNIDNANWSFVDRLTRIKISCPTVGKLSNDMSPFVVRESPIK

SEQ ID NO: 892 - protein, 1003 aa, unidentified; identical to SEQ ID NO: 767
  REGION 1..1003: note = Description of Unknown: uncultivated organism with predicted taxonomy: Collinsella
  REGION 1..1003: note = MG14-219 effector

SEQ ID NO: 893 - protein, 985 aa, unidentified; identical to SEQ ID NO: 805
  REGION 1..985: note = Description of Unknown: uncultivated organism with predicted taxonomy: Collinsella
  REGION 1..985: note = MG14-220 effector

SEQ ID NO: 894 - protein, 1003 aa, unidentified; identical to SEQ ID NO: 789
  REGION 1..1003: note = Description of Unknown: uncultivated organism with predicted taxonomy: Collinsella
  REGION 1..1003: note = MG14-221 effector

SEQ ID NO: 895 - protein, 1003 aa, unidentified; identical to SEQ ID NO: 778
  REGION 1..1003: note = Description of Unknown: uncultivated organism with predicted taxonomy: Collinsella
  REGION 1..1003: note = MG14-222 effector

SEQ ID NO: 896 - protein, 1053 aa, unidentified
  REGION 1..1053: note = Description of Unknown: uncultivated organism with predicted taxonomy: Collinsella sp. AM13-34
  REGION 1..1053: note = MG14-223 effector
VIRLESGMDKAKGADIGELGFDPATFATALMTLEEFRSKDRVIWAGLDIGVASTGLCLVDVRNHEIVLMASHLFKSPVVDKKKATAAPESLASVRRGARSVRRNIMREGRRKKAIRAALADFDLIPADADGEWFSARRDERTVVRLRSKALGYLLNSRELARVLYSFASHRGYIDHGKSDKEDDAGKVKKALAANHAALADGGCKTFGQYLAGQPRSRNRAGDYSYTADIGMTVDEVRTIFARQRELGSEIASKALEERYIAELTWLTDTSKRDRSTYLKVGFCTYLGAPYRRGATSTISFEMVRAHQTLCNTVILHADGTSSTIPGDIRIEIVRDLFAVKKSVKPLKWSGLRRRLGLSEGDSFKGRPVEEEKRDCIALPAWAVLCAGLYEGHRDLLERLHDHIDDADAVCSALTFASSAASLAGRLAPLALSDDEVEAIIDLPYSARLFSGYANASLEALQMLRGTFEDPRVTSLRQAEEDSGLAQARAILAEERGGSADGLLCAFSDYDPTCRNPVVLRATAQVRRMVNSVIRHYGLPDVIRVEVARDLKRSKHEREIVAESNRARLELNEQAKRDIIEFLGLPDDHHVRGRDLALVKLYREQGGKDPYTGAAIDFRRMLEEHRYAEIDHILPVSRTCDDSQANKVLCLTKSNRDKSNRSPYEWMTSGEASAPDWGEFCGRMERWAKMCEPRRYARKKLANLTCENLAERAGNFIDRNLNDTRYMSVALAKWLRECLPFTKDGHEHVFCVAGGATALMRSVWDIGITGPDGKKNRDDDRHHAVDAAVIACCTPGIVRNVALVNEGHARADVRQRLFSDSLPYPEFKEQVDAWIPCIVPTLTLPNTVTGSVLKDTVYPYLGRDEAGKDLYLTVKRDKDGRIVERKVNKATTMWKDGQGGCRAYGSMCALEAVFDASAGKRGRWSFDPVYCIDIPHREAVRRTMRAFSKEKAIDLWDTVAVPEAAPRMTIRRGDVLVCDGKAARFHCFDISVNAIRLFSQRGGKQLQATGPLSAEAFPPPSKWGEGVRIMQEDCLGLCWLSFLAQRAAGVQME

SEQ ID NO: 897 - protein, 1004 aa, unidentified; identical to SEQ ID NO: 742
  REGION 1..1004: note = Description of Unknown: uncultivated organism with predicted taxonomy: Collinsella
  REGION 1..1004: note = MG14-224 effector

SEQ ID NO: 898 - protein, 1003 aa, unidentified
  REGION 1..1003: note = Description of Unknown: uncultivated organism with predicted taxonomy: Collinsella
  REGION 1..1003: note = MG14-225 effector
MEITINREIGKLGLPRHLVLGMDPGIASCGFALIDTANHEILDLGVRLFDSPIHPKTKQSLAVIRRGFRSTRRNIDRTQARLKHCLQVLKAYGLIPQDATKEYFHTTKGDKQPLKLRVDGLDRLLNDREWALVLYSLCKRRGYIPHGEGNQDKSSEGGKVLSALAANKEAIAETSCRTVGKWLAQQPQSRNRGGNYDKCVTHAQLIEETHILFDAQRSFGSKYASPEFEAAYIEVCDWERSRKDFDRRTYDIVGHCSYFPTEKRAARCTLTSELVSAYGALGNITIIHENGTSRALTATERDECIAILFSCEPIRGNKDCAVKFGALRKALDLSSGDYFKGVPAADEKTREVYKPKGWRVLRNTLNAANPILLQRLRDDRDLADAVMEAVAYSSALPVLQEQLQGLPLSEAEIEALCRLPYSSKALNGYGNRSKKALDMLLDCLEEPEVLNLTQAENDCGLLGLRIAGAQLERSDRLMPYETWIERTGRTNNNPVVIRSMSQMRKVVNAVCRKWGVPNEIHVELDRELRLPQRAKDEIAKANKKNEKNRERIAGQIAELRGCTADEVTGKQIEKYRLWEEQEYFDLYTGAKIEVDRLISDDTYTQIDHILPFSRTGENSRNNKVLVLAKSNQDKREQTPYEWMSHDGAPSWDAFERRVQENQKLSRRKKNFLLEKDLDTKEGEFLARSFTDTAYMSREVCAYLADCLLFPDDGAKAHVVPTTGRATAWLRRRWGLNFGSNGEKDRSDDRHHATDACVIAACSPSLVIKTARINQETHWSITRGMNETQRRDAIMKALESVMPWETFANEVRAAHDFVVPTRFVPRKGKGELFEQTVYRYAGVNAQGKDIARKASSDKDIVMGNAVVSADEKSVIKVSEMLCLRLWHDPEAKKGQGAWYADPVYKADIPALKDGTYVPRIAKAHTGRKAWKPVPESAMKKPPLEIYLGDLVQIGDFVGRFSGYNIDNANWSFVDRLTRIKISCPTVGKLSNDMSPFVVRESPIK

SEQ ID NO: 899 - protein, 1003 aa, unidentified; identical to SEQ ID NO: 898
  REGION 1..1003: note = Description of Unknown: uncultivated organism with predicted taxonomy: Collinsella
  REGION 1..1003: note = MG14-226 effector

SEQ ID NO: 900 - protein, 1005 aa, unidentified; identical to SEQ ID NO: 727
  REGION 1..1005: note = Description of Unknown: uncultivated organism with predicted taxonomy: Collinsella
  REGION 1..1005: note = MG14-227 effector

SEQ ID NO: 901 - protein, 1026 aa, unidentified; identical to SEQ ID NO: 794
  REGION 1..1026: note = Description of Unknown: uncultivated organism with predicted taxonomy: Olsenella
  REGION 1..1026: note = MG14-228 effector

SEQ ID NO: 902 - protein, 1005 aa, unidentified
  REGION 1..1005: note = Description of Unknown: uncultivated organism with predicted taxonomy: Olsenella
  REGION 1..1005: note = MG14-229 effector
MEITINREIGKLGLPRHLVLGMDPGIASCGFALIDTANHEILDLGVRLFDSPTHPKTGQSLAVIRRGFRSTRRNIDRTQARLKHCLQILKAYGLIPQDATKEYFHTTKGDKQPLKLRVDGLDRQLNDREWALVLYSLCKRRGYIPHGEGNQDKSSEGGKVLSALAANKEAIAETSCRTVGEWLAQQPQSRNRGGNYDKCVTHAQLIEETHILFDAQRSFGSKYASPEFEAAYIEVCDWERSRKDFDHRTYDLVGHCSYFPTEKRAARCTLTSELVSAYGALGNITIIHENGTSRALSATERDECIAILFSCEPIRGNKDCAVKFGALRKALDLSSGDYFKGVPAADEKTREVYKPKGWRVLRNTLNAANPILLQRLRDDRNLADAVMEAVAYSSALPVLQEQLQGLPLSEAEIEALCRLPYSSKALNGYGNRSKKALDMLLDCLEEPEVLNLTQAENDCGLLGLRIAGAQLERSDRLMPYETWIERTGRTNNNPVVIRSMSQMRKVVNAVCRKWGVPNEIHVELDRELRLPQRAKDEIAKANKKNEKNRERIAGQIAELRGCTADEVTGKQIEKYRLWEEQECFDLYTGAKIEVDRLISDDTYTQIDHILPFSRTGENSRNNKVLVLAKSNQDKREQTPYEWMSHDGAPSWDAFERRVQENQKLSRRKKNFLLEKDLDTKEGEFLARSFTDTAYMSREVCTYLADCLLFPDDGAKAHVVPTTGRATAWLRRRWGLNFGSNGEKDRSDDRHHATDACVIAACSRSLVIKTARINQETHWSITRGMNETQRRDAIMKALESVMPWETFANEVRAAHDFVVPTRFVPRKGKGELFEQTVYRYAGVNAQGKDIARKASSDKDIVMGNAVVSADEKSVIKVSEMLCLRLWHDPEAKKGQGAWYADPVYKADIPALKDGTYVPRIARAAIGRKAWKLVPDSAMTKPPLEIYLGDLVQIGNFIGRFSGYNIANGSWSFIDRLTKETLSCPSVAKLNNNLFPTIIRESIIMRK

SEQ ID NO: 903 - protein, 1004 aa, unidentified; identical to SEQ ID NO: 774
  REGION 1..1004: note = Description of Unknown: uncultivated organism with predicted taxonomy: Collinsella
  REGION 1..1004: note = MG14-230 effector

SEQ ID NO: 904 - protein, 1004 aa, unidentified; identical to SEQ ID NO: 786
  REGION 1..1004: note = Description of Unknown: uncultivated organism with predicted taxonomy: Collinsella
  REGION 1..1004: note = MG14-231 effector

SEQ ID NO: 905 - protein, 1003 aa, unidentified; identical to SEQ ID NO: 812
  REGION 1..1003: note = Description of Unknown: uncultivated organism with predicted taxonomy: Collinsella
  REGION 1..1003: note = MG14-232 effector

SEQ ID NO: 906 - protein, 1003 aa, unidentified; identical to SEQ ID NO: 734
  REGION 1..1003: note = Description of Unknown: uncultivated organism with predicted taxonomy: Collinsella
  REGION 1..1003: note = MG14-233 effector

SEQ ID NO: 907 - protein, 1004 aa, unidentified; identical to SEQ ID NO: 815
  REGION 1..1004: note = Description of Unknown: uncultivated organism with predicted taxonomy: Collinsella
  REGION 1..1004: note = MG14-234 effector

SEQ ID NO: 908 - protein, 1002 aa, unidentified; identical to SEQ ID NO: 790
  REGION 1..1002: note = Description of Unknown: uncultivated organism with predicted taxonomy: Collinsella
  REGION 1..1002: note = MG14-235 effector

SEQ ID NO: 909 - protein, 1004 aa, unidentified; identical to SEQ ID NO: 807
  REGION 1..1004: note = Description of Unknown: uncultivated organism with predicted taxonomy: Collinsella
  REGION 1..1004: note = MG14-236 effector

SEQ ID NO: 910 - protein, 1002 aa, unidentified
  REGION 1..1002: note = Description of Unknown: uncultivated organism with predicted taxonomy: Collinsella
  REGION 1..1002: note = MG14-237 effector
MEITINREIGKLGLPRHLVLGMDPGIASCGFALIDTANHEILDLGVRLFDSPTHPKTGQSLAVIRRGFRSTRRNIDRTQARLKHCLQILKAYGLIPQDATKEYFHTTKGDKQPLKLRVDGLDRLLNDREWALVLYSLCKRRGYIPHGEGNQDKSSEGGKVLSALAANKEAIAETSCRTVGEWLAQQPQSRNRGGNYDKCVTHAQLIEETHILFDAQRSFGSKYASPELEAAYIEVCDWERSRKDFDRRTYDLVGHCSYFPTEKRAARCTLTSELVSAYGALGNITIIHENGTSRALSATERDECIAILFSCEPIRDNEDCAVKFGALRKALDLSSGDYFKGVPAADEKTREVYKPKGWRVLRNTLNAANPILLQRLRDDRDLADAVMEAVAYSSALPVLQEQLQGLPLSEAEIEALCRLPYSSKALNGYGNRSKKALDMLLDCLEEPEVLNLTQAENDCGLLGLRIAGAQLERSDRLMPYETWIERTGRTNNNPVVIRSMSQMRKVVNAVCRKWGVPNEIHVELDRELRLPQRAKDEIAKANKKNEKNRERIAGQIAELRGCTADEVTGKQIEKYRLWEEQECFDLYTGAKIEVDRLISDDTYTQIDHILPFSRTGENSRNNKVLVLAKSNQDKREQTPYEWMSHDGAPSWDAFERRVQENQKLSRRKKNFLLEKDLDTKEGEFLARSFTDTAYMSREVCAYLADCLLFPDDGAKAHVVPTTGRATAWLRRRWGLNFGSNGEKDRSDDRHHATDACVIAACSRSLVIKTARINQETHWSITRGMNETQRRDAIMKALESVMPWETFANEVRAAHDFVVPTRFVPRKGKGELFEQTVYRYAGVNAQGKDIARKASSDKDIVMGNAVVSADEKSVIKVSEMLCLRLWHDPEAKKGKGAWYADPVYKADIPSLKDGTYVPKIAKAATGRKAWKAIPQNVLNSAPLEIYLGDLVQIGNQKGRFRGINIDTVSWSFVDTLSKLPVKMPTIGRLNNETIPTVIRELLI

SEQ ID NO: 911 - protein, 1027 aa, unidentified; identical to SEQ ID NO: 782
  REGION 1..1027: note = Description of Unknown: uncultivated organism with predicted taxonomy: Atopobium sp. ICM42b
  REGION 1..1027: note = MG14-238 effector

SEQ ID NO: 912 - protein, 1004 aa, unidentified
  REGION 1..1004: note = Description of Unknown: uncultivated organism with predicted taxonomy: Collinsella
  REGION 1..1004: note = MG14-239 effector
MEITINREIGKLGLPRHLVLGMDPGIASCGFALIDTANREILDLGVRLFDSPTHPKTGQSLAVIRRGFRSTRRNIDRTQARLKHCLQILKAYGLIPQDATKEYFHTTKGDKQPLKLRVDGLDRLLNDREWALVLYSLCKRRGYIPHGEGNQDKSSEGGKVLSALAANKEAIAETSCRTVGEWLAQQPQSRNRGGNYDKCVTHAQLIEETHILFDAQRSFGSKYASPEFEAAYIEVCDWERSRKDFDRRTYDLVGHCSYFPTEKRAARCTLTSELVSAYGALGNITIIHDDGTSRALSATERDECIAILFSCEPIRGNKDCAVKFGALRKALDLSSGDYFKGVPAADEKTREVYKPKGWRVLRNTLNAANPILLQRLRDDRNLADAVMEAVAYSSALPVLQEQLQGLPLSEAEIEALCRLPYSSKALNGYGNRSKKALDMLLDCLEEPEVLNLTQAENDCGLLGLRIAGTQLERSDRLMPYETWIELTGRTNNNPVVIRSMSQMRKVVNAVCRKWGVPNEIHVELDRELRLPQRAKDEIAKANKKNEKNRERIAGQIAELRGCTADEVTGKQIEKYRLWEEQEYFDLYTGAKIEVDRLISDDTYTQIDHILPFSRTGENSRNNKVLVLAKSNQDKREQTPYEWMSHDGAPSWDAFVRRVQENQKLSRRKKNFLLEKDLDTKEGEFLARSFTDTAYMSREVCAYLADCLLFPDDGAKAHVVPTTGRATAWLRRRWGLNFGSNREKDRSDDRHHATDACVIAACSRSLVIKTARINQETHWSITRGMNETQRRNAIMKALESVMPWETFANEVRAAHDFVVPTRFVPRKGKGELFEQTVYRYAGVNAQGKDLARKASSDKDIVMGNAVVSADEKSVIKVSEMLCLRLWHDPEAKKGQGAWYADPVYKADIPALKDGTYIPRIAKQKYGRKVWKAVPNSALTQKPLEIYLGDLIKVGDKLGRYNGYNIATANWSFVDALTKKEIAFPSVGMLSNELQPIIIRESILDN

SEQ ID NO: 913 - protein, 1003 aa, unidentified; identical to SEQ ID NO: 772
  REGION 1..1003: note = Description of Unknown: uncultivated organism with predicted taxonomy: Collinsella
  REGION 1..1003: note = MG14-240 effector

SEQ ID NO: 914 - protein, 1004 aa, unidentified; identical to SEQ ID NO: 795
  REGION 1..1004: note = Description of Unknown: uncultivated organism with predicted taxonomy: Collinsella
  REGION 1..1004: note = MG14-241 effector

SEQ ID NO: 915 - protein, 1003 aa, unidentified; identical to SEQ ID NO: 753
  REGION 1..1003: note = Description of Unknown: uncultivated organism with predicted taxonomy: Collinsella
  REGION 1..1003: note = MG14-242 effector

SEQ ID NO: 916 - protein, 1004 aa, unidentified; identical to SEQ ID NO: 766
  REGION 1..1004: note = Description of Unknown: uncultivated organism with predicted taxonomy: Collinsella
  REGION 1..1004: note = MG14-243 effector

SEQ ID NO: 917 - protein, 1006 aa, unidentified
  REGION 1..1006: note = Description of Unknown: uncultivated organism
  REGION 1..1006: note = MG14-244 effector
MAMRRPYLVLGLDPGIASCGFCLLDLTNHKILLMGVRLFSVPKNRSGVSLAAERRAARSTRRNNHRTKSRLKRCLSILKAAGLVPEDADRGWLQARKKDKPVIKLRAVGLVRILSDRELAQALYSLCEHRGYIPHGEGKEGAADDADGKKVLSAIKKNMEDMDKGGYRTVGEMLYTQGRSRNRGGNYDRCVYNSQIQEEVSSIFAAQRSFGNPKATAELEQEYMECLTSEKSSSGHDRRSYEAVGSCVYFPELKRAAKADISSELCRAYERFGHLVIVHKDGTEQTLTSEQISRYISALFTPSAIQKKVQRITCATIRKDLDISGASVFKGVSHEQEKKEVFDPKAWRCLSKCLAGDHGELLERMWQDRSLGDAVCEALTYSSTEESLEGQLETLDLSEDECRALKAVPFNSKIFKGYGTRSIKALSLLVGAFEDPDVRTLADAEKATGLDMKRAEDRMPRSTKLPPYSVYDPTCKNPVVLRAMGQMRKIVNAIIKEHGVPDEIHIELSRDLKMSKREKDAVAKRQRTNEAANKKRATLAAGILGCEPSEVSHLVIRKLALREEQSDKDIYTGAAIDLQRLVEDDHYCEIGHILPYSRTGMGGWNNEVLVLAASNQKKRERTPYEWMQQDAGKAGVPAWDEYSSRVTATIDNPRKRRNLLCKDTGDEAMNGFLLRDLNDTRYMSVAVKNYLEDCLLFPEDGRKLHVTAVSGGATASLRRVWGLNSNGSDDEKTNSNTMRNSIDAAVIAACSVKTVQAVAKTRSLGRETFRHMRRSRLADTQPWETFADDVIVKCKTVIPTRMAEHGVTGCALNEFVYRIDGFNEKGYAILSRQVDRATRKRGIQVAGNYMPFGESSAKLVGQIAFIRLWHDPDFGKDGRWYVEPVYYNDIPALGNGVYQPKYILSKHPRMEWLPVPEAALSGTPLTLFPGDIIVAGNHIARFKKLDIACQGLGMLNILNEQLAVKNFPTINRWKNDMNIFILQEDCLGKCFNSLDIDSGSSTFTLR

SEQ ID NO: 918 - protein, 1006 aa, unidentified
  REGION 1..1006: note = Description of Unknown: uncultivated organism with predicted taxonomy: Olsenella
  REGION 1..1006: note = MG14-245 effector
MEANRPYLVLGLDPGIASCGFCLLDMTDHKILEMGSHLFDAPQEAKTKTSLAVTRRNARSARRNTLRTATRMKHCLALLKGADLVPEDADKAWLQSKKGDKPILKLRANGLDRKLADREFAQVLYSLCGRRGYIPHGEGRLGETDDGEGRKVLSAIKANEATMKRGNYRTVGEMLYANDGKSRNRGGDYSLCVYNSQIKDEVRALFAAQRALGNSKASEGFEKDYIDCLEWEKKTVDHDKRVYELVGACPYFPEEKRAADADISSELCRAYERLGHIAIVHEDGSEQNLTPNQIDGYLDVLFSPLPLKGNKECKVTYGTIRKDLDLSGKDVFKGVAQDGEKGEPFSPKSWRCLRTALYENHEDLLVRMLKDRELGDDICEALTFASTEASLGERLGLLDLTDDEQAALCSSVPFTGKLFKGYGNRSLKALGILLGAFEEPEIRTLTDAERATGLLDLRLADRGLRDNLLPSYSKYDPTCRNPVVLRSMGRMRRIVNAIIRIHGVPDEIHIELGRDLKMSNKEKATVSKNQRANEAANKKWAAKAANILGCSPEEVPGRIVRKLAMREEQGDKDAYTGAAIDLEHLVRDDRYCEIDHILPYSRTCDDSRANKVLVLSKSNQDKRERTPYEWMTSGEPGAPDWDEYRNRVMATVKYARKRANLLNTDLGPNVQAQFLARNLNDDRYMSVAVKNYLEDCLLFPNDGRKKHVTAVAGGATGNLRWVWGLNFGQGNTKDRDDDRHHAVDAAIIAACSESTVKKVAEASSKGRETFKHLRKSRLSDTQPWPTFAEEVAARRAFVVPTRMVNHGVTGRVFEDTLYHLEGFTNDKGKYPLVRAGEKTAKKGNVRIGPDGSVKLIDGMAFLRLWLDPNARPNGKVKGKWYAEPVYYADIPAIKAGTYVPRACTIHVARNAWEPVPESAMQREPVVLFAGDVVEVDGHIGRYSGFNIFGGRITILNLLTKAEVGDWPSLGSWGRDTQVRVLQEDCLGHCYDDIVINPDNSTFRQRE

SEQ ID NO: 919 - protein, 1027 aa, unidentified
  REGION 1..1027: note = Description of Unknown: uncultivated organism with predicted taxonomy: Coriobacteriales
  REGION 1..1027: note = MG14-246 effector
MGQQNQEMANARHYLVLGLDPGIASCGFCLLDMTDHKILEMGSHLFDAPQNPKSKQNLSVERRNARSARRNLKRTRDRQKKCLELLKQCGLSPSDADKQWLQSRKGDKPVIKLRASALDRTLTDRELAQVLYSLTGRRGYIPHGEGHLDDVDDAEAGKVLAAVRENQNQMAKKGYRTVGQMLYKEGRSRNRGGDYTLCVLNSQIIDEAKIILDEQRSHGNAILTKMSNGEFEQFTNSYIDCLTWEKKSTKHDERVYSLVGACTYFPEEKRAAEADLSSELCRAYERFGHLVMVDADGTEHRLSAKDRARYLQILFSPVPIRGNKDCKVTYATIRKDLDLSAHVSFKGIEAERENKEEPFSPRRWRKLRACGVPEGLLARMLEDRDLADSIGEALAYASTEESLRDKLSSLDLSDDEINQLAVNVPFAGKLFSGYGSRSLKALHMLLDMFEDESILTLDDAERESGLQALRLADKGHRSLNLLPYDIYDPTCNNPTVLRALGRMRRIVNAIIRIYGVPDEIHIELGKELKQSSKEKKSIAKSNLQNKKDNERIAKTIAELLGCSPDDVRGKQIRRFALREEQGCKDAYTGDSIDLMRMLTEDRYTEIDHILPYSRTCDDSRANKVLVLQKSNQDKKERTPWEWMSDDASKGAPDWEEFKARTLTNHRLSYKKRDHLLNQNLNGQEQSFIDRNLNDTRYMSVAVKDYLEKSLLFPDDGRKSHVIAVAGGATSALRHVWGLNFGADNTKDRSDDRHHAVDAAVIAACSQATVKKVADTSKLGHSEFKRKRESRLADTQPWPTFADEVIARREFVIPTRMANHGVTGSAFEDTIYRYEGIREGKDSLAVLSKSQGKDKPRAVKPSGNYRLDADGGAHLYDGIAFLRFWLDAEARPKGKVKGKWLIEPVYYADIPLIQCGRYIPKYIPAAHLARDQWVEIPESVLATDPVTVFFGDVLYVDGHIGRYSGFNINGLKLTMHSVISGESIAFPPVSSTWSKDSEVRIIEEDVLGRCWTPNIAKLVRLQEAASSS

SEQ ID NO: 920 - protein, 1027 aa, unidentified
  REGION 1..1027: note = Description of Unknown: uncultivated organism with predicted taxonomy: Coriobacteriales
  REGION 1..1027: note = MG14-247 effector
MGQQNQEMANARHYLVLGLDPGIASCGFCLLDMTDHKILEMGSHLFDAPQNPKSKQNLSVERRNARSARRNLKRTRDRQKKCLELLKQCGLSPSDADKQWLQSRKGDKPVIKLRASALDRTLTDRELAQVLYSLTGRRGYIPHGEGHLDDVDDAEAGKVLAAVRENQNQMAKKGYRTVGQMLYKEGRSRNRGGDYTLCVLNSQIIDEAKIILDEQRSHGNAILTKMSNGEFEQFTNSYIDCLTWEKKSTKHDERVYSLVGACTYFPEEKRAAEADLSSELCRAYERFGHLVMVDADGTEHRLSAKDRARYLQILFSPVPIRGNKDCKVTYATIRKDLDLSAHVSFKGIEAERENKEEPFSPRRWRKLRACGVPEGLLARMLEDRDLADSIGEALAYASTEESLRDKLSSLDLSDDEINQLAVNVPFAGKLFSGYGSRSLKALHMLLDMFEDESILTLDDAERESGLQALRLADKGHRSLNLPPYDIYDPTCNNPTVLRALGRMRRIVNAIIRIYGVPDEIHIELGKELKQSSKEKKSIAKSNLQNKKDNERIAKTIAELLGCSPDDVRGKQIRRFALREEQGCKDAYTGDSIDLMRMLTEDRYTEIDHILPYSRTCDDSRANKVLVLQKSNQDKKERTPWEWMSDDASKGAPDWEEFKARTLTNHRLSYKKRDHLLNQNLNGQEQSFIDRNLNDTRYMSVAVKDYLEKSLLFPDDGRKSHVIAVAGGATSALRHVWGLNFGADNTKDRSDDRHHAVDAAVIAACSQATVKKVADTSKLGHSEFKRKRESRLADTQPWPTFADEVIARREFVIPTRMANHGVTGSAFEDTIYRYEGIREGKDSLAVLSKSQGKDKPRAVKPSGNYRLDADGGAHLYDGIAFLRFWLDAEARPKGKVKGKWLIEPVYYADIPLIQCGRYIPKYIPAAHLARDQWVEIPESVLATDPVTVFFGDVLYVDGHIGRYSGFNINGLKLTMHSVISGESIAFPPVSSTWSKDSEVRIIEEDVLGRCWTPNIAKLVRLQEAASSS

SEQ ID NO: 921 - protein, 858 aa, unidentified
  REGION 1..858: note = Description of Unknown: uncultivated organism
  REGION 1..858: note = MG14-248 effector
MAKKGYRTVGQMLYKEGRSRNRGGDYTLCVLNSQIIDEAKIILDEQRSHGNAILTKMSNGEFEQFTNSYIDCLTWEKKSTKHDERVYSLVGACTYFPEEKRAAEADLSSELCRAYERFGHLVMVDADGTEHRLSAKDRARYLQILFSPVPIRGNKDCKVTYATIRKDLDLSAHVSFKGIEAERENKEEPFSPRRWRKLRACGVPEGLLARMLEDRDLADSIGEALAYASTEESLRDKLSSLDLSDDEINQLAVNVPFAGKLFSGYGSRSLKALHMLLDMFEDESILTLDDAERESGLQALRLADKGHRSLNLPPYDIYDPTCNNPTVLRALGRMRRIVNAIIRIYGVPDEIHIELGKELKQSSKEKKSIAKSNLQNKKDNERIAKTIAELLGCSPDDVRGKQIRRFALREEQGCKDAYTGDSIDLMRMLTEDRYTEIDHILPYSRTCDDSRANKVLVLQKSNQDKKERTPWEWMSDDASKGAPDWEEFKARTLTNHRLSYKKRDHLLNQNLNGQEQSFIDRNLNDTRYMSVAVKDYLEKSLLFPDDGRKSHVIAVAGGATSALRHVWGLNFGADNTKDRSDDRHHAVDAAVIAACSQATVKKVADTSKLGHSEFKRKRESRLADTQPWPTFADEVIARREFVIPTRMANHGVTGSAFEDTIYRYEGIREGKDSLAVLSKSQGKDKPRAVKPSGNYRLDADGGAHLYDGIAFLRFWLDAEARPKGKVKGKWLIEPVYYADIPLIQCGRYIPKYIPAAHLARDQWVEIPESVLATDPVTVFFGDVLYVDGHIGRYSGFNINGLKLTMHSVISGESIAFPPVSSTWSKDSEVRIIEEDVLGRCWTPNIAKLVRLQEAASSS

SEQ ID NO: 922 - protein, 1027 aa, unidentified; identical to SEQ ID NO: 920
  REGION 1..1027: note = Description of Unknown: uncultivated organism with predicted taxonomy: Olsenella
  REGION 1..1027: note = MG14-249 effector

SEQ ID NO: 923 - protein, 1007 aa, unidentified
  REGION 1..1007: note = Description of Unknown: uncultivated organism with predicted taxonomy: Olsenella
  REGION 1..1007: note = MG14-250 effector
MESERAYLVLGLDPGIASCGFCLLDMTNHKILEMGSRLFKTPQEDKTKVSLAVTRRNARSARRNNERTKSRMKHCMDILADEGLIPEDADKTWFQSKKGDKPILKLRSCGLNRALTDREFAQVLYSLCGHRGYIPHGEGKDAETDDAEGKKVLNAIKRNTEEMAAGGYRTVGEMLHSRGKSRNRGGNYDFCVYNSQIQSEVHAIFEAQRALGNLKANEKFEDRYLECLTWEKKSSDHDKKVYDQVGTCIYFPELKRAADADVSSELCRAYEKLGHLVIVHVDGAEQRLTGEQISHYIGILFSPTPLNNNKYCKVTYSTIRSDLDLSGKSVFKGVPQEKEKDEVFVPKAWRCLRKVLANDHEDLLDRMLNDRELGDAICEALTFSSSETSLQEQLEPLGLAEDECVALSSIPFNGKLFKGYGSRSIKALSILLGAFEEPGVQTLADAEKATGLDRKRLEDRVARSELLPPYNTYDETCRNPVVLRAMGQMRHIVNAIIRIYGVPDEIHIELGRELKMSAREKEMVSKRQRANETANKNWAAIAAKILCCEPEEVPGQTIRKLAFREEQGEKDIYTNAPIDLEKLVTDNRYCEIDHVLPYSRTCDDSRANKVLVLSASNQNKRERTPYEWMSQDAGKAGTPKWSEYSARVIATVKNPRKRANLLNMDLDKDAESEFLQRNLNDTRYMSVAVKNYLEDCLQFPDDGRKTHVIAVAGGATASLRHVWGLNFGKNNEKDRTDNRHHAVDAAVIAACSTKTVQAVARASSVGRESFKHIRQSRLADTQPWKTFAEDVITERSFVIPTYMADHGVTGCVFEDFSYSLEGIDEKGYAHISRQTDRTTGECRSLKASNFEIVNETTVKLLDSMAFLRLWHDPHAGKTGRWYIEPVYCADIPNLDGKTYHPRYQKQKVARSGWPLVPAEALKNKPLLLFRGDVLIVGNHIARYWKFDIGGGKVTMLSIVDINSEAKGFPSISKWKNDMPVRILSEDCLASCYKHMTIDSENSTFEER

SEQ ID NO: 924 - protein, 1006 aa, unidentified
  REGION 1..1006: note = Description of Unknown: uncultivated organism
  REGION 1..1006: note = MG14-251 effector
MAMQRPYLVLGLDPGIASCGFCLIDLANHKILLMGVRLFSVPKNRAGVSLAAERRAARSARRNNQRTKSRLKRCLTILKAAGLVPEDADRGWLQARKKDKPVIKLRAAGLDRVLSDRELAQVLYSLCEHRGYIPHGEGKEGATDDADGKKVLSAIKKNMEDMAKGGYRTVGEMLCAQGRSRNRGGNYDRCVYNSQIQEEARAIFAAQRSFGNLNVTAELEQEYMECLTSEKSSSDHDRRSYEVVGSCVYFPELKRAAKADISSELCRAYERFGHLVIVHKNGNEQTLTHEQINRYISALFMPSALQKKAQRITYATIRKDLDISGTSVFKGISHEQEKNEVFEPKAWRCLSKCLAENHGELLDRMWLDRALADSVCEALTYASTEVSLKGQLEALDLSEDECRAIKAIPFNSKIFKGYGTRSIKALSLLVGAFEDPDVRTLADAERATGLDMKRAEDRMPRSIMLPPYSAYDPTCRNPVVLRAMGQMRKIVNAIIKDHGVPDEIHIELSRNLKMSKREKDAIAKRQRSNEAANKKWAALAAGILDCEPSEVPHLVIRKLALREEQGDKDVYTGAAIDLERLVADDHYCEIDHILPYSRTGMSGWNNEVLVLAASNQKKRERTPYEWMQQDAGKSGVPAWDAYSSRVAATIGNPRKRRNLLCMDTGQEAMNGFLLRDLNDTRYMSVAIKNYLEDCLLFPEDGRKLHVTAVSGGATASLRRVWGLNTKGSDDEKTNSDTMRNAIDAAVIAACSVKTVQAVAKTRSLGRETFRHMRRSRLADTQPWETFADDVLAKCETVIPTRMAEHGVTGCALNEFVYRIDGFNEKGYAILSRQIDRATGERGVQVAGNYAPFGAGSAKLVGQTAFIRLWHDPDFGKGGRWYVEPVYYKDIPTLHDISYQPRYILSGRPRTEWPPVPEAALSRPPLILFSGDILVVGNHIARFKRLDINSQKLVMLNIFDERSLVKDFPTISRWKGDTNISIFSEDVLGKCFESVDIDSESSTFTLH

SEQ ID NO: 925 - protein, 1000 aa, unidentified
  REGION 1..1000: note = Description of Unknown: uncultivated organism with predicted taxonomy: Olsenella umbonata
  REGION 1..1000: note = MG14-252 effector
MAEQYLVLGLDPGISSCGFALLDMNNHKILEMGSHLFDAPQESKTKVSLAVGRRNARSARRNNLRTKNRQKHCMKLLKEAGLVPDDATKQWFQSAKGDRPLLELRFAALERILTNREFAQILYALSARRGYIPHGEGRISKLSDMDTSGSSDAETGKVLKAIGENNKLMVQGQFRTVGEMLYHQGKSRNKGGSYEHCVLNSQIVDEVHAIFQRQRAQQNPAATQELEDKYIENLTWEKRTLDHDARVYALVKKCKYFPSEYHAARADLSSELCSAYERLKHLRIVNADGHETALAPEQVEAYIAILFSPEPLSGRKEKVTYARIRKDLDLSAHLFFKGIDPEDEKDHEPYAPRAWRAMRKVLPTELMNRFRNDRALADAVGEALTYASSEDSLIYQLDSLDLSEAEREYILGLPFSGKIFKGYGSRSLKALGMLIDAFEEPEVTTLTEAEESSGLLGLRMSDNGMRYPLLPPYSTYDSENRNPVVLRAMGRMRRIVNAIIRIYGVPDEIHIELGRDLKRSKHEKDLISKRNRENERKNKQWRAQAAEIQGIDPDEVRPKLLKKMALWEEQGGLDAYTGHKIEFDRMISDDKYCEIDHVLPYSRTCDDSRSNKVLVLAKSNQDKRERTPYEWMTQDAQKGAPSWDEYQARVIANRHISPRKRRYLLNNNLGPDQESDFLNRNLNDDRYMSRAVKSYLEDTLIFPEDGRKKHVTAVSGGATGSLRHVWGLNFGDGNTKDRSDNRHHAVDACVIAACSEATVQAVAKARKLGAEAYKHIREDRLKDTQPWPTFADEVVARREFVIPTRMVSHGVTGQAFEDTNYRFDGLTNDTKKLGILYGNGKFTKKGNYVIGGDGNAHLVDGMAFLRLWIDPTAKKGKGKWYAEPVYYADIPAIKNGTYVPRAGKATVARNAWEAIPEAAHRTKPLVLFCGDVISMDGHTARYWSFSINTLTLKTKDLITGDDYKDFPTLGKWSKDSYPKIIQEDCLGHCYKGLVPKSSEG

SEQ ID NO: 926 - protein, 1022 aa, unidentified
  REGION 1..1022: note = Description of Unknown: uncultivated organism with predicted taxonomy: Atopobium sp. ICM42b
  REGION 1..1022: note = MG14-253 effector
MSGQSNGKTILGIDAGIASVGFCLLDIDNHQILELGSRLFDQPTEPKTDQNLSVARRQARSQRRLIARRKVRKGRCLGILKSCGLVPDDVDSGWLQSRKGDKNPLILRAEGLDRRLTDRELAQVLYLLCTHRDYIPHNADKAKTGDAAKDNERGKVLSAVGANRDKLAQLGYRTVGEMFAKEVKDDGNTAHRQGSYRNRRYKDSSGKEQSDYSHTVYMVELVDEVRQIVEAQRAFGNDRLTDSFLDTYLANMTAERGSKEKDAKVYQEQVAYCTYFPQEKRAASATLSNELANAYERLSNLRVINPDGTESCLDGVQIEQFINVLFSVKAPTLNYGKIRKTLDLSSEHYFKGIDRDRESKLEPCAPKAWRALCKSLSEKTLGHKSSLLVKMAVDRGFADTVLEAFAYASDEESFTDRVAELLANKGYDQLTDAELEDALSVPFTSRVFKGYCSRSLKALGLLLGCWEESEVSSLTEAEEASGLLQRRLADSYQRAELLPPYDSYDPTCTNPVVLRALSQMRRVINSIIKIHGIPDEIHVELSRDLKNSKAARDMIAKRQRDREKEKNALRKVIAELLSCELEDVTSNQLFRYELRQEQGDVDVYTGEQIDLMRMLLDQSYTQIDHILPYSRTAIDSRSNKVLVLSGSNAAKGERTPLEWMEEDVGAPDKDQYQSRIHSMSLPAAKKEKLLRRELTDADSRGFLDRNLNDNRYLSRAVMNWLAETLAFGDMDRRHVYAVTGAGTAILRKSWALNFGPNGLKDRNYDRHHAIDAAVIAACSVSTIQAIATAHAHERRLSESRMVSTQPWPSFAIELTQRIERVVPTHQVQHKGTGTVLQATIYGLRGMTKTNKYQIVTSGKTSTSGNLHIHPDGKSAQSIGDMAFLRLWHDSKNGKWYPEPVYYYDLPRLDSDAYVSRYITRNRSRDKWHEVPSEAMNERPLVVHRNDVLVVDGHVGRYITVDIAGGTIDVRSLLSKAKDGNLALATGFPSLSRWKDAWVVNEDCLGHCYDGFIVNSDCLAVIG

SEQ ID NO: 927 - protein, 1007 aa, unidentified; identical to SEQ ID NO: 923
  REGION 1..1007: note = Description of Unknown: uncultivated organism with predicted taxonomy: Olsenella sp. KH3B4
  REGION 1..1007: note = MG14-254 effector

SEQ ID NO: 928 - protein, 1000 aa, unidentified; identical to SEQ ID NO: 925
  REGION 1..1000: note = Description of Unknown: uncultivated organism with predicted taxonomy: Olsenella
  REGION 1..1000: note = MG14-255 effector

SEQ ID NO: 929 - protein, 800 aa, unidentified
  REGION 1..800: note = Description of Unknown: uncultivated organism with predicted taxonomy: Olsenella
  REGION 1..800: note = MG14-256 effector
MPEQLHGRTVLGIDAGIASVGFCLLDLDNHQILELGSHLFDQPTEPKTKQNLSVARRQARGQRRLIARRKVRKGRCLGILKDCGLVPADIDASWLQSRKGDKNPLILRAEGLDRRLTDRELAQVLYLLCTHRGYIPHNADKSATGDAARDNELGKVLSAVGSNREKLATSGYRTVGEMFAKEVKDDGVAAHRQGSYRNRRYKDSSGKEQGDYSHTVYMVELVDEVKQLVNAQRTFGNDKLTDAFLEAYLANMTAERGCKEKDAKVYEEQVGYCTYFPQEKRAATASLSNELANAYERFSNLRIINPDGSESRLDGMQIEQFVSALFSVKAPKVTYSKVWKALGLSSQHYFKGIDNDDKSRLEPYTPKAWRALCKSLSEKTLGHKSVLLAKMAYDRDYADAVLEAFAYASDDDSFSDRVNELLANKGYDQLTDAELEEAISVPFTSRVFKGYCSRSLKALGMLLECWEEKEITSLTEAEEASGLDRLRLSDRHERTLLLQPYDVYDPTCRNPVVLRSLSQMRRVINAIIKIHGVPDEIHVELSRDLKNSKAVKDKISNQQRRREAEKATLRRTIAELLQCEPDDVTGGQLLRYELRQEQNDQDVYTGDSIDLMRMLRDQSYTQIDHILPYSRTAIDSRSNKVLVLASSNAAKGERTPLEWMEQDANGPSIDAYQSRVHALNLPSAKKEKLLRRELTEDDAKHFLDRNLNDNRYLSRSVMNWLADTLAFDNLGHRHVYAVTGAGTAILRRHWALNFGSNGLKDRNDDRHHAIDAAVIAACSVSTIQSIATAHARGYRSSESR

SEQ ID NO: 930 - protein, 1082 aa, unidentified
  REGION 1..1082: note = Description of Unknown: uncultivated organism with predicted taxonomy: Megasphaera
  REGION 1..1082: note = MG15-1 effector
MNYVLGLDVGIASVGWAVLELNEEDNPIRIEGLGARIFDKAEVPKTGASLAAPRRMSRGIRRVIRRRRFRLQRVRSYLKKHNILPAEKVDHLYDVPSAIDIYELRKRALTEKVTAEEWARLLIFFAKHRGFKSNRKKASGDADEGEMLKAIAANAEILKNYRTVGEMLCDNEKFRKRKRNRDGAYNFTVSRAMLMEEIHTLFEIQRNLGQKFADEKLEEEYVILFAAQRKFDEGPGENSPYAGNQIEKMIGSCTLEGKKEKRAPKASYAFMAFNLWQKINHLKVNRRGSERFLTEEERRRIADLAWKKEKLTYGSLRKVLSLDPEDRFVGLRYDLKKGKAENLEEPVSEAEKRSFSWVKDYHSIRKALDKVEKNRILKLSHEQLDTIATAFSVYKNEETIEKYLEEGGIGKADGEALLERLSGFSKFGHLSLKACYKLLPFLEKGEVYSRACELAGYDFSKSSLENIDDIPNPVVKRSISQTLKVINAIILRYGNPVEVHIELARELARSFRDRKKMEKGMQENQAKNEKIRQRLISEFGVLRPKGMDIVKFKLCEEQNGECAYSQKHFDMEKLLKDPSYAEVDHIIPYSRSFDDSYNNKVLVLTKENREKRNRIPMEYLADAPERKNRFIHWVKSTIRNSRKRENLLRTDYTATTENEWKRRNLQDTQYISKYLYNYLRHHLVLAKGYTERKRRIIPVNGAVTAYFRKRLGINKIRENGDLHHAVDAVIIACATQGIVNKVSRYSKSRELWDYEVDMETGEVLQKKNKNTKDVFPEPWLNFRYELEQKVRVRPLDIPETADITEMEEPFVSHMPNRKIHGPAHKETIRSGRLKEEGYTISKTALIDLKLTEDKEEIKGYYNKESDRLLYEALKKQLQRYGGKAKEAFKEPFHKPKADGTPGPIVNKVKIMEKSTMLIPVNGGKGLASNGNMVRIDVFRAEEKGKKKYYFIPVYVADTVKEELPNRAVLAHKPYEAWKIMKEENFIFSLYPNDLIFVDAGKEIPFKAALKGSTLDPEKKASRFLMYYKGADIATGSISGVNHDETYKARGVGIQSLREIKKCCIDVLGNISFASKEKRQTFR

SEQ ID NO: 931 - protein, 1113 aa, unidentified
  REGION 1..1113: note = Description of Unknown: uncultivated organism with predicted taxonomy: Selenomonas sp. AE3005
  REGION 1..1113: note = MG15-3 effector
MNYILGLDIGIASVGWAAVALDANDEPYKILDLNSRIFEKAEDPQNGDSLAAPRRKARGSRRRTRRRRHRMERLRHLFAREGLLSADKIEEIFHVPDDVYRLRAEGLTRCLKDEEWARVLYHIAKHRGFKSNRKSAASDADEGKVIEAVRQNAVLLKNYKTVGEMLFRDEKFQAAKRNKGGSYNFCVSRDMLSDEIGALFEAQRKAGNQHASEKFEADYHKIFADQRNFDDGPDINSHSPYAGNQIENMIGNCSLEPSEKRAPKASYSFMRFALLQKINHLRLKKAKGEERFLNDEERAAVEELAWKTASLTYGAVRKALSLSDEWRFTDLYYRWGKTQEEIEKKKLQFTVPYHEIRKALDKREKGRIQKLTPDALDAIGYIFTVFKNDAKIAEALKSAGIGEEDAAALMAAGLTFSGFGHISVKACRKLIPNFEKGMTYDKACKEEGYEFQGKSGEKTKFLSGNLEEIREIPNPVVRRAIAQTVKVINAVIRRYGSPVGVNVELAREMGRTFQARRDMMKSMEDNSAKNEKLKEELKGYGVMHPSGLDIVKLKLYKDQGGVCAYSLAAMPIEKVFKEHDYAEVDHILPYSRSFDDSYSNKVLVLTKENRDKGNRTPMEYMANMPGRKHDFITWVNSSIRDFRKRDNLLLENFDEEREDAWKERHLTDTQYISRFVKNLLDEHLEFAPWLSGKKQHVIAVNGAVTDYTRKRLGIRKIREDGDLHHAVDAAVIATVTQGNIQKLTNYSKRIECACIKNSDGSYTNPDTGEILKKDELIVQMSKHFPEPWPKFRHELEARVSDHPKELIESLKLPSYSMEEIDALKPPFVSRMPTRKVRGAAHLETVVSPRLQNEGMILKKVPLESLKLTKEKDAIENYYAPESDRLLYEALLHRLQAFEGNGKKAFAEEFHKPKADGMPGPVVKKVKVAEKSTLSVPVHQGKGLAANGGMVRIDVFFIPEGRELGYYLVPVYTSDVVRGELPMRAVVAHKSYAEWKIMREEDFLFSLYPNDLIWIENKKGIKVNLPNKLAKNSSLTASRVQKEGFFYYKGMNIANAQFDVVVHDGTYRQESLGVKTLTKMEKWTIDVLGGEVNQVSREQRQGFNDMKRDPHAIK

SEQ ID NO: 932 - protein, 1113 aa, unidentified
  REGION 1..1113: note = Description of Unknown: uncultivated organism with predicted taxonomy: Selenomonas sp. AE3005
  REGION 1..1113: note = MG15-4 effector
MNYILGLDIGIASVGWAAVALDANDEPYKILDLNSRIFEKAEDPQNGDSLAAPRRKARGSRRRTRRRRHRMERLRHLFAREGLLSADKIEEIFHVPDDVYRLRAEGLTRCLKDEEWARVLYHIAKHRGFKSNRKSAASDADEGKVIEAVRQNAVLLKNYKTVGEMLFRDEKFQAAKRNKGGSYNFCVSRDMLSDEIGALFEAQRKAGNQHASEKFEADYHKIFADQRNFDDGPDINSHSPYAGNQIENMIGNCSLEPSEKRAPKASYSFMRFALLQKINHLRLKKAKGEERFLNDEERAAVEELAWKTASLTYGAVRKALSLSDEWRFTDLYYRWGKTQEEIEKKKLQFTVPYHEIRKALDKREKGRIQKLTPDALDAIGYIFTVFKNDAKIAEALKSAGIGEEDAAALMAAGLTFSGFGHISVKACRKLIPNFEKGMTYDKACKEEGYEFQGKSGEKTKFLSGNLEEIREIPNPVVRRAIAQTVKVINAVIRRYGSPVGVNVELAREMGRTFQARRDMMKSMEDNSAKNEKLKEELKGYGVMHPSGLDIVKLKLYKDQGGVCAYSLAAMPIEKVFKEHDYAEVDHILPYSRSFDDSYSNKVLVLTKENRDKGNRTPMEYMANMPGRKHDFITWVNSSIRDFRKRDNLLLENFDEEREDAWKERHLTDTQYISRFVKNLLDEHLEFAPWLSGKKQHVIAVNGAVTDYTRKRLGIRKIREDGDLHHAVDAAVIATVTQGNIQKLTNYSKRIECACIKNSDGSYTNPDTGEILKKDELIVQMSKHFPEPWPKFRHELEARVSDHPKELIESLKLPSYSMEEIDALKPPFVSRMPTRKVRGAAHLETVVSPRLQNEGMILKKVPLESLKLTKEKDAIENYYAPESDRLLYEALLHRLQAFEGNGKKAFAEEFHKPKADGMPGPVVKKVKVAEKSTLSVPVHQGKGLAANGGMVRIDVFFIPEGREHGYYLVPVYTSDVVRGELPMRAVVAHKSYAEWKIMREEDFLFSLYPNDLIWIENKKGIKVNLPNKLAKNSSLTASRVQKEGFFYYKGMNIANAQFDVVVHDGTYRQESLGVKTLTKMEKWTIDVLGGEVNQVSREQRQGFNDMKRDPHAIK

SEQ ID NO: 933 - protein, 1078 aa, unidentified
  REGION 1..1078: note = Description of Unknown: uncultivated organism with predicted taxonomy: Veillonellales
  REGION 1..1078: note = MG15-6 effector
MNYVLGLDVGITSCGWAVLELNHEDEPVRIVDLNSRIFDKAEAGNGDSLAAPRRMARGIRRLTRRRKFRLHRVRGFLVRHHILTKEEIENLYTNPHKTDIYELRYRVLTEKVSPSDWARLLIFFAKHRGFQSNRKNEKSGEDGLMLAAIGENKKILENYRSVGDMLYSDEKFKDCKRNKGGTYRFTVSRSMLKEEVQILFKKQRELGQTFAGEDLEDEYLSIFSAQRNFDEGPGANSPYAGDQIEKMIGDCTFEDGENGRPLQKRAPKASYAFMAFNLWQKINHIRVNSKGIQRSLETEEKNKIADLAWTKENITYHDLRQITGLDEETRFSEVTYPLDSTTEEAEKKVKFSWVKPYHAMRRALDKVEKNYIRKLSREEIDAIAYAFTVYKNDKKIRTALTEKGIKENVADVLITHLDGFSKFGHLSEYACYKLLPFLEKGEEYYKACDSAGLIESPARKIKDITNPVVKRAVTQTMKVIKAVQRKYGNPVEVHIELARELARSFKDRAAMDHRMKENYAKNEKIKERLSKEFHIMNPTGQDIVKWKLYEQQQGCCAYSQKPFDVDRLLHDGNYAEVDHILPYSRSFDDTYRNKVLVLEKENRDKGNRTPMEYLADKPERKEKFIAWVKTVIKDSKKREHLLRVKYGRDEEAEWKQRHLQDTQYISRFLYNYLRNTLKLAPGYTDRKRRIIPVNGAVTGYIRKRLDIRKIRENGDLHHAVDAVVIAVTTQGMIQKVTRYSQIRENPKLIDKKTGEVLTAKEFHNKDNFPEPWPRFRQELEVRVSEDPEEAIRRLRLPAYENVGEIKKPFVSRMPRRKVRGAAHEETVRSGKLREDGYTILKTDLSKLKLENGEIKGYYRPESDRLLYEALKKRLEAFGGKGEEAFKEPFYKPKADGTPGPLVKKVKIIEKSSLNVPVHKGKGVAYNDMMVRIDIFGVNEKGKNAYYFVPVYVSDTVKKELPCRGVVKRKSYENWKIMDDKDFLFSLYHNDMIHVVSKKPLSFTAAKGSSLLPKMETKDTYVYYKGADIKGVSITVINHDNSYGIKGMGIKTLLQLEKCEVDVLGNISFVKQEKRQGFR

SEQ ID NO: 934 - protein, 861 aa, unidentified
  REGION 1..861: note = Description of Unknown: uncultivated organism with predicted taxonomy: Megasphaera stantonii
  REGION 1..861: note = MG15-7 effector
ADEKLEEEYVILFAAQRKFDEGPGENSPYAGNQIEKMIGSCTLEGKKEKRAPKASYAFMAFNLWQKINHLKVNRRGSERFLTEEERRRIADLAWKKEKLTYGSLREVLFLDPEDRFVGLRYDLKKEKEEDLEEPVSEAEKMSFSWVKDYHSIRKALDKVEKNRILKLSHEQLDTIATAFSVYKNEETIEKYLKEGGIEKADREALLERLSGFSKFGHLSLKACYKILPFLEKGEVYSRACERAGYDFSKSSLENINDIPNPVVKRSISQTLKVINAIILQYGNPVEVHIELARELAKNFRDRKKMEKGMQENQAKNEKIRQRLMSEFGVLRPKGMDIVKFKLCEEQNGECAYSQKHFDMEKLLRDPSYAEVDHIIPYSRSFDDSYNNKVLVLTKENREKRNRIPMEYLADATERKNRFIHWVKSTIRNSRKRENLLRTDYTATTENEWKRRNLQDTQYISKYLYNYLRHHLVLAKGYTERKRRIIPVNGAVTAYIRKRLGINKIRENGDLHHAVDAVIIACATQGIVNKVSRYSKSRELWDYEVDMETGEVLQKKNENRKDIFPEPWLNFRYELEQKVRVRPLDIPETADITEMEEPFVSHMPNRKIHGPAHKETIRSGRLKEEGYTISKTALTDLKLTEDKEEIKGYYNKESDRLLYEALKKQLQRYSGKAKEAFKEPFHKPKADGTPGPIVNKVKIMEKSTMPVPVNGGKGLASNGNMVRIDVFRVEEKGKKKYYFIPVYVADTVKEELPNRAVLAHKPYEAWKIMKEEDLIFVDAGKEIPFKAALKGSTLDPEKKASRFLMYYKGADIATGSISGVNHDETYKARGVGIQSLREIKKCCIDVLGNISFASKEKRQTFR

SEQ ID NO: 935 - protein, 1084 aa, unidentified
  REGION 1..1084: note = Description of Unknown: uncultivated organism with predicted taxonomy: Dialister
  REGION 1..1084: note = MG15-8 effector
MNYVLGLDVGITSCGWAVLELNPEDEPVRIVDLNSRIFDKAEAGNGDSLAAPRRMARGIRRLTRRRKFRLHRVRGFLVRHHILTKEEIENLYTTPHKTDIYELRYRALTEKVSPSDWARLLIFFAKHRGFQSNRKNEKSGEDGLMLAAIGENKKILENYRSVGDMLYSDEKFKDCKRNKGGTYRFTVSRSMLKEEVQTLFKKQRELGQTFAGEDLEDEYISIFSAQRNFDEGPGANSPYAGDQIEKMIGNCTFEDGKNDRPPQKRAPKASYAFMAFNLWQKINHIRVNCKGIERSLETEEKNKIAGLAWTKENITYHDLRQITGLDEETRFSGVTYPLDSTTEEAEKKVKFSWVKPYHAMRRALDKVEKNYIRKLSREEIDAIAYAFTVYKNDKKIRTALAEKGIEDNVADVLITHLDGFSKFGHLSEYACYKLLPFLEKGEEYYKACDSAGLTESPAKKIKDITNPVVKRAVTQTMKVIKAVQRKYGNPVEVHIELARELARSFKDRAAMDHRMKENYAKNEKIKERLSKEFHIMNPRGQDIVKWKLYEQQQGCCAYSQKPFDVDRLLHDGNYAEVDHILPYSRSFDDTYRNKVLVLEKENRDKGNRTPMEYLADKPERKERFIAWVKTTIKDSKKREHLLRVKYGRDEEAEWKQRHLQDTQYISRFLYNYLRNTLELAPGYTDRKRRIIPVNGAVTGYIRKRLDIRKIRENGDLHHAVDAVVIAATTQGMIQKVTRYSQIKENETWIDDHTKVDERTGEIFFVKKAHEKDAFPEPWPRFRQELEARVSEDPEEAIRRLGLPSYENAGEIKKPFVSRMPRRKVRGAAHKETVRSGKLREDGYTILKTDLSALKLKNGEIEGYYRPESDRLLYEALKKRLEAFGGKGKEAFKEPFYKPKADGTPGPLVKKVKIIEKSSLNVPVHKGKGIAYNDTMVRIDIFGVNEKGKNAYYFVPVYVSDTVKKELPCRAVVSKKPYEEWKVMDDKDFLFSLYPNDMIHVVAKTPLSFTVAEGADLAPTMETKDTYVYYKKAAISVGTITVITHDNSYGIKSMGIKTLLQLEKCEVDVLGNISFVKQEKRQGFR

SEQ ID NO: 936 - protein, 1081 aa, unidentified
  REGION 1..1081: note = Description of Unknown: uncultivated organism with predicted taxonomy: Dialister invisus
  REGION 1..1081: note = MG15-9 effector
MNYVLGLDVGIASVGWAVLELNEEDNPIRIEGLGARIFDKAEVPKTGASLAAPRRMSRGIRRVIRRRRFRLQRVRSYLKRHNILPAEKVDHLYDVPSAIDIYELRKRALTEKVTAEEWARLLIFFAKHRGFKSNRKKASGDADEGEMLKAIAANAEILKNYRTVGEMLCDNEKFRKRKRNRDGAYNFTVSRAMLMEEIHTLFEIQRNLGQKFADEKIEEEYVILFAAQRKFDEGPGENSPYAGNQIEKMIGSCTLEGKKEKRAPKASYAFMAFNLWQKINHLKINRRGSERFLTEEERRRIADLAWKKEKLTYGSLREVLFLDPEDRFVGLRYDLKKEKEEDLEEPVSEAEKMSFSWVKDYHSIRKALDKVEKNRILKLSHEQLDTIATAFSVYKNEETIEKYLEEGGIEKADREALLERLSGFSKFGHLSLKACYKILPFLEKGEVYSRACERAGYDFSKSSLENIDDIPNPVVKRSISQTLKVINAIILRYGNPVEVHIELARELARNFRDRKKMEKGMQENQAKNEKIRQRLISEFGVLRPKGMDIVKFKLCEEQNGECAYSQKHFDMEKLLRDPSYAEVDHIIPYSRSFDDSYNNKVLVLTKENREKRNRIPMEYLADATERKNRFIHWVKSTIRNSRKRENLLRTDYTETTENEWKRRNLQDTQYISKYLYNYLRHHLVLAKGYTERKRRIIPVNGAVTAYIRKRLGINKIRENGDLHHAVDAVIIACATQGIVNKVSRYSKSRELWDYEVDMETGEVLQKKNENRKDIFPEPWLNFRYELEQKVRVRPLDIPETADITEMEEPFVSHMPNRKIHGPAHKETIRSGRLKEEGYTISKTALTDLKLTEDKEEIKGYYNKESDRLLYEALKKQLQRYSGKAKEAFKEPFHKPKADGTPGPIVNKVKIMEKSTMPVPVNGGKGLASNGNMVRIDVFRVEEKGKKKYYFIPVYVADTVKEELPNRAVLAHKPYEAWKIMKEEDFIFSLYPNDLIFVDAGKEIPFKAALKGSTLDPEKKASRFLMYYKGADIAGGTINGVNHDSTYGIRIGLQRLKGIRKCRIDVLGNISLVGKEKRKTFR

SEQ ID NO: 937 - protein, 1082 aa, unidentified
  REGION 1..1082: note = Description of Unknown: uncultivated organism with predicted taxonomy: Dialister
  REGION 1..1082: note = MG15-10 effector
MNYVLGLDVGIASVGWAVLELNEEDNPIRIEGLGARIFDKAEVPKTGASLAAPRRMSRGIRRVIRRRRFRLQRVRSYLKRHNILPAEKVDHLYDVPSAIDIYELRKRALTEKVTAEEWARLLIFFAKHRGFKSNRKKASGDADEGEMLKAIAANAEILKNYRTVGEMLCDNEKFRKRKRNRDGAYNFTVSRAMLMEEIHTLFEIQRNLGQKFADEKIEEEYVILFAAQRKFDEGPGENSPYAGNQIEKMIGSCTLEGKKEKRAPKASYAFMAFNLWQKINHLKINRRGSERFLTEEERRRIADLAWKKEKLTYGSLREVLFLDPEDRFVGLRYDLKKEKEEDLEEPVSEAEKMSFSWVKDYHSIRKALDKVEKNRILKLSHEQLDTIATAFSVYKNEETIEKYLEEGGIEKADREALLERLSGFSKFGHLSLKACYKILPFLEKGEVYSRACERAGYDFSKSSLENIDDIPNPVVKRSISQTLKVINAIILRYGNPVEVHIELARELARNFRDRKKMEKGMQENQAKNEKIRQCLISEFGVLRPKGMDIVKFKLCEEQNGECAYSQKHFDMEKLLRDPSYAEVDHIIPYSRSFDDSYNNKVLVLTKENREKRNRIPMEYLADAPERKNRFIHWVKSTIRNSRKRENLLRIDYTETTENEWKRRNLQDTQYISKYLYNYLRHHLVLAKGYTERKRRIIPVNGAVTAYFRKRLGINKIRENGDLHHAVDAVIIACATQGIVNKVSRYSKSRELWDYEVDMETGEVLQKKNKNTKDVFPEPWLNFRYELEQKVRIRPLDIPKTADITEMEEPFVSHMPNRKIHGPAHKETIRSGRLKEEGYTISKTALIDLKLTEDKEEIKGYYNKESDRLLYEALKKQLQRYGGKAKEAFKEPFHKPKADGTPGPIVNKVKIMEKSTMLIPVNGGKGLASNGNMVRIDVFRVEEKGKKKYYFIPVYVADTVKEELPNRAVLAHKPYEAWKIMKEEDFIFSLYPNDLIFVDAGKGIPFKAALKGSTLDPEKKASRFLMYYKGADIATGSISGVNHDETYKARGIGIQSLREIKKCCIDVLGNISFASKEKRQTFR

SEQ ID NO: 938 - protein, 1082 aa, unidentified
  REGION 1..1082: note = Description of Unknown: uncultivated organism with predicted taxonomy: Dialister
  REGION 1..1082: note = MG15-11 effector
MNYVLGLDVGIASVGWAVLELNEEDNPIRIEGLGARIFDKAEVPKTGASLAAPRRMSRGIRRVIRRRRFRLQRVRSYLKRHNILPAEKVDHLYDVPSAIDIYELRKRALTEKVTAEEWARLLIFFAKHRGFKSNRKKASGDADEGEMLKAIAANAEILKNYRTVGEMLCDNEKFRKRKRNRDGAYNFTVSRAMLMEEIHTLFEIQRNLGQKFADEKIEEEYVILFAAQRKFDEGPGENSPYAGNQIEKMIGSCTLEGKKEKRAPKASYAFMAFNLWQKINHLKINRRGSERFLTEEERRRIADLAWKKEKLTYGSLREVLFLDPEDRFVGLRYDLKKEKEEDLEEPVSEAEKMSFSWVKDYHSIRKALDKVEKNRILKLSHEQLDTIATAFSVYKNEETIEKYLEEGGIEKADREALLERLSGFSKFGHLSLKACYKILPFLEKGEVYSRACERAGYDFSKSSLENIDDIPNPVVKRSISQTLKVINAIILRYGNPVEVHIELARELARNFRDRKKMEKGMQENQAKNEKIRQRLISEFGVLRPKGMDIVKFKLCEEQNGECAYSQKHFDMEKLLRDPSYAEVDHIIPYSRSFDDSYNNKVLVLTKENREKRNRIPMEYLADAPERKNRFIHWVKSTIRNSRKRENLLRIDYTETTENEWKRRNLQDTQYISKYLYNYLRHHLVLAKGYTERKRRIIPVNGAVTAYFRKRLGINKIRENGDLHHAVDAVIIACATQGIVNKVSRYSKSRELWDYEVDMETGEVLQKKNKNTKDVFPEPWLNFRYELEQKVRIRPLDIPKTADITEMEEPFVSHMPNRKIHGPAHKETIRSGRLKEEGYTISKTALIDLKLTEDKEEIKGYYNKESDRLLYEALKKQLQRYGGKAKEAFKEPFHKPKADGTPGPIVNKVKIMEKSTMLIPVNGGKGLASNGNMVRIDVFRVEEKGKKKYYFIPVYVADTVKEELPNRAVLAHKLYEAWKIMKEEDFIFSLYPNDLIFVDAGKGIPFKAALKGSTLDPEKKASRFLMYYKGADIATGSISGVNHDETYKARGIGIQSLREIKKCCIDVLGNISFASKEKRQTFR

SEQ ID NO: 939 - protein, 1103 aa, unidentified
  REGION 1..1103: note = Description of Unknown: uncultivated organism with predicted taxonomy: Megasphaera micronuciformis
  REGION 1..1103: note = MG15-12 effector
MDTKELKYVVGLDIGITSVGWATLLLDSQDEPVRILDLNSRIFDKAEVPKTGASLAAPRRMARGVRRRLRRRKFRLHRVRQYILRHHILDKVGLECLYKPKTDIDIFALRTAGLDRQLKPEEWARILLYMAKHRGFKSNRKSTADETADGDMLKAIQQNKEILSKYRSVGEMFDKDEKFSDHKRNKGGSYEFTVARSMLEDEIKLLFEKQRDFGSAFAEKDAEEEYIDLFSAQRNFDEGPGGDSPYGGNQIGKMIGLCTFEGKNGEKRAPKASYAFMATNLWQKINQIRIIKKGTELHLTAEEAGKKYEKAWNKEAMTYKDIRSEISLGDEASFKGLAYKWTETDKEETESKTKFSWVKEYHTLRKVLDKVEKNRILQLSHDEIDNIAYVFSVYKNDDKIREALEETDLDSKDIDVLIENLGTFSKFGHLSLKACYKILPYLEQGMVYSDACTAAGYDFRKSAQGSIADIPNPVVKRAISQTMKVLKAIKQKYGCPPVEIHIEMARELAKSFDERQKMTKSIEENQSHNERIKERLQKEFNVPYPSGQDIVKLKLYEEQNETCAYSQKHMDAHRLFHENNYAEVDHIIPYSRSFDDTYNNKVLVLTAENRQKGNRTPMEYLSGDEARKKQFVAWVKSDVKKPRKRENLLREKFTDDAENDWKARHLQDTQYISRFMLNYLQNNYELTPGNTDRKRRIIPVNGAVTAYVRKRLGISKIRENGDLHHAVDAAVIAAVTQGVVNSVSKYSKRHELQYHVDEHGNCVDLVTGELMGDAFKENHKIKGFPEPWPQFRAELEARVSENATEAIRILNLPTYSPDEEIKTPFVSRMVRHKTTGQAHEDTVRGKSNVADNVYVKKVALTELKLKDGEIEGYYNPSSDRLLYEALKKRLEQFGGKGKDAFKEPFHKPKADGSSGPIVKKCKVLDKINLSVPVHGGKGAAANANGGMIRVDIFKAKGKNGKSSYYAVPIYVADTVKVELPNRAVVTKKTYAEWPEMKTEDFAFSLYPNDVVYIGGKEIKMNVMPGCTLATENHVKDDFFYYKGLDIATGAMIVINHDGTYKQRGVGIKQLPLIEKYEVSVLGDLVKAIYRPREIFKHKAQRSK

SEQ ID NO: 940 - protein, 1081 aa, unidentified
  REGION 1..1081: note = Description of Unknown: uncultivated organism with predicted taxonomy: Megasphaera sp. AM44-1BH
  REGION 1..1081: note = MG15-13 effector
MNYVLGLDVGIASVGWAVLELNEEDNPIRIEGLGARIFDKAEVPKTGASLAAPRRMSRGIRRVIRRRRFRLQRVRSYLKRHNILPAEKVDHLYDVPSAIDIYELRKRALTEKVTAQEWARLLIFFAKHRGFKSNRKKASGDADEGEMLKAIAANAEILKNYRTVGEMLCDNEKFRKRKRNRDGAYNFTVSRAMLMEEIHTLFEIQRNLGQKFADEKLGEEYVILFAAQRKFDEGPGENSPYAGNQIEKMIGSCTLEGKKEKRAPKASYAFMAFNLWQKINHLKVNRRGSERFLTEEERRRIADLAWKKEKLTYGSLREVLFLDPEDRFVGLRYDLKKEKEEDLEEPVSEAEKMSFSWVKDYHSIRKALDKVEKNRILKLSHEQLDTIATAFSVYKNEETIEKYLEEGGIEKADREALLERLSGFSKFGHLSLKACYKILPFLEKGEVYSRACERAGYDFSKSSLENINDIPNPVVKRSISQTLKVINAIILRYGNPVEVHIELARELAKNFRDRKKMEKGMQENQAKNEKIRQRLMSEFGVLRPKGMDIVKFKLCEEQNGECAYSQKHFDMEKLLRDPSYAEVDHIIPYSRSFDDSYNNKVLVLTKENREKRNRIPMEYLADATERKNRFIHWVKSTIRNSRKRENLLRTDYTETIENEWKRRNLQDTQYISKYLYNYLRHHLVLAKGYTERKRRIIPVNGAVTAYIRKRLGINKIRENGDLHHAVDAVIIACATQGIVNKVSRYSKSRELWDYEVDMETGEVLQKKNENRKDIFPEPWLNFRYELEQKVRVRPLDIPETADITEMEEPFVSHMPNRKIHGPAHKETIRSGRLKEEGYTISKTALTDLKLTEDKEEIKGYYNKESDRLLYEALKKQLQRYSGKAKEAFKEPFHKPKADGTPGPIVNKVKIMEKSTMPVPVNGGKGLASNGNMVRIDVFRVEEKGKKKYYFIPVYVADTVKEELPNRAVLAHKPYEAWKIMKEEDFIFSLYPNDLIFVDAGKEIPFKAALKGSTLDPEKKASRFLMYYKGADIAGGTINGVNHDSTYGIRIGLQRLKGIRKCRIDVLGNISLVGKEKRKTFR

SEQ ID NO: 941 - protein, 1081 aa, unidentified
  REGION 1..1081: note = Description of Unknown: uncultivated organism with predicted taxonomy: Dialister
  REGION 1..1081: note = MG15-14 effector
MNYVLGLDVGIASVGWAVLELNEEDNPIRIEGLGARIFDKAEVPKTGASLAAPRRMSRGIRRVIRRRRFRLQRVRSYLKRHNILPAEKVDHLYDVPSAIDIYELRKRALTEKVTAEEWARLLIFFAKHRGFKSNRKKASGDADEGEMLKAIAANAEILKNYRTVGEMLCDNEKFRKRKRNRDGAYNFTVSRAMLMEEIHTLFEIQRNLGQKFADEKIEEEYVILFAAQRKFDEGPGENSPYAGNQIEKMIGSCTLEGKKEKRAPKASYAFMAFNLWQKINHLKINRRGSERFLTEEERRRIADLAWKKEKLTYGSLREVLFLDPEDRFVGLRYDLKKEKEEDLEEPVSEAEKMSFSWVKDYHSIRKALDKVEKNRILKLSHEQLDTIATAFSVYKNEETIEKYLEEGGIEKADREALLERLSGFSKFGHLSLKACYKILPFLEKGEVYSRACERAGYDFSKSSLENIDDIPNPVVKRSISQTLKVINAIILRYGNPVEVHIELARELAKNFRDRKKMEKGMQENQAKNEKIRQRLMSEFGVLRPKGMDIVKFKLCEEQNGECAYSQKHFDMEKLLRDPSYAEVDHIIPYSRSFDDSYNNKVLVLTKENREKRNRIPMEYLADAPERKNRFIHWVKSTIRNSRKRENLLRIDYTETTENEWKRRNLQDTQYISKYLYNYLRHHLVLAKGYTERKRRIIPVNGAVTAYFRKRLGINKIRENGDLHHAVDAVIIACATQGIVNKVSRYSKSRELWDYEVDMETGEVLQKKNENRKDIFPEPWLNFRYELEQKVRVRPLDIPETADITEMEEPFVSHMPNRKIHGPAHKETIRSGRLKEEGYTISKTALTDLKLTEDKEEIKGYYNKESDRLLYEALKKQLQRYSGKAKEAFKEPFHKPKADGTPGPIVNKVKIMEKSTMPVPVNGGKGLASNGNMVRIDVFRVEEKGKKKYYFIPVYVADTVKEELPNRAVLAHKPYEAWKIMKEEDFIFSLYPNDLIFVDAGKEIPFKAALKGSTLDPEKKASRFLMYYKGADIAGGTINGVNHDSTYGIRIGLQRLKGIRKCRIDVLGNISLVGKEKRKTFR

SEQ ID NO: 942 - protein, 1104 aa, unidentified
  REGION 1..1104: note = Description of Unknown: uncultivated organism with predicted taxonomy: Megasphaera micronuciformis
  REGION 1..1104: note = MG15-15 effector
MDTKELKYVVGLDIGITSVGWATLLLDSQDEPVRILDLNSRIFDKAEVPKTGASLAAPRRMARGVRRRLRRRKFRLYRVRQYILRHHILDKAGLECLYKPKTDIDIFALRTAGLDRLLEPEEWARILLYMAKHRGFKSNRKSTAVAGGDDGVMLKAIQQNKEVLSKYRSVGEMFDKDEKFSDHKRNKGGSYEFTVARSMLVDEIKLLFEKQRDFGLAFTEKDAEEEYIELFSAQRNFDEGPGGDSPYGGNQIEKMIGLCTFEGKNGEKRAPKASYAFMATNLWQKINQIRIIEKGTERPLTAEEAGKIDEKAWKKEAMTYKDIRSEISLGDEASFKGLPYKWTETDKEETESKAKFSWVKEYHTLRKVLDKVEKNRILQLSHDDIDNIAYIFSVYKNDDKIREALEGTDLDSKDIDVLIENLGTFSKFGHLSLKACYKILPYLEQGMVYSDACTAAGYDFRKSAQGSIADIPNPVVKRAISQTMKVLKAIKQKYGCPPVEIHIEMARELAKSFDERQKMTKSIEENQSHNERIKERLQKEFNVPYPSGQDIVKLKLYEEQNETCAYSQKHIDAAKLFHDPNYAEVDHIIPYSRSFDDTYNNKVLVLTAENRQKGNRTPMEYLSGDEARKKQFVAWVKSDIKKPRKRENLLREKFTADAENDWKARHLQDTQYISRFMLNYLQNNYELTPGNTDRRRRIIPVNGAVTAYVRKRLGISKIRENGDLHHAVDAAVIAAVTQGVVNSVSRYSKRHELQYHVDEHGNCVDLVTGELMGDAFKENHKIKGFPEPWPQFRAELEARVSENAAEAIRILNLPTYSPDEEIKTPFVSRMVRHKTTGQAHEDTVRGKSNVADNVYVKKVALTELKLKDGEIEGYYNPSSDRLLYEALKKRLEQFDGKGKDAFKEPFHKPKSDGSPGPIVKKCKVLDKINLAVPVHDGKGITKNAGGSMIRVDIFKVKKSNGGHQYYSVPIYVADTVKEALPNRAVVAYKEYDEWKIVDDKDFVFSLYPNDLLFIGGKEIKLNGTGGDTLHQGIMVQDVFLYYRGLNIAVGSIGVENSDGRYAQDSLGIKQLPIIEKYEVSVLGDLVKAMYRTRETFKHKAQRAK

SEQ ID NO: 943 - protein, 840 aa, unidentified
  REGION 1..840: note = Description of Unknown: uncultivated organism with predicted taxonomy: Megasphaera stantonii
  REGION 1..840: note = MG15-16 effector
MNYVLGLDIGITSVGWAVLELDTHDEPIRIVDLNSRIFEKAEVPKTGESLAAPRRMARSARRLTRRRRFRLHRMRRYLIRNRILDARQVEELYVDSIGKTDIYELRYQALSQPVSNSDWARLLIFFAKHRGFKSNRKHISDSGDKGQMLNAITENQEILNNYHTVGEMLYKNEKFKACKRNKGGSYAFTVSRDMLADEIHALFDVQRSLGQAYASEELEEEYMELFSAQRNFDEGPGMNSPYSGNQIEKMIGCCTFEDDEKRAPKASYAFMAFNVWQKINHLRVTCEGTDRSLSQAEKETLAALAWKKENITFKDIRNKLGLDDTVRFLDVNYNLDKYKTAEEAEKKVKFSWVKEYHAIRKALDKVKKDRISELSHEQIDTIAYAFTVYKNDEAIKRYLLEHAIELADAEALLENISGFSKFGHLSVKACYKLLKPLKQGNVYTKACEIAGYDPQKSSQGNISDIPNPVVKRALSQALKVIKAIIRQYGCPPVEIHIELARELAKSAKERTELEKAMKDNQSRNEKIKTKLHELNVMQPTGLDIVKYKLYEQQQGDCAYSQKKFDVNRLLHDPTYAEVDHIIPYSRSFDDTYRNKVLVLTKENRDKGNRTPMEYFQDKPERKEAFINWVKRTISDGKKRNNLLRVNYSADAEKEWKDRHLQDTQYISRYLYNYLKRHIELKEGYTDRKRRIIPVNGAVTAYVRKRLGISKIRENGDLHHAVDAVIIACVTQGVVNKISRYSKIKELRQFMTADGTIVDQETGEVLQTANPRKTDPFPEPWPKFRQELEARVSDNPAEAIAALRLPTYEGIVTISAPFVSRMPNRKVHGPAHMETIRSAKM

SEQ ID NO: 944 - protein, 1082 aa, unidentified
  REGION 1..1082: note = Description of Unknown: uncultivated organism with predicted taxonomy: Dialister
  REGION 1..1082: note = MG15-17 effector
MNYVLGLDVGIASVGWAVLELNEEDNPIRIEGLGARIFDKAEVPKTGASLAAPRRMSRGIRRVIRRRRFRLQRVRSYLKRHNILPAEKVDHLYDVPSAIDIYELRKRALTEKVTAEEWARLLIFFAKHRGFKSNRKKASGDADEGEMLKAIAANAEILKNYRTVGEMLCDNEKFRKRKRNRDGAYNFTVSRAMLMEEIHTLFEIQRNLGQKFADEKIEEEYVILFAAQRKFDEGPGENSPYAGNQIEKMIGSCTLEGKKEKRAPKASYAFMAFNLWQKINHLKINRRGSERFLTEEERRRIADLAWKKEKLTYGSLREVLFLDPEDRFVGLRYDLKKEKEEDLEEPVSEAEKMSFSWVKDYHSIRKALDKVEKNRILKLSHEQLDTIATAFSVYKNEETIEKYLEEGGIEKADREALLERLSGFSKFGHLSLKACYKILPFLEKGEVYSRACERAGYDFSKSSLENIDDIPNPVVKRSISQTLKVINAIILRYGNPVEVHIELARELARNFRDRKKMEKGMQENQAKNEKIRQRLISEFGVLRPKGMDIVKFKLCEEQNGECAYSQKHFDMEKLLRDPSYAEVDHIIPYSRSFDDSYNNKVLVLTKENREKRNRIPMEYLADAPERKNRFIHWVKSTIRNSRKRENLLRIDYTETTENEWKRRNLQDTQYISKYLYNYLRHHLVLAKGYTERKRRIIPVNGAVTAYIRKRLGINKIRENGDLHHAVDAVIIACATQGIVNKVSRYSKSRELWDYEVDMETGEVLQKKNENRKDIFPEPWLNFRYELEQKVRVRPLDIPETADITEMEEPFVSHMPNRKIHGPAHKETIRSGRLKEEGYTISKTALIDLKLTEDKEEIKGYYNKESDRLLYEALKKQLQRYGGKAKEAFKEPFHKPKADGTPGPIVNKVKIMEKSTMLIPVNGGKGLASNGNMVRIDVFRVEEKGKKKYYFIPVYVADTVKEELPNRAVLAHKPYEAWKIMKEEDFIFSLYPNDLIFVDAGKGIPFKAALKGSTLDPEKKASRFLMYYKGADIATGSISGVNHDETYKARGIGIQSLREIKKCCIDVLGNISFASKEKRQTFR

SEQ ID NO: 945 - protein, 1103 aa, unidentified
  REGION 1..1103: note = Description of Unknown: uncultivated organism with predicted taxonomy: Megasphaera micronuciformis
  REGION 1..1103: note = MG15-18 effector
MDTKELKYVVGLDIGITSVGWATLLLDSQDEPVRILDLNSRIFDKAEVPKTGASLAAPRRMARGVRRRLRRRKFRLHRVRQYILRHHILDKAGLECLYKPKTDIDIFALRTAGLDRLLEPEEWARILLYMAKHRGFKSNRKSASDASDDGDMLDAIRKNKEVLSKYRSVGEMFDKDEKFSDHKRNKGGSYEFTVARSMLEDEIKLLFEKQRDFGLAFAEKDAEEEYIELFSAQRNFDEGPGGDSPYGGNQIEKMIGLCTFEGKNGEKRAPKASYAFMATNLWQKINQIRIIEKGTERPLTAEEAGKIDEKAWKKEAMTYKDIRSEIGLGDEASFKGLPYKWTETDKEETESKAKFSWVKEYHTLRKVLDKVEKNRILQLSHDDIDNIAYIFSVYKNDDKIREALEGTDLDSKDIDVLIENLGTFSKFGHLSLKACYKILPYLEQGMVYSDACTAAGYDFRKSAQGSIADIPNPVVKRAISQAMKVLKAIKQKYGCPPVEIHIEMARELAKSFDERQKMTKSIEENQSHNERIKERLQKEFNVPYPSGQDIVKLKLYEEQNETCAYSQKHIDAAKLFHDPNYAEVDHIIPYSRSFDDTYNNKVLVLTAENRQKGNRTPMEYLSGDEARKKQFVAWVKSDIKKPRKRENLLREKFTADAENDWKVRHLQDTQYISRFMLNYLQNNYELTPGNTDRKRRIIPVNGAVTAYVRKRLGISKIRENGDLHHAVDAAVIAAVTQGVVNSVSKYSKRHELQYHVDEHGNCVDLVTGELMGDAFKENHKIKGFPEPWPQFRAELEARVSENAAEAIRILKLPTYSPDEEIKTPFVSRMVRHKTTGQAHEDTVRGKSNVADNVYVKKVALTELKLKDGEIEGYYNPSSDRLLYEALKKRLEQFGGKGKDAFKEPFYKPKSDGSLGPIVKKCKVIDKISLAVPVHGGKGATANANGSMIRVDIFRVKEKNNKHSYYAVPIYVADTVKDKLPNKAIVAKKNYDEWLEMKKEDFVFSLYPNSAVYIGGKDIKMNVISGCTLELEKTMRDTILYYKGLDISPGALKIINHDGTYQQRGLGIKSLPFIEKYEVSVLGDLVKATYRPRETFNHKAQRSK

SEQ ID NO: 946 - protein, 1104 aa, unidentified
  REGION 1..1104: note = Description of Unknown: uncultivated organism with predicted taxonomy: Megasphaera micronuciformis
  REGION 1..1104: note = MG15-19 effector
MDTKELKYVVGLDIGITSVGWATLLLDSQDEPVRILDLNSRIFDKAEVPKTGASLAAPRRMARGVRRRLRRRKFRLHRVRQYILRHHILDKAGLECLYKPKTDIDIFALRTAGLDRLLEPEEWARILLYMAKHRGFKSNRKSAAVAGGDDGDMLDAIRKNKEVLSKYRSVGEMFDKDEKFSDHKRNKGGSYEFTVARSMLVDEIKLLFERQRDFGSAFAEKDAEEEYIELFSAQRNFDEGPGGDSPYGGNQIEKMIGLCTFEGKNGEKRAPKASYAFMATNLWQKINQIRIIEKGTERPLTAEEAGKIDEKAWKKEAMTYKDIRSEISLGDEAYFKGLSYKWTETDKEETESKVKFSLVKEYHTLRKVLDKVEKNRILQLSHDDIDNIAYIFSVYKNDDKIREALEETDLDSKDIDVLIEHLGTFRKFGHLSLKACYKILPYLEQGMVYSDACTAAGYDFRKSAQGSIADIPNPVVKRAISQTMKVLKAIKQKYGCPPVEIHIEMARELAKSFDERQKMTKSIEENQSHNERIKERLQKEFNVPYPSGQDIVKLKLYEEQNETCAYSQKHIDAAKLFHDPNYAEVDHIIPYSRSFDDTYNNKVLVLTAENRQKGNRTPMEYFSGDEARKKQFVAWVKSDIKKPRKRENLLREKFTADAENDWKIRHLQDTQYISRFMLNYLQNNYELTPGNTDRRRRIIPVNGAVTAYVRKRLGISKIRENGDLHHAVDAAVIAAVTQGVVNSVSKYSKRHELQYHVDEHGNCVDLVTGELMGDAFKENHKIKGFPEPWPQFRAELEARVSENAAEAIRILKLPTYSPDEEIKTPFVSRMVRHKTTGQAHEDTVRGKSNVADNVYVKKVALTELKLKDGEIEGYYNPSSDRLLYEALKKRLEQFGGKGKDAFKEPFHKPKSDGSPGPIVKKCKVIDKISLAVPVHGGKGATANANGSMIRVDIFRVKEKNNKHSYYAVPIYVADTVKDKLPNKAIVAKKNYDEWLEMKKEDFVFSLYPNSAVYIGGKDIKMNVMSGCTLELEKTMRDTILYYKGLDISPGALKIINHDGTYQQRGLGIKSLPFIEKYEVSVLGDLVKATYRPRETFNHKAQRSK

SEQ ID NO: 947 - protein, 1082 aa, unidentified
  REGION 1..1082: note = Description of Unknown: uncultivated organism with predicted taxonomy: Dialister
  REGION 1..1082: note = MG15-20 effector
MNYVLGLDVGIASVGWAVLELNEEDNPIRIEGLGARIFDKAEVPKTGASLAAPRRMSRGIRRVIRRRRFRLQRVRSYLKRHNILPAEKVDHLYDVPSAIDIYELRKRALTEKVTAEEWARLLIFFAKHRGFKSNRKKASGDADEGEMLKAIAANAEILKNYRTVGEMLCDNEKFRKRKRNRNGAYNFTVSRAMLMEEIHTLFEIQRNLGQKFADEKLEEEYVILFAAQRKFDEGPGENSPYAGNQIEKMIGSCTFEGKKEKRAPKASYAFMAFNLWQKINHLKVNRRGSERFLTEEERRRIADLAWKKEKLTYGSLRKVLSLDPEDRFVGLRYDLKKGKAENLEEPVSEAEKRSFSWVKDYHSIRKALDKVEKNHILKLSHEQLDTIATAFSVYKNEETIEQYLEEGGIGKADREALLERLSGFSKFGHLSLKACYKLLPFLEKGEVYSRACELAGYDFSKSSLENIDDIPNPVVKRSISQTLKVINAIILRYGNPVEVHIELARELARSFRDRKKMEKGMQENQAKNEKIRQRLISEFGVLRPKGMDIVKFKLCEEQNGECAYSQKHFDMEKLLKDPSYAEVDHIIPYSRSFDDSYNNKVLVLTKENREKRNRIPMEYLADAPERKNRFIHWVKSTIRNSRKRENLLRTDYTATTENEWKRRNLQDTQYISKYLYNYLRHHLVLAKGYTERKRRIIPVNGAVTAYFRKRLGINKIRENGDLHHAVDAVIIACATQGIVNKVSRYSKSRELWDYEVDMETGEVLQKKNKNTKDVFPEPWLNFRYELEQKVRVRPLDIPETADITEMEEPFVSHMPNRKIHGPAHKETIRSGRLKEEGYTISKTALIDLKLTEDKEEIKGYYNKESDRLLYEALKKQLQRYGGKAKEAFKEPFHKPKADGTPGPIVNKVKIMEKSTMLIPVNGGKGLASNGNMVRIDVFRAEEKGKKKYYFIPVYVADTVKEELPNRAVLAHKPYEAWKIMKEEDFIFSLYPNDLILVDAGKEIPFKAALKGSTLDPEKKASRFLMYYKGADIATGSISGVNHDETYKARGVGIQSLREIKKCCIDVLGNISFASKEKRQTFR

SEQ ID NO: 948 - protein, 1081 aa, unidentified; identical to SEQ ID NO: 940
  REGION 1..1081: note = Description of Unknown: uncultivated organism with predicted taxonomy: Dialister
  REGION 1..1081: note = MG15-21 effector

SEQ ID NO: 949 - protein, 1082 aa, unidentified
  REGION 1..1082: note = Description of Unknown: uncultivated organism with predicted taxonomy: Dialister
  REGION 1..1082: note = MG15-22 effector
MNYVLGLDVGIASVGWAVLELNEEDNPIRIEGLGARIFDKAEVPKTGASLAAPRRMSRGIRRVIRRRRFRLQRVRSYLKKHNILPAEKVDHLYDVPSAIDIYELRKRALTEKVTAEEWARLLIFFAKHRGFKSNRKKASGDADEGEMLKAIAANAEILKNYRTVGEMLCDNEKFRKRKRNRDGAYNFTVSRAMLMEEIHTLFEIQRNLGQKFADEKLEEEYVILFAAQRKFDEGPGENSPYAGNQIEKMIGSCTLEGKKEKRAPKASYAFMAFNLWQKINHLKVNRRGSERFLTEEERRRIADLAWKKEKLTYGSLRKVLSLDPEDRFVGLRYDLKKGKAENLEEPVSEAEKRSFSWVKDYHSIRKALDKVEKNRILKLSHEQLDTIATAFSVYKNEETIEKYLEEGGIGKADREALLERLSGFSKFGHLSLKACYKLLPFLEKGEVYSRACELAGYDFSKSSLENIDDIPNPVVKRSISQTLKVINAIILRYGNPVEVHIELARELARSFRDRKKMEKGMQENQAKNEKIRQRLISEFGVLRPKGMDIVKSKLCEEQNGECAYSQKHFDMEKLLKDPSYAEVDHIIPYSRSFDDSYNNKVLVLTKENREKRNRIPMEYLADAPERKNRFIHWVKSTIRNSRKRENLLRTDYTATTENEWKRRNLQDTQYISKYLYNYLRHHLVLAKGYTERKRRIIPVNGAVTAYFRKRLGINKIRENGDLHHAVDAVIIACATQGIVNKVSRYSKSRELWDYEVDMETGEVLQKKNKNTKDVFPEPWLNFRYELEQKVRVRPLDIPETADITEMEEPFVSHMPNRKIHGPAHKETIRSGRLKEEGYTISKTALIDLKLTEDKEEIKGYYNKESDRLLYEALKKQLQRYGGKAKEAFKEPFHKPKADGTPGPIVNKVKIMEKSTMLIPVNGGKGLASNGNMVRIDVFRAEEKGKKKYYFIPVYVADTVKEELPNRAVLAHKPYEAWKIMKEEDFIFSLYPNDLIFVDAGKEIPFKAALKGSTLDPEKKASRFLMYYKGADIATGSISGVNHDETYKARGVGIQSLREIKKCCIDVLGNISFASKEKRQTFR

SEQ ID NO: 950 - protein, 1082 aa, unidentified
  REGION 1..1082: note = Description of Unknown: uncultivated organism with predicted taxonomy: Dialister
  REGION 1..1082: note = MG15-23 effector
MNYVLGLDVGIASVGWAVLELNEEDNPIRIEGLGARIFDKAEVPKTGASLAAPRRMSRGIRRVIRRRRFRLQRVRSYLKRHNILPAEKVDHLYDVPSAIDIYELRKRALTEKVTAEEWARLLIFFAKHRGFKSNRKKASGDADEGEMLKAIAANAEILKNYRTVGEMLCDNEKFRKRKRNRDGAYNFTVSRAMLMEEIHTLFEIQRNLGQKFADEKIEEEYVILFAAQRKFDEGPGENSPYAGNQIEKMIGSCTLEGKKEKRAPKASYAFMAFNLWQKINHLKINRRGSERFLTEEERRRIADLAWKKEKLTYGSLREVLFLDPEDRFVGLRYDLKKEKEEDLEEPVSEAEKMSFSWVKDYHSIRKALDKVEKNRILKLSHEQLDTIATAFSVYKNEETIEKYLEEGGIEKADREALLERLSGFSKFGHLSLKACYKILPFLEKGEVYSRACERAGYDFSKSSLENIDDIPNPVVKRSISQTLKVINAIILRYGNPVEVHIELARELARNFRDRKKIEKGMQENQAKNEKIRQRLISEFGVLRPKGMDIVKFKLCEEQNGECAYSQKHFDMEKLLRDPSYAEVDHIIPYSRSFDDSYNNKVLVLTKENREKRNRIPMEYLADAPERKNRFIHWVKSTIRNSRKRENLLRIDYTETTENEWKRRNLQDTQYISKYLYNYLRHHLVLAKGYTERKRRIIPVNGAVTAYFRKRLGINKIRENGDLHHAVDAVIIACATQGIVNKVSRYSKSRELWDYEVDMETGEVLQKKNKNTKDVFPEPWLNFRYELEQKVRIRPLDIPKTADITEMEEPFVSHMPNRKIHGPAHKETIRSGRLKEEGYTISKTALIDLKLTEDKEEIKGYYNKESDRLLYEALKKQLQRYGGKAKEAFKEPFHKPKADGTPGPIVNKVKIMEKSTMLIPVNGGKGLASNGNMVRIDVFRVEEKGKKKYYFIPVYVADTVKEELPNRAVLAHKPYEAWKIMKEEDFIFSLYPNDLIFVDAGKGIPFKAALKGSTLDPEKKASRFLMYYKGADIATGSISGVNHDETYKARGIGIQSLREIKKCCIDVLGNISFASKEKRQTFR

SEQ ID NO: 951 - protein, 1081 aa, unidentified
  REGION 1..1081: note = Description of Unknown: uncultivated organism with predicted taxonomy: Dialister invisus
  REGION 1..1081: note = MG15-24 effector
MNYVLGLDVGIASVGWAVLELNEEDNPIRIEGLGARIFDKAEVPKTGASLAAPRRMSRGIRRVIRRRRFRLQRVRSYLKRHNILPAEKVDHLYDVPSAIDIYELRKRALTEKVTAEEWARLLIFFAKHRGFKSNRKKASGDADEGEMLKAIAANAELLKNYRTVGEMLCDNEKFRKRKRNRDGAYNFTVSRAMLIEEIHTLFEIQRNLGQKFADERLEEEYVILFVAQRKFDEGPGENSPYAGNQIEKMIGSCTLEGKKEKRAPKASYAFMAFNLWQKINHLKINRRGSERFLTEEERRRIADSAWKKEKLTYGSLREVLFLDPEDRFVGLRYDLKKEKEEDLEEPVSEAEKMSFSWVKDYHSIRKALDKVEKNRILKLSHEQLDTIATAFSVYKNEETIEKYLEEGGIEKADREALLERLSSFSKFGHLSLKACYKILPFLEKGEVYSRACERAGYDFRKSSLENINDIPNPVVKRSISQTLKVINAIILRYGNPVEVHIELARELAKNFRDRKKMEKGMQENQAKNEKIRQRLMSEFGVLCPKGMDIVKFKLCEEQNGECAYSQKHFDMEKLLKDPSYAEVDHIIPYSRSFDDSYNNKVLVLTKENREKRNRIPMEYLADAPEQKNRFIHWVKSTIRNSRKRENLLRTDYTAATENEWKRRNLQDTQYISKYLYNYLLENLELAKGYTERKRRIIPVNGAVTAYIRKRLGINKIRENGDLHHAVDAVIIACATQGIVNKVSRYSKSRELWDYEVDKETGEILQKKNKNTKDVFPEPWLNFRYELEQKVRIRPLDIPETADITKMEEPFVSHMPNRKIHGPAHKETIRSGRLKEEGYTISKTALTDLKLTEDKEEIKGYYNKESDRLLYEALKKQLRRYGGKAKEAFKEPFHKPKADGTPGPIVNKVKIMEKSTMPVPVNGGKGIASNGNMVRIDVFRVEEKGKKKYYFIPVYVADTVKEELPNRAVLAHKPYEAWKIMKEEDFIFSLYPNDLIFVDAGKEIPFKAALKGSTLDPEKKASRFLMYYKGADIAGGTINGVNHDSTYGIRIGLQRLKGIRKCRIDVLGNISLVGKEKRKTFR

SEQ ID NO: 952 - protein, 1081 aa, unidentified
  REGION 1..1081: note = Description of Unknown: uncultivated organism with predicted taxonomy: Dialister
  REGION 1..1081: note = MG15-25 effector
MNYVLGLDVGIASVGWAVLELNEEDNPIRIEGLGARIFDKAEVPKTGASLAAPRRMSRGIRRVIRRRRFRLQRVRSYLKRHNILPAEKVDHLYDVPSAIDIYELRKRALTEKVTAEEWARLLIFFAKHRGFKSNRKKASGDADEGEMLKAIAANAELLKNYRTVGEMLCDNEKFRKRKRNRDGAYNFTVSRAMLIEEIHTLFEIQRNLGQKFADERLEEEYVILFVAQRKFDEGPGENSPYAGNQIEKMIGSCTLEGKKEKRAPKASYAFMAFNLWQKINHLKINRRGSERFLTEEERRRIADLAWKKEKLTYGSLREVLFLDPEDRFVGLRYDLKKEKEEDLEEPVSEAEKMSFSWVKDYHSIRKALDKVEKNRILKLSHEQLDTIATAFSVYKNEETIEKYLEEGGIEKADREALLERLSSFSKFGHLSLKACYKILPFLEKGEVYSRACERAGYDFRKSSLENINDIPNPVVKRSISQTLKVINAIILRYGNPVEVHIELARELAKNFRDRKKMEKGMQENQAKNEKIRQRLMSEFGVLCPKGMDIVKFKLCEEQNGECAYSQKHFDMEKLLKDPSYAEVDHIIPYSRSFDDSYNNKVLVLTKENREKRNRIPMEYLADAPEQKNRFIHWVKSTIRNSRKRENLLRTDYTAATENEWKRRNLQDTQYISKYLYNYLLENLELAKGYTERKRRIIPVNGAVTAYIRKRLGINKIRENGDLHHAVDAVIIACATQGIVNKVSRYSKSRELWDYEVDKETGEILQKKNKNTKDVFPEPWLNFRYELEQKVRIRPLDIPETADITKMEEPFVSHMPNRKIHGPAHKETIRSGRLKEEGYTISKTALTDLKLTEDKEEIKGYYNKESDRLLYEALKKQLRRYGGKAKEAFKEPFHKPKADGTPGPIVNKVKIMEKSTMPVPVNGGKGIASNGNMVRIDVFRVEEKGKKKYYFIPVYVADTVKEELPNRAVLAHKPYEAWKIMKEEDFIFSLYPNDLIFVDAGKEIPFKAALKGSTLDPEKKASRFLMYYKGADIAGGTINGVNHDSTYGIRIGLQRLKGIRKCRIDVLGNISLVGKEKRKTFR

SEQ ID NO: 953 - protein, 1082 aa, unidentified
  REGION 1..1082: note = Description of Unknown: uncultivated organism with predicted taxonomy: Dialister
  REGION 1..1082: note = MG15-26 effector
MNYVLGLDVGIASVGWAVLELNEEDNPIRIEGLGARIFDKAEVPKTGASLAAPRRMSRGIRRVIRRRRFRLQRVRSYLKKHNILPAEKVDHLYDVPSAIDIYELRKRALTEKVTAEEWARLLIFFAKHRGFKSNRKKASGDADEGEMLKAIAANAEILKNYRTVGEMLCDNEKFRKRKRNRDGAYNFTVSRAMLMEEIHTLFEIQRNLGQKFADEKLEEEYVILFAAQRKFDEGPGENSPYAGNQIEKMIGSCTLEGKKEKRAPKASYAFMAFNLWQKINHLKVNRRGSERFLTEEERRRIADLAWKKEKLTYGSLRKVLSLDPEDRFVGLRYDLKKGKAENLEEPVSEAEKRSFSWVKDYHSIRKALDKVEKNRILKLSHEQLDTIATAFSVYKNEETIEKYLEEGGIGKADGEALLERLSGFSKFGHLSLKACYKLLPFLEKGEVYSRACELAGYDFSKSSLENIDDIPNPVVKRSISQTLKVINAIILRYGNPVEVHIELARELARSFRDRKKMEKGMQENQAKNEKIRQRLISEFGVLRPKGMDIVKFKLCEEQNGECAYSQKHFDMEKLLKDPSYAEVDHIIPYSRSFDDSYNNKVLVLTKENREKRNRIPMEYLADAPERKNRFIHWVKSTIRNSRKRENLLRTDYTATTENEWKRRNLQDTQYISKYLYNYLRHHLVLAKGYTERKRRIIPVNGAVTAYFRKRLGINKIRENGDLHHAVDAVIIACATQGIVNKVSRYSKSRELWDYEVDMETGEVLQKKNKNTKDVFPEPWLNFRYELEQKVRVRPLDIPETADITEMEEPFVSHMPNRKIHGPAHKETIRSGRLKEEGYTISKTALIDLKLTEDKEEIKGYYNKESDRLLYEALKKQLQRYGGKAKEAFKEPFHKPKADGTPGPIVNKVKIMEKSTMLIPVNGGKGLASNGNMVRIDVFRAEEKGKKKYYFIPVYVADTVKEELPNRAVLAHKPYEAWKIMKEEDFIFSLYPNDLIFVDAGKEIPFKAALKGSTLDPEKKASRFLMYYKGADIATGSISGVNHDETYKARGVGIQSLREIKKCCIDVLGNISFASKEKRQTFR

SEQ ID NO: 954 - protein, 1082 aa, unidentified
  REGION 1..1082: note = Description of Unknown: uncultivated organism with predicted taxonomy: Dialister
  REGION 1..1082: note = MG15-27 effector
MNYVLGLDVGIASVGWAVLELNEEDNPIRIEGLGARIFDKAEVPKTGASLAAPRRMSRGIRRVIRRRRFRLQRVRSYLKRHNILPAEKVDHLYDVPSAIDIYELRKRALTEKVTAEEWARLLIFFAKHRGFKSNRKKASGDADEGEMLKAIAANAEILKNYRTVGEMLCDNEKFRKRKRNRGGAYNFTVSRAMLMEEIHTLFEIQRNLGQKFADEKIEEEYVILFAAQRKFDEGPGENSPYAGNQIEKMIGSCTLEGKKEKRAPKASYAFMAFNLWQKINHLKINRRGSERFLTEEERRRIADLAWKKEKLTYGSLREVLFLDPEDRFVGLRYDLKKEKEEDLEEPVSEAEKMSFSWVKDYHSIRKALDKVEKNRILKLSHEQLDTIATAFSVYKNEETIEKYLEEGGIEKADREALLERLSGFSKFGHLSLKACYKILPFLEKGEVYSRACERAGYDFSKSSLENIDDIPNPVVKRSISQTLKVINAIILRYGNPVEVHIELARELARNFRDRKKMEKGMQENQAKNEKIRQRLISEFGVLRPKGMDIVKFKLCEEQNGECAYSQKHFDMEKLLRDPSYAEVDHIIPYSRSFDDSYNNKVLVLTKENREKRNRIPMEYLADAPERKNRFIHWVKSTIRNSRKRENLLRIDYTETTENEWKRRNLQDTQYISKYLYNYLRHHLVLAKGYTERKRRIIPVNGAVTAYFRKRLGINKIRGNGDLHHAVDAVIIACATQGIVNKVSRYSKSRELWDYEVDMETGEVLQKKNKNTKDVFPEPWLNFRYELEQKVRVRPLDIPKTADITEMEEPFVSHMPNRKIHGPAHKETIRSGRLKEEGYTISKTALIDLKLTEDKEEIKGYYNKESDRLLYEALKKQLQRYGGKAKEAFKEPFHKPKADGTPGPIVNKVKIMEKSTMLIPVNGGKGLASNGNMVRIDVFRVEEKGKKKYYFIPVYVADTVKEELPNRAVLAHKPYEAWKIMKEEDFIFSLYPNDLIFVDAGKGIPFKAALKGSTLDPEKKASRFLMYYKGADIATGSISGVNHDETYKARGIGIQSLREIKKCCIDVLGNISFASKEKRQTFR

SEQ ID NO: 955 - protein, 1082 aa, unidentified
  REGION 1..1082: note = Description of Unknown: uncultivated organism with predicted taxonomy: Dialister
  REGION 1..1082: note = MG15-28 effector
MNYVLGLDVGIASVGWAVLELNEEDNPIRIEGLGARIFDKAEVPKTGASLAAPRRMSRGIRRVIRRRRFRLQRVRSYLKRHNILPAEKVDHLYDVPSAIDIYELRKRALTEKVTAEEWARLLIFFAKHRGFKSNRKKASGDADEGEMLKAIAANAEILKNYRTVGEMLCDNEKFRKRKRNRDGAYNFTVSRAMLMEEINTLFEIQRNLGQKFADEKLEEEYVILFASQRKFDEGPGENSPYAGNQIEKMIGSCTLEGKKEKRAPKASYVFMAFNLWQKINHLKVNRRGSERFLTEEERRRIADLAWKKEKLTYGSLRKVLSLDPEDRFVGLRYDLKKGKAENLEEPVSEAEKRSFSWVKDYHSIRKALDKVEKNRILKLSHEQLDTIATAFSVYKNEETIERYLEEGGIGKADREALLERLSGFSKFGHLSLKACYKLLPFLEKGEVYSRACELAGYDFSKSSLENIDDIPNPVVKRSISQTLKVINAIILRYGNPVEVHIELARELARSFRDRKKMEKGMQENQAKNEKIRQRLISEFGVLRPKGMDIVKFKLCEEQNGECAYSQKHFDMEKLLKDPSYAEVDHIIPYSRSFDDSYNNKVLVLTKENREKRNRIPMEYLADAPERKNRFIHWVKSTIRNSRKRENLLRTDYTATTENEWKRRNLQDTQYISKYLYNYLRHHLVLAKGYTERKRRIIPVNGAVTAYFRKRLGINKIRENGDLHHAVDAVIIACATQGIVNKVSRYSKSRELWDYEVDMETGEVLQKKNKNTKDVFPEPWLNFRYELEQKVRVRPLDIPETADITEMEEPFVSHMPNRKIHGPAHKESIRSGRLKEEGYTISKTALIDLKLTGDKEEIKGYYNKESDRLLYEALKKQLQRYGGKAKEAFKEPFHKPKADGTPGPIVNKVKIMEKSTMLIPVNDGKGLASNGNMVRIDVFRVEEKGKKKYYFIPVYVADTVKEELPNRAVLAHKPYEAWKIMKEEDFIFSLYPNDLIFVDAGKEIPFKAALKGSTLDPEKKVSRFLMYYKGADIATGSISGVNHDETYKARGVGIQSLREIKKCCIDVLGNISFASKEKRQTFR

SEQ ID NO: 956 - protein, 784 aa, unidentified
  REGION 1..784: note = Description of Unknown: uncultivated organism with predicted taxonomy: Dialister invisus
  REGION 1..784: note = MG15-29 effector
MNYVLGLDVGIASVGWAVLELNEEDNPIRIEGLGARIFDKAEVPKTGASLAAPRRMSRGIRRVIRRRRFRLQRVRSYLKKHNILPAEKVDHLYDVPSAIDIYELRKRALTEKVTAEEWARLLIFFAKHRGFKSNRKKASGDADEGEMLKAIAANAEILKNYRTVGEMLCDNEKFRKRKRNRDGAYNFTVSRAMLMEEIHTLFEIQRNLGQKFADEKLEEEYVILFAAQRKFDEGPGENSPYAGNQIEKMIGSCTLEGKKEKRAPKASYAFMAFNLWQKINHLKVNRRGSERFLTEEERRRIADLAWKKEKLTYGSLRKVLSLDPEDRFVGLRYDLKKGKAENLEEPVSEAEKRSFSWVKDYHSIRKALDKVEKNRILKLSHEQLDTIATAFSVYKNEETIEKYLEEGGIGKADGEALLERLSGFSKFGHLSLKACYKLLPFLEKGEVYSRACELAGYDFSKSSLENIDDIPNPVVKRSISQTLKVINAIILRYGNPVEVHIELARELARSFRDRKKMEKGMQENQAKNEKIRQRLISEFGVLRPKGMDIVKFKLCEEQNGECAYSQKHFDMEKLLKDPSYAEVDHIIPYSRSFDDSYNNKVLVLTKENREKRNRIPMEYLADAPERKNRFIHWVKSTIRNSRKRENLLRTDYTATTENEWKRRNLQDTQYISKYLYNYLRHHLVLAKGYTERKRRIIPVNGAVTAYFRKRLGINKIRENGDLHHAVDAVIIACATQGIVNKVSRYSKSRELWDYEVDMETGEVLQKKNKNTKDVFPEPWLNFRY

SEQ ID NO: 957 - protein, 1081 aa, unidentified; identical to SEQ ID NO: 940
  REGION 1..1081: note = Description of Unknown: uncultivated organism with predicted taxonomy: Megasphaera sp. AM44-1BH
  REGION 1..1081: note = MG15-30 effector

SEQ ID NO: 958 - protein, 1082 aa, unidentified
  REGION 1..1082: note = Description of Unknown: uncultivated organism with predicted taxonomy: Dialister
  REGION 1..1082: note = MG15-31 effector
MNYVLGLDVGIASVGWAVLELNEEDNPIRIEGLGARIFDKAEVPKTGASLAAPRRMSRGIRRVIRRRRFRLQRVRSYLKRHNILPAEKVDHLYDVPSAIDIYELRKRALTEKVTAEEWARLLIFFAKHRGFKSNRKKASGDADEGEMLKAIAANAEILKNYRTVGEMLCDNEKFRKRKRNRDGAYNFTVSRAMLMEEIHTLFEIQRNLGQKFADEKLEEEYVILFAAQRKFDEGPGEKSPYAGNQIEKMIGSCTLEGKKEKRAPKASYAFMAFNLWQKINHLKVNRRGSERFLTEEERRRIADLAWKKEKLTYGSLRKVLSLDPEDRFVGLRYDLKKGKAENLEEPVSEAEKRSFSWVKDYHSIRKALDKVEKNRILKLSHEQLDTIATAFSVYKNEETIEQYLEEGGIGKADREALLERLSGFSKFGHLSLKACYKLLPFLEKGEVYSRACELAGYDFSKSSLENIDDIPNPVVKRSISQTLKVINAIILRYGNPVEVHIELARELARSFRDRKKMEKGMQENQAKNEKIRQRLISEFGVLRPKGMDIVKFKLCEEQNGECAYSQKHFDMEKLLKDPSYAEVDHIIPYSRSFDDSYNNKVLVLTKENREKRNRIPMEYLADAPERKNRFIHWVKRTIRNSRKRENLLRTDYTATTENEWKRRNLQDTQYISKYLYNYLRHHLVLAKGYTERKRRIIPVNGAVTAYFRKRLGINKIRENGDLHHAVDAVIIACATQGIINKVSRYSKSRELWDYEVDMETGEVLQKKNKNTKDVFPEPWLNFRYELEQKVRVRPLNIPETADITEMEEPFVSHMPNRKIHGPAHKETIRSGRLKEEGYTISKTALIDLKLTEDKEEIKGYYNKESDRLLYEALKKQLQRYGGKAKEAFKEPFHKPKADGTPGPIVNKVKIMEKSTMLIPVNGGKGLASNGNMVRIDVFRAEEKGKKKYYFIPVYVADTVKEELPNRAVLAHKPYEAWKIMKEEDFIFSLYPNDLIFVDAGKEIPFKAALKGSTLDPEKKASRFLMYYKGADIATGSISGVNHDETYKARGVGIQSLREIKKCCIDVLGNISFASKEKRQTFR

SEQ ID NO: 959 - protein, 1082 aa, unidentified; identical to SEQ ID NO: 953
  REGION 1..1082: note = Description of Unknown: uncultivated organism with predicted taxonomy: Veillonellales
  REGION 1..1082: note = MG15-32 effector

SEQ ID NO: 960 - protein, 1081 aa, unidentified
  REGION 1..1081: note = Description of Unknown: uncultivated organism with predicted taxonomy: Dialister
  REGION 1..1081: note = MG15-33 effector
MNYVLGLDVGIASVGWAVLELNEEDNPIRIEGLGARIFDKAEVPKTGASLAAPRRMSRGIRRVIRRRRFRLQRVRSYFKRHNILPAEKVDHLYDVPSAIDIYELRKRALTEKVTAEEWARLLIFFAKHRGFKSNRKKASGDADEGEMLKAIAANAEILKNYRTVGEMLCDNEKFRKRKRNRDGAYNFTVSRAMLMEEIHTLFEIQRNLGQKFADEKIEEEYVILFAAQRKFDEGPGENSPYAGNQIEKMIGSCTLEGKKEKRAPKASYAFMAFNLWQKINHLKINRRGSERFLTEEERRRIADLAWKKEKLTYGSLREVLFLDPEDRFVGLRYDLKKEKEEDLEEPVSEAEKMSFSWVKDYHSIRKALNKVEKNRILKLSHEQLDTIATAFSVYKNEETIEKYLEEGGIEKADREALLERLSGFSKFGHLSLKACYKILPFLEKGEVYSRACERAGYDFSKSSLENIDDIPNPVVKRSISQTLKVINAIILRYGNPVEVHIELARELARNFRDRKKMEKGMQENQAKNEKIRQRLISEFGVLRPKGMDIVKFKLCEEQNGECAYSQKHFDMEKLLRDPSYAEVDHIIPYSRSFDDSYNNKVLVLTKENREKRNRIPMEYLADAPERKNRFIHWVKSTIRNSRKRENLLRIDYTETTENEWKRRNLQDTQYISKYLYNYLRHHLVLAKGYTERKRRIIPVNGAVTAYFRKRLGINKIRENGDLHHAVDAVIIACATQGIVNKVSRYSKSRELWDYEVDMETGEVLQKKNKNTKDVFPEPWLNFRYELEQKVRVRPLDIPKTADITEMEEPFVSHMPNRKIHGPAHKETIRSGRLKEEGYTISKTALIDLKLTEDKEEIKGYYNKESDRLLYEALKKQLQRYGGKAKEAFKEPFHKPKADGTPGPIVNKVKIMEKSTMLIPVNGGKGLASNGNMVRIDVFRVEEKGKKKYYFIPVYVADTVKEELPNRAVLAHKPYEAWKIMKEEDFIFSLYPNDLIFVDAGKGIPFKAALKGSTLDPEKKASRFLMYYKGADIAGGTINGVNHDSTYGIRIGLQRLKGIRKCRIDVLGNISLVGKEKRKTFR

SEQ ID NO: 961 - protein, 1081 aa, unidentified; identical to SEQ ID NO: 951
  REGION 1..1081: note = Description of Unknown: uncultivated organism with predicted taxonomy: Megasphaera
  REGION 1..1081: note = MG15-34 effector

SEQ ID NO: 962 - protein, 1084 aa, unidentified
  REGION 1..1084: note = Description of Unknown: uncultivated organism with predicted taxonomy: Megasphaera
  REGION 1..1084: note = MG15-35 effector
MNYVLGLDIGITSVGWAVLELDTHDEPIRIVDLNSRIFEKAEVPKTGESLAAPRRMARSARRLTRRRRFRLHRVRRYLIRNRILDARQVEELYVDSIGKTDIYELRYQALSQPVSNSDWARLLIFFAKHRGFKSNRKHISGSGDEGQMLNAITENQEILKNYRTVGEMLYKNEKFKACKRNKGGSYTFTVSRAMLADEIHTLFDVQRNLGQAYASEKLKEEYMELFSAQRNFDKGPGINSPYSGNQIEKMIGSCTFEDGEKRAPKASYAFMAFNVWQKINHLRVTCEGTYRFLSQTEKETLAALAWKKENITFKDIRRELKLDDTVRFLDVNYNLDKYKEEAEKKVKFSWVKEYHAIRKALDKVKKDRISELSHEQIDTIAYAFTVYKNDEAIKRYLLEHAIELADAEALLENISGFSKFGHLSVKACYKLLEPLQQGHVYTKACEIAGYDPQKSNQENINDIPNPVVKRALSQALKVIKAIIRQYGCPPVEIHIELARELAKSAKERTELEKAMKDNQSRNEKIKTKLHELNVMQPTGLDIVKYKLYKQQQGDCAYSQKKFDVNRLLHDPTYAEVDHIIPYSRSFDDTYRNKVLVLTKENRDKGNRTPMEYFQDKPERKEAFINWVKRTISDGKKRNNLLRVNYSADAEKEWKDRHLQDTQYISRYLYNYLKRHIELKEGYTDRKRRIIPVNGAVTAYVRKRLGISKIRENGDLHHAVDAVIIACVTQGVVNKISRYSKIKELRQFMTADGTIVDQETGEVLQTANPRKTDPFPEPWPKFRQELEARVSDNPAEAIAALRLPTYEGIVTISAPFVSRMPNRKVHGPAHMETIRSAKMQQDGYTMVKTELTNLKLKDGEIEGYYNPSSDKILYDALKRRLEQFGGDGNKAFKDPFYKPKSDGTPGPEVKKVKIMTKSSLNVAVNQGKGVADNGSMVRIDVFGVEERGKNAYYFVPIYVADTVRETLPNKAVVPNKSYNDWKFMRDEDFLFSLYPNDLIYIESLSPVSFHTVKGCTLVPKIERKEMLLYYRKAGISTASITVLNHDNTYVKESLGIKTIGKLQKCTVDILGNVHYVQKEKRLGFK

SEQ ID NO: 963 - protein, 1081 aa, unidentified; identical to SEQ ID NO: 952
  REGION 1..1081: note = Description of Unknown: uncultivated organism with predicted taxonomy: Dialister
  REGION 1..1081: note = MG15-36 effector

SEQ ID NO: 964 - protein, 1081 aa, unidentified; identical to SEQ ID NO: 952
  REGION 1..1081: note = Description of Unknown: uncultivated organism with predicted taxonomy: Dialister
  REGION 1..1081: note = MG15-37 effector

SEQ ID NO: 965 - protein, 1112 aa, unidentified
  REGION 1..1112: note = Description of Unknown: uncultivated organism with predicted taxonomy: Selenomonas bovis
  REGION 1..1112: note = MG15-38 effector
MDRRYALGLDIGIASVGWAVLAFDDADNPYRIINMGTRIFDAAEHPKDGASLAAPRREARSARRRLRRRHHRIERTRKLLIREGLLTKDALQHLFDAPPEKDVYTLRFEGLECCLDGEEWARVLLFFSKHRGFRSNRIVDDEAGDEGKVLSAIRQNEERLQGYRTVGEMLARDPKFADRKRNKAEDYQLTVSRTMLEKEICTLFDAQRQWKNPHASEDFEQEYLEIFSSQRHFDEGPGGRSPYGGDQIEKMIGRCTLEPKEKRAPKASYSFQRFSLLQNINHLRIKSQNTERSLSDEERKAVEALCWKSPSVTYYKIRQEVNLPDDVRFAGLYYDKAPEEVEKKTKFSYTVPYHEIRKVLDKWKKGGIQELDVHQLDTIGYAFTVYKNDDRIHRYLCGHGISDAIAEVLVQNLKSFQKFGHISLKACQKLIPFLEQGMVYSDACKAAGYAAPDAEPKKFLSGGMEEIREIPNPVVRRSLSQTVKIINAVIREYGSPVEVHIELAREMARSRQDRDKMEKDIKNNRARNEAIKKELQELGLRNPKGQDIIKWRLYKEQDGFCAYSQKQFDVERLLHDGSYAEIDHILPYSRSFDDSYHNKVLVMAAENRQKGNRTPLEYMAGEEERIHAFRIWVNSRIHDFRKRQNLLREHFDKESTEKDWKERNLNDTKYISRFIYNLIRQHLQFAPFRTDRKQHIISVNGAVTSYIRKRLGIPKIREDGDLHHAVDAVVIASITQGTIQKVTRYSREKETLYHCDSKGRLIDTSTGEILSPEEHQRRLAEKFPEPWPCFRKEIEARISHHPAENLRLLHLPTYTEEELAELEKPIFVSRMPNHKVRGAAHEKSLRSPRLQEDGIIVYSTPLTKLKLGKDNNSILNYYNPDSDRLLYTALLQRLQKFQGDAEKAFKEPFHKPKADGTLGPVVRKVKVTDKSNLNVSLNHGHSIAKNDSDGGMVRVDVYYIPDGKKHGYYLVPVYVSDVVRKTLPNKAIVADTPYAEWPEMREEDFLFSLYKNDLIHLRKKKPAKMKVIQKESTLQKEIAVSEGNAYYISTDSATASIKIINHDNTYYTKGLGVKTLLSLEKMQVDVLGNITPAPREPRQDFSAMKRDRFARK

SEQ ID NO: 966 - protein, 1082 aa, unidentified; identical to SEQ ID NO: 953
  REGION 1..1082: note = Description of Unknown: uncultivated organism with predicted taxonomy: Dialister
  REGION 1..1082: note = MG15-39 effector

SEQ ID NO: 967 - protein, 1082 aa, unidentified; identical to SEQ ID NO: 953
  REGION 1..1082: note = Description of Unknown: uncultivated organism with predicted taxonomy: Dialister
  REGION 1..1082: note = MG15-40 effector

SEQ ID NO: 968 - protein, 1089 aa, unidentified
  REGION 1..1089: note = Description of Unknown: uncultivated organism with predicted taxonomy: Megasphaera sp. AM44-1BH
  REGION 1..1089: note = MG15-41 effector
MHYVLGLDIGITSVGWAVLELNIQDEPIRIVDLNSRIFERAEIPKTGESLAAPRRVARSSRRRTRRRRFRLYRIRRYLLRNQIITPSDMKILYDNCGDMKDIYTLRHEALDRAVTSKEWARLLIFFGKHRGFKSNRKSIIASGDEGVMLQAVKENQELLKAYRTVGDMLYSDTKFANAKRNKGESYTFTVSRRMLTDEIQTLFCIQRDLGQSFATPSLEDEYLSIFLAQRNFDEGPGGNSPYSGNQIEKMIGNCAFEKNEKRAPKASYAFMAFNLLQKINHLRIERKGKQRFLTQEERNNIAGLAWKKENLTFKDIRTAISLSGDELFQDVHYASEVSLEECEKKTKFNLVRSYHAMRKALDAVEKNRIQKLSHEQLDTIAYAFTVYKNDDKISSYLLAHSIEQQDVEALLAQLRTFNKFGHLSIKACYRILPYLKEGKTYAAACTSAGYDFRNSSLEEIKDIPNPVVKRAVSQTLKVIRAIIKKYGCEPVEIHIELARELARSFQNRVKMQKSMEENQSRNEKIKERLVQEYNILSPTGMDIVKFKLYEQQQGACAYSQKMFNIYQLFHDPSYAEVDHIIPYSRSFDDSYRNKVLVFTAENRNKGNRTPMEYLKNQSERKEQFITWVKNTIRDYKKRNNLLRETYTSEDEADWKRRHLQDTQYLSTYLYNYLCHVMKLTPGCTERKRRIIAVNGAVTAYVRKRLGINKIRSNGDLHHAVDAVIIACVTQGVINRISRYSKIKELQNFQTNDGQVVDSVTGEILTLKHVHKKDPFPEPWPHFRQELEARVGKQPQEAIAALHLPTYKNVESIYTPFVSRMPNRKVHGPAHLETIRSSKLLYKGITIVKTSLTNLKLKDGEIQGYYNPDSDRILYQALKRRLIQFDGEGRAAFKEPFYKPRSDGSPGPMVKKVKIMTNSSLNVLLNHGRGVADNGAMVRIDVFYVSEKGKKAYYFVPIYVADTVKKELPHKAVVAYKPCEEWKNVDDDDFIFSLYPNDLVYVRHKKSILLKASKRSTLSPQIKIKEGLFYYKGANISVGSISIINNDDTYGQHSLGIKTLECMKKANVDILGNVTFVGRENRQPFQLSKK

SEQ ID NO: 969 - protein, 898 aa, unidentified
  REGION 1..898: note = Description of Unknown: uncultivated organism with predicted taxonomy: Veillonellales
  REGION 1..898: note = MG15-42 effector
GEEKRALFEGQPQWGQAYAAEELEKEYIEIFGAQRNFDEGPGAGSPYGGDQIEKMIGTCTFEPMEKRAPKVSYGFMAFNLWQKINHLGLIANGVAPSFTAEEKQQIADLAWSKNNLHLQHIRKELRIPEDTIFSGVNYGIRKQDTEWAKQLEEVEKKQKFNWLTPYHEMRVALDAVKKHRITELSPDQIDTIAYAFTVFKNDEKITSYLRENGIEEDDIRALLSKVKGFSKFGHLSLKACYKILPYLEEGNIYSKACELAGYDFRSSSQEQLEDIPNPVVKRAISQTLKVIKAIVRRYGNPVEVHIELARELARNFEDRRTMQKSMEDNQKRNEEIKERLVKEYNVLQPTGMDIVKFKLYEEQQGACAYSQKMFDVNRVLHDPSYSEVDHIIPYSRSFDDSYNNKVLVLTKENRDKGNRTPMEYLKDNPVRIDAFTTWVNAIVRNSRKRANLLKSSFTEDAEQEWKRRHLQDTQYISRFLYNYLRQNLPLKEGFTNRKRRIIPVNGAVTSYVRKRLGIAKIRENGDLHHAVDAVIIACVTQGVIKRVSEYSKSRELWLYQLDDGTVIDGETGEVMTGQRGHKQEPFPEPWPEFRHELEDRVSENPPELLRHLQLPAYEGIDIETIKTPFVSRMPNRKVKGQAHEETIRSGRLKYEGYTVTKVDLKNLKLKNGEIEGYYNPDSDRLLYNALKQQLEVYDGKGDKAFAEPFHKPKADGTPGPIVKKVKIMTKSNLNVPVNGGKGVADNGSMVRIDVFGVEERGKMAYRFIPIYVSDTVKRILPNKAVTRDRGYKDWDIMDDKDFLFSLYPNDLIYVESKRDISLKAAKGSTLAKERKQKEALVYYRGADIATASIGVVNDDNTYSMRGLGIKTLQSIRKCIVDVLGNVAFVTKEKRQGFR

SEQ ID NO: 970 - protein, 1082 aa, unidentified
  REGION 1..1082: note = Description of Unknown: uncultivated organism with predicted taxonomy: Veillonellales
  REGION 1..1082: note = MG15-43 effector
MNYVLGLDVGIASVGWAVLELNEEDNPIRIEGLGARIFDKAEVPKTGASLAAPRRMSRGIRRVIRRRRFRLQRVRSYLKRHNILPAEKVDHLYDVPSAIDIYELRKRALTEKVTAEEWARLLIFFAKHRGFKSNRKKASGDADEGEMLKAIAANAEILKNYRTVGEMLCDNEKFRKRKRNRDGAYNFTVSRAMLMEEIHTLFEIQRNLGQKFADEKIEEEYVILFAAQRKFDEGPGENSPYAGNQIEKMIGSCTLEGKKEKRAPKASYAFMAFNLWQKINHLKINRRGSERFLTEEERRRIADLAWKKEKLTYGSLREVLFLDPEDRFVGLRYDLKKEKEEDLEEPVSEAEKMSFSWVKDYHSIRKALDKVEKNRILKLSHEQLDTIATAFSVYKNEETIEKYLEEGGIEKADREALLERLSGFSKFGHLSLKACYKILPFLEKGEVYSRACERAGYDFSKSSLENIDDIPNPVVKRSISQTLKVINAIILRYGNPVEVHIELARELARNFRDRKKMEKGMQENQAKNEKIRQRLISEFGVLRPKGMDIVKFKLCEEQNGECAYSQKHFDMEKLLRDPSYAEVDHIIPYSRSFDDSYNNKVLVLTKENREKRNRIPMEYLADAPERKNRFIHWVKSTIRNSRKRENLLRIDYTETTENEWKRRNLQDTQYISKYLYNYLRHHLVLAKGYTERKRRIIPVNGAVTAYFRKRLGINKIRENGDLHHAVDAVIIACATQGIVNKVSRYSKSRELWDYEVDMETGEVLQKKNKNTKDVFPEPWLNFRYELEQKVRIRPLDIPKTADITEMEEPFVSHMPNRKIHGPAHKETIRSGRLKEEGYTISKTALIDLKLTEDKEEIKGYYNKESDRLLYEALKKQLQRYGGKAKEAFKEPFHKPKADGTPGPIVNKVKIMEKSTMLIPVNGGKGLASNGNMVRIDVFRVEEKGKKKYYFIPVYVADTVKEELPNRAVLAHKPYEAWKIMKEEDFIFSLYPNDLIFVDAGKGIPFKAALKGSTLDPEKKASRFLMYYKGADIATGSISGVNHDETYKARGIGIQSLREIKKCCIDVLGNISFASKEKRQTFR

SEQ ID NO: 971 - protein, 898 aa, unidentified; identical to SEQ ID NO: 969
  REGION 1..898: note = Description of Unknown: uncultivated organism with predicted taxonomy: Veillonellales
  REGION 1..898: note = MG15-44 effector

SEQ ID NO: 972 - protein, 1112 aa, unidentified; identical to SEQ ID NO: 965
  REGION 1..1112: note = Description of Unknown: uncultivated organism with predicted taxonomy: Selenomonas bovis
  REGION 1..1112: note = MG15-45 effector

SEQ ID NO: 973 - protein, 1081 aa, unidentified
  REGION 1..1081: note = Description of Unknown: uncultivated organism with predicted taxonomy: Dialister
  REGION 1..1081: note = MG15-46 effector
MNYVLGLDVGIASVGWAVLELNEEDNPIRIEGLGARIFDKAEVPKTGASLAAPRRMSRGIRRVIRRRRFRLQRVRSYLKRHNILPAEKVDHLYDVPSAIDIYELRKRALTEKVTAEEWARLLIFFAKHRGFKSNRKKASGDADEGEMLKAIAANAELLKNYRTVGEMLCDNEKFRKRKRNRDGAYNFTVSRAMLIEEIHTLFEIQRNLGQKFADEKLEEEYVILFAAQRKFDEGPGENSPYAGNQIEKMIGSCTLEGKKEKRAPKASYAFMAFNLWQKINHLKINRRGSERFLTEEERRRIADLAWKKEKLTYGSLREVLFLDPEDRFVGLRYDLKKEKEENLEEPVSEAEKMSFSWVKDYHSIRKALDKVEKNRILKLSHEQLDTIATAFSVYKNEETIEKYLEEGGIEKADREALLERLSGFSKFGHLSLKACYKILPFLEKGEVYSRACERAGYDFRKSSLENINDIPNPVVKRSISQTLKVINAIILRYGNPVEVHIELARELAKNFRDRKKMEKGMQENQAKNEKIRQRLMSEFGVLRPKGMDIVKFKLCEEQNGECAYSQKHFDMEKLLRDPSYAEVDHIIPYSRSFDDSYNNKVLVLTKENREKRNRIPMEYLADATERKNRFIHWVKSTIRNSRKRENLLRTDYTETTENEWKRRNLQDTQYISKYLYNYLRHHLVPAKGYTERKRRIIPVNGAVTAYIRKRLGINKIRENGDLHHAVDAVIIACATQGIVNKVSRYSKSRELWDYEVDMETGEVLQKKNENRKDIFPEPWLNFRYELEQKVRVRPLDIPETADITEMEEPFVSHMPNRKIHGPAHKETIRSGRLKEEGYTISKTALTDLKLTEDKEEIKGYYNKESDRLLYEALKKQLQRYSGKAKEAFKEPFHKPKADGTPGPIVNKVKIMEKSTMPVPVNGGKGLASNGNMVRIDVFRVEEKGKKKYYFIPVYVADTVKEELPNRAVLAHKPYEAWKIMKEEDFIFSLYPNDLIFVDAGKEIPFKAALKGSTLDPEKKASRFLMYYKGADIAGGTINGVNHDSTYGIRIGLQRLKGIRKCRIDVLGNISLVGKEKRKTFR

SEQ ID NO: 974 - protein, 1078 aa, unidentified
  REGION 1..1078: note = Description of Unknown: uncultivated organism with predicted taxonomy: Dialister
  REGION 1..1078: note = MG15-47 effector
MNYVLGLDVGITSCGWAVLELNHEDEPVRIVDLNSRIFDKAEAGNGDSLAAPRRMARGIRRLTRRRKFRLHRVRGFLVRHHILTKEEIENLYTNPHKTDIYELRYRALTEKVSPSDWARLLIFFAKHRGFQSNRKNEKSGEDGLMLAAIGENKKVLENYRSVGDMLYSDEKFRDCKRNKGGTYRFTVSRSMLKEEVQTLFKTQRELGQTFAGEDLEDEYISIFSAQRNFDEGPGANSPYAGDQIEKMIGDCTFEDGKNGRPPQKRAPKASYAFMAFNLWQKINHIRVNSKGIERSLETEEKNKIAGLAWTKENITYYDLRQITGLDEETRFSGVTYPLDSTTEEAEKKVKFSWVKPYHAMRRALDKVEKNYIQKLSREEIDAIAYAFTVYKNDKKIRTALAEKGIEDNVADVLITHLDGFSKFGHLSEYACYKLLPFLEKGEEYYKACDSAGLTESPAKKIKDITNPVVKRAVTQTMKVIKAVQRKYGNPVEVHIELARELARSFKDRAAMDHRMKENYAKNEKIKERLSKEFHIMNPRGQDIVKWKLYEQQQGCCAYSQKPFDVDRLLHDGNYAEVDHILPYSRSFDDTYRNKVLVLEKENRDKGNRTPMEYLADKPERKEKFIAWVKTTIKDSKKREHLLRVKYGRDEEAEWKQRHLQDTQYISRFLYNYLRNTLELTPGYTDRKRRIIPVNGAVTGYIRKRLGIRKIRENGDLHHAVDAVVIAVTTQGMIQKVTRYSQIRENPKLIDKKTGEVLTAKEFHNKDNFPEPWPRFRQELEARVSEDPEEAIRRLRLPAYENVGEIKKPFISRMPRRKVRGAAHEETVRSGKLREDGYTILKTDLSKLKLENGEIKGYYRPESDRLLYEALKKRLEAFGGKGEEAFKEPFYKPKADGTPGPLVKKVKIIEKSSLNVPVHKGEGAAYNKIRIRIDIFGVNEKGKMAYYFVPVYVSDTVKRELPCRAVVQDKSYENWKMMDDKDFLFSLYPNDMIHVVAKRDLSFTAAEGSSLAPKMKTKDAYVYYKGADINGGTITVINHDNSYGIKSMGIKTLLQMEKCEVDILGNISVVKQEKRQGFR

SEQ ID NO: 975 - protein, 1112 aa, unidentified; identical to SEQ ID NO: 965
  REGION 1..1112: note = Description of Unknown: uncultivated organism with predicted taxonomy: Selenomonas bovis
  REGION 1..1112: note = MG15-48 effector

SEQ ID NO: 976 - protein, 1081 aa, unidentified
  REGION 1..1081: note = Description of Unknown: uncultivated organism with predicted taxonomy: Dialister
  REGION 1..1081: note = MG15-49 effector
MNYVLGLDVGIASVGWAVLELNEEDNPIRIEGLGARIFDKAEVPKTGASLAAPRRMSRGIRRVIRRRRFRLQRVRSYLKRHNILPAEKVDHLYDVPSAIDIYELRKRALTEKVTAEEWARLLIFFAKHRGFKSNRKKASGDADEGEMLKAIAANAELLKNYRTVGEMLCDNEKFRKRKRNRDGAYNFTVSRAMLIEEIHTLFEIQRNLGQKFADERLEEEYVILFVAQRKFDEGPGENSPYAGNQIEKMIGSCTLEGKKEKRAPKASYAFMAFNLWQKINHLKINRRGSERFLTEEERRRIADLAWKKEKLTYGSLREVLFLDPEDRFVGLRYDLKKEKEEDLEEPVSEAEKMSFSWVKDYHSIRKALDKVEKNRILKLSHEQLDTIATAFSVYKNEETIEKYLEEGGIEKADREALLERLSSFSKFGHLSLKACYKILPFLEKGEVYSRACERAGYDFRKSSLENINDIPNPVVKRSISQTLKVINAIILRYGNPVEVHIELARELAKNFRDRKKMEKGMQENQAKNEKIRQRLMSEFGVLCPKGMDIVKFKLCEEQNGECAYSQKHFDMEKLLKDPSYAEVDHIIPYSRSFDDSYNNKVLVLTKENREKRNRIPMEYLADAPEQKNRFIHWVKSTIRNSRKRENLLRTDYTAATENEWKRRNLQDTQYISKYLYNYLLENLELAKGYTERKRRIIPVNGAVTAYFRKRLGINKIRENGDLHHAVDAVIIACATQGIVNKVSRYSKSRELWDYEVDMETGEVLQKKNENRKDIFPEPWLNFRYELEQKVRVRPLDIPETADITEMEEPFVSHMPNRKIHGPAHKETIRSGRLKEEGYTISKTALTDLKLTEDKEEIKGYYNKESDRLLYEALKKQLRRYGGKAKEAFKEPFHKPKADGTPGPIVNKVKIMEKSTMPVPVNGGKGLASNGNMVRIDVFRVEEKGKKKYYFIPVYVADTVKEELPNRAVLAHKPYEAWKIMKEEDFIFSLYPNDLIFVDAGKEIPFKAALKGSTLDPEKKASRFLMYYKGADIAGGTINGVNHDSTYGIRIGLQRLKGIRKCRIDVLGNISLVGKEKRKTFR

SEQ ID NO: 977 - protein, 1082 aa, unidentified
  REGION 1..1082: note = Description of Unknown: uncultivated organism with predicted taxonomy: Dialister
  REGION 1..1082: note = MG15-50 effector
MNYVLGLDVGIASVGWAVLELNEEDNPIRIEGLGARIFDKAEVPKTGASLAAPRRMSRGIRRVIRRRRFRLQRVRSYLKRHNILPAEKVDHLYDVPSAIDIYELRKRALTEKVTAEEWARLLIFFAKHRGFKSNRKKASGDADEGEMLKAIAANAEILKNYRTVGEMLCDNEKFRKRKRNRNGAYNFTVSRAMLMEEIHTLFEIQRNLGQKFADEKLEEEYVILFAAQRKFDEGPGENSPYAGNQIEKMIGSCTFEGKKEKRAPKESYAFMAFNLWQKINHLKVNRRGSERFLTEEERRRIADLAWKKEKLTYGSLRKVLSLDPEDRFVGLRYDLKKGKAENLEEPVSEAEKRSFSWVKDYHSIRKALDKVEKNHILKLSHEQLDTIATAFSVYKNEETIEQYLEEGGIGKADREALLERLSGFSKFGHLSLKACYKLLPFLEKGEVYSRACELAGYDFSKSSLENIDDIPNPVVKRSISQTLKVINAIILRYGNPVEVHIELARELARSFRDRKKMEKGMQENQAKNEKIRQRLISEFGVLRPKGMDIVKFKLCEEQNGECAYSQKHFDMEKLLKDPSYAEVDHIIPYSRSFDDSYNNKVLVLTKENREKRNRIPMEYLADAPERKNRFIHWVKSTIRNSRKRENLLRTDYTATTENEWKRRNLQDTQYISKYLYNYLRHHLVLAKGYTERKRRIIPVNGAVTAYFRKRLGINKIRENGDLHHAVDAVIIACATQGIVNKVSRYSKSRELWDYEVDMETGEVLQKKNKNTKDVFPEPWLNFRYELEQKVRVRPLDIPETADITEMEEPFVSHMPNRKIHGPAHKETIRSGRLKEEGYTISKTALIDLKLTEDKEEIKGYYNKESDRLLYEALKKQLQRYGGKAKEAFKEPFHKPKADGTPGPIVNKVKIMEKSTMLIPVNGGKGLASNGNMVRIDVFRAEEKGKKKYYFIPVYVADTVKEELPNRAVLAHKPYEAWKIMKEEDFIFSLYPNDLIFVDAGKEIPFKAALKGSTLDPEKKASRFLMYYKGADIATGSISGVNHDETYKARGVGIQSLREIKKCCIDVLGNISFASKEKRQTFR

SEQ ID NO: 978 - protein, 1082 aa, unidentified; identical to SEQ ID NO: 938
  REGION 1..1082: note = Description of Unknown: uncultivated organism with predicted taxonomy: Dialister
  REGION 1..1082: note = MG15-51 effector

SEQ ID NO: 979 - protein, 1081 aa, unidentified
  REGION 1..1081: note = Description of Unknown: uncultivated organism with predicted taxonomy: Veillonellales
  REGION 1..1081: note = MG15-52 effector
MNYVLGLDVGIASVGWAVLELNEEDNPIRIEGLGARIFDKAEVPKTGASLAAPRRMSRGIRRVIRRRRFRLQRVRSYLKRHNILPAEKVDHLYDVPSAIDIYELRKRALTEKVTAEEWARLLIFFAKHRGFKSNRKKASGDADEGEMLKAIAANAELLKNYRTVGEMLCDNEKFRKRKRNRDGAYNFTVSRAMLIEEIHTLFEIQRNLGQKFADERLEEEYVILFVAQRKFDEGPGENSPYAGNQIEKMIGSCTLEGKKEKRVPKASYAFMAFNLWQKINHLKINRRGSERFLTEEERRRIADLAWKKEKLTYGSLREVLFLDPEDRFVGLRYDLKKEKEEDLEEPVSEAEKMSFSWVKDYHSIRKALDKVEKNRILKLSHEQLDTIATAFSVYKNEETIEKYLEEGGIEKADREALLERLSSFSKFGHLSLKACYKILPFLEKGEVYSRACERAGYDFRKSSLENINDIPNPVVKRSISQTLKVINAIILRYGNPVEVHIELARELAKNFRDRKKMEKGMQENQAKNEKIRQRLMSEFGVLCPKGMDIVKFKLCEEQNGECAYSQKHFDMEKLLKDPSYAEVDHIIPYSRSFDDSYNNKVLVLTKENREKRNRIPMEYLADAPEQKNRFIHWVKSTIRNSRKRENLLRTDYTAATENEWKRRNLQDTQYISKYLYNYLLENLELAKGYTERKRRIIPVNGAVTAYFRKRLGINKIRENGDLHHAVDAVIIACATQGIVNKVSRYSKSRELWDYEVDMETGEVLQKKNENRKDIFPEPWLNFRYELEQKVRVRPLDIPETADITEMEEPFVSHMPNRKIHGPAHKETIRSGRLKEEGYTISKTALTDLKLTEDKEEIKGYYNKESDRLLYEALKKQLRRYGGKAKEAFKEPFHKPKADGTPGPIVNKVKIMEKSTMPVPVNGGKGLASNGNMVRIDVFRVEEKGKKKYYFIPVYVADTVKEELPNRAVLAHKPYEAWKIMKEEDFIFSLYPNDLIFVDAGKEIPFKAALKGSTLDPEKKASRFLMYYKGADIAGGTINGVNHDSTYGIRIGLQRLKGIRKCRIDVLGNISLVGKEKRKTFR

SEQ ID NO: 980 - protein, 1081 aa, unidentified; identical to SEQ ID NO: 952
  REGION 1..1081: note = Description of Unknown: uncultivated organism with predicted taxonomy: Dialister invisus
  REGION 1..1081: note = MG15-53 effector

SEQ ID NO: 981 - protein, 1081 aa, unidentified
  REGION 1..1081: note = Description of Unknown: uncultivated organism with predicted taxonomy: Dialister
  REGION 1..1081: note = MG15-54 effector
MNYVLGLDVGIASVGWAVLELNEEDNPIRIEGLGARIFDKAEVPKTGASLAAPRRMSRGIRRVIRRRRFRLQRVRSYFKRHNILPAEKVDHLYDVPSAIDIYELRKRALTEKVTAEEWARLLIFFAKHRGFKSNRKKASGDADEGEMLKAIAANAEILKNYRTVGEMLCDNEKFRKRKRNRDGAYNFTVSRAMLMEEIHTLFEIQRNLGQKFADEKIEEEYVILFAAQRKFDEGPGENSPYAGNQIEKMIGSCTLEGKKEKRAPKASYAFMAFNLWQKINHLKINRRGSERFLTEEERRRIADLAWKKEKLTYGSLREVLFLDPEDRFVGLRYDLKKEKEEDLEEPVSEAEKMSFSWVKDYHSIRKALDKVEKNRILKLSHEQLDTIATAFSVYKNEETIEKYLEEGGIEKADREALLERLSGFSKFGHLSLKACYKILPFLEKGEVYSRACERAGYDFSKSSLENIDDIPNPVVKRSISQTLKVINAIILRYGNPVEVHIELARELARNFRDRKKMEKGMQENQAKNEKIRQRLISEFGVLRPKGMDIVKFKLCEEQNGECAYSQKHFDMEKLLRDPSYAEVDHIIPYSRSFDDSYNNKVLVLTKENREKRNRIPMEYLADAPERKNRFIHWVKSTIRNSRKRENLLRIDYTETTENEWKRRNLQDTQYISKYLYNYLRHHLVLAKGYTERKRRIIPVNGAVTAYFRKRLGINKIRENGDLHHAVDAVIIACATQGIVNKVSRYSKSRELWDYEVDMETGEVLQKKNKNTKDVFPEPWLNFRYELEQKVRVRPLDIPKTADITEMEEPFVSHMPNRKIHGPAHKETIRSGRLKEEGYTISKTALIDLKLTEDKEEIKGYYNKESDRLLYEALKKQLQRYGGKAKEAFKEPFHKPKADGTPGPIVNKVKIMEKSTMLIPVNGGKGLASNGNMVRIDVFRVEEKGKKKYYFIPVYVADTVKEELPNRAVLAHKPYEAWKIMKEEDFIFSLYPNDLIFVDAGKGIPFKAALKGSTLDPEKKASRFLMYYKGADIAGGTINGVNHDSTYGIRIGLQRLKGIRKCRIDVLGNISLVGKEKRKTFR

SEQ ID NO: 982 - protein, 768 aa, unidentified
  REGION 1..768: note = Description of Unknown: uncultivated organism with predicted taxonomy: Megasphaera stantonii
  REGION 1..768: note = MG15-55 effector
AGGDDGVMLKAIQQNKEVLSKYRSVGEMFDKDEKFSDHKRNKGGSYEFTVARSMLIDEIKLLFEKQRDFGSAFAEKDAEEGYIDLFSAQRNFDEGPGGDSPYGGNQIEKMIGLCTFEGKNGEKRAPKASYAFMATNLWQKINQIRIIEKGTERPLTAEEAGKIYEKAWNKEAMTYKDIRSEIGLGDEASFKGLPYKWTETDKEETEGKTKFSWVKEYHTLRKVLDKVEKNRILQLSHDDIDNIAYIFSVYKNDDKIREALEETDLDSKDIDVLIEKLGTFSKFGHLSLKACYKILPYLEQGMVYSDACTAAGYDFKKSAQGSIADIPNPVVKRAISQTMKVLKAIKQKYGCPPVEIHIEMARELAKSFDERQKMTKSIEENQSHNERIKERLQKEFNVPYPSGQDIVKLKLYEEQNETCAYSQKHIDAAKLFHDPNYAEVDHIIPYSRSFDDTYNNKVLVLTAENRQKGNRTPMEYLSGDEARKKQFVAWVKSDVKKPRKRENLLREKFTADAENDWKVRHLQDTQYISRFMLNYLQNNYELTPGNTNRKRRIIPVNGAVTAYVRKRLGISKIRENGDLHHAVDATVIAAVTQGVVNSVSKYSKRHELQYHVDEHGNCVDLVTGELMGDAFKENHKIKGFPEPWPQFRAELEARVSENAAEAIRILKLPTYSPDEEIKTPFVSRMVRHKTTGQAHEDTVRGKSNVADNVYVKKVALTELKLKDGEIEGYYNPSSDRLLYEALKKRLEQFGGKGKDAFKEPFHKPKADG

SEQ ID NO: 983 - protein, 1112 aa, unidentified; identical to SEQ ID NO: 965
  REGION 1..1112: note = Description of Unknown: uncultivated organism with predicted taxonomy: Selenomonas bovis
  REGION 1..1112: note = MG15-56 effector

SEQ ID NO: 984 - protein, 1081 aa, unidentified; identical to SEQ ID NO: 981
  REGION 1..1081: note = Description of Unknown: uncultivated organism with predicted taxonomy: Dialister
  REGION 1..1081: note = MG15-57 effector

SEQ ID NO: 985 - protein, 1094 aa, unidentified
  REGION 1..1094: note = Description of Unknown: uncultivated organism with predicted taxonomy: Dialister
  REGION 1..1094: note = MG15-58 effector
VDIFSKYFVQRREAIYVLGLDVGIASVGWAVLELNEEDNPIRIEGLGARIFDKAEVPKTGASLAAPRRMSRGIRRVIRRRRFRLQRVRSYLKRHNILPAEKVDHLYDVPSAIDIYELRKRALTEKVTAEEWARLLIFFAKHRGFKSNRKKASGDADEGEMLKAIAANAEILKNYRTVGEMLCDNEKFRKRKRNRDGAYNFTVSRAMLMEEIHTLFEIQRNLGQKFADEKIEEEYVILFAAQRKFDEGPGENSPYAGNQIEKMIGSCTLEGKKEKRAPKASYAFMAFNLWQKINHLKINRRGSERFLTEEERRRIADLAWKKEKLTYGSLREVLFLDPEDRFVGLRYDLKKEKEEDLEEPVSEAEKMSFSWVKDYHSIRKALDKVEKNRILKLSHEQLDTIATAFSVYKNEETIEKYLEEGGIEKADREALLERLSGFSKFGHLSLKACYKILPFLEKGEVYSRACERAGYDFRKSSLENIDDIPNPVVKRSISQTLKVINAIILRYGNPVEVHIELARELAKNFRDRKKMEKGMQENQAKNEKIRQRLMSEFGVLRPKGMDIVKFKLCEEQNGECAYSQKHFDMEKLLRDPSYAEVDHIIPYSRSFDDSYNNKVLVLTKENREKRNRIPMEYLADATERKNRFIHWVKSTIRNSRKRENLLRTDYTETTENEWKRRNLQDTQYISKYLYNYLRHHLVPAKGYTERKRRIIPVNGAVTAYIRKRLGINKIRENGDLHHAVDAVIIACATQGIVNKVSRYSKSRELWDYEVDMETGEVLQKKNENRKDIFPEPWLNFRYELEQKVRVRPLDIPETADITEMEEPFVSHMPNRKIHGPAHKETIRSGRLKEEGYTISKTALTDLKLTEDKEEIKGYYNKESDRLLYEALKKQLQRYSGKAKEAFKEPFHKPKADGTPGPIVNKVKIMEKSTMPVPVNGGKGLASNGNMVRIDVFQAEEKGKKKYYFIPVYVADTVKEELPNRAVLAHKPYEAWKIMKEEDFIFSLYPNDLIFVDAGKEIPFKAALKGSTLDPEKKASRFLMYYKGADIAGGTINGVNHDSTYGIRIGLQRLKGIRKCRIDVLGNISLVGKEKRKTFR

SEQ ID NO: 986 - protein, 1081 aa, unidentified; identical to SEQ ID NO: 973
  REGION 1..1081: note = Description of Unknown: uncultivated organism with predicted taxonomy: Dialister
  REGION 1..1081: note = MG15-59 effector

SEQ ID NO: 987 - protein, 1081 aa, unidentified; identical to SEQ ID NO: 952
  REGION 1..1081: note = Description of Unknown: uncultivated organism with predicted taxonomy: Megasphaera
  REGION 1..1081: note = MG15-60 effector

SEQ ID NO: 988 - protein, 1081 aa, unidentified; identical to SEQ ID NO: 952
  REGION 1..1081: note = Description of Unknown: uncultivated organism with predicted taxonomy: Dialister
  REGION 1..1081: note = MG15-61 effector

SEQ ID NO: 989 - protein, 1103 aa, unidentified; identical to SEQ ID NO: 945
  REGION 1..1103: note = Description of Unknown: uncultivated organism with predicted taxonomy: Megasphaera stantonii
  REGION 1..1103: note = MG15-62 effector

SEQ ID NO: 990 - protein, 1081 aa, unidentified
  REGION 1..1081: note = Description of Unknown: uncultivated organism with predicted taxonomy: Dialister
  REGION 1..1081: note = MG15-63 effector
MNYVLGLDVGIASVGWAVLELNEEDNPIRIEGLGARIFDKAEVPKTGASLAAPRRMSRGIRRVIRRRRFRLQRVRSYLKRHNILPAEKVDHLYDVPSAIDIYELRKRALTEKVTAEEWARLLIFFAKHRGFKSNRKKASGDADEGEMLKAIAANAEILKNYRTVGEMLCDNEKFRKRKRNRDGAYNFTVSRAMLMEEIHTLFEIQRNLGQKFADEKIEEEYVILFAAQRKFDEGPGENSPYAGNQIEKMIGSCTLEGKKEKRAPKASYAFMAFNLWQKINHLKINRRGSERFLTEEERRRIADLAWKKEKLTYGSLREVLFLDPEDRFVGLRYDLKKEKEEDLEEPVSEAEKMSFSWVKDYHSIRKALDKVEKNRILKLSHEQLDTIATAFSVYKNEETIEKYLEEGGIEKADREALLERLSGFSKFGHLSLKACYKILPFLEKGEVYSRACERAGYDFSKSSLENIDDIPNPVVKRSISQTLKVINAIILRYGNPVEVHIELARELARNFRDRKKMEKGMQENQAKNEKIRQRLISEFGVLRPKGMDIVKFKLCEEQNGECAYSQKHFDMEKLLRDPSYAEVDHIIPYSRSFDDSYNNKVLVLTKENREKRNRIPMEYLADAPERKNRLIHWVKSTIRNSRKRENLLRIDYTETTENEWKRRNLQDTQYISKYLYNYLRHHLVLAKGYTERKRRIIPVNGAVTAYFRKRLGINKIRENGDLHHAVDAVIIACATQGIVNKVSRYSKSRELWDYEVDMETGEVLQKKNENRKDIFPEPWLNFRYELEQKVRVRPLDIPETADITEMEEPFVSHMPNRKIHGPAHKETIRSGRLKEEGYTISKTALTDLKLTEDKEEIKGYYNKESDRLLYEALKKQLQRYSGKAKEAFKEPFHKPKADGTPGPIVNKVKIMEKSTMPVPVNGGKGLASNGNMVRIDVFRVEEKGKKKYYFIPVYVADTVKEELPNRAVLAHKPYEAWKIMKEEDFIFSLYPNDLIFVDAGKEIPFKAALKGSTLDPEKKASRFLMYYKGADIAGGTINGVNHDSTYGIRIGLQRLKGIRKCRIDVLGNISLVGKEKRKTFR

SEQ ID NO: 991 - protein, 1081 aa, unidentified
  REGION 1..1081: note = Description of Unknown: uncultivated organism with predicted taxonomy: Megasphaera
  REGION 1..1081: note = MG15-64 effector
MNYVLGLDVGIASVGWAVLELNEEDNPIRIEGLGARIFEKAEVPKTGASLAAPRRMSRGIRRVIRRRRFRLQRVRSYLKRHNILPAEKVDHLYDVPSAIDIYELRKRALTEKVTAEEWARLLIFFAKHRGFKSNRKKASGDADEGEMLKAIAANAEILKNYRTVGEMLCDNEKFRKRKRNRDGAYNFTVSRAMLMEEIHTLFEIQRNLGQKFADEKIEEEYVILFAAQRKFDEGPGENSPYAGNQIEKMIGSCTLEGKKEKRAPKASYAFMAFNLWQKINHLKINRRGSERFLTEEERRRIADLAWKKEKLTYGSLREVLFLDPEDRFVGLRYDLKKEKEENLEEPVSEAEKMSFSWVKDYHSIRKALDKVEKNRILKLSHEQLDTIATAFSVYKNEETIEKYLEEGGIEKADREALLERLSGFSKFGHLSLKACYKILPFLEKGEVYSRACERAGYDFRKSSLENINDIPNPVVKRSISQTLKVINAIILRYGNPVEVHIELARELAKNFRDRKKMEKGMQENQAKNEKIRQRLMSEFGVLRPKGMDIVKFKLCEEQNGECAYSQKHFDMEKLLRDPSYAEVDHIIPYSRSFDDSYNNKVLVLTKENREKRNRIPMEYLADATERKNRFIHWVKSTIRNSRKRENLLRTDYTETTENEWKRRNLQDTQYISKYLYNYLRHHLVPAKGYTERKRRIIPVNGAVTAYIRKRLGINKIRENGDLHHAVDAVIIACATQGIVNKVSRYSKSRELWDYEVDMETGEVLQKKNENRKDIFPEPWLNFRYELEQKVRVRPLDIPETADITEMEEPFVSHMPNRKIHGPAHKETIRSGRLKEEGYTISKTALTDLKLTEDKEEIKGYYNKESDRLLYEALKKQLQRYSGKAKEAFKEPFHKPKADGTPGPIVNKVKIMEKSTMPVPVNGGKGLASNGNMVRIDVFRVEEKGKKKYYFIPVYVADTVKEELPNRAVLAHKPYEAWKIMKEEDFIFSLYPNDLIFVDAGKEIPFKAALKGSTLDPEKKASRFLMYYKGADIAGGTINGVNHDSTYGIRIGLQRLKGIRKCRIDVLGNISLVGKEKRKTFR

SEQ ID NO: 992 - protein, 1082 aa, unidentified; identical to SEQ ID NO: 955
  REGION 1..1082: note = Description of Unknown: uncultivated organism with predicted taxonomy: Dialister
  REGION 1..1082: note = MG15-65 effector

SEQ ID NO: 993 - protein, 1103 aa, unidentified
  REGION 1..1103: note = Description of Unknown: uncultivated organism with predicted taxonomy: Megasphaera micronuciformis
  REGION 1..1103: note = MG15-66 effector
MDTKELKYVVGLDIGITSVGWATLLLDSQDEPVRILDLNSRIFDKAEVPKTGASLAAPRRMARGVRRRLRRRKFRLHRVRQYILRHHILDKAGLECLYKPKTDIDIFALRTAGLDRLLEPEEWARILLYMAKHRGFKSNRKSAAVAGGDDGVMLDAIRKNKEVLSKYRSVGEMFDKDEKFSAHKRNKGGSYEFTVARSMLEDEIKLLFEKQRDFGSAFAEKDAEEEYIELFSAQRNFDEGPGGDSPYGGNQIEKMIGLCTFEGKNGEKRAPKASYAFMATNLWQKINQIRIIEKGTERPLTAEEAGKIDEKAWKKEAMTYKDIRSEISLGDEAYFKGLSYKWTEADKEETESKVKFSLVKEYHTLRKVLDRVEKNRILQLSHDDIDNIAYIFSVYKNDDKIREALEETDLDSKDIDVLIEHLGTFSKFGHLSLKACYKILPYLEQGMVYSDACTAAGYDFRKSAQGSIADIPNPVVKRAISQTMKVLKAIKQKYGCPPVEIHIEMARELAKSFDERQKMTKSIEENQSHNERIKERLQKEFNVPYPSGQDIVKLKLYEEQNETCAYSQKHIDAAKLFHDPNYAEVDHIIPYSRSFDDTYNNKVLVLTAENRQKGNRTPMEYLSGDEARKKQFVAWVKSDIKKPRKRENLLREKFTADAENDWKARHLQDTQYISRFMLNYLQNNYELTPGNTDRKRRIIPVNGAVTAYVRKRLGISKIRENGDLHHAVDAAVIAAVTQGVVNSVSKYSKRHELQYHVDEHGNCVDLVTGELMGDAFKENHKIKGFPEPWPQFRAELEARVSENAAEAIRILKLPTYSPDEEIKTPFVSRMVRHKTTGQAHEDTVRGKSNVADNVYVKKVALTELKLKDGEIEGYYNPSSDRILYEALKKRLEQFGGKGKDAFKEPFHKPKSDGSPGPIVKKCKVLDKINLAVQVHGGNGATSNANGSMIRVDIFKVKEKNDKSSYYAVPIYVADTVKSELPKKAVCQKPYDEWPEMKEADFAFSLYPNDVIYIGGKELKMNAVLGCTLETTRSMQDVNLYFKGMDISTGAIQVVNHDGTYKQRSLGIKQLPLIEKCEVSVLGDLVKAQYRPRETFKHKAQRSK

SEQ ID NO: 994 - protein, 1053 aa, unidentified
  REGION 1..1053: note = Description of Unknown: uncultivated organism with predicted taxonomy: Megasphaera stantonii
  REGION 1..1053: note = MG15-67 effector
APRRMARGVRRRLRRRKFRLHRVRQYILRHHILDKAGLECLYKPKMDIDIFALRTAGLDRLLEPEEWARILLYMAKHRGFKSNRKSTAVAGGDDGIMLKAIQQNKEVLSKYRSVGEMFDKDEKFSDHKRNKGGSYEFTVARSMLVDEIKLLFEKQRDFGLAFAEKDAEEEYIELFSAQRNFDEGPGGDSPYGGNQIEKMIGLCTFEGKNGEKRAPKASYAFMATNLWQKINQIRIIEKGTERPLTAEEAGKIDEKAWKKEAMTYKDIRSEISLGDEASFKGLPYKWTETDKEETESKAKFSWVKEYHTLRKVLDKVEKNRILQLSHDDIDNIAYIFSVYKNDDKIREALEGTHLDSKDIDVLIENLGTFSKFGHLSLKACYNILPYLEQGMVYSDACTAAGYDFRKSAQGSIADIPNPVVKRAISQTMKVLKAIKQKYGCPPVEIHIEMARELAKSFDERQKMAKSIEENQSHNERIKERLQKEFNVPYPSGQDIVKLKLYEEQNETCAYSQKHMDAHRLFHEDNYAEVDHIIPYSRSFDDTYNNKVLVLTAENRQKGNRTPMEYLSGDEARKKQFVAWVKSDIKKPRKRENLLREKFTTDAENDWKIRHLQDTQYISRFMLNYLQNNYELTPGNTDRKRRIIPVNGAVTAYVRKRLGISKIRENGDLHHAVDAAVIAAVTQGVVNSVSKYSKRHELQYHVDEHGNCVDLVTGELMGDAFKENHKIKGFPEPWPQFRAELEARVSENAAEAIRILKLPTYSPDEEIKTPFVSRMVRHKTTGQAHEDTVRGKSNVADNVYVKKVALTELKLKDGEIEGYYNPSSDRLLYEALKKRLEQFGGKGKDAFKEPFHKPKSDGSPGPIVKKCKVLDKINLAVQVHGGKGITKNAGGSMVRVDVFKVKKSNGGHQYYLVPIYVADTVKERLPNRAVMAHKEYDEWKIVDDKDFVFSLYPNDLLFIGGKEIKLNGTGGDTLHQGIMVQNVYLYYRGLNIAVGTISVEDHDSKYIQESLGVGRVPVLEKYEVSVLGDLIKAQYRPRETFKHKAQRTKDQVNV

SEQ ID NO: 995 - protein, 1081 aa, unidentified
  REGION 1..1081: note = Description of Unknown: uncultivated organism with predicted taxonomy: Veillonellaceae bacterium DNF00626
  REGION 1..1081: note = MG15-68 effector
MNYVLGLDVGIASVGWAVLELDEKDEPIRIIDLSSRIFDKAEVPRTGASLAQARRIARGVRRRLRRRRFRLHRVRSYLIRQSILTKEELQNIYHCSHEESIYELRYKGLSEKLSATNWGRLLLFFAKHRGFRSNRKNDQSKEDGLMLKAISENEELLKKYRTVGEMIYSDEKFKEYKRNKGGNYQFTVSRSMLIDEIKMLFETQRKLGQFFAEQELEEKYLDIFSAQRNFDEGPGGNGFYSGNQIEKKIGVCTFEKGENGENPPKRAPKASYAFMAFTLWGKINHLRINSKGTRRALTQEEKEKVAKLSWEKASINFSTIRKELQLSPEDHFIDVRYTYGKTDEECEKGTKWNYCASYHTMRKALDKVYKNRIKELMSEQDEQKQLDDIAYAFTVYKSDEKIKNYLLQCQLEEKDAEALLAGVNNFSGFGHLSNKACYKILLHLKQGYEYAKACEMAGYDFKNISLEDIKDIPNPVVKRAIIQTLKVVRAVVREYGNPVEVHIELARDLGRNFKDRDLIKSNMEKNQKKNDEIKERIVNEFGIMQPKSQDIVKLKLCEQQDNVCVYSQKSFDLHRLFEKNYVEVDHIIPYSRSFDDTYANKVLVFNKENRDKGNKLPLEYLANQPERKEKFIAWVKSHIKDRKKRDNLLRESYSAEDKNGWKQRNLQDTQYISSYLYRYLMQNITLAPGYTDRKERIISLNGVVTGYVRKRWRIPKIRANGDLHHAVDAVVIACINDRLIKRVTEYSKAKELEYTPSDSGAVKTSMKDGFPEPWYCFRQELKARLSETPDEAIRNLHLATYCNVGNIKTPFVSRMLKCKVTGQANKETIGSGRLKDEEYVIEKTLLTELKLDKNNEIEGYYRPEDDKLLYEALKKQLMNHGGKGDKAFQAPFYKPKSDGTPGPLVKKVKLKVKLNSQVHVYQGKGIAQNGDMIRIDVFCVNKKGKKAYYFVPIYVADTVKKELPGKAVVSGKPYSAWKPMDDKDFIFSLYKNNLIYIEFNKPKSFVAEEGCTLSQTVDVKKAFLYYIKADRFAGTITVVNHDNTYKTRTGIKNTLLRFKKCVVDPLGRISFVEKEKRQRFQ

SEQ ID NO: 996 - protein, 1087 aa, unidentified
  REGION 1..1087: note = Description of Unknown: uncultivated organism with predicted taxonomy: Dialister
  REGION 1..1087: note = MG15-69 effector
MNYVLGLDVGITSCGWAVLELNHEDEPVRIVDLNSRIFDKAEAPKTGESLAAPRRMARGIRRLTRRRKFRLHRVRGFLVRHHILTKEEIENLYTTPHKTDIYELRYRALTEKVSPSDWARLLIFFAKHRGFQSNRKNEKSGEDGLMLAAIGENKKILENYRSVGDMLYSDEKFKDCKRNKGGTYRFTVSRSMLKEEVQTLFKKQRELGQTFAGEDLEDEYISIFSAQRNFDEGPGANSPYAGDQIEKMIGDCTFEDGKNGRPPQKRAPKASYAFMAFNLWQKINHIRVNCKGIERSLETEEKNKIVGLAWTKENITYHDLRQITGLDEETRFSGVTYPLDSTTEEAEKKVKFSWVKPYHAMRRALDKVEKNYIQKLSREEIDAIAYAFTVYKNDRKIRTALTEKGIEDNVADVLITHLDGFSKFGHLSKYACYKLLPFLKKGEEYYKACESAGYDFRKSSMEKLEDIPNPVVKRAVTQTMKVIKAVQRKYGNPVEVHIELARELARSFKDRAAMDDRMKENHAKNEEIKEYLSKELHVMSPTGQDIVKWKLYKQQQGYCAYSQKLFDVDKLLHDRTYAEVDHILPYSRSFDDTYRNKVLVLTKENRDKGNRTPMEYLADKPERKEKFIAWVKTTIKDSKKREHLLRVKYGRDEEAEWKQRHLQDTQYISRFLYNYLRNTLELTPGYTDRKRRIIPVNGAVTGYIRKRLGIHKIRENGDLHHAVDAVVIAATTQGMIQKVTRYSQIKENETWIDDHTKVDERTGEIFFVKKAHEKDAFPEPWPRFRQELEARVSEDPEETIRRLRLPSYENAGEIKKPFVSRMPRRKVRGAAHKETVRSGKLREDGCTILKTDLSALKLKNGEIEGYYRPESDRLLYEALKKRLEAFGGKGKEAFKEPFYKPKADGTPGPLVKKVKIIEKSSLNVPVHKGQGVAYNDTMVRIDIFGVNEKGKNAYYFVPVYVSDTVKKELPCRAVVAHKPYEEWKVMDDKDFLFSLYPNDMIHVVAKREIPFTAAKGSDLEPKIQIKDTFVYYVGANIATGNIAVISHDHSYEQGSMGIKTLSQLEKCEIDVLGNVSFVKQEKRQGFR

SEQ ID NO: 997 - protein, 1082 aa, unidentified; identical to SEQ ID NO: 938
  REGION 1..1082: note = Description of Unknown: uncultivated organism with predicted taxonomy: Dialister
  REGION 1..1082: note = MG15-70 effector

SEQ ID NO: 998 - protein, 1081 aa, unidentified; identical to SEQ ID NO: 973
  REGION 1..1081: note = Description of Unknown: uncultivated organism with predicted taxonomy: Dialister
  REGION 1..1081: note = MG15-71 effector

SEQ ID NO: 999 - protein, 1082 aa, unidentified; identical to SEQ ID NO: 950
  REGION 1..1082: note = Description of Unknown: uncultivated organism with predicted taxonomy: Dialister
  REGION 1..1082: note = MG15-72 effector

SEQ ID NO: 1000 - protein, 1081 aa, unidentified; identical to SEQ ID NO: 951
  REGION 1..1081: note = Description of Unknown: uncultivated organism with predicted taxonomy: Dialister invisus
  REGION 1..1081: note = MG15-73 effector

SEQ ID NO: 1001 - protein, 1081 aa, unidentified; identical to SEQ ID NO: 951
  REGION 1..1081: note = Description of Unknown: uncultivated organism with predicted taxonomy: Dialister
  REGION 1..1081: note = MG15-74 effector

SEQ ID NO: 1002 - protein, 1081 aa, unidentified; identical to SEQ ID NO: 951
  REGION 1..1081: note = Description of Unknown: uncultivated organism with predicted taxonomy: Dialister invisus
  REGION 1..1081: note = MG15-75 effector

SEQ ID NO: 1003 - protein, 1082 aa, unidentified; identical to SEQ ID NO: 953
  REGION 1..1082: note = Description of Unknown: uncultivated organism with predicted taxonomy: Dialister
  REGION 1..1082: note = MG15-76 effector

SEQ ID NO: 1004 - protein, 1081 aa, unidentified; identical to SEQ ID NO: 981
  REGION 1..1081: note = Description of Unknown: uncultivated organism with predicted taxonomy: Dialister invisus
  REGION 1..1081: note = MG15-77 effector

SEQ ID NO: 1005 - protein, 1081 aa, unidentified; identical to SEQ ID NO: 951
  REGION 1..1081: note = Description of Unknown: uncultivated organism with predicted taxonomy: Dialister
  REGION 1..1081: note = MG15-78 effector

SEQ ID NO: 1006 - protein, 1003 aa, unidentified
  REGION 1..1003: note = Description of Unknown: uncultivated organism with predicted taxonomy: Megasphaera stantonii
  REGION 1..1003: note = MG15-79 effector
MNYVLGLDVGIASVGWAVLELNEEDNPIRIEGLGARIFDKAEVPKTGASLAAPRRMSRGIRRVIRRRRFRLQRVRSYLKKHNILPAEKVDHLYDVPSAIDIYELRKRALTEKVTAEEWARLLIFFAKHRGFKSNRKKASGDADEGEMLKAIAANAEILKNYRTVGEMLCDNEKFRKRKRNRDGAYNFTVSRAMLMEEIHTLFEIQRNLGQKFADEKLEEEYVILFAAQRKFDEGPGENSPYAGNQIEKMIGSCTLEGKKEKRAPKASYAFMAFNLWQKINHLKVNRRGSERFLTEEERRRIADLAWKKEKLTYGSLRKVLSLDPEDRFVGLRYDLKKGKAENLEEPVSEAEKRSFSWVKDYHSIRKALDKVEKNRILKLSHEQLDTIATAFSVYKNEETIEKYLEEGGIGKADGEALLERLSGFSKFGHLSLKACYKLLPFLEKGEVYSRACELAGYDFSKSSLENIDDIPNPVVKRSISQTLKVINAIILRYGNPVEVHIELARELARSFRDRKKMEKGMQENQAKNEKIRQRLISEFGVLRPKGMDIVKFKLCEEQNGECAYSQKHFDMEKLLKDPSYAEVDHIIPYSRSFDDSYNNKVLVLTKENREKRNRIPMEYLADAPERKNRFIHWVKSTIRNSRKRENLLRTDYTATTENEWKRRNLQDTQYISKYLYNYLRHHLVLAKGYTERKRRIIPVNGAVTAYFRKRLGINKIRENGDLHHAVDAVIIACATQGIVNKVSRYSKSRELWDYEVDMETGEVLQKKNKNTKDVFPEPWLNFRYELEQKVRVRPLDIPETADITEMEEPFVSHMPNRKIHGPAHKETIRSGRLKEEGYTISKTALIDLKLTEDKEEIKGYYNKESDRLLYEALKKQLQRYGGKAKEAFKEPFHKPKADGTPGPIVNKVKIMEKSTMLIPVNGGKGLASNGNMVRIDVFRAEEKGKKKYYFLPVYVADTVKEELPNRAVLAHKPYEAWKIMKEEDFIFSLFAIDLIFVDAGKEI

SEQ ID NO: 1007 - protein, 1081 aa, unidentified; identical to SEQ ID NO: 940
  REGION 1..1081: note = Description of Unknown: uncultivated organism with predicted taxonomy: Megasphaera sp. AM44-1BH
  REGION 1..1081: note = MG15-80 effector

SEQ ID NO: 1008 - protein, 1082 aa, unidentified; identical to SEQ ID NO: 947
  REGION 1..1082: note = Description of Unknown: uncultivated organism with predicted taxonomy: Megasphaera
  REGION 1..1082: note = MG15-81 effector

SEQ ID NO: 1009 - protein, 1081 aa, unidentified; identical to SEQ ID NO: 940
  REGION 1..1081: note = Description of Unknown: uncultivated organism with predicted taxonomy: Megasphaera sp. AM44-1BH
  REGION 1..1081: note = MG15-82 effector

SEQ ID NO: 1010 - protein, 1081 aa, unidentified; identical to SEQ ID NO: 995
  REGION 1..1081: note = Description of Unknown: uncultivated organism with predicted taxonomy: Veillonellaceae bacterium DNF00626
  REGION 1..1081: note = MG15-83 effector

SEQ ID NO: 1011 - protein, 1081 aa, unidentified; identical to SEQ ID NO: 940
  REGION 1..1081: note = Description of Unknown: uncultivated organism with predicted taxonomy: Dialister
  REGION 1..1081: note = MG15-84 effector

SEQ ID NO: 1012 - protein, 1081 aa, unidentified; identical to SEQ ID NO: 940
  REGION 1..1081: note = Description of Unknown: uncultivated organism with predicted taxonomy: Dialister
  REGION 1..1081: note = MG15-85 effector

SEQ ID NO: 1013 - protein, 1082 aa, unidentified; identical to SEQ ID NO: 954
  REGION 1..1082: note = Description of Unknown: uncultivated organism with predicted taxonomy: Dialister
  REGION 1..1082: note = MG15-86 effector

SEQ ID NO: 1014 - protein, 1082 aa, unidentified; identical to SEQ ID NO: 958
  REGION 1..1082: note = Description of Unknown: uncultivated organism with predicted taxonomy: Dialister
  REGION 1..1082: note = MG15-87 effector

SEQ ID NO: 1015 - protein, 1081 aa, unidentified
  REGION 1..1081: note = Description of Unknown: uncultivated organism with predicted taxonomy: Megasphaera sp. AM44-1BH
  REGION 1..1081: note = MG15-88 effector
MNYVLGLDVGIASVGWAVLELNEEDNPIRIEGLGARIFDKAEVPKTGASLAAPRRMSRGIRRVIRRRRFRLQRVRSYLKRHNILPAEKVDHLYDVPSAIDIYELRKRALTEKVTAEEWARLLIFFAKHRGFKSNRKKASGDADEGEMLKAIAANAELLKNYRTVGEMLCDNEKFRKRKRNRDGAYNFTVSRAMLIEEIHTLFEIQRNLGQKFADEKLEEEYVILFVAQRKFDEGPGENSPYAGNQIEKMIGSCTLEGKKEKRAPKASYAFMAFNLWQKINHLKINRRGSERFLTEEERRRIADLAWKKEKLTYGSLREVLFLDPEDRFVGLRYDLKKEKEEDLEEPVSEAEKMSFSWVKDYHSIRKALDKVEKNRILKLSHEQLDTIATAFSVYKNEETIEKYLEEGGIEKADREALLERLSSFSKFGHLSLKACYKILPFLEKGEVYSRACERAGYDFRKSSLENINDIPNPVVKRSISQTLKVINAIILRYGNPVEVHIELARELAKNFRDRKKMEKGMQENQAKNEKIRQRLMSEFGVLRPKGMDIVKFKLCEEQNGECAYSQKHFDMEKLLRDPSYAEVDHIIPYSRSFDDSYNNKVLVLTKENRKKRNRIPMEYLADATERKNRFIHWVKSTIRNSRKRENLLRTDYTETTENEWKRRNLQDTQYISKYLYNYLRHHLVLAKGYTERKRRIIPVNGAVTAYIRKRLGINKIRENGDLHHAVDAVIIACATQGIVNKVSRYSKSRELWDYEVDMETGEVLQKKNENRKDIFPEPWLNFRYELEQKVRVRPLDIPETADITEMEEPFVSHMPNRKIHGPAHKETIRSGRLKEEGYTISKTALTDLKLTEDKEEIKGYYNKESDRLLYEALKKQLQRYSGKAKEAFKEPFHKPKADGTPGPIVNKVKIMEKSTMPVPVNGGKGLASNGNMVRIDVFRVEEKGKKKYYFIPVYVADTVKEELPNRAVLAHKPYEAWKIMKEEDFIFSLYPNDLIFVDAGKEIPFKAALKGSTLDPEKKASRFLMYYKGADIAGGTINGVNHDSTYGIRIGLQRLKGIRKCRIDVLGNISLVGKEKRKTFR

SEQ ID NO: 1016 - protein, 1082 aa, unidentified; identical to SEQ ID NO: 944
  REGION 1..1082: note = Description of Unknown: uncultivated organism with predicted taxonomy: Dialister
  REGION 1..1082: note = MG15-89 effector

SEQ ID NO: 1017 - protein, 1081 aa, unidentified; identical to SEQ ID NO: 941
  REGION 1..1081: note = Description of Unknown: uncultivated organism with predicted taxonomy: Dialister
  REGION 1..1081: note = MG15-90 effector

SEQ ID NO: 1018 - protein, 1094 aa, unidentified; identical to SEQ ID NO: 985
  REGION 1..1094: note = Description of Unknown: uncultivated organism with predicted taxonomy: Dialister
  REGION 1..1094: note = MG15-91 effector

SEQ ID NO: 1019 - protein, 840 aa, unidentified; identical to SEQ ID NO: 943
  REGION 1..840: note = Description of Unknown: uncultivated organism with predicted taxonomy: Firmicutes
  REGION 1..840: note = MG15-92 effector

SEQ ID NO: 1020 - protein, 1103 aa, unidentified
  REGION 1..1103: note = Description of Unknown: uncultivated organism with predicted taxonomy: Megasphaera micronuciformis
  REGION 1..1103: note = MG15-93 effector
MDPKELKYVVGLDIGITSVGWATLLLDSQDEPVRILDLNSRIFDKAEVPKTGASLAAPRRMARGVRRRLRRRKFRLHRVRQYILRHHILAKAGLDCLYKPKTDIDIFALRTAGLDRLLEPEEWARILLYMAKHRGFKSNRKSTAVAGGDDGVMLKAIQQNKEVLSKYRSVGEMFDKDEKFSDHKRNKGGSYEFTVARSMLVDEIKLLFEKQRDFGLAFAEKDAEEEYIELFSAQRNFDEGPGGDSPYGGNQIEKMIGLCTFEGKNGEKRAPKASYAFMATNLWQKINQIRIIEKGTERPLTAEEAGKIDEKAWKKEAMTYKDIRFEISLGDEASFKGLPYKWTETDKEETESKAKFSWVKEYHTLRKVLDKVEKNRILQLSHDDIDNIAYIFSVYKNDDKIREALEGTDLDSKDIDVLIENLGTFSKFGHLSLKACYMILPYLEQGLVYSDACTAAGYDFRKSAQGSIADIPNPVVKRAISQTMKVLKAIKQKYGCPPVEVHIEMARELAKSFDERQKMTKSIEENQSHNERIKERLQKEFNVPYPSGQDIVKLKLYEEQNETCAYSQKHIDAAKLFHDRNYAEVDHIIPYSRSFDDTYNNKVLVLTAENRQKGNRTPMEYLSGDEARKKQFVAWVKSDIKKPRKRENLLREKFTADAENDWKARHLQDTQYISRFMLNYLQNNYELTPGNTDRRRRIIPVNGAVTAYVRKRLGISKIRENGDLHHAVDAAVIAAVTQGVVNSVSRYSKRHELQYHVDEHGNCVDLVTGELMGDAFKENHKIKGFPEPWPQFRAELEARVSENAAEAIRILNLPTYSPDEEIKTPFVSRMVRHKTTGQAHEDTVRGKSNVADNVYVKKVALTELKLKDGEIEGYYNPSSDRLLYEALKKRLEQFGGKGKDAFKEPFHKPKSDGSPGPIVKKCKVLDKINLAVQVHGGNGATSNANGSMIRVDIFKVQEKNGKHSYYSVPIYVADTVKAELPKKAVYRRPYDEWPEMKEADFAFSLYPNDAIYIGGKEIKMNAMPGCTLETTRSMQDVNLYFRGMDISTGAIRVVNHDGTYEQRSLGIKQLPIIEKYEVSVLGDLVKAMYSPRETFKHKAQRAK

SEQ ID NO: 1021 - protein, 1081 aa, unidentified; identical to SEQ ID NO: 979
  REGION 1..1081: note = Description of Unknown: uncultivated organism with predicted taxonomy: Dialister
  REGION 1..1081: note = MG15-94 effector

SEQ ID NO: 1022 - protein, 1081 aa, unidentified; identical to SEQ ID NO: 952
  REGION 1..1081: note = Description of Unknown: uncultivated organism with predicted taxonomy: Dialister
  REGION 1..1081: note = MG15-95 effector

SEQ ID NO: 1023 - protein, 1103 aa, unidentified
  REGION 1..1103: note = Description of Unknown: uncultivated organism with predicted taxonomy: Megasphaera micronuciformis
  REGION 1..1103: note = MG15-96 effector
MDPKELKYVVGLDIGITSVGWATLLLDSQDEPVRILDLNSRIFDKAEVPKTGASLAAPRRMARGVRRRLRRRKFRLHRVRQYILRHHILDKAGLECLYKPKTDIDIFALRTAGLDRLLEPEEWARILLYMAKHRGFKSNRKSTAVAGGEDGVMLKAIQQNKEVLSKYRSVGEMFDKDEKFSDHKRNKGGSYEFTVARSMLEDEIKLLFEKQRDFGSAFAEKDAEEEYIDLFSAQRNFDEGPGGDSPYGGNQIEKMIGLCTFEGKNGEKRAPKASYAFMATNLWQKINQIRIIEKGTERPLIAEEAGKIYEKAWNKEAMTYKDIRSEISLGDEASFKGLPYKWTETDKEETEGKAKFSWVKEYHTLRKVLDKVEKNRILQLSHDNIDNIAYIFSVYKNDDKIREALEETDLDSKDIDVLIEKLGTFSKFGHLSLKACYKILPYLEQGMVYSDACTAAGYDFKKSAQGSIADIPNPVVKRAISQTMKVLKAIKQKYGCPPVEIHIEMARELAKSFDERQKMTKSIEENQSHNERIKERLQKEFNVPYPSGQDIVKLKLYEEQNEICAYSQKHIDAAKLFHDPNYAEVDHIIPYSRSFDDTYNNKVLVLTAENRQKGNRTPMEYLSGDEARKKQFVAWVKSDIKKPRKRENLLREKFTTDAENDWKARHLQDTQYISRFMLNYLQNNYELTPGNTDRKRRIIPVNGAVTAYVRKRLGISKIRENGDLHHAVDAAVIAAVTQGVVNSVSKYSKRHELQYHVDEHGNCVDLVTGELMGDAFKENHKIKGFPEPWPQFRAELEARVSENAAEAIRILKLPTYSPDEEIKTPFVSRMVRHKTTGQAHEDTVRGKSNVADNVYVKKVALTELKLKDGEIEGYYNPSSDRLLYEALKKRLEQFGGKGKDAFKEPFHKPKADGSPGPIVKKCKVIDKINLAVQVHGGKGATANANGSMIRVDIFKVQEKNGKSYYYAVPIYVADTVKSELPKKAVYRRPYDEWPEMKEADFAFSLYPNDVVYIGGKEIKMNVMPGCTLESEKSMRDEVLYFKGLDIATGTIRVVNHDGTYKQKSLGIKQLSIIEKYEVSVLGDLVKAMYSPRETFKHKAQRAK

SEQ ID NO: 1024 - protein, 1104 aa, unidentified; identical to SEQ ID NO: 946
  REGION 1..1104: note = Description of Unknown: uncultivated organism with predicted taxonomy: Megasphaera micronuciformis
  REGION 1..1104: note = MG15-97 effector

SEQ ID NO: 1025 - protein, 1082 aa, unidentified; identical to SEQ ID NO: 953
  REGION 1..1082: note = Description of Unknown: uncultivated organism with predicted taxonomy: Dialister
  REGION 1..1082: note = MG15-98 effector

SEQ ID NO: 1026 - protein, 1104 aa, unidentified
  REGION 1..1104: note = Description of Unknown: uncultivated organism with predicted taxonomy: Megasphaera micronuciformis
  REGION 1..1104: note = MG15-99 effector
MDTKELKYVVGLDIGITSVGWATLLLDSQDEPVRILDLNSRIFDKAEVPKTGASLAAPRRMARGVRRRLRRRKFRLHRVRQYILRHHILDKAGLECLYKPKTDIDIFALRTAGLDRQLKPEEWARILLYMAKHRGFKSNRKSAAVAGGDDGVMLKAIQQNKEVLSKYRSVGEMFDKDEKFSDHKRNKDGSYEFTVARSMLEDEIKLLFEKQRDFGSVFAKKDAEEEYIDLFSAQRNFDEGPGGDSPYGGNQIEKMIGLCTFEGKNGEKRAPKASYAFMATNLWQKINQIRIIEKGTERPLTAEEAGKIYEKAWNKEAMTYKDIRSEISLGDEASFKGLPYKWTETDKEETEGKAKFSWVKEYHTLRKVLDKVEKNRILQLSHDNIDNIAYIFSVYKNDDKIREALEGTDLDSKDIDVLIENLGTFSKFGHLSLKACYKILPYLEQGMVYSDACTAAGYDFRKSAQGSIADIPNPVVKRAISQTMKVLKAIKQKYGCPPVEIHIEMARELAKSFDERQKMTKSIEENQSHNERIKERLQKEFNVPYPSGQDIVKLKLYEEQNETCAYSQKHIDAAKLFHDPNYAEVDHIIPYSRSFDDTYNNKVLVLTAENRQKGNRTPMEYLSGDEARKKQFVAWVKSDIKKPRKRENLLREKFTADAENDWKARHLQDTQYISRFMLNYLQNNYELTPGNTDRKRRIIPVNGAVTAYVRKRLGISKIRENGDLHHAVDAAVIAAVTQGVVNSVSKYSKRHELQYHVDEHGNCVDLVTGELMGDAFKENHKIKGFPEPWPQFRAELEARVSENAAEAIRILKLPTYSPDEEIKTPFVSRMVRHKTTGQAHEDTVRGKSNVADNVYVKKVALTELKLKDGEIEGYYNPSSDRLLYEALKKRLEQFGGKGKDAFKEPFHKPKSDGSPGPIVKKCKVLDKINLAVPVHDGKGITKNAGGSMVRVDVFKVKKSNGGHQYYLVPIYVSDTVKERLPNRAVMAHKEYDEWKIVDDKDFVFSLYSNDLLFIGGKEIKLNGTGGDTLHQGIMVQNVYLYYRGLNIAAGTISVEDHDSKYIQESLGVGRVPVLEKYEVSVLGDLIKAPYRPRETFKHKAQRSK

SEQ ID NO: 1027 - protein, 1103 aa, unidentified; identical to SEQ ID NO: 945
  REGION 1..1103: note = Description of Unknown: uncultivated organism with predicted taxonomy: Megasphaera stantonii
  REGION 1..1103: note = MG15-100 effector

SEQ ID NO: 1028 - protein, 1081 aa, unidentified; identical to SEQ ID NO: 952
  REGION 1..1081: note = Description of Unknown: uncultivated organism with predicted taxonomy: Dialister
  REGION 1..1081: note = MG15-101 effector

SEQ ID NO: 1029 - protein, 1082 aa, unidentified; identical to SEQ ID NO: 953
  REGION 1..1082: note = Description of Unknown: uncultivated organism with predicted taxonomy: Megasphaera
  REGION 1..1082: note = MG15-102 effector

SEQ ID NO: 1030 - protein, 1089 aa, unidentified; identical to SEQ ID NO: 968
  REGION 1..1089: note = Description of Unknown: uncultivated organism with predicted taxonomy: Megasphaera sp. AM44-1BH
  REGION 1..1089: note = MG15-103 effector

SEQ ID NO: 1031 - protein, 1082 aa, unidentified
  REGION 1..1082: note = Description of Unknown: uncultivated organism with predicted taxonomy: Dialister
  REGION 1..1082: note = MG15-104 effector
MNYVLGLDVGIASVGWAVLELNEEDNPIRIEGLGARIFDKAEVPKTGASLAAPRRMSRGIRRVIRRRRFRLQRVRSYLKRHNILPAEKVDHLYDVPSAIDIYELRKRALTEKVTAEEWARLLIFFAKHRGFKSNRKKASGDADEGEMLKAIAANAEILKNYRTVGEMLCDNEKFRKRKRNRDGAYNFTVSRAMLMEEINTLFEIQRNLGQKFADEKLEEEYVILFASQRKFDEGPGENSPYAGNQIEKMIGSCTLEGKKEKRAPKASYVFMAFNLWQKINHLKVNRRGSERFLTEEERRRIADLAWKKEKLTYGSLRKVLSLDPEDRFVGLRYDLKKGKAENLEEPVSEAEKRSFSWVKDYHSIRKALDKVEKNRILKLSHEQLDTIATAFSVYKNEETIERYLEEGGIGKADREALLERLSGFSKFGHLSLKACYKLLPFLEKGEVYSRACELAGYDFSKSSLENIDDIPNPVVKRSISQTLKVINAIILRYGNPVEVHIELARELARNFRDRKKMEKGMQENQAKNEKIRQRLISEFGVLRPKGMDIVKFKLCEEQNGECAYSQKHFDMEKLLKDPSYAEVDHIIPYSRSFDDSYNNKVLVLTKENREKRNRIPMEYLADAPERKNRFIHWVKSTIRNSRKRENLLRTDYTATTENEWKRRNLQDTQYISKYLYNYLRHHLVLAKGYTERKRRIIPVNGAVTAYFRKRLGINKIRENGDLHHAVDAVIIACATQGIVNKVSRYSKSRELWDYEVDMETGEVLQKKNKNTKDVFPEPWLNFRYELEQKVRVRPLDIPETADITEMEEPFVSHMPNRKIHGPAHKESIRSGRLKEEGYTISKTALIDLKLTGDKEEIKGYYNKESDRLLYEALKKQLQRYGGKAKEAFKEPFHKPKADGTPGPIVNKVKIMEKSTMLIPVNDGKGLASNGNMVRIDVFRVEEKGKKKYYFIPVYVADTVKEELPNRAVLAHKPYEAWKIMKEEDFIFSLYPNDLIFVDAGKEIPFKAALKGSTLDPEKKVSRFLMYYKGADIATGSISGVNHDETYKARGVGIQSLREIKKCCIDVLGNISFASKEKRQTFR

SEQ ID NO: 1032 - protein, 1075 aa, unidentified
  REGION 1..1075: note = Description of Unknown: uncultivated organism with predicted taxonomy: Megasphaera micronuciformis
  REGION 1..1075: note = MG15-105 effector
MDTKEMKYVVGLDIGITSVGWATLLLDSQDEPVRILDLNSRIFDKAEVPKTGASLAAPRRMARGVRRRLRRRKFRLHRVRQYILRHHILDKAGLECLYKPKTDIDIFALRTAGLDRLLEPEEWARILLYMAKHRGFKSNRKSAAVAGGDDGDMLDAIRKNKEVLSKYRSVGEMFDKDEKFSDHKRNKGGSYEFTVARSMLVDEIKLLFERQRDFGSAFAEKDAEEEYIELFSAQRNFDEGPGGDSPYGGNQIEKMIGLCTFEGKNGEKRAPKASYAFMATNLWQKINQIRIIEKGTERPLTAEEAGKIDEKAWKKEAMTYKDIRSEISLGDEAYFKGLSYKWTETDKEETESKVKFSLVKEYHTLRKVLDKVEKNRILQLSHDDIDNIAYIFSVYKNDDKIREALEETDLDSKDIDVLIEHLGTFRKFGHLSLKACYKILPYLEQGMVYSDACTAAGYDFRKSAQGSIADIPNPVVKRAISQTMKVLKAIKQKYGCPPVEIHIEMARELAKSFDERQKMTKSIEENQSHNERIKERLQKEFNVPYPSGQDIVKLKLYEEQNETCAYSQKHIDAAKLFHDPNYAEVDHIIPYSRSFDDTYNNKVLVLTAENRQKGNRTPMEYLSGDEARKKQFVAWVKSDIKKPRKRENLLREKFTADAENDWKARHLQDTQYISRFMLNYLQNNYELTPGNTDRRRRIIPVNGAVTAYVRKRLGISKIRENGDLHHAVDAAVIAAVTQGVVNSVSKYSKRHELQYHVDEHGNCVDLVTGELMGDAFKENHKIKGFPEPWPQFRAELEARVSENAAEAIRILKLPTYSPDEEIKTPFVSRMVRHKTTGQAHEDTVRGKSNVADNVYVKKVALTELKLKDGEIEGYYNPSSDRLLYEALKKRLEQFGGKGKDAFKEPFHKPKADGSPGPIVKKCKVIDKISLAVPVHGGKGATANANGSMIRVDIFRVKEKNNKHSYYAVPIYVADTVKDKLPNKAIVAKKNYDEWLEMKKEDFVFSLYPNSAVYIGGKDIKMNVMSGCTLELEKTMRDTILYYKGLDISPGALKIINHDGTYQQRGLGIKSLPFIE

SEQ ID NO: 1033 - protein, 1082 aa, unidentified; identical to SEQ ID NO: 949
  REGION 1..1082: note = Description of Unknown: uncultivated organism with predicted taxonomy: Dialister
  REGION 1..1082: note = MG15-106 effector

SEQ ID NO: 1034 - protein, 1082 aa, unidentified; identical to SEQ ID NO: 953
  REGION 1..1082: note = Description of Unknown: uncultivated organism with predicted taxonomy: Dialister
  REGION 1..1082: note = MG15-107 effector

SEQ ID NO: 1035 - protein, 1082 aa, unidentified; identical to SEQ ID NO: 977
  REGION 1..1082: note = Description of Unknown: uncultivated organism with predicted taxonomy: Dialister
  REGION 1..1082: note = MG15-108 effector

SEQ ID NO: 1036 - protein, 1109 aa, unidentified
  REGION 1..1109: note = Description of Unknown: uncultivated organism with predicted taxonomy: Megasphaera stantonii
  REGION 1..1109: note = MG15-109 effector
MDPKELKYVVGLDIGITSVGWATLLLDSQDEPVRILDLNSRIFDKAEVPKTGASLAAPRRMARGVRRRLRRRKFRLHRVRQYILRHHILDKAGLECLYKPKMDIDIFALRTAGLDRLLEPEEWARILLYMAKHRGFKSNRKSTAVAGGDDGIMLKAIQQNKEVLSKYRSVGEMFDKDEKFSDHKRNKGGSYEFTVARSMLVDEIKLLFEKQRDFGLAFAEKDAEEEYIELFSAQRNFDEGPGGDSPYGGNQIEKMIGLCTFEGKNGEKRAPKASYAFMATNLWQKINQIRIIEKGTERPLTAEEAGKIDEKAWKKEAMTYKDIRSEISLGDEASFKGLPYKWTETDKEETESKAKFSWVKEYHTLRKVLDKVEKNRILQLSHDDIDNIAYIFSVYKNDDKIREALEGTHLDSKDIDVLIENLGTFSKFGHLSLKACYNILPYLEQGMVYSDACTAAGYDFRKSAQGSIADIPNPVVKRAISQTMKVLKAIKQKYGCPPVEIHIEMARELAKSFDERQKMAKSIEENQSHNERIKERLQKEFNVPYPSGQDIVKLKLYEEQNETCAYSQKHMDAHRLFHEDNYAEVDHIIPYSRSFDDTYNNKVLVLTAENRQKGNRTPMEYLSGDEARKKQFVAWVKSDIKKPRKRENLLREKFTTDAENDWKIRHLQDTQYISRFMLNYLQNNYELTPGNTDRKRRIIPVNGAVTAYVRKRLGISKIRENGDLHHAVDAAVIAAVTQGVVNSVSKYSKRHELQYHVDEHGNCVDLVTGELMGDAFKENHKIKGFPEPWPQFRAELEARVSENAAEAIRILKLPTYSPDEEIKTPFVSRMVRHKTTGQAHEDTVRGKSNVADNVYVKKVALTELKLKDGEIEGYYNPSSDRLLYEALKKRLEQFGGKGKDAFKEPFHKPKSDGSPGPIVTKCKVLDKINLAVQVHGGKGITKNAGGSMVRVDVFKVKKSNGGHQYYLVPIYVADTVKERLPNRAVMAHKEYDEWKIVDDKDFVFSLYPNDLLFIGGKEIKLNGTGGDTLHQGIMVQNVYLYYRGLNIAVGTISVEDHDSKYIQESLGVGRVPVLEKYEVSVLGDLIKAQYRPRETFKHKAQRTKDQVNV

SEQ ID NO: 1037 - protein, 1081 aa, unidentified; identical to SEQ ID NO: 990
  REGION 1..1081: note = Description of Unknown: uncultivated organism with predicted taxonomy: Dialister
  REGION 1..1081: note = MG15-110 effector

SEQ ID NO: 1038 - protein, 1082 aa, unidentified; identical to SEQ ID NO: 953
  REGION 1..1082: note = Description of Unknown: uncultivated organism with predicted taxonomy: Veillonellales
  REGION 1..1082: note = MG15-111 effector

SEQ ID NO: 1039 - protein, 1081 aa, unidentified; identical to SEQ ID NO: 952
  REGION 1..1081: note = Description of Unknown: uncultivated organism with predicted taxonomy: Dialister
  REGION 1..1081: note = MG15-112 effector

SEQ ID NO: 1040 - protein, 1082 aa, unidentified; identical to SEQ ID NO: 953
  REGION 1..1082: note = Description of Unknown: uncultivated organism with predicted taxonomy: Dialister
  REGION 1..1082: note = MG15-113 effector

SEQ ID NO: 1041 - protein, 1087 aa, unidentified
  REGION 1..1087: note = Description of Unknown: uncultivated organism with predicted taxonomy: Veillonellales
  REGION 1..1087: note = MG15-114 effector
MNYVLGLDVGITSCGWAVLELNHEDEPVRIVDLNSRIFDKAEAPKTGESLAAPRRMARGIRRLTRRRKFRLHRVRGFLVRHHILTKEEIENLYITPHKTDIYELRYRALTEKVSPSDWARLLIFFAKHRGFQSNRKNEKSGEDGLMLAAIGENKKILENYRSVGDMLYSDEKFKDCKRNKGGTYRFTVSRSMLKEEVQTLFKKQRELGQTFAGEDLEDEYISIFSAQRNFDEGPGANSPYAGDQIEKMIGDCTFEDGKNGRPPQKRAPKASYAFMAFNLWQKINHIRVNSKGIERSLETEEKNKIAGLAWTKENITYHDLRQIAGLDEETRFSGVTYPLDSTTEEAEKKVKFSWVKPYHAMRRALDKVEKNYIQKLSREEIDAIAYAFTVYKNDKKIRTALAEKGIEDNVADVLITHLDGFSKFGHLSEYACYKLLLFLEKGEEYYKACESAGYDFRKSSMEKLEDIPNPVVKRAVTQTMKVIKAVQRKYGNPVEVHIELARELARSFKDRAAMDDRMKENHAKNEEIKEYLSKELHVMSPTGQDIVKWKLYKQQQGYCAYSQKPFDVNKLLHDRTYAEVDHILPYSRSFDDTYRNKVLVLTKENRDKGNRTPMEYLADKPERKGKFIAWVKTTIKDSKKREHLLRVKYGRDEEAEWKQRHLQDTQYISRFLYNYLKNTLELTPGYTDRKRRIIPVNGAVTGYIRKRLGIHKIRENGDLHHAVDAVVIAATTQGMIQKVTRYSQIKENETWIDDHTKVDERTGEIFFVKKAHEKDAFPEPWPRFRQELEARVSEDPEEAIRRLGLPSYENVGEIKKPFVSRMPRRKVRGAAHKETVRSGKLRKDGYTILKTDLSALKLKNGEIEGYYRPESDRLLYEALKKRLEAFGGKGKEAFKEPFYKPKADGTPGPLVKKVKIIEKSSLNVPVHKGKGVAYNDTMVRIDIFGVNEKGKTAYYFVPVYVSDTVKKELPCRAVVAHKPYEEWKVMDDKDFLFFLYPNDMIHVVAKRDLSFTAAEGADLAPTMETKDTCVYYKAADISAGNIKVITHDNSYEKRGFGIKTLLQLEKCEVDVLGNISVVKKEKRQGFC

SEQ ID NO: 1042 - protein, 1082 aa, unidentified; identical to SEQ ID NO: 953
  REGION 1..1082: note = Description of Unknown: uncultivated organism with predicted taxonomy: Dialister
  REGION 1..1082: note = MG15-115 effector

SEQ ID NO: 1043 - protein, 1081 aa, unidentified; identical to SEQ ID NO: 940
  REGION 1..1081: note = Description of Unknown: uncultivated organism with predicted taxonomy: Megasphaera sp. AM44-1BH
  REGION 1..1081: note = MG15-116 effector

SEQ ID NO: 1044 - protein, 1084 aa, unidentified; identical to SEQ ID NO: 962
  REGION 1..1084: note = Description of Unknown: uncultivated organism with predicted taxonomy: Megasphaera
  REGION 1..1084: note = MG15-117 effector

SEQ ID NO: 1045 - protein, 1081 aa, unidentified; identical to SEQ ID NO: 981
  REGION 1..1081: note = Description of Unknown: uncultivated organism with predicted taxonomy: Dialister
  REGION 1..1081: note = MG15-118 effector

SEQ ID NO: 1046 - protein, 1078 aa, unidentified; identical to SEQ ID NO: 974
  REGION 1..1078: note = Description of Unknown: uncultivated organism with predicted taxonomy: Dialister
  REGION 1..1078: note = MG15-119 effector

SEQ ID NO: 1047 - protein, 1104 aa, unidentified
  REGION 1..1104: note = Description of Unknown: uncultivated organism with predicted taxonomy: Megasphaera micronuciformis
  REGION 1..1104: note = MG15-120 effector
MDPKELKYVVGLDIGITSVGWATLLLDSQDEPVRILDLNSRIFDKAEVPKTGASLAAPRRMARGVRRRLRRRKFRLHRVRQYILRHHILDKAGLECLYKPKTDIDIFALRTAGLDRLLEPEEWARILLYMAKHRGFKSNRKSTAVAGGDDGVMLKAIQQNKEVLSKYRSVGEMFDKDEKFSDHKRNKGGSYEFTVARSMLVDEIKLLFEKQRDFGLVFAEKDAEEEYIELFSAQRNFDEGPGGDSPYGGNQIEKMIGLCTFEGKNGEKRAPKASYAFMATNLWQKINQIRIIEKGTERPLTAEEAGKIDEKAWKKEAMTYKDIRSEISLGDEASFKGLPYKWTETDKEETESKAKFSWVKEYHTLRKVLDKVEKNRILQLSHDDIDNIAYIFSVYKNDDKIREALEGTDLDSKDIDVLIENLGTFSKFGHLSLKACYKILPYLEQGMVYSDACTAAGYDFRESAKGSIADIPNPVVKRAISQTMKVLKAIKQKYGCPPVEIHIEMARELAKSFDERQKMTKSIEENQSHNERIKERLQKEFNVPYPSGQDIVKLKLYEEQNETCAYSQKHIDAAKLFHDPNYAEVDHIIPYSRSFDDTYNNKVLVLTAENRQKGNRTPMEYLNGDEARKKQFVAWVKSDIKKPRKRENLLREKFTDDVENDWKERHLQDTQYISRFMLNYLQNNYELTPGNTDRKRRIIPVNGAVTAYVRKRLGISKIRENGDLHHAVDAAVIAAVTQGVVNSVSKYSKRHELQYHVDEHGNCVDLVTGELMGDAFKENHKIKGFPEPWPQFRAELEARVSENAAEAIRILNLPTYSPDEEIKTPFVSRMVRHKTTGQAHEDTVRGKSNVADNVYVKKVALTELKLKDGEIEGYYNPSSDRLLYEALKKRLEQFGGKGKDAFKEPFHKPKSDGSPGSIVKKCKVLDKINLAVQVHGGKGITKNTGGSMVRVDVFKVKKGNGGHQYYLVPIYVADTVKEKLPNRAVVGSTSYDGWKILHDDSFVFSLYPNELVHISGKKIKLKGTGGNTKGQEINIEDAYLYYKALNISNGMITVVTHDNTYIQESLGIGRVPTLEKYEVSVLGDLVKATYRPRETFKHKAQRFK

SEQ ID NO: 1048 - protein, 1104 aa, unidentified; identical to SEQ ID NO: 942
  REGION 1..1104: note = Description of Unknown: uncultivated organism with predicted taxonomy: Megasphaera micronuciformis
  REGION 1..1104: note = MG15-121 effector

SEQ ID NO: 1049 - protein, 1081 aa, unidentified; identical to SEQ ID NO: 952
  REGION 1..1081: note = Description of Unknown: uncultivated organism with predicted taxonomy: Dialister invisus
  REGION 1..1081: note = MG15-122 effector

SEQ ID NO: 1050 - protein, 1082 aa, unidentified; identical to SEQ ID NO: 970
  REGION 1..1082: note = Description of Unknown: uncultivated organism with predicted taxonomy: Megasphaera
  REGION 1..1082: note = MG15-123 effector

SEQ ID NO: 1051 - protein, 1081 aa, unidentified
  REGION 1..1081: note = Description of Unknown: uncultivated organism with predicted taxonomy: Dialister
  REGION 1..1081: note = MG15-124 effector
MNYVLGLDVGIASVGWAVLELNEEDNPIRIEGLGARIFDKAEVPKTGASLAAPRRMSRGIRRVIRRRRFRLQRVRSYLKRHNILPAEKVDHLYDVPSAIDIYELRKRALTEKVTAEEWARLLIFFAKHRGFKSNRKKASGDADEGEMLKAIAANAELLKNYRTVGEMLCDNEKFRKRKRNRDGAYNFTVSRAMLIEEIHTLFEIQRNLGQKFADEKLEEEYVILFVAQRKFDEGPGENSPYAGNQIEKMIGSCTLEGKKEKRAPKASYAFMAFNLWQKINHLKINRRGSERFLTEEERRRIADLEWKKEKLTYGSLREVLFLDPEDRFVGLRYDLKKEKEEDLEEPVSEAEKMSFSWVKDYHSIRKALDKVEKNRILKLSHEQLDTIATAFSVYKNEETIEKYLEEGGIEKADREALLERLSSFSKFGHLSLKACYKILPFLEKGEVYSRACERAGYDFSKSSLENIDDIPNPVVKRSISQTLKVINAIILRYGNPVEVHIELARELARNFRDRKKMEKGMQENQAKNEKIRQRLISEFGVLRPKGMDIVKFRLCEEQNGECAYSQKHFDMEKLLKDPSYAEVDHIIPYSRSFDDSYNNKVLVLTKENREKRNRIPMEYLADAPERKNRFIHWVKSTIRNSRKRENLLRTDYTATTENEWKRRNLQDTQYISKYLYNYLRHHLVLAKGYTERKRRIIPVNGAVTAYFRKRLGINKIRENGDLHHAVDAVIIACATQGIVNKVSRYSKSRELWDYEVDMETGEVLQKKNKNTKDVFPEPWLNFRYELEQKVRVRPLDIPETADITEMEEPFVSHMPNRKIHGPAHKETIRSGRLKEEGYTISKTALIDLKLTEDKEEIKGYYNKESDRLLYEALKKQLQRYGGKAKEAFKEPFHKPKADGTPGPIVNKVKIMEKSTMPVPVNGGKGLASNGNMVRIDVFRSEEKGKKKYYFIPIYVADTVKEELPNRAALAHKPYEAWKIMKEEDFIFSLYPNDLIFVDAGKEIPFKAALKGSTLDPEKKASRFLMYYKGADIAGGTINGVNHDNTYGIRIGLQQLKGIRKCRIDVLGNISFASKEKRQTFR

SEQ ID NO: 1052 - protein, 1081 aa, unidentified; identical to SEQ ID NO: 960
  REGION 1..1081: note = Description of Unknown: uncultivated organism with predicted taxonomy: Dialister
  REGION 1..1081: note = MG15-125 effector

SEQ ID NO: 1053 - protein, 1103 aa, unidentified
  REGION 1..1103: note = Description of Unknown: uncultivated organism with predicted taxonomy: Megasphaera stantonii
  REGION 1..1103: note = MG15-126 effector
MDTKELKYVVGLDIGIASVGWATLLLDSQDEPVRILDLNSRIFDKAEVPKTGASLAAPRRMARGVRRRLRRRKFRLHRVRQYILRHHILDKVGLECLYKPKTDIDIFALRTAGLDRLLEPEEWARILLYMAKHRGFKSNRKSAAVAGGDDGVMLDAIRKNKEVLSKYRSVGEMFDKDEKFSAHKRNKGGSYEFTVARSMLEDEIKLLFEKQRDFGLAFAEKDAEEEYIELFSAQRNFDEGPGGDSPYGGNQIEKMIGLCTFEGKNGEKRAPKASYAFMATNLWQKINQIRIIEKGTERPLTAEEAGKIDEKAWKKGAMTYKDIRSEISLGDEAYFKGLSYKWTETDKEETESKVKFSLVKEYHTLRKVLDKVEKNRILQLSHDDIDNIAYIFSVYKNDDKIREALEETDLDSKDIDVLIEHLGTFSKFGHLSLKACYKILPYLEQGMVYSDACTAAGYDFRKSAQGSIADIPNPVVKRAISQTMKVLKAIKQKYGCPPVEIHIEMARELAKSFDERQKMTKSIEENQSHNERIKERLQKEFNVPYPSGQDIVKLKLYEEQNETCAYSQKHIDAAKLFHDPNYAEVDHIIPYSRSFDDTYNNKVLVLTAENRQKGNRTPMEYLSGDEARKKQFVAWVKSDIKKQRKRENLLREKFTADAENDWKARHLQDTQYISRFMLNYLQNNYELTPGNTDRKRRIIPVNGAVTAYVRKRLGISKIRENGDLHHAVDATVIAAVTQGVVNSVSKYSKRHELQYHVDEHGNCVDLVTGKLMGDAFKENHKIKGFPEPWPQFRAELEARVSENAAEAIRTLNLPTYSSDEEIKTPFVSRMVRHKTTGQAHEDTVRGKSNVADNEYVKKVALTELKLKDGEIEGYYNRPSDRLLYEALKKRLEQFGGKGKDAFKEPFYKPKSDGSPGPIVKKCKILDKINLAVQVHGGKGATANANGSMIRVDIFKAKEKNGKYSYYAVPIYVADTVKEELPNKAVCNKEYNRWPKMKEEDFAFSLYPNDVVYIGGKEIKMNAAPGCTLETTRSIQDVNLYFRGMDISTGAIRVVNHDGTYKQKSLGIKQLPLIEKYEVSVLGDLVKAIYKPRETFKHKVRRSK

SEQ ID NO: 1054 - protein, 1081 aa, unidentified; identical to SEQ ID NO: 973
  REGION 1..1081: note = Description of Unknown: uncultivated organism with predicted taxonomy: Dialister
  REGION 1..1081: note = MG15-127 effector

SEQ ID NO: 1055 - protein, 1081 aa, unidentified; identical to SEQ ID NO: 991
  REGION 1..1081: note = Description of Unknown: uncultivated organism with predicted taxonomy: Dialister invisus
  REGION 1..1081: note = MG15-128 effector

SEQ ID NO: 1056 - protein, 1081 aa, unidentified; identical to SEQ ID NO: 991
  REGION 1..1081: note = Description of Unknown: uncultivated organism with predicted taxonomy: Dialister
  REGION 1..1081: note = MG15-129 effector

SEQ ID NO: 1057 - protein, 1081 aa, unidentified; identical to SEQ ID NO: 940
  REGION 1..1081: note = Description of Unknown: uncultivated organism with predicted taxonomy: Dialister
  REGION 1..1081: note = MG15-130 effector

SEQ ID NO: 1058 - protein, 1081 aa, unidentified; identical to SEQ ID NO: 976
  REGION 1..1081: note = Description of Unknown: uncultivated organism with predicted taxonomy: Dialister
  REGION 1..1081: note = MG15-131 effector

SEQ ID NO: 1059 - protein, 1092 aa, unidentified
  REGION 1..1092: note = Description of Unknown: uncultivated organism with predicted taxonomy: Veillonella magna
  REGION 1..1092: note = MG15-132 effector
MNYVLGLDVGITSVGWAVLELNSQDDPIRIVDLNSRIFEKAENPKNGESLALPRRQARSIRRLTRRRRFRLQRVRRYIVRSGILNKETLHRLYNTMEGLPDIYELRYRGLTQPLSAEEWSRLLIFFAKHRGFKSNRKNASDGDDGEMLSAVKANQELLKSYRTVGEMLYKNEKFKECKHNKGGSYAFTVSRAMLEDEIRALFEVQRQLGQAYAAEELEKEYIEIFGAQRNFDEGPGAGSPYGGDQIEKMIGTCTFEPMEKRAPKVSYGFMAFNLWQKINHLGLIANGVARSFTAEEKQQIADLAWSKNNLHLQHIRKELRIPEDTIFSGVNYGIRKQDTEWAKQLEEVEKKQKFNWLTPYHEMRVALDAVKKHRITELSPDQIDTIAYAFTVFKNDEKITSYLRENGIEEDDIRALLSKVKGFSKFGHLSLKACYKILPYLEEGNIYSKACELAGYDFRSSSQEQLEDIPNPVVKRAISQTLKVIKAIVRRYGNPVEVHIELARELARNFEDRRTMQKSMEDNQKRNEEIKERLVKEYNVLQPTGMDIVKFKLYEEQQGACAYSQKMFDVNRVLHDPSYSEVDHIIPYSRSFDDSYNNKVLVLTKENRDKGNRTPMEYLKDNPVRIDAFTTWVNAIVRNSRKRANLLKSSFTEDAEQEWKRRHLQDTQYISRFLYNYLRQNLPLKEGFTNRKRRIIPVNGAVTSYVRKRLGIAKIRENGDLHHAVDAVIIACVTQGVIKRVSEYSKSRELWLYQLDDGTVIDGETGEVMTGQRGHKQEPFPEPWPEFRHELEDRVSENPPELLRHLQLPAYEGIDIETIKTPFVSRMPNRKVKGQAHEETIRSGRLKYEGYTVTKVDLKNLKLKNGEIEGYYNPDSDRLLYNALKQQLEVYDGKGDKAFAEPFHKPKADGTPGPIVKKVKIMTKSNLNVPVNGGKGVADNGSMVRIDVFGVEERGKMAYRFIPIYVSDTVKRILPNKAVTRDRGYKDWDIMDDKDFLFSLYPNDLIYVESKRDISLKAAKGSTLAKERKQKEALVYYRGADIATASIGVVNDDNTYSMRGLGIKTLQSIRKCIVDVLGNVAFVTKEKRQGFR

SEQ ID NO: 1060 - protein, 1082 aa, unidentified; identical to SEQ ID NO: 953
  REGION 1..1082: note = Description of Unknown: uncultivated organism with predicted taxonomy: Dialister
  REGION 1..1082: note = MG15-133 effector

SEQ ID NO: 1061 - protein, 1103 aa, unidentified; identical to SEQ ID NO: 993
  REGION 1..1103: note = Description of Unknown: uncultivated organism with predicted taxonomy: Megasphaera micronuciformis
  REGION 1..1103: note = MG15-134 effector

SEQ ID NO: 1062 - protein, 1103 aa, unidentified; identical to SEQ ID NO: 945
  REGION 1..1103: note = Description of Unknown: uncultivated organism with predicted taxonomy: Megasphaera micronuciformis
  REGION 1..1103: note = MG15-135 effector

SEQ ID NO: 1063 - protein, 796 aa, unidentified
  REGION 1..796: note = Description of Unknown: uncultivated organism with predicted taxonomy: Megasphaera stantonii
  REGION 1..796: note = MG15-136 effector
VAVLELNEEDNPIRIEGLGARIFDKAEVPKTGASLAAPRRMSRGIRRVIRRRRFRLQRVRSYLKRHNILPAEKVDHLYDVPSAIDIYELRKRALTEKVTAEEWARLLIFFAKHRGFKSNRKKASGDADEGEMLKAIAANAELLKNYRTVGEMLCDNEKFRKRKRNRDGAYNFTVSRAMLIEEIHTLFEIQRNLGQKFADERLEEEYVILFVAQRKFDEGPGENSPYAGNQIEKMIGSCTLEGKKEKRAPKASYAFMAFNLWQKINHLKINRRGSERFLTEEERRRIADLAWKKEKLTYGSLREVLFLDPEDRFVGLRYDLKKEKEEDLEEPVSEAEKMSFSWVKDYHSIRKALDKVEKNRILKLSHEQLDTIATAFSVYKNEETIEKYLEEGGIEKADREALLERLSSFSKFGHLSLKACYKILPFLEKGEVYSRACERAGYDFRKSSLENINDIPNPVVKRSISQTLKVINAIILRYGNPVEVHIELARELAKNFRDRKKMEKGMQENQAKNEKIRQRLMSEFGVLCPKGMDIVKFKLCEEQNGECAYSQKHFDMEKLLKDPSYAEVDHIIPYSRSFDDSYNNKVLVLTKENREKRNRIPMEYLADAPEQKNRFIHWVKSTIRNSRKRENLLRTDYTAATENEWKRRNLQDTQYISKYLYNYLLENLELAKGYTERKRRITPVNGAVTAYIRKRLGINKIRENGDLHHAVDAVIIACATQGIVNKVSRYSKSRELWDYEVDKETGEILQKKNKNTKDVFPEPWLNFRYELEQKVRIRPLDIPETADITKMEEPFV

SEQ ID NO: 1064 - protein, 1089 aa, unidentified; identical to SEQ ID NO: 968
  REGION 1..1089: note = Description of Unknown: uncultivated organism with predicted taxonomy: Megasphaera sp. AM44-1BH
  REGION 1..1089: note = MG15-137 effector

SEQ ID NO: 1065 - protein, 1086 aa, unidentified
  REGION 1..1086: note = Description of Unknown: uncultivated organism with predicted taxonomy: Megasphaera
  REGION 1..1086: note = MG15-138 effector
MNYVLGLDIGITSVGWAVLELDTHDEPIRIVDLNSRIFEKAEVPKTGEALAAPRRMARSARRLTRRRRFRLHRVRRYLIRNDILDEQQVAVLYDDSAGKTDIYELRYQALSQPVSNSDWARLLIFFAKHRGFKSNRKHISDSGDEGQMLNAITENQELLKNYRTVGEMLYKNEKFKACKRNKGGSYTFTVSRAMLTDEIHTLFDVQRNLGQAYASEKLKEEYMELFSAQRNFDEGPGMNSPYSGNQIEKMIGCCTFEDGEKRAPKASYAFMAFNIWQKINHLRVTCEGTYRFLSQAEKETLAAFAWKKENITFKDIRNKLGLDDTVRFLDVNYNLDQYKTAEEAEKKAKFSWVKEYHAIRKALDKVKKDRISELSHEQIDAIAYAFTVYKNDEAIKSYLLEHAIELADAEALLENISGFSKFGHLSVKACYKLLEPLKQGHVYTKACEIAGYDPQKSSQGNISDIPNPVVKRALSQALKVIKAIIRQYGCPPVEIHIELARELAKNAKERTELEKAMKDNQSRNEEIKTKLHELNVMQPTGLDIVKYKLYEQQQGDCAYSQKKFDVDRLLHDSTYAEVDHIIPYSRSFDDTYRNKVLVLTKENRDKGNRTPMEYFQDKPERKEAFVRWVKRTISDGKKRNNLLRVNYSADAEKEWKDRHLQDTQYISRYLYNYLRQHIPLKEGYTDRKRRIIPVNGAVTAYVRKRLGISKIRENGDLHHAVDAVIIACVTQGVVNKISCYSKIKELRQFMTADGTIVDKETGEVLQTANPRKTDPFPEPWPKFRQELEARVSDNPAEAIAALGLPTYEGIVSISAPFVSRMPNRKVHGPAHMETIRSAKMQQDGYTMVKTDLTNLKLKDGEIEGYYNPSSDKILYDALKRRLEQFGGDSNKAFKDPFYKPKSDGTPGPEVKKVKIMTKSSLNVTVNQGKGIADNGSMIRIDVFGVEERGKNAYYFVPIYVADTVKETLPNKAVVPNKSYNDWKVMRDEDFLFSLYPNDLIYIESPTPISFHTVKGCPLVPKIERKEMFLYYRKAGISTASITVLNHDNTYVKESLGIKTIAKLQKCTVDVLGNIHYVQKEKRLGFK

SEQ ID NO: 1066 - protein, 1086 aa, unidentified
  REGION 1..1086: note = Description of Unknown: uncultivated organism with predicted taxonomy: Megasphaera
  REGION 1..1086: note = MG15-139 effector
MNYVLGLDIGITSVGWAVLELDTHDEPIRIVDLNSRIFEKAEVPKTGESLAAPRRMARSARRLTRRRRFRLHRVRRYLIRNRILDARQVEELYVDSIGKTDIYELRYQALSQQVSNSDWARLLIFFAKHRGFKSNRKHISDSGDEGQMLNAITENQEILNNYRTVGEMLYKNEKFKACKRNKGGSYAFTVSRDMLADEIHALFDVQRSLGQAYASEKLEEEYMELFSAQRNFDEGPGMNSPYSGNQIEKMIGCCTFEDGEKRAPKASYAFMAFNVWQKINHLRVTCEGTYRSLSQAEKETLAALAWKKENITFKDIRNKLGLDDTVRFLDVNYNLDKYKTAEEAEKKVKFSWVKEYHAIRKALDKVKKDRISELSHEQIDTIAYAFTVYKNDEAIKRYLLEHAIEPADAEALLENISGFSKFGHLSVKACYRLLEPLQQGHVYTKACEIAGYDPQKSNQENINDIPNPVVKRALSQALKVIKAIIRQYGCPPVEIHIELARELAKSAKERTELEKAMKDNQSRNEEIKTKLHELNVMQPTGLDIVKYKLYEQQQGDCAYSQKKFDVNRLLHDPTYAEVDHIIPYSRSFDDTYRNKVLVLTKENRDKGNRTPMEYFQDKPERKEAFINWVKRTISDGKKRNNLLRVNYSADAEKEWKDRHLQDTQYISRYLYNYLKRHIELKEGYTDRKRRIIPVNGAVTAYVRKRLGISKIRENGDLHHAVDAVIIACVTQGVVNKISRYSKIKELRQFMTADGMIVDKETGEVLQTANPRKTDPFPEPWPKFRQELEARVSDNPAEAIAALGLPTYEGIVNISAPFVSRMPNRKVHGPAHMETIRSSKMQQDGYTMVKTELTNLKLKDGEIEGYYNPSSDKILYDALKRRLEQFGGDGNKAFKDPFYKPKSDGTPGPEVKKIKIMTKSSLNVTVNQGKGVADNGSMVRIDVFGVEEKGKNAYYFVPIYVADTVKETLPNRAVTRGEPYNNWKIMKDEDFLFSLYPNDLIYIESLSPVSFHTVKGCTLVSKIERKEMLLYYRKAGISTASITVLNHDNTYVKESLGIKTIGKLQKCTVDILGNVHYVQKEKRVGFK

SEQ ID NO: 1067 - protein, 1089 aa, unidentified
  REGION 1..1089: note = Description of Unknown: uncultivated organism with predicted taxonomy: Megasphaera sp. AM44-1BH
  REGION 1..1089: note = MG15-140 effector
MHYVLGLDIGITSVGWAVLELNIQDEPIRIVDLNSRIFERAEIPKTGESLAAPRRVARSSRRRTRRRRFRLYRIRRYLLRNQIITPSDMKILYDNCGDMKDIYTLRHEALDRAVTSKEWARLLIFFGKHRGFKSNRKSIIASGDEGVMLQAVKENQELLKAYRTVGDMLYSDTKFANAKRNKGESYTFTVSRRMLTDEIRTLFCIQRDLGQSFATPSLEDEYLSIFLAQRNFDEGPGGNSPYSGNQIEKMIGNCAFEKNEKRAPKASYAFMAFNLLQKINHLRIERKGKQRFLTQEERNNIAGLAWKKENLTFKDIRTAISLSGDELFQDVHYASEVSLEECEKKTKFNLVRSYHAMRKALDAVEKNRIQKLSHEQLDTIAYAFTVYKNDDKISSYLLAHSIEQQDVEALLAQLRTFNKFGHLSIKACYRILPYLKEGKTYAAACTSAGYDFRNSSLEEIKDIPNPVVKRAVSQTLKVIRAIIKKYGCEPVEIHIELARELARSFQNRVKMQKSMEENQSRNEKIKERLVQEYNILSPTGMDIVKFKLYEQQQGACAYSQKMFNIYQLFHDPSYAEVDHIIPYSRSFDDSYRNKVLVFTAENRNKGNRTPMEYLKNQSERKEQFITWVKNTIRDYKKRNNLLRETYTSEDEADWKRRHLQDTQYLSTYLYNYLCHVMKLTPGCTERKRRIIAVNGAVTAYVRKRLGINKIRSNGDLHHAVDAVIIACVTQGVINRISRYSKIKELQNFQTNDGQVVDSVTGEMLTLKHVHKKDPFPEPWPHFRQELEARVGKQPQEAIAALHLPTYENVESIYTPFVSRMPNRKVHGPAHLETIRSSKLLYKGITIVKTSLTNLKLKDGEIQGYYNPDSDRILYQALKRRLIQFDGEGRAAFKEPFYKPRSDGSPGPMVKKVKIMTNSSLNVLLNHGRGVADNGAMVRIDVFYVSEKGKKAYYFVPIYVADTVKKELPHKAVVAYKPCEEWKNVDDDDFIFSLYPNDLVYVRHKKSILLKASKRSTLSPQIKIKEGLFYYKGANISVGSISIINNDDTYGQHSLGIKTLECMKKANVDILGNVTFVGRENRQPFQLSKK

SEQ ID NO: 1068 - protein, 1081 aa, unidentified
  REGION 1..1081: note = Description of Unknown: uncultivated organism with predicted taxonomy: Dialister
  REGION 1..1081: note = MG15-141 effector
MNYVLGLDVGIASVGWAVLELNEEDNPIRIEGLGARIFEKAEVPKTGASLAAPRRMSRGIRRVIRRRRFRLQRVRSYLKRHNILPAEKVDHLYDVPSAIDIYELRKRALTEKVTAEEWARLLIFFAKHRGFKSNRKKASGDADEGEMLKAIAANAEILKNYRTVGEMLCDNEKFRKRKRNRDGAYNFTVSRAMLMEEIHTLFEIQRNLGQKFADEKIEEEYVILFAAQRKFDEGPGENSPYAGNQIEKMIGSCTLEGKKEKRAPKASYAFMAFNLWQKINHLKINRRGSERFLTEEERRRIADLAWKKEKLTYGSLREVLFLDPEDRFVGLRYDLKKEKEENLEEPVSEAEKMSFSWVKDYHSIRKALDKVEKNRILKLSHEQLDTIATAFSVYKNEETIEKYLEEGGIEKADREALLERLSGFSKFGHLSLKACYKILPFLEKGEVYSRACERAGYDFRKSSLENINDIPNPVVKRSISQTLKVINAIILRYGNPVEVHIELARELAKNFRDRKKMEKGMQENQAKNEKIRQRLMSEFGVLRPKGMDIVKFKLCEEQNGECAYSQKHFDMEKLLRDPSYAEVDHIIPYSRSFDDSYNNKVLVLTKENREKRNRIPMEYLADATERKNRFIHWVKSTIRNSRKRENLLRTDYTETTENEWKRRNLQDTQYISKYLYNYLRHHLVPAKGYTERKRRIISVNGAVTAYIRKRLGINKIRENGDLHHAVDAVIIACATQGIVNKVSRYSKSRELWDYEVDMETGEVLQKKNENRKDIFPEPWLNFRYELEQKVRVRPLDIPETADITEMEEPFVSHMPNRKIHGPAHKETIRSGRLKEEGYTISKTALTDLKLTEDKEEIKGYYNKESDRLLYEALKKQLQRYSGKAKEAFKEPFHKPKADGTPGPIVNKVKIMEKSTMPVPVNGGKGLASNGNMVRIDVFRVEEKGKKKYYFIPVYVADTVKEELPNRAVLAHKPYEAWKIMKEEDFIFSLYPNDLIFVDAGKEIPFKAALKGSTLDPEKKASRFLMYYKGADIAGGTINGVNHDSTYGIRIGLRRLKGIRKCRIDVLGNISLVGKEKRKTFR

SEQ ID NO: 1069 - protein, 1089 aa, unidentified
  REGION 1..1089: note = Description of Unknown: uncultivated organism with predicted taxonomy: Megasphaera sp. AM44-1BH
  REGION 1..1089: note = MG15-142 effector
MHYVLGLDIGITSVGWAVLELNIQDEPIRIVDLNSRIFERAEIPKTGESLAAPRRVARSSRRRTRRRRFRLYRIRRYLLRNQIITPSDMKILYDNCGDMKDIYTLRHEALDRAVTSKEWARLLIFFGKHRGFKSNRKSIIASGDEGAMLQAVKENQELLKAYRTVGDMLYSDTKFANAKRNKGESYTFTVSRRMLTDEIRTLFCIQRDLGQSFATPSLEDEYLSIFLAQRNFDEGPGGNSPYSGNQIEKMIGNCAFEKNEKRAPKASYAFMAFNLLQKINHLRIERKGKQRFLTQEERNNIAGLAWKKENLTFKDIRTAISLSGDELFQDVHYASEVSLEECEKKTKFNLVRSYHAMRKALDAVEKNRIQKLSHEQLDTIAYAFTVYKNDDKISSYLLAHSIEQQDVEALLAQLRTFNKFGHLSIKACYRILPYLKEGKTYAAACTSAGYDFRNSSLEEIKDIPNPVVKRAVSQTLKVIRAIIKKYGCEPVEIHIELARELARSFQNRVKMQKSMEENQSRNEKIKERLVQEYNILSPTGMDIVKFKLYEQQQGACAYSQKMFNIYQLFHDPSYAEVDHIIPYSRSFDDSYRNKVLVFTAENRNKGNRTPMEYLKNQSERKEQFITWVKNTIRDYKKRNNLLRETYTSEDEADWKRRHLQDTQYLSTYLYNYLCHVMKLTPGCTERKRRIIAVNGAVTAYVRKRLGINKIRSNGDLHHAVDAVIIACVTQGVINRISRYSKIKELQNFQTNDGQVVDSVTGEILTLKHVHKKDLFPEPWPHFRQELVARVGKQPQEAIAALHLPTYENVESIYTPFVSRMPNRKVHGPAHLETIRSSKLLYKGITIVKTSLTNLKLKDGEIQGYYNPDSDRILYQALKRRLIQFDGEGRAAFKEPFYKPRSDGSPGPMVKKVKIMTNSSLNVLLNHGRGVADNGAMVRIDVFYVSEKGKKAYYFVPIYVADTVKKELPHKAVVAYKPCEEWKNVDDDDFIFSLYPNDLVYVRHKKSILLKASKRSTLSPQIKIKEGLFYYKGANISVGSISIINNDDTYGQHSLGIKTLECMKKANVDILGHVTFVGRENRQSFQLSKK

SEQ ID NO: 1070 - protein, 1103 aa, unidentified
  REGION 1..1103: note = Description of Unknown: uncultivated organism with predicted taxonomy: Megasphaera micronuciformis
  REGION 1..1103: note = MG15-143 effector
MDTKELKYVVGLDIGITSVGWATLLLDSQDEPVRILDLNSRIFDKAEVPKTGASLAAPRRMARGVRRRLRRRKFRLHRVRQYILRHHILDKVGLECLYKPKTDIDIFALRTAGLDRQLKPEEWARILLYMAKHRGFKSNRKSTADETADGDMLKAIQQNKEILSKYRSVGEMFDKDEKFSDHKRNKGGSYEFTVARSMLEDEIKLLFEKQRDFGSAFAEKDAEEEYIDLFSAQRNFDEGPGGDSPYGGNQIGKMIGLCTFEGKNGEKRAPKASYAFMATNLWQKINQIRIIKKGTELHLTAEEAGKIYEKAWNKEAMTYKDIRSEISLGDEASFKGLAYKWTETDKEETESKTKFSWVKEYHTLRKVLDKVEKNRILQLSHDEIDNIAYVFSVYKNDDKIREALEETDLDSKDIDVLIENLGTFSKFGHLSLKACYKILPYLEQGMVYSDACTAAGYDFRKSAQGSIADIPNPVVKRAISQTMKVLKAIKQKYGCPPVEIHIEMARELAKSFDERQKMTKSIEENQSHNERIKERLQKEFNVPYPSGQDIVKLKLYEEQNETCAYSQKHMDAHRLFHENNYAEVDHIIPYSRSFDDTYNNKVLVLTAENRQKGNRTPMEYLSGDEARKKQFVAWVKSDVKKPRKRENLLREKFTDDAENDWKARHLQDTQYISRFMLNYLQNNYELTPGNTDRKRRIIPVNGAVTAYVRKRLGISKIRENGDLHHAVDAAVIAAVTQGVVNSVSKYSKRHELQYHVDEHGNCVDLVTGELMGDAFKENHKIKGFPEPWPQFRAELEARVSENATEAIRILNLPTYSPDEEIKTPFVSRMVRHKTTGQAHEDTVRGKSNVADNVYVKKVALTELKLKDGEIEGYYNPSSDRLLYEALKKRLEQFGGKGKDAFKEPFHKPKADGSSGPIVKKCKVLDKINLSVPVHGGKGAAANANGGMIRVDIFKAKGKNGKSSYYAVPIYVADTVKVELPNRAVVTKKTYAEWPEMKTEDFAFSLYPNDVVYIGGKEIKMNVMPGCTLATENHVKDDFFYYKGLDIATGAMIVINHDGTYKQRGVGIKQLPLIEKYEVSVLGDLVKAIYRPREIFKHKAQRSK

SEQ ID NO: 1071 - protein, 831 aa, unidentified
  REGION 1..831: note = Description of Unknown: uncultivated organism with predicted taxonomy: Megasphaera stantonii
  REGION 1..831: note = MG15-144 effector
LAKAGLDCLYKPKTDIDIFALRTAGLDRLLEPEEWARILLYMAKHRGFKSNRKSTAVAGGDDGVMLKAIQQNKEVLSKYRSVGEMFDKDEKFSDHKRNKGGSYEFTVARSMLVDEIKLLFEKQRDFGLAFAEKDAEEEYIELFSAQRNFDEGPGGDSPYGGNQIEKMIGLCTFEGKNGEKRAPKASYAFMATNLWQKINQIRIIEKGTERPLTAEEAGKIDEKAWKKEAMTYKDIRSEISLGDEASFKGLPYKWTETDKEETESKAKFSWVKEYHTLRKVLDKVEKNRILQLSHDDIDNIAYIFSVYKNDDKIREALEGTDLDSKDIDVLIENLGTFSKFGHLSLKACYKILPYLEQGLVYSDACTAAGYDFRKSAQGSIADIPNPVVKRAISQTMKVLKAIKQKYGCPPVEIHIEMARELAKSFDERQKMTKSIEENQSHNERIKERLQKEFNVPYPSGQDIVKLKLYEEQNETCAYSQKHIDAAKLFHDRNYAEVDHIIPYSRSFDDTYNNKVLVLTAENRQKGNRTPMEYLSGDEARKKQFVAWVKSDIKKPRKRENLLREKFTADAENDWKARHLQDTQYISRFMLNYLQNNYELTPGNTDRRRRIIPVNGAVTAYVRKRLGISKIRENGDLHHAVDAAVIAAVTQGVVNSVSRYSKRHELQYHVDEHGNCVDLVTGELMGDAFKENHKIKGFPEPWPQFRAELEARVSENAAEAIRILNLPTYSPDEEIKTPFVSRMVRHKTTGQAHEDTVRGKSNVADNVYVKKVALTELKLKDGEIEGYYNPSSDRLLYEALKKRLEQFGGKGKDAFKEPFHKPKSDGSPGPIV

SEQ ID NO: 1072 - protein, 1056 aa, unidentified
  REGION 1..1056: note = Description of Unknown: uncultivated organism with predicted taxonomy: Megasphaera stantonii
  REGION 1..1056: note = MG15-145 effector
EVPKTGASLAAPRRMARGVRRRLRRRKFRLHRVRQYILRHHILDKAGLECLYKPKTDIDIFALRTAGLDRLLEPEEWARILLYMAKHRGFKSNRKSASDASDDGDMLDAIRKNKEVLSKYRSVGEMFDKDEKFSDHKRNKGGSYEFTVARSMLVDEIKLLFEKQRDFGLAFAEKDAEEEYIELFSAQRNFDEGPGGDSPYGGNQIEKMIGLCTFEGKNGEKRAPKASYAFMATNLWQKINQIRIIEKGTERPLTAEEAGKIDEKAWKKEAMTYKDIRSEISLGDEASFKGLPYKWTETDKEETESKVKFSLVKEYHTLRKVLDKVEKNRILQLSHDDIDNIAYIFSVYKNDDKIREALEETDLDSKDIDVLIEHLGTFSKFGHLSLKACYKILPYLEQGMVYSDACTAAGYDFRKSAQGSIADIPNPVVKRAISQTMKVLKAIKQKYGCPPVEIHIEMARELAKSFDERQKMTKSIEENQSHNERIKERLQKEFNVPYPSGQDIVKLKLYEEQNETCAYSQKHIDAAKLFHDPNYAEVDHIIPYSRSFDDTYNNKVLVLTAENRQKGNRTPMEYLSGDEARKKQFVAWVKSDIKKPRKRENLLREKFTADAENDWKARHLQDTQYISRFMLNYLQNNYELTPGNTDRRRRIIPVNGAVTAYVRKRLGISKIRENGDLHHAVDAAVIAAVTQGVVNSVSRYSKRHELQYHVDEHGNCVDLVTGELMGDAFKENHKIKGFPEPWAQFRAELEARVSENAAEAIRILNLPTYSPDEEIKTPFVSRMVRHKTTGQAHEDTVRGKSNVADNVYVKKVALTELKLKDGEIEGYYNPSSDRLLYEALKKRLEQFGGKGKDAFKEPFHKPKADGSTGPIVKKCKVLDKINLAVQVHGGKGATANANGSMIRVDIFKVQEKNGKHSYYSVPIYVADTVKAELPKKAVYRRPYDEWPEMKEADFAFSFYPNDVVYIGGKEIKMNIMPGCTLATENHVKNDFFYYKGLDIATGAMIVINHDGTYKQRGVGIKQLPLIEKYEVSVLGDLVKAPYRQRETFKRKVHGSK

SEQ ID NO: 1073 - protein, 757 aa, unidentified
  REGION 1..757: note = Description of Unknown: uncultivated organism with predicted taxonomy: Megasphaera stantonii
  REGION 1..757: note = MG15-146 effector
AEGLSRRLDDGEWVRVLYHIAKHRGFKSNRKSAASDADEGKVLDAVKENAELLKNYKTVGEMLFRDEKFRDAKRNKGGSYSFCVGRDMLADEIAALFDAQRRNGNKHASEEFEKACLKIFADQRSFDDGPDINSPSPYAGNQIEKMIGNCSLEPKEKRAPKASYSFMRFSLLQKINHLRLKDAKGEERPLDDEERAAVEALAWKSASLTYGAIRKALSLSDDLRFTDLYYRWDKKPEEIEKKKLPFAAPYHEIRKALDKLEKGRIQKLTPDALDAIGYIFTVFKNDTKIAAALKTAGVEEEDAAALMDYGLTFRGFGHISVKACRKLIPHLEKGMTYDKACKEAGYDLQKTGGEKTKLLSGNLEEIREIPNPVVRRAIAQTVKVVNAVIRRYGSPVAVNVELAREMGRSFQERRDMMKSMEDNNAANEKLKEEIKKDYGIAHPNGLDIVKYKLFKEQGERCAYSLKPMDARQVLKDPSYAEVDHILPYSRSFDDSYANKVLVLAKENRDKGNRTPMEYMANLPERKHAFITWVKSNVRNPKKRDNLLLEKFDGDKEDAWKERHLNDTKYISSFVKNLLDDHLEFAPWLTGKNRHVMAVNGAVTDYTRKRLGIRKIREDGDLHHAVDAAVIAIVTQGNIQKLTNYSKQIERSRAFAKNPDGSYSDRETGEILKKDELIVRMSKHFPEPWPGFRRELEARVSDHPKELLESLRLPTYTPEELDALKPPFVSRMPTRKVRGAAHLETVVSPRLQKEGLIV

SEQ ID NO: 1074 - protein, 913 aa, unidentified
  REGION 1..913: note = Description of Unknown: uncultivated organism with predicted taxonomy: Selenomonas ruminantium
  REGION 1..913: note = MG15-147 effector
SDDYKMTISREMLLQEIRSLFASQRNYGNPYASKDFEEAYTSIFLSQRNFDEGPGEGSPYAGNQIEKMIGKCTLEGGELRAPKASYSFMQFNLLQKLCHIRIRGKAGERALTADEIKRLESLAWSNASLNYGHFRKELCLADTERFTDVYYKTEDFVQEEKKNKIKITAAYHEIAKALKDKGKDYIATLSIDQLDAIAYAFSAYKSDSKIRDYMQAKGVLSEDVDLLLANLSGFSKFGHISIKACRKLIPYLKKGMGYIKACEAAGYKDKLVQKKKTLSGNIEEVQEIPNPVVKRAVSQTIKVINAIVRKYGSPVEIHIELAREMARSKKDRDAMTTSMEKNRAENETIKRELMEKGLLSPKGLDIVKWKLYKEQQGVCAYSQKVIDVERLLHEGTYAEVDHILPYSRSFDDSYRNKVLVLTEENRKKGNRTPMEYFADMPERKHAFVTWCKGNIRDFKKREHLLKENYDREDAGWKDRHLNDTRYITKLVKDLIEKYLEMAPFNTNRKRHVVAVNGAVTAYVRKRLGIAKIREDGDLHHAVDAAVIACVTEGMINRISRYSKRREILYNNKLVDEETGEIIKGKEDFPEPWPWFRKELDARTSKNPALLLREMKLPTYTEAELENLREPYVSRMPCHKVRGAGHESKIRSPRLLKDGKTAIKTPLVELKLTNDKTKIAGYVNPESDKLLYDALYERLCKFGGKAEKAFAEPFYKPKADGGQGPLVKSVKISKLSTMNVELNKGNGIADNERRVRVDVFYVSEGKKKGYYLVPIYVADTIKPVLPKKAVKAHKAYDEWEEMKAEDFSFSLYPNDLIYIEHKTGIKFSLISKNSTLSKEINVKKGYFYYRGMDIAAGAINIENFDGVYQARGLGVKTLNCLRKGEIDILGNIRLINREYRHCFTKMKRDRYKKE

SEQ ID NO: 1075 - protein, 1098 aa, unidentified
  REGION 1..1098: note = Description of Unknown: uncultivated organism with predicted taxonomy: Selenomonas sp. AE3005
  REGION 1..1098: note = MG15-148 effector
MEQRYILGLDIGIASVGWAALALNDKDEPYRILDMNSRIFPEAEQPETGESLAAPRRQARGMRRRLRRRRHRLARLRSLLVREGVLSKAALAALYEKPVTDIYAVRCEGLERRLTPEEWTRVLLYFAKHRGFKSNRLAEAGNAEEGQVKEALKANAELLADYRTVGEMLYKDAKFQAHKRNKAAAYQMTVSRNMLLSEIKQLFAAQREQNNEHASEQFEEKYVEVFSSQRNFDEGPGGESPYGGNLIERMIGTCTLERAAGEKRAPKASYSFMRFSLLEKLSHIRITANGATRSLTDEERQQLEQLAWQSPSLTYAHLRKALGLHETERFNDLYYSKDIAETEKKKKFGFTAAYHEVRKALDKLEKDYIKKLSPDELDVIGYAFSVFKNEGNLRSYLLNNGIADEVCSTLLVNLKPFRKFGHISVKACRKLIPYLEQGMTYDAACRAAGYEPSGDNGLKHKFLSGAMEEVREIPNPVVRRAISQTIKVLNALIRRYGSPVEIHVELAREMARNFQDRRDMQHKMEDNRKANERIIQELRENGLLQPNGLDIVKWKLYKEQQGICAYSQKPFDVERLLHDGKYAEVDHILPYSRSLDDSYANKVLVMAGENQLKRNRTPLEYMADDEEKLNAFVCWANTSIRDLRKRQNLLRKNFHSEEKEWKDRHLNDTKYISRFVYNLLRQHLEFSPFIGGRKRHVLAVNGSVTAYVRKRLGINKIRANGDLHHAVDAVIIACVTQGMVNIIEQYSKARELWEISAKEPFPEPWQGFRKELEARTSDNPAEELRRVQVKNYTEEELQAVKPIFVSRMPRRKIRAAAHEATIHSAKHLNEGITVVKKKLSELKLTNDKMAIAGYFNPSSDKLLYQALLTRLQAFAGNAKKAFAEPFYKPRADGSPGPLVRSVKIAAKSVLQVDVNKGKGVAANDSMVRVDVFYRAEGKGKGYYLVPVYVADTVKDELPVKAVTRRKAYKDWDEMKSDEFLFSLYKDDLLLVRSAKDIELSFLGRKGESGNLLTTYKTREFLCYYQGTNRAACSITICNQDNTYAKESMGIKTLALLKKMQVDVLGQVSEAPAEKRQGFKQMKKDPHRRCGKNVSAPDD

SEQ ID NO: 1076 - protein, 1039 aa, unidentified
  REGION 1..1039: note = Description of Unknown: uncultivated organism with predicted taxonomy: Selenomonas ruminantium
  REGION 1..1039: note = MG15-149 effector
MDLRYVLGLDIGIASVGWAVLALDDNDEPYKIEALNSRIFEKAENPKDGSSLAAPRREARSMRRRLRRRRHRSERVRHLLVREGVLSAEEAESLCSSAIPKNAVRGKGLHALRYEGLDRKLSPVEWSRVLLYFAKHRGFKSNRKNGTADKDEGRVLQAIAVNMELLSKYRSAGEMLYLDERFKARKRNASDDYKMTISRDMLLQEIRILFASQRNYGNPYASEGLEEAYATIFLSQRNFDEGPGEGSPYAGNQIEKMIGKCTLEGEELRAPKASYSFMRFNLLQKLSHIRIRGKVGERALTEEEIKRLESLAWSNASLNYGHFRKELGLADTDRFADVYYKTEDFVQEEKKNKIKITASYHEIAKALKDKGKEYITTLSIDQLDAIAYAFSAYKSDSKIRAYMQAKGVSSEDAALLLANLSGFSKFGHISIKACRKLMPYFEKGMGYIKACEAAGYKDKLVQKRKTLSGNIKEVQEIPNPVVKRAVSQTIKVINAIVRQYGSPVEIHIELAREMARSKTDRDAMTSSMEKNRAANEKVKKELMEKGLLSPKGLDIVKWKLYKEQQGVCAYSQKVIDVERLLHEGTYAEVDHILPYSRSFDDSYRNKVLVLTEENRKKGNRTPMEYFADMPERKHAFVTWCKGNIRDFKKREHLLKENYDREDAGWKDRHLNDTRYITKLVKDIIEKYLEMAPFKTSRKRNVVAVNGAVTAYVRKRLGIAKIRENGDLHHAVDAAVIACVTEGMINRISRYSKRREILYNSKLVDEETGEIIKGKEDFPEPWPWFRKELDARTSKNPALLIRGLKLPTYAEEELENLHEPYVSRMPCHKVRGAGHKDTIRSPRLREEGRSVTKKALTELKLTKDKIRIEGYVNPESDRLLYEALYEKLCQFDGDAKKAFSAPFYKPKADGGQGPLVKKVKISEVSTLNVSVHKGKGIADSDRMLRVDVYYVSEGKKKGYYLVPIYVADTLKPVLPNKAVKAHKVYDEWEEMNVEDFVFSLYPNDLVYIEHKSGFKLKVVSKKSTLQNEMYGKTGVFYYCS

SEQ ID NO: 1077 - protein, 786 aa, unidentified
  REGION 1..786: note = Description of Unknown: uncultivated organism with predicted taxonomy: Selenomonas ruminantium
  REGION 1..786: note = MG15-150 effector
WDKKPEEIEKKKLPFAAPYHEIRKALDKREKGRIQKLTPGALDAIGYIFTVFKNDTKIAAALKEAGIDEADAAALMDYGLTFQGFGHISVKACRKLIPHLETGMTYDKACKEAGYDFHGKSGEKAKLLSGNLEEIREIPNPVVRRAIAQTVKVVNAVIRRYGSPVAVNVELAREMGRTFQERREMMKSMEDNNTKNEKLKEELKDYGVAHPSGLDIVKLKLYKEQGGVCAYSLAAMPIEKVLNDYDYAEVDHILPYSRSFDDSYANKVLVLAKENRDKGNRTPMEYMEKTPGKKHDFVTWVKASVRNPKKRDNLLLEKFDEDKEAAWKERHLTDTKYIGSFVANLLRDHLDFAPWLNGRKQHVLVVNGAVTDYTRKRLGIRKIREDGDLHHAVDAAVIATVTQGNIQKLTNYSKQIERSRAFDKTANGSYADRETGEVLKKDELMVRMSKHFPEPWPGFRHELEARVSDHPKELLESLRLPTYTPEELDALKPPFVSRMPTRKVRGAAHLETVVSPRLQKEGLIVKKVSLEALKLTKEKDAIENYYAPESDRLLYEALLQRLKACDGDGKKAFAEPFHKPKADGTPGPVVKKVKIAEKSTLSVPVHHGRGLAANGGMVRVDVFFIPEGKEKGYYLVPVYTSDVVCGALPMRAVIGAKPYDEWKNMKEEQFLFSLYPNDLVYIESKRGIKGKLPDKMAKKSSLLQTRTQTEGLFYYKGTDIFTASIKVVATDGTYEFRGLGVRTLQKLEKWTVDVLGGALHPLHQEVRQGFSVMKRDPHSPKTMDDC

SEQ ID NO: 1078 - protein, 1098 aa, unidentified
  REGION 1..1098: note = Description of Unknown: uncultivated organism with predicted taxonomy: Selenomonas sp. AE3005
  REGION 1..1098: note = MG15-151 effector
MEQRYILGLDIGIASVGWAALALNDKDEPYRILDMNSRIFPEAEQPKTGESLAAPRRQARGMRRRLRRRRHRLARLRSLLVREGVLSKAALAALYEKPVTDIYAVRCEGLERRLTPEEWTRVLLYFAKHRGFKSNRLAEAGNAEEGQVKEALKANAELLADYRTVGEMLYKDAKFQAHKRNKAAAYQMTVSRNMLLSEIKQLFAAQREQNNEHASEQFEEKYVEVFSSQRNFDEGPGGESPYGGNLIERMIGTCTLERAAGEKRAPKASYSFMRFSLLEKLSHIRITANGATRSLTDEERQQLEQLAWQSPSLTYAHLRKALGLHETERFNDLYYSKDIAETEKKKKFGFTAAYHEVRKALDKLEKDYIKKLSPDELDVIGYAFSVFKNEGNLRSYLLNNGIADEVCSTLLVNLKPFRKFGHISVKACRKLIPYLEQGMTYDAACRAAGYEPSGDNGLKHKFLSGAMEEVREIPNPVVRRAISQTIKVLNALIRRYGSPVEIHVELAREMARNFQDRRDMRHKMEDNRKANERIIQELRENGLLQPNGLDIVKWKLYKEQQGICAYSQKPFDVERLLHDGKYAEVDHILPYSRSLDDSYANKVLVMAGENQLKRNRTPLEYMADDEEKLNAFVCWANTSIRDLRKRQNLLRKNFHSEEKEWKDRHLNDTKYISRFVYNLLRQHLEFSPFIGGRKRHVLAVNGSVTAYVRKRLGINKIRANGDLHHAVDAVIIACVTQGMVNIIEQYSKARELWEISAKEPFPEPWPGFRKELEARTSDNPAEELRRVQVKNYTEEELQAVKPIFVSRMPRRKIRAAAHEATIHSAKHLNEGITVVKKKLSELKLTNDKMAIAGYFNPSSDKLLYQALLTRLQAFAGNAKKAFAEPFYKPRADGAPGPLVRSVKIAAKSVLQVDVNKGKGVAANDSMVRVDVFYRAEGKGKGYYLVPVYVADTVKDELPLKAVTQRKDYADWEIMRSKDFLFSLYKDDLLLVRSTKDIEMKFNEKKKEKSTLPAIFRTREVFAYYQGTDSSTASITVCNHDNTYGKRGMGVKTIALLKKMQVDVLGQISEAPAEKRQGFKQMKKDPHRRCGKNVSAPDD

SEQ ID NO: 1079 - protein, 1100 aa, unidentified
  REGION 1..1100: note = Description of Unknown: uncultivated organism with predicted taxonomy: Selenomonas sp. AE3005
  REGION 1..1100: note = MG15-152 effector
MEQRYVLGLDIGIASVGWAALALNDKDEPYRILDMNSRIFPVAEQSDGASLAAPRRQARGIRRRLRRRRHRLDRVRRLLVREGVLNKAGLTALYEKPVTDIYVIRYEGLERRLTPEEWARVLLFFVKHRGFKSNRLAETANDEDGQVKAALKANEELLVGYRTVGEMLYKDAKFQGHKRNKTADYQMTVSRNMLLEEIKQLFVAQREQNNGHATESFEEKYVEIFSSQRNFDEGPGGDSPYGGNLIEKMIGACTLERANGEKRAPKASYSFMRFNLLEKLSHIRITANGTMRSLTDEERRQLEQLAWRSPSLTYAHLRKALGLQETERFNDLYYSKDTAETEKKAKFSFTAAYHEIRKALDKVEKDYIKKLSPNELDVIGYAFSVFKNERNLRSYLLNNGITENICSTLLDNLKPFRKFGHISVKACRKLIPYLEKGMTYYDACKAAGYDILGKNSRKQKFLSGGMEEVREIPNPVVRRAISQTIKVLNALIRRYGSPVEIHVELAREMARSFQDRKDMHNKMENNRKANEQIIKELRENGLLQPNGLDIVKWKLYKEQQGVCAYSQKTFDVERLLHDGKYDGKYAEVDHILPYSRSFDDSYTNKVLVMAGENQHKGNRTPWEYMRDNEEKWTSFACWTNTAIRDFRKRQNLLRKNFCSEEKEWKERHLNDTKYISRFVYNLLRNHLEFNPFMGGRNRHVLAVSGGVTAYVRKRLGINKIRANGDLHHAVDAVIIACVTQGMVNIIEQYSKAKELWEISAKEPFPEPWIGFRKELEARTSDNPAEALRRMRCKNYSEEELQALKPIFVSRMPRRKVRAAAHEETIRSAKHLDEGFTVVKKKLSDLKLTKDKMAIEGYFNPSSDTLLYQALLERLQKFDGKAAKAFAEPFYKPKADGTPGPLVRTVKIAAKSVLQVDVNKGKGVTDNESMVRVDIFYRAEGKRKGYYLVPVYVADTIKDELPIKAVTRGKPHKDWEEMNPDEFQFSLYKDDLLLVRSTKDIDMKFNEKNGEGALPPIFRTREVLVYYQATDRATASITVCNHDNTYGKRGMGVKTIALLKKMQVDVLGQVSEFPPMKRQGFKQMKKDPHRRCDRNVSASND

SEQ ID NO: 1080 - protein, 999 aa, unidentified
  REGION 1..999: note = Description of Unknown: uncultivated organism with predicted taxonomy: Selenomonas sp. AE3005
  REGION 1..999: note = MG15-153 effector
VTDIYAIRYEGLERRLTTEEWARVLLFFVKHRGFKSNRLAETANDEDGQVKDAIKANAELLVGYRTVGEMLYKDAKFQGHKRNKTADYQMTVSRNMLLEEIKQLFVAQREQNNGHATESFEEKYLEIFSSQRNFDEGPGGNSPYGGNLIEKMIGVCTLERANGEKRAPKASYSFMRFSLLEKLSHIRLTANGTTRSLTDEERSRLEQLAWQSPSLTYAHLRKALGLQETERFNDLYYSKDTAETEKKAKFSFTAAYHEIRKALDKLEKDYIKKLSPNELDVIGYAFSVFKNERNLRSYLLNNGITENVCSTLLDNLKPFRKFGHISVKACRKLIPYLETGMTYYDACKAAGYDVLGKNGCKEKFLSGGMEEVREIPNPVVRRAISQTIKVLNALIRRYGSPVEIHVELAREMARSFQDRRDMHNKMENNRKANEQIIKELRENGLLQPNGLDIVKWKLYKEQQGICAYSQKTFDVERLLHDGKYAEVDHILPYSRSFDDSYTNKVLVMAGENQHKGNRTPWEYMRDNEEKWTSFACWTNTAIRDFRKRQNLLRKNFCSEEKEWKERHLNDTKYISRFVYNLLRNHLEFSPFMGGRNRHVLAVSGGVTAYVRKRLGINKIRANGDLHHAVDAVIIACVTQGMVNIIEQYSKAKELWEISAKEPFPEPWIGFRKELEARTSDNPAEALRRMRCKNYSEEELQALNPIFVSRMPRRKVRAAAHEETIRSAKHLDEGFTVVKKKLSDLKLTKDKMAIEGYFNPSSDTLLYQALLERLQKFDGKAAKAFAEPFYKPKADGTPGPLVRTVKIAAKSVLQVDVNKGKGVTDNESMVRVDVFYRSEGKGKGYYLVPIYVADTVKDELPLKAVTPRKCYMDWETMKPEEFLFSLYKDDLLLVCSSKDIDMKLNEKNGEGVLPPIFRTREVLVYYQATDRATASITVCNHDNTYGKRGMGVKTIALLKKMHVDVLGQVSEFPPMKRQGFKQMKKDPHRRCDRNVSASND

SEQ ID NO: 1081 - protein, 963 aa, unidentified
  REGION 1..963: note = Description of Unknown: uncultivated organism with predicted taxonomy: Selenomonas ruminantium
  REGION 1..963: note = MG15-154 effector
KDGSSLAAPRREARSMRRRLRRRRHRSERVRHLLVREGVLSAEGAESLCSSAIPKNAMLGKGLHALRYEGLDRKLSPVEWSRVLLYFAKHRGFKSNRKNGTADKDEGRVLQAIAVNMELLSKYRSAGEMLYLDERFKARKRNASDDYKMTISRDMLLQEIRILFASQRNYGNPYASEGVEEAYTTIFLSQRNFDEGPGEGSPYAGNQIEKMIGKCTLEGEELRAPKASYSFMRFNLLQKLSHIRIRGKVGERALTEEEIKRLESLAWSNASLNYGHFRKELGLADTDRFADVYYKTEDFVQEEKKNKIKITAAYHEIAKALKDKGKEYITTLSIDQLDAIAYAFSAYKSDSKIRAYMQAKGVSSEDAALLLANLSGFSKFGHISIKACRKLMPYLEKGMGYIKACEAAGYKDKLVQKRKTLSGNIEEVQEIPNPVVKRAVSQTIKVINAIVRQYGSPVEIHIELAREMARSKTDRDAMTSSMEKNRAANEKVKKELMEKGLLSPKGLDIVKWKLYKEQQGVCAYSQKVIDVERLLHEGTYAEVDHILPYSRSFDDSYRNKVLVLTEENRKKGNRTPMEYFADMPERKHAFVTWCKGNIRDFKKREHLLKENYDREDAGWKDRHLNDTRYITKLVKDIIEKYLEMAPFKTSRKRNVVAVNGAVTAYVRKRLGIAKIRENGDLHHAVDAAVIACVTEGMINRISRYSKRREILYNSKLVDEETGEIIKEKEDFPEPWPWFRKELDARTSKNPALLIRELKLPTYAEEELENLHEPYVSRMPCHKVRGAGHKDTIRSPRLRKEGRSVTKKPLTELKLTKDKTKIEGYVNPESDRLLYEALYEKLCQFDGDAKKAFSAPFYKPKADGGQGPLVKKVRISEVSTLNVAVHKGKGIADSDRMLRVDVYYVSEGKKKGYYLVPIYVADTLKPVLPNKAVKAHKACDEWEEMKAEDFSFSLYPNDLIYIEH

SEQ ID NO: 1082 - protein, 910 aa, unidentified
  REGION 1..910: note = Description of Unknown: uncultivated organism with predicted taxonomy: Selenomonas sp. AE3005
  REGION 1..910: note = MG15-155 effector
KANEELLTGYRTVGEMLYKDAKFQGHKRNKTADYQMTVSRNMLLEEIKQLFVAQREQNNGHATESFEEKYLEIFSAQRNFDEGPGGNSPYGGNLIERMIGTCTLERASGEKRAPKASYSFMRFSLLEKLSHIKIKTNGTTRSLTSEERRQLEQLAWQSPSLTYAHLRKALGLQDTERFNDLYYTKDIAGTEKKTKFGFTVAYHEIRKALDKMEKAYIKKLSPEDLDVIGYAFSVFKNEGNLSAYLLNHGITKDVCSILLANLKPFRKFGHISVKACRKLIPYLEQGMTYYDACIAAGYDVAGKNSRKQKFLSGGMEEVREIPNPVVRRAISQTIKVLNALIRRYGSPVEIHVELAREMARSFQDRKDMHNKMENNRKANEQIIKELRENGLLQPNGLDIVKWKLYKEQQGVCAYSQKTFDVERLLHDGKYAEVDHILPYSRSFDDSYTNKVLVMAGENQHKGNRTPWEYMSNNEEKWTAFACWTNTAIRDFRKRQNLLRKKFCSEEKEWKERHLNDTKYISRFVYNLLRNHLEFSPFMGGRNRHVLAVSGGVTAYVRKRLGINKIRANGDLHHAVDAVIIACVTQGMVNIIEQYSKAKELWEISAKEPFPEPWIGFRKELEARTSDNPAEALRRMRCKNYSEEELQALKPIFVSRMPRRKVRASAHEDTIRSAKYLDEGFTIVKKKLSDLKLTKDKMAIEGYFNPSSDTLLYQALLKRLQEFDGKAAKAFADPFYKPRADGTPGPLVRTVKIKTKSVLQVDVNKGKGVTDNKSMVRVDIFYRAEGKRKGYYLVPVYVADTIKDELPIKAVTKGKAYKDWDEMKPDEFLFSLYKDDLLLVRSVKDIELSFLGKKGELGNFLPTYKTREFLCYYQGTNRGACSITICNQDNTYAKESMGIKTLALLKKMQVD

SEQ ID NO: 1083 - protein, 1111 aa, unidentified
  REGION 1..1111: note = Description of Unknown: uncultivated organism with predicted taxonomy: Selenomonas sp. AE3005
  REGION 1..1111: note = MG15-156 effector
YLFINEIEMGRKVMEQRYILGLDIGIASVGWAALALNDKDEPYRILDMNSRIFPEAEQPKTGESLAAPRRQARGMRRRLRRRRHRLARLRSLLVREGVLSKAALAALYEKPVTDIYAVRCEGLERRLTPEEWTRVLLYFAKHRGFKSNRLAEAGNAEEGQVKEALKANAELLADYRTVGEMLYKDAKFQAHKRNKAAAYQMTVSRNMLLSEIKQLFAAQREQNNEHASEQFEEKYVEVFSSQRNFDEGPGGESPYGGNLIERMIGTCTLERAAGEKRAPKASYSFMRFSLLEKLSHIRITANGATRSLTDEERQQLEQLAWQSPSLTYAHLRKALGLHETERFNDLYYSKDIAETEKKKKIGFTAAYHEVRKALDKLEKDYIKKLSPDELDVIGYAFSVFKNEGNLRSYLLNNGIADEVCSTLLVNLKPFRKFGHISVKACRKLIPYLEQGMTYDAACRAAGYEPSGDNGLKHKFLSGAMEEVREIPNPVVRRAISQTIKVLNALIRRYGSPVEIHVELAREMARNFQDRRDMQHKMEDNRKANERIIQELRENGLLQPNGLDIVKWKLYKEQQGICAYSQKPFDVERLLHDGKYAEVDHILPYSRSLDDSYANKVLVMAGENQLKRNRTPLEYMADDEEKQNAFVCWANTSIRDLRKRQNLLRKNFHSEEKEWKDRHLNDTKYISRFVYNLLRQHLEFSPFIGGRKRHVLAVNGSVTAYVRKRLGINKIRANGDLHHAVDAVIIACVTQGMVNIIEQYSKARELWEISAKEPFPEPWPGFRKELEARTSDNPAEELRRVQVKNYTEEELQAVKPIFVSRMPRRKIRAAAHEATIHSAKHLNEGITVVKKKLSELKLTNDKMAIAGYFNPSSDKLLYQALLTRLQAFAGNAKKAFAEPFYKPRADGSPGPLVRSVKIAAKSVLQVDVNKGKGVAANDSMVRVDVFYRAEGKGKGYYLVPVYVADTVKDELPLKAVTQRKDYADWEIMRSKDFLFSLYKDDLLLVRSTKDIEMKFNEKKKEKSTLPAIFRTREVFAYYQGTDSSTASITVCNHDNTYGKRGMGVKTIALLKKMKVDVLGQVSEAPAEKRQGFKQMKKDPHRGCGKNVSAPDD

SEQ ID NO: 1084 - protein, 861 aa, unidentified
  REGION 1..861: note = Description of Unknown: uncultivated organism with predicted taxonomy: Megasphaera stantonii
  REGION 1..861: note = MG15-157 effector
EQPKTGASLAAPRREARGSRRRTRRRRHRMERLRHLFVREGLMTADTLAALFEAPADVYQLRAEGLSRRLDAGEWARVLYHIAKHRGFKSNRKSAASDADEGKVLDAVKENAELLKNYKTVGEMLFRDEKFRDAKRNKGGSYSFCVGRDMLADEIAALFDAQRRNGNQHASEEFEKACLKIFADQRSFDDGPDINSPSPYAGNQIEKMIGSCSLEPKEKRAPKASYSFMRFSLLQKINHLRLKDAKGEERPLDDEERAAVEALAWKSASLTYGAIRKALSLSDDLRFTDLYYRWDKKPEEIEKKKLPFAAPYHEIRKALDKREKGRIQKLTPDALDAIGYIFTVFKNDTKIAAALKTAGVEEEDAAALMDYGLTFRGFGHISVKACRKLIPYLEKGMTYDKACKEAGYDLQKTGGEKTKLLSGNLEEIREIPNPVVRRAIAQTVKVVNAVIRRYGSPVAINVELAREMGRSFQERRDMMKSMEDNNAENEKRKEELKGYGVAHPNGLDIVKLKLYKEQGGVCAYSLAAMPIEKVLKDPSYAEVDHILPYSRSFDDSYANKVLVLAKENRDKGNRTPMEYMANLPERKHAFITWVKSNVRNPKKRDNLLLEKFDGDKEDAWKERHLNDTKYISSFVKNLLEDHLEFAPWLTGRKRHVMAVNGAVTDYTRKRLGIRKIREDGDLHHAVDAAVIAIVTQGNIQKLTNYSKRIEHAFIKNRDGSYTHPDTGEILKKDELMAQMSRHFPEPWPGFRRELEARVSDHPKELLESLRLPTYTPEEIDALKPPFVSRMPTRKVRGAAHLETVVSPRLQKEGLIVKKVSLDALKLTKEKDAIENYYAPESDRLFYEALLQRLQACDGNGK

SEQ ID NO: 1085 - protein, 764 aa, unidentified
  REGION 1..764: note = Description of Unknown: uncultivated organism with predicted taxonomy: Selenomonas ruminantium
  REGION 1..764: note = MG15-158 effector
YYKTEDFVQEEKKNKIKITAAYHEIAKALKDKGKEYITTLSIDQLDAIAYAFSAYKSDSKIRAYMQAKGVSSEDAAILLANLSGFSKFGHISIKACRKLMPYLEKGMGYIKACEAAGYKDKLVQKRKTLSGNIEEVQEIPNPVVKRAVSQTIKVINAIVRQYGSPVEIHIELAREMARSKTDRDAMTSSMEKNRAANEKVKKELMEKGLLSPKGLDIVKWKLYKEQQGVCAYSQKVIDVERLLHEGTYAEVDHILPYSRSFDDSYRNKVLVLTEENRKKGNRTPMEYFADMPERKHAFVTWCKGNIRDFKKREHLLKENYDREDAGWKDRHLNDTRYITKLVKDIIEKYLEMAPFKTTRKRNVVAVNGAVTAYVRKRLGIAKIRENGDLHHAVDAAVIACVTEGMINRISRYSKRREILYNNKLVDEETGEIIKGKEDFPEPWPWFRKELDARTGKNPALLIRDLKLPTYTEAELENLHEPYVSRMPCHKVRGAGHEAKIRSPRLLKDGKTAIKTPLVKLNLTNDKTKIAGYVNPESDKLLYDALYERLCKFGGKAEKAFAEPFYKPKADGGQGPLVKSVKISKSSTMNVELNKGNGIADNERRVRVDVFYVSEGKKKGYYLVPIYVADTIKPVLPNKAVKAHKACDEWEEMKAEDFSFSLYPNDLIYIEHKTGIKFSLISKNSTLSKEINIKKGYFYYRGMDIAAGAINIENVDGVYQARGLGVKTLNCLRKGEIDILGNIRLINREYRHCFTKMKRDRYKKE

SEQ ID NO: 1086 - protein, 1102 aa, unidentified
  REGION 1..1102: note = Description of Unknown: uncultivated organism with predicted taxonomy: Selenomonas ruminantium
  REGION 1..1102: note = MG15-159 effector
MDLRYVLGLDIGIASVGWAVLALDDNDEPYKIEALNSRIFEKAENPKDGSSLAAPRREARSMRRRLRRRRHRSERVRHLLVREGVLSAEGAESLCSSAIPKNAMLGKGLHALRYEGLDRKLSPVEWSRVLLYFAKHRGFKSNRKNGTADKDEGRVLQAIAVNMELLSKYRSAGEMLYLDERFKARKRNASDDYKMTISRDMLLQEIRILFASQRNYGNPYASEGLEEAYATIFLSQRNFDEGPGEGSPYAGNQIEKMIGKCTLEEEELRAPKASYSFMRFNLLQKLSHIRIRGKVGERALTEEEIKRLESLAWSNASLNYGHFRKELGLADMDRFADVYYKTEDFVQEEKKNKIKITAAYHEIAKALKDKGKEYITTLSIDQLDAIAYAFSAYKSDSKIRAYMQAKGVSSEDAALLLANLSGFSKFGHISIKACRKLMPYLEKGMGYIKACEAAGYKDKLVQKRKTLSGNIEEVQEIPNPVVKRAVSQTIKVINAIVRQYGSPVEIHIELAREMARSKTDRDAMTSSMEKNRAANEKVKKELMEKGLLSPKGLDIVKWKLYKEQQGVCAYSQKVIDVERLLHEGTYAEVDHILPYSRSFDDSYRNKVLVLTEENRKKGNRTPMEYFADMPERKHAFVTWCKGNIRDFKKREHLLKENYDREDAGWKDRHLNDTRYITKLVKDIIEKYLEMAPFKTSRKRNVVAVNGAVTAYVRKRLGIAKIRENGDLHHAVDAAVIACVTEGMINRISRYSKRREILYNSKLVDEETGEIIKEKEDFPEPWPWFRKELDARTSKNPALLTRELKLPTYAEEELENLHEPYVSRMPCHKVRGAGHKDTIRSPRLRKEGRSVTKKPLTELKLTKDKTKIEGYVNPESDRLIYEALYEKLCQFDGDAKKAFSAPFYKPKADGGQGPLVKKVKISEVSTLNVSVHKGKGIADSDRMLRVDVYYVSEGKKKGYYLVPIYVADTLKPVLPNKAVKAHKVYDEWEEMNVEDFVFSLYPNDLVYIEHKSGFKLKVVSKKSTLQNETYGKTGVFYYCSMNISTGALNLENLDGTYQVESLGVKTLICLRKGEIDTLGNIRLLENEVRKGFSYMKKDRYRKV

SEQ ID NO: 1087 - protein, 911 aa, unidentified
  REGION 1..911: note = Description of Unknown: uncultivated organism with predicted taxonomy: Megasphaera stantonii
  REGION 1..911: note = MG15-160 effector
RRRTRRRRHRMERLRHLFVREGLMTADALAALFEAPADVYQLRAEGLSRRLDEGEWARVLYHIAKHRGFKSNRKSAASDADEGKVLDAVKENAELLKNYKTVGEMLFRDEKFRDAKRNKGGSYSFCVGRDMLADEIAALFDAQRRNGNKHASEEFEKACLKIFADQRSFDDGPDINSPSPYAGNQIEKMIGSCSLEPKEKRAPKAGYSFMRFSLLQKINHLRLKDAKGEERPLDDEECAAVEALAWKSASLTYGAIRKALSLSDDLRFTDLYYRWDKKPEEIEKKKLPFAAPYHEIRKALDKREKGRIQKLTPDALDAIGYIFTVFKNDTKIAAALKTAGVEEEDAAALMDYGLTFRGFGHISVKACRKLIPHLEKGMTYDKACKEAGYDLQKTGGEKTKLLSGNLEEIREIPNPVVRRAIAQTVKVVNAVIRRYGSPVAINMELAREMGRSFQERRDMMKSMEDNNAENEKRKEELKGYGVAHPNGLDIVKLKLYKEQGGVCAYSLAAMPIEKVLKDPSYAEVDHILPYSRSFDDSYANKVLVLAKENRDKGNRTPMEYMANLPERKHAFITWVKSNVRNPKKRDNLLLEKFDGDKEDAWKERHLNDTKYISSFVKNLLEDHLEFAPWLTGKKRHVMAVNGAVTDYTRKRLGIRKIREDGDLHHAVDAAVIAIVTQGNIQKLTNYSKRIEHAFIKNRDGSYTHPDTGEILKKGELMAQMSRHFPEPWPGFRRELEARVSDHPKALLESLRLPTYTPEELDALKPPFVSRMPTRKVRGAAHLETVVSPRLQKEGLIVKKVSLDALKLTKEKDAIENYYAPESDRLLYEALLRRLKEFDGDGKKAFAEPFHKPKADGTPGPVVKKVKIAEKSTLSVPVHHGRGLAANGGMVRVDLFFIPEGKERGYYLVPVY

SEQ ID NO: 1088 - protein, 1112 aa, unidentified
  REGION 1..1112: note = Description of Unknown: uncultivated organism with predicted taxonomy: Selenomonas sp. AE3005
  REGION 1..1112: note = MG15-161 effector
MDRRYALGLDIGIASVGWAVLALDDADNPYRIINMGTRIFDAAEHPKDGASLAAPRREARSARRRLRRRHHRIERTRKLLIREGLLTKDALQHLFDAPPEKDVYTLRFEGLECCLDGEEWARVLLFFSKHRGFRSNRIVDDEAGDEGKVLSAIRQNEERLQGYRTVGEMLARDPKFADRKRNKAEDYQLTVSRTMLEKEICTLFDAQRQWKNPHASEDFEQEYLEIFSSQRHFDEGPGGRSPYGGDQIEKMIGRCTLEPKEKRAPKASYSFQRFSLLQNINHLRIKSQNTERSLSDEERKAVEALCWKSPSVTYYKIRQEVNLPDDARFAGLYYDKAPEEVEKKTKFSYTVPYHEIRKVLDKWKKGGIQELDVHQLDTIGYAFTVYKNDDRIHRYLCGHGISDAIAEVLVQNLKSFQKFGHISLKACQKLIPFLEQGMVYSDACKAAGYAAPDAEPKKFLSGGMEEIREIPNPVVRRSLSQTVKIINAVIREYGSPVEVHIELAREMARSRQDRDKMEKDIKNNRARNEAIKKELQELGLRNPKGQDIIKWRLYKEQDGFCAYSQKQFDVERLLHDGSYAEIDHILPYSRSFDDSYHNKVLVMAAENRQKGNRTPLEYMAGEEERIHAFRIWVNSRIHDFRKRQNLLREHFDKESTEKDWKERNLNDTKYISRFIYNLIRQHLQFAPFRTDRKQHIISVNGAVTSYIRKRLGIPKIREDGDLHHAVDAVVIASITQGTIQKVTRYSREKETLYHCDSKGRLIDTSTGEILSPEEHQRRLAEKFPEPWPCFRKEIEARISHHPAENLRLLHLPTYTEEELAELEKPIFVSRMPNHKVRGAAHEKSLRSPRLQEDGIIVYSTPLTKLKLGKDNNSILNYYNPDSDRLLYTALLQRLQKFQGDAEKAFKEPFHKPKADGTLGPVVRKVKVTDKSNLNVSLNHGHSIAKNDSDGGMVRVDVYYIPDGKKHGYYLVPVYVSDVVRKTLPNKAIVADTPYAEWPEMREEDFLFSLYKNDLIHLRKKKPAKMKVIQKESTLQKEIAVSEGNAYYISTDSATASIKIINHDNTYYTKGLGVKTLLSLEKMQVDVLGNITPAPREPRQDFSAMKRDRFARK

SEQ ID NO: 1089 - protein, 1082 aa, unidentified
  REGION 1..1082: note = Description of Unknown: uncultivated organism with predicted taxonomy: Megasphaera
  REGION 1..1082: note = MG15-162 effector
MNYVLGLDVGIASVGWAVLELNEEDNPIRIEGLGARIFDKAEVPKTGASLAAPRRMSRGIRRVIRRRRFRLQRVRSYLKRHNILPAEKVDHLYDVPSAIDIYELRKRALTEKVTAEEWARLLIFFAKHRGFKSNRKKASGDADEGEMLKAIAANAEILKNYRTVGEMLCDNEKFRKRKRNRDGAYNFTVSRAMLMEEIHTLFEIQRNLGQKFADEKIEEEYVILFAAQRKFDEGPGENSPYAGNQIEKMIGSCTLEGKKEKRAPKASYAFMAFNLWQKINHLKVNRRGSERFLTEEERRRIADLAWKKEKLTYGSLREVLFLDPEDRFVGLRYDLKKEKEEDLEEPVSEAEKMSFSWVKDYHSIRKALDKVEKNRILKLSHEQLDTIATAFSVYKNEETIEKYLEEGGIEKADREALLERLSGFSKFGHLSLKACYKILPFLEKGEVYSRACERAGYDFSKSSLENIDDIPNPVVKRSISQTLKVINAIILRYGNPVEVHIELARELAKNFRDRKKMEKGMQENQAKNEKIRQRLMSEFGVLRPKGMDIVKFKLCEEQNGECAYSQKHFDMEKLLRDPSYAEVDHIIPYSRSFDDSYNNKVLVLTKENREKRNRIPMEYLADATERKNRFIHWVKSTIRNSRKRENLLRIDYTETTENEWKRRNLQDTQYISKYLYNYLRHHLVLAKGYTERKRRIIPVNGAVTAYFRKRLGINKIRENGDLHHAVDAVIIACATQGIVNKVSRYSKSRELWDYEVDMETGEVLQKKNKNTKDVFPEPWLNFRYELEQKVRVRPLDIPETADITEMEEPFVSHMPNRKIHGPAHKETIRSGRLKEEGYTISKTALTDLKLTEDKEEIKGYYNKESDRLLYEALKKQLQRYGGKAKEAFKEPFHKPKADGTPGPIVNKVKIMEKSTMLIPVNGGKGLASNGNMVRIDVFRVEEKGKKKYYFIPVYVADTVKEELPNRAVLAHKPYEAWKIMKEEDFIFSLYPNDLIFVDAGKGIPFKAALKGSTLDPEKKASRFLMYYKGADIATGSISGVNHDETYKARGIGIQSLREIKKCCIDVLGNISFASKEKRQTFR

SEQ ID NO: 1090 - protein, 767 aa, unidentified
  REGION 1..767: note = Description of Unknown: uncultivated organism with predicted taxonomy: Megasphaera stantonii
  REGION 1..767: note = MG15-163 effector
LREVLFLDPEDRFVGLRYDLKKEKEEDLEEPVSEAEKMSFSWVKDYHSIRKALDKVEKNRILKLSHEQLDTIATAFSVYKNEETIEKYLEEGGIEKADREALLERLSGFSKFGHLSLKACYKILPFLEKGEVYSRACERAGYDFSKSSLENIDDIPNPVVKRSISQTLKVINAMILRYGNPVEVHIELARELARNFRDRKKMEKGMQENQAKNEKIRQRLISEFGVLRPKGMDIVKFKLCEEQNGECAYSQKHFDMEKLLKDPSYAEVDHIIPYSRSFDDSYNNKVLVLTKENREKRNRIPMEYLADAPERKNRFIHWVKSTIWNSRKRENLLRIDYTETTENEWKRRNLQDTQYISKYLYNYLRHHLVLAKGYTERKRRIIPVNGAVTAYIRKRLGINKIRENGDLHHAVDAVIIACATQGIVNKVSRYSKSRELWDYEVDMETGEVLQKKNKNTKDVFPEPWLNFRYELEQKVRVRPLDIPETADITEMEEPFVSHMPNRKIHGPAHKETIRSGRLKEEGYTISKTALIDLKLTEDKEEIKGYYNKESDRLLYEALKKQLQRYGGKAKEAFKEPFHKPKADGTPGPIVNKVKIMEKSTMLIPVNGGKGLASNGNMVRIDVFRVEEKGKKKYYFIPVYVADTVKEELPNRAVLAHKPYEAWKIMKEEDFIFSLYPNDLIFVDAGKEIPFKAALKGSTLDPEKKASRFLMYYKGADIATGSISGVKHDETYKARGIGIQSLRKNKKCCIDVLGNISFASKEKRQTFR

SEQ ID NO: 1091 - protein, 1038 aa, unidentified
  REGION 1..1038: note = Description of Unknown: uncultivated organism with predicted taxonomy: Megasphaera
  REGION 1..1038: note = MG15-164 effector
MNYVLGLDVGIASVGWAVLELNEEDNPIRIEGLGARIFDKAEVPKTGASLAAPRRMSRGIRRVIRRRRFRLQRVRSYLKRHNILPAEKVDHLYDVPSAIDIYELRKRALTEKVTAEEWARLLIFFAKHRGFKSNRKKASGDADEGEMLKAIAANAEILKNYRTVGEMLCDNEKFRKRKRNRDGAYNFTVSRAMLMEEIHTLFEIQRNLGQKFADEKLEEEYVILFAAQRKFDEGPGENSPYAGNQIEKMIGSCTLEGKKEKRAPKASYAFMAFNLWQKINHLKVNRRGSERFLTEEERRRIADLAWKKEKLTYGSLRKVLSLDPEDRFVGFRYDLKKGKAENLEEPVSEAEKMSFSWVKDYHSIRKALDKVEKNRILKLSHEQLDTIATAFSVYKNEETIEKYLEEGGIGKADREALLERLSGFSKFGHLSLKACYKLLPFLEKGEVYSRACELAGYDFSKSSLENIDDIPNPVVKRSISQTLKVINAIILRYGNPVEVHIELARELARNFRDRKKMEKGMQENQAKNEKIRQRLISEFGVLRPKGMDIVKFKLCEEQNGECAYSQKHFDMEKLLRDPSYAEVDHIIPYSRSFDDSYNNKVLVLTKENREKRNRIPMEYLADAPERKNRFIHWVKSTIRNSRKRENLLRTDYTATTENEWKRRNLQDTQYISKYLYNYLRHHLVLAKGYTERKRRIIPVNGAVTAYFRKRLGINKIRENGDLHHAVDAVIIACATQGIVNKVSRYSKSRELWDYEVDMETGEVLQKKNENRKDIFPEPWLNFRYELEQKVRVRPLDIPETADITEMEEPFVSHMPNRKIHGPAHKETIRSGRLKEEGYTISKTALTDLKLTEDKEEIKGYYNKESDRLLYEALKKQLQRYGGKAKEAFKEPFHKPKADGTPGPIVNKVKIMEKSTMPVPVNGGKGLASNGNMVRIDVFRSEEKGKKKYYFIPIYVADTVKEELPNRAALAHKPYEAWKIMKEEDFIFSLYPNDLIFVDAGKEIPFKAALKGSTLDPEKKASRFLMYYKGADIAGGTIN

SEQ ID NO: 1092 - protein, 846 aa, unidentified
  REGION 1..846: note = Description of Unknown: uncultivated organism with predicted taxonomy: Megasphaera stantonii
  REGION 1..846: note = MG15-165 effector
ENSPYAGNQIEKMIGSCTLEGKKEKRAPKASYAFMAFNLWQKINHLKINRRGSERFLTEEERRRIADLAWKKEKLTYGSLREVLFLDPEDRFVGLRYDLKKEKEEDLEEPVSEAEKMSFSWVKDYHSIRKALDKVEKNRILKLSHEQLDTIATAFSVYKNEETIEKYLEEGGIGKADGEALLERLSGFSKFGHLSLKACYKLLPFLEKGEVYSRACELAGYDFSKSSLENIDDIPNPVVKRSISQTLKVINAIILRYGNPVEVHIELARELARSFRDRKKMEKGMQENQAKNEKIRQRLISEFGVLRPKGMDIVKFKLCEEQNGECAYSQKHFDMEKLLKDPSYAEVDHIIPYSRSFDDSYNNKVLVLTKENREKRNRIPMEYLADAPERKNRFIHWVKSTIRNSRKRENLLRTDYTATTENEWKRRNLQDTQYISKYLYNYLRHHLVLAKGYTERKRRIIPVNGAVTAYFRKRLGINKIRENGDLHHAVDAVIIACATQGIVNKVSRYSKSRELWDYEVDMETGEVLQKKNKNTKDVFPEPWLNFRYELEQKVRVRPLDIPETADITEMEEPFVSHMPNRKIHGPAHKETIRSGRLKEEGYTISKTALIDLKLTEDKEEIKGYYNKESDRLLYEALKKQLQRYGGKAKEAFKEPFHKPKADGTPGPIVNKVKIMEKSTMPVPVNGGKGLASNGNMVRIDVFRVEEKGKKKYYFIPVYVADTVKEELPNRAVLAHKPYEAWKIMKEEDFIFSLYPNDLIFVDAGKEIPFKAALKGSTLDPEKKASRFLMYYKGADIATGSISGVNHDETYKARGVGIQSLREIKKCCIDVLGNISFASKEKRQTFR

SEQ ID NO: 1093 - protein, 1227 aa, unidentified
  REGION 1..1227: note = Description of Unknown: uncultivated organism with predicted taxonomy: Bacteroidales
  REGION 1..1227: note = MG16-2 effector
MKRILGLDLGTNSIGWALVEVDEDGKIIKILGIGSRIIPLSPDDANEFTTGKSITKNRKRTEQRTTRKCFDRYQLRRLLLTIELRKFNMLPDERLIKLPVLDLWQLRAKAATKGNRLTLPELGRVLYHLNQKRGYKHAKSDESNDKNQREYVANVNTRYANIKQLGKTIGQFFAEKLEENQVITEKGKFYTYRIKDQVFPRKAYEEEFDQIMECQREFYPEILTDKFIDKVRNEIIYYQRKLKSCKHLVSLCEFEKRAYVNKDGKVVYDGPKVAPRTSPLFQVCKIWESVNNLKIKNRKNDELYITQEQRIAMFNFLNNNEKMTLSDMYKILKIDKSDGWWGGKAIGNGLQGNTTKMQLKKALSNCQNVDELLQFNLDIVDSDKIDEETGEVLKVVSPNCEQEPLYKLWHTIYSIQDKNELKNVLQKKWGITDETTLNSLFALDFVRPGYGNKSSKFIRKILPYLQDGLMYNEACAYIGVNHSNSLTKAENDARELLEKLPQIKKNELRQPVVEKILNQMINVVNAIFDKYGNNNGIDEIRVELARELKQSREERELTDKNNRNRQKENDSNAKLIEEYGIRASRNRIQKYRMWKESRQTCFYCGQVVDVKDFLRGYDVEVEHIIPKALFFDDSFSNKVCSCRKCNSEKGERTAYDYMSSKGEDELNRYIRTVEDRCKKGEISKTKRERLLTPADKIPTDFINRQLRETQYIAKKSVEILKQICRNVWTTSGSVTDFLRHNWGYDEILHTLDFDRYKSGGLTEVIEIEHKGQKHRIERIKDWSKRLDHRHHAVDALVVACTKQSYIQRLNNLNTERDAMYQDIEAQSVEWKEKHSLLEKWIKLQPHPTVSEVTDKVDEILVSFKAGKRVATLGKRSVYKNGKKTVVQNNIIVPRGALCEESVYGQINLIEKNKPIKYLFENPSLIFKPYIKALVEERLKEYNGDTSKAISSLKNNPIYLRKDKSVVLEYGTCYKKEYVKKYSLNSIKAKDVDSIIDKHIREVVRQRLEDNNNNEKAAFASPLYADKQKQIPIKSVRCTTGINIAAPVNYNESNDPISFVKPGNNHHIAIYKDKDGKRQEHIVTFWHAVERKKYGMPVVITNPKEIWDLIIEKSLDLPESFLNCLPNSDWNYEISMQQNEMFVMGMSEDEFQDAIRNNDYKTLNKYLYRVQSVSESDYWLRLHIETMNDKTPEGNIIKKYYRIKSINTFFNFNPHKVKITLLGEIQSS

SEQ ID NO: 1094 - protein, 1165 aa, unidentified
  REGION 1..1165: note = Description of Unknown: uncultivated organism with predicted taxonomy: Bacteroidales
  REGION 1..1165: note = MG16-5 effector
MATKKILGLDLGTNSIGWALIETEDSNPKSILAMGSRIVPLSTDDSTQFAKGQAITKNADRTQKRTARKGLNRYQMRRAMLTEELRRHGMLPERTDENIMDLWRLRSDAATDGKQLSLPQIGRVLYHINQKRGYKHSKADNSANTKQTKYVEAVNQRYRDIQACHQTIGQYFYEQLLSSAVQTPSGSYYTYRIKDKVLPREAYIAEFDQIMKVQRVFYPDVLTDELVDTLRNHIIFYQRPLKSCKHLVSLCEFEKRPFKREDGQIVYSGPKCAPRTSPLAQFCTVWEAVNNITLTNRQNETFEITQEQRVAMADFLNQHDKMGVKDLQKILGISPKDGWWAGKAIGKGLKGNTTFTQLREALGNLPNAEHLLKMKLSMVDAAVDTTTGELIRQVSPQVEEEPLFRLWHLVYSLQNEDELRKALRKQFGIDDEEVLDKLCKIDFVKPGYANKSHKFIRKLLPYLMEGYQYHEACAHIGVNHSDSLTAEQNAARPLLDKIPLLEKNELRQPVIEKILNQMINVVNALKAEYGDIDDVRIELARELKSSKDEREAAFKRNNENERQNKIYENRIREYGIQPSRSRIQKYKMWEESNHLCFYCGKPVNVTDFLAGAEVEIEHIIPQSVLFDDSYSNKVCACRACNQAKGNLTAREFMEKHSKEEYDSYLRRVDDAFNAHRISKTKRDHLLWRKEDIPQDFIDRQLLQSQYIAKKAAEILRQGYRNVYATSGSVTDFLRHQWGYDEILHRLNLPRYQQVEGLTEDVTYDHCGQEHQQERIKGWTKRLDHRHHAIDALTIALTQQSVIQRLNTLNNSREQMFDELGKRTDTPEYTEKRSLLEKWVDAQPHFSVQEVTDKVDGILVSFRAGKRAATPAKRAVYQNGKRHIVQTGLQVPRGALSEETVYGKLGNKYVVKYPLGHQSMKMDDIVDPTIREIVRTRLNAFGGKAKDAFAEPLYSDAAHQMQIKTVRCYTGLQDKAVVPVRFNAQGEPVGFVKMGNNHHIAIYRDAKGQYQESVVSFWQAVERKRYGIPVVIEQPHEVWDKLINSDNIPQDFLETLPHDDWQFVVSLQQNEMFILGMDDADFEAAMEQKDYRTLNKYLYRVQKISSKEYCFRYHTETSVDDKYDGVINKSISMELQKLKRLTSISAFFSQHPHKVRVNLLGEVSAL

SEQ ID NO: 1095 - protein, 1165 aa, unidentified; identical to SEQ ID NO: 1094
  REGION 1..1165: note = Description of Unknown: uncultivated organism with predicted taxonomy: Bacteroidetes
  REGION 1..1165: note = MG16-6 effector

SEQ ID NO: 1096 - protein, 1224 aa, unidentified
  REGION 1..1224: note = Description of Unknown: uncultivated organism with predicted taxonomy: Bacteroides
  REGION 1..1224: note = MG16-7 effector
MKKVLGLDLGVGSIGWALVNVDETHAPVNLLGMGSRIVPLTTDDAKEFTQGNAASKNQKRTQKRTARKGYDRYQLRRQQLTDKLRSLGMLPDERLIKLPVLELWELRANAATPSYKLSLPEIGRVLYHINQKRGYRHSRDEDSDKQQRDYVAAVNNRWKEIREEGKTIGQHFANKLKETEIISEKGKFYTYRIKEQVFPRGAYMEELDRIVEAQKVFWPDIFTDENVDELRNRIIFFQRPLKSCKHLVSLCDFEVRDFVKKNHSGNVITDRNGNQCHILAGPKVAPKSSPLSQESKLWEEINNIRITNSKNDEFFISQEKKVEIYRFLSENEVMKANDLKKILGISANDKEWTIDKAVSKGLTGNTTRTRLRKALSHFKREDLLRFDMQLTDSSFVNPETGEILHEIDPKCEQEPLYRLWHCIYSIDNKEDLAKALENQFGITNKEAIDNLNKIDFVKQGYGSKSAKFIRRILPYLQNGAMYSEACEIIGTNHSGSLTKAENAARQLLQRIPQLNKNELRQPVVEKILNQMINVVNAIAEKFGSIDEIRIEMARELKLSQEARATTAKSIRDREKINLEYAGKIREFGIVPSKNKILKYRLWEEAGQRCFYCGQTISAQEFLSGFDSDIEHIIPKSRLFDDSYSNKACSCRKCNSTKNNMTAYDFMKAQGEDKFKDYCDRVANAYKEGKISRTKRDRFMTPAEKIPKDFISRQLVQTQYISRKAMEILMQICHDVYASSGDVTAYLRRIWGYDEILQRLNIPRYREGGLTEMVTYEHNNQQHTEERIKGWSKRLDHRHHAIDALTIACTRQNIIQRLNNLNAQESSGEDKLNLDKWTMAQAHFSVREVSDAASRILISFKSGKKVATPGKRYIYRNGKRILAQENIIVPRGALSEESVYGKIRTIEKGIAINKLFDRHEDIFQPLIKKIIEERISEFDGNIKAAKASLKKRPLYLDKEKTIELKYGSCFKYEYVIKYPLNTLRAKDVEYIVDENIRETVSDRLSQFNGNVKEAFKEPLYTDGTSPVLIKTVRMFTGLDAVVPVRKDSDGKNIGFVKTGNNHHVAIYKDKEGKYQEHTVTFWHAVERKKYGIPIIIEHPDEVWQKVLDLDAPQSFIDQLPSPDWTYVMSMQQNEMFILGMGDDEFNDAMSAKDYRTLAQHLYRVQKVCSKDYYFRYQYETQLDDKEAALSMKKFYRVTSLSSLQSLNPKKVSINLLGDISLHNII

SEQ ID NO: 1097 - protein, 1224 aa, unidentified
  REGION 1..1224: note = Description of Unknown: uncultivated organism with predicted taxonomy: Bacteroides
  REGION 1..1224: note = MG16-8 effector
MKKVLGLDLGVGSIGWALVNVDETHAPVNLLGMGSRIVPLTTDDAKEFTQGNAASKNQKRTQKRTARKGYDRYQLRRQQLTDKLRSLGMLPDERLIKLPVLELWELRANAATPSYKLSLPEIGRVLYHINQKRGYRHSRDEDSDKQQRDYVAAVNNRWKEIREEGKTIGQHFANKLKETEIISEKGKFYTYRIKEQVFPRGAYMEEFDRIVEAQKVFWPDIFTDENVDELRNRIIFFQRPLKSCKHLVSLCDFEVRDFVKKDHSGNVITDRNGNQCHILAGPKVAPKSSPLSQESKLWEEINNIRITNSKNDEFFISQEKKVEIYRFLSENEVMKANDLKKILGISANDKEWTIDKAVSKGLTGNTTRTRLRKALSHFKREDLLRFDMQLTDSSFVNPETGEILHEIDPKCEQEPLYRLWHCIYSIDNKEDLAKALENQFGITNKEAIDNLNKIDFVKQGYGSKSAKFIRRILPYLQNGAMYSEACEIIGTNHSGSLTKAENAARQLLQRIPQLNKNELRQPVVEKILNQMINVVNAIAEKFGSIDEIRIEMARELKLSQEARATTAKSIRDREKINLEYAGKIREFGIVPSKNKILKYRLWEEAGQRCFYCGQTISAQEFLSGFDSDIEHIIPKSRLFDDSYSNKACSCRKCNSTKNNMTAYDFMKAQGEDKFKDYCDRVANAYKEGKISRTKRDRFMTPAEKIPKDFISRQLVQTQYISRKAMEILMQICHDVYASSGDVTAYLRRIWGYDEILQRLNIPRYREGGLTEMVTYEHNNQQHTEERIKGWSKRLDHRHHAIDALTIACTRQNIIQRLNNLNAQESSGEDKLNLDKWTMAQAHFSVREVSDAASRILISFKSGKKVATPGKRYIYRNGKRILAQENIIVPRGALSEESVYGKIRTIEKGIAINKLFDRHEDIFQPLIKKIIEERISEFDGNIKAAKASLKKRPLYLDKEKTIELKYGSCFKYEYVIKYPLNTLRAKDVEYIVDENIRETVSDRLSQFNGNVKEAFKEPLYTDGTSPVLIKTVRMFTGLDAVVPVRKDSDGKNIGFVKTGNNHHVAIYKDKEGKYQKHTVTFWHAVERKKYGIPIIIEHPDEVWQKVLDLDAPQSFIDQLPSPDWTYVMSMQQNEMFILGMGDDEFNDAMSAKDYRTLAQHLYRVQKVCSKDYYFRYQYETQLDDKEAALSMKKFYRVTSLSSLQSLNPKKVSINLLGDISLHNII

SEQ ID NO: 1098 - protein, 1224 aa, unidentified; identical to SEQ ID NO: 1096
  REGION 1..1224: note = Description of Unknown: uncultivated organism with predicted taxonomy: Bacteroides sp. CAG:770
  REGION 1..1224: note = MG16-9 effector

SEQ ID NO: 1099 - protein, 1224 aa, unidentified
  REGION 1..1224: note = Description of Unknown: uncultivated organism with predicted taxonomy: Bacteroides
  REGION 1..1224: note = MG16-10 effector
MKKVLGLDLGVGSIGWALVNVDETHAPVNLLGMGSRIVPLTTDDAKEFTQGNAASKNQKRTQKRTARKGYDRYQLRRQQLTDKLRSLGMLPDERLIKLPVLELWELRANAATPSYKLSLPEIGRVLYHINQKRGYRHSRDEDSDKQQRDYVAAVNNRWKEIREEGKTIGQHFANKLKETEIISEKGKFYTYRIKEQVFPRGAYMEEFDRIVEAQKVFWPDIFTDENVDELRNRIIFFQRPLKSCKHLVSLCDFEVRDFVKKNHSGNVITDRNGNQCHILAGPKVAPKSSPLSQESKLWEEINNIRITNSKNDEFFISQEKKVEIYRFLSENEVMKANDLKKILGISANDKEWTIDKAVSKGLTGNTTRTRLRKALSHFKREDLLRFDMQLTDSSFVNPETGEILHEIDPKCEQEPLYRLWHCIYSIDNKEDLAKALENQFGITNKEAIDNLNKIDFVKQGYGSKSAKFIRRILPYLQNGAMYSEACEIIGTNHSGSLTKAENAARQLLQRIPQLNKNELRQPVVEKILNQMINVVNAIAEKFGSIDEIRIEMARELKLSQEARATTAKSIRDREKINLEYAGKIREFGIVPSKNKILKYRLWEEAGQRCFYCGQTISAQEFLSGFDSDIEHIIPKSRLFDDSYSNKACSCRKCNSTKNNMTAYDFMKAQGEDKFKDYCDRVANAYKEGKISRTKRDRFMTPAEKIPKDFISRQLVQTQYISRKAMEILMQICHDVYASSGDVTAYLRRIWGYDEILQRLNIPRYREGGLTEMVTYEHNNQQHTEERIKGWSKRLDHRHHAIDALTIACTRQNIIQRLNNLNAQESSGEDKLNLDKWTMAQAHFSVREVSDAASRILISFKSGKKVATPGKRYIYRNGKRILAQENIIVPRGALSEESVYGKIRTIEKGIAINKLFDRHEDIFQPLIKKIIEERISEFDGNIKAAKASLKKRPLYLDKEKTIELKYGSCFKYEYVIKYPLNTLRAKDVEYIVDENIRETVSDRLSQFNGNVKEAFKEPLYTDGTSPVLIKTVRMFTGLDAVVPVRKDSDGKNIGFVKTGNNHHVAIYKDKEGKYQKHTVTFWHAVERKKYGIPIIIEHPDEVWQKVLDLDAPQSFIDQLPSPDWTYVMSMQQNEMFILGMGDDEFNDAMSAKDYRTLAQHLYRVQKVCSKDYYFRYQYETQLDDKEAALSMKKFYRVTSLSSLQSLNPKKVSINLLGDISLHNII

SEQ ID NO: 1100 - protein, 1224 aa, unidentified; identical to SEQ ID NO: 1099
  REGION 1..1224: note = Description of Unknown: uncultivated organism with predicted taxonomy: Bacteroides
  REGION 1..1224: note = MG16-11 effector

SEQ ID NO: 1101 - protein, 1165 aa, unidentified; identical to SEQ ID NO: 1094
  REGION 1..1165: note = Description of Unknown: uncultivated organism with predicted taxonomy: Bacteroidetes
  REGION 1..1165: note = MG16-12 effector

SEQ ID NO: 1102 - protein, 1224 aa, unidentified; identical to SEQ ID NO: 1096
  REGION 1..1224: note = Description of Unknown: uncultivated organism with predicted taxonomy: Bacteroides
  REGION 1..1224: note = MG16-13 effector

SEQ ID NO: 1103 - protein, 1224 aa, unidentified
  REGION 1..1224: note = Description of Unknown: uncultivated organism with predicted taxonomy: Bacteroides sp. CAG:770
  REGION 1..1224: note = MG16-14 effector
MKKVLGLDLGVGSIGWALVNVDETHAPVNLLGMGSRIVPLTTDDAKEFTQGNAASKNQKRTQKRTARKGYDRYQLRRQQLTDKLRSLGMLPDERLIKLPVLELWELRANAATPSYKLSLPEIGRVLYHINQKRGYRHSRDEDSDKQQRDYVAAVNNRWKEIREEGKTIGQHFANKLKETEIISEKGKFYTYRIKEQVFPRGAYMEEFDRIVEAQKVFWPDIFTDENVDELRNRIIFFQRPLKSCKHLVSLCDFEVRDFVKKNHSGNVITDRNGNQCHILAGPKVAPKSSPLSQESKLWEEINNIRITNSKNDEFFISQEKKVEIYRFLSENEVMKANDLKKILGISANDKEWTIDKAVSKGLTGNTTRTRLRKALSHFKREDLLRFDMQLTDSSFVNPETGEILHEIDPKCEQEPLYRLWHCIYSIDNKEDLAKALENQFGITNKEAIDNLNKIDFVKQGYGSKSAKFIRRILPYLQNGAMYSEACEIIGTNHSGSLTKAENAARQLLQRIPQLNKNELRQPVVEKILNQMINVVNAIAEKFGSIDEIRIEMARELKLSQEARATTAKSIRDREKINLEYAGKIREFGIVPSKNKILKYRLWEEAGQRCFYCGQTISAQEFLSGFDSDIEHIIPKSRLFDDSYSNKACSCRKCNSTKNNMTAYDFMKAQGEDKFKDYCDRVANAYKEGKISRTKRDRFMTPAEKIPKDFISRQLVQTQYISRKAMEILMQICHDVYASSGDVTAYLRRIWGYDEILQRLNIPRYREGGLTEMVTYEHNNQQHTEERIKGWSKRLDHRHHAIDALTIACTRQNIIQRLNNLNAQESSGEDKLNLDKWTMAQAHFSVREVSDAASRILISFKSGKKVATPGKRYIYRNGKRILAQENIIVPRGALSEESVYGKIRTIEKGIAINKLFDRHEDIFQPLIKKIIEERISEFDGNIKAAKASLKKRPLYLDKEKTIELKYGSCFKYEYVIKYPLNTLRAKDVEYIVDENIRETVSDRLSQFNGNVKEAFKEPLYTDGTSPVLIKTVRMFTGLDAVVPVRKDSDGKNIGFVKTGNNHHVAIYKDKEGKYQEHTVTFWHAVERKKYGIPIIIEHPDEVWQKVLDLDAPQSFIDQLPSPDWTYVMSMQQNEMFILGMGDDEFNDAMSAKDYRTLAQHLYRVQKVCSKNYYFRYQYETQLDDKEAALSMKKFYRVTSLSSLQSLNPKKVSINLLGDISLHNII

SEQ ID NO: 1104 - protein, 1221 aa, unidentified
  REGION 1..1221: note = Description of Unknown: uncultivated organism with predicted taxonomy: Bacteroides sp. CAG:770
  REGION 1..1221: note = MG16-15 effector
MKKVLGLDLGVGSVGWSLVNVDDNYKPTEILGIGSRIISLSPDESSEFTSGNAASKNQKRTQKRTARKGYDRYQMRRQALTEKLRELKMLPDERLIKLPVLELWTLRAKAATPGEKLTLPEIGRVLYHINQKRGYRHAKSDDSADKEQRDYVQTVNKRYQEIKDEGTTIGQHFAIKLKESEIVTDKGPFYNYRIKEQVFPRDAYIEEFDRIMDCQKTFYPEELSEDNIDEIRNKIIFHQRDLKSCKHLVSQCEFMTRSFLDADHKPILNSSGELVMSGPKVAPKSSPIFQACKIWEEINNLSIRNKENDELHISPEQKKDIFEYLDNNEKINATTLYKILGIGKGDGWSVDKALSKGFTGNTTKVAIAKALGKEHNTKKSDLLRFDLRLKENGVNKDTGEIIYEIDPTCENEPLYRLWHVIYSINDKDALRHALTNQFGINDGESLRELTKIDFVKQGYGSRSAKFMRKLLPALMDGARYSEACDMIGINHSGSLTKSENEARELLHKIPQLQKNELRQPVVEKILNQMINVVNAVIDQFGSIDEIRVEMARELKLSKEGRAATAKNIRDREKMNNEMAEKIKELGITPSKNKILKYRLWQESGQKCFYCGQPVGAAEFLSGLDVEIEHIVPKALLFDDSFSNKVCACRKCNAEKSNTTAYDYMKSKGENEFNDYLRRVDAAFNEHKISFTKRSRLLTPTDKLPKDFISRQLVQTQYISRKAMEILKQVCHNVYGSSGEVTSYLRRIWGYDEILHSLDLPRYREGGMTAEVSYDHRGQTHTEERIKDWSKRLDHRHHAIDALTIACTRQSIIQRLNNLSAMTAVAGESMSLDKWTLAQPHFSVQEVSDNVSRILVSFKAGKKVTTPGKRYVYRGGKRILAQEGLLIPRGALCEESVYGRIHSLEKEVPVKKLFERVDDIVKPGIRAAVEERLRACDNDVKVACASLKKEPLYLDVEKTIPLEYGTCYKAEYVMRYALSALKPKDVEFIVDEHIRKVVSERLSEYGNDPKKAFAEPLYADKSKTIPIRAVRCYTGLAQVVPVKKDSKGNDIGFVKPGNNHHIAIYRDAEGTYHESIVTFWDSVERKKYGLPVIIRKPGEIWDILIDKNIPEELAAGLPAPDWQFVMSMQQNEMCVLGMEDDEFRDAMEVKDYKTLGAHLYRVQKLASIYYVFRHQYETQLDDSKGAQIMKKFYRAQSFKALFALHPRKVSVSLLGEMALKDD

SEQ ID NO: 1105 - protein, 1221 aa, unidentified
  REGION 1..1221: note = Description of Unknown: uncultivated organism with predicted taxonomy: Bacteroides sp. CAG:709
  REGION 1..1221: note = MG16-16 effector
MKKILGLDLGVGSIGWSLINADKDNKPIAILGLGSRIISLSPDESSEFTSGNAASKNQKRTQKRTARKGYDRYQMRRQALTDKLRELKMLPDEHLIKLPVLDLWTLRARAATPGERLTLPEIGRVLYHINQKRGYRHSRSDDSADKEQREYVQAINKRFQEIREEGVTIGQHFVKKLKESEVVTDKGAFYNYRIKEQVFPRDAYVAEFDKVMDCQKVFYPEELSEANINELRNEIIFYQRNLKSCKHLVSRCEFMTRSFLDEEHRPVLDASGKLVISGPKVAPKSSPIFQVCKIWEEINNLSIRNKENDELHISPEQKKDIFEYLDNNEKITSAALYKILGIGKGDGWSVDKALSKGFTGNTTKVAISKALGKANDAKKRDLLRFDLRLKENGVNKDTGEIVCEIDPECENEPLYKLWHVIYSINDKDAQRHALTNQFGINDEASLAELSKIDFVKQGYGSRSVKFMRKLLPSLMDGAKYSEACDVIGVNHSGSLTKSENEARELLQRIPQLQKNELRQPVVEKILNQMINVVNAVIEKFGGVDEIRVEMARELKLSKEGRAATAKNIRDREKENKEIADKIIELGVTPSKNKILKYRLWQEAGQKCFYCGQPVGATEFLNGLDVEIEHVVPKALLFDDSFSNKVCACRKCNAEKRNSTAYDYMKSKGENAFNDYLRRVDTAFSEHKISFTKRSRLLTPADKIPKDFISRQLVQTQYISRKAMEILKQVCHNVYGSSGEVTSYLRRIWGYDEILHSLDLPRYREGGMTAEVSYEHRGQTHTEERIKDWSKRLDHRHHAIDALTIACTRQSVIQRLNNLSSMTAVAGEAMSLDKWTLAQPHFSVQEVSDNVSQILVSFKAGKKVTTPGKRYVYRGGKRILAQEGLLIPRGALCEESVYGRIHSLEKGVPVKKLFERVDDIVKPGIRAAVEERLRACDNDVKVACASLKKEPLYLDAEKTIPLEYGTCYKAEYVMKYALSALKPKDVEYIVDEHIRKVVSERLSEYGNDPKKAFAESLYADDAKTIPVRTVRCYTGLDQVVPVKKDVAGNDIGFVKPGNNHHIAIYRDADGKFHECVVTFWDAVERKKYGIPVIVRNPDEVWDVVIDKNVPEELAAGLPALGWSFVTSLQQNEMFVLGMEDDEFRDAMAEADYKALGAHLYRVQKLAGSDYYFRSHYETLLDDSAGARIMKKFYRVRSFNALFNLHPRKVAVSLLGEMSLKND

SEQ ID NO: 1106 - protein, 1221 aa, unidentified
  REGION 1..1221: note = Description of Unknown: uncultivated organism with predicted taxonomy: Bacteroides sp. CAG:770
  REGION 1..1221: note = MG16-17 effector
MKKVLGLDLGVGSVGWSLVNVDDNYKPTEILGIGSRIISLSPDESSEFTSGNAASKNQKRTQKRTARKGYDRYQMRRQALTEKLRELKMLPDERLIKLPVLELWTLRAKAATPGEKLTLPEIGRVLYHINQKRGYRHAKSDDSADKEQRDYVQTVNKRYQEIKDEGTTIGQHFAIKLKESEIVTDKGPFYNYRIKEQVFPRDAYIEEFDRIMDCQKTFYPEELSEDNIDEIRNKIIFYQRNLKSCKHLVSQCEFMTRSFLDAEHKPILNSSGELVMSGPKVAPKSSPIFQACKIWEEINNLSIRNKENDELHISPEQKKDIFEYLDNNEKINATALYKILGIGKGDGWSVDKALSKGFTGNTTKGAIAKVLGKDHNTKKSDLLRFDLRLKENGVNKDTGEIIYEIDPTCENEPLYRLWHVIYSINGKDALRHALTNQFGINDEESLRELTKIDFVKQGYGSRSAKFMRKLLPALMDGARYSEACDMIGINHSGSLTKSENEARELLHKIPQLQKNELRQPVVEKILNQMINVVNAVIEQFGSIDEIRVEMARELKLSKEGRAATAKNIRDREKMNNEMAEKIKELGITPSKNKILKYRLWQESGQKCFYCGQPVGAAEFLSGLDVEIEHIVPKALLFDDSFSNKVCACRKCNAEKSNTTAYDYMKSKGENEFNDYLRRVDAAFNEHKISFTKRSRLLTPADKLPKDFISRQLVQTQYISRKAMEILKQVCHNVYGSSGEVTSYLRRIWGYDEILHSLDLPRYREGGMTAEVSYDHRGQTHTEERIKDWSKRLDHRHHAIDALTIACTQQSIIQRLNNLSAMTAVAGESMSLDKWTLAQPHFSVQKVSDNVSRILVSFKAGKKVTTPGKRYVYRGGKRVLVQEGLLIPRGALCEESVYGRIHSLEKEVPVKKLFERVDDIVKPGIRTAVEERLRACDNDVKVACASLKKEPLYLDVEKTIPLEYGTCYKAKYVMRYALSALKPKDIEFIVDEHIRKVVSERLSEYGNDPKKAFAEPLYADKSKTIPIRAVRCYTGLAQVVPVKKDSKGNDIGFVKPGNNHHIAIYRDAEGTYHESIVTFWDSVERKKYGLPVIIRKPGEIWDILIDKNIPEELAAGLPAPDWQFVMSMQQNEMFVLGMEDDEFRDAMEVKDYKTLGAHLYRVQKLASIDYYFRSQYETALDNSAGARMMKKFYRINSIKSLFALHPRKVSVSLLGEMALKDD

SEQ ID NO: 1107 - protein, 1220 aa, unidentified
  REGION 1..1220: note = Description of Unknown: uncultivated organism with predicted taxonomy: Bacteroides sp. CAG:770
  REGION 1..1220: note = MG16-18 effector
MKKILGLDLGVGSVGWSVISCDDEHRPLEILGMGSRIVPLTPDESNEFSSGNAASKNQSRTQKRTARKGYDRYQLRRQALTVKLRELGMLPDEALIKLPVLDLWTLRARAATPGDKLSLPEIGRVLYHLNQKRGYRHSKQDDSADKTQRDYVQAVNKRFQEIKDEGLTIGQHFAEKLKESEIITDKGAFYNYRIKEQVFPRAAYVEEFDRIIQCQREFYPEVFTEAIVNEIRNEIIYYQRPLKSCKHLVSVCEFMQRELFDAEHNPIRNGKGEIVVAGPKCAPKSSPLAQVCKIWEEVNNIRITNKENDEYFISIDNKHEIFDFLNTHEKMKADDLFKILGLAKNSGWSADRAMSKGMVGNTTRVALMKALKGRRDIEEVLRFDLSAVESNQVNADTGEVLMEISAECEREPLYRLWHIIYSISDKNEQKSALKSQFGILDESMLESLCKIDFVKQGYSSRSFKFMRKILPSLMDGAKYSEACDAVGINHSDSITKAENQARELLVKLPQLQKNELRQPVVEKILNQMINVVNAVIDKYGAIDEIRVEMARELKLSKEGRESAAKNIRAREKANEEIARRIEELGLVPSKNKILKYRLWEESGKRCFYCGQPVSAAEFLNGLDVEIEHVIPKSLLFDDSFSNKVCACRKCNAEKDNATAFDFMKGRGENAFEDYLKRVETAFKENRISQTKKNRLLTPADKIPKDFISRQLVQTQYISRKAMEILNQVCRNVYGSSGDVTAYLRRIWGYDEILHSLDLPRYREGNLTGDVTYVHRGQTHTEERIKDWSKRLDHRHHAIDALTIASTRQSIIQRLNTLNAKTAIGEEQISLDKWTLAQAHFSVADVADHVADILVSFKSGKKVATPGKRYVYKAGRRRVVQENILVPRGALSEESVYGRIKSIEEKIPVKKLFERADDIVKPRIRHLIGERLEACGGDCSKAVSSLRKSPLYLDEEKTIMLEYGSCFKPEYVIKYSLNSIKAKDAVSIVDKHVREVVTERLAAFGDDPKKAFAEPLYADEAGKIQIKTVRCYTGLSQVVPVKKDADGNDIGFVKPGNNHHIAIYKDADGKYQECIVTFRDAVERKKYGIPVVVRKPAAVLDTVIDKNVPEDLAGGLPSPEWTFVMSMQQNEMFVLGMGDDEFNDAMAGRDYKSLGEHLYRVQSISHADYYFRSQYETMLDNSKNAMAMKKYYRIRSFKALFALNPRKVSISLLGEISLKDD

SEQ ID NO: 1108 - protein, 1220 aa, unidentified
  REGION 1..1220: note = Description of Unknown: uncultivated organism with predicted taxonomy: Bacteroides sp. CAG:770
  REGION 1..1220: note = MG16-19 effector
MKKILGLDLGVGSVGWSVISCDDEHRPLEILGMGSRIVPLTPEESNEFSSGNAASKNQSRTQKRTARKGYDRYQSRRKALTDKLRELDMLPDETLIKLPVLDLWTLRARAATPGDKLSLPEIGRVLYHLNQKRGYRHSKQDDSADKTQRDYVQAVNKRFQEIKDEGLTIGQHFAVKLKESEVITDKGAFYNYRIKEQVFPRAAYVEEFDRIIQCQREFYPEVLTEANVNEIRNEIIYYQRPLKSCKHLVSVCEFMQRELFDAEHNPIRNGKGEIVVAGPKCAPKSSPLAQVCKIWEEVNNIRITNKENDEYFISIDNKHEIFDFLNTHEKMKADDLFKILGIAKNSGWSADKAMSKGMVGNTTRVALMKALKGRRDIDDILRFDLREVESNQVNADTGEVLMEISAECESEPLYRLWHIIYSISDKNEQKSALEKQFGITDESMLESLCRIDFVKQGYSGRSFKFMRKILPSLMDGAKYSEACDVIGINHSDSITKAENQTRKLLTKLPQLQKNELRQPVVEKILNQMINVVNAVIDKYGAIDEIRVEMARELKLSKAGRESAANNIRTRKKVNEEIAKRIEELGLVPSKNKILKYRLWEESGKRCFYCGQPVSATEFLNGLDVEIEHVVPKSLLFDDSFSNKVCACRKCNAEKGNATAFDFMKGRGENAFEDYLKRVETAFKENTISQTKRNRLLTPADKIPKDFIARQLVQTQYISRKAMEILNQVCRNVYGSSGDVTAYLRRIWGYDEILHSLDLPRYRDGNLTEDVTYVHRGQTHTEERIKDWSKRLDHRHHAIDALTIACTRQSIIQRLNTLNAKTAIGEEQMSLDKWTLAQAHFSVADVADHVADILVSFKSGKRVTTPGKRYVYKAGRRIVAQENILVPRGALSEESVYGRIKSIEEKVPVKKLFERADDIVKPRIRRLIRERLETFGGDCSKAVSSLKKSPLYLDEENTIMLEYGSCFKPEYVIKYSLNSIKAKDAVSIVDKHIREVVTARLAAFGDDPKKAFAEPLYSYASGKIQIKTVRCYTGLSQVVPVKRDADGNDIGFVKPGNNHHIAIYKDADGKYQESIVTFCDAVERKKYGIPVDVRNPAAVLDTVIDKNVPEDLAGGLPSPEWTFVMSMQQNEMFVLGMGDDEFNDAMTGRDYKSLGEHLYRVQKLASLYYVFRSQYETKLDDSKGALTMKKFYRTASFKALFALNPRKVSISLLGEISLKDD

SEQ ID NO: 1109 - protein, 1221 aa, unidentified
  REGION 1..1221: note = Description of Unknown: uncultivated organism with predicted taxonomy: Bacteroides sp. CAG:770
  REGION 1..1221: note = MG16-20 effector
MKKVLGLDLGVGSVGWSLVNVDDNYKPTEILGIGSRIISLSPDESSEFTSGNAASKNQKRTQKRTARKGYDRYQMRRQALTEKLRELKMLPDEHLIKLPVLELWTLRAKAATPGEKLTLQEIGRVLYHINQKRGYRHAKSDDSADKEQHDYVQTVNKRYQEIKDEGTTIGQHFAIKLKESEIVTDKGPFYNYRIKEQVFPRDAYIEEFDRIMDCQKTFYPEELSEDNIEEIRNKIIFYQRDLKSCKHLVSQCEFMTRSFLDADHKPILNSSGELVMSGPKVAPKSSPIFQACKIWEEINNLSIRNKENDELHISPEQKKDIFEYLDNNEKINATALYKILDIGKGDGWSVDKALSKGFTGNTTKVAIAKVLGKEHNTKKSDLLRFDLRLKENGVNKDTGEIIYEIDPTCENEPLYRLWHVIYSINDKDALRQALTNQFGINDGESLRELTKIDFVKQGYGSRSAKFMRKLLPALMDGARYSEACDMIGINHSGSLTKSENEARELLHTIPQLQKNELRQPVVEKILNQMINVVNAVIDQFGSIDEIRVEMARELKLSKEGRAATAKNIRDREKMNNEMAEKIKELGITPSKNKILKYRLWQESGQKCFYCGQPVGAAEFLSGLDVEIEHIVPKALLFDDSFSNKVCACRKCNAEKSNTTAYDYMKSKGENEFNDYLRRVDAAFNEHKISFTKRSRLLTPANKLPKDFISRQLVQTQYISRKAMEILKQVCHNVYGSSGEVTSYLRRIWGYDEILHSLDLPRYREGGMTAEVSYDHRGQTHTEERIKDWSKRLDHRHHAIDALTIACTRQSIIQRLNNLSAMSAVAGESMSLDKWTLAQPHFSVQEVSDNVSRILVSFKAGKKVATPGKRYVYRGSKRILAQEGLLIPRGALCEESVYGRINSLEKGVPVKKLFERVDDIVKPGIRTAVEERLRACDNDVKVACASLKKEPLYLDVEKTIPLEYGTCYKAEYVMRYALSALKPKDVEYIVDEHIRKVVSERLSEYGNDPKKAFAEPLYADKSKTIPIRAVRCYTGLAQVVPVKKDSKGNDIGFVKPGNNHHIAIYRDAEGTYHESIVTFLDSVERKKYGLPVIIRKPGEIWDILIDKNIPEELAAGLPAPDWQFVMSMQQNEMFVLGMEDDEFMDAMEVKDYKTLGAHLYRVQNISSLYYVLRLQYETQVDNSNEALNMKKFHRIRSFNALFALHPRKVSVSLLGEMALKDD

SEQ ID NO: 1110 - protein, 1218 aa, unidentified
  REGION 1..1218: note = Description of Unknown: uncultivated organism with predicted taxonomy: Bacteroides sp. CAG:770
  REGION 1..1218: note = MG16-21 effector
MKKILGLDLGVGSVGWSVVSCDDEHKPVEILGMGSRIVPLTPDESSEFSSGNAASKNQSRTQKRTARKGYDRYQLRRQALTVKLRELGMLPDEALIKLPVLDLWKLRARAATPGEKLSLAEIGRVLYHLNQKRGYRHSKEDDSADKTQRDYVQAVNKRFQEIKDEGLTIGQHFAVKLKESEVITDKGAFYNYRIKEQVFPRAAYVEEFDRIIQCQREFYPEVLTAADVNEIRNEIIYYQRPLKSCKHLVSSCEFMQRELFDAEHNPIRNGKGEIVVAGPKCAPKSSPLAQVCKIWEEINNIRVTNKENDEYFISIDNKHEIFDFLNTHEKMKADDLFKILGIAKNSGWSADRAMSKGMVGNTTRVALMKALKGRRDIDDILRFDLRDVESNQVNADTGEVLMEISAECESEPLYRLWHIIYSISDKNEQKSALKNQFGISDESMLESLCKIDFVKQGYSSRSFKFMRKILPSLMDGAKYSEACDVIGVNHSDSITKAENQARELLARLPQLQKNELRQPVVEKILNQMINVVNAVIDKYGAIDEIRVEMARELKLSKAGRESAAKNVRTREKANEEIAKRIEELGLVPSKNKILKYRLWEESGKRCFYCGQPVSATEFLNGLDVEIEHVVPKSLLFDDSFSNKVCACRKCNAEKGNATAFDFMKGRGENAFEDYLKRVETAFKENKISQTKRNRLLTPADKIPKDFISRQLVQTQYVSRKAMEILNQVCRNVYGSSGDVTAYLRRIWGYDEILHSLDLPRYREGNLTGNVTYVHRGQTHTEERIRDWSKRLDHRHHAIDALTIACTRQSIIQRLNTLNAKTAIGEEQMSLDKWTLAQAHFSVADVADHVADILVSFKSGKKVTTPGKRYVYKSGKRRIAQENILVPRGALSEESVYGRIKSIEEKVPVKKLFERVDDIVKPRIRHLIRERLEACGGDCSKAVSSLKKSPLYLDEENTIMLEYGSCFKPEYVIKYSLDSIKAKDAASIVDKHVREVVTARLAAFGDDPKKAFAEPLYADEAGKIQIKTVRCHTGLSQVVPVKKDADGNDIGFVKPGNNHHIAIYKDADGKYCWNVVTLWNAVDRKRYGLPIIVRNPYEISDIIIDSNVPDELASGLPDPNWSFVMSLQQNEMFVLGMSEEEFRCAIENKDYKTLGMHLYRVQKLSHLRFRSQYETRLDDSNEAKSMKKFYEIRSLKSFWFLNPHKVSISLLGEISLKDD

SEQ ID NO: 1111 - protein, 1220 aa, unidentified
  REGION 1..1220: note = Description of Unknown: uncultivated organism with predicted taxonomy: Bacteroides sp. CAG:770
  REGION 1..1220: note = MG16-22 effector
MKKILGLDLGVGSVGWSVISCDDEHRPLEILGMGSRIVPLTPEESNEFSSGNAASKNQSRTQKRTARKGYDRYQSRRKALTDKLRELDMLPDETLIKLPVLDLWTLRARAATPGDKLSLPEIGRVLYHLNQKRGYRHSKQDDSADKTQRDYVQAVNKRFQEIKDEGLTIGQHFAEKLKESEIITDKGAFYNYRIKEQVFPRAAYVEEFDRIIQCQREFYPEVLTEANVNEIRNEIIYYQRPLKSCKHLVSVCEFMQRELFDAEHNPIRNGKGEIVVAGPKCAPKSSPLAQVCKIWEEINNIRVTNKENDEYFISIDNKHEIFDFLNTHEKMKADDLFKILGLAKNSGWSADRAMSKGMVGNTTRVALMKALKGRRDIDEILRFELKEVESNQVNADTGEVLMEISAECEREPLYRLWHIIYSISDKNEQKSALEKQFGITDESMLESLCRIDFVKQGYSSRSFKFMRKILPSLMDGAKYSEACDVIGINHSDSITKAENQTRKLLTKLPQLQKNELRQPVVEKILNQMINVVNAVIDKYGSIDEIRVEMARELKLSKSGRESAAKNIRTREKANEEIAKRIEELGLVPSKNKILKYRLWEESGKRCFYCGQPVSATEFLNGLDVEIEHVVPKSLLFDDSFSNKVCACRKCNAEKGNATAFDFMKGRGENAFEDYLKRVETAFKENKISQTKRNRLLTPADKIPKDFIARQLVQTQYISRKAMEILNQVCRNVYGSSGDVTAYLRRIWGYDEILHSLDLPRYRKGNLTGDVTYVHKGQTHTEERIKDWSKRLDHRHHAIDALTIACTRQSIIQRLNTLNAKTAIGEEQMSLDKWTLAQAHFSVADVADHVADILVSFKSGKRVTTLGKRYVYKAGRRIVAQENILVPRGALSAESVYGRIKSIEEKVPVKKLFERVDDIVKPRIRHLIRERLEACGGDCSKAVSSLKKSPLYLDEENTIMLEYGSCFKPEYVIKYSLNSIKAKDVASIVDKYIREVVTARLAAFGDDPKKAFAEPLYADEAGKIQIKTVRCYTGLSQVVPVKKDADGNDIGFVKPGNNHHIAIYKDADGKYQESIVTFRDAVERKKYGIPVVVRNPVEVLDTVIDKNVPEDLAGGLPSPEWTFVMSMQQNEMFVLGMGDDEFNDAFAGRDYKSLGEHLYRVQKLASLYYVFRSQYETKLDDSNNALAMRKFYRVRSFNALFSLNPRKVSISLLGEISLKDD

SEQ ID NO: 1112 - protein, 1221 aa, unidentified
  REGION 1..1221: note = Description of Unknown: uncultivated organism with predicted taxonomy: Bacteroidales
  REGION 1..1221: note = MG16-23 effector
MKKVLGLDLGVGSVGWSLVNVDDNYKPTEILGIGSRIISLSPDESSEFTSGNAASKNQKRTQKRTARKGYDRYQMRRQALTEKLRELKMLPDERLIKLPVLELWTLRAKAATPGEKLTLPEIGRVLYHINQKRGYRHAKSDDSADKEQRDYVQTVNKRYQEIKDEGTTIGQHFAIKLKESEIVTDKGPFYNYRIKEQVFPRDAYIEEFDRIMDCQKTFYPEELSEDNIDEIRNKIIFYQRDLKSCKHLVSQCEFMTRSFLDAEHKPILNSSGELVMSGPKVAPKSSPIFQACKIWEEINNLSIRNKENDELHISPEQKKDIFEYLDNNEKINATTLYKILGIGKGDGWSVDKALSKGFTGNTTKVAIAKVLGKEHNTKKSDLLRFDLRLKENGVNKDTGEIIYEIDPTCENEPLYRLWHVIYSINDKDALRHALTNQFGINDEESLRELTKIDFVKQGYGSRSAKFMRKLLPALMDGARYSEACDMIGINHSGSLTKSENEARELLHKIPQLQKNELRQPVVEKILNQMINVVNAVIEQFGSIDEIRVEMARELKLSKEGRAATAKNIRDREKMNNEMAEKIKELGITPSKNKILKYRLWQESGQKCFYCGQPVGAAEFLSGLDVEIEHIVPKALLFDDSFSNKVCACRKCNAEKSNTTAYDYMKSKGENEFNDYLRRVDAAFNEHKISFTKRSRLLSPADKLPKDFISRQLVQTQYISRKAMEILKQVCHNVYGSSGEVTSYLRRIWGYDEILHSLDLPRYREGGMTAEVSYDHRGQTHTEERIKDWSKRLDHRHHAIDALTIACTRQSIIQRLNNRSAMTAVAGESMSLDKWTLAQPHFSVQEVSDNVSRILVSFKAGKKVTTPGKRYVYRGGKRVLAQEGLLIPRGALCEESVYGRIHSLEKEVPVKKLFERVDDIVKPGIRTAVEERLRACDNDVKVACASLKKEPLYLDVEKTIPLEYGTCYKAKYVMRYVLSALKPKDVEFIVDEHIRKVVSERLSEYGNDPKKAFAEPLYSDKSKTIPIRAVRCYTGLAQVVPVKKDSKGNAIGFVKPGNNHHIAIYRDADGAYHENVVTFWDTVERKKYGLPVIIRKPGEIWDILIDKNIPEELAAGLPAPDWQFVMSMQQNEMFVLGMEDDEFRDAMEVKDYKTLGAHLYRVQSLSRSDYYYRCQYETQLDNSNGAMLMKKYYRVRSFNALFTLHPRKVSVSLLGEMALKDD

SEQ ID NO: 1113 - protein, 1221 aa, unidentified
  REGION 1..1221: note = Description of Unknown: uncultivated organism with predicted taxonomy: Bacteroides sp. CAG:770
  REGION 1..1221: note = MG16-24 effector
MKKVLGLDLGVSSVGWSLVNVDDNYKPTEILGIGSRIISLSPDESSEFTSGNAASKNQKRTQKRTARKGYDRYQMRRQALTEKLRELKMLPDERLIKLPVLELWTLRAKAATPGEKLTLPEIGRVLYHINQKRGYRHAKSDDSADKEQRDYVQTVNKRYQEIKDEGTTIGQHFAIKLKESEIVTDKGPFYNYRIKEQVFPRDAYIEEFDRIMDYQKTFYPEELSEDNIDEIRNKIIFYQRDLKSCKHLVSQCEFMTRSFLDAEHKPILNSSGELVMSGPKVAPKSSPIFQACKIWEEINNLSIRNKENDELHISPEQKKDIFEYLDNNEKINATALYKILGIGKGDGWSVDKALSKGFTGNTTKVAIAKALGKEHNTKKSDLLRFDLRLKENGVNKDTGEIIYEIDPTCENEPLYRLWHVIYSINDKDALRHALTNQFGINDGESLRELTKIDFVKQGYGSRSAKFMRKLLPALMDGARYSEACDTIGINHSGSLTKSENEARELLHKIPQLQKNELRQPVVEKILNQMINVVNAVIDQFGSIDEIRVEMARELKLSKEGRAATAKNIRDREKMNNEMAEKIKELGITPSKNKILKYRLWQESGQKCFYCGQPVGAAEFLSGLDVEIEHIVPKALLFDDSFSNKVCACRKCNAEKSNTTAYDYMKSKGENEFNDYLRRVDAAFNEHKISFTKRSRLLTPADKLPKDFISRQLVQTQYISRKAMEILKQVCHNVYGSSGEVTSYLRRIWGYDEILHALDLPRYREGGMTAEVSYDHRGQTHTEERIKDWSKRLDHRHHAIDALTIACTRQSIIQRLNNLSAMTAVAGESMSLDKWTLAQPHFSVQEVSDNVSRILVSFKAGKKVTTPGKRYVYRGGKRVLAQEGLLIPRGALCEESVYGRIHSLEKEVPVKKLFERVDDIVKPGIRTAVEERLRACDNDVKVACASLKKEPLYLDAEKTIPLEYGTCYKAEYVMRYALSALKPKDVEFIVDEHIRKVVSERLSEYGNDPKKAFAEPLYADKSKTIPIRAVRCYTGLAQVVPVKKDSKGNDIGFVKPGNNHHIAIYRDAEGTYHENIVTFWDSVERKKYGLPVIIRKPGEIWDILIDKNIPEELAAGLPAPDWQFVMSMQQNEMFVLGMEDDEFRDAMEVKDYKTLGAHLYRVQKLTSIDYYFRSQYETTLDDSAGARMMKKFYRIKSIKSLFALHPRKVSVSLLGEMALKDD

SEQ ID NO: 1114 - protein, 895 aa, unidentified
  REGION 1..895: note = Description of Unknown: uncultivated organism with predicted taxonomy: Bacteroides sp. CAG:770
  REGION 1..895: note = MG16-25 effector
MKKILGLDLGVGSVGWSVVSCDDEHKPVEILGMGSRIVPLTPDESNEFSSGNAASKNQSRTQKRTARKGYDRYQLRRQALTGKLRELGMLPDEALIKLPVMDLWTLRARAATPGEKLSLAEIGRVLYHLNQKRGYRHSKEDDSADKTQRDYVQAVNKRFQEIMNEGLTIGQHFAVKLKESEVITDKGAFYNYRIKEQVFPRAAYVEEFDRIIQCQREFYPEVLTEANVNEIRNEIIYYQRPLKSCKHLVSVCEFMQRELFDAEHNPIRNRKGEIVVAGPKCAPKSSPLAQVCKIWEEVNNIRITNKENDEYFISIDNKHEIFDFLNTHEKMKADDLFKILGLAKNSGWSADRAMSKGMVGNTTRVALMKALKGRRDIEEVLRFDLSAVESNQVNADTGEVLMEISAECEREPLYRLWHIIYSISDKNEQKSALKNQFGISDESMLESLCRIDFVKQGYSSRSFKFMRKILPSLMDGAKYSEACDAVGINHSDSITKAENQARELLVKLPQLQKNELRQPVVEKILNQMINVVNAVIDKYGAIDEIRVEMARELKLSKEGRESAAKNIRAREKANEEIARRIEELGLVPSKNKILKYRLWEESVKRCFYCGQPVSAAEFLNGLDVEIEHVIPKSLLFDDSFSNKVCACRKCNAEKDNATAFDFMKGRGENAFEDYLKRVETAFKENRISQTKKNRLLTPADKIPKDFISRQLVQTQYISRKAMEILNQVCRNVYGSSGDVTAYLRRIWGYDEILHSLDLPRYREGNLTGDVTYVHRGQTHTEERIKDWSKRLDHRHHAIDALTIACTRQSIIQRLNTLNAKTAIGEEQISLDKWTLAQAHFSVADVADHVADILVSFKSGKKVATPGKRYVYKAGRRRVVQENILVPRGALSEESV

SEQ ID NO: 1115 - protein, 1071 aa, unidentified
  REGION 1..1071: note = Description of Unknown: uncultivated organism with predicted taxonomy: Bacteroides
  REGION 1..1071: note = MG16-26 effector
MKKVLGLDLGVGSVGWSLVNVDDNYKPTEILGIGSRIISLSPDESSEFTSGNAASKNQKRTQKRTARKGYDRYQMRRQALTEKLRELKMLPDERLIKLPVLELWTLRAKAATPGEKLTLPEIGRVLYHINQKRGYRHAKSDDSADKEQRDYVQTVNKRYQEIKDEGTTIGQHFAIKLKESEIVTEKGPFYNYRIKEQVFPRDAYIEEFDRIMDCQKTFYPEELSEDNIDEIRNKIIFYQRDLKSCKHLVSQCEFMTRSFLDAEHKPILNSSGELVMSGPKVAPKSSPIFQACKIWEEINNLSIRNKENDELHISPEQKKDIFEYLDNNEKINATALYKILGIGKGDGWSVDKALSKGFTGNTTKVAIAKALGKEHNTKKSDLLRFDLRLKENGVNKDTGEIIYEIDPTCENEPLYRLWHVIYSINDKDALRHALTNQFGINDEESLRELTKIDFVKQGYGSRSAKFMRKLLPALMDGARYSEACDMIGINHSGSLTKSENEARELLHKIPQLQKNELRQPVVEKILNQMINVVNAVIEQFGSIDEIRVEMARELKLSKEGRAATAKNIRDREKMNNEMAEKIKELGITPSKNKILKYRLWQESGQKCFYCGQPVGAAEFLSGLDVEIEHIVPKALLFDDSFSNKVCACRKCNAEKSNTTAYDYMKSKGENEFNDYLRRVDAAFNEHKISFTKRSRLLTPADKLPKDFISRQLVQTQYISRKAMEILKQVCHNVYGSSGEVTSYLRRIWGYDEILHSLDLPRYREGGMTAEVSYDHRGQTHTEERIKDWSKRLDHRHHAIDALTIACTRQSIIQRLNNLSAMTAVAGESMSLDKWTLAQPHFSVQEVSDNVSRILVSFKAGKKVTTPGKRYVYRGGKRVLAQEGLLIPRGALCEESVYGRIHSLEKEVPVKKLFERVDDIVKPGIRTAVEERLRACDNDVKVACASLKKEPLYLDVEKTIPLEYGTCYKAEYVMRYALSALKPKDVEFIVDEHIRKVVSERLSEYGNDPKKAFAEPLYADKSKTIPIRAVRCYTGLAQVVPVKKDSKGNDIGFVKPGNNHHIAIYRDAEGTY

SEQ ID NO: 1116 - protein, 1220 aa, unidentified
  REGION 1..1220: note = Description of Unknown: uncultivated organism with predicted taxonomy: Bacteroides sp. CAG:770
  REGION 1..1220: note = MG16-27 effector
MKKILGLDLGVGSVGWSVVSCDDEHKPVEILGMGSRIVPLTPAESNEFSSGNAASKNQSRTQKRTARKGYDRYQLRRQALTVKLRELGMLPDEALIKLPVLDLWTLRARAATPGEKLSLAEIGRVLYHLNQKRGYRHSKEDDSADKTQRDYVQAVNKRFQEIKNEGLTIGQHFAVKLKGSEVITDKGAFYNYRIKEQVFPRAAYVEEFDRIIQCQREFYPEVLTAADVNEIRNEIIYYQRPLKSCKHLVSSCEFMQRELFDAEHNPIRNRKGEIVVAGPKCAPKSSPLAQVCKIWEEINNIRVTNKENDEYFVGIDNKHEIFDFLNTHEKMKADDLFKILGLAKNSGWSADRAMSKGMVGNTTRVALMKALKGRRDIDDILRFDLREVESNQVNADTGEVLMEIGAECESEPLYRLWHIIYSISDKNEQKAALEKQFGITDESMLESLCRIDFVKQGYSSRSFKFMRKILPSLMDGAKYSEACDVIGINHSDSITKAENQTRKLLPKLPQLQKNELRQPVVEKILNQMINVVNAVIDKYGAIDEIRVEMARELKLSKAGRESAAKNIRTREKANEEIAKRIEELGLVPSKNKILKYRLWEESGKRCFYCGQPVSATEFLNGLDVEIEHIVPKSLLFDDSFSNKVCACRKCNAEKGNATAFDYMKGRGENAFEDYLKRVEAAFKENKISQTKRNRLLTPADKIPKDFISRQLVQTQYISRKAMEILDQVCRNVYGSSGDVTAYLRRIWGYDEILHSLDLPRYREGNLTGDVTYVHRGQTHTEERIKDWSKRLDHRHHAIDALTIACTRQSIIQRLNTLNAKTAIGEEQMSLDKWTLAQAHFSVADVADHVADILVSFKSGKKVTTPGKRYVYKAGSRRVAQENILVPRGALSEESVYGRIKSIEEKVPVKKLFERVDDIVKPRIRHLIRERLEACGGDCSKAVSSLKKSPLYLDEENTIMLEYGSCFKPEYVIKYSLDSIKAKDAASIVDKHIRDVVTARLAAFGDDPKKAFAEPLYADEAGKIQIKTVRCYTGLSQVVPVKKDADGNDIGFVKPGNNHHIAIYKDADGKYQESIVTFRDAVERKKYGIPVVVRNPVEVLDTIIDKNVPEDLTGGLPSPEWTFVMSMQQNEMFVLGMGDDEFNDALAGRDYKSLGEHLYRVQKLASSYYVFRSQYETKLDDSKNALMMKKYYRTQSFNALFAINPRKVSISLLGEISLKDD

SEQ ID NO: 1117 - protein, 1219 aa, unidentified
  REGION 1..1219: note = Description of Unknown: uncultivated organism with predicted taxonomy: Bacteroides sp. CAG:545
  REGION 1..1219: note = MG16-28 effector
MKKVLGLDLGVGSVGWSLVNVDDNYKPTEILGIGSRIISLSPDESSEFTSGNAASKNQKRTQKRTARKGYDRYQMRRQALTEKLRELKMLPDERLIKLPVLELWTLRAKAATPGEKLTLPEIGRVLYHINQKRGYRHAKSDDSADKEQRDYVQTVNKRYQEIKDEGTTIGQHFAIKLKESEIVTDKGPFYNYRIKEQVFPRDAYIEEFDKIMDCQKTFYPEELSEDNIDEIRNKIIFYQRDLKSCKHLVSQCEFMTRSFLDADHKPILNSSGELVMSGPKVAPKSSPIFQACKIWEEINNLSIRNKENDELHISPEQKKDIFEYLDNNEKINATALYKILGIGKGDGWSVDKALSKGFTGNTTKVAIAKALGKEHNTKKSDLPRFDLRLKENGVNKDTGEIIYEIDPTCENEPLYRLWHVIYSINDKDALRHALTNQFGINDGESLRELTKIDFVKQGYGSRSAKFMRKLLPALMDGARYSEACDMIGINHSGSLTKSENEARELLHKIPQLQKNELRQPVVEKILNQMINVVNAVIDQFGSIDEIRVEMARELKLSKEGRAATAKNIRDREKMNNEMAEKIKELGITPSKNKILKYRLWQESGQKCFYCGQPVGAAEFLSGLDVEIEHIVPKALLFDDSFSNKVCACRKCNAEKSNTTAYDYMKSKGENEFNDYLRRVDAAFNEHKISFTKRSRLLTPADKLPKDFISRQLVQTQYISRKAMEILKQVCHNVYGSSGEVTSYLRRIWGYDEILHTLDLPRYREGGMTAEVSYDHRGQTHTEERIKDWSKRLDHRHHAIDALTIACTRQSIIQRLNNLSAMTAVAGESMSLDKWTLAQPHFSVQEVSDNVSRILVSFKAGKKVTTPGKRYVYRGGKRVLAQEGLLIPRGALCEESVYGRIHSLEKEVPVKKLFERVDDIVKPGIRTAVEERLRACDNDVKVACASLKKEPLYLDAEKTIPFEYGTCYKAEYVMRYALSALKPKDVEFIVDEHIRKVVSERLSEYGNDPKKAFAEPLYADKSKTIPIRAVRCYTGLAQVVPVKKDSKGNDIGFVKPGNNHHIAIYIDSDGMYHKSTLTFWKAVERKKYGLPVIIRKPWEIWDIIIDKNIPEELAAGLPAPDWKFVMSMQQNEMFILGMEDDEFRDAMEVKDYKTLGAHLYRVQKLEHLNFRIQYDTILDDSKAAKDMKKFYEIRSFKAFWALHPRKVSVSLLGEMALKDD

SEQ ID NO: 1118 - protein, 1221 aa, unidentified
  REGION 1..1221: note = Description of Unknown: uncultivated organism with predicted taxonomy: Bacteroides sp. CAG:709
  REGION 1..1221: note = MG16-29 effector
MKKILGLDLGVGSIGWSLINADKDNKPIAILGLGSRIISLSPDESSEFTSGNAASKNQKRTQKRTARKGYDRYQMRRQALTDKLRKLKMLPDEHLIKLPVLDLWTLRARAATPGEKLTLPEIGRVLYHINQKRGYRHSRSDDSADKEQREYVQAINKRFQEIREEGVTIGQHFVKKLKESEVVTDKGAFYNYRIKEQVFPRDAYVAEFDRVMDCQKVFYPEELSEANINEFRNEIIFYQRNLKSCKHLVSRCEFMTRSFLDEEHRPVLDASGKLVISGPKVAPKSSPIFQVCKIWEEINNLSIRNKENDELHISPEQKKEIFEYLDNNEKITSAALYKILGISKGDGWSVDKALSKGFTGNTTKVAISKALGKANDAKKRDLLRFDLRLKENGVNKDTGEIICEIDPECENEPLYKLWHVIYSINDKDAQRHALTSQFGINDEASLAELSKIDFVKQGYGSRSVKFMRKLLPSLMDGAKYSEACDVIGVNHSGSLTKSENEARELLQRIPQLQKNELRQPVVEKILNQMINVVNAVIEKFGGVDEIRVEMARELKLSKEGRAATAKNIRDREKENKEIAEKIIELGVTPSKNKILKYRLWQEAGQKCFYCGQPVGATEFLNGLDVEIEHVVPKALLFDDSFSNKVCACRKCNAEKRKSTAYDYMKSKGENAFNDYLRRVDTAFSEHKISFTKRSRLLTPADKIPKDFISRQLVQTQYISRKAMEILKQVCHNVYGSSGEVTSYLRRIWGYDEILHSLDLPRYREGGMTAEVSYEHRGQTHTEERIKDWSKRLDHRHHAIDALTIACTRQSVIQRLNNLSSMTAVAGEAMSLDKWTLAQPHFSVQEVSDKVGGILVSFKAGKKVTTPGKRYTYRGGKRILAQDGLLIPRGALSEESVYGRISALEKNVLVKKLFERVEDIVKPGIRAVVEDRLMACDNDVNAACASLKKEPLYLDAEKTIPLEYGTCYKRKYVIKYPISSLKAKDVESIIDGHIRQIVSERLSEYGNDPKKAFAEPLYADDAKTIPVRTVRCYTGLDQVVPVKKDVAGNDIGFVKPGNNHHIAICRDADGKFHECVETFWDAVERKKYGIPVIVRNPDEVWDVVIDKNVPEELAAGLPALGWSFVMSLQQNEMFILGMEDDEFRDAMAEADYKALGAHLYRVQKLAGSDYYFRSHYETLLDDSAGARIMKKFYRVRSFNALFYLHPRKVAVSLLGEMSLKND

SEQ ID NO: 1119 - protein, 1221 aa, unidentified
  REGION 1..1221: note = Description of Unknown: uncultivated organism with predicted taxonomy: Bacteroides sp. CAG:709
  REGION 1..1221: note = MG16-30 effector
MKKILGLDLGVGSIGWSLINADKDNKPIAILGLGSRIISLSPDESSEFTSGNAASKNQKRTQKRTARKGYDRYQMRRQALTDKLRKLKMLPDEHLIKLPVLDLWTLRARAATPGEKLTLPEIGRVLYHINQKRGYRHSRSDDSADKEQREYVQAINKRFQEIREEGVTIGQHFVKKLKESEVVTDKGAFYNYRIKEQVFPRDAYVAEFDRVMDCQKVFYPEELSEANINEFRNEIIFYQRNLKSCKHLVSRCEFMTRSFLDEGHRPVLDASGKLVISGPKVAPKSSPIFQVCKIWEEINNLSIRNKENDELHISPEQKKEIFEYLDNNEKITSAALYKILGIGKGDGWSVDKALSKGFTGNTTKVAISKALGKANDAKKRDLLRFDLRLKENGVNKDTGEIICEIDPECENEPLYKLWHVIYSINDKDAQRHALTSQFGINDEASLAELSKIDFVKQGYGSRSVKFMRKLLPSLMDGAKYSEACDVIGVNHSGSLTKSENEARELLQRIPQLQKNELRQPVVEKILNQMINVVNAVIEKFGGVDEIRVEMARELKLSKEGRAATAKNIRDREKENKEIAEKIIELGVTPSKNKILKYRLWQEAGQKCFYCGQPVGATEFLNGLDVEIEHVVPKALLFDDSFSNKVCACRKCNAEKRNSTAYDYMKSKGENAFNDYLRRVDTAFSEHKISFTKRSRLLTPADKIPKDFISRQLVQTQYISRKAMEILKQVCHNVYGSSGEVTSYLRRIWGYDEILHSLDLPRYREGGMTAEVSYEHRGQTHTEERIKDWSKRLDHRHHAIDALTIACTRQSVIQRLNNLSSMTAVAGEAMSLDKWTLAQPHFSVQEVSDKVGGILVSFKAGKKVTTPGKRYTYRGGKRILAQDGLLIPRGALSEESVYGRISALEKNVPVKKLFERVEDIVKPGIRAVVEDRLMACDNDVNAACASLKKEPLYLDAEKTIPLEYGTCYKAKYVMKYALSALKPKDVEYIVDEHIRKVVSERLSEYGNDPKKAFAEPLYADDAKTIAVRTVRCYTGLDQVVPVKKDVAGNDIGFVKPGNNHHIAIYRDADGKFHECVVTFWDAVERKKYGIPVIVRNPDEVWDVVIDKNVPEELAAGLPALGWSFVMSLQQNEMFILGMEDDEFRDAMAEADYKALGAHLYRVQKLAGSDYYFRSHYETLLDDSAGARIMKKFYRISSSKALFALHPRKVAVSLLGEMSLKND

SEQ ID NO: 1120 - protein, 1221 aa, unidentified
  REGION 1..1221: note = Description of Unknown: uncultivated organism with predicted taxonomy: Bacteroides sp. CAG:709
  REGION 1..1221: note = MG16-31 effector
MKKILGLDLGVGSIGWSLINADKDNKPIAILGLGSRIISLSPDESSEFTSGNAASKNQKRTQKRTARKGYDRYQMRRQALTDKLRKLKMLPDEHLIKLPVLDLWTLRARAATPGEKLTLPEIGRVLYHINQKRGYRHSRSDDSADKEQREYVQAINKRFQEIREEGVTIGQHFVKKLKESEVVTDKGAFYNYRIKEQVFPRDAYVAEFDRVMDCQKVFYPEELSEANINEFRNEIIFYQRNLKSCKHLVSRCEFMTRSFLDEGHRPVLDASGKLVISGPKVAPKSSPIFQVCKIWEEINNLSIRNKENDELHISPEQKKEIFEYLDNNEKITSAALYKILGIGKGDGWSVDKALSKGFTGNTTKVALSKALGKANDAKKRDLLRFDLRLKENGVNKDTGEIICEIDPECENEPLYKLWHVIYSINDKDAQRHALTSQFGINDEASLAELSKIDFVKQGYGSRSVKFMRKLLPSLMDGAKYSEACDVIGVNHSASLTKSENEARELLQRIPQLQKNELRQPVVEKILNQMINVVNAVIEKFGGVDEIRVEMARELKLSKEGRAATAKNIRDREKENKEIAEKIIELGVTPSKNKILKYRLWQEAGQKCFYCGQPVGATEFLNGLDVEIEHVVPKALLFDDSFSNKVCACRKCNAEKRNSTAYDYMKSKGENAFNDYLRRVDTAFSEHKISFTKRSRLLTPADKIPKDFISRQLVQTQYISRKAMEILKQVCHNVYGSSGEVTSYLRRIWGYDEILHSLDLPRYREGGMTAEVSYEHRGQTHTEERIKDWSKRLDHRHHAIDALTIACTRQSVIQRLNNLSSMTAVAGEAMSLDKWTLAQPHFSVQEVSDKVGGILVSFKAGKKVTTPGKRYTYRGGKRILAQDGLLIPRGALSEESVYGRISALEKNVPVKKLFERVEDIVKPGIRAVVEDRLMACYNDVNAACASLKKEPLYLDAEKTIPLEYGTCYKAKYVMKYALSALKPKDVEYIVDEHIRKVVSERLSEYGNDPKKAFAEPLYADDAKTIDVRTVRCYTGLDQVVPVKKDVAGNDIGFVKPGNNHHIAIYRDADGKFHECVVTFWDAVERKKYGIPVIVRNPDEVWDVVIDKNVPEELAAGLPALGWSFVMSLQQNEMFILGMEDDEFRDAMAEADYKALGAHLYRVQKLAGSDYYFRSHYETLLDDSAGARIMKKFYRISSSKALFALHPRKVAVSLLGEMSLKND

SEQ ID NO: 1121 - protein, 1219 aa, unidentified
  REGION 1..1219: note = Description of Unknown: uncultivated organism with predicted taxonomy: Alistipes sp. CAG:514
  REGION 1..1219: note = MG16-32 effector
MKKVLGLDLGVGSVGWSLVNVDDNYKPAEILGLGSRIISLSPDESSEFTSGNAASKNQKRTQKRTARKGYDRYQMRRQALTEKLRELKMLPDERLIKLPVLDLWTLRARAATPGEKLTLPEIGRVLYHINQKRGYRHSKSDDSADKEQRDYVQTVNKRFQEIKDEGTTIGQHFAIILKESEVFTEKGPFYNYRIKEQVFPRDAYIEEFDRIMACQKAFYPEELSDININEIRNEIIFYQRNLRSCKHLVSRCEFMTRRFFDAEHKPILNNSGEIVISGPKVAPKSSPIFQACKIWEEINNLSLRNKENDELHISREQKKEIFEYLDNNEKITATALYKILGIGKGDGWSMDKALSKGVTGNTTKTAIARALGKMNNPAKESLLRFDLRLKENGVNKDSGEVIYEIDPECENEPLYRLWHIIYSINDKEALRQALTNQFGINDEESLKELSNIDFVKQGYGSRSAKFMRKLLPALIGGAKYSEACDMIGINHSGSLTKSENEARELLHKIPQLQKNELRQPVVEKILNQMINVVNAVIDQFGDIDEIRVEMARELKLSKEGRAATAKNIRDREKQNNEIAEKIKELGITPSKNKILKYRLWQESGQKCFYCGQPVGAAEFLNGLDVEIEHIVPKALLFDDSFSNKVCACRRCNAEKSNLTAYDYMKSKGENEFNDYLRRVDAAFNDHKISFTKRSRLLTPADKLPKDFILRQLVQTQYISRKAMEILKQVCHNVYGSSGEVTSYLRRIWGYDEILHSLDLPRYREGGMTTEVSYEHRGQTHTEERIKDWSKRLDHRHHAIDALTIACTRQSIIQRLNNLSSMTATAGESMSLDKWTSAQPHFSVQEVSDNVSRILVSFKAGKKVTTPGKRYIHRGGKRILTQEGLLIPRGALCEESVYGRILSLEKAVPVKKLFERVEDIVKPGIRAMVEERLQACNNDVKVACASLKKEPLYLDAEKTIPLEYGTCYKAEYVMKYTLSALKPKDVEYIVDEHIRKVVSERLSEYGNDPKKAFAEPLYADEAKTIPIRTVRCYTDLRQAAPVKKDANGNDIGFVKPGNNHHIAIYIDSDGVYHKSTITFWKAVERKKYGLPVIIRKPREIWMIIIDKNIPEELAAGLPDPDWKFVMSMQQNEMFVLGMEDDEFRDAMEGKDYKTLGAHLYRVQKLEHLNFRIQYDTILDDSKAAKDMKKFYEIRGFKAFWALHPRKVSVSLLGELSLKDD

SEQ ID NO: 1122 - protein, 1219 aa, unidentified; identical to SEQ ID NO: 1121
  REGION 1..1219: note = Description of Unknown: uncultivated organism with predicted taxonomy: Alistipes sp. CAG:514
  REGION 1..1219: note = MG16-33 effector

SEQ ID NO: 1123 - protein, 1221 aa, unidentified
  REGION 1..1221: note = Description of Unknown: uncultivated organism with predicted taxonomy: Bacteroides sp. CAG:545
  REGION 1..1221: note = MG16-34 effector
MKKVLGLDLGVGSVGWSLVNVDDNYKPMEILGIGSRIISLSPDESSEFTSGNAASKNQKRTQKRTARKGYDRYQMRRQALTEKLRELKMLPDERLIKLPVLELWTLRAKAATPGEKLTLPEIGRVLYHINQKRGYRHAKSDDSADKEQRDYVQSVNKRYQEIKDEGATIGQHFAIKLKESEIVTDKGPFYNYRIKEQVFPRDAYIEEFDRIMACQKTFYPEELSDGNIDEIRNKIIFYQRDLKSCKHLVSQCEFMTRSFLDAEHKPILNSSGELVMSGPKVAPKSSPIFQACKIWEEINNLSIRNKENDELHISPEQKKDIFEYLDNNEKINATALYKILGIGKGDGWSVDKALSKGFTGNTTKVAIAKALGKEHNTKKSDLLRFDLRLKENGVNKDTGEIIYEIDPTCENEPLYRLWHVIYSINDKDALRHALTNQFGINDGESLRELSKIDFVKQGYGSRSAKFMRKLLPALMDGARYSEACDMIGINHSGSLTKSENEARELLHKIPQLQKNELRQPVVEKILNQMINVVNAVIDQFGSIDEIRVEMARELKLSKEGRAATAKNIRDREKMNNEMAEKIKELGITPSKNKILKYRLWQESGQKCFYCGQPVGAAEFLSGLDVEIEHIVPKALLFDDSFSNKVCACRKCNAEKSNTTAYDYMKSKGENEFNDYLRRVDAAFNEHKISFTKRSRLLTPADKLPKDFISRQLVQTQYISRKAMEILKQVCHNVYGSSGEVTSYLRRIWGYDEILHSLDLPRYREGGMTAEVSYDHRGQTHTEERIKDWSKRLDHRHHAIDALTIACTRQSIIQRLNNLSAMTAVAGESMSLDKWTLAQPHFSVQEVSDNVSRILVSFKAGKKVTTPGKRYVYRGGKRVLAQEGLMIPRGALCEESVYGRIHSLEKEVPVKKLFERVDDIVKPGIRTAVEERLRACDNDVKVACASLKKEPLYLDAEKTIPLEYGTCYKAEYAMRYALSALKPKDVEFIVDEHIRKVVSERLSEYGNDPKKAFAEPLYADKSKMIPIRTVRCYTGLAQVVPIKKDSNGNDIGFVKPGNNHHIAIYRDADGTYHESVVTFWDTVERKKYGLPVIIRKPEEIWDIIIDKNIPEELAAGLPAPDWKFVMSMQQNEMYVLGMEDDEFRDAMEGKDYKTLGAHLYRVQKLTSLYYVFRHQYETQLDDSKGAQIMKKFYRVRSFNAMFALHPRKVSVSLLGEMALKDD

SEQ ID NO: 1124 - protein, 1186 aa, unidentified
  REGION 1..1186: note = Description of Unknown: uncultivated organism with predicted taxonomy: Bacteroides sp. CAG:770
  REGION 1..1186: note = MG16-35 effector
MGSRIVPLTPDESNEFSSGNAASKNQSRTQKRTARKGYDRYQLRRQALTGKLRELGMLPDEALIKLPVMDLWTLRARAATPGEKLSLAEIGRVLYHLNQKRGYRHSKEDDSADKTQRDYVQAVNKRYQEIKNEGLTIGQHFAVKLKESEVITDKGAFYNYRIKEQVFPRAAYVEEFDRIIQCQREFYPEVLTEANVNEIRNEIIYYQRLLKSCKHLVSVCEFMQRELFDAEHNPIRNRKGEIVIAGPKCAPKSSPLAQVCKIWEEVNNIRITNKENDEYFISVDDRHKIFDFLNTHEKMKADDLFKILGLAKNSGWSADRAMSKGMVGNTTRVALMKALKGRRDIEEVLRFDLSAVESNQVNADTGEVLMEISAECEREPLYRLWHIIYSISDKNEQKSALKNQFGISDESMLESLCRIDFVKQGYSSRSFKFMRKILPSLMDGAKYSEACDAVGINHSDSITKAENQARELLVKLPQLQKNELRQPVVEKILNQMINVVNAVIDKYGAIDEIRVEMARELKLSKEGRESAAKNIRAREKANEEIARRIEELGLVPSKNKILKYRLWEESGKRCFYCGQPVSAAEFLNGLDVEIEHVIPKSLLFDDSFSNKVCACRKCNAEKDNATAFDFMKGRGENAFEDYLKRVETAFKENRISQTKKNRLLTPADKIPKDFISRQLVQTQYISRKAMEILNQVCRNVYGSSGDVTAYLRRIWGYDEILHSLDLPRYREGNLTGDVTYVHKGQTHTEERIKDWSKRLDHRHHAIDALTIACTRQSIIQKLNTLNAKTAIGEEQISLDKWTLAQAHFSVADVADHVADILVSFKSGKKVATPGKRYVYKAGRRSVAQENILVPRGALSEESVYGRIKSIEEKVPVKKLFERADDIVKPRIRHLIGERLEACGGDCSKAVSSLRKSPLYLDEEKTIMLEYGSCFKPEYVIKYSLNSIKAKDAVSIVDKHVREVVTERLAAFGDDPKKAFAEPLYADEAGKIQIKTVRCYTGLSQVVPVKKDADGNDIGFVKPGNNHHIAIYKDADGTYYWKLVTLWNAVDRKRYGLPIIVRNPYEISDIIIDSNIPDALASGLPEPNWSFVMSLQQNEMFVLGMSEEEFRCAIENKDYKTLGMHLYRVQKLSHLRFRSQYETRLDDSSEAKNMKKFYEIRSLKSFWSLNPRKVSISLLGEISLKDD

SEQ ID NO: 1125 - protein, 1221 aa, unidentified
  REGION 1..1221: note = Description of Unknown: uncultivated organism with predicted taxonomy: Bacteroides
  REGION 1..1221: note = MG16-36 effector
MKKVLGLDLGVGSVGWSLVNVDDNYKPTEILGIGSRIISLSPDESSEFTSGNAASKNQKRTQKRTARKGYDRYQMRRQALTEKLRELKMLPDERLIKLPVLELWTLRAKAATPGEKLTLPEIGRVLYHINQKRGYRHAKSDDSADKEQRDYVQTVNKRYQEIKDEGTTIGQHFAIKLKESEIVTDKGPFYNYRIKEQVFPRDAYIEEFDRIMDCQKTFYPEELSEDNIDEIRNKIIFYQRDLKSCKHLVSQCEFMTRSFLDADHKPILNSSGELVMSGPKVAPKSSPIFQACKIWEEINNLSIRNKENDELHISPEQKKDIFEYLDNNEKINATALYKILGIGKGDGWSVDKALSKGFTGNTTKGAIAKALGKDHNTKKSDLLRFDLRLKENGVNKDTGEIIYEIDPTCENEPLYRLWHVIYSINDKDALRHALTNQFGINDEESLRELTKIDFVKQGYGSRSAKFMRKLLPALMDGARYSEACDMIGSNHSGSLTKSENEARELLHKIPQLQKNELRQPVVEKILNQMINVVNAVIDQFGSIDEIRVEMARELKLSKEGRAATAKNIRDREKMNNEMAEKIKELGITPSKNKILKYRLWQESGQKCFYCGQPVGAAEFLSGLDVEIEHIVPKALLFDDSFSNKVCACRKCNAEKSNTTAYDYMKSKGENEFNDYLRRVDAAFNEHKISFTKRSRLLTPADKLPKDFISRQLVQTQYISRKAMEILKQVCHNVYGSSGEVTSYLRRIWGYDKILHSLDLPRYREGGMTAEVSYDHRGQTHTEERIKDWSKRLDHRHHAIDALTIACTRQSIIQRLNNLSAMTAVAGESMSLDKWTLAQPHFSVQEVSDNVSRILVSFKAGKKVTTPGKRYVYRGGKRVLAQKGLLIPRGALCEESVYGRIHSLEKEVPVKKLFERVDDIVKPGIRAAVEERLRACDNDVKVACASLKKEPLYLDVEKTIPLEYGTCYKVEYVMRYALSALKPKDVEYFVDEHIRKVVSERLSEYGNDPKKAFAEPLYADKSKTIPIRAVRCYTGLAQVVPVKKDSKGNAIGFVKPGNNHHIAIYRDADGTYHESVVTFWDTVERKKYGLPVIIRKPEEIWDIIIDKNIPEELAAGLPAPDWKFVMSMQQNEMYVLGMEDDEFRDAMEVKDYKTLGAHLYRVQKLTSIDYYFRSQYETTLDDSAGARMMKKFYRIKSIKSLFALHPRKVSVSLLGEMALKDD

SEQ ID NO: 1126 - protein, 1221 aa, unidentified
  REGION 1..1221: note = Description of Unknown: uncultivated organism with predicted taxonomy: Bacteroides sp. CAG:545
  REGION 1..1221: note = MG16-37 effector
MKKVLGLDLGVGSVGWSLVNVDDNYKPTEILGIGSRIISLSPDESSEFTSGNAASKNQKRTQKRTARKGYDRYQMRRQALTEKLRELKMLPDERLIKLPVLELWTLRAKAATPGEKLTLPEIGRVLYHINQKRGYRHAKSDDSADKEQRDYVQTVNKRYQEIKDEGTTIGQHFAIKLKESEIVTDKGPFYNYRIKEQVFPRDAYIEEFDRIMDCQKTFYPEELSEDNIDEIRNKIIFYQRDLKSCKHLVSQCEFMTRSFLDADHKPILNSSGELVMSGPKVAPKSSPIFQACKIWEEINNLSIRNKENDELHISPEQKKDIFEYLDNNEKINATALYKILGIGKGDGWSVDKALSKGFTGNTTKVAIAKALGKEHNTKKSDLLRFDLRLKENGVNKDTGEIIYEIDPTCENEPLYRLWHVIYSINDKDALRHALTNQFGINDEESLRELTKIDFVKQGYGSRSAKFMRKLLPALMDGARYSEACDMIGINHSGSLTKSENEARELLHKIPQLQKNELRQPVVEKILNQMINVVNAVIDQFGSIDEIRVEMARELKLSKEGRAATAKNIRDREKMNNEMAEKIKELGITPSKNKILKYRLWQESGQKCFYCGQPVGAAEFLSGLDVEIEHIVPKALLFDDSFSNKVCACRKCNAEKSNTTAYDYMKSKGENEFNDYLRRVDAAFNEHKISFTKRSRLLTPADKLPKDFISRQLVQTQYISRKAMEILKQVCHNVYGSSGEVTSYLRRIWGYDEILHSLDLPRYREGGMTAEVSYDHRGQTHTEERIKDWSKRLDHRHHAIDALTIACTRQSIIQRLNNLSAMTAVAGESMSLDKWTLAQPHFSVQEVSDNVSRILVSFKAGKKVTTPGKRYVYRGGKRVLAQEGLLIPRGALCEESVYGRIHSLEKEVPVKKLFERVDDIVKPGIRAAVEERLRACDNDVKVACASLKKEPLYLDAEKTIPLEYGTCYKAEYVMRYALSALKPKDVEFIVDEHIRKVVSERLSEYGNDPKKAFAEPLYADKSKTIPIRAVRCYTGLAQVVPVKKDSKGNDIGFVKPGNNHHIAIYRDAEGTYHENVVTFWDTVERKKYGLPVIIRKPGEIWDILIDKNIPEELAAGLPAPDWKFVMSMQQNEMFVLGMEDDEFRDAMAVKDYKTLGAHLYRVQKLASIYYVFRHQYETQLDDSKGALVMKKFYRTASFKALFALHPRKVSVSLLGEMALKDD

SEQ ID NO: 1127 - protein, 1221 aa, unidentified; identical to SEQ ID NO: 1125
  REGION 1..1221: note = Description of Unknown: uncultivated organism with predicted taxonomy: Bacteroides
  REGION 1..1221: note = MG16-38 effector

SEQ ID NO: 1128 - protein, 1220 aa, unidentified
  REGION 1..1220: note = Description of Unknown: uncultivated organism with predicted taxonomy: Bacteroides sp. CAG:770
  REGION 1..1220: note = MG16-39 effector
MKKILGLDLGVGSVGWSVISCDDEHRPLEILGMGSRIVPLTPEESNEFSSGNAASKNQSRTQKRTARKGYDRYQSRRKALTDKLRELDMLPDETLIKLPVLDLWTLRARAATPGDKLSLPEIGRVLYHLNQKRGYRHSKQDDSADKTQRDYVQAVNKRFQEIKDEGLTIGQHFAEKLKESEIITDKGAFYNYRIKEQVFPRAAYVEEFDRIIQCQREFYPEVLTEANVNEIRNEIIYYQRPLKSCKHLVSVCEFMQRELFDAEHNPIRNGKGEIVVAGPKCAPKSSPLAQVCKIWEEVNNIRITNKENDEYFISIDNKHEIFDFLNTHEKMKADDLFKILGIAKNSGWSADKAMSKGMVGNTTRVALMKALKGRRDIDDILRFDLREVESNQVNADTGEVLMEIGAECESEPLYRLWHIIYSISDKNEQKAALEKQFGITDKSMLESLCRIDFVKQGYSSRSFKFMRKILPSLMDGAKYSEACDVIGINHSDSITKAENQTRKLLTKLPQLQKNELRQPVVEKILNQMINVVNAVIDKYGAIYEIRVEMARELKLSKAGRESAAKNVRTREKANEEIAKRIEELGLVPSKNKILKYRLWEESGKRCFYCGQPVSATEFLNGLDVEIEHVVPKSLLFDDSFSNKVCACRKCNAEKGNATAFDFMKGRGENAFEDYLKRVETAFKENKISQTKRNRLLTPADKIPKDFIARQLVQTQYISRKAMEILNQVCRNVYGSSGDVTAYLRRIWGYDEILHSLDLPRYRDGNLTEDVTYVHRGQTHTEERIKDWSKRLDHRHHAIDALTIACTRQSIIQRLNTLNAKTAIGEEQMSLDKWTLAQAHFSVADVADHVADILVSFKSGKRVTTPGKRYVYKAGRRIVAQENILVPRGALSEESVYGRIKSIEEKVPVKKLFERADDIVKPRIRRLIRERLETFGGDCSKAVSSLKKSPLYLDEENTIMLEYGSCFKPEYVIKYSLNSIKAKDAVSIVDKHIREVVTARLAAFGDDPKKAFAEPLYSYASGKIQIKTVRCYTGLSQVVPVKRDADGNDIGFVKPGNNHHIAIYKDADGKYQESIVTFCDAVERKKYGIPVVVRNPAAVLDTVIDKNVPEDLAGGLPSPEWTFVMSMQQNEMFVLGMGDDEFNDAMTGRDYKSLGEHLYRVQKLASLYYVFRSQYETKLDDSKGALTMKKFYRTASFKALFALNPRKVSISLLGEISLKDD

SEQ ID NO: 1129 - protein, 1221 aa, unidentified
  REGION 1..1221: note = Description of Unknown: uncultivated organism with predicted taxonomy: Bacteroides sp. CAG:770
  REGION 1..1221: note = MG16-40 effector
MKKILGLDLGVGSIGWSLINADKDNKPIAILGLGSRIISLSPDESSEFTSGNAASKNQKRTQKRTARKGYDRYQMRRQALTDKLRKLKMLPDEHLIKLPVLDLWTLRARAATPGEKLTLPEIGRVLYHINQKRGYRHSRSDDSADKEQREYVQAINKRFQEIREEGVTIGRHFVKKLKESEVVTDKGAFYNYRIKEQVFPRDAYVAEFDRVMDCQKVFYPEELSEANINEFRNEIIFYQRNLKSCKHLVSRCEFMTRSFLDEGHRPVLDASGKVVISGPKVAPKSSPIFQVCKIWEEINNLSIRNKENDELHISPEQKKEIFEYLDNNEKITSAALYKILGIGKGDGWSVDKALSKGFTGNTTKVAISKALGKANDAKKRDLLRFDLRLKENGVNKDTGEIICEIDPECENEPLYKLWHVIYSINDKDAQRHALTSQFGINDEASLAELSKIDFVKQGYGSRSVKFMRKLLPSLMDGAKYSEACDVIGVNHSGSLTKSENEARELLQRIPQLQKNELRQPVVEKILNQMINVVNAVIEKFGGVDEIRVEMARELKLSKEGRAATAKNIRDREKENKEIAEKIIELGVTPSKNKILKYRLWQEAGQKCFYCGQPVGATEFLNGLDVEIEHVVPKALLFDDSFSNKVCACRKCNAEKRNSTAYDYMKSKGENAFNDYLRRVDTAFSEHKISFTKRSRLLTPADKIPKDFISRQLVQTQYISRKAMEILKQVCHNVYGSSGEVTSYLRRIWGYDEILHSLDLPRYREGGMTAEVSYEHRGQTHTEERIKDWSKRLDHRHHAIDALTIACTRQSIIQRLNNLSSMTAVAGEAMSLDKWTLAQPHFSVQEVSDKVGGILVSFKAGKKVTTPGKRYTYRGGKRILAQDGLLIPRGALSEESVYGRISALEKNVPVKKLFERVEDIVKPGIRAVVEDRLKACDNDVNAACASLKKEPLYLDAEKTIPLEYGTCYKAKYVMKYALSALKPKDVEYIVDEHIRKVVSERLSEYGNDPKKAFAEPLYADDAKTIAVRTVRCYTGLDQVVPVKRDVAGNDIGFVKPGNNHHIAIYRDADGKFHECVVTFWDAVERKKYGIPVIVRNPDEVWDVVIDKNVPEELAAGLPALGWSFVMSLQQNEMFILGMEDDEFMDAMAEADYKALGAHLYRVQKLASSYYVFRHQYETQLDDSKCAQIMKKFYRAQSFKALFALHPRKVSVSLLGEMALKDD

SEQ ID NO: 1130 - protein, 1220 aa, unidentified
  REGION 1..1220: note = Description of Unknown: uncultivated organism with predicted taxonomy: Bacteroides sp. CAG:770
  REGION 1..1220: note = MG16-42 effector
MKKILGLDLGVGSVGWSVVSCDDEHKPVEILGMGSRIVPLTPDESNEFSSGNAASKNQSRTQKRTARKGYDRYQLRRQALTVKLRELGMLPDEALIKLPVQDLWTLRARAATLGNKLSLPEIGRVLYHLNQKRGYRHSKQDDSADKTQRDYVQAVNKRFQEIKDEGLTIGQHFAVKLKESEVITDKGAFYNYRIKEQVFPRAAYVEEFDRIIQCQREFYPEVLTEANVNEIRNEIIYYQRPLKSCKHLVSSCEFMQRELFDAEHNPIRNRKGEIVVAGPKCAPKSSPLAQVCKIWEEINNIRVTNKENDEYFISIDNKHEIFDFLNTHEKMKADDLFKILGIAKNSGWSADKAMSKGMVGNTTRVALMKALKGRRDIDEILRFDLREVESNQVNADTGEVLMEIGAECESEPLYRLWHIIYSISDKNEQKAALEKQFGITDESMLESLCRIDFVKQGYSGRSFKFMRKILPSLMDGAKYSEACDVIGINHSDSITKAENQTRKLLTKLPQLQKNELRQPVVEKILNQMINVVNAVIGKYGAIDEIRVEMARELKLSKEGRESAAKNIRAREKANEEIAKRIEELGLLPSKNKILKYRLWEESGKRCFYCGQPVSATEFLNGLDVEIEHVVPKSLLFDDSFSNKVCACRKCNAEKGNATAFDFMNGRGENAFEDYLKRVETAFKENKISQTKRNRLLTPADKIPKDFISRQLVQTQYISRKAMEILNQVCRNVYGSSGDVTAYLRRIWGYDEILHSLDLPRYREGNLTGDVTYVHMGQTHTEERIKDWSKRLDHRHHAIDALTIACTRQSIIQRLNTLNAKTAIGEEQMSLDKWTLAQAHFSVADVSDHVADILVSFKSGKKVTTPGKRCVYKAGRRIVAQENILVPRGALSEESVYGRIKSIEEKVPVKKLFERVDDIVKPRIRHLIRERLEACGGDCSKAVSSLKKSPLYLDEENTIMLEYGSCFKPEYVIKYSLNSIKAKDAASIVDKHIRDVVIARFAAFGDDPKKAFAEPLYADEAGKIQIKTVRCYTGLSQVVPVKKDAAGNDIGFVKPGNNHHIAIYKDADGKYQESIVTFRDAVERKKYGIPVVVRNPVEVLDTVIDKNVPEDLAGGLPSPEWTFVMSMQQNEMFVLGMGDDEFNDALAGRDYKSLGEHLYRVQKLATSDYFFRSQYETKLDDSKGASAMRKFYRTASLKALFALNPRKVSISLLGEISLKDD

SEQ ID NO: 1131 - protein, 1220 aa, unidentified; identical to SEQ ID NO: 1130
  REGION 1..1220: note = Description of Unknown: uncultivated organism with predicted taxonomy: Bacteroides sp. CAG:770
  REGION 1..1220: note = MG16-43 effector

SEQ ID NO: 1132 - protein, 1232 aa, unidentified
  REGION 1..1232: note = Description of Unknown: uncultivated organism with predicted taxonomy: Bacteroides sp. CAG:770
  REGION 1..1232: note = MG16-44 effector
CGSYRSGLSDRAYISRVHLDLGVGSVGWSVISCDDEHRPLEILGMGSRIVPLTPEESNEFSSGNAASKNQSRTQKRTARKGYDRYQSRRKALTDKLRELDMLPDETLIKLPVLDLWTLRARAATPGDKLSLPEIGRVLYHLNQKRGYRHSKQDDSADKTQRDYVQAVNKRFQEIKDEGLTIGQHFAEKLKESEIITDKGAFYNYRIKEQVFPRAAYVEEFDRIIQCQREFYPEVLTEANVNEIRNEIIYYQRPLKSCKHLVSVCEFMQRELFDAEHNPIRNGKGEIIVAGPKCAPKSSPLAQVCKIWEEVNNIRITNKENDEYFISIDNKHEIFDFLNTHEKMKADDLFKILGIAKNSGWSADKAMSKGMVGNTTRVALMKALKGRRDIDDILRFDLREVESNQVNADTGEVLMEISAECESEPLYRLWHIIYSISDKNEQKSALEKQFGITDESMLESLCRIDFVKQGYSSRSFKFMRKILPSLMDGAKYSEACDVIGINHSDSITKAENQTRKLLTKLPQLQKNELRQPVVEKILNQMINVVNAVIDKYGSIDEIRVEMARELKLSKSGRESAAKNIRTREKANEEIAKRIEELGLVPSKNKILKYRLWEESGKRCFYCGQPVSATEFLNGLDVEIEHVVPKSLLFDNSFSNKVCACRKCNAEKGNATAFDFMKGRGENAFEDYLKRVETAFKENKISQTKRNRLLTPADKIPKDFISRQLVQTQYISRKAMEILNQVCRNVYGSSGDVTAYLRRIWGYDEILHYLDLPRYREGNLTGDVTYVHRGQTHTEERIRDWSKRLDHRHHAIDALTIACTRQSIIQRLNTLNAKTAIGEEQMSLDKWTLAQAHFSVADVADHVADILVSFKSGKKVTTPGKRYVYKAGRRNVAQKNILVPRGALSEESVYGRIKSIEEKVPVKKLFERVDDIVKPRIRHLIRERLEACGGDCSKAVSSLKKSPLYLDEENTIMLEYGSCFKPEYVIKYSLNSIKAKDAVSIVDNHIREVVTARLAAFGDDPKKSFAEPLYADEAGKIQIKTVRCYTGLSQVVPVKKDADGNDIGFVKPGNNHHIAIYKDADGKYQESIVTFRDAVERKKYGIPVVVRNPVEVLDTIIDKNVPEDLAGGLPSPEWTFVMSMQQNEMFVLGMGDDEFNDAMVGMDYKSLGEHLYRVQKLASLYYVFRSQYETKLDDSNNALAMRKFYRVRSFNALFSLNPRKVSISLLGEISLKDD

SEQ ID NO: 1133 - protein, 1186 aa, unidentified; identical to SEQ ID NO: 1124
  REGION 1..1186: note = Description of Unknown: uncultivated organism with predicted taxonomy: Bacteroides sp. CAG:770
  REGION 1..1186: note = MG16-45 effector

SEQ ID NO: 1134 - protein, 1221 aa, unidentified
  REGION 1..1221: note = Description of Unknown: uncultivated organism with predicted taxonomy: Bacteroides sp. CAG:770
  REGION 1..1221: note = MG16-46 effector
MKKVLGLDLGVGSVGWSLVNVDDNYKPTEILGIGSRIISLSPDESSEFTSGNAASKNQKRTQKRTARKGYDRYQMRRQALTEKLRELKMLPDERLIKLPVLELWTLRAKAATPGEKLTLPEIGRVLYHINQKRGYRHAKSDDSADKEQRDYVQTVNKRYQEIKDEGTTIGQHFAIKLKESEIVTDKGPFYNYRIKEQVFPRDAYIEEFDRIMDCQKTFYPEELSEDNIDEIRNKIIFYQRNLKSCKHLVSQCEFMTRSFLDAEHKPILNSSGELVMSGPKVAPKSSPIFQACKIWEEINNLSIRNKENDELHISPEQKKDIFEYLDNNEKINATALYKILGIGKGDGWSVDKALSKGFTGNTTKVAIAKALGKEHNTKKSDLLRFDLRLKENGVNKDTGEIIYEIDPTCENEPLYRLWHVIYSINDKDALRHALTNQFGINDGDSLRELTKIDFVKQGYGSRSAKFMRKLLPALMDGARYSEACDMIGINHSGSLTKSENEARELLHKIPQLQKNELRQPVVEKILNQMINVVNAVIDQFGSIDEIRVEMARELKLSKEGRAATAKNLRDREKMNNEMAEKIKELGITPSKNKILKYRLWQESGQKCFYCGQPVGAAEFLSGLDVEIEHIVPKALLFDDSFSNKVCACRKCNAEKSNTTAYDYMKSKGENEFNDYLRRVDAAFNEHKISFTKRSRLLTPADKLPKDFISRQLVQTQYISRKAMEILKQVCHNVYGSSGEVTSYLRRIWGYDEILHSLDLPRYREGGMTAEVSYDHRGQTHTEERIKDWSKRLDHRHHAIDALTIACTRQSIIQRLNNLSAMTAVAGESMSLDKWTLAQPHFSVQEVSDNVSRILVSFKAGKKVTTPGKRYVYRGGKRVLAQEGLLIPRGALCEESVYGRIHSLEKEVPVKKLFERVDDIVKPGIRTTVEERLRACDNDVKVACASLKKEPLYLDVEKTIPLEYGTCYKAEYVMRYALSALKPKDVEFIVDEHIRKVVSERLSEYGNDPKKAFAEPLYADKSKTIPIRAVRCYTGLAQVVPVKKDSKGNDIGFVKPGNNHHIAIYRDAEGTYHESIVTFWDSVERKKYGLPVIIRKPGEIWDILIDKNIPEELAAGLPAPDWQFVMSMQQNEMFVLGMEDDEFRDAMEVKDYKTLGAHLYRVQKLTSLYYVFRHQYETQLDDSKGAQIMKKFYRVRSFNAMFALHPRKVSVSLLGEMALKDD

SEQ ID NO: 1135 - protein, 1221 aa, unidentified
  REGION 1..1221: note = Description of Unknown: uncultivated organism with predicted taxonomy: Bacteroides sp. CAG:709
  REGION 1..1221: note = MG16-47 effector
MKKILGLDLGVGSIGWSLINADKDNKPIAILGLGSRIISLSPDESSEFTSGNAASKNQKRTQKRTTRKGYDRYQMRRQALTDKLSKLKMLPDEHLIKLPVLDLWTLRARAATPGEKLTLQEIGRVLYHINQKRGYRHSRSDDSADKEQREYVQAINKRFQEIREEGVTIGQHFVKKLKESEVVTDKGAFYNYRIKEQVFPRDAYVAEFDRVMDCQKVFYPEELSEANINEFRNEIIFYQRTLKSCKHLVSRCEFMTRSFLDEEHRPVLDASGKLVISGPKVAPKSSPIFQVCKIWEEINNLSIRNKENDELHISPEQKKEIFEYLDNNEKITSAALYKILGIGKSDGWSVDKALSKGFTGNTTKVAISKALGKANDAKKRDLLRFDLRLKENGVNKDTGEIICEIDPECENEPLYKLWHVIYSINDKDAQRHALTSQFGINDEASLAELSKIDFVKQGYGSRSVKFMRKLLPSLMDGAKYSEACDVIGVNHSGSLTKSENEARELLQRIPQLQKNELRQPVVEKILNQMINVVNAVIEKFGGVDEIRVEMARELKLSKEGRAATAKNIRDREKENKEIAEKIIELGVTPSKNKILKYRLWQEAGQKCFYCGQPVGATEFLNGLDVEIEHVVPKALLFDDSFSNKVCACRKCNAEKRNSTAYDYMKSKGENAFNDYLRRVDTAFSEHRISFTKRSRLLTPADKIPKDFISRQLVQTQYISRKAMEILKQVCHNVYGSSGEVTSYLRRIWGYDEILHSLDLPRYREGGMTAEVSYEHRGQTHTEERIKDWSKRLDHRHHAIDALTIACTRQSVIQRLNNLSSMTAVAGEAMSLDKWTLAQPHFSVQEVSDKVGGILVSFKAGKKVTTPGKRYTYRGGKRILAQDGLLIPRGALSEESVYGRISALEKNVPVKKLFERVEDIVKPGIRAVVEDRLMACDNDVNAACASLKKEPLYLDAEKTIPLEYGTCYKAEYVMKYALSALKPKDVEYIVDEHIRKVVSERLSEYGNDPKKAFAEPLYADDAETIPVRTVRCYTGLDQVVPVKRDVAGNDIGFVKPGNNHHIAIYRDADGKFHECVVTFWDAVERKKCGIPVIVRNPDEVWDVVIDKNVPEELAAGLPALGWSFVMSLQQNEMFILGMEDDEFRDAMAEADYKALGAHLYRVQKLTGSDYYFRSHYETLLDDSAGARIMKKFYRIQSFKALFALHPRKVAVSLLGEMSLKND

SEQ ID NO: 1136 - protein, 1220 aa, unidentified
  REGION 1..1220: note = Description of Unknown: uncultivated organism with predicted taxonomy: Bacteroides sp. CAG:770
  REGION 1..1220: note = MG16-48 effector
MKKILGLDLGVGSVGWSVISCDDEHRPLEILGMGSRIVPLTPEESNEFSSGNAASKNQSRTQKRTARKGYDRYQSRRKALTDKLRELDMLPDETLIKLPVLDLWTLRARAATPGDKLSLPEIGRVLYHLNQKRGYRHSKQDDSADKTQRDYVQAVNKCFQEIKDEGLTIGQHFAVKLKESEVITDKGAFYNYRIKEQVFPRAAYVEEFDRIIQCQREFYPDVFTEAIVNEIRNEIIYYQRPLKSCKHLVSVCEFMQRELFDAGHNPIRHRKGEIVVAGPKCAPKSSPLAQVCKIWEEVNNIRITNKENDEYFISIDNKHEIFDFLNTHEKMKADDLFKILGIAKNSGWSADRAMSKGMVGNTTRVALMKALKGRRDIDDILRFDLREVESNQVNADTGEVLMEISAECESEPLYRLWHIIYSISDKNEQKSALKNQFGISDDSMLESLCKIDFVKQGYSSRSFKFMRKILPSLMDGAKYSEACDVIGINHSDSITKAENQTRKLLTKLPQLQKNELRQPVVEKILNQMINVVNAVIDKYGAIDEIRVEMARELKLSKAGRESAAKNIRTREKANEEIAKRIEELGLVPSKNKILKYRLWEESGKRCFYCGQPVSATEFLNGLDVEIEHVVPKSLLFDDSFSNKVCACRKCNAEKGNATAFDFMKGRGENAFEDYLKRVETAFKENKISQTKRNRLLTPADKIPKDFISRQLVQTQYISRKAMEILNQVCRNVYGSSGDVTAYLRRIWGYDEILHSLDLPRYREGNLTGDVTYVHRGQTHTEERIRDWSKRLDHRHHAIDALTIASTRQSIIQRLNTLNAKTAIGEEQISLDKWTLAQAHFSVADVADHVADILVSFKSGKKVTTPGKRYVYRAGRRNVAQKNILVPRGALSEESVYGRIKSIEEKVPVKKLFERVDDIVKPRIRHLIRERLEACGGDCSKAVSSLKKSPLYLDEENTIMLEYGSCFKPEYVIKYSLNSIKAKDVASIVDKHVREVVTARLAAFGDEPKKAFAEPLYADVAGKIQIKTVRCYTGLSQVVPVKKDADGNDIGFVKPGNNHHIAIYKDADGKYQESIVTFCDAVERKKYGIPVVVRNPAAVLDTVIDKNVPEDLARGLPSPEWTFVMSMQQNEMFVLGMGDDEFNDAMAEMDYKSLGEHLYRVQKLTSSYYVFRSQYETKLDDSKNALRMKKYYRTQSFNALFSLNPRKVSISLLGEISLKDD

SEQ ID NO: 1137 - protein, 1191 aa, unidentified
  REGION 1..1191: note = Description of Unknown: uncultivated organism with predicted taxonomy: Bacteroides sp. CAG:770
  REGION 1..1191: note = MG16-50 effector
ILGMGSRIVPLTPEESNEFSSGNAASKNQSRTQKRTARKGYDRYQSRRKALTDKLRELDMLPDETLIKLPVLDLWTLRARAATPGDKLSLPEIGRVLYHLNQKRGYRHSKQDDSADKTQRDYVQAVNKCFQEIKDEGLTIGQHFAVKLKESEVITDKGAFYNYRIKEQVFPRAAYVEEFDRIIQCQREFYPDVFTEAIVNEIRNEIIYYQRPLKSCKHLVSVCEFMQRELFDAGHNPIRHRKGEIVVAGPKCAPKSSPLAQVCKIWEEVNNIRITNKENDEYFISIDNKHEIFDFLNTHEKMKADDLFKILGIAKNSGWSADRAMSKGMVGNTTRVALMKALKGRRDIDDILRFDLREVESNQVNADTGEVLMEISAECESEPLYRLWHIIYSISDKNEQKSALKNQFGISDDSMLESLCKIDFVKQGYSSRSFKFMRKILPSLMDGAKYSEACDVIGINHSDSITKAENQTRKLLTKLPQLQKNELRQPVVEKILNQMINVVNAVIDKYGAIDEIRVEMARELKLSKAGRESAAKNIRTREKANEEIAKRIEELGLVPSKNKILKYRLWEESGKRCFYCGQPVSATEFLNGLDVEIEHVVPKSLLFDDSFSNKVCACRKCNAEKGNATAFDFMKGRGENAFEDYLKRVETAFKENKISQTKRNRLLTPADKIPKDFISRQLVQTQYISRKAMEILNQVCRNVYGSSGDVTAYLRRIWGYDEILHSLDLPRYREGNLTGDVTYVHRGQTHTEERIRDWSKRLDHRHHAIDALTIASTRQSIIQRLNTLNAKTAIGEEQISLDKWTLAQAHFSVADVADHVADILVSFKSGKKVTTPGKRYVYRAGRRNVAQKNILVPRGALSEESVYGRIKSIEEKVPVKKLFERVDDIVKPRIRHLIRERLEACGGDCSKAVSSLKKSPLYLDEENTIMLEYGSCFKPEYVIKYSLNSIKAKDVASIVDKHVREVVTARLAAFGDEPKKAFAEPLYADVAGKIQIKTVRCYTGLSQVVPVKKDADGNDIGFVKPGNNHHIAIYKDADGKYQESIVTFCDAVERKKYGIPVVVRNPAAVLDTVIDKNVPEDLARGLPSPEWTFVMSMQQNEMFVLGMGDDEFNDAMAEMDYKSLGEHLYRVQKLTSSYYVFRSQYETKLDDSKNALRMKKYYRTQSFNALFSLNPRKVSISLLGEISLKDD

SEQ ID NO: 1138 - protein, 1220 aa, unidentified; identical to SEQ ID NO: 1136
  REGION 1..1220: note = Description of Unknown: uncultivated organism with predicted taxonomy: Bacteroides sp. CAG:770
  REGION 1..1220: note = MG16-51 effector

SEQ ID NO: 1139 - protein, 1217 aa, unidentified
  REGION 1..1217: note = Description of Unknown: uncultivated organism with predicted taxonomy: Bacteroides sp. CAG:770
  REGION 1..1217: note = MG16-52 effector
MKKILGLDLGVGSVGWSVVSCDDEHKPVEILGMGSRIVPLTPDESNEFSSGNAASKNQSRTQKRTARKGYDRYQLRRQALTVKLRELGMLPDETLIKLPVLDLWTLRARAATPGDKLSLPEIGRVLYHLNQKRGYRHSKQDDSADKTQRDYVQAVNKRFQEIKDEGLTIGQHFAVKLKESELITDKGAFYNYRIKEQVFPRAAYVEEFDRIIQCQREFYPEVFTEAIVNEIRNEIIYYQRPLKSCKHLVSVCEFMQRELFDAGHNPIRNRKGEIVVAGPKCAPKSSPLAQVCKIWEEINNIRVTNKENDEYFISIDNKHEIFDFLNTHEKMKADDLFKILGIAKNSGWSADRAMSKGMVGNTTRVALMKALKGRRDIDDILRFDLREVESNQVNADTGEVLMEIGAECESEPLYRLWHIIYSISDKNEQKAALEKQFGITDKSMLESLCRIDFVKQGYSSRSFKFMRKILPSLMDGAKYSEACDVIGINHSDSITKAENQTRKLLTKLPQLQKNELRQPVVEKILNQMINVVNAVIDKYGAIDEIRVEMARELKLSKAGRESAAKNVRTREKANEEIAKRIEELGLVPSKNKILKYRLWEESGKRCFYCGQPVSATEFLNGLDVEIEHVVPKSLLFDDSFSNKVCACRKCNAEKGNATAFDFMKGRGENAFEDYLKRVETAFKENKISQTKRNRLLTPADKIPKDFIARQLVQTQYISRKAMEILNQVCRNVYGSSGDVTAYLRRIWGYDEILHSLDLPRYREGNLTGDVTYVHRGQTHTEERIRDWSKRLDHRHHAIDALTIACTRQSIIQRLNTLNAKTAIGEEQMSLDKWTLAQAHFSVADVADHVADILVSFKSGKKVTTPGKRYVYKAGRRIVAQENILVPRGALSEESVYGRIKSIEEKVPVKKLFERVDDIVKPRIRRLIRDRLKACGGDCSKAVSSLKKSPLYLDEENTIMLEYGSCFKPEYVIKYSLNSIKAKDAVSIVDNHVREVVTERLAAFGDDPKKAFAEPLYADAAGKIQIRTVRCYTNSTVVPVKKDADGNDIGFVKPGNNHHIAIYKDADGTYYWKLVTLWNAVDRKRYGLPIIVRNPYEISDIIIDSNIPDALASGLPEPNWSFVMSLQQNEMFVLGMSEEEFRCAIENKDYKTLGMHLYRVQKLSHLRFRSQYETRLDDSSEAKNMKKFYEIRSLKSFWSLNPRKVSISLLGEISLKDD

SEQ ID NO: 1140 - protein, 1221 aa, unidentified
  REGION 1..1221: note = Description of Unknown: uncultivated organism with predicted taxonomy: Bacteroides sp. CAG:709
  REGION 1..1221: note = MG16-53 effector
MKKILGLDLGVGSIGWSLINADKDNKPIAILGLGSRIISLSPDESSEFTSGNAASKNQKRTQKRTARKGYDRYQMRRQALTDKLRKLKMLPDEHLIKLPVLDLWTLRARAATPGEKLTLPEIGRVLYHINQKRGYRHSRSDDSADKEQREYVQAINKRFQEIREEGVTIGQHFVKKLKESEVVTDKGAFYNYRIKEQVFPRDAYVAEFDRVMDCQKVFYPEELSEANINEFRNEIIFYQRNLKSCKHLVSRCEFMTRSFLDEGHRPVLDASGKLVISGPKVAPKSSPIFQVCKIWEEINNLSIRNKENDELHISPEQKKEIFEYLDNNEKITSAALYKILGIGKGDGWSVDKALSKGFTGNTTKVAISKALGKANDAKKRDLLRFDLRLKENGVNKDTGEIICEIDPECENEPLYKLWHVIYSINDKDAQRHALTSQFGINDEASLAELSKIDFVKQGYGSRSVKFMRKLLPSLMDGAKYSEACDVIGVNHSGSLTKSENEARELLQRIPQLQKNELRQPVVEKILNQMINVVNAVIEKFGGVDEIRVEMARELKLSKEGRAATAKNIRDREKENKEIAEKIIELGVTPSKNKILKYRLWQEAGQKCFYCGQPVGATEFLNGLDVEIEHVVPKALLFDDSFSNKVCACRKCNAEKRNSTAYDYMKSKGENAFNDYLRRVDTAFSEHKISFTKRSRLLTPADKIPKDFISRQLVQTQYISRKAMEILKQVCHNVYGSSGEVTSYLRRIWGYDEILHSLDLPRYREGGMTAEVSYEHRGQTHTEERIKDWSKRLDHRHHAIDALTIACTRQSVIQRLNNLSSMTAVAGEAMSLDKWTLAQPHFSVQEVSDKVGGILVSFKAGKKVTTPGKRYVYRGGKRILAQEGLLIPRGALCEESVYGRISALEKNVPVKKLFERVEDIVKPGIRAVVEDRLMACDNDVNAACASLKKEPLYLDAEKTIPLEYGTCYKAKYVMKYALSALKPKDVEYIVDEHIRKVVSERLSEYGNDPKKAFAEPLYADDAKTIPVRTVRCYTGLDQVVPVKKDVAGNDIGFVKPGNNHHIAIYRDADGKFHECVVTFWDAVERKKYGMPVIVRNPDEVWDDVIDKNVPEELAAGLPALGWSFVMSLQQNEMFILGMEDDEFRDAMAEADYKALGAHLYRVQKLAGSDYYFRSHYETLLDDSAGARIMKKFYRIQSFKALFALHPRKVAVSLLGEMSLKND

SEQ ID NO: 1141 - protein, 1221 aa, unidentified
  REGION 1..1221: note = Description of Unknown: uncultivated organism with predicted taxonomy: Bacteroides sp. CAG:709
  REGION 1..1221: note = MG16-54 effector
MKKILGLDLGVGSIGWSLINADKDNKPIAILGLGSRIISLSPDESSEFTSGNAASKNQKRTQKRTARKGYDRYQMRRSALTDKLRKLKMLPDEHLIKLPVLDLWTLRARAATPGEKLTLPEIGRVLYHINQKRGYRHSRSDDSADKEQREYVQAINKRFQEIREEGVTIGQHFVKKLKESEVVTDKGAFYNYRIKEQVFPRDAYVAEFDRIMDCQKVFYPEELSEANINEFRNEIIFYQRNLKSCKHLVSRCEFMTRSFLDEEHRPVLDASGKLVISGPKVAPKSSPIFQVCKIWEEINNLSIRNKENDELHISPEQKKEIFEYLDNNEKITSAALYKILGISKGDGWSVDKALSKGFTGNTTKVAISKALGKANDAKKRDLLRFDLRLKENGVNKDTGEIICEIDPECENEPLYKLWHVIYSINDKDAQRHALTSQFGINDEASLAELSKIDFVKQGYGSRSVKFMRKLLPSLMDGAKYSEACDVIGVNHSGSLTKSENEARELLQRIPQLQKNELRQPVVEKILNQMINVVNAVIEKFGGVDEIRVEMARELKLSKEGRAATAKNIRDREKENKEIAEKIIELGVTPSKNKILKYRLWQEAGQKCFYCGQPVGATEFLNGLDVEIEHVVPKALLFDDSFSNKVCACRKCNAEKRNSTAYDYMKSKGENAFNDYLRRVDTAFSEHKISFTKRSRLLTPADKIPKDFISRQLVQTQYISRKAMEILKQVCHNVYGSSGEVTSYLRRIWGYDEILHSLDLPRYREGGMTAEVSYEHRGQTHTEERIKDWSKRLDHRHHAIDALTIACTRQSVIQRLNNLSSMTAVAGEAMSLDKWTLAQPHFSVQEVSDKVGGILVSFKAGKKVTTPGKRYTYRGGKRILAQDGLLIPRGALSEESVYGRISALEKNVLVKKLFERVEDIVKPGIRAVVEDRLMACDNDVNAACASLKKEPLYLDAEKTIPLEYGTCYKRKYVIKYPISSLKAKDVESIIDGHIRQIVSERLSEYGNDPKKAFAEPLYADDAKTIPVRTVRCYTGLDQVVPVKKDVAGNDIGFVKPGNNHHIAIYRDADGKFHECVETFWDAVERKKYGIPVIVRNPDEVWDVVIDKNVPEELAAGLPALGWSFVMSLQQNEMFILGMEDDEFRDAMAEADYKALGAHLYRVQKLAGSDYYFRSHYETLLDDSAGARIMKKFYRISSSKALFALHPRKVAVSLLGEMSLKND

SEQ ID NO: 1142 - protein, 1220 aa, unidentified
  REGION 1..1220: note = Description of Unknown: uncultivated organism with predicted taxonomy: Bacteroides sp. CAG:770
  REGION 1..1220: note = MG16-55 effector
MKKILGLDLGVGSVGWSVISCDDEHRPLEILGMGSRIVPLTPDESNEFSSGNAASKNQSRTQKRTARKGYDRYQSRRKALTDKLRDLDMLPDETLIKLPVLDLWTLRARAATPGDKLSLPEIGRVLYHLNQKRGYRHSKQDDSADKTQRDYVQAVNKRFQDIKDEGLTIGQHFAEKLKESEIITDKGAFYNYRIKEQVFPRAAYVEEFDRIIQCQRGFYPEVLTEANVNEIRNEIIYYQRPLKSCKHLVSVCEFMQRELFDADHNPIRNGKGEIVVAGPKCAPKSSPLAQVCKIWEEINNIRVTNKENDEYFISIDNKHEIFDFLNTHEKMKADDLFKILGLAKNSGWSADRAMSKGMVGNTTRVALMKALKGRRDIEEVLRFDLRAVESNQVNADTGEVLMEISAECEREPLYRLWHIIYSISDKNEQKSALKNQFGISDESMLESLYKIDFVKQGYSSRSFKFMRKILPSLMDGAKYSEACDAVGINHSDSITKAENQARELLVKLPQLQKNELRQPVVEKILNQMINVVNAVIDKYGAIDEIRVEMARELKLSKEGRESAAKNISDRKKANEEIARRIEELGLVPSKNKILKYRLWEESGKRCFYCGQPVSATEFLNGLDVEIEHVIPKSLLFDDSFSNKVCACRKCNAEKGNATAFDFMKGRGENAFEDYLKRVETAFKENRISQTKRSRLLTPADKIPKDFISRQLVQTQYISRKAMDILNQVCRNVYGSSGDVTAYLRRIWGYDEILHSLDLPRYREGNLTGDVTYVHRGQTHTEERIKDWSKRLDHRHHAIDALTIASTRQSIIQRLNTLNAKAAIGEEQMSLDKWTLAQAHFSVADVADHVADILVSFKSGKKVATPGKRYVYRAGSRNVAQENILVPRGALSEESVYGRIKSIEEKVPVKKLFERVDDIVKPRISHLICERLEACGGDCSKAVSSLKKSPLYLDEENTIMLEYGSCFKPEYVIKYSLNSIKAKDAVSIVDNHVREVVTARLAAFGDDPKKAFAEPLYADEAGKIQIKTVRCYTGLSQVVPVKKDADGNDIGFVKPGNNHHIAIYKDADGKYQESIVTFRDAVERKKYGIPVVVRNPVEVLDTIIDKNVPEELARGLPSPEWTFVMSMQQNEMFVLGMGDDEFNDAMAGRDYKSLGEHLYRVQKLATSDYFFRSQYETKLDDTKNALSMKKYYRTRSFKALFALNPHKVSISLLGEISLKDD

SEQ ID NO: 1143 - protein, 1219 aa, unidentified
  REGION 1..1219: note = Description of Unknown: uncultivated organism with predicted taxonomy: Bacteroides sp. CAG:545
  REGION 1..1219: note = MG16-56 effector
MKKVLGLDLGVGSVGWSLVNVDDNYKPTEILGIGSRIISLSPDESSEFTSGNAASKNQKRTQKRTARKGYDRYQMRRQALTEKLRELKMLPDERLIKLPVLELWTLRAKAATPGEKLTLPEIGRVLYHINQKRGYRHAKSDDSADKEQRDYVQTVNKRYQEIKDEGTTIGQHFAIKLKESEIVTDKGPFYNYRIKEQVFPRDAYIEEFDRIMDCQKTFYPEELSEDNIDEIRNKIIFYQRDLKSCKHLVSQCEFMTRSFLDADHKPILNSSGELVMSGPKVAPKSSPIFQACKIWEEINNLSIRNKENDELHISPEQKKDIFEYLDNNEKINATALYKILGIGKGDGWSVDKALSKGFTGNTTKVAMGKALGKEHNTKKSDLLRFDLRLKENGVNKDTGEIIYEIDPACENEPLYRLWHVIYSINDKDALRHALTNQFGINDGESLRKLTKIDFVKQGYGSRSAKFMRKLLPALMDGARYSEACDMIGINHSDSLTKSENEARELLHKIPQLQKNELRQPVVEKILNQMINVVNAVIEQFGSIDEIRVEMARKLKLSKEGRAATAKNIRDREKMNNEMAEKIKELGITPSKNKILKYRLWQESGQKCFYCGQPVGAAEFLSGLDVEIEHIVPKALLFDDSFSNKVCACRKCNAEKSNTTAYDYMKSKGENEFNDYLRRVDAAFNEHKISFTKRSRLLTPADKLPKDFISRQLVQTQYISRKAMEILKQVCHNVYGSSGEVTSYLRRIWGYDEILHSLDLPRYREGGMTAEVSYDHRGQTHTEERIKDWSKRLDHRHHAIDALTIACTRQSIIQRLNNLSAMTAVAGESMSLDKWTLAQPHFSVQEVSDNVSRILVSFKAGKKVTTPGKRYVYRGGKRVLAQEGLLIPRGALCEESVYGRIHSLEKEVPVKKLFERVDDIVKPGIRTAVEERLRACDNDVKVACASLKKEPLYLDAEKTIPFEYGTCYKAEYVMRYALSALKPKDVEFIVDEHIRKVVSERLSEYGNDPKKAFAEPLYADKSKTIPIRALRCYTGLAQVVPVKKDSKGNDIGFVKPGNNHHIAIYIDSDGMYHKSTLTFWKAVERKKYGLPVIIRKPWEIWDIIIDKNIPEELAAGLPAPDWKFVMSMQQNEMFILGMEDDEFRDAMEVKDYKTLGAHLYRVQKLEHLNFRIQYDTILDDSKAAKDMKKFYEIRSFKAFWALHPRKVSVSLLGEMALKDD

SEQ ID NO: 1144 - protein, 1220 aa, unidentified; identical to SEQ ID NO: 1108
  REGION 1..1220: note = Description of Unknown: uncultivated organism with predicted taxonomy: Bacteroides sp. CAG:770
  REGION 1..1220: note = MG16-57 effector

SEQ ID NO: 1145 - protein, 1223 aa, unidentified
  REGION 1..1223: note = Description of Unknown: uncultivated organism with predicted taxonomy: Bacteroides sp. CAG:770
  REGION 1..1223: note = MG16-58 effector
MKKILGLDLGVGSVGWSVISCDDEHRPREILGMGSRIVPLTPDESNEFSSGNAASKNQSRTQKRTARKGYDRYQSRRKALTDKLRELDMLPDEALIKLPVLDLWTLRARAATPGDKLSLPEIGRVLYHLNQKRGYRHSKQDDSADKTQRDYVQAVNKRFQEIKDEGLTIGQHFAEKLKDSEIITDKGAFYNYRIKEQVFPRAAYVEEFDRIIQCQREFYPEVLTEANVNEIRNEIIYYQRPLKSCKHLVSVCDFMQRELFDADHNPIRNGKGKIVVAGPKCAPKSSPLAQVCKIWEEVNNIRITNKENDEYFISIDNKHEIFDFLNTHEKMKADDLFKILGLAKNSGWSADRAMSKGMVGNTTRVALMKALKGRRDIDEILRFDLREVGSNQVNADTGEVLMEISAECEREPLYRLWHIIYSISDKNEQKSALKNQFGISDDSMLESLCKIDFVKQGYSSRSFKFMRKILPSLMDGAKYSEACDVIGINHSDSITKAENQARELLTRLPQLQKNELRQPVVEKILNQMINVVNAVIDKYGAIDEIRVEMARELKLSKAGRESAAKNIRTREKANEEIAKRIEELDLVPSKNKILKYRLWEESGKRCFYCGQPVSATEFLNGLDVEIEHIVPKSLLFDDSFSNKVCACRKCNAEKGNATAFDFMKGRGENAFEDYLKRVETAFKENKISQTKRNRLLTPADKIPKDFIARQLVQTQYISRKAMEILNQVCRNVYGSSGDVTAYLRRIWGYDEILHSLDLPRYREGNLTGDVTYVHRGQTHTEERIRDWSKRLDHRHHAIDALTIACTRQSIIQRLNTLNAKTAIGEEQMSLDKWTLAQAHFSVADVADHVAGILVSFKSGKRVTTPGKRYVYKTGRRIVAQENILVPRGALSEESVYGRIKSIEEKVPVKKLFERVDDIVKPRIRYLIRERLETFGGDCSKAVSSLKKSPLYLDEENTIMLEYGSCFKYSYVKKSKLIQLDKKDDFINVSLIVDKHIREVVTARLAAFGGDTKKAFAEPLYADEAGKIQIRTVRCYTNSTVVTVKKDADGNDIGFVKPGNNHHIAIYKDADGKYQESIVTFCDAVERKKYGIPVVVRKPAAVLDTVIDKNVPEDLARGLPSPEWTFVMSMQQNEMFVLGMGDDEFNDALAGRDYKSLGEHLYRVQKLASLYYVFRSQYETKLDDSNNALAMRKFYRVRSFNALFSLNPRKVSISLLGEISLKDD

SEQ ID NO: 1146 - protein, 1221 aa, unidentified
  REGION 1..1221: note = Description of Unknown: uncultivated organism with predicted taxonomy: Bacteroides sp. CAG:770
  REGION 1..1221: note = MG16-59 effector
MKKVLGLDLGVGSVGWSLVNVDDNYKPTEILGIGSRIISLSPDESSEFTSGNAASKNQKRTQKRTARKGYDRYQMRRQALTEKLRELKMLPDERLIKLPVLELWTLRAKAATPGEKLTLPEIGRVLYHINQKRGYRHAKSDDSADKEQRDYVQTVNKRYQEIKDEGTTIGQHFAIKLKESEIVTDKGPFYNYRIKEQVFPRDAYIEEFDRIMDCQKTFYPEELSEDNIDEIRNKIIFYQRDLKSCKHLVSQCEFMTRSFLDAEHKPILNSSGELVMSGPKVAPKSSPIFQACKIWEEINNLSIRNKENDELHISLEQKKDIFEYLDNNEKINATALYKILGIGKGDGWSVDKALSKGFTGNTTKVAIAKALGKEHNTKKSDLLRFDLRLKENGVNKDTGEIIYEIDPTCENEPLYRLWHVIYSINDKDALRHALTNQFGINDGESLRELTKIDFVKQGYGSRSAKFMRKLLPALMDGARYSEACDMIGINHSGSLTKSENEARELLHKIPQLQKNELRQPVVEKILNQMINVVNAVIEQFGSIDEIRVEMARELKLSKEGRAATAKNIRDREKMNNEMAEKIKELGITPSKNKILKYRLWQESGQKCFYCGQPVGAAEFLSGLDVEIEHIVPKALLFDDSFSNKVCACRKCNAEKSNNTAYDYMKSKGENEFNDYLRRVDAAFNEHKISFTKRSRLLTPADKLPKDFISRQLVQTQYISRKAMEILKQVCHNVYGSSGEVTSYLRRIWGYDEILHSLDLPRYREGGMTAEVSYDHRGQTHTEERIKDWSKRLEHRHHAIDALTIACTRQSIIQRLNNLSAMTAVAGESMSLDKWTLAQPHFSVQEVSDNVSRILVSFKAGKKVTTPGKRYVYRGGKRVLAQESLLIPRGALCEESVYGRIHSLEKEVPVKKLFERVDDIVRPGIRAAVEERLRACDNDVKVACASLKKEPLYLDAEKTIPLEYGTCYKAEYVMRYALSALKPKDVEFIVDEHIRKVVSERLSEYGNDPKKAFAEPLYADKSKTIPIRAVMCYTGLAQVVPVKKDSKGNDIGFVKPGNNHHIAIYRDAEGTYHESIVTFWDSVERKKYGLPVIIRKPGEIWDILIDKNIPEELAAGLPAPDWQFVMSMQQNEMFVLGMEDDEFRDAMEGKDYKTLGAHLYRVQKLASIYYVFRHQYETQLDDSKGAQIMKKFYRAQSFKALFALHQRKVSVSLLGEMALKDD

SEQ ID NO: 1147 - protein, 1221 aa, unidentified
  REGION 1..1221: note = Description of Unknown: uncultivated organism with predicted taxonomy: Bacteroides sp. CAG:770
  REGION 1..1221: note = MG16-60 effector
MKKVLGLDLGVGSVGWSLVNVDDNYKPTEILGIGSRIISLSPDESSEFTSGNAASKNQKRTQKRTARKGYDRYQMRRQALTEKLRELKMLPDERLIKLPVLELWTLRAKAATPGEKLTLPEIGRVLYHINQKRGYRHAKSDDSADKEQRDYVQTVNKRYQEIKDEGTTIGQHFAIKLKESEIVTDKGPFYNYRIKEQVFPRDAYIEEFDRIMDCQKTFYPEELSEDNIDEIRNKIIFYQRDLKSCKHLVSQCEFMTRSFLDADHKPILNSSGELVMSGPKVAPKSSPIFQACKIWEEINNLSIRNKENDELHISPEQKKDIFEYLDNNEKINATALYKILGIGKGDGWSVDKALSKGFTGNTTKGAIAKALGKDHNTKKSDLLRFDLRLKENGVNKDTGEIIYEIDPTCENEPLYRLWHVIYSINDKDALRHALTNQFGINDEESLRELTKIDFVKQGYGSRSAKFMRKLLPALMDGARYSEACDMIGSNHSGSLTKSENEARELLHKIPQLQKNELRQPVVEKILNQMINVVNAVIDQFGSIDEIRVEMARELKLSKEGRAATAKNIRDREKMNNEMAEKIKELGITPSKNKILKYRLWQESGQKCFYCGQPVGAAEFLSGLDVEIEHIVPKALLFDDSFSNKVCACRKCNAEKSNTTAYDYMKSKGENEFNDYLRRVDAAFNEHKISFTKRSRLLTPADKLPKDFISRQLVQTQYISRKAMEILKQVCHNVYGSSGEVTSYLRRIWGYDEILHSLDLPRYREGGMTAEVSYDHRGQTHTEERIKDWSKRLDHRHHAIDALTIACTRQSIIQRLNNLSAMTAVAGESMSLDKWTLAQPHFSVQEVSDNVSRILVSFKAGKKVTTPGKRYVYRGGKRVLAQKGLLIPRGALCEESVYGRIHSLEKEVPVKKLFERVDDIVKPGIRAAVEERLRACDNDVKVACASLKKEPLYLDVEKTIPLEYGTCYKVEYVMRYALSALKPKDVEYFVDEHIRKVVSERLSEYGNDPKKAFAEPLYADKSKTIPIRAVRCYTGLAQVVPVKKDSKGNAIGFVKPGNNHHIAIYRDADGTYHESVVTFWDTVERKKYGLPVIIRKPEEIWDIIIDKNISEELAAGLPAPDWKFVMSMQQNEMYVLGMEDDEFRDAMEVKDYKTLGAHLYRVQKLTSIDYYFRSQYETTLDDSAGARMMKKFYRIKSIKSLFALHPRKVSVSLLGEMALKDD

SEQ ID NO: 1148 - protein, 1221 aa, unidentified
  REGION 1..1221: note = Description of Unknown: uncultivated organism with predicted taxonomy: Bacteroides sp. CAG:709
  REGION 1..1221: note = MG16-61 effector
MKKILGLDLGVGSIGWSLINADKDNKPIAILGLGSRIISLSPDESSEFTSGNAASKNQKRTQKRTTRKGYDRYQMRRQALTDKLSKLKMLPDEHLIKLPVLDLWTLRARAATPGEKLTLQEIGRVLYHINQKRGYRHSRSDDSADKEQREYVQAINKRFQEIREEGVTIGQHFVKKLKESEVVTDKGAFYNYRIKEQVFPRDAYVAEFDRVMDCQKVFYPEELSEANINEFRNEIIFYQRDLKSCKHLVSRCEFMTRSFLDEGHRPVLDASGKLVISGPKVAPKSSPIFQVCKIWEEINNLSIRNKENDELHISPEQKKEIFEYLDNNEKITSAALYKILGIGKGDGWSVDKALSKGFTGNTTKVAISKALGKANDAKKRDLLRFDLRLKENGVNKDTGEIICEIDPECENEPLYKLWHVIYSINDKDAQRHALTSQFGINDEASLAELSKIDFVKQGYGSRSVKFMRKLLPSLMDGAKYSEACDVIGVNHSASLTKSENEARELLQRIPQLQKNELRQPVVEKILNQMINVVNAVIEKFGGVDEIRVEMARELKLSKEGRAATAKNIRDREKENKEIAEKIIELGVTPSKNKILKYRLWQEAGQKCFYCGQPVGATEFLNGLEVEIEHVVPKALLFDDSFSNKVCACRKCNAEKRNSTAYDYMKSKGENAFNDYLRRVDTAFSEHKISFTKRSRLLTPADKIPKDFISRQLVQTQYISRKAMEILKQVCHNVYGSSGEVTSYLRRIWGYDEILHSLDLPRYREGGMTAEVSYEHRGQTHTEERIKDWSKRLDHRHHAIDALTIACTRQSVIQRLNNLSSMTAVAGEAMSLDKWTLAQPHFSVQEVSDKVGGILVSFKAGKKVTTPGKRYTYRGGKRILAQDGLLIPRGALSEESVYGRISALEKNVPVKKLFERVEDIVKPGIRAVVEDRLMACDNDVNAACASLKEEPLYLDAEKTIPLEYGTCYKAKYVMKYALSALKPKDVEYIVDEHIRKVVSERLSEYGNDPKKAFAEPLYADDAKTIAVRTVRCYTGLDQVVPVKRDVAGNDIGFVKPGNNHHIAIYRDADGKFHECVVTFWDAVERKKCGIPVIVRNPDEVWDVVIDKNVPEELAAGLPALGWSFVMSLQQNEMFIFGMEDDEFMDAMAEADYKALGAHLYRVQKLAGSDYYFRSHYETLLDDSAGARIMKKFYRISSSKALFALHPRKVAVSLLGEMSLKND

SEQ ID NO: 1149 - protein, 1221 aa, unidentified
  REGION 1..1221: note = Description of Unknown: uncultivated organism with predicted taxonomy: Bacteroides sp. CAG:770
  REGION 1..1221: note = MG16-62 effector
MKKVLGLDLGVGSVGWSLVNVDDNYKPTEILGIGSRIISLSPDESSEFTSGNAASKNQKRTQKRTARKGYDRYQMRRQALTEKLRELKMLPDERLIKLPVLELWTLRAKAATPGEKLTLPEIGRVLYHINQKRGYRHAKSDDSADKEQRDYVQTVNKRYQEIKDEGTTIGQHFAIKLKESEIVTDKGPFYNYRIKEQVFPRDAYIEEFDRIMDCQKTFYPEELSEDNIDEIRNKIIFYQRNLKSCKHLVSQCEFMTRSFLDADHKPILNSSGELVMSGPKVAPKSSPIFQACKIWEEINNLSIRNKENDELHISPEQKKDIFEYLDNNEKINATALYKILGIGKGDGWSVDKALSKGFTGNTTKVAIAKALGKEHNTKKSDLLRFDLRLKENGVNKDTGEIIYEIDPTCENEPLYRLWHVIYSINDKDALRHALTNQFGINDGDSLRELTKIDFVKQGYGSRSAKFMRKLLPALMDGARYSEACDMIGINHSGSLTKSENEARELLHKIPQLQKNELRQPVVEKILNQMINVVNAVIDQFGSIDEIRVEMARELKLSKEGRAATAKNIRDREKMNNEMAEKIKELGITPSKNKILKYRLWQESGQKCFYCGQPVGAAEFLSGLDVEIEHIVPKALLFDDSFSNKVCACRKCNAEKSNTTAYDYMKSKGENEFNDYLRRVDAAFNEHKISFTKRSRLLTPADKLPKDFISRQLVQTQYISRKAMEILKQVCHNVYGSSGEVTSYLRRIWGYDEILHSLDLPRYREGGMTAEVSYDHRGQTHTEERIKDWSKRLDHRHHAIDALTIACTRQSIIQRLNNLSAMTAVAGESMSLDKWTLAQPHFSVQEVSDNVSRILVSFKAGKKVTTPGKRYVYRGGKRVLAQEGLLIPRGALCEESVYGRIHSLEKEVPVKKLFERVDDIVKPGIRAAVEERLRACDNDVKVACASLKKEPLYLDAEKTIPLEYGTCYKAEYVMRYALSALKPKDVEFIVDEHIRKVVSERLSEYGNDPKKAFAEPLYADKSKTIPIRAVRCYTGLAQVVPVKKDSKGNDIGFVKLGNNHHIAIYRDAEGTYHENVVTFWDTVERKKYGLPVIIRKPGEIWDILIDKNIPEELAAGLPAPDWKFVMSMQQNEMFVLGMEDDEFRDAMAVKDYKTLGAHLYRVQKLASIYYVFRHQYETQLDDSKGALVMKKFYRTASFKALFALHPRKVSVSLLGEMALKDD

SEQ ID NO: 1150 - protein, 1221 aa, unidentified
  REGION 1..1221: note = Description of Unknown: uncultivated organism with predicted taxonomy: Bacteroides sp. CAG:770
  REGION 1..1221: note = MG16-63 effector
MKKVLGLDLGVGSVGWSLVNVDDNYKPTEILGIGSRIISLSPDESSEFTSGNAASKNQKRRQKRTARKGYDRYQMRRQALTEKLRELKMLPDERLIKLPVLELWTLRAKAATPGEKLTLPEIGRVLYHINQKRGYRHAKSDDSADKEQRDYVQTVNKRYQEIKDEGTTIGQHFAIKLKESEIVTDKGPFYNYRIKEQVFPRDAYIEEFDRIMDCQKTFYPEELSEDNIDEIRNKIIFYQRDLKSCKHLVSQCEFMTRSFLDADHKPILNSSGELVMSGPKVAPKSSPIFQACKIWEEINNLSIRNKENDELHISPEQKKDIFEYLDNNEKINATALYKILGIGKGDGWSVDKALSKGFTGNTTKVAIAKALGKEHNTKKSDLLRFDLRLKENGVNKDTGEIIYEIDPTCENEPLYRLWHVIYSINDKGALRHALTNQFGINDGESLRELTKIDFVKQGYGSRSAKFMRKLLPALMDGARYSEACDMIGINHSGSLTKSENEARELLHKIPQLQKNELRQPVVEKILNQMINVVNAVIDQFGSIDEIRVEMARELKLSKEGRAATAKNIRDREKMNNEMAEKIKELGITPSKNKILKYRLWQESGQKCFYCGQPVGAAEFLSGLDVEIEHIVPKALLFDDSFSNKVCACRKCNAEKSNTTAYDYMKSKGENEFNDYLRRVDAAFNEHKISFTKRSRLLTPADKLPKDFISRQLVQTQYISRKAMEILKQVCHNVYGSSGEVTSYLRRIWGYDEILHSLDLPRYREGGMTAEVSYDHRGQTHTEERIKDWSKRLDHRHHAIDALTIACTRQSIIQRLNNLSAMTAVAGESMSLDKWTLAQPHFSVQEVSDNVSRILVSFKAGKKVTTPGKRYVYRGGKRVLAQEGLLIPRGALCEESVYGRIHSLEKEVPVKKLFERVDDIVKPGIRTAVEERLRACDNDVKVACASLKKEPLYLDVEKTIPLEYGTCYKAKYVMRYVLSALKPKDVEFIVDEHIRKVVSERLSEYGNDPKKAFAEPLYSDKSKTIPIRAVRCYTGLAQVVPVKKDSKGNAIGFVKPGNNHHIAIYRDADGAYHENVVTFWDTVERKKYGLPVIIRKPGEIWDILIDKNIPEELAAGLPAPDWQFVMSMQQNEMFVLGMEDDEFRDAMEVKDYKTLGAHLYRVQSLSRSDYYYRCQYETQLDNSNGAMLMKKYYRVRSFNALFTLHPRKVSVSLLGEMALKDD

SEQ ID NO: 1151 - protein, 1219 aa, unidentified
  REGION 1..1219: note = Description of Unknown: uncultivated organism with predicted taxonomy: Alistipes sp. CAG:514
  REGION 1..1219: note = MG16-64 effector
MKKVLGLDLGVGSVGWSLVNVDDNYKPAEILGLGSRIISLSPDESSEFTSGNAASKNQKRTQKRTARKGYDRYQMRRQALTEKLRELKMLPDERLIKLPVLDLWTLRARAATPGEKLTLPEIGRVLYHINQKRGYRHSKSDDSADKEQRDYVQTVNKRFQEIKDEGTTIGQHFAIILKESEVFTEKGPFYNYRIKEQVFPRDAYIEEFDRIMACQKAFYPEELSDININEIRNEIIFYQRNLRSCKHLVSRCEFMTRRFFDAEHKPILNNSGEIVISGPKVAPKSSPIFQACKIWEEINNLSLRNKENDELHISREQKKEIFEYLDNNEKITATALYKILGIGKGDGWSMDKALSKGVTGNTTKTAIARALGKMNNPAKESLLRFDLRLKENGVNKDSGEVIYEIDPKCENEPLYRLWHIIYSINDKEALRQALTNQFGINDEESLKELSNIDFVKQGYGSRSAKFMRKLLPALIGGAKYSEACDMIGINHSGSLTKSENEARELLHKIPQLQKNELRQPVVEKILNQMINVVNAVIDQFGDIDEIRVEMARELKLSKEGRAATAKNIRDREKQNNEIAEKIKELGITPSKNKILKYRLWQESGQKCFYCGQPVGAAEFLNGLDVEIEHIVPKALLFDDSFSNKVCACRRCNAEKSNLTAYDYMKSKGENEFNDYLRRVDAAFNDHKISFTKRSRLLTPADKLPKDFILRQLVQTQYISRKAMEILKQVCHNVYGSSGEVTSYLRRIWGYDEILHSLDLPRYREGGMTTEVSYEHRGQTHTEERIKDWSKRLDHRHHAIDALTIACTRQSIIQRLNNLSSMTATAGESMSLDKWTSAQPHFSVQEVSDNVSRILVSFKAGKKVTTPGKRYIHRGGKRILTQEGLLIPRGALCEESVYGRILSLEKAVPVKKLFERVEDIVKPGIRAMVEERLQACNNDVKVACASLKKEPLYLDAEKTIPLEYGTCYKAEYVMKYTLSALKPKDVEYIVDEHIRKVVSERLSEYGNDPKKAFAEPLYADEAKTIPIRTVRCYTDLRQVAPVKKDANGNDIGFVKPGNNHHIAIYIDSDGVYHKSTITFWKAVERKKYGLPVIIRKPREIWMIIIDKNIPEELAAGLPDPDWKFVMSMQQNEMFVLGMEDDEFRDAMEGKDYKTLGAHLYRVQKLEHLNFRIQYDTILDDSKAAKDMKKFYEIRGFKAFWALHPRKVSVSLLGELSLKDD

SEQ ID NO: 1152 - protein, 1220 aa, unidentified
  REGION 1..1220: note = Description of Unknown: uncultivated organism with predicted taxonomy: Bacteroides sp. CAG:770
  REGION 1..1220: note = MG16-65 effector
MKKILGLDLGVGSVGWSVISCDDEHRPLEILGMGSRIVPLTPDESNEFSSGNAASKNQSRTQKRTARKGYDRYQLRRQALTVKLRELGMLPDEALIKLPVLDLWTLRARAATPGDKLSLPEIGRVLYHLNQKRGYRHSKQDDSADKTQRDYVQAVNKRFQEIKDEGLTIGQHFAEKLKESEIITDKGAFYNYRIKEQVFPRAAYVEEFDRIIQCQREFYPEVFTEAIVNEIRNEIIYYQRPLKSCKHLVSVCEFMQRELFDAEHNPIRNGKGEIVVAGPKCAPKSSPLAQVCKIWEEVNNIRITNKENDEYFISIDNKHEIFDFLNTHEKMKADDLFKILGLAKNSGWSADRAMSKGMVGNTTRVALMKALKGRRDIDEILRFDLREVESNQVNADTGEVLMEIGAECESEPLYRLWHIIYSISDKNEQKATLEKQFGITDESMLESLCRIDFVKQGYSSRSFKFMRKILPYLMDGAKYSEACDAVGINHSDSITKAKNQARELLVKLPQLQKNELRQPVVEKILNQMINVVNAVIDKYGAIDEIRVEMARELKLSKEGRESAAKNISDRKKANEEIARRIEELGLVPSKNKILKYRLWEESGKRCFYCGQPVSAAEFLNGLDVEIEHVIPKSLLFDDSFSNKVCACRKCNAEKDNATAFDFMKGRGENAFEDYLKRVETAFKENKISQTKRNRLLTPADKIPKDFISRQLVQTQYISRKAMEILNQVCRNVYGSSGDVTAYLRRIWGYDEILHSLDLPRYREGNLTGDVTYVHKGQTHTEERIKDWSKRLDHRHHAIDALTIASTRQSIIQRLNTLNAKTAIGEEQISLDKWTLAQAHFSVADVADHVADILVSFKSGKKVTTPGKRYVYKAGRRRVAQENILVPRGALSEESVYGRIKSIEEKVPVKKLFERVDDIVKPRIRHLVRERLEACGGDCSKAVSSLKKSPLYLDEENTIMLEYGSCFKPEYVIKYSLNSIKAKDAVSIVDKHVREVVTARLAAFGDDPKKAFAEPLYADEAGKIQIKTVRCYTGLSQVVPVKKDADGNDIGFVKPGNNHHIAIYKDAGGKYQECIVTFRDAVERKKYGIPVVVRKPAAVLDTVIDKNVPEDLAGGLPSPEWTFVMSMQQNEMFVLGMGDDEFNDAMAGRDYKSLGEHLYRVQSISHADYYFRSQYETMLDNSKNAMAMKKYYRIRSFKALFALNPRKVSISLLGEISLKDD

SEQ ID NO: 1153 - protein, 1221 aa, unidentified
  REGION 1..1221: note = Description of Unknown: uncultivated organism with predicted taxonomy: Bacteroides sp. CAG:770
  REGION 1..1221: note = MG16-66 effector
MKKVLGLDLGVGSVGWSLVNVDDNYKPTEILGIGSRIISLSPDESSEFTSGNAASKNQKRTQKRTARKGYDRYQMRRQALTEKLRELKMLPDERLIKLPVLELWTLRAKAATPGEKLTLPEIGRVLYHINQKRGYRHAKSDDSADKEQRDYVQTVNKRYQEIKDEGTTIGQHFAIKLKESEIVTDKGPFYNYRIKEQVFPRDAYIEEFDRIMDCQKTFYPEELSEDNIDEIRNKIIFYQRDLKSCKHLVSQCEFMTRSFLDADHKPILNSSGELVMSGPKVAPKSSPIFQACKIWEEINNLSIRNKENDELHISPEQKKDIFEYLDNNEKINATALYKILGIGKGDGWSVDKALSKGFTGNTTKVAIAKALGKEHNTKKSDLLRFDLRLKENGVNKDTGEIIYEIDPTCENEPLYRLWHVIYSINDKDALRHALTNQFGINDGESLRELTKIDFVKQGYGSRSAKFMRKLLPALMDGARYSEACDMIGINHSGSLTKSENEARELLHKIPQLQKNELRQPVVEKILNQMINVVNAVIEQFGSIDEIRVEMARELKLSKEGRAATAKNIRDREKMNNEMAEKIKELGITPSKNKILKYRLWQESGQKCFYCGQPVGAAEFLSGLDVEIEHIVPKALLFDDSFSNKVCACRKCNAEKSNTTAYDYMKSKGENEFNDYLRRVDAAFNAHKISFTKRSRLLTPADKLPKDFISRQLVQTQYISRKAMEILKQVCHNVYGSSGEVTSYLRRIWGYDEILHSLDLPRYREGGMTAEVSYDHRGQTHTEERIKDWSKRLDHRHHAIDALTIACTRQSIIQRLNNLSAMTAVAGEYMSLDKWTLAQPHFSVQEVSDNVSRILVSFKAGKKVTTPGKRYVYRGGKRILAQEGLLIPRGALCEESVYGRIHSLEKEVPVKKLFERVDDIVRPGIRAAVEERLRACDNDVKVACASLKKEPLYLDVEKTIPLEYGTCYKAEYVMRYALSALKPKDVEFIVDEHIRKVVSERLSEYGNDPKKAFAEPLYADKSKTIPIRAVRCYTGLAQVVPVKKDSKGNDIGFVKPGNNHHIAIYRNVEGTYHESIVTFWDSVERKKYGLPVIIRKPGEIWDILIDKNIPEELAAGLPAPDWQFVMSMQQNEMFVLGMEDDEFRDAMEVKNYKTLGAHLYRVQKLASIDYYFRSQYETALDNSAGARMMKKFYRINSIKSLFALHPRKVSVSLLGEMALKDD

SEQ ID NO: 1154 - protein, 1221 aa, unidentified
  REGION 1..1221: note = Description of Unknown: uncultivated organism with predicted taxonomy: Bacteroides sp. CAG:545
  REGION 1..1221: note = MG16-67 effector
MKKVLGLDLGVGSVGWSLVNVDDNYKPTEILGIGSRIISLSPDESSEFTSGNAASKNQKRTQKRTARKGYDRYQMRRQALTEKLRELKMLPDERLIKLPVLELWTLRAKAATPGEKLTLPEIGRVLYHINQKRGYRHAKSDDSADKEQRDYVQTVNKRYQEIKDEGTTIGQHFAIKLKESEIVTDKGPFYNYRIKEQVFPRDAYIEEFDRIMDCQKTFYPEELSEGNIDEIRNKIIFYQRDLKSCKHLVSQCEFMTRSFLDADHKPILNSSGELVMSGPKVAPKSSPIFQACKIWEEINNLSIRNKENDELHISPEQKKDIFEYLDNNEKINATALYKILGIGKGDGWSVDKALSKGFTGNTTKVAMAKALGKEHNTKKSDLLRFDLRLKENGVNKDTGEIIYEIDPACENEPLYRLWHVIYSINDKDALRHALTNQFGINDGESLRELTKIDFVKQGYGSRSAKFMRKLLPALMDGARYSEACDMIGINHSGSLTKSENEARELLHKIPQLQKNELRQPVVEKILNQMINVVNAVIEQFGSIDEIRVEMARELKLSKEGRAATAKNIRDREKMNNEMAEKIKELGITPSKNKILKYRLWQESGQKCFYCGQPVGAAEFLSGLDVEIEHIVPKALLFDDSFSNKVCACRKCNAEKSNTTAYDYMKSKGENEFNDYLRRVDAAFNEHKISFTKRSRLLTPADKLPKDFISRQLVQTQYISRKAMEILKQVCHNVYGSSGEVTSYLRRIWGYDEILHSLDLPRYREGGMTAEVSYDHRGQTHTEERIKDWSKRLDHRHHAIDALTIACTRQSIIQRLNNLSAMTAVAGESMSLDKWTLAQPHFSVQEVSDNVSRILVSFKAGKKVTTPGKRYVYRGGKRVLAQEGLLIPRGALCEESVYGRIHSLEKEVPVKKLFERVDDIVKPGIRTAVEERLRACDNDVKVACASLKKEPLYLDAEKTIPLEYGTCYKAEYVMRYALSALKPKDVEFIVDEHIRKVVSERLSEYGNDPKKAFAEPLYADKSKTIPIRAVRCYTGLAQVVPVKKDSKGNDIGFVKPGNNHHIAIYRDAERTYHENIVTFWDSVERKKYGLPVIIRKPGEIWDILIDKNIPEELAAGLPAPDWQFVMSMQQNEMFVLGMEDDEFRDAMEVKDYKTLGAHLYRVQKLTSIDYYFRSQYETTLDDSAGARMMKKFYRIKSIKSLFALHPRKVSVSLLGEMALKDD

SEQ ID NO: 1155 - protein, 1221 aa, unidentified; identical to SEQ ID NO: 1109
  REGION 1..1221: note = Description of Unknown: uncultivated organism with predicted taxonomy: Bacteroides sp. CAG:770
  REGION 1..1221: note = MG16-68 effector

SEQ ID NO: 1156 - protein, 1221 aa, unidentified; identical to SEQ ID NO: 1120
  REGION 1..1221: note = Description of Unknown: uncultivated organism with predicted taxonomy: Bacteroides sp. CAG:709
  REGION 1..1221: note = MG16-69 effector

SEQ ID NO: 1157 - protein, 1221 aa, unidentified
  REGION 1..1221: note = Description of Unknown: uncultivated organism with predicted taxonomy: Bacteroides sp. CAG:770
  REGION 1..1221: note = MG16-70 effector
MKKVLGLDLGVGSVGWSLVNVDDNYKPTEILGIGSRIISLSPDESSEFTSGNAASKNQKRTQKRTARKGYDRYQMRRQALTEKLRELKMLPDERLIKLPVLELWTLRAKAATPGEKLTLPEIGRVLYHINQKRGYRHAKSDDSADKEQRDYVQTVNKRYQEIKDEGTTIGQHFAIKLKESEIVTDKGPFYNYRIKEQVFPRDAYIEEFDRIMDCQKTFYPEELSEDNIDEIRNKIIFYQRDLKSCKHLVSQCEFMTRSFLDAEHKPILNSSGELVMSGPKVAPKSSPIFQACKIWEEINNLSIRNKENDELHISPEQKKDIFEYLDNNEKINATALYKILGIGKGDGWSVDKVLSKGFTGNTTKGAIAKALGKDHNTKKSDLLRFDLRLKENGVNKDTGEIIYEIDPTCENEPLYRLWHVIYSINDKDALRHALTNQFGINDGESLRELTKIDFVKQGYGSRSAKFMRKLLPALMDGARYSEACDMIGVNHSGSLTKSENEARELLHKIPQLQKNELRQPVVEKILNQMINVVNAVIEQFGSIDEIRVEMARELKLSKEGRAATAKNIRDREKMNNEMAEKIKELGITPSKNKILKYRLWQESGQKCFYCGQPVGAAEFLSGLDVEIEHIVPKALLFDDSFSNKVCACRKCNAEKSNTTAYDYMKSKGENEFNDYLRRVDAAFNEHKISFTKRSRLLTPADKLPKDFISRQLVQTQYISRKAMEILKQVCHNVYGSSGEVTSYLRRIWGYDEILHSLDLPRYREGGMTAEVSYDHRGQTHTEERIKDWSKRLDHRHHAIDALTIACTRQSIIQRLNNLSAMTAVAGESMSLDKWTLAQPHFSVQEVSDNVSRILVSFKAGKKVTTPGKRYVYRGGKRVLAQEGLLIPRGALCEESVYGRIHSLEKEVPVKKLFERVDDIVKPGIRTAVEERLRACDNDVKVACASLKKEPLYLDVEKTIPLEYDTCYKAKYVMRYALSALKPKDVEFIVDEHIRKVVSERLSEYGNDPKKAFAEPLYADKSKTIPIRAVRCYTGLAQVVPVKKDSKGNDIGFVKPGNNHHIAIYRDAEGTYHESIVTFWDSVERKKYGLPVIIRKPGEIWDILIDKNIPEELAAGLPAPDWQFVMSMQQNEMFVLGMEDDEFRDAMEVKDYKTLGAHLYRVQKLTSIDYYFRSQYETTLDDSAGARMMKKFYRIKSIKSLFALHPRKVSVSLLGEMALNDD

SEQ ID NO: 1158 - protein, 1219 aa, unidentified; identical to SEQ ID NO: 1117
  REGION 1..1219: note = Description of Unknown: uncultivated organism with predicted taxonomy: Bacteroides sp. CAG:545
  REGION 1..1219: note = MG16-72 effector

SEQ ID NO: 1159 - protein, 1221 aa, unidentified
  REGION 1..1221: note = Description of Unknown: uncultivated organism with predicted taxonomy: Bacteroides sp. CAG:545
  REGION 1..1221: note = MG16-73 effector
MKKVLCLDLGVGSVGWSLVNVDDNYKPTEILGIGSRIISLSPDESSEFTSGNAASKNQKRTQKRTARKGYDRYQMRRQALTEKLRELKMLPDERLIKLPVLELWTLRAKAATPGEKLTLPEVGRVLYHINQKRGYRHAKSDDSADKEQRDYVQTVNKRYQEIKDEGTTIGQHFAIKLKESEIVTDKGPFYNYRIKEQVFPRDAYIEEFDRIMDCQKTFYPEELSEDNIDEIRNKIIFYQRDLKSCKHLVSQCEFMTRSFLDADHKPILNSSGELVMSGPKVAPKSSPIFQACKIWEEINNLSIRNKENDELHISPEQKKDIFEYLDNNEKINATALYKILGIGKGDGWSVDKALSKGFTGNTTKVAIAKALGKEHNTKKSDLLRFDLSLKENGVNKDTGEIIYEIDPACENEPLYRLWHVIYSINDKDALRHALTNQFGINDEESLRELTKIDFVKQGYGSRSAKFMRKLLPALMDGARYSEACDMIGINHSGSLTKSENEARELLHKIPQLQKNELRQPVVEKILNQMINVVNAVIEQFGSIDEIRVEMARELKLSKEGRAATAKNIRDREKMNNEMAEKIKELGITPSKNKILKYRLWQESGQKCFYCGQPVGAAEFLSGLDVEIEHIVPKALLFDDSFSNKVCACRKCNAEKSNTTAYDYMKSKGENEFNDYLRRVDAAFNEHKISFTKRSRLLTPADKLPKDFISRQLVQTQYISRKAMEILKQVCHNVYGSSGEVTSYLRRIWGYDEILHSLDLPRYREGGMTAEVSYDHRGQTHTEERIKDWSKRLDHRHHAIDALTIACTRQSIIQRLNNLSAMTAVAGESMSLDKWTLAQPHFSVQEVSDNVSRILVSFKAGKKVTTPGKRYVYRGGKRVLAQEGLLIPRGALCEESVYGRIHSLEKEVPVKKLFERVDDIVKPGIRAAVEERLRACDNDVKVACASLKKEPLYLDVEKTIPLEYGTCYKVEYVMRYALSALKPKDVEYIVDEHIRKVVSERLSEYGNDPKKAFAEPLYADKSKTIPIRAVRCYTGLAQVVPVKKDSKGNAIGFVKPGNNHHIAIYRDADGTYHESVVTFWDTVERKKYGLPVIIRKPEEIWDIIIDKNIPEELAAGLPAPDWQFVMSMQQNEMFVLGMKDDEFRDAMEVKDYKTLGAHLYRVQKLTSIYYVFRHQYETQLDDSKGAQIMKKFYRAQSFKALFALHPRKVSVSLLGEMALKDD

SEQ ID NO: 1160 - protein, 1220 aa, unidentified
  REGION 1..1220: note = Description of Unknown: uncultivated organism with predicted taxonomy: Bacteroides sp. CAG:770
  REGION 1..1220: note = MG16-74 effector
MKKILGLDLGVGSVGWSVISCDDEHRPLEILGMGSRIVPLTPDESNEFSSGNAASKNQSRTQKRTARKGYDRYQSRRKALTDKLRDLDMLPDETLIKLPVLDLWTLRARAATPGDKLSLPEIGRGLYHLNQKRGYRHSKEDDSADKTQRDYVQAVNKRFQEIKDEGLTIGQHFAVKLKESEVITDKGAFYNYRIKEQVFPRAAYVEEFDRIIQCQREFYPEVLTEANVNEIRNEIIYYQRPLKSCKHLVSVCEFMQRELFDAEHNPIRNGKGEIVVAGPKCAPKSSPLAQVCKIWEKVNNIRITNKENDEYFISIDNKHEIFDFLNTHEKMKADDLFKILGIAKNSSWSADRAMSKGMVGNTTRVALMKALKGRRDIDEILRFDLREVESSQVNADTGEVLMEISAECEREPLYRLWHIIYSISDKNEQKSALKNQFGISDDSMLESLCKIDFVKQGYSSRSFKFMRRILPSLMDGAKYSEACDVIGINHSDSITKAENQARELLTRLPQLQKNELRQPVVEKILNQMINVVNAVIDKYGSIDEIRVEMARELKLSKAGRESAAKNIRTREKANEEIAKRIEELGLVPSKNKILKYRLWEESGKRCFYCGQPVSATEFLNGLDVEIEHIVPKSLLFDDSFSNKVCACRKCNAEKDNATAFDFMKGRGENAFEDYLKRVETAFKENKISQTKRNRLLTPADKIPKDFISRQLVQTQYISRKAMEILNQVCRNVYGSSGDVTAYLRRIWGYDEILHSLDLPRYREGNLTGDVTYVHRGQTHTEERIRDWSKRLDHRHHAIDALTIASTRQSIIQRLNTLNANTAIGEEQISLDKWTLAQAHFSVADVADHVADILVSFKSGKKVATPGKRYVYRAGRRIVAQENILVPRGALSEESVYGRIKSIEEKVPVKKLFERADDIVKPRIRHLIGARLEACGGDCSKAVSSLRKSPLYLDEEKTIMLEYGSCFKPEYVIKYSLNSIKAKDAVSIVDNHVREVVTARLAAFGDDPKKAFAEPLYADEAGKIQIKTVRCYTGLSQVVPVKKDADGNDIGFVKPGNNHHIAIYKNADGKYQESIVTFCDAVERKKYGIPVVVRNPAAVLDTVIDKNVPEDLAGGLPSPEWTFVMSMQQNEMFVLGMGDDEFNDAMTGRDYKSLGEHLYRVQKLASLYYVFRSQYETKLDDSKGALTMKKFYRTASFKALFALNPRKVSISLLGEISLKDD

SEQ ID NO: 1161 - protein, 1221 aa, unidentified; identical to SEQ ID NO: 1119
  REGION 1..1221: note = Description of Unknown: uncultivated organism with predicted taxonomy: Bacteroides sp. CAG:709
  REGION 1..1221: note = MG16-75 effector

SEQ ID NO: 1162 - protein, 1219 aa, unidentified
  REGION 1..1219: note = Description of Unknown: uncultivated organism with predicted taxonomy: Bacteroides
  REGION 1..1219: note = MG16-76 effector
MKKILGLDLGVGSIGWSLINADKDNKPIAILGLGSRIISLSPDESSEFTSGNAASKNQKRTQKRTARKGYDRYQMRRQALTDKLRKLKMLPDEHLIKLPDLWTLRARAATPGEKLTLPEIGRVLYHINQKRGYRHSRSDDSADKEQREYVQAINKRFQEIREEGVTIGQHFVKKLKESEVVTDKGAFYNYRIKEQVFPRDAYVAEFDRVMDCQKVFYPEELSEANINEFRNEIIFYQRNLKSCKHLVSRCEFMTRSFLDEGHRPVLDASGKLVISGPKVAPKSSPIFQVCKIWEEINNLSIRNKENDELHISPEQKKEIFEYLDNNEKITSAALYKILGIGKGDGWSVDKALSKGFTGNTTKVAISKALGKANDAKKRDLLRFDLRLKENGVNKDTGEIICEIDPECENEPLYKLWHVIYSINDKDAQRHALTSQFGINDEASLAELSKIDFVKQGYGSRSVKFMRKLLPSLMDGAKYSEACDVIGVNHSGSLTKSENEARELLQRIPQLQKNELRQPVVEKILNQMINVVNAVIEKFGGVDEIRVEMARELKLSKEGRAATAKNIRDREKENKEIAEKIIELGVTPSKNKILKYRLWQEAGQKCFYCGQPVGATEFLNGLDVEIEHVVPKALLFDDSFSNKVCACRKCNAEKRNSTAYDYMKSKGENAFNDYLRRVDTAFSEHKISFTKRSRLLTPADKIPKDFISRQLVQTQYISRKAMEILKQVCHNVYGSSGEVTSYLRRIWGYDEILHSLDLPRYREGGMTAEVSYEHRGQTHTEERIKDWSKRLDHRHHAIDALTIACTRQSVIQRLNNLSSMTAVAGEAMSLDKWTLAQPHFSVQEVSDKVGGILVSFKAGKKVTTPGKRYTYRGGKRILAQDGLLIPRGALSEESVYGRISALEKNVPVKKLFERVEDIVKPGIRAVVEDRLMACDNDVNAACASLKKEPLYLDAEKTIPLEYGTCYKAKYVMKYALSALKPKDVEYIVDEHIRKVVSERLSEYGNDPKKAFAEPLYADDAKTIAVRTVRCYTGLDQVVPVKKDVAGNDIGFVKPGNNHHIAIYRDADGKFHECVVTFWDAVERKKYGIPVIVRNPDEVWDVVIDKNVPEELAAGLPALGWSFVMSLQQNEMFILGMEDDEFRDAMAEADYKALGAHLYRVQKLAGSDYYFRSHYETLLDDSAGARIMKKFYRISSSKALFALHPRKVAVSLLGEMSLKND

SEQ ID NO: 1163 - protein, 1220 aa, unidentified
  REGION 1..1220: note = Description of Unknown: uncultivated organism with predicted taxonomy: Bacteroides sp. CAG:770
  REGION 1..1220: note = MG16-77 effector
MKKILGLDLGVGSVGWSVVSCDDEHKPVEILGMGSRIVPLTPDESNEFSSGNAASKNQSRTQKRTARKGYDRYQLRRQALTVKLRELGMLPDEALIKLPVMDLWTLRARAATPGEKLSLAEIGRVLYHLNQKRGYRHSKEDDFADKTQRDYVQAVNKRFQEIKNEGLTIGQHFAVKLKESEVITDNGAFYNYRIKEQVFPRAAYVEEFDRIIQCQREFYPEVLTEANVNEIRNEIIYYQRPLKSCKHLVSVCEFMQRELFDAEHNPIRNGKGEIVVAGPKCAPKSSPLAQVCKIWEEVNNIRITNKENDEYFISIDNKHEIFDFLNTHEKMKADDLFKILGLAKNSGWSADRAMSKGMVGNTTRVALMKALKGRRDIDEILRFDLREVESNQVNADTGEVLMEIGAECESEPLYRLWHIIYSISDKNEQKATLEKQFGITDESMLESLCRIDFVKQGYSSRSFKFMRKILPSLMDSAKYSEACDVIGINHSDSITKAENQTRKLLTKLPQLQKNELRQPVVEKILNQMINVVNAVIDKYGSIDEIRVEMARELKLSKAGRESAAKNIRTREKANEEIAKRIEELGLVPSKNKILKYRLWEESGKRCFYCGQPVSAAEFLNGLDVEIEHVVPKSLLFDDSFSNKVCACRKCNAEKGNATAFDFMKGRGENAFEDYLKRVETAFKENKISQTKRNRLLTPADKIPKDFIARQLVQTQYISRKAMEILNQVCRNVYGSSGDVTAYLRRIWGYDEILHSLDLPRYREGNLTGDVTYVHRGQTHTEERIRDWSKRLDHRHHAIDALTIACTRQSIIQRLNTLNAKTAIGEEQMSLDKWTLAQAHFSVADVADHVADILVSFKSGKRVTTPGKRYVYKAGRRIVVQENILVPRGALSEESVYGRIKSIEEKVPVKKLFERVDDIVKPRIRRLIRERLEACGGDCSKAVSSLKKSPLYLDEEKTIMLEYGSCFKPEYVIKYSLNSIKAKDAVSIVDKHVREVVTERLAAFGDDPKKAFAEPLYADEAGKIQIKTVRCYTGLSQVVPVKKDADGNDIGFVKPGNNHHIAIYKDADGKYQESIVTFRDAVERKKYGIPVVVRNPVEVLDTIIDKNVPEDLAGGLPSPEWTFVMSMQQNEMFVLGMGDDEFNDALAGRDYKSLGEHLYRVQKLASLYYVFRSQYETKLDDSKGALTMKKFYRTASFKALFSLNPRKVSISLLGEISLKDD

SEQ ID NO: 1164 - protein, 1221 aa, unidentified
  REGION 1..1221: note = Description of Unknown: uncultivated organism with predicted taxonomy: Bacteroides
  REGION 1..1221: note = MG16-78 effector
MKKVLGLDLGVGSVGWSLVNVDDNYKPTEILGIGSRIISLSPDESSEFTSGNAASKNQKRTQKRTARKGYDRYQMRRQALTEKLRELKMLPDERLIKLPVLELWTLRAKAATPGEKLTLPEIGRVLYHINQKRGYRHAKSDDSADKEQRDYVQTVNKRYQEIKDEGTTIGQHFAIKLKESEIVTDKGPFYNYRIKEQVFPRDAYIEEFDRIMDCQKTFYPEELSEDNIDEIRNKIIFYQRDLKSCKHLVSQCEFMTRSLLDAEHKPILNSSGELVMSGPKVAPKSSPIFQACKIWEEINNLSIRNKENDELHISPEQKKDIFEYLDNNEKINATTLYKILGIGKGDGWSVDKALSKGFTGNTTKVAIAKVLGKEHNTKKSDLLRFDLRLKENGVNKDTGEIIYEIDPTCENEPLYRLWHVIYSINDKDALRHALTNQFGINDEESLRELTKIDFVKQGYGSRSAKFMRKLLPALMDGARYSEACDMIGINHSGSLTKSENEARELLHKIPQLQKNELRQPVVEKILNQMINVVNAVIEQFGSIDEIRVEMARELKLSKEGRAATAKNIRDREKMNNEMAEKIKELGITPSKNKILKYRLWQESGQKCFYCGQPVGAAEFLSGLDVEIEHIVPKALLFDDSFSNKVCACRKCNAEKSNTTAYDYMKSKGENEFNDYLRRVDAAFNEHKISFTKRSRLLSPADKLPKDFISRQLVQTQYISRKAMEILKQVCHNVYGSSGEVTSYLRRIWGYDEILHSLDLPRYREGGMTAEVSYDHRGQTHTEERIKDWSKRLDHRHHAIDALTIACTRQSIIQRLNNLSAMTAVAGESMSLDKWTLAQPHFSVQEVSDNVSRILVSFKAGKKVTTPGKRYVYRGGKRVLAQEGLLIPRGALCEESVYGRIHSLEKEVPVKKLFERVDDIVKPGIRTAVEERLRACDNDVKVACASLKKEPLYLDVEKTIPLEYGTCYKAKYVMRSVLSALKPKDVEFIVDEHIRKVVSERLSEYGNDPKKAFAEPLYSDKSKTIPIRAVRCYTGLAQVVPVKKDSKGNAIGFVKPGNNHHIAIYRDADGAYHENVVTFWDTVERKKYGLPVIIRKPGEIWDILIDKNIPEELAAGLPAPDWQFVMSMQQNEMFVLGMEDDEFRDAMEVKDYKTLGAHLYRVQSLSRSDYYYRCQYETQLDNSNGAMLMKKYYRVRSFNALFTLHPRKVSVSLLGEMALKDD

SEQ ID NO: 1165 - protein, 1221 aa, unidentified
  REGION 1..1221: note = Description of Unknown: uncultivated organism with predicted taxonomy: Bacteroides sp. CAG:770
  REGION 1..1221: note = MG16-79 effector
MKKVLGLDLGVGSVGWSLVNVDDNYKPTEILGIGSRIISLSPDESSEFTSGNAASKNQKRTQKRTARKGYDRYQMRRQALTEKLRELKMLPDERLIKLPVLELWTLRAKAATPGEKLTLPEIGRVLYHINQKRGYRHAKSDDSADKEQRDYVQTVNKRYQEIKDEGTTIGQHFAIKLKESEIVTDKGPFYNYRIKEQVFPRDAYIEEFDRIMDCQKTFYPEELSEDNIDEIRNKIIFYQRDLKSCKHLVSQCEFMTRSFLDADHKPILNSSGELVMSGPKVAPKSSPIFQACKIWEEINNLSIRNKENDELHISPEQKKDIFEYLDNNEKINATALYKILGIGKGDGWSVDKALSKGFTGNTTKVAIAKALGKEHNTKKSDLLRFDLRLKENGVNKDTGEIIYEIDPTCENEPLYRLWHVIYSINDKDALRHALTNQFGINDGESLRELTKIDFVKQGYGSRSAKFMRKLLPALMDGARYSEACDMIGINHSGSLTKSENEARELLHKIPQLQKNELRQPVVEKILNQMINVVNAVIDQFGSIDEIRVEMARELKLSKEGRAATAKNIRDREKMNNEMAEKIKELGITPSKNKILKYRLWQESGQKCFYCGQPVGAAEFLSGLDVEIEHIVPKALLFDDSFSNKVCACRKCNAEKSNTTAYDYMKSKGENEFNDYLRRVDAAFNEHRISFIKRSRLLTPADKLPKDFISRQLIQTQYISRKAMEILKQVCHNVYGSSGEVTSYLRRIWGYDEILHSLDLPRYREGGMTAEVSYDHRGQTHTEERIKDWSKRLDHRHHAIDALTIACTRQSIIQRLNNLSAMTAVAGESMSLDKWTLAQPHFSVQEVSDNVSRILVSFKAGKKVTTPGKRYVYRGGKRVLAQEGLLIPRGALCEESVYGRIHSLEKEVPVKKLFERVDDIVKPGIRAAVEERLRACDNDVKVACASLKKEPLYLDVEKTIPLEYGTCYKVEYVMRYALSALKPKDVEYIVDEHIRKVVSERLSEYGNDPKKAFAEPLYADKSKTIPIRAVRCYTGLAQVVPVKKDSKGNAIGFVKPGNNHHIAIYRDAEGTYHESIVTFWDSVERKKYGLPVIIRKPGEIWDILIDKNIPEELAAGLPAPDWQFVMSMQQNEMFVLGMEDDEFRDAMEVKDYKTLGAHLYRVQKLTSIYYVFRHQYETQLDDSKGAQIMKKFYRAQSFKALFALHPRKVSVSLLGEMALKDD

SEQ ID NO: 1166 - protein, 1221 aa, unidentified; identical to SEQ ID NO: 1134
  REGION 1..1221: note = Description of Unknown: uncultivated organism with predicted taxonomy: Bacteroides sp. CAG:545
  REGION 1..1221: note = MG16-80 effector

SEQ ID NO: 1167 - protein, 1221 aa, unidentified
  REGION 1..1221: note = Description of Unknown: uncultivated organism with predicted taxonomy: Bacteroides
  REGION 1..1221: note = MG16-81 effector
MKKILGLDLGVGSIGWSLINADKDNKPIAILGLGSRIISLSPDESSEFTSGNAASKNQKRTQKRTARKGYDRYQMRRQALTDKLRKLKMLPDEHLIKLPVLDLWTLRARAATPGEKLTLPEIGRVLYHINQKRGYRHSRSDDSADKEQREYVQAINKRFQEIREEGVTIGQHFVKKLKESEVVTDKGAFYNYRIKEQVFPRDAYVAEFDRVMDCQKVFYPEELSEANINEFRNEIIFYQRNLKSCKHLVSRCEFMTRSFLDEGHRPVLDASGKLVISGPKVAPKSSPIFQVCKIWEEINNLSIRNKENDELHISPEQKKEIFEYLDNNEKITSAALYKILGIGKGDGWSVDKALSKGFTGNTTKVAISKALGKANDAKKRDLLRFDLRLKENGVNKDTGEIICEIDPECENEPLYKLWHVIYSINDKDAQRHALTSQFGINDEASLAELSKIDFVKQGYGSRSVKFMRKLLPSLMDGAKYSEACDVIGVNHSGSLTKSENEARELLQRIPQLQKNELRQPVVEKILNQMINVVNAVIEKFGGVDEIRVEMARELKLSKEGRAATAKNIRDREKENKEIAEKIIELGVTPSKNKILKYRLWQEAGQKCFYCGQPVGATEFLNGLDVEIEHVVPKALLFDDSFSNKVCACRKCNAEKRNSTAYDYMKSKGENAFNDYLRRVDTAFSEHKISFTKRSRLLTPADKIPKDFISRQLVQTQYISRKAMEILKQVCHNVYGSSGEVTSYLRRIWGYDVILHSLDLPRYREGGMTAEVSYEHRGQTHTEERIKDWSKRLDHRHHAIDALTIACTRQSVIQRLNNLSSMTAVAGEAMSLDKWTLAQPHFSVQEVSDKVGGILVSFKAGKKVTTPGKRYVYRGGKRILAQEGLLIPRGALCEESVYGRISALEKNVPVKKLFERVEDIVKPGIRAVVEDRLMACDNDVNAACASLKKEPLYLDAEKTIPLEYGTCYKAKYVMKYALSALKPKDVEYIVDEHIRKVVSERLSEYGNDPKKAFAEPLYADKSKTIPVRTVRCYTGLDQVVPVKKDVAGNDIGFVKPGNNHHIAIYRDADGKFHECVVTFWDAVERKKYGIPVIVRNPDEVWDVVIDKNVPEELAAGLPALGWSFVMSLQQNEMFILGMEDDEFRDAMAEADYKALGAHLYRVQKLTGSDYYFRSHYETLLDDSAGARIMKKFYRVRSFNALFNLHPRKVAVSLLGEMSLKND

SEQ ID NO: 1168 - protein, 1221 aa, unidentified
  REGION 1..1221: note = Description of Unknown: uncultivated organism with predicted taxonomy: Bacteroides sp. CAG:770
  REGION 1..1221: note = MG16-82 effector
MKKVLGLDLGVGSVGWSLVNVDDNYKPTEILGIGSRIISLSPDESSEFTSGNAASKNQKRTQKRTARKGYDRYQMRRQALTEKLRELKMLPDEHLIKLPVLELWTLRAKAATPGEKLTLPEIGRVLYHINQKRGYRHAKSDDSADKEQRDYVQTVNKRYQEIKDEGTTIGQHFAIKLKESEIVTDKGPFYNYRIKEQVFPRDAYIEEFDRIMDCQKTFYPEELSEDNIDEIRNKIIFYQRDLKSCKHLVSQCEFMTRSFLDADHKPILNSSGELVMSGPKVAPKSSPIFQACKIWEEINNLSIRNKENDELHISPEQKRDIFEYLDNNEKINATALYKILDIGKCDGWSVDKALSKGFTGNTTKVAIAKVLGKEHNTKKSDLLRFDLRLKENGVNKDTGEIIYEIDPTCENEPLYRLWHVIYSINDKDALRQALTNQFGINDGESLRELTKIDFVKQGYGSRSAKFMRKLLPALMDGARYSEACDMIGINHSGSLTKSENEARELLHTIPQLQKNELRQPVVEKILNQMINVVNAVIDQFGSIDEIRVEMARELKLSKEGRAATAKNIRDREKMNNEMAEKIKELGITPSKNKLLKYRLWQESGQKCFYCGQPVGAAEFLSGLDVEIEHIVPKALLFDDSFSNKVCACRKCNAEKSNTTAYDYMKSKGENEFNDYLRRVDAAFNEHKISFTKRSRLLTPANKLPKDFISRQLVQTQYISRKAMEILKQVCHNVYGSSGEVTSYLRRIWGYDEILHSLDLPRYREGGMTAEVSYDHRGQTHTEERIKDWSKRLDHRHHAIDALTIACTRQSIIQRLNNLSAMSAVAGESMSLDKWTLAQPHFSVQEVSDNVSRILVSFKAGKKVATPGKRYVYRGSKRILAQEGLLIPRGALCEESVYGRINSLEKGVPVKKLFERVDDIVKPGIRTAVEERLRACDNDVKVACASLKKEPLYLDVEKTIPLEYGTCYKAEYVMRYALSALKPKDVEYIVDEHIRKVVSERLSEYGNDPKKAFAEPLYADKSKTIPIRAVRCYTGLAQVVPVKKDSKGNDIGFVKPGNNHHIAIYRDAEGTYHESIVTFLDSVERKKYGLPVIIRKPGEIWDILIDKNIPEELAAGLPAPDWQFVMSMQQNEMFVLGMEDDEFMDAMEVKDYKTLGAHLYRVQKLTSIYYVFRHQYETQLDDSKGAQIMKKFYRAQSFKALFALHPRKVSVSLLGEMALKDD

SEQ ID NO: 1169 - protein, 1221 aa, unidentified
  REGION 1..1221: note = Description of Unknown: uncultivated organism with predicted taxonomy: Bacteroides sp. CAG:545
  REGION 1..1221: note = MG16-83 effector
MKKVLGLDLGVGSVGWSLVNVDDNYKPTEILGIGSRIISLSPDESSEFTSGNAASKNQKRTQKRTARKGYDRYQMRRQALTEKLRELKMLPDERLIKLPVLELWTLRAKAATPGEKLTLPEIGRVLYHINQKRGYRHAKSDDSADKEQRDYVQTVNKRYQEIKDEGTTIGQHFAIKLKESEIVTDKGPFYNYRIKEQVFPRDAYIEEFDRIMDCQKTFYPEELSEDNIDEIRNKIIFYQRNLKSCKHLVSQCEFMTRSFLDAEHKPILNSSGELVMSGPKVAPKSSPIFQACKIWEEINNLSIRNKENDELHISPEQKKDIFEYLDNNEKINATALYKILGIGKGDGWSVDKALSKGFTGNTTKVAIAKALGKEHNTKKSDLLRFDLRLKENGVNKDTGEIIYEIDPTCENEPLYRLWHVIYSINDKDALRHALTNQFGINDGDSLRELTKIDFVKQGYGSRSAKFMRKLLPALMDGARYSEACDMIGINHSGSLTKSENEARELLHKIPQLQKNELRQPVVEKILNQMINVVNAVIDQFGSIDEIRVEMARELKLSKEGRAATAKNIRDREKMNNEMAEKIKELGITPSKNKILKYRLWQESGQKCFYCGQPVGAAEFLSGLDVEIEHIVPKALLFDDSFSNKVCACRKCNAEKSNTTAYDYMKSKGENEFNDYLRRVDAAFNEHKISFTKRSRLLTPADKLPKDFISRQLVQTQYISRKAMEILKQVCHNVYGSSGEVTSYLRRIWGYDEILHSLDLPRYREGGMTAEVSYDHRGQTHTEERIKDWSKRLDHRHHAIDALTIACTRQSIIQRLNNLSAMTAVAGESMSLDKWTLAQPHFSVQEVSDNVSRILVSFKAGKKVTTPGKRYVYRGGKRVLAQEGLLIPRGALCEESVYGRIHSLEKEVPVKKLFERIDDIVKPGIRAAVEERLRACDNDVKVACASLKKEPLYLDVEKTIPLEYGTCYKAKYVMRYALSALKPKDVEFIVDEHIRKVVSERLSEYGNDPKKAFAEPLYADKSKTIPIRAVRCYTGLAQVVPVKKDSKGNDIGFVKPGNNHHIAIYRDAEGTYHENVVTFWDTVERKKYGLPVIIRKPGEIWDILIDKNIPEELAAGLPAPDWKFVMSMQQNEMFVLGMEDDEFRDAMAVKDYKTLGAHLYRVQKLASIDYYFRSQYETALDNSAGARMMKKFYRINSIKSLFTLHPRKVSVSLLGEMALKDD

SEQ ID NO: 1170 - protein, 1165 aa, unidentified
  REGION 1..1165: note = Description of Unknown: uncultivated organism with predicted taxonomy: Bacteroidetes
  REGION 1..1165: note = MG16-84 effector
MQTRKILGLDLGVGSVGWALIETEDDQPKSILAMGSRIVPLSSDDSTKFQKGQAITKNAERTQKRTMRKGLNRYQIRRALLTDLLRRNGMLPEYMNENVIDLWQLRSDAATEGKQLSLPQIGRVLYHINQKRGYKHSKADISADAKQTKYVEAVNQRYRNIQALHQTIGQYFCQQLKETAVQTEKGVYYTFRIKEKVLPRASYVAEFDQIMKVQQSYYPNVLTDELIDTLRNHIIFYQRPLKSCKHLVGLCEFEMRPYKRNDGQIVYGGPKCAPRTSPLAQLCAVWEAVNNITLTNRSNETLEITPKQRKAMADFLYEHEKMGVKDLQKILGISPKDGWWAGKAIGKGIKGNTTYTQLRDALGPISNAADLLSMKIELTDSMVDTTTAELIRQVSPNVEEQPLYRLWHIVYSAQNEDDLRKALHKQFDIEDEKVVANLGKIDFVKPGYANKSNKFMRKLLPYLMQGYKYNEACAHIGVNHSNSLTAEQNTVRPLLDKIPLLEKNALRQPVIEKILNQMINVVNALKAEFGDIDDVRIELARELKESKDERESAFKRNNENERKNKEYEARIREYGIRPSRSRIQKYKMWEESQKKCFYCGKTIDVVEFLNGVDAEIEHIIPQSVLFDDSFSNKVCSCRDCNHTKGNLTAREFMEQHSAADYEAYLRRVDEAFDEHRISKTKRDHLLWRKEDIPQDFIDRQLRQSQYIAKKAAEILRQGVRNVYATSGSVTDFLRHQWGYDNILHYLNLPRYQQVDGLTESVTYDHCGQKHQEERIKDWTKRLDHRHHAIDALTIALTQQSVIQRLNTLNASREEMKNDLGQRIDTPEYTEKRSLLEKWVDIQPHFSVQEVTDKVDGILISFRAGKRVATPAKRAIYQQRKRCIVQTGLQVPRGALSEETVYGKLGNKYVVKYALTHPSMKVDDIVDPTIREIVRNRLNAFGGNVKDAFAESLYSDVAHKMQIKSVRCYTNLQDKAVSAVRFNAQGEPVGFVKMGNNHHIAIYCDKKGQYQESVVSFWHAVERKRYGIPVVIEKPQEVWDKLIDIDAIPQDFLENLPKDDWQFVVSLQQNEMFILGMDEADYEAAMEQKDYRTLNKYLYRVQKISSKEYYFRYHTETSVDDKYEGKNNPNISIELQKLKRIKSFGALFSQHPHKVRINLLGEISAL

SEQ ID NO: 1171 - protein, 1221 aa, unidentified
  REGION 1..1221: note = Description of Unknown: uncultivated organism with predicted taxonomy: Bacteroides
  REGION 1..1221: note = MG16-85 effector
MKKVLGLDLGVGSVGWSLVNVDDNYKPTEILGIGSRIISLSPDESSEFTSGNAASKNQKRTQKRTARKGYDRYQMRRQALTEKLRELKMLPDERLIKLPVLELWTLRAKAATPGEKLTLPEIGRVLYHINQKRGYRHAKSDDSADKEQRDYVQTVNKRYQEIKDEGTTIGQHFAIKLKESEIVTEKGPFYNYRIKEQVFPRDAYIEEFDRIMDCQKTFYPEELSEDNIDEIRNKIIFYQRDLKSCKHLVSQCEFMTRSFLDAEHKPILNSSGELVMSGPKVAPKSSPIFQACKIWEEINNLSIRNKENDELHISPEQKKDIFEYLDNNEKINATALYKILGIGKGDGWSVDKALSKGFTGNTTKVAIAKALGKEHNTKKSDLLRFDLRLKENGVNKDTGEIIYEIDPTCENEPLYRLWHVIYSINDKDALRHALTNQFGINDEESLRELTKIDFVKQGYGSRSAKFMRKLLPALMDGARYSEACDMIGINHSGSLTKSENEARELLHKIPQLQKNELRQPVVEKILNQMINVVNAVIEQFGSIDEIRVEMARELKLSKEGRAATAKNIRDREKMNNEMAEKIKELGITPSKNKILKYRLWQESGQKCFYCGQPVGAAEFLSGLDVEIEHIVPKALLFDDSFSNKVCACRKCNAEKSNTTAYDYMKSKGENEFNDYLRRVDAAFNEHKISFTKRSRLLTPADKLPKDFISRQLVQTQYISRKAMEILKQVCHNVYGSSGEVTSYLRRIWGYDEILHSLDLPRYREGGMTAEVSYDHRGQTHTEERIKDWSKRLDHRHHAIDALTIACTRQSIIQRLNNLSAMTAVAGESMSLDKWTLAQPHFSVQEVSDNVSRILVSFKAGKKVTTPGKRYVYRGGKRVLAQEGLLIPRGALCEESVYGRIHSLEKEVPVKKLFERVDDIVKPGIRTAVEERLRACDNDVKVACASLKKEPLYLDVEKTIPLEYGTCYKAEYVMRYALSALKPKDVEFIVDEHIRKVVSERLSEYGNDPKKAFAEPLYADKSKTIPIRAVRCYTGLAQVVPVKKDSKGNDIGFVKPGNNHHIAIYRDAEGTYHESIVTFWDSVERKKYGLPVIIRKPGEIWDILIDKNIPEELAAGLPAPDWQFVMSMQQNEMFVLGMEDDEFRDAMEVKGYKTLGAHLYRVQNISSLYYVLRLQYETQVDNSNEALNMKKFHRIRSFNALFALRPRKVSVSLLGEMALKDD

SEQ ID NO: 1172 - protein, 1221 aa, unidentified
  REGION 1..1221: note = Description of Unknown: uncultivated organism with predicted taxonomy: Bacteroides sp. CAG:545
  REGION 1..1221: note = MG16-86 effector
MKKVLGLDLGVGSVGWSLVNVDDNYKPTEILGIGSRIISLSPDESSEFTSGNAASKNQKRTQKRTARKGYDRYQMRRQALTEKLRELKMLPDEHLIKLPVLELWTLRAKAATPGEKLTLPEIGRVLYHINQKRGYRHAKSDDSADKEQRDYVQTVNKRYQEIKDEGTTIGQHFAIKLKESEIVTDKGPFYNYRIKEQVFPRDAYIEEFDRIMDCQKTFYPEELSEDNIDEIRNKIIFYQRDLKSCKHLVSQCEFMTRSFLDADHKPILNSSGELVMSGPKVAPKSSPIFQACKIWEEINNLSIRNKENDELHIRPEQKKDIFEYLDNNEKINATTLYKILDIGKGDGWSVDKALSKGFTGNTTKVAIAKVLGKEHNTKKSDLLRFDLRLKENGVNKDTGEIIYEIDPTCENEPLYRLWHVIYSINDKDALRQALTNQFGINDGESLRELTKIDFVKQGYGSRSAKFMRKLLPALMDGARYSEACDMIGINHSGSLTKSENEARELLHTIPQLQKNELRQPVVEKILNQMINVVNAVIDQFGSIDEIRVEMARELKLSKEGRAATAKNIRDREKMNNEMAEKIKELGITPSKNKILKYRLWQESGQKCFYCGQPVGAAEFLSGLDVEIEHIVPKALLFDDSFSNKVCACRKCNAEKSNTTAYDYMKSKGENEFNDYLRRVDAAFNEHKISFTKRSRLLTPANKLPKDFISRQLVQTQYISRKAMEILKQVCHNVYGSSGEVTSYLRRIWGYDEILHSLDLPRYREGGMTAEVSYDHLGQTHTEERIKDWSKRLDHRHHAIDALTIACTRQSIIQRLNNLSAMSAVAGESMSLDKWTLAQPHFSVQEVSDNVSRILVSFKAGKKVATPGKRYVYRGGKRILAQEGLLIPRGALCEESVYGRINSLEKGVPVKKLFERVDDIVKPGIRTAVEERLRACDNDVKVACVSLKKEPLYLDVEKTIPLEYGTCYKAEYVMRYALSALKPKDVEYIVDEHIRKVVSERLSEYGNDPKKAFAEPLYADKSKTIPIRAVRCYTGLAQVVPVKKDSKGNDIGFVKPGNNHHIAIYRDAEGTYHESIVTFWDSVERKKYGLPVIIRKPGEIWDILIDKNIPEELAAGLPAPDWQFVMSMQQNEMFVLGMEDDEFRDAMEVKDYKTLGAHLYRVQKLTSIDYYLRSQYETTLDDSAGARMMKKFYRIKSIKSLFALHPRKVSVSLLGEMALKDD

SEQ ID NO: 1173 - protein, 1221 aa, unidentified; identical to SEQ ID NO: 1172
  REGION 1..1221: note = Description of Unknown: uncultivated organism with predicted taxonomy: Bacteroides
  REGION 1..1221: note = MG16-87 effector

SEQ ID NO: 1174 - protein, 1219 aa, unidentified
  REGION 1..1219: note = Description of Unknown: uncultivated organism with predicted taxonomy: Bacteroides
  REGION 1..1219: note = MG16-88 effector
MKKILGLDLGVGSIGWSLINADKDNKPIAILGLGSRIISLSPDESSEFTSGNAASKNQKRTQKRTARKGYDRYQMRRQALTDKLRKLKMLPDEHLIKLPVLDLWTLRARAATPGEKLTLPEIGRVLYHINQKRGYRHSRSDDSADKEQREYVQAINKRFQEIREEGVTIGQHFVKKLKESEVVTDKGAFYNYRIKEQVFPRDAYVAEFDKVMDCQKVFYPEELSEANINEFRNEIIFYQRNLKSCKHLVSRCEFMTRSFLDEGHRPVLDASGKLVISGPKVAPKSSPIFQVCKIWEEINNLSIRNKENDELHISPEQKKEIFEYLDNNEKITSAALYKILGIGKGDGWSVDKALSKGFTGNTTKVAISKALGKANDAKKRDLLRFDLRLKENGVNKDTGEIICEIDPECENEPLYKLWHVIYSINDKDAQRHALTSQFGINDEASLAELSKIDFVKQGYGSRSVKFMRKLLPSLMDGAKYSEACDVIGVNHSGSLTKSENEARELLQRIPQLQKNELRQPVVEKILNQMINVVNAVIEKFGGVDEIRVEMARELKLSKEGRAATAKNIRDREKENKEIADKIIELGVTPSKNKILKYRLWQEAGQKCFYCGQPVGATEFLNGLDVEIEHVVPKALLFDDSFSNKVCACRKCNAEKRNSTAYDYMKSKGENAFNDYLRRVDTAFSEHKISFTKRSRLLTPADKIPKDFISRQLVQTQYISRKAMEILKQVCHNVYGSSGEVTSYLRRIWGYDEILHSLDLPRYREGGMTAEVSYEHRGQTHTEERIKDWSKRLDHRHHAIDALTIACTRQSVIQRLNNLSSMTAVAGEAMSLDKWTLAQPHFSVQEVSDNVSQILVSFKAGKKVTTPGKRYVYRGGKRILAQKGLLIPRGALCEESVYGRIHSLEKGVPVKKLFERVDDIVKPGIRAAVEERLRACDNDVKVACASLKKEPLYLDAEKTIPLEYGTCYKAEYVMKYALSALKPKDVEYIVDEHIRKVVSERLSEYGNDPKKAFAEPLYADKSKTIPIRAARCYTDLRQVAPVKKDANGNNIGFVKPGNNHHIAIYIDSDGMYHKSTLTFWKAVERKKYGLPVIIRKPGELWDTIIDKNIPEELAAGLPAPDWKFVMSMQQNEMFVLGMEDDEFRDAMEGKDYKTLGAHLYRVQKLEHLNFRIQYDTILDDSKAAKDMKKFYEIRSFKAFWALHPRKVSVSLLGEMALKDD

SEQ ID NO: 1175 - protein, 1221 aa, unidentified; identical to SEQ ID NO: 1118
  REGION 1..1221: note = Description of Unknown: uncultivated organism with predicted taxonomy: Bacteroides sp. CAG:709
  REGION 1..1221: note = MG16-89 effector

SEQ ID NO: 1176 - protein, 1223 aa, unidentified
  REGION 1..1223: note = Description of Unknown: uncultivated organism with predicted taxonomy: Bacteroides sp. CAG:770
  REGION 1..1223: note = MG16-90 effector
MKKILGLDLGVGSVGWSVISCDDEHRPLEILGMGSRIVPLTPDESNEFSSGNAASKNQSRTQKRTARKGYDRYQLRRQALTVKLRELGMLPDEALIKLPVLDLWTLRARAATPGDKLSLPEIGRVLYHLNQKRGYRHSKQDDSADKTQRDYVQAVNKRFQEIKDEGLTIGQHFAEKLKESEIITDKGAFYNYRIKEQVFPRAAYVEEFDRIIQCQREFYPEVFTEAIVNEIRNEIIYYQRPLKSCKHLVSVCEFMQRELFDADHNPIRNGKGKIVVAGPKCAPKSSPLAQVCKIWEEVNNIRITNKENDEYFISIDNKHEIFDFLNTHEKMKADDLFKILGLAKNSGWSADRAMSKGMVGNTTRVALMKALKGRRDIDEILRFDLREVGSNQVNADTGEVLMEISAECEREPLYRLWHIIYSISDKNEQKSALKNQFGISDDSMLESLCKIDFVKQGYSSRSFKFMRKILPSLMDGAKYSEACDVIGINHSDSITKAENQARELLTRLPQLQKNELRQPVVEKILNQMINVVNAVIDKYGAIDEIRVEMARELKLSKAGRESAAKNIRTREKANEEIAKRIEELDLVPSKNKILKYRLWEESGKRCFYCGQPVSATEFLNGLDVEIEHIVPKSLLFDDSFSNKVCACRKCNAEKGNATAFDFMKGRGENAFEDYLKRVETAFKENKISQTKRNRLLTPADKIPKDFIARQLVQTQYISRKAMEILNQVCRNVYGSSGDVTAYLRRIWGYDEILHSLDLPRYREGNLTGDVTYVHRGQTHTEERIRDWSKRLDHRHHAIDALTIACTRQSIIQRLNTLNAKTAIGEEQMSLDKWTLAQAHFSVADVADHVAGILVSFKSGKRVTTPGKRYVYKAGRRIVAQENILVPRGALSEESVYGRIKSIEEKVPVKKLFERVDDIVKPRIRYLIRERLETFGGDCSKAVSSLKKSPLYLDEENTIMLEYGSCFKYSYVKKSKLIQLDKKDDFINVSLIVDKHIREVVTARLAAFGGDTKKAFAEPLYADEAGKIQIRTVRCYTNSTVVPVKKDADGNDIGFVKPGNNHHIAIYKDADGKYQESIVTFCDAVERKKYGIPVVVRKPAAVLDTVIDKNVPEDLARGLPSPEWTFVMSMQQNEMFVLGMGDDEFNDALAGRDYKSLGEHLYRVQKLASLYYVFRSQYETKLDDSNNALAMRKFYRVRSFNALFSLNPRKVSISLLGEISLKDD

SEQ ID NO: 1177 - protein, 1223 aa, unidentified; identical to SEQ ID NO: 1176
  REGION 1..1223: note = Description of Unknown: uncultivated organism with predicted taxonomy: Bacteroides sp. CAG:770
  REGION 1..1223: note = MG16-91 effector

SEQ ID NO: 1178 - protein, 1219 aa, unidentified; identical to SEQ ID NO: 1151
  REGION 1..1219: note = Description of Unknown: uncultivated organism with predicted taxonomy: Alistipes sp. CAG:514
  REGION 1..1219: note = MG16-92 effector

SEQ ID NO: 1179 - protein, 1219 aa, unidentified; identical to SEQ ID NO: 1151
  REGION 1..1219: note = Description of Unknown: uncultivated organism with predicted taxonomy: Alistipes sp. CAG:514
  REGION 1..1219: note = MG16-93 effector

SEQ ID NO: 1180 - protein, 1221 aa, unidentified
  REGION 1..1221: note = Description of Unknown: uncultivated organism with predicted taxonomy: Bacteroides sp. CAG:545
  REGION 1..1221: note = MG16-94 effector
MKKVLGLDLGVGSVGWSLVNVDDNYKPTEILGIGSRIISLSPDESSEFTSGNAASKNQKRTQKRTARKGYDRYQMRRQALTEKLRELKMLPDERLIKLPVLELWTLRAKAATPGEKLTLPEIGRVLYHINQKRGYRHAKSDDSADKEQRDYVQTVNKRYQEIKDEGTTIGQHFAIKLKESEIVTDKGPFYNYRIKEQVFPRDAYIEEFDRIMDCQKTFYPEELSEDNIDEIRNKIIFYQRDLKSCKHLVSQCEFMTRSFLDADHKPILNSSGELVMSGPKVAPKSSPIFQACKIWEEINNLSIRNKENDELHISPEQKKDIFEYLDNNEKINATALYKILGIGKGDGWSVDKALSKGFTGNTTKVAIAKALGKEHNTKKSDLLRFDLRLKENGVNKDTGEIIYEIDPTCENEPLYRLWHVIYSINDKDALRHALTNQFGINDGESLRELTKIDFVKQGYGSRSAKFMRKLLPALMDGARYSEACDMIGINHSGSLTKSENEARELLHKIPQLQKNELRQPVVEKILNQMINVVNAVIDQFGSIDEIRVEMARELKLSKEGRAATAKNIRDREKMNNEMAEKIKELGITPSKNKILKYRLWQESGQKCFYCGQPVGAAEFLSGLDVEIEHIVPKALLFDDSFSNKVCACRKCNAEKSNTTAYDYMKSKGENEFNDYLRRVDAAFNEHKISFTKRSRLLTPADKLPKDFISRQLVQTQYISRKAMEILKQVCHNVYGSSGEVTSYLRRIWGYDEILHSLDLPRYREGGMTAEVSYDHRGQTHTEERIKDWSKRLDHRHHAIDALTIACTRQSIIQRLNNLSAMTAVAGESMSLDKWTLAQPHFSVQEVSYNVSRILVSFKAGKKVTTPGKRYVYRGGKRILAQEGLLIPRGALCEESVYGRIHSLEKEVPVKKLFERVDDIVKPGIRAAVEERLRACDNDVKVACASLKKEPLYLDAEKTIPLEYGTCYKAEYVMRYALSALKPKDVEFIVDEHIRKVVSERLSEYGNDPKKAFAEPLYADKSKTIPIRAVRCYTGLAQVVPVKKDPKGNDIGFVKPGNNHHIAIYRDAEGTYHENVVTFWDTVERKKYGLPVIIRKPGEIWDILIDKNIPEELAAGLPAPDWQFVMSMQQNEMFVLGMEDDEFRDAMEVKDYKTLGAHLYRVQKLTSIDYYFRSQYETALDNSAGARMMKKFYRINSIKSLFALHPRKVSVSLLGEMALKDD

SEQ ID NO: 1181 - protein, 1221 aa, unidentified
  REGION 1..1221: note = Description of Unknown: uncultivated organism with predicted taxonomy: Bacteroides sp. CAG:709
  REGION 1..1221: note = MG16-95 effector
MKKILGLDLGVGSIGWSLINADKDNKPIAILGLGSRIISLSPDESSEFTSGNAASKNQKRTQKRTARKGYDRYQMRRQALTDKLRKLKMLPDEHLIKLPILDLWTLRARAATPGEKLTLPEIGRVLYHINQKRGYRHSRSDDSADKEQREYVQAINKRFQEIREEGVTIGQHFVKKLKESEVVTDKGAFYNYRIKEQVFPRDAYVAEFDRVMDCQKVFYPEELSEANINEFRNEIIFYQRNLKSCKHLVSRCEFMTRSFLDEEHRPVLDASGKLVISGPKVAPKSSPIFQVCKIWEEINNLSIRNKENDELHISPEQKKEIFEYLDNNEKITSAALYKILGIGKGDGWSVDKALSKGFTGNTTKVAISKALGKANDAKKRDLLRFDLRLKENCVNKDTGEIICEIDPECENEPLYKLWHVIYSINDKDAQRHALTSQFGINDEASLAELSKIDFVKQGYGSRSVKFMRKLLPSLMDGAKYSEACDVIGVNHSASLTKSENEARELLQRIPQLQKNELRQPVVEKILNQMINVVNAVIEKFGGVDEIRVEMARELKLSKEGRAATAKNIRDREKENKEIAEKIIELGVTPSKNKILKYRLWQEAGQKCFYCGQPVGATEFLNGLDVEIEHVVPKALLFDDSFSNKVCACRKCNAEKRNSTAYDYMKSKGENAFNDYLRRVDTAFSEHKISFTKRSRLLTPADKIPKDFISRQLVQTQYISRKAMEILKQVCHNVYGSSGEVTSYLRRIWGYDEILHSLDLPRYREGGMTAEVSYEHRGQIHTEERIKDWSKRLDHRHHAIDALTIACTRQSVIQRLNNLSSMTAVAGEAMSLDKWTLAQPHFSVQEVSDKVGGILVSFKAGKKVTTPGKRYTYRGGKRILAQDGLLIPRGALSEESVYGRISALEKNVPVKKLFERVEDIVKPGIRAVVEDRLMACDNDVNAACASLKKEPLYLDAEKTIPLEYGTCYKAKYVMKYALSALKPKDVEYIVDEHIRKVVSERLSEYGNDPKKAFAEPLYADDAKTIPVRTVRCYTGLDQVVPVKKDVAGNDIGFVKPGNNHHIAIYRDADGKFHECVVTFWDAVERKKYGIPVIVRNPDEVWDVVIDKNVPEELAAGLPALGWSFVMSLQQNEMFILGMEDDEFRDAMAEADYKALGAHLYRVQKLTGSDYYFRSHYETLLDDSAGARIMKKFYRVRSFNALFNLHPRKVAVSLLGEMSLKND

SEQ ID NO: 1182 - protein, 1189 aa, unidentified
  REGION 1..1189: note = Description of Unknown: uncultivated organism with predicted taxonomy: Bacteroides
  REGION 1..1189: note = MG16-96 effector
MKKVLGLDLGVGSVGWSLVNVDDNYKPTEILGIGSRIISLSPDESSEFTSGNAASKNQKRTQKRTARKGYDRYQMRRQALTEKLRELKMLPDERLIKLPVLELWTLRAKAATPGEKLTLPEIGRVLYHINQKRGYRHAKSDDSADKEQRDYVQTVNKRYQEIKDEGTTIGQHFAIKLKESEIVTDKGPFYNYRIKEQVFPRDAYIEEFDRIMDCQKTFYPEELSEDNIDEIRNKIIFYQRDLKSCKHLVSQCEFMTRSFLDADHKPILNSSGELVMSGPKVAPKSSPIFQACKIWEEINNLSIRNKENDELHISPEQKKDIFEYLDNNEKINATALYKILGIGKGDGWSVDKALSKGFTGNTTKVAIAKALGKEHNTKKSDLLRFDLRLKENGVNKDTGEIIYEIDPTCENEPLYRLWHVIYSINDKDALRHALTNQFGINDEESLRELTKIDFVKQGYGSRSAKFMRKLLPALMDGARYSEACDMIGINHSGSLTKSENEARELLHKISQLQKNELRQPVVEKILNQMINVVNAVIDQFGSIDEIRVEMARELKLSKEGRAATAKNIRDREKMNNEMAEKIKELGITPSKNKILKYRLWQESGQKCFYCGQPVGAAEFLSGLDVEIEHIVPKALLFDDSFSNKVCACRKCNAEKSNTTAYDYMKSKGENEFNDYLRRVDAAFNEHKISFTKRSRLLTPADKLPKDFISRQLVQTQYISRKAMEILKQVCHNVYGSSGEVTSYLRRIWGYDEILHSLDLPRYREGGMTAEVSYDHRGQTHTEERIKDWSKRLDHRHHAIDALTIACTRQSIIQRLNNLSAMTAVAGESMSLDKWTLAQPHFSVQEVSDNVSRILVSFKAGKKVTTPGKRYVYRGGKRVLAQEGLLIPRGALCEESVYGRIHSLEKEVPVKKLFERVDDIVKPGIRTAVEERLRACDNDVKVACASLKKEPLYLDVEKTIPLEYGTCYKAEYVMRYALSALKPKDVEFIVDEHIRKVVSERLSEYGNDPKKAFAEPLYADKSKMIPIRAVRCYTSLAQVAPVKKDSKGNDIGFVKPGNNHHIAIYRDAEGTYHESIVTFWDSVERKKYGLPVIIRKPGEIWDILIDKNIPEELAAGLPAPDWQFVMSMQQNEMFVLGMEDDEFRDAMEGKDYKTLGAHLYRVQKLTSIDYYFRSQYETTLDDSAGARMMK

SEQ ID NO: 1183 - protein, 1221 aa, unidentified
  REGION 1..1221: note = Description of Unknown: uncultivated organism with predicted taxonomy: Bacteroides
  REGION 1..1221: note = MG16-97 effector
MKKVLGLDLGVGSVGWSLVNVDDNYKPTEILGIGSRIISLSPDESSEFTSGNAASKNQKRTQKRTARKGYDRYQMRRQALTEKLRELKMLPDERLIKLPVLELWTLRAKAATPGEKLTLPEIGRVLYHINQKRGYRHAKSDDSADKEQRDYVQTVNKRYQEIKDEGTTIGQHFAIKLKESEIVTDKGPFYNYRIKEQVFPRDAYIEEFDRIMDCQKTFYPKELSEDNIDEIRNKIIFYQRDLKSCKHLVSQCEFMTRSFLDANHKPILNSSGELVMSGPKVAPKSSPIFQACKIWEEINNLSIRNKENDELHISPEQKKDIFEYLDNNEKINATALYKILGIGKGDGWSVDKALSKGFTGNTTKVAIAKALGKEHNTKKSDLLRFDLRLKENGVNKDTGEIIYEIDPTCENEPLYRLWHVIYSINDKDALRHALTNQFGINDGESLRELTKIDFVKQGYGSRSAKFMRKLLPALMDGARYSEACDMIGINHSGSLTKSENEARELLHKIPQLQKNELRQPVVEKILNQMINVVNAVIEQFSSIDEIRVEMARELKLSKEGRAATAKNIRNREKMNNEMAEKIKELGITPSKNKILKYRLWQESGQKCFYCGQPVGAAEFLSGLDVEIEHIVPKALLFDDSFSNKVCACRKCNAEKSNTTAYDYMKSKGENEFNDYLRRVDAAFNEHKISFTKRSRLLTPADKLPKDFISRQLVQTQYISRKAMEILKQVCHNVYGSSGEVTSYLRRIWGYDEILHSLDLPRYREGGMTAEVSYDHRGQTHTEERIKDWSKRLDHRHHAIDALTIACTRQSIIQRLNNLSAMTAVAGESMSLDKWTLAQPHFSVQEVSDNVSRILVSFKAGKKVTTPGKRYVYRGGKRVLAQEGLLIPRGVLCEESVYGRIHSLEKEVPVKKLFERVDDIVKPGIRAAVEERLRAYDNDVKVACASLKKEPLYLDVEKTIPLEYGTCYKAEYVMRYALSALKPKDVEFIVDEHIRKVVSERLSEYGNDPKKAFAEPLYADKSKTIPIRAVRCYTGLAQVVPVKKDSKGNDIGFVKPGNNHHIAIYRDAEGTYHESIVTFWDSVERKKYGLPVIIRKSGEIWDILIDKNIPEELAAGLPAPDWKFVMSMQQNEMFVLGMEDDEFRDAMEVKDYKTLGAHLYRVQSLSRSDYYYRCQYETQLDNSNGAMLMKKYYRVRSFNALFTLHPRKVSVSLLGEMALKDD

SEQ ID NO: 1184 - protein, 1220 aa, unidentified
  REGION 1..1220: note = Description of Unknown: uncultivated organism with predicted taxonomy: Bacteroides sp. CAG:770
  REGION 1..1220: note = MG16-98 effector
MKKILGLDLGVGSVGWSVVSCDDEHKPVEILGMGSRIVPLTPDESNEFSSGNAASKNQSRTQKRTARKGYDRYQLRRQALTVKLRELGMLPDEALIKLPVLDLWTLRARAATPGEKLSLAEIGRVLYHLNQKRGYRHSKEDDSADKTQRDYVQAVNKRFQEIKDEGLTIGQHFAVKLKESEVITDKGAFYNYRIKEQVFPRAAYVEEFDRIIQCQREFYPEVFTEAIVNEIRNEIIYYQRPLKSCKHLVSVCEFMQRELFDAEQNPIRNRKGEIVVAGPKCAPKSSPLAQVCKIWEEINNIRVTNKENDEYFISIDNKHEIFDFLNTHEKMKADDLFKILGIAKNSGWSADKAMSKGMVGNTTRVALMKALKGRRDIDEILRFDLREVESNQVNADTGEVLMEIGAECESEPLYRLWHIIYSISDKNEQKAALEKLFGITDESMLESLCRIDFVKQGYSGRSFKFMRKILPSLMDGAKYSEACDVIGINHSDSITKAENQTRKLLTKLPQLQKNELRQPVVEKILNQMINVVNAVIGKYGAIDEIRVEMARELKLSKEGRESAAKNIRAREKANEEIAKRIEELGLVPSKNKILKYRLWEESGKRCFYCGQPVSATEFLNGLDVEIEHVVPKSLLFDDSFSNKVCACRKCNAEKGNATAFDFMKGRGENAFEDYLKRVETAFKENKISQTKRNRLLTPADKIPKDFIARQLVQTQYISRKAMEILNQVCRNVYGSSGDVTAYLRRIWGYDEILHSLDLPRYREGNLTGDVTYVHRGQTHTEERIKDWSKRLDHRHHAIDALTIACTRQSIIQRLNTLNAKTAIGEEQMSLDKWTLAQAHFSVADVADHVADILVSFKSGKKVTTPGKRYVYKSGRRIVAQENILVPRGALSEESVYGRIKSIEEKVPVKKLFERVDDIVKPRIRHLVRERLEACGGDCSKAVSSLKKSPLYLDEENTIMLEYGSCFKPEYVIKYSLNSIKTKDAASIVDKHIREVVTARLAAFGDDPKKAFAEPLYADEAGKIQIKTVRCYTGLCQVVPVKKDAAGNDIGFVKPGNNHHIAIYKDADGKYQESIVTFCDAVERKKYGIPVVVRNPAAVLDTIIDKNVPEDLAGGLPSPEWTFVMSMQQNEMFVLGMGDDEFNDAMAGMDYKSLGEHLYRVQKLATSDYFFRSQYETKLDDTKNALSMKKYYRTRSFKALFALNPHKVSISLLGEISLKDD

SEQ ID NO: 1185 - protein, 1219 aa, unidentified
  REGION 1..1219: note = Description of Unknown: uncultivated organism with predicted taxonomy: Bacteroides sp. CAG:709
  REGION 1..1219: note = MG16-99 effector
MKKILGLDLGVGSIGWSLINADKDNKPIAILGLGSRIISLSPDESSEFTSGNAASKNQKRTQKRTARKGYDRYQMRRQALTDKLRKLKMLPDEHLIKLPVLDLWTLRARAATPGEKLTLPEIGRVLYHINQKRGYRHSRSDDSADKEQREYVQAINKRFQEIREEGVTIGQHFVKKLKESEVVTDKGAFYNYRIKEQVFPRDAYVAEFDRVMDCQKVFYPEELSEANINEFRNEIIFYQRNLKSCKHLVSRCEFMTRSFLDEGHRPVLDASGKLVISGPKVAPKSSPIFQVCKIWEEINNLSIRNKENDELHISPEQKKEIFEYLDNNEKITSAALYKILGIGKGDGWSVDKALSKGFTGNTTKVAISKALGKANDAKKRDLLRFDLRLKENGVNKDTGEIICEIDPECENEPLYKLWHVIYSINDKDAQSHALTSQFGINDEASLAELSKIDFVKQGYGSRSVKFMRKLLPSLMDGAKYSEACDVIGVNHSGSLTKSENEARELLQRIPQLQKNELRQPVVEKILNQMINVVNAVIEKFGGVDEIRVEMARELKLSKEGRAATAKNIRDREKENKEIAEKIIELGVTPSKNKILKYRLWQEAGQKCFYCGQPVGATEFLNGLDVEIEHVVPKALLFDDSFSNKVCACRKCNAEKRDSTAYDYMKSKGENAFNDYLRRVDTAFSEHKISFTKRSRLLTPADKIPKDFISRQLVQTQYISRKAMEILKQVCHNVYGSSGEVTSYLRRIWGYDEILHSLDLPRYREGGMTAEVSYEHRGQTHTEERIKDWSKRLDHRHHAIDALTIACTRQSVIQRLNNLSSMTAVAGEAMSLDKWTLAQPHFSVQEVSDKVGGILVSFKAGKKVTTPGKRYTYRGGKRILAQDGLLIPRGALSEESVYGRISALEKNVPVKKLFERVEDIVKPGIRAVVEDRLKACDNDVNAACASLKKEPLYLDAEKTIPLEYGTCYKAEYVMKYALSALKPKDVEYIVDEHIRKVVSERLSEYGNDPKKAFAEPLYADKSKTIPIRAARCYTDLRQVAPVKKDANGNNIGFVKPGNNHHIAFYIDSDGMYHKSTLTFWKAVERKKYGLPVIIRKPGELWDTIIDKNIPEELAAGLPAPDWKFVMSMQQNEMFVLGMEDDEFRDAMEGKDYKTLGAHLYRVQKLEHLNFRIQYDTILDDSKAAKDMKKFYEIRSFKAFWALHPRKVSVSLLGEMALKDD

SEQ ID NO: 1186 - protein, 1221 aa, unidentified
  REGION 1..1221: note = Description of Unknown: uncultivated organism with predicted taxonomy: Bacteroides sp. CAG:709
  REGION 1..1221: note = MG16-100 effector
MKKILGLDLGVGSIGWSLINADKDNKPIAILGLGSRIISLSPDESSEFTSGNAASKNQKRTQKRTARKGYDRYQMRRQALTDKLRKLKMLPDEHLIKLPVLDLWTLRARAATPGEKLTLPEIGRVLYHINQKRGYRHSRSDDSADKEQREYVQAINKRFQEIREEGVTIGQHFVKKLKESEVVTDKGAFYNYRIKEQVFPRDAYVAEFDRVMDCQKVFYPEELSEANINEFRNEIIFYQRNLKSCKHLVSRCEFMTRSFLDEEHRPVLDASGKVVISGPKVAPKSSPIFQVCKIWEEINNLSIRNKENDELHISPEQKKEIFEYLDNNEKITSAALYKILGIGKGDGWSVDKALSKGFTGNTTKVAISKSLGKANDAKKRDLMRFDLRLKENGVNKDTGEIICEIDPECENEPLYKLWHVIYSINDKDAQRHALTSQFGINDEASLAELSKIDFVKQGYGSRSVKFMRKLLPSLMDGAKYSEACNVIGVNHSGSLTKSENEARELLQRIPQLQKNELRQPVVEKILNQMINVVNAVIEKFGGVDEIRVEMARELKLSKEGRAATAKNIRDREKENKEIAEKIIELDVTPSKNKILKYRLWQEAGQKCFYCGQPVGATEFLNGLDVEIEHVVPKALLFDDSFSNKVCACRKCNAEKRNSTAYDYMKSKGENAFNDYLRRVDTAFSEHKISFTKRSRLLTPADKIPKDFISRQLVQTQYISRKAMEILKQVCHNVYGSSGEVTSYLRRIWGYDEILHSLDLPRYREGGMTAEVSYEHRGQTHTEERIKDWSKRLDHRHHAIDALTIACTRQSVIQRLNNLSSMTAVAGEAMSLDKWTLAQPHFSVQEVSDKVGGILVSFKAGKKVTTPGKRYTYRGGKRILAQDGLLIPRGALSEESVYGRISALEKNVLVKKLFERVEDIVKPGIRAVVEDRLKACDNDVKAACTSLKEEPLYLDAEKTIPLEYGTCYKAKYVMKYALSALKPKDVEYIVDEHIRKVVSERLSEYGNDPKKAFAEPLYADDAKTIPVRTVRCYTGLDQVVPVKRDVAGNDIGFVKPGNNHHIAIYRDADGKFHECVVTFWDAVERKKYGIPVIVRNPDEVWDVVIDKNVPEELAAGLPALGWSFVMSLQQNEMFILSMEDDEFRDAMAEADYKALGAHLYRVQKLTGSDYYFRSHYETLLDDSAGARIMKKFYRVRSFNALFNLHPRKVSVSLLGEMALKDD

SEQ ID NO: 1187 - protein, 1221 aa, unidentified
  REGION 1..1221: note = Description of Unknown: uncultivated organism with predicted taxonomy: Bacteroides sp. CAG:545
  REGION 1..1221: note = MG16-101 effector
MKKVLGLDLGVGSVGWSLVNVDDNYKPTEILGIGSRIISLSPDESSEFTSGNAASKNQKRTQKRTARKGYDRYQMRRQALTEKLRELKMLPDERLIKLPVLELWTLRAKAATPGEKLTLSEIGRVLYHINQKRGYRHAKSDDSADKEQRDYVQTVNKRYQEIKDEGTTIGQHFAIKLKESEIVTEKGPFYNYRIKEQVFPRDAYIEEFDRIMDCQKTFYPEELSEDNIDEIRNKIIFYQRDLKSCKHLVSQCEFMTRSFLDAEHKPILNSSGELVMSGPKVAPKSSPIFQACKIWEETNNLSIRNKENDELHISPEQKKDIFEYLDNNEKINATALYKILGIGKGDGWSVDKALSKGFTGNTTKVAMAKALGKEHNTKKSDLLRFDLRLKENGVNKDTGEIIYEIDPTCENEPLYRLWHVIYSINDKDALRHALTNQFGINDGESLRELTKIDFVKQGYGSRSAKFMRKLLPALMDGARYSEACDMIGINHSGSLTKSENEARELLHKIPQLQKNELRQPVVEKILNQMINVVNAVIEQFGSIDEIRVEMARELKLSKEGRAATAKNIRDREKMNNEMAEKIKELGITPSKNKILKYRLWQESGQKCFYCGQPVGAAEFLSGLDVEIEHIVPKALLFDDSFSNKVCACRKCNAEKSNTTAYDYMKSKGENEFNDYLRRVDAAFNEHKISFTKRSRLLTPADKLPKDFISRQLVQTQYISRKAMEILKQVCHNVYGSSGEVTSYLRRIWGYDEILHSLDLPRYREGGMTSEVSYDHRGQTHTEERIKDWSKRLDHRHHAIDALTIACTRQSIIQRLNNLSAMTAVAGESMSLDKWTLAQPHFSVQEVSDNVSRILVSFKAGKKVTTPGKRYVYRGGKRVLAQEGLLIPRGALCEESVYGRIHSLEKDVPVKKLFERVDDIVKPGIRAAVEERLRACDNDVKVACASLKKEPLYMDVEKTIPLEYGTCYKAEYVMRYALSALKPKDVEFIVDEHIRKVVSERLSEYGNDPKKAFAEPLYADKSKTIPIRAVRCYTGLAQVVPVKKDSKGNDIGFVKPGNNHHIAIYRDAEGTYHENVVTFWDTVERKKYGLPVIIRKPGEIWDILIDKNIPEELAAGLPAPDWKFVMSMQQNEMFVLGMEDDEFRDAMAVKDYKTLGAHLYRVQKLASIYYVFRHQYETQLDDSKGALVMKKFYRTASFKALFALHPRKVSVSLLGEMALKDD

SEQ ID NO: 1188 - protein, 1220 aa, unidentified
  REGION 1..1220: note = Description of Unknown: uncultivated organism with predicted taxonomy: Bacteroides sp. CAG:770
  REGION 1..1220: note = MG16-102 effector
MKKILGLDLGVGSVGWSVVSCDDEHKPVEILGMGSRIVPLTPDESNEFSSGNAASKNQSRTQKRTARKGYDRYQLRRQALTVKLRELGMLPDEALIKLPVMDLWTLRARAATPGEKLSLAEIGRVLYHLNQKRGYRHSKQDDSADKTQRDYVQAVNKRFQEIKNEGLTIGQHFAVKLKESEVITDKGAFYNYRIKEQVFPRAAYVEEFDRIIQCQREFYPEVLTEANVNEIRNEIIYYQRPLKSCKHLVSVCEFMQRELFDAEHNPIRNGKGEIVVAGPKCAPKSSPLAQVCKIWEEVNNIRITNKENDEYFISIDNKHEIFDFLNTHEKMKADDLFKILGLAKNSGWSADRAMSKGMVGNTTRVALMKALKGRRDIDDILRFDLREVESNQVNSDTGEVLMEISAECESEPLYRLWHIIYSISDKNEQKAALEKQFGITDESMLESLCRIDFVKQGYSSRSFKFMRKILPSLMDGAKYSEACDVIGINHSDSITKAENQTRKLLTKLPQLQKNELRQPVVEKILNQMINVVNAVIDKYGAIDEIRVEMARELKLSKAGRESAANNIRTRKKANEEIAKRIEELGLVPSKNKILKYRLWEESGKRCFYCGQPVSATEFLNGLDVEIEHVVPKSLLFDDSFSNKVCACRKCNAEKGNATAFDFMKGRGENAFEDYLKRVETAFKENKISQTKRNRLLTPADKIPKDFISRQLVQTQYISRKAMEILNQVCRNVYCSSGDVTAYLRRIWGYDEILHSLDLPRYREGNLTGDVTYVHMGQTHTEERIKDWSKRMDHRHHAIDALTIACTRQSIIQRLNTLNAKTAIGEEQMSLDKWTLAQAHFSVADVADHVADILVSFKSGKRVTTLGKRYVYKAGRRIVAQENILVPRGALSEESVYGRIKSIEEKVPVKKLFERVDDIVKPRIRHLIRERLEACGGDCSKAVSSLKKSPLYLDEENTIMLEYGSCFKPEYVIKYSLNSIKAKDVASIVDKYIREVVTARLAAFGDDPKKAFAEPLYADEAGKIQIKTVRCYTGLSQVVPVKKDADGNDIGFVKPGNNHHIAIYKDADGKYQESIVTFRDAVERKKYGIPVVVRNPVEVLDTVIDKNVPEDLAGGLPSPEWTFVMSMQQNEMFVLGMGDDEFNDAFAGRDYKSLGEHLYRVQKLASLYYVFRSQYETKLDDSNNALAMRKFYRVRSFNALFSLNPRKVSISLLGEISLKDD

SEQ ID NO: 1189 - protein, 1220 aa, unidentified
  REGION 1..1220: note = Description of Unknown: uncultivated organism with predicted taxonomy: Bacteroides sp. CAG:770
  REGION 1..1220: note = MG16-103 effector
MKKILGLDLGVGSVGWSVVSCDDEHKPVEILGMGSRIVPLTPDESNEFSSGNAASKNQSRTQKRTARKGYDRYQSRRKALTDKLRELDMLPDETLIKLPVLDLWTLRARASTPGDKLSLPEIGRVLYHLNQKRGYRHSKQDDSADKTQRDYVQAVNKRFQEIKDEGLTIGQHFAEKLKESEIITDKGAFYNYRIKEQVFPRAAYVEEFDRIIQCQRKFYPEVLTEANVNEIRNEIIYYQRPLKSCKHLVSVCEFMQRELFDADHNPIRNGKGKIVVAGPKCAPKSSPLAQVCKIWEEVNNIRITNKENDEYFISIDNKHEIFDFLNTHEKMKADDLFKILGIAKNSGWSADKAMSKGMVGNTTRVALMKALKGRRDIDDILRFDLREVESNQVNADTGEVLMEIGAECESEPLYRLWHIIYSISDKNEQKSALEKQFGITDESMLESLCRIDFVKQGYSSRSFKFMRKILPSLMDGAKYSEACDVIGINHSDSITKAENQTRKLLTKLPQLQKNELRQPVVEKILNQMINVVNAVIDKYGSIDEIRVEMARELKLSKSGRESAAKNIRTREKANEEIAKRIEELGLVPSKNKILKYRLWEESGKRCFYCGQPVSATEFLNGLDVEIEHVVPKSLLFDNSFSNKVCACRKCNAEKGNATAFDFMKGRGENAFEDYLKRVETAFKENKISQTKRNRLLTPADKIPKDFISRQLVQTQYISRKAMEILNQVCRNVYGSSGDVTAYLRRIWGYDEILHYLDLPRYREGNLTGDVTYVHRGQTHTEERIRDWSKRLDHRHHAIDALTIACTRQSIIQRLNTLNAKTAIGEEQMSLDKWTLAQAHFSVADVADHVADILVSFKSGKKVTTPGKRYVYKAGRRNVAQKNILVPRGALSEESVYGRIKSIEEKVPVKKLFERVDDIVKPRIRHLIRERLEACGGDCSKAVSSLKKSPLYLDEENTIMLEYGSCFKPEYVIKYSLNSIKAKDAVSIVDNHIREVVTARLAAFGDDPKKSFAEPLYADEAGKIQIKTVRCYTGLSQVVPVKKDADGNDIGFVKPGNNHHIAIYKDADGKYQESIVTFRDAVERKKYGIPVVVRNPVEVLDTIIDKNVPEDLAGGLPSPEWTFVMSMQQNEMFVLGMGDDEFNDAMVGMDYKSLGEHLYRVQKLASLYYVFRSQYETKLDDSNNALAMRKFYRVRSFNALFSLNPRKVSISLLGEISLKDD

SEQ ID NO: 1190 - protein, 1221 aa, unidentified; identical to SEQ ID NO: 1119
  REGION 1..1221: note = Description of Unknown: uncultivated organism with predicted taxonomy: Bacteroides
  REGION 1..1221: note = MG16-104 effector

SEQ ID NO: 1191 - protein, 1220 aa, unidentified
  REGION 1..1220: note = Description of Unknown: uncultivated organism with predicted taxonomy: Bacteroides sp. CAG:770
  REGION 1..1220: note = MG16-105 effector
MKKILGLDLGVGSVGWSVISCDDEHRPLEILGMGSRIVPLTPEESNEFSSGNAASKNQSRTQKRTARKGYDRYQSRRKALTDKLRELDMLPDETLIKLPVLDLWTLRARAATPGDKLSLPEIGRVLYHLNQKRGYRHSKQDDSADKTQRDYVQAVNKRFQEIKNEGLTIGQHFAEKLKESEIITDKGSFYNYRIKEQVFPRAAYVEEFDRIIQCQREFYPEVFTEAIVNEIRNEIIYYQRPLKSCKHLVSVCEFMQRELFDAEHNPIRNGKGEIVVAGPKCAPKSSPLAQVCKIWEEINNIRITNKENDEYFISIDNKHEIFDFLNTHEKMKADDLFKILGLAKNSGWSADRAMSKGMVGNTTRVALMKALKGRRDIDEILRFDLREVESNQVNADTGEVLMEISAECEREPLYRLWHIIYSISDKNEQKSALKNQFGISDESMLESLYKIDFVKQGYSSRSFKFMRKILPSLMDGAKYSEACDVIGINHSDSITKAENQTRKLLTKLPQLQKNELRQPVVEKILNQMINVVNAVIDKYGAIDEIRVEMARELKLSKAGRESAANNIRTRKKVNEEIAKRIEELGLVPSKNKILKYRLWEESGKRCFYCGQPVSATEFLNGLDVEIEHVVPKSLLFDDSFSNKVCACRKCNAEKGNATAFDFMKGRGENAFEDYLKRVETAFKENRISQTKRNRLLTPADKIPKDFIARQLVQTQYISRKAMEILNQVCRNVYGSSGDVTAYLRRIWGYDEILHSLDLPRYREGNLTENVTYVHRGQTHTEERIKDWSKRLDHRHHAIDALTIACTRQSIIQRLNTLNAKTAIGEEQMSLDKWTLAQTHFSVADVADHVADILVSFKSGKRVTTPGKRYVYKAGRRRVAQENILVPRGALSEESVYGRIKSIEEKVPVKKLFERVDDIVKPRIRRLIRERLEACGGDCSKAVSSLKKSPLYLDEENTIMLEYGSCFKPEYVIKYSLNSIKAKDAVSIVDKHIREVVIARLAAFGDDPKKAFAEPLYADEAGKIQIKTVRCYTGLSQVVPVKKDADGNDIGFVKPGNNHHIAIYKDADGKYQESIVTFRDVVERKKYGIPVVVRNPAAVLDTIIDKNVPEDLAGGLPSPEWTFVMSMQQNEMFVLGMGDDEFNDAMSGMDYKSLGEHLYRVQKLASLYYVFRSQYETKLDDSKGALTMKKFYRTASFKALFALNPRKVSISLLGEISLKDD

SEQ ID NO: 1192 - protein, 1221 aa, unidentified
  REGION 1..1221: note = Description of Unknown: uncultivated organism with predicted taxonomy: Bacteroides sp. CAG:545
  REGION 1..1221: note = MG16-106 effector
MKKVLGLDLGVGSVGWSLVNVDDNYKPTEILGIGSRIISLSPDESSEFTSGNAASKNQKRTQKRTARKGYDRYQMRRQALTEKLRELKMLPDERLIKLPVLELWTLRAKAATPGEKLTLPEIGRVLYHINQKRGYRHAKSDDSADKEQRDYVQTVNKRYQEIKDEGTTIGQHFAIKLKESEIVTEKGPFYNYRIKEQVLPRDAYIEEFDRIMDCQKTFYPEELSEDNIDEIRNKIIFYQRDLKSCKHLVSQCEFMTRSFLDADHKPILNSSGELVMSGPKVAPKSSPIFQACKIWEEINNLSIRNKENDELHISPEQKKDIFEYLDNNEKINATALYKILGIGKGDGWSVDKALSKGFTGNTTKVAIAKALGKEHNTQKSDLLRFDLRLKENGVNKDTGEIIYEIDPTCENEPLYRLWHVIYSINDKDALRHALTNQFGINDGESLRELSKIDFVKQGYGSRSAKFMRKLLPALMDGARYSEACDMIGINHSGSLTKSENEARELLHKIPQLQKNELRQPVVEKILNQMINVVNAVIDQFGSIDEIRVEMARELKLSKEGRAATAKNIRDREKMNNEMAEKIKELGITPSKNKILKYRLWQESGQKCFYCGQPVGAAEFLSGLDVEIEHIVPKALLFDDSFSNKVCACRKCNAEKSNTTAYDYMKSKGENEFNDYLRRVDAAFNEHKISFTKRSRLLTPADKLPKDFISRQLVQTQYISRKAMEILKQVCHNVYGSSGEVTSYLRRIWGYDEILHSLDLPRYREGGMTAEVSYDHRGQTHTEERIKDWSKRLDHRHHAIDALTIACTRQSIIQRLNNLSAMTAVAGESMSLDKWTLAQPHFSVQEVSDNVSRILVSFKAGKKVTTPGKRYVYRGGKRVLAQEGLLIPRGALCEESVYGRIHSLDKEVPVKKLFERIDDIVKPGIRTAVEERLRACDNDVKVACASLKKEPLYLDVEKTIPLEYGTCYKAEYVMRYALSALKPKDVEFIVDEHIRKVVSERLSEYGNDPKKAFAEPLYADKSKTIPIRAVRCYTGLAQVVPVKKDSKGNDIGFVKPGNNHHIAIYKDAEGTYHESIVTFWDSVERKKYGLPVIIRKPGEIWDIIIDKNIPEELAAGLPAPDWQFVMSMQQNEMFVLGMEDDGFRDAMEVKDYKTLGAHLYRVQKLTSIDYYFRSQYETTLDDSAGARMMKKFYRIKSIKSLFALHPRKVSVSLLGEMALKDD

SEQ ID NO: 1193 - protein, 1221 aa, unidentified
  REGION 1..1221: note = Description of Unknown: uncultivated organism with predicted taxonomy: Bacteroides sp. CAG:545
  REGION 1..1221: note = MG16-107 effector
MKKVLGLDLGVGSVGWSLVNVDDNYKPTEILGIGSRIISLSPDESSEFTSGNAASKNQKRTQKRTARKGYDRYQMRRQALTEKLRELKMLPDERLIKLPVLELWTLRAKAATPGEKLTLPEIGRVLYHINQKRGYRHAKSDDSADKEQRDYVQTVNKRYQEIKDEGTTIGQHFAIKLKESEIVTDKGPFYNYRIKEQVFPRDAYIEEFDRIMDCQKTFYPEELSEDNIDEIRNKIIFYQRDLKSCKHLVSQCEFMTRSFLDAEHKPILNSSGELVMSGPKVAPKSSPIFQACKIWEEINNLSIRNKENDELHISPEQKKDIFEYLDNNEKINATALYKILGIGKGDGWSVDKALSKGFTGNTTKVAIAKALGKDHNTKKSDLLRFDLRLKENGVNKDTGEIIYEIDPTCENEPLYRLWHVIYSINDKDALRHALTNQFGINDEESLRELTKIDFVKQGYGSRSAKFMRKLLPALMDGARYSEACDMIGINHSGSLTKSENEAREFLHKIPQLQKNELRQPVVEKILNQMINVVNAVIDQFGSIDEIRVEMARELKLSKEGRAATAKNIRDREKMNNEMAEKIKELGITPSKNKILKYRLWQESGQKCFYCGQPVGAAEFLSGLDVEIEHIVPKALLFDDSFSNKVCACRKCNAEKSNTTAYDYMKSKGENEFNDYLRRVDAAFNEHKISFTKRSRLLTPADKLPKDFISRQLVQTQYISRKAMEILKQVCHNVYGSSGEVTSYLRRIWGYDEILHSLDLPRYREGGMTAEVSYDHRGQTHTEERIKDWSKRLDHRHHAIDALTIACTRQSIIQRLNNLSAMTAVAGESMSLDKWTLAQPHFSVQEVSDNVSRILVSFKAGKKVTTPGKRYVYRGGKRVLAQEGLLIPRGALCEESVYGRIHSLEKEVPVKKLFERVDDIVKPGIRAAVEERLRACDNDVKVACASLKKEPLYLDVEKTIPLEYGTCYKVEYVMRYALSALKPKDVEYIVDEHIRKVVSERLSEYGNDPKKAFAEPLYADKSKTIPIRAVRCYTGLAQVVPVKKDSKGNAIGFVKPGNNHHIAIYRDADGTYHESVVTFWDTVERKKYGLPVIIRKPEEIWDIIIDKNIPEELAAGLPAPDWKFVMSMQQNEMYVLGMEDDEFRDAMEVKDYKTLGAHLYRVQKLTSIDYYFRSQYETTLDDSAGARMMKKFYRIKSIKSLFALHPRKVSVSLLGEMALKDD

SEQ ID NO: 1194 - protein, 1220 aa, unidentified; identical to SEQ ID NO: 1111
  REGION 1..1220: note = Description of Unknown: uncultivated organism with predicted taxonomy: Bacteroides sp. CAG:770
  REGION 1..1220: note = MG16-108 effector

SEQ ID NO: 1195 - protein, 1221 aa, unidentified
  REGION 1..1221: note = Description of Unknown: uncultivated organism with predicted taxonomy: Bacteroides sp. CAG:709
  REGION 1..1221: note = MG16-109 effector
MKKILGLDLGVGSIGWSLINADKDNKPIAILGLGSRIISLSPDESSEFTSGNAASKNQKRTQKRTARKGYDRYQMRRQSLTDKLRKLKMLPDEHLIKLPVLDLWTLRARAATPGEKLTLPEIGRVLYHINQKRGYRHSRSDDSADKEQREYVQAINKRFQEIREEGVTIGQHFVKKLKESEVVTDKGAFYNYRIKEQVFPRDAYVAEFDRVMDCQKVFYPEELSEANINEFRNEIIFYQRNLKSCKHLVSRCEFMTRSFLDEGHRPVLDASGKLVISGPKVAPKSSPIFQVCKIWEEINNLSIRNKENDELHISPEQKKEIFEYLDNNEKITSAALYKILGIGKGDGWSVDKALSKGFTGNTTKVAISKALGKANDAKKRDLLRFDLRLKENGVNKDTGEIICEIDPECENEPLYKLWHVIYSINDKDAQRHALTSQFGINDEASLAELSKIDFVKQGYGSRSVKFMRKLLPSLMDGAKYSEACDVIGVNHSGSLTKSENEARELLQRIPQLQKNELRQPVVEKILNQMINVVNAVIEKFGGVDEIRVEMARELKLSKEGRAATAKNIRDREKENKEIAEKIIELGVTPSKNKILKYRLWQEAGQKCFYCGQPVGATEFLNGLDVEIEHVVPKALLFDDSFSNKVCACRKCNAEKRNSTAYDYMKSKGENAFNDYLRRVDTAFSEHKISFTKRSRLLTPADKIPKDFISRQLVQTQYISRKAMEILKQVCHNVYGSSGEVTSYLRRIWGYDEILHSLDLPRYREGGMTAEVSYEHRGQTHTEERIKDWSKRLDHRHHAIDALTIACTRQSVIQRLNNLSSMTAVAGEAMSLDKWTLAQPHFSVQEVSDKVGGILVSFKAGKKVTTPGKRYVYRGGKRILAQEGLLIPRGALCEESVYGRIHSLEKGVPVKKLFERVDDIVKPGIRAAVEERLRACDNDVKVACASLKKEPLYLDAEKTIPLEYGTCYKAEYVMKYALSALKPKDVEYIVDEHIRKVVSERLSEYGNDPKKAFAEPLYADDAKTIPIRAVRCYTGLAQVVPVKKDSKGNDIGFVKPGNNHHIAIYRDADGAYHENVVTFWDTVERKKYGLPVIIRKPGEIWDILIDKNIPEELAAGLPAPDWKFVMSMQQNEMFVLGMEDDEFRDAMEVKDYKTLGAHLYRVQKLASSYYVFRHQYETQLDDSKCAQIMKKFYRAQSFKALFALHPRKVSVSLLGEMALKDD

SEQ ID NO: 1196 - protein, 1221 aa, unidentified; identical to SEQ ID NO: 1195
  REGION 1..1221: note = Description of Unknown: uncultivated organism with predicted taxonomy: Bacteroides sp. CAG:709
  REGION 1..1221: note = MG16-110 effector

SEQ ID NO: 1197 - protein, 1221 aa, unidentified; identical to SEQ ID NO: 1150
  REGION 1..1221: note = Description of Unknown: uncultivated organism with predicted taxonomy: Bacteroides sp. CAG:770
  REGION 1..1221: note = MG16-113 effector

SEQ ID NO: 1198 - protein, 1221 aa, unidentified
  REGION 1..1221: note = Description of Unknown: uncultivated organism with predicted taxonomy: Bacteroides sp. CAG:545
  REGION 1..1221: note = MG16-114 effector
MKKVLGLDLGVGSVGWSLVNVDDNYKPTEILGIGSRIISLSPDESSEFTSGNAASKNQKRTQKRTARKGYDRYQMRRQALTEKLRELKMLPDERLIKLPVLELWTLRAKAATPGEKLTLPEIGRVLYHINQKRGYRHAKSDDSADKEQRDYVQTVNKRYQEIKDEGTTIGQHFAIKLKESEIVTDKGPFYNYRIKEQVFPRDAYIEEFDRIMDCQKTFYPEELSEDNIDEIRNKIIFYQRDLKSCKHLVSQCEFMTRSFLDADHKPILNSSGELVMSGPKVAPKSSPIFQACKIWEEINNLSIRNKENDELHISPEQKKDIFEYLDNNEKINATALYKILGIGKGDGWSVDKALSKGFTGNTTKGAIAKALGKDHNTKKSDLLRFDLRLKENGVNKDTGEIIYEIDPTCENEPLYRLWHVIYSINDKDALRHALTNQFGINDEESLRELTKIDFVKQGYGSRSAKFMRKLLPALMDGARYSEACDMIGINHSGSLTKSENEARELLHKIPQLQKNELRQPVVEKILNQMINVVNAVIDQFGSIDEIRVEMARELKLSKEGRAATAKNIRDREKMNNEMAEKIKELGITPSKNKILKYRLWQESGQKCFYCGQPVGAAEFLSGLDVEIEHIVPKALLFDDSFSNKVCACRKCNAEKSNTTAYDYMKSKGENEFNDYLRRVDAAFNEHKISFTKRSRLLTPADKLPKDFISRQLVQTQYISRKAMEILKQVCHNVYGSSGEVTSYLRRIWGYDEILHSLDLPRYREGGMTAEVSYDHRGQTHTEERIKDWSKRLDHRHHAIDALTIACTRQSIIQRLNNLSAMTAVAGESMSLDKWTLAQPHFSVQEVSDNVSRILVSFKAGKKVTTPGKRYVYRGGKRVLAQESLLIPRGALCEESVYGRIHSLEKEVPVKKLFERVDDIVRPGIRAAVEERLRACDNDVKVACASLKKEPLYLDAEKTIPLEYGTCYKAEYVMRYALSALKPKDVEFIVDEHIRKVVSERLSEYGNDPKKAFAEPLYADKSKTIPIRAVRCYTGLAQVVPVKKDSKGNDIGFVKPGNNHHIAIYRDAEGTYHESIVTFWDSVERKKYGLPVIIRKPGEIWDILIDKNIPEELAAGLPAPDWQFVMSMQQNEMFVLGMEDDEFRDAMEGKDYKTLGAHLYRVQKLACIYYVFRHQYETQLDDSKGAQIMKKFYRAQSFKALFALRQRKVSVSLLGEMALKDD

SEQ ID NO: 1199 - protein, 1221 aa, unidentified
  REGION 1..1221: note = Description of Unknown: uncultivated organism with predicted taxonomy: Bacteroides sp. CAG:770
  REGION 1..1221: note = MG16-115 effector
MKKVLGLDLGVGSVGWSLVNVDDNYKPTEILGIGSRIISLSPDESSEFTSGNAASKNQKRTQKRTARKGYDRYQMRRQALTEKLRELKMLPDERLIKLPVLELWTLRAKAATPGEKLTLPEIGRVLYHINQKRGYRHAKSDDSADKEQRDYVQTVNKRYQEIKDEGTTIGQHFAIKLKKSEIVTDKGPFYNYRIKEQVFPRDAYIEEFDRIMDCQKTFYSEELSEDNIDEIRNKIIFYQRNLKSCKHLVSQCEFMTRSFLDAEHKPILNSSGELVMSGPKVAPKSSPIFQACKIWEEINNLSIRNKENDELHISPEQKKDIFEYLDNNEKINATALYKILGIGKGDGWSVDKALSKGFTGNTTKGAIAKALGKDHNTKKSDLLRFDLRLKENGVNKDTGEIIYEIDPTCENEPLYRLWHVIYSINDKDALRHALTNQFGINDEESLRELTKIDFVKQGYGSRSAKFMRKLLPALMDGARYSEACDMIGINHSGSLTKSENEARELLHKIPQLQKNELRQPVVEKILNQMINVVNAVIEQFGSIDEIRVEMARELKLSKEGRAATAKNIRDREKMNNEMAEKIKELGITPSKNKILKYRLWQESGQKCFYCGQPVGAAEFLSGLDVEIEHIVPKALLFDDSFSNKVCACRKCNAEKSNTTAYDYMKSKGENEFNDYLRRVDAAFNEHKISFTKRSRLLSPADKLPKDFISRQLVQTQYISRKAMEILKQVCHNVYGSSGEVTSYLRRIWGYDEILHSLDLPRYREGGMTAEVSYDHRGQTHTEERIKDWSKRLDHRHHAIDALTIACTRQSIIQRLNNLSAMTAVAGESMSLDKWTLAQPHFSVQEVSDNVSRILVSFKAGKKVTTPGKRYVYRGGKRVLAQEGLLIPRGALCEESVYGRIHSLEKEVPVKKLFERVDDIVKPGIRTAVEERLRACDNDVKVACASLKKEPLYLDVEKTIPLEYGTCYKAKYVMRYVLSALKPKDVEFIVDEHIRKVVSERLSEYGNDPKKAFAEPLYSDKSKTIPIRAVRCYTGLAQVVPVKKDSKGNAIGFVKPGNNHHIAIYRDADGAYHENVVTFWDTVERKKYGLPVIIRKPGEIWDILIDKNIPEELAAGLPAPDWQFVMSMQQNEMFVLGMEDDEFRDAMEVKDYKTLGAHLYRVQSLSRSDYYYRCQYETQLDNSNGAMLMKKYYRVRSFNALFTLHPRKVSVSLLGEMALKDD

SEQ ID NO: 1200 - protein, 1221 aa, unidentified
  REGION 1..1221: note = Description of Unknown: uncultivated organism with predicted taxonomy: Bacteroides
  REGION 1..1221: note = MG16-116 effector
MKKVLGLDLGVGSVGWSLVNVDDNYKPTEILGIGSRIISLSPDESSEFTSGNAASKNQKRTQKRTTRKGYDRYQMRRQALTEKLRELKMLPDERLIKLPVLELWTLRAKAATPGEKLTLPEIGRVLYHINQKRGYRHAKSDDSADKEQRDYVQTVNKRYQEIKDEGTTIGQHFAIKLKESEIVTEKGPFYNYRIKEQVFPRDAYIEEFDRIMDCQKTFYPEELSEDNIDEIRNKIIFYQRNLKSCKHLVSQCEFMTRSFLDADHKPILNSSGELVMSGPKVAPKSSPIFQACKIWEEINNLSIRNKENDELHISPEQKKDIFEYLDNNEKINATALYKILGIGKGDGWSVDKALSKGFTGNTTKVAIAKALGKEHNTKKSDLLRFDLRLKENGVNKDTGEIIYEIDPTCENEPLYRLWHVIYSINDKDALRHALTNQFGINDGESLRELTKIDFVKQGYGSRSAKFMRKLLPALMDGARYSEACDMIGINHSGSLTKSENEARELLHKIPQLQKNELRQPVVEKILNQMINVVNAVIDQFGSIDEIRVEMARELKLSKEGRAATAKNIRDREKMNNEMAEKIKELGITPSKNKILKYRLWQESGQKCFYCGQPVGAAEFLSGLDVEIEHIVPKALLFDDSFSNKVCACRKCNAEKSNTTAYDYMKSKGENEFNDYLRRVDAAFNEHKISFTKRSRLLTPADKLPKDFISRQLVQTQYISRKAMEILKQVCHNVYGSSGEVTSYLRRIWGYDEILHSLDLPRYREGGMTAEVSYDHRGQTHTEERIKDWSKRLDHRHHAIDALTIACTRQSIIQRLNNLSAMTAVAGESMSLDKWTLAQPHFSVQEVSDNVSRILVSFKAGKKVTTPGKRYVYRGGKRVLAQEGLLIPRGALCEESVYGRIHSLEKEVPVKKLFERVDDIVKPGIRAAVEERLRACDNDVKVACASLKKEPLYLDVEKTIPLEYGTCYKAEYVMRYALSALKPKDVEFIVDEHIRKVVSERLSEYGNDLKKAFAEPLYADKSKTIPIRAVRCYTGLAQVVPVKKDSKGNAIGFVKPGNNHHIAIYKDADGTYHENVVTFWDTVERKKYGLPVIIRKPGEIWDILIDKNIPEELAAGIPAPDWKFVMSMQQNEMFVLGMEDDEFRDTMEVKDYKTLGAHLYRVQKLTSIYYVFRHQYETQLDDSKGAQIMKKFYRAQSFKALFSLHPRKVSVSLLGEMALKDD

SEQ ID NO: 1201 - protein, 1220 aa, unidentified
  REGION 1..1220: note = Description of Unknown: uncultivated organism with predicted taxonomy: Bacteroides sp. CAG:770
  REGION 1..1220: note = MG16-118 effector
MKKILGLDLGVGSVGWSVISCDDEHRPLEILGMGSRIVPLTPDESNEFSSGNAASKNQSRTQKRTARKGYDRYQLRRQALTVKLRELGMLPDEALIKLPVMDLWTLRARAATPGEKLSLAEIGRVLYHLNQKRGYRHSKEDDSADKTQRDYVQAVNKRFQEIKNEGLTIGQHFAVKLKESEVITDKGAFYNYRIKEQVFPRAAYVEEFDRIIQCQREFYPEVLTEANVNEIRNEIIYYQRPLKSSKHLVSVCEFMQRELFDAEHNPIRNGKGEIVVAGPKCAPKSSPLAQVCKIWEEVNNIRITNKENDEYFISIDNKHEIFDFLNTHEKMKADDLFKILGLAKNSGWSADRAMSKGMVGNTTRVALMKALKGRRDIDEILRFDLREVESNQVNADTGEVLMEIGAECESEPLYRLWHIIYSISDKNEQKATLEKQFGITDESMLESLCRIDFVKQGYSSRSFKFMRKILPYLMDGAKYSEACDAVGINHSDSITKAKNQARELLVKLPQLQKNELRQPVVEKILNQMINVVNAVIDKYGAIDEIRVEMARELKLSKEGRESAAKNISDRKKANEEIARRIEELGLVPSKNKILKYRLWEESGKRCFYCGQPVSAAEFLNGLDVEIEHVIPKSLLFDDSFSNKVCACRKCNAEKDNATAFDFMKGRGENAFEDYLKRVETAFKENKISQTKRNRLLTPADKIPKDFISRQLVQTQYISRKAMEILNQVCRNVYGSSGDVTAYLRRIWGYDEILHSLDLPRYREGNLTGDVTYVHKGQTHTEERIKDWSKRLDHRHHAIDALTIASTRQSIIQRLNTLNAKTAIGEEQISLDKWTLAQAHFSVADVADHVADILVSFKSGKKVTTPGKRYVYKAGRRRVAQENILVPRGALSEESVYGRIKSIEEKVPVKKLFERVDDIVKPRIRHLVRERLEACGGDCSKAVSSLKKSPLYLDEENTIMLEYGSCFKPEYVIKYSLNSIKAKDAVSIVDKHVREVVTARLAAFGDDPKKAFAEPLYADEAGKIQIKTVRCYTGLSQVVPVKKDADGNDIGFVKPGNNHHIAIYKDADGKYQECIVTFRDAVERKKYGIPVVVRKPAAVLDTVIDKNVPEDLAGGLPSPEWTFVMSMQQNEMFVLGMGDDEFNDAMAGRDYKSLGEHLYRVQSISHADYYFRSQYETMLDNSKNAMAMKKYYRIRSFKALFALNPRKVSISMLGEISLKDD

SEQ ID NO: 1202 - protein, 1221 aa, unidentified
  REGION 1..1221: note = Description of Unknown: uncultivated organism with predicted taxonomy: Bacteroides sp. CAG:709
  REGION 1..1221: note = MG16-119 effector
MKKILGLDLGVGSIGWSLINADKDNKPIAILGLGSRIISLSPDESSEFTSGNAASKNQKRTQKRTARKVYDRYQMRRQALTDKLRKLKMLPDEHLIKLPVLDLWTLRARAATPGEKLTLPEIGRVLYHINQKRGYRHSRSDDSADKEQREYVQAINKRFQEIREEGVTIGQHFVKKLKESEVVTDKGAFYNYRIKEQVFPRDAYVAEFDRVMDCQKVFYPEELSEANINEFRNEIIFYQRNLKSCKHLVSRCEFMTRSFLDEGHRPVLDASGKLVISGPKVAPKSSPIFQVCKIWEEINNLSIRNKENDELHISPEQKKEIFEYLDNNEKITSAALYKILGIGKGDGWSVDKALSKGFTGNTTKVAISKALGKANDAKKRDLLRFDLRLKENGVNKDTGEIICEIDPECENEPLYKLWHVIYSINDKDAQRHALTSQFGINDEASLAELSKIDFVKQGYGSRSVKFMRKLLPSLMDGAKYSEACDVIGVNHSGSLTKSENEARELLQRIPQLQKNELRQPVVEKILNQMINVVNAVIEKFGGVDEIRVEMARELKLSKEGRAATAKNIRDREKENKEIAEKIIELGVTPSKNKILKYRLWQEAGQKCFYCGQPVGATEFLNGLDVEIEHVVPKALLFDDSFSNKVCACRKCNAEKRNSTAYDYMKSKGENAFNDYLRRVDTAFSEHKISFTKRSRLLTPADKIPKDFISRQLVQTQYISRKAMEILKQVCHNVYGSSGEVTSYLRRIWGYDEILHSLDLPRYREGGMTAEVSYEHRGQTHTEERIKDWSKRLDHRHHAIDALTIACTRQSVIQRLNNLSSMTAVAGEAMSLDKWTLAQPHFSVQEVSDKVGGILVSFKAGKKVTTPGKRYTYRGGKRILAQDGLLIPRGALSEESVYGRISALEKNVLVKKLFERVEDIVKPGIRAVVEDRLKAYDNDVKAACTSLKEEPLYLDAEKTIPLEYGTCYKAKYVMKYALSALKPKDVEYIVDEHIRKVVSERLSEYGNDPKKAFAEPLYADDAKTIAVRTVRCYTGLDQVVPVKRDVAGNDIGFVKPGNNHHIAIYRDADGKFHECVVTFWDAVERKKCGIPVIVRNPDEVWDVVIDKNVPEELAAGLPALGWSFVMSLQQNEMFILGMEDDEFRDAMAEADYKALGAHLYRVQKLAGSDYYFRSHYETLLDDSAGARIMKKFYRISSSKALFALHPRKVAVSLLGEMSLKND

SEQ ID NO: 1203 - protein, 1221 aa, unidentified; identical to SEQ ID NO: 1135
  REGION 1..1221: note = Description of Unknown: uncultivated organism with predicted taxonomy: Bacteroides sp. CAG:709
  REGION 1..1221: note = MG16-120 effector

SEQ ID NO: 1204 - protein, 1223 aa, unidentified
  REGION 1..1223: note = Description of Unknown: uncultivated organism with predicted taxonomy: Bacteroides sp. CAG:770
  REGION 1..1223: note = MG16-121 effector
MKKILGLDLGVGSVGWSVISCDDEHRPLEIVGMGSRIVPLTPDESNEFSSGNAASKNQSRTQKRTARKGYDRYQSRRKALTDKLRELDMLPDETLIKLPVLDLWTLRARAATPGDKLSLPEIGRVLYHLNQKRGYRHSKQDDSADKTQRDYVQAVNKRFQDIKDEGLTIGQHFAEKLKESEIITDKGAFYNYRIKEQVFPRAAYVEEFDRIIQCQREFYPEVLTEANVNEIRNEIIYYQRPLKSCKHLVSVCEFMQRELFDADHNPIRNGKGKIVVAGPKCAPKSSPLARVCKIWEEINNIRVTNKENDEYFISIDNKHEIFDFLNTHEKMKADDLFKILGIAKNSGWSADRAMSKGMVGNTTRVALMKALKGRRDIDDILRFDLRDVESNQVNADTGEVLMEISAECESEPLYRLWHIIYSISDKNEQKSALKNQFGISDESMLESLCKIDFVKQGYSSRSFKFMRKILPSLMDGAKYSEACDVIGVNHSDSITKAENQARELLARLPQLQKNELRQPVVEKILNQMINVVNAVIDKYGAIDEIRVEMARELKLSKAGRESAAKNVRTREKANEEIAKRIEELGLVPSKNKILKYRLWEESGKRCFYCGQPVSATEFLNGLDVEIEHVVPKSLLFDDSFSNKVCACRKCNAEKGNATAFDFMKGHGENAFEDYLKRVETAFKENRISQTKRNRLLTPADKIPKDFISRQLVQTQYISRKAMEILNQVCRNVYGSSGDVTAYLRRIWGYDEILHSLDLPRYREGNLTGDVTYLHKGQTHTEERIKDWSKRLDHRHHAIDALTIASTRQSIIQRLNTLNAKTAIGEEQISLDKWTLAQAHFSVADVADHVADILVSFKSGKKVATPGKRYVYKAGRRIVAQENILVPRGALSEESVYGRIKSIEEKVPVKKLFERVDDIVKPRIRHLIRERLEACGGDCSKAVSSLKKSPLYLDEENTIMLEYGSCFKYSYVKKSKLIQRDKKDDCINVSLIVDKHIREVVTARLAAFGGDTKKAFAEPLYADEAGKIQIKTVRCYTNSTVVPVKKDADGNDIGFVKPGNNHHIAIYKDADGKYQESIVTFRDAVERKKYGIPVVVRNPVEVMDTVIDKNVPEDLAGGLPSPEWTFVMSMQQNEMFVLGMGDDEFNDAMAGMDYKSLGEHLYRFQSISHADYYFRSQYETMLDNSKNAMAMKKYYRIRSFKALFALNPRKVSISLLGEISLKDD

SEQ ID NO: 1205 - protein, 1220 aa, unidentified
  REGION 1..1220: note = Description of Unknown: uncultivated organism with predicted taxonomy: Bacteroides sp. CAG:770
  REGION 1..1220: note = MG16-122 effector
MKKILGLDLGVGSVGWSVISCDDEHRPLEILGMGSRIVPLTPDESNEFSSGNAASKNQSRTQKRTARKGYDRYQLRRQALTVKLRELGMLPDEALIKLPVMDLWTLRARAATPGEKLSLAEIGRVLYHLNQKRGYRHSKEDDSADKTQRDYVQAVNKRFQEIKNEGLTIGQHFAVKLKESEVITDKGAFYNYRIKEQVFPRAAYVEEFDRIIQCQREFYPEVLTEANVNEIRNEIIYYQRPLKSCKHLVSVCEFMQRELFDAEHNPIRNGKGEIVVAGPKCAPKSSPLAQVCKIWEEVNNIRITNKENDEYFISIDNKHEIFDFLNTHEKMKADDLFKILGLAKNSGWSADRAMSKGMVGNTTRVALMKALKGRRDIDEILRFDLREVESNQVNADTGEVLMEIGAECESEPLYRLWHIIYSISDKNEQKATLEKQFGITDESMLESLCRIDFVKQGYSSRSFKFMRKILPYLMDGAKYSEACDVIGVNHSDSITKAENQARELLTRLPQLQKNELRQPVVEKILNQMINVVNAVIDKYGAIDEIRVEMARELKLSKAGRESAAKNIRTREKANEEIAKRIEELGLVPSKNKILKYRLWEEFGKRCFYCGQPVSATEFLNGLDVEIEHVVPKSLLFDDSFSNKVCACRKCNAEKGNATAFDFMKGRGENAFEDYLKRVETAFKENRISQTKRNRLLTPADKIPKDFISRQLVQTQYISRKAMEILNQVCRNVYGSSGDVTAYLRRIWGYDEILHSLDLPRYREGNLTGDVTYVHKGQTHTEERIKDWSKRLDHRHHAIDALTIASTRQSIIQRLNTLNAKTAIGEEQISLDKWTLAQAHFSVADVADHVADILVSFKSGKRVTTPGKRYVYKAGRRRVVQENILVPRGALSEESVYGRIKSIEEKVPVKKLFERVDDIVKPRIRYLIRERLETCGGDCSKAVSSLKKSPLYLDEENTIMLEYGSCFKPEYVIKYSLNSIKAKDAVSIVDNHIREVVTARLAAFGDDPKKAFAEPLYADGAGKIQIRTVRCYTGLSQVVPVKKDADGNDIGFVKPGNNHHIAIYKDADGKYQESIVTFCDAVERKKYGIPVVVRNPVEALDTIIDKNVPEDLAGGLPSPEWTFVMSMQQNEMFVLGMGDDEFNDALAGMDYKSLGEHLYRVQKLATSDYFFRSQYETKLDDSKGASAMRKFFRTASLKALFALNPRKVSISLLGEISLKDD

SEQ ID NO: 1206 - protein, 1221 aa, unidentified
  REGION 1..1221: note = Description of Unknown: uncultivated organism with predicted taxonomy: Bacteroides sp. CAG:545
  REGION 1..1221: note = MG16-123 effector
MKKVLGLDLGVGSVGWSLVNVDDNYKPTEILGIGSRIISLSPDESSEFTSGNAASKNQKRTQKRTARKGYDRYQMRRQALTEKLRELKMLPDERLIKLPVLELWTLRAKAATPGEKLTLPEIGRVLYHINQKRGYRHAKSDDSADKEQRDYVQTVNKRYQEIKDEGTTIGQHFAIKLKESEIVTDKGPFYNYRIKEQVFPRDAYIEEFDRIMDCQKTFYPEELSEDNIDEIRNKIIFYQRDLKSCKHLVSQCEFMTRSFLDAEHKPILNSSGELVMSGPKVAPKSSPIFQACKIWEEINNLSIRNKENDELHISPEQKKDIFEYLDNNEKINATTLYKILGIGKGDGWSVDKALSKGFTGNTTKVAIAKVLGKEHNTKKSDLLRFDLRLKENGVNKDTGEIIYEIDPTCENEPLYRLWHVIYSINDKDALRHALTNQFGINDEESLRELTKIDFVKQGYGSRSAKFMRKLLPALMDGARYSEACDMIGINHSGSLTKSENEARELLHKIPQLQKNELRQPVVEKILNQMINVVNAVIEQFGSIDEIRVEMARELKLSKEGRAATAKNIRDREKMNNEMAEKIKELGITPSKNKILKYRLWQESGQKCFYCGQPVGAAEFLSGLDVEIEHIVPKALLFDDSFSNKVCACRKCNAEKSNTTAYDYMKSKGENEFNDYLRRVDAAFNEHKISFTKRSRLLSPADKLPKDFISRQLVQTQYISRKAMEILKQVCHNVYGSSGEVTSYLRRIWGYDEILHSLDLPRYREGGMTAEVSYDHRGQTHTEERIKDWSKRLDHRHHAIDALTIACTRQSIIQRLNNLSAMTAVAGESMSLDKWTLAQPHFSVQEVSDNVSRILVSFKAGKKVTTPGKRYVYRGGKRVLAQEGLLIPRGALCEESVYGRIHSLEKEVPVKKLFERVDDIVKPGIRTAVEERLRACDNDVKVACASLKKEPLYLDVEKTIPLEYGTCYKAKYVMRYVLSALKPKDVEFIVDEHIRKVVSERLSEYGNDPKKAFAEPLYSDKSKTIPIRAVRCYTGLAQVVPVKKDSKGNAIGFVKPGNNHHIAIYRDADGAYHENVVTFWDTVERKKYGLPVIIRKPGEIWDILIDKNIPEELAAGLPAPDWQFVMSMQQNEMFVLGMEDDEFRDAMEVKDYKTLGAHLYRVQKLASIDYYFRSQYETALDNSAGARMMKKFYRTNSIKSLFALHPRKVSVSLLGEMALKND

SEQ ID NO: 1207 - protein, 1221 aa, unidentified
  REGION 1..1221: note = Description of Unknown: uncultivated organism with predicted taxonomy: Bacteroides sp. CAG:770
  REGION 1..1221: note = MG16-126 effector
MKKVLGLDLGVGSVGWSLVNVDDNYKPTEILGIGSRIISLSPDESSEFTSGNAASKNQKRTQKRTARKGYDRYQMRRQALTEKLRELKMLPDERLIKLPVLDLWTLRAKAATPGEKLTLPEIGRVLYHINQKRGYRHAKSDDSADKEQRDYVQTVNKRYQEIKDEGTTIGQHFAIKLKESEIVTDKGPFYNYRIKEQVFPRDAYIEEFDRIMDCQKTFYPEELSEDNIDEIRNKIIFYQRDLKSCKHLVSQCEFMTRSFLDADHKPILNSSDELVISGPKVAPKSSPIFQACKIWEEINNLSIRNKENDELHISPEQKKDIFEYLDNNEKINATALYKILGIGKGDGWSVDKALSKGFTGNTTKVAIAKALGKEHNTKKSDLLRFDLRLKENGVNKDTGEIIYEIDPTCENEPLYRLWHVIYSINDKDALRHALTNQFGINDGESLRELTKIDFVKQGYGSRSAKFMRKLLPALMDGARYSEACDMIGINHSGSLTKSENEARELLHKIPQLQKNELRQPVVEKILNQMINVVNAVIDQFGSIDEIRVEMARELKLSKEGRAATAKNIRDREKMNNEMAEKIKELGITPSKNKILKYRLWQESGQKCFYCGQPVGAAEFLCGLDVEIEHIVPKALLFDDSFSNKVCACRKCNAEKSNTTAYDYMKSKGENEFNDYLRRVDAAFNEHKISFTKRSRLLTPADKLPKDFISRQLVQTQYISRKAMEILKQVCHNVYGSSGEVTSYLRRIWGYDEILHSLDLPRYREGGMTAEVSYDHRGQTHTEERIKDWSKRLDHRHHAIDALTIACTRQSIIQRLNNLSAMAAVAGESMSLDKWTLAQPHFSVQEVSDNVSRILVSFKAGKKVTTPGKRYVYRGGKRILAQEGLLIPRGALCEESVYGRIHSLEKGVPVKKLFERVDDIVKPVIRAAVEERLRACDNDVKVACASLKKEPLYLDAEKTIPLEYGTCYKAEYVMKYALSALKPKDVEYIVDEHIRKVVSERLSEYGNDPKKAFAEPLYADKSKTIPIRAVRCYTGLAQVVPVKKDSKGNDIGFVKPGNNHHIAIYRDADGTYHENVVTFWDTVERKKYGLPVIIRKPGEIWDIIIDKNIPEELATCLPAPDWQFVMSMQQNEMFVLGMEDDEFRDAMEGKDYKTLGAHLYRVQKLTSIDYYFRSQYETTLDDSAGARMMKKFYRIKSIKSLFALHPRKVSVSLLGEMALKDD

SEQ ID NO: 1208 - protein, 1221 aa, unidentified
  REGION 1..1221: note = Description of Unknown: uncultivated organism with predicted taxonomy: Bacteroides sp. CAG:709
  REGION 1..1221: note = MG16-127 effector
MKKILGLDLGVGSIGWSLINADKDNKPIAILGLGSRIISLSPDESSEFTSGNAASKNQKRTQKRTARKGYDRYQMRRQALTDKLRKLKMLPDEHLIKLPVLDLWTLRARAATPGEKLTLPEIGRVLYHINQKRGYRHSRSDDSADKEQREYVQAINKRFQEIREEGVTIGQHFVKKLKESEVVTDKGAFYNYRIKEQVFPRDAYVAEFDRVMDCQKVFYPEELSEANINEFRNEIIFYQRNLKSCKHLVSRCEFMTRSFLDEGHRPVLDASGKLVISGPKVAPKSSPIFQVCKIWEEINNLSIRNKENDELHISPEQKKEIFEYLDNNERITSAALYKILGIGKGDGWSVDKALSKGFTGNTTKVAISKALGKANDAKKRDLLRFDLRLKENGVNKDTGEIICEIDPECENEPLYKLWHVIYSINDKDAQRHALTSQFGINDEASLAELSKIDFVKQGYGSRSVKFMRKLLPSLMDGAKYSEACDVIGVNHSASLTKSENEARELLQRIPQLQKNELRQPVVEKILNQMINVVNAVIEKFGGVDEIRVEMARELKLSKEGRAATAKNIRDREKENKEIAEKIIELGVTPSKNKILKYRLWQEAGQKCFYCGQPVGATEFLNGLDVEIEHVVPKALLFDDSFSNKVCACRKCNAEKRNSTAYDYMKSKGENAFNDYLRRVDTAFSEHKISFTKRSRLLTPADKIPKDFISRQLVQTQYISRKAMEILKQVCHNVYGSSGEVTSYLRRIWGYDEILHSLDLPRYREGGMTAEVSYEHRGQTHTEERIKDWSKRLDHRHHAIDALTIACTRQSVIQRLNNLSSMTAVAGEAMSLDKWTLAQPHFSVQEVSDKVGGILVSFKAGKKVTTPGKRYTYRGGKRILAQDGLLIPRGALSEESVYGRISALEKNVLVKKLFERVEDIVKPGIRAVVEDRLKAYDNDVNAACASLKKEPLYLDAEKTIPLEYGTCYKREYVIKYPISSLKAKDVESIIDGHIRQIVSERLSEYGNDPKKAFAEPLYADDAKTIPVRTVRCYTGLDQVVPVKKDVAGNDIGFVKPGNNHHIAIYRDADGKFHECVVTFWDAVERKKYGIPVIVRNPDEVWDVVIDKNVPEELAAGLPALGWSFVMSLQQNEMFILGMEDDEFMDAMAEADYKALGAHLYRVQKLAGSDYYFRSHYETLLDDSAGARIMKKFYRISSSKALFALHPRKVAVSLLGEMSLKND

SEQ ID NO: 1209 - protein, 1221 aa, unidentified
  REGION 1..1221: note = Description of Unknown: uncultivated organism with predicted taxonomy: Bacteroides sp. CAG:770
  REGION 1..1221: note = MG16-128 effector
MKKVLGLDLGVGSVGWSLVNVDDNYKPTEILGIGSRIISLSPDESSEFTSGNAASKNQKRTQKRTARKGYDRYQMRRQALTEKLRELKMLPDERLIKLPVLELWTLRAKAATPGEKLTLPEIGRVLYHINQKRGYRHAKSDDSADKEQRDYVQTVNKRYQEIKDEGTTIGQHFAIKLKESEIVTEKGPFYNYRIKEQVFPRDAYIEEFDRIMDCQKTFYPEELSEDNIDEIRNKIIFYQRDLKSCKHLVSQCEFMTRSFLDADHKPILNSSGELVMSGPKVAPKSSPIFQACKIWEEINNLSIRNKENDELHISPEQKKDIFEYLDNNEKINATALYKILGIGKGDGWSVDKALSKGFTGNTTKVAIAKALGKEHNTKKSDLLRFDLRLKENGVNKDTGEIIYEIDPTCENEPLYRLWHVIYSINDKDALRHALTNQFGINDGESLRELTKIDFVKQGYGSRSAKFMRKLLPALMDGARYSEACDMIGINHSGSLTKSENEARELLHKIPQLQKNELRQPVVEKILNQMINVVNAVIDQFGSIDEIRVEMARELKLSKEGRAATAKNIRDREKMNNEMAEKIKELGITPSKNKILKYRLWQESGQKCFYCGQPVGAAEFLSGLDVEIEHIVPKALLFDDSFSNKVCACRKCNAEKSNTTAYDYMKSKGENEFNDYLRRVDAAFNEHKISFTKRSRLLTPADKLPKDFISRQLVQTQYISRKAMEILKQVCHNVYGSSGEVTSYLRRIWGYDEILHSLDLPRYREGGMTAEVSYDHRGQTHTEERIKDWSKRLDHRHHAIDALTIACTRQSIIQRLNNLSAMTAVAGESMSLDKWTLAQPHFSVQEVSDNVSRILVSFKAGKKVTTPGKRYVYRGGKRVLAQEGLLIPRGALCEESVYGRIHSLEKEVPVKKLFERVDDIVKPGIRTTVEERLRACDNDVKVACASLKKEPLYLDVEKTIPLEYGTCYKAKYVMRYALSALKPKDVEFIVDEHIRKVVSERLSEYGNDPKKAFAEPLYADKSKMIPIRAVRCYTGLAQVVPVKKDSKGNDIGFVKPGNNHHIAIYRDAEGTYHESIVTFWDSVERKKYGLPVIIRKPGEIWDILIDKNIPEELAAGLPAPDWQFVMSMQQNEMFVLGMEDDEFRDAMEVKDYKTLGAHLYRVQSLSRSDYYYRCQYETQLDNSNGAMLMKKYYRVRSFNALFTLHPRKVSVSLLGEMALKDD

SEQ ID NO: 1210 - protein, 1221 aa, unidentified
  REGION 1..1221: note = Description of Unknown: uncultivated organism with predicted taxonomy: Bacteroides sp. CAG:709
  REGION 1..1221: note = MG16-129 effector
MKKILGLDLGVGSIGWSLINADKDNKPIAILGLGSRIISLSPDESSEFTSGNAASKNQKRTQKRTARKGYDRYQMRRQALTDKLRKLKMLPDEHLIKLPVLDLWTLRARAATPGEKLTLPEIGRVLYHINQKRGYRHSRSDDSADKEQREYVQAINKRFQEIREEGVTIGQHFVKKLKESEVVTDKGAFYNYRIKEQVFPRDAYVAEFDRVMDCQKVFYPEELSEANINEFRNEIIFYQRNLKSCKHLVSRCEFMTRSFLDEGHRPVLDASGKLVISGPKVAPKSSPIFQVCKIWEEINNLSIRNKENDELHISPEQKKEIFEYLDNNEKITSAALYKILGIGKGDGWSVDKALSKGFTGNTTKVAISKALGKANDAKKRDLLRFDLRLKENGVNKDTGEIICEIDPECENEPLYKLWHVIYSINDKDAQRHALTSQFGINDEASLAELSKIDFVKQGYGSRSVKFMRKLLPSLMDGAKYSEACDVIGVNHSGSLTKSENEARELLQRIPQLQKNELRQPVVEKILNQMINVVNAVIEKFGGVDEIRVEMARELKLSKEGRAATAKNIRDREKENKEIAEKIIELGVTPSKNKILKYRLWQEAGQKCFYCGQPVGATEFLNGLDVEIEHVVPKALLFDDSFSNKVCACRKCNAEKRNSTAYDYMKSKGENAFNDYLRRVDTAFSEHKISFTKRSRLLTPADKIPKDFISRQLVQTQYISRKAMEILKQVCHNVYGSSGEVTSYLRRIWGYDEILHSLDLPRYREGGMTAEVSYEHRGQTHTEERIKDWSKRLDHRHHAIDALTIACTRQSVIQRLNNLSSMTAVAGEAMSLDKWTLAQPHFSVQEVSDKVGGILVSFKAGKKVTTPGKRYTYREGKRILAQDGLLIPRGALSEESVYGRISALEKNVLVKKLFERVEDIVKPGIRAVVEDRLMACDNDVNAACASLKEEPLYLDAEKTIPLEYGTCYKREYVIKYPISSLKTKDVESIIDGHIRQIVSERLSEYGNDPKKAFAEPLYADDAKTIPVRTVRCYTGLDQVVPVKRDVAGNDIGFVKPGNNHHIAIYRDADGKFHECVVTFWDAVERKKYGIPVIVRNPDEVWDVVIDKNVPEELAAGLPALGWSFVMSLQQNEMFILGMEDDEFRDAMAEADYKALGAHLYRVQSLSRSDYYYRCQYETQLDNSNGAMRMKKFYRVRSFNALFNLHPRKVAVSLLGEMSLKND

SEQ ID NO: 1211 - protein, 1220 aa, unidentified
  REGION 1..1220: note = Description of Unknown: uncultivated organism with predicted taxonomy: Bacteroides sp. CAG:770
  REGION 1..1220: note = MG16-130 effector
MKKILGLDLGVGSVGWSVISCDDEHRPLEILGMGSRIVPLTPEESNEFSSGNAASKNQSRTQKRTARKGYDRYQSRRKALTDKLRELDMLPDETLIKLPVLDLWTLRARAATPGDKLSLPEIGRVLYHLNQKRGYRYSKEDDSADKTQRDYVQAVNKRFQEIKNEGLTIGQHFAVKLKASEVITDKGAFYNYRIKEQVFPRAAYVEEFDRIIQCQREFYPEVFTEAIVNEIRNEIIYYQRPLKSCKHLVSVCEFMQRELFDAEHNPIRNGKGEIVVAGPKCAPKSSPLAQVCKIWEEINNIRITNKENDEYFISIDNKHEIFDFLNTHEKMKADDLFKILGLAKNSGWSADRAMSKGMVGNTTRVALMKALKGRRDIDEILRFDLREVESNQVNADTGEVLMEISAECEREPLYRLWHIIYSISDKNEQKSALKNQFGISDESMLESLCKIDFVKQGYSSRSFKFMRKILPSLMDGAKYSEACDVIGINHSDSITKAENQIRKLLTKLPQLQKNELRQPVVEKILNQMINVVNAVIDKYGAIDEIRVEMARELKLSKAGRESAANNIRTREKANEEIAKRIEELGLVPSKNKILKYRLWEESGKRCFYCGQPVSATEFLNGLDVEIEHVVPKSLLFDDSFSNKVCACRKCNAEKGNATAFDFMKGRGENAFEDYLKRVETAFKENKISQTKRNRLLTPADKIPKDFISRQLVQTQYISRKAMEILNQVCRNVYGSSGDVTAYLRRIWGYDEILHSLDLPRYRDGNLTEDVTYVHRGQTHTEERIKDWSKRLDHRHHAIDALTIACTRQSIIQRLNTLNAKTAIGEEQMSLDKWTLAQAHFSVADVADHVADILVSFKSGKKVTTPGKRYVYKAGRRRVAQENILVPRGALSEESVYGRIKSIEEKVPVKKLFERVDDIVKPRIRHLIRERLEACGGDCSKAVSSLKKSPLYLDEENTIMLEYGSCFKPEYVIKYSLNSIKTKDAASIVDKHVREVVTERLAAFGDDPKKAFAEPLYADEVGKIQIKTVRCYTGLSQVVPVKKDADGNDIGFVKPGNNHHIAIYKDADGKYQECIVTFRDAVERKKYGIPVVVRNPVEALDTIIDKNVPEDLAGGLPSPEWTFVMSMQQNEMFVLGMGEDEFNDAMAGMDYKSLGEHLYRVQKLASSDYFFRSQYETKLDDTKNALLMKKYYRTRSFKALFALNPHKVSISLLGEISLKDD

SEQ ID NO: 1212 - protein, 1221 aa, unidentified
  REGION 1..1221: note = Description of Unknown: uncultivated organism with predicted taxonomy: Bacteroides sp. CAG:709
  REGION 1..1221: note = MG16-131 effector
MKKILGLDLGVGSIGWSLINADKDNKPIAILGLGSRIISLSPDESSEFTSGNAASKNQKRTQKRTARKGYDRYQMRRQALTDKLRKLKMLPDEHLIKLPVLDLWTLRARAATPGEKLTLPEIGRVLYHINQKRGYRHSRSDDSADKEQREYVQAINKRFQEIREEGVTIGQHFVKKLKESEVVTDKGAFYNYRIKEQVFPRDAYVAEFDRVMDCQKVFYPEELSEANINEFRNEIIFYQRNLKSCKHLVSRCEFMTRSFLDEEHRPVLDASGKLVISGPKVAPKSSPIFQVCKIWEEINNLSIRNKENDELHISPEQKKEIFEYLDNNEKITSAALYKILGIGKGDGWSVDKALSKGFTGNTTKVAISKALGKANDAKKRDLLRFDLRLKENGVNKDTGEIICEIDPECENEPLYKLWHVIYSINDKDAQRHALTSQFGINDEASLAELSKIDFVKQGYGSRSVKFMRKLLPSLMDGAKYSEACDVIGVNHSGSLTKSENEARELLQRIPQLQKNELRQPVVEKILNQMINVVNAVIEKFGGVDEIRVEMARELKLSKEGRAATAKNIRDREKENKEIAEKIIELGVTPSKNKILKYRLWQEAGQKCFYCGQPVGATEFLNGLDVEIEHVVPKALLFDDSFSNKVCACRKCNAEKRNSTAYDYMKSKGENAFNDYLRRVDTAFSEHKISFTKRSRLLTPADKIPKDFVSRQLVQTQYISRKAMEILKQVCHNVYGSSGEVTSYLRRIWGYDEILHSLDLPRYREGGMTAEVSYEHRGQTHTEERIKDWSKRLDHRHHAIDALTIACTRQSVIQRLNNLSSMTAVAGEAMSLDKWTLAQPHFSMQEVSDKVGGILVSFKAGKKVTTPGKRYTYRRGKRILAQDGLLIPRGALSEESVYGRISALEKNVLVKKLFERVEDIVKPGIRAVVEDRLKACDDDVKAACASLKKEPLYLDAEKTIPLEYGTCYKAKYVMKYALSALKPKDVEYIVDEHIRKVVSERLSEYGNDPKKAFAEPLYADDAKTIAVRTVRCYTGLDQVVPVKKDVAGNDIGFVKPGNNHHIAIYRDADGKFHECVVTFWDAVERKKYGIPVIVRNPDEVWDVVIDKNVPEELAAGLPALGWSFVMSLQQNEMFILGMEDDEFRDAMAEADYKALGAHLYRVQKLAGSDYYFRSHYETLLDDSAGARIMKKFYRISSSKALFALHPRKVAVSLLGEMSLKND

SEQ ID NO: 1213 - protein, 1221 aa, unidentified
  REGION 1..1221: note = Description of Unknown: uncultivated organism with predicted taxonomy: Bacteroides
  REGION 1..1221: note = MG16-132 effector
MKKVLGLDLGVGSVGWSLVNVDDNYKPTEILGIGSRIISLSPDESSEFTSGNAASKNQKRTQKRTARKGYDRYQMRRQALTEKLRELKMLPDERLIKLPVLELWTLRAKAATPGEKLTLPEIGRVLYHINQKRGYRHAKSDDSADKEQRDYVQTVNKRYQEIKDEGTTIGQHFAIKLKESEIVTDKGPFYNYRIKEQVFPRDAYIEEFDRIMDCQKTFYPEELSEDNIDEIRNKIIFYQRDLKSCKHLVSQCEFMTRSFLDADHKPILNSSGELVMSGPKVAPKSSPIFQACKIWEEINNLSIRNKENDELHISPEQKKDIFEYLDNNEKINATALYKILGIGKGDGWSVDKALSKGFTGNTTKGAIAKALGKDHNTKKSDLLRFDLRLKENGVNKDTGEIIYEIDPTCENEPLYRLWHVIYSINDKDALRHALTNQFGINDEESLRELTKIDFVKQGYGSRSAKFMRKLLPALMDGARYSEACDMIGINHSGSLTKSENEARELLHKIPQLQKNELRQPVVEKILNQMINVVNAVIDQFGSIDEIRVEMARELKLSKEGRAATAKNIRDREKMNNEMAEKIKELGITPSKNKILKYRLWQESGQKCFYCGQPVGAAEFLSGLDVEIEHIVPKALLFDDSFSNKVCACRKCNAEKSNTTAYDYMKSKGENEFNDYLRRVDAAFNEHKISFTKRSRLLTPADKLPKDFISRQLVQTQYISRKAMEILKQVCHNVYGSSGEVTSYLRRIWGYDEILHSLDLPRYREGGMTAEVSYDHRGQTHTEERIKDWSKRLDHRHHAIDALTIACTRQSIIQRLNNLSAMTAVAGESMSLDKWTLAQPHFSVQEVSDNVSRILVSFKAGKKVTTPGKRYVYRGGKRVLAQKGLLIPRGALCEESVYGRIHSLEKEVPVKKLFERVDDIVKPGIRAAVEERLRACDNDVKVACASLKKEPLYLDVEKTIPLEYGTCYKVEYVMRYALSALKPKDVEYIVDEHIRKVVSERLSEYGNDPKKAFAEPLYADKSKTIPIRALRCYTGLAQVVPVKKDSKGNAIGFVKPGNNHHIAIYRDADGTYHESVVTFWDTVERKKYGLPVIIRKPEEIWDIIIDKNIPEELAAGLPAPDWKFVMSMQQNEMYVLGMEDDEFRDAMEVKDYKTLGAHLYRVQKLTSIDYYFRSQYETTLDDSAGARMMKKFYRIKSIKSLFALHPRKVSVSLLGEMALKDD

SEQ ID NO: 1214 - protein, 1257 aa, unidentified
  REGION 1..1257: note = Description of Unknown: uncultivated organism with predicted taxonomy: Bacteroidales
  REGION 1..1257: note = MG16-133 effector
MKKILGLDLGTTSIGWALINAEDNNKPTEIQDIGVRIVPLAENEGDKFTKGQDITVNADRTRARGQRRNYDRFQLRRQALTEKLRSLDMLPDEHLIKLPVMELWQLRANAVTQKVSLNELGRVLYHLNQKRGYKHSRTDSNDSKQRAYVKEINNRYAELQKLGMTIGQYFAQKLEETAIKQNGKIFYAFRIKEQIYPRQAYEEEYDAIMKCQQTFYPEILTESIIEEIRNRIIYYQRDLRSCKHLVTVCEFEKRCFYDADGNVKRNQKGEIIYDGPKVVPRTSPLFQVFKNWQSINNIRFHNRKNEYLFITKEQKQQIANVMANQEVLKLKDVQEILGVTSKSGWYCDKAIKAGIKGNITKCAIIASLSSLPQSKIREITRFNLETETTNMVDEETGELLVRIKNTYQEEPLYKLWHIIYSIKNDNERLNTIISFLKDFDIEDISISNALNDLDFVTPGYANLSAKAISKILPYMMEGLDYSDSCEYVGYNHSDSLTKEENENRILLDKIPALKKNELRQPTVEKILNQTISIFNEINANLLQKGERVDEVRIELARELKQSKEEREKTDRGIRKQQKANEVFANLLKEQGVRPTRNRILKYRLWRESYETCFYCGQPISFKEFLKFSDVEREHVIPKRLLYDDSFANQVCSCRKCNAEKGGRTAIDYMRTTQHLQPYLEKVDKMFQEHKISGKKHAHLLASYDDYLSRKKEGKETKDDIIIWEEAIERQLRLSQYISKKAQELLKKSCREVIATSGSVTDLIRHTWGYDTILHELNLPCYKEAGLTTFIKEENTGQQKEVIKDWTKRLDHRHHAVDALTVACTSRSIIQHINTLHASREVMRGDVKTPRKEWENNDLLQQWIKEKMPFDRQYVLQKVASILVSMKSGKKSTVPGKRKIYIKGKPIVMQSGLRIPRGQLHEQTVYGAIKQYSKDKKGNLIEKKEIVTRYKMGVGSVGFVFNGKETCDVVFDKKNNRYVIADGIDKAINYIIDKHIRDIVRERLNEAFPDGETYRTEAEIALAAGKTYNGKERSMKALEQLKALYEQPLYADKNKHIVIKSVRCFTGLSAVQPLRYNDKNEPTSFVLTKNNHHVAIYLDEKGELKECIYTFWQAVERSKYKLPLIIKEPKSLWDEILERENNGEIFPDTLITSLPSPNWTFVESLQLNDMFVMDMDDVKFENFISSNNYEEIGKRIYRVQSLSSHDYVFRHHTDTTSSMMPEAALCRKFIRIKSLKAYIEHHPHKVQLSLLGKILTKR

SEQ ID NO: 1215 - protein, 1243 aa, unidentified
  REGION 1..1243: note = Description of Unknown: uncultivated organism
  REGION 1..1243: note = MG16-134 effector
MKKILGLDLGTNSIGWAVVNADENGNPVSIEGMGSRIVPLTADDTNEFTKGNAISKNQSRTEKRTARKGYDRYQLRRNKLTLEFRKLNMLPDEQLIKLQPLELWQLRATAATEGHKLTLPEIGRVLYHINQKRGYKHAKSDESADTKQKAYVAEVNARYAMIKERKQTIGQFFAEKLKENEIETSKGKLYTYRIKEQVFPRRAYEAEFDQIMECQRVFYPDVLTNEEINRLRNEIIFYQRKLKSCKHLVSLCEFEKREYKNKDGKIVIDGPKVAPKSSPLFQVCKIWEEINNITLRNRRNDELYISMDQRQAMFDFLDTHEKMTLSDLYSILGISKNDGWWGGKAIGKGLQGNTTKIALKNALGDFENADNLLQFKLESIDSNFVDEETGEIIQIINPNLEKEPLYDLWHTVYSISDKEELANALKKKFNINDEDIINNLYAIDFVKPGYGNKSAKAIRRILPYLQQGLKYSDACEYAGFRHSESLTKTENEQRQLLDKLPAIQKNALRQPIVEKILNQMINVVNALMVEYKEHFYSIRVELARELKQSKDDRNTTYLQNEAMERLNDAIAKRLNSEGIKTTKRILEKYKYIFPTKGCIDKKTGKFVSKNFENLSTVNQCIYCGKSFSLTAALNGDGYEVEHIIPRDLICDNSQSNKVLSCRSCNSKKSNKTAFDFMRGQGEQALEDYIARIEKWYKDGIISPAKREHLLLSHEDYLKRKKEGKTTDEDKKYWEDFVSRQAGETQYISREAIKILKQCCKNVNATSGAVTAILRHLWGYDEILHQLDFERYKKAGLTKIVTWESDHGKNKHTKEQIVNWTKRIDHRHHAIDALVIACTQQGFVQRINTLNADETKDLMKKQIESSGVKFEEKKDLLNKYLASLTPFSTQTVADNVDKILVSFKAGKKSASTGKRIKYVKGKKVVLQKGIIIPRGALHEEGVYGQIEINGKKEIVKKYKLGKGAQGFVFTGKETYEKKVNNKTGEIHVVDKIKNVLDSIVDVNIRSKILQRLNQGFEDGKDYRDDVKKALDNLNDLDKNPIFADDNNTIPIRTVRCRTGLSAVVPIKHNEKGEPIGFVKPGNNHHIAIYSDKNGNLHEHTVTFWHAVERKKYGIPVIIENPQSVWDSIIDKQLPESFLENLPDVKWTFEISLQQNEMFVLGMENESFEDAVRNNDFSTISKYLYRVQSISESDYWFRLHIETQNDKTPSAKLANKYHRVKSLKSFHELNPHKVYISVIGKIKAL

SEQ ID NO: 1216 - protein, 1078 aa, unidentified
  REGION 1..1078: note = Description of Unknown: uncultivated organism with predicted taxonomy: Porphyromonas sp. oral taxon 278
  REGION 1..1078: note = MG16-135 effector
MKRILGLDLGTNSIGWAVVNTDENDKPVSIENMGSRIVPLTSDDTNEFTKGNAITKNQARTVKRTARKGYDRYQLRREHLTAELRKLKMLPDERLIKLPVLELWELRGRAASKGNQLTLSEIGRVLYHINQKRGYKHAKSDESADTKQKAYVAEVNARYAMIKERNQTIGQFFAEKLKENEIETSKGKFYTYRIKEQVFPRKAYEAEFDQIIECQKEFYPDILTNEEINRLRNEIIFYQRRLKSCKHLVSFCDFEKREYINKVGKVVYGGPKVAPKSSPLFQLCKIWEEVNNLTLRNRKNDELFITIEQRQAMVDFLDTHEKLTLSDMYSILGISKQDGWWGGKAIGRGLQGNTTKIALKKALGDFVNADTLLQFNLKQTDSNLVDEVTGEILQVIDPKLEKEPLYDLWHTIYSISDKEELANALKKKYNIHDEDIINRLYAIDFVKSGFGNKSTKAMRRILPYLQQGLKYSDACEYAGFRHSDSLTKAENEARQLLEKLPPVQKNALHQPIVEKILNQMINVVNALMIEYGQFDSIRVELARELKQSKDERNVTFLQNEAMQRLNDSIANRLSSEGIKPTKRTIEKYKFIFPTKGCFDKRTGKFITKNFENLSTVNRCIYCGQPFSLSAALNGDGYEVEHILPRDLICDNSQSNKVLSCRKCNSIKSNKTAFDFMRSQGEHAFETYLERVESWYKDGIISPSKRERLLLSHEDYLERKRKDKATDIDKKYWEDFVSRQAGETQYISREAIRILKQCCRYVNATSGSITATLRHLWGYDEILHQLNFERYKQAGLTKIVTWESNHGKNKHSKEQIVDWSKRIDHRHHAIDALVVACTQQGFIQRINTLNADETKDLMKKQIESAGIKYEEKKVLLDKYLISLIPFKTQIVADAVNKILVSFKAGKKTATIGKRIEYKHGNKHIVQKGIIIPRGALHEEGVYGRIEINGKKEIVKKYKLGKGAQGFVFTGKETYAEKINKKTGGIQIEDKIKNVLDSIVDSNIRAKVLQRLNQGFEEGQDYRNNVKKALDNLNNLDDNPIFADKNNTIPIRTVRCRTGLSAVVPIKKNERGEAIGYVKP

SEQ ID NO: 1217 - protein, 1217 aa, unidentified
  REGION 1..1217: note = Description of Unknown: uncultivated organism with predicted taxonomy: Bacteroidales
  REGION 1..1217: note = MG16-136 effector
MRKILGLDLGVGSIGWSLIETDAEDNPKAILGMGSRIVPLSTDDANEFSSGNAISKNQKRTQKRTQRKGYDRYQLRRALLTQKLRELGMLPDERLIKLPVLELWQLRADAATPGKQLELKEIGRVLYHINQKRGYRHSRSDDGEDKSQKDYVQQVNQRYREILDEGTTIGQHFSKKLADNEVITPKGKFYTYRIKEQVFPRDAYVEEFDRIMECQRRFYPDLLTESTIREIRDEIVFFQRPLKSCKHLVSVCEFAMREYKTKEGKSILAGPKVAPRSSPLFQVCKIWESVNNLSLKNRSGEVYHFSQEERRKMFDFLDNHDKMAVTDLYKLLGISKKEGWWGGKAIGKGLQGNTTKAALAKALGERQDLLQFQLETIDSRQIDTETGEVLKTISPSFEKEPLYRLWHILYSMHERSEVAAALERQFGITAPDTVDRLFAIDFVKAGYGNKSARFIREILPYLQAGMQYSQACDYIGINHSNSLTIEENASRVLLDRLPQLQKNELRQPVIEKILNQMVAVVNALLSQYGPIDEIRVELARELKQSRDERNDAYLSINKRERENKVIEERIREYGISPSKSRIQKYRLWEESNHLCFYCGHPVGAAEFLSGSGVEIEHIIPRSLLFDDSFANKVCACRQCNAEKGNSTAFDYMKSKPANDFEDYLKRVEKYFTEKRISKTKRERLLTPASEIPQDFIDRQLRQSQYISKKAVEMLKLVCRNVWTTSGSITDFLRHNWGYDQILHDLNLPRYSLGGMTESVHYEHNGQKHEEERIIGWTKRLDHRHHAIDALTIASTQQSYIQRLNTLSASRDVMHAEVEKQGVQWQEKHSLLEEWTAQRPHLPYSTVRDYVDGILVSFKPGKMVATPGKRYTYKNGKKELVQDGLLIPRGALSEESVYGQITTIEPSVPVKKLFEDPSLIFKPYIRELVERRIKECGGDWKKARASIGKKPIWLDTEETVALEFATCWKKEYVIKYPVSSLKAKDVDSIVDRHIREIVRKRIDEVGEKEAFKTPIYTDDAQSIPLRSVRLFTGLDAVEPVKYVDGVPVGFSKPGNNHHIAIYRDQDGNRSEHVVSFWHAVERKRYGLPVIIRDTDSVWEQIEGESLPESFLKNLPQPGLKLELSLQQNEMLILGMKEDEFNDAIREKDTRRLNKHLYRVQKLSTMYYVFRYHTETQIDDSKGALEMHKFYRTVSFRALDALFPRKVRISVTGELIPIQ

SEQ ID NO: 1218 - protein, 1045 aa, unidentified
  REGION 1..1045: note = Description of Unknown: uncultivated organism with predicted taxonomy: Prevotella
  REGION 1..1045: note = MG16-137 effector
MKKILGLDLGTTSIGWALVNVDDNNNPVDIQDIGVRRVPLSENEGDKFTKGQDITVNADRTRARGTRRNYDRYQLRRQALTEKLRQLNMLPDENLIMLPIMDLWQLRADAVTKKVSLNELGRILYHLNQKRGYKHSRTDANDSKQREYVKEINNRYAKLLESKMTIGQLFANKLAETAVVQDGKIFYNYRIKDQIYPRNAYEEEYDAIMKCQQKFYPEILTDAIIDEIKNRIIYYQRDLRSCKHLVSICEFEKRCFYDEDGNVKRNKKGDIFYDGPKVAPRTSPLFQVFKDWQSINNLRFHNRRNEYLYITKEQKEQIADFMEHHEILKLKDVQSLLDITAKSGWYCDKAIKAGIKGNSTKCAILSSLSSLPHSKIAEITRFNLETETTNIVDEETGEMLVRIRNTYQNEPLYRLWHIIYSIKNDNERINAISKFLKEFEVEEETVINSLKDIDFVTPGYANLSAKAICKILPYMMEGLDYSDSCEYVGYNHSDSLTKEENEKRELLDKIPALKKNELRQPTVEKILNQTINVFNQINEDLSKDGERISEVRVELARELKQSKDERNETEIGIRKQQKLNDEYAKILKEEGVRPTRNRILKYRLWRESNKSCFYCEQPISFHEFLDFSETEREHIIPKKLMYDDSFANQVCSCRNCNKEKGGRTAMDYMRTKQNLQFYLDKVDKMFQDHKISGKKRSHLLASYDDYLFRKENGKETKDDILIWEKPIERQLRLSQYISRKAQELLRMTCRDVTVTTGEITALIRHTWGYDTILHDLNFSSYKEAGLTEIVKGEDSGRTREIIKDWSKRLDHRHHAIDALAVACTSRSIVQRINTLNASREEIRGEIKAPRKEWKDSNLLQQWIKEKMPFDRQYVLHKVASILISMKAGKKATVPGKRKIYKKGKPIVIQTGLRIPRGQLHEKTVYGAINQYDKGQKVMKIVTRYKMGVGSMGYVFNGKETCDVIKKKNRYEIVDGIQKALDYIVDKHIREIVKARMNEAFPEGETYLTEAEKALAEGKAYDGKARCQKALDQLRTLSERPLYADK

SEQ ID NO: 1219 - protein, 1217 aa, unidentified
  REGION 1..1217: note = Description of Unknown: uncultivated organism
  REGION 1..1217: note = MG16-138 effector
MKRILGLDLGVGSIGWSLIQADEDGNPQSIIDIGCRIVPLSPDDTNEFSSGNAISKNRKRAQKRSVRKGYDRYQLRRQNLTDELRGLGMLPDERLIKLPILALWQLRANAATPGKRLTLPEIGRIFYHINQKRGYLHSKSDEEDKNQRDYVQAINNRYATIKAEGKTIGQYFAQKLADSEVTTDKGKVYAFRIKEQVFPRQAYQEEFDQIIACQRIHYPEVLTDDVIHRLRDEIIFYQRPLKSCKHLVSLCEFAMREYKTTDGRSIQAGPKVTPRSSPLFQVCKIWESVNNIELKNRDGESYPFSAEERLKLFNFLDNNEKMTVTDLKRILGLGTKDKWWGGKAIGKGLQGNITKMALKKALPYHEELLSFNLKSIESRHIDTETGDILLEIAPDFEQEPLYRLWHIIYSMKDPDEMASALNRQFGIDDPTILTNLTRIDFVKAGYGNKSARFIRQILPYLQKGMKYSEACDYISINHSNSLTTAENNSRELLPHMQQLQKNELRQPVIEKILNQMVNVVNALLDKYGSIDEVRVELGRELKQSRDERNSAFLNNNKRERDNKAISERIQEMGIRASRSRILKYRLWEEAKHICFYCGQTVGVKEFLEGTDVEIEHIIPRSLFFDDSFSNKVCACRKCNAEKGNRTAYDYMKQKSDNDFADYTRRIEDAYEKKEISKTKRERLLTTAKDIPEDFIDRQLRQSQYISKKAVEMLKQVCRNVWTTSGSVTDFIRHQWGYDNILHDLNFKRYKDAGQTEIIISDHLGQVHQEERIKNWTKRLDHRHHAIDALTIASTKQSYIQRLNHLNSSRDKMFQELEAQSKEVKEKYSLLESWMRCRPHIPVSVVSQAIDGILVSFKTGKRITTPGKRFIYKSGKREVAQYGIAVPRGALSEESVYGSISCLEANVPVKKLFEHPEIIFKPYIREKVEKRINEFSGDWKAALKSLKKTPIFLRADGTEPLEYATCWKREYVIRYPLASLLKKDLPFIVDRNIRRLVSERINAVGEKDAFKEPLFADKADINPIRSVRLFTGLTQDSLSPVKYFNGYPIGYSKPGNNHHFCYYRNKNGELFEHIVSFWHAVDRKKYGIPVIIEDTDVLWEDMANRDLPQDFLKNLPPAGLKLEVSLQQNEMFVLGMPEEDFQNAIKENDQRALNKYLFRVQKISGQYNVFRRNTDTGKDEDSKAQSLGQFVRISSVRGWIHCCPHKVRISVLGEISEI

SEQ ID NO: 1220 - protein, 930 aa, unidentified
  REGION 1..930: note = Description of Unknown: uncultivated organism with predicted taxonomy: Bacteroidales
  REGION 1..930: note = MG16-139 effector
MKKKILGLDLGVGSIGWALIKTDDNQPKQIIGMGSRIVPISKDDNDQFSKGQAISKNADRTARRTTRKGYDRYQLRRALLTDVLRQNGMLPERMDEHVIDLWKLRSDAATEGHQLTLPQIGRVLYHINQKRGYKHAKADDNGDSKQTKYVEAVNQRYTDLQAEGLTIGQHFHLELLHSKVEGASGPYYTFRIKDKVFPRAAYIAEFDQIMRVQRVYYPEILTDELIDVLRNRIIFYQRPLKSCKHMVSLCEFEMRPYKTKDGRIVYGGPKCAPRTSPLAQFCAMWETANNITLTNRNNERYEFTLDARAQIVKHLCEHAVLKLTDLYKILGITKKDGWWGGKAIGKGIKGNATLNQLRDALDGKYGEWLEMPVEIEDKVNDATGEVVKTVSAEVEHAPLFQLWHAVYSLQNADELAKTLREKFQITDEAVIEALCKIDFVKPGYANKSHKFIRRILPYLMDGYMYNEACAKVGINHSNSMTAAERDARPLAERIELLQKNALRQPVIEKIINQMINLVNRLQQEYGPIDEARVELARELKQSRDERESAYKAINKNERENSTIANRILEDYGIRPSRSRIQKYRMWEESKQRCFYCGKMIDVKQFLSGADVEIEHIVPRSILFDDSYSNKVCACRECNQEKGNLTAMEYMEGKPTGEFEAYKQRVDEAFSEHRISKTKRDHLLWRRADIPQDFIERQLRQSQYIAVKAVEILQQGIRRVWTSGGSVTDFLRHQWGYDEILHTLNLPRYKQVDEMTEWVHYEHAGQEHEVERIKNWTKRLDHRHHAIDALTVALTQQSMIQRLNTLEASHDEMEKQVKEANTPYKEKKSILEKWVTEQPHFEVSEVTDKVDSILVSFRAGKRVTTPARRAIYQGGKRTIVQTGIQVPRGALTEETIYGKSGDKFVVKYPLDHPSMKPENIVDPTIRALVEK

SEQ ID NO: 1221 - protein, 830 aa, unidentified
  REGION 1..830: note = Description of Unknown: uncultivated organism with predicted taxonomy: Fibrobacter
  REGION 1..830: note = MG16-140 effector
MKKILGLDLGVSSIGWSVISVDKNGDPSEILGMGSRIVPLSTDDANEFSTGNAISKNQKRTQKRTARKGYDRYQLRRENLTAELRKHQMLPDERLIKLPVLDLWTLRANAATEGCKLSLPEIGRVLYHINQKRGYKHAKADEAGDKKQTEYIENVNKRFAMIKELGLTIGQFFANKLKESEVVSEKGTFYTYRTKEQVFPRGAYIAEFDQIIEVQRKFYPQVFTDEFINRLRNEIIFYQRNLKSCKHLVSLCEFEKREYKNKDGKIVFDGPKVAPRTSPLFQICRIWEFVNNIRLENGYKEARVLSQEERLKVVDFLDNHEKMTAKDFTKLLRLDKNDEWDLKRYFGKNGVQGNTTKAQLVTALANIPNACEFLRFNLALENSNYVNESTGEILKVISSNFQNEPLYMLWHTVYSLSDKEELKNALNKKYGITDESVLNNLFKIDFIKPGSGNKSAKAIRRILPFLQDGLVYSDACAEAGYNHSNSLTKSENEARTLLSRLPQIKKNELRQPVIEKILNQMVNVVNAIYDEYGQIDEIRVELARELKQSKDERNTTASNIAKRERENKNIEAKIQEFGIRSSRNRIQKYRLWEESEQKCFYCGQPVQAKEFLSGLDVEVEHVIPKSLLFDDSFANKVCACRKCNAAKGNKTAYDFMKGQKEEVFDAYVKRVNDFYKDGKISKTKKERLLTTQSEIPSDFIERQLRQTQYIAKKALEMLKEICYNVYATSGSVTDFIRRTWGYDEILHQLNFDRYKKGGLTELREYEHKGETHTEERIQDWSKRLDHRHHAIDALVIAMTRQSIIQRLNHLNTERDAMFQEVEKQRKDWKN

SEQ ID NO: 1222 - protein, 797 aa, unidentified
  REGION 1..797: note = Description of Unknown: uncultivated organism with predicted taxonomy: Bacteroidales
  REGION 1..797: note = MG16-141 effector
MKKHILGLDLGVGSIGWALIETEDDQPKQIIGMGSRIVPISKDDSDQFSKGQAISKNADRTARRTTRKGYDRYQLRRALLTQVLRQNGMLPERMDENVIDLWKLRSGAATEGHQLTLPQIGRVLYHINQKRGYKHAKADDNGDSKQTKYVEAVNQRYKEIQEAKQTIGQHFYLELLRSKVESGSGPYYTFRIKDKVFPRAAYIAEFDQIMKVQRAYYPDVLTDELIDTLRNRIIFYQRPLKSCKHLVSLCEFEMKPYKTKDGKIVYGGPKCAPRTSPLAQFCAMWETANNITLTNRNNEQYDFSLEERRQIVEHLCTHEALKLTDLYKILGITKKDGWYGGKAIGKGIKGNATLNQLRKALNGKYGEWLEMPIERVDVVDNETAEVFWQVSPKVEETPLFKLWHAVYSIQDADELAKTLRNKFGIDDQDVIEALCKIDFVKPGYANKSHKFIRRLLPYLMEGMMYSEACARIGINHSNSMTAAERDARPLAERIELLQKNALRQPVIEKILNQMINLVNRLQQEYGPIDEARVELARELKQSREEREGAYRRNNQNERLNKEIAAKIEEMGIRPSRSRIQKYKMWEESNHRCMYCGKTVSLAEFLNGADVEIEHIIPRSILFDDSFSNKVCACRECNHEKGNMTALDYLETKPAAEVEAYKQRVDEAFKEGRISKTKRDHLLWHKSDIPTDFIDRQLRQSQYIAVKAVEILQQGIRQVWTSGGSVTDFLRHQWGYDEILHTLNLPRYRKVEDLTEIVHYEHAGQEHDEERIKNWSKRIDHRHHAIDALTVALTRQAY

SEQ ID NO: 1223 - protein, 1154 aa, unidentified
  REGION 1..1154: note = Description of Unknown: uncultivated organism with predicted taxonomy: Bacteroidales
  REGION 1..1154: note = MG16-142 effector
MKKKILGLDLGVGSIGWALIETENDQPKQIIGMGSRIVPISKDDNDQFSKGQAISKNADRTARRTTRKGYDRYQLRRSLLTQVLRQNGMLPERMDENVIDLWKLRSDAASEGHQLTLAQIGRVLYHINQKRGYKHAKADNNGDSKQTKYVEAVNQRYKEIQESKQTIGQHFYLELLRSKVDGVRGSYYTFRIKDKVFPRAAYMDEFDQIMRVQRDYYPDVLTEELIDTLRNRIIFYQRPLKSCKHLVGLCEFEMRPYKTQEGNIVYSGPRCAPRTSPLAQLCAMWESVNNITLTNRNNERYEFSLEERQQIVEHLCTHEVLKITDLYKILDISKKDGWYGGKAIGKGLKGNTTLNQLRKALNGKYQEWLEMPIERVDDVDNTTAEVFWVVSPKVEETPLFKLWHAVYSLQDTDELAKTLCSKFGITDQEVIEALCKIDFVKPGYANKSHKFIRRLLPYLMKGMMYSEACERIGINHSNSMTAAERNARPLAEHIELLQKNALRQPVIEKILNQMINLVNRLQQEYGPIDEARVELARELKQSREERESAYKAINKNEHENAERAAKIAEFGIRPSRSRVQKYKMWEESQHRCFYCGKMVDLAQFLNGADVEIEHIVPRSILFDDSFSNKVCACRECNKEKGNLTAMEYIETKPVGEQEAYKQRVAEAFDAHRISKTKRDHLLWRRADIPQDFIERQLRQSQYIAVKAVEILQKGIRTVWTSGGSVTDFLRHQWGYDEILHTLNLPRYRQVDELTEMVHYEHAGQEHDEERIKNWTKRIDHRHHAIDALTVALTRQSYIQRLNTLEASHDIMEKQVKEAGTQYNEKKSILEKWVAEQPHFPVADVTENVDGILVSFRAGKRVTTPARRAIYKGGKRTIVQTGLQVPRGSLTEETVYGRLEDKFVVKYPLDHPSMKPENIVDPTIRALVQKRVEEKGKDAFKEPIYSAEGMKIKSVRCYTSLSENGVVPVKFDEKGQPIGFAKKGNNHHVAIYQDKDGQYQEMVVSFWDAVERKKYGVPSVITNPRELWNSIMDIDLPQEFLLKLPQDDWQYVLSMQENEMFVLGMEEDEFHDALERHDYCSLNKHLYRVQKISHGEYVLRYHTETKVDDKYKGVEKGRDASLKLGALVSIRSFGSLFSKFPHKVKIDIMGRITKA

SEQ ID NO: 1224 - protein, 1048 aa, unidentified
  REGION 1..1048: note = Description of Unknown: uncultivated organism with predicted taxonomy: Deminuibacter soli
  REGION 1..1048: note = MG16-143 effector
YCDLLQICIGKYDVFFRLFKQMRKILGLDLGVGSIGWSLIETDANDNPVAILGIGSRIVPLSTDDANEFSSGNAISKNQKRTQKRTQRKGYDRYQLRRALLTEKLRESGMLPDERLIKLPVLDLWQLRANAATPGKQLELKEIGRVLYHINQKRGYRHSRYDDGDEKSQREYVQQVNQRFRDIRDEGVTIGQHFANKLAENEVTTPKGKFYTYRIKEQVFPREAYVEEFDRIMDCQRGFYPDILTDSTIGVIRDEIIFYQRPLKSCKHLVSVCEFAMREYKTSDGKSVLSGPKVAPRSSPLFQVCKIWESINNLSLKNRSGQVYRFSDEDRQKMFDFLDNHDRMTVTDLYKLLSISKKDGWWGGKAIGKGLQGNTTKAALAKVLGSRSELLRFQLETIDSKRIDTETGEILKVISPSFEKEPLYRLWHIVYSMHERSEVAAALERQFGITDPETVDKLFSIDFIKAGYGNKSARFIREILPYLQVGMQYSDACNYIGINHSNSLTTEDNASRVLLDKLPQLKKNELRQPVIEKILNQMVAVVNALLSQFGPIDEIRVELARELKQSRDERNDAFLKNNKRERENKVIEERIREYGITPSRSRIQKYRLWEESNHLCFYCGQPVGAAEFLSGSGVEIEHIIPRSLLFDDSYANKVCSCRKCNAEKGNSTAYDYMKAKPEGDFEDYLKRIEKFFSEKRISKSKREKLLTPASEIPQDFIDRQLRQSQYIAKKAVDMLKQVCRNVWTTSGSVTDFLRHNWGYDQILHDLNLPRYKEGGMTEMVHYEHNGQEHDEERIIGWTKRLDHRHHAIDALTIASTRQSYIQRLNTLYASRDAMHAEIKKQSAHWQEKHSLLEEWTKQRPHLPVSVVRDSVDGILVSFKPGKRVATPGKRYTYKGKKELIQDGLLIPRGALSEESVYGQITTLEEHVPVKRLFEDPSLIFKPYIRHLVEQRIEEFHGDWKKARLSIGKKPIWLDEGETVALEYATCWKKEYVIRYPVSSLKAKDVNSIVDRHIREIVRKRIDEVGEKDAFKTPLFSDATQMIPVNGIR

SEQ ID NO: 1225 - protein, 1244 aa, unidentified
  REGION 1..1244: note = Description of Unknown: uncultivated organism with predicted taxonomy: Bacteroidales
  REGION 1..1244: note = MG16-144 effector
MKRILGLDLGTTSIGWAVINVDDNLKPVSIESMGSRIVPLSSDDTNEFTKGNAISKNQSRTERRTSRKRYDRYQLRRKYLTAELRKLKMLPDERLIKLPTLELWELRANAASKGHQLTLPELGRVLYHINQKRGYKHAKSDDSSDTKQKAYVAEVNARYSMIKEKNQTIGQYFAEKLKESEVVTPKGKFYTYRTKEQVFPRKAYEAEFDQIMECQKVFYPNLLTEKEISKLRNEIIFYQRNLKSCKHLVSVCDFEKKEYKNKEGKIVFGGPKVAPKSSPLFQICKIWEEVNNLTLKNRKNEELYISLEQRQAMVDFLDTHEKMTLNDMYTILGISKKDGWWGGKAIGRGLQGNTTKIALMNALGNSENVKSLFQFNLHKIDSQLVDEVTGEIIQIIDPKLEKEPLYDLWHTIYSISDKEEFAKALKKKYNITDETIINGLYSIDFVKPGFGNKSAKSIRRILPYLQEGLKYSDACEYAGFRHSESLSKAENETRTLLDELPHINKNELRQPIVEKILNQMINVVNALMNEYGKFDSIRVELARELKQSKDERNTTFLQNEAMQRLNESIAKRLVSENINPTKRIIDKYKFIFPTKGCFDKRTGKFITKNFESLSTVNRCIYCGQSFSLSEALNGDGYEIEHILPRDLICDNSQNNKVLSCRKCNSIKSNKTAFDYMRTQDKNAFEAYLERVESWYKDGIISPAKRERLLLSHEDYLERKRIGKETDEDKKYWEEFVSRQAGETQYISRESIRILKQCCRNVNATSGSITATLRHLWGYDEVLHQLNFERFKNAGLTETVTWESNHGKNKHSKEQIIDWSKRVDHRHHAIDALVVACTQQGFIQRINTLNADETKDLMKRQIETVGVKYDEKKILLDKYLTSLAPFKTQTVANAASNILVSFKPGKKTATTGKRIEYRNGKKHVVQKGIIIPRGALHEEGVYGEIEINGKKHIVKKYKLGKGAQGFVFTGKETYTEKINKKTGEIQIEDKIKNVLDSIVDGSIRAKVLQRLNQGFEEGKDYRNDVKKALENLNDLDKNPIYADDNNTIPIRTVRCITGLSAIVPIKYNDQGKSIGFVKPGNNHHIAIYQDNEGNLREHSVTFWHAVERKKYGVPVIIDNPIQVWDSIKDRQLPESFLEKLPEVNWTYKISLQQNEMFILGMEDDAYDYAIRNQDYSTLGQYLYKVQNVSEKQYRFSLHNMTKFDIKRMNKADKCFYNIQSIDALFRLHPHKVHISLIGKIKEIQE

SEQ ID NO: 1226 - protein, 1266 aa, unidentified
  REGION 1..1266: note = Description of Unknown: uncultivated organism with predicted taxonomy: Bacteroides
  REGION 1..1266: note = MG16-145 effector
PFTQIFLYFFAIFAKNKKQIIQYTMKKILGLDLGTNSIGWAVVNAEENWKPVSIESMGSRIIPLSSDDTNEFTKGNAITKNQSRTEKRTARKRYDRYQLRREYLTATLRKLKMLPDESLIKLPILELWELRGKAACKGQQLSLPELGRVLYHINQKRGYKHAKSDESSDTKQKAYVAEVNARYAMIKKRNQTIGQYFAEKLKESEIETPKGKFYTYRTKEQVFPRKAYEAEFDQIMACQKVFYPDILTEKEINKLRNEIIFYQRRLKSCKHLVSICDFEKQEYKNKEGKIVFGGPKVAPKSSPLFQICKIWEEVNNLTLKNRKNDELFISLEQRQAMVDFLETHEKLTLSDMYAILGISKKDGWWGGKAIGRGLQGNTTKIALKKALGDFENAERLLQFNLYKTDSNLVDDTTGEIIQIIDSKLEKEPLYDLWHTIYSISDKEEFGKALKRKYNITDEDIINRLYSIDFVKPGFGNKSTKAMRRILPYLQEGLKYSDACEYAGFKHSESLTKSENEARPLLDMLPSINKNELRQPIVEKILNQMINVVNALMNEYGKFDSIRVELARELKQSKDERNTTFLQNEAMQRLNESITKRLESENIKPTKRIIEKYKFIFPTKGCFDKRTGKFITKNFEDLSTINYCIYCGQPFSLSAALNGDGYEVEHILPRDLICDNSQNNKVLSCRRCNSIKSNKTAFDFMRSQEKNAFEAYLERVETWYQDGIISPGKRERLLLSHEDYLERKRLGKETDEDKKYWEEFVSRQARETQYISRESIRILKQCCRNVNATSGAVTAILRHLWGYDEILHQLNFERYKNAGLTETVIWESNHGKNKHSREQIVDWSKRVDHRHHAIDALVVACTQQGFIQRINTLNADETKGLMKKQIETAGLKYVEKMALRDKYLISLTPFKTQAVANAVNNILVSFKPGKRTATTGKRIEYKEGKRHIVQKGIIIPRGPLHEEGVYGSIKINGEKQIVKKYKLGKGAQGFVFTGKETYEEKVNKKTGEIQIEDKIKNVLDSIVDGNIRTKVLQRLNQGFEEGKDYRNDVKKALENLNNLDKNPIYADDNKTIPIHTVRCITGLSAIVPIKYNNQGKPIGFVKPGNNHHIAIYQDEEGNLKEHSVTFWHAVERKKYGIPVIIENPTKLWDEIKDKQLPESFLEKLPEVNWTFKVSLQQNEMFILGMEDDTYDVAMGNKDFTLISKFLYRVQSISESDYWFRLHIESQNDKTPQAKQAKKFHRIKSLKGFYQLHPHKVHISVIGKIKEL

SEQ ID NO: 1227 - protein, 1218 aa, unidentified
  REGION 1..1218: note = Description of Unknown: uncultivated organism with predicted taxonomy: Bacteroidetes
  REGION 1..1218: note = MG16-146 effector
MKKILGLDLGVGSIGWSVIQADEEGNPASLLDIGCRIVPLSTDDANEFSSGNAISKNQMRTQKRTTRKGYDRYQLRRQYLTEELRKLGMLPNERLIKLPVLDLWQLRAYAATPGKKLSLPEIGRVLYHINQKRGYQHSKSDDSDDKSQRDYVQTINNRFATIKTEKKTIGQFFVERLAESEVLTDKGKFYTFRIKEQVFPRKAYVEEFDQIISCQKVYYPDILTDDEIHILRDEIIFYQRPLKSCKHLISRCKFALREYKTADGESIIAGPNVAPRTSPLFQVCKIWESVNNIELKNRDGDSYQFSMEDRQKLFDFLDNNEKLTVTDLKKVLGLNSKDKWWGGKAIGKGLQGNTTKIAIKKALQGHLELLSFNLKSIDSQHIDTQTGEILHEISPDFEKEPLYRLWHIVYSMADPEEMGAAIKRQFGIEDPEILSRLSKIDFVKAGYGNKSARFIRQILPYLQKGLKYSEACDYISINHSNSLTTAENNARKLLSHIPQLQKNELRQPVIEKILNQMVNVVNALIDKHGGIDEVRVELARELKQSKDERNSTFLNNNKRERENKIIEERIAEMGIRPSRSRILKYRLWEEAKHICFYCGQPVGVKEFLEGAEVEIEHIIPRSLFFDDSFANKVCSCRKCNAEKGNRTAFDYMKQKGENEFSDYSRRIEEAFEKKEISKVKRERLLTSAKDIPEDFIDRQLRQSQYISKKAVEMLKQVCRNVWTTSGSVTDFVRHHWGYDNIIHDLNFQRNKNAGQTAIITYEHRGQTHQEERIKEWSKRLDHRHHAIDALTIASTKQSYIQRLNHLNTSRDAMFQELEAQSEEFKEKYSLLERWIKERPHIPVSEVTEAVDGILVSFKAGKRVSTPGKRYTYKKGKRSVAQTGIVVPRGALSEESIYGAISCLEEHVPVKKLFEHPEIIFKSYIREKVENRIREFGGNWKAALQSLKKTPIYLGIDETKPLEYASCWKKEYVIRYPLSSIRKKDVDYIVDQHIRHLVSERIAAVGEKDAFREPLYADKAGKMPIKSVRLFTGLTDSSVSPVKYSHGLPIGFSKPGNNHHYCFYRNRDGELVGHLVSFWHAVERKKYGIPVIIKDTDRLWEEVANRDLPEDFLKNLPPSGLTLEVSLQQNEMFILGMPEEDYQRAIEKSSKNDLNKYLYRVQKISGQYNVFRRNTDTGKEEDSIAQSLGQFIRISSTKGWISYNPHKIHIDILGDICEL

SEQ ID NO: 1228 - protein, 1160 aa, unidentified
  REGION 1..1160: note = Description of Unknown: uncultivated organism with predicted taxonomy: Bacteroidales
  REGION 1..1160: note = MG16-147 effector
MKKKILGLDLGVGSIGWALIETEDNQPKQILGMGSRIVPISKDDNDQFSKGQAITKNADRTARRTARKGYNRYQMRRALLTQALRNNNMLPERMDENVIDLWKLRSDAATEGHQLTLPQIGRVLYHINQKRGYKHSKADENGDSKQTKYVEAVNQRFKDIQEAHQTIGQRFYLELLRTRVHREKGDYYTYRIKDQVFPRAAYIAEFDQIMHVQRVYYPEVLTDEFIDTLRNRIIFYQRPLKSCKHLVSLCEFEMRPYKTKDGKIVYGGPKCAPRTSPLAQLCAMWETANNITLTNRNNERFEFTLEQRRQIVDFLCHNKEMKVTHLQKILGISKKDGWYGGKAIGKGIKGNATLNQLRETLQGKYDQWLEMPIKHVDVVDATTSEVFWAVSPEVEETPLFKLWHAVYSLQNADELAKTLREKFQIFDEAVIEALCKIDFVKPGYANKSHKFIRRLLPYLMEGMMYSEACERININHSNSMTREEREQRPLSARIQLLQKNQLRQPVVEKVLNQMINIVNSLKDQYGEIDEARVELARELKQSREERESAYRAMGQNERRNKEIAEKISEFGIRPSRSRIQKYKMWEESMHQCFYCGKTIDLSEFLNGADVEIEHIIPRSILFDDSFSNKVCACRRCNQEKGNQTAMEYMETKSAAEQEAYKQRVDEAFTAKRISKTKRDHLLWRKADIPADFIERQLRQSQYIAVKAVEVLQDGIRHVWTSGGSVTDFLRHQWGYDEILHTLNLPRYRQVEGLTEYVEFEHAGQKHTEERIKNWSKRIDHRHHAIDALTVALTQQGYIQRLNTLEASHDLMEKQVKEAGTHYNEKKSILEKWINEQPHFSVEDVTNVVKGILVSFRAGKRVTTPARRAIYKGGKRVIAQRGIEVPRGALTKDTIYGKQGESYVVKYPLTHQSMKADNIVDPTIRALVKARLAAYNNNANEAFKTPLYSAEGMEIKSVRCVARLTENGVIPIKYNKQGMAIGYAEKGNNHHVAIYKEKDKKTFDITVSFYDAVERKRYGVPVVITNPHEVWDSVLNKDLPQEFLAKLPNDNWQFILSMQENEMFVLGMEDDEFDDAIERQDYATLNKHLYRVQKIAHNDYWFRYHTETTVDDKYGDGEDNKVNLGWSVEMGKVCRIRSCDALFAKHPHKVKVDLLGHIHKA

SEQ ID NO: 1229 - protein, 1154 aa, unidentified
  REGION 1..1154: note = Description of Unknown: uncultivated organism with predicted taxonomy: Bacteroidales
  REGION 1..1154: note = MG16-148 effector
MKKKILGLDLGVGSIGWALIETEDNQPKQILGMGSRIVPISKDDGDQFSKGQAITKNADRTARRTARKGYNRYQMRRALLTQALRNNNMLPERMDENVIDLWKLRNDAATEGHQLSLPQIGRVLYHINQKRGYKHSKADENGDSKQTKYVEDVNKRYKDIQEAHQTIGQHFYLELLRSKIERANGPYYTYRIKDQVFPRAAYIAEFDQIMNVQRVYYPEILTDEFIDTLRNRIIFYQRPLKSCKHLVSLCEFEMRPYKAKDGKIVYGGPKCAPRTSPLAQLCAMWETANNITLTNRNNERYEFTLEQRRQIVDFLCHNKEMKVTHLQKILGISKKDGWYGGKAIGKGIKGNATLNQLREALQGKYDQWLEMPIKRIDVVDATTSEVFWAVSPEVEETPLFKLWHAVYSLQNADELTKTLREKFQITDEAVIEALCRIDFVKPGYANKSHKFIRRLLPYLMEGMMYSEACERININHSNSMTREEREQRPLSARIQLLQKNQLRQPVVEKVLNQMINIVNSLKDQYGEIDEARMELARELKQSRDERESAYKAMGQNERRNKEIAAKITEFGIRPSRSRIQKYKMWEESLHQCFYCGKTIDLSEFLNGADVEIEHIIPRSILFDDSFSNKVCACRRCNQEKGNQTAMEYMETKSAAEQEAYKQRVDEAFTAKRISKTKRDHLLWRKTDIPSDFIERQLRQSQYIAVKAVEVLQDGIRQVWTSGGSVTDFLRHQWGYDEILHTLNLPRYRQVEGLTEFVDFEHAGQKHTEERIKNWSKRIDHRHHAIDALTVALTQQGYIQRLNTLEASHDFMEKQVKEAGTKYNEKKSILEKWINEQPHFSVEDVTNAVDGILVSFRAGKRVTTPARRAIYKGGKRVIAQRGIEVPRGALTEETIYGKLGDKFTVKYPLDHPSMKPENIVDSTIRELVQKRVAERGKDAFKEPIYSAEGMKIKSVRCFTSLSENGVVPVKYDEAGRPIGYAKKGNNHHIAIYQDKDGQYQEMVVSFWNAVERKRYGVPVVITNPHEVWDSLLNKDLPQEFLAKLPNDNWQFILSMQENEMFVLGMENDEFNDAIERQDYATLNKHLYRVQKLSTHDYSFRYHTETKVDDKYEGAENGRNASMSLGALVPIRSCGSLFVQFPHKVKVDILGHIHKA

SEQ ID NO: 1230 - protein, 1007 aa, unidentified
  REGION 1..1007: note = Description of Unknown: uncultivated organism with predicted taxonomy: Bacteroidetes
  REGION 1..1007: note = MG16-149 effector
MKRILGLDLGTNSIGWAVVNTDENDKPVSIERMGSRIVPLTSDDTNEFTKGNAITKNQSRTEKRTARKGYDRYQLRREHLTTELRKLKMLPDEKLIKLPVLELWELRGKAASKGNQLTLSEIGRVLYHINQKRGYKHAKSDESADTKQKAYVAEVNARYAMIKERNQTIGQFFAEKLKENEIETSKGKFYTYRIKEQVFPRKAYEAEFDQIIECQKEFYPDILTNEEINRLRNEIIFYQRRLKSCKHLVSFCDFEKREYINKVGKVVYGGPKVAPKSSPLFQLCKIWEEVNNLTLRNRKNDELFITIEQRQAMVDFLDTHEKLTLSDMYSILGISKQDGWWGGKAIGRGLQGNTTKIALKKALGDFVNADTLLQFNLKQTDSNLVDEVTGEILQVIDPKLEKEPLYDLWHTIYSISDKEELTNALKKKYNIHDEDIINRLYAIDFVKSGFGNKSTKAMRRILPYLQQGLKYSDACEYAGFRHSDSLTKAENEARQLLEKLPPVQKNALHQPIVEKILNQMINVVNALMIEYGQFDSIRVELARELKQSKDERNVTFLQNEAMQRLNDSIANRLSSEGIKPTKRTIEKYKFIFPTKGCFDKRTGKFITKNFENLSTVNRCIYCGQPFSLSAALNGDGYEVEHILPRDLICDNSQSNKVLSCRKCNSIKSNKTAFDFMRSQGEHAFETYLERVESWYKDGIISPSKRERLLLSHEDYLERKKKGKITDIDKKYWEDFVSRQAGETQYISREAIRILKQCCRYVNATSGSITATLRHLWGYDEILHQLNFERYKQAGLTEIVTWESNHGKNKHSKEQIVDWSKRIDHRHHAIDALVVACTQQGFIQRINTLNADETKDLMKKQIESAGIKYEEKKVLLDKYLISLIPFKTQIVADAVNKILVSFKAGKKTATIGKRIEYKHGNKHIVQKGIIIPRGALHEEGVYGRIEINGKKEIVKKYKLGKGAQGFVFTGKETYAEKINKKTGEIQIEDKIKNVLDSIVDGNIRNKVL

SEQ ID NO: 1231 - protein, 1250 aa, unidentified
  REGION 1..1250: note = Description of Unknown: uncultivated organism with predicted taxonomy: Bacteroidales
  REGION 1..1250: note = MG16-150 effector
MKRILGLDLGTTSVGWALITVDESNNPIDIQDIGVRIVPLAENEGDKFTKGQDITVNADRTLARGIRRNYDRYQMRRRALTEKMRQLNMLPDEHLIKLPVLDLWQLRANAAKQKISLCELGRVLYHLNQRRGYKHARTDSNDSKQKDYVQKINNRYSLLQQLGLTIGQYFAQKLAETAITHNGKTFYVFRIKEQIYPRRAYEEEFDTIMTCQQLFYPTILTDEVINEIRNNIIYYQRDLRSCKHLVSICEFEKRSFYDENGEVKRNKKGEIVYSGPKVAPRTSPLFQVFKNWQSINNLHFHNRRNEDLFITLEQKTHIASIMDNKELLKLKDVHEVLGINNKSGWYCDKAIKAGIKGNTTKTAIIACLSTLPLSIINEIARFNLKTEKTNIVDEESGEIFVRISNNYQDEPLYRLWHIIYSIKDDEERFNAISKFLKDFGIEDDSITNALKDIDFVTPGYANLSAKAISKILPYMMEGLDYSDACEYVGYNHSDSLTKEENASRDLVDKIPLLKKNELRQPTVEKILNQTINIFNQINADLIQKGERIDEVRVELARELKQSKTEREEASAGIRKQQALNDNYANILKSESIRPTRNKILKYRLWTESNKTCFYCDQPVNFKEYLQTTEFEREHVIPKRLIFDDSFANQVCSCSKCNKEKGGLTALDFMRTKANLRNYLDKVDSMYQKHEISGKKRSHLLASYDDYLERKKEGKETKEDIMIWETPIDRQLRLSQYISRKAMEILRMGCREVVATSGSITELIRHTWGYDTILHELNCPDYKEAGLTEIIIDEKTKRQREVISDWTKRLDHRHHAIDALAVACTTHSIVQHINTLHASRKIMRDEIKTSRKEWKDNYLLQQWIKEKMPFDRHYVLHKIASILVSMKAGKKATVPGKRKIYKNGKPQIIQTGIKIPRGQLHEKTIYGAIKQWSGGEEHRKIVTRYKLGIGAAGYVFNGKESCDVIFDKKKKQYVMDDGIDKAIKYIVDKHIQDVIRGRLNEAFPANETYRSEAEKALAEGKTYDGKDRSKKALEQLRTLSEKPLYADKGKTIIIKSVRCFTGLSAVQPLRYNSQNEPIAFVLTKNNHHVAIYSDEKGEYKECVYTFWQAVERSKYRLPLIIKEPHELWREIMKRENDGEHFPDSIIEALPSPNWTFIESLQLNDMFVMDLDDETFEEYITNKNYEKLGKKLYRVQSLSTGDYCFRHHTDTTTDRTNAKLTKKFLRKSLMSFISSNPRKVQISLLGKINRDC

SEQ ID NO: 1232 - protein, 1242 aa, unidentified
  REGION 1..1242: note = Description of Unknown: uncultivated organism with predicted taxonomy: Prevotella
  REGION 1..1242: note = MG16-151 effector
MKKILGLDLGTNSIGWAVVNAEENWKPVSIESMGSRIIPLSSDDTNEFTKGNAITKNQSRTEKRTARKRYDRYQLRREYLTATLRKLKMLPDESLIKLPILELWELRGKAACKGQQLSLPELGRVLYHINQKRGYKHAKSDESSDTKQKAYVAEVNARYAMIKKRNQTIGQYFAEKLKESEIETPKGKFYTYRTKEQVFPRKAYEAEFDQIMACQKVFYPDILTEKEINKLRNEIIFYQRRLKSCKHLVSICDFEKQEYKNKEGKIVFGGPKVAPKSSPLFQICKIWEEVNNLTLKNRKNDELFISLEQRQAMVDFLETHEKLTLSDMYAILGISKKDGWWGGKAIGRGLQGNTTKIALKKALGDFENAERLLQFNLYKTDSNLVDDTTGEIIQIIDSKLEKEPLYDLWHTIYSISDKEEFGKALKRKYNITDEDIINRLYSIDFVKPGFGNKSTKAMRRILPYLQEGLKYSDACEYAGFKHSESLTKSEIEARPLLDMLPSINKNELRQPIVEKILNQMINVVNALMNEYGKFDSIRVELARELKQSKDERNTTFLQNEAMQRLNESITKRLESENIKPTKRIIEKYKFIFPTKGCFDKRTGKFITKNFEDLSTINYCIYCGQPFSLSAALNGDGYEVEHILPRDLICDNSQNNKVLSCRRCNSIKSNKTAFDFMRSQEKNAFEAYLERVETWYQDGIISPGKRERLLLSHEDYLERKRLGKETDEDKKYWEEFVSRQARETQYISRESIRILKQCCRNVNATSGAVTAILRHLWGYDEILHQLNFERYKNAGLTETVIWESNHGKNKHSREQIVDWSKRVDHRHHAIDALVVACTQQGFIQRINTLNADETKGLMKKQIETAGLKYVEKMALRDKYLISLTPFKTQAVANAVNNILVSFKPGKRTATTGKRIEYKEGKRHIVQKGIIIPRGPLHEEGVYGSIKINGEKQIVKKYKLGKGVQGFVFTGKETYEEKVNKKTGEIQIEDKIKNVLDSIVDGNIRTKVLQRLNQGFEEGKDYRNDVKKALGNLNNLDKNPIYADDNKTIPIHTVRCITGLSAIVPIRCNNQGKPIGFVKPGNNHHIAIYQDEEGNLKEHSVTFWHAVERKKYGIPVIIENPTKLWDEIKDKQLPESFMEKLPEVNWTFKVSLQQNEMFILGMEDDTYDVAMGNKDFTLISKFLYRVQSISESDYWFRLHIESQNDKTPQAKQAKKFHRIQSLKGFYQLHPHKVHISVIGKIKEL

SEQ ID NO: 1233 - protein, 1228 aa, unidentified
  REGION 1..1228: note = Description of Unknown: uncultivated organism with predicted taxonomy: Fibrobacter
  REGION 1..1228: note = MG16-152 effector
MKKILGLDLGVGSIGWSVISVDENGDPSEILGMGSRIIPLSTDDANEFSTGNAISKNQKRTQKRTARKGYDRFQLRRENLTAELRKLHMLPDEKLIKLPILELWTLRAKAATEGNKLSLPEIGRILYHINQKRGYKHAKADEAGDKQQTEYVAAVNSRYAMIKERSQTIGQYFAEKIRESEVISEKGKFYTFRTKEQVFPRKAYEEEFDKIIAVQRQYYPDVLTDSAINRLRNEIIFYQRNLKSCKHLVSLCEFEKHEYKNKEGKIVYDGPKVAPRTSPLAQICRIWEFVNNISLENGYKERRELSLEEKQKVVHFLDNNEKMTATDFSKLLGLGKKNEWDLKRYFGQNGVKGNETKVSLRNALKDFPNVEELLQFNLTLDNSNYVNESTGEVLKVISPSFQNEPLYDLWHTVYSLSDKDELSNALGKKFGISDKNAIQQLFKIDFVKPGFSNKSAKAVRRILPFLQQGLMYSEACAEAGYNHSNSLTKTENEARSLLDRLPQIKKNELRQPVVEKILNQMVNVVNAIYDDYGTIDEIRVELARELKQSKDERNTTFNNIAKRERENKGIAERIKNEYGLIPNRNKIEKYRLWEEAEQKCFYCGQTVNVKEFLSGFDVEVEHVIPKSLLFDDSYANKVCACRKCNANKGNKTAFDFMKSQSEDAFNNYVSRVEEYYKNGKISRTKHDRLLTPQSEIPSDFIERQLRQTQYISKKALEMLKEVCRNVYATSGSVTDFIRHTWGYDEILHQLNFDRYKQGGLTEAREFDNKGIIHKEERIQNWSKRLDHRHHAIDALVIAMTKQSIIQRLNHLNTERDAMFQEVDKQSAEWKNDFSLLQEWLRERKHFSTKDVADRVAEILISFKAGKRVATTGKRIKYEKGQKKVLQEGIVIPRGALSEESVYGKIKVIDPHKPLKFLFENPQTIVSPQIKTAVIDRLSKFGNDVKKAIASIKKEPLTLASDKVINDADCFKEEYVIKYPLEGFKAKDIQFVVDKHIREDVLPKRLAEFDGNEKNAFKDIDKNPIFADANHNIPIKHVRCFTGLSAVVPVKHDDAGKAIGFVKPGNNHHVAIYKDECGKLHESLVSFWNAVERKIKKVPVVITQPQDAWNIAENAHCSEEFTASLPNKTWTFVQSLQVNEMFVLGLEESAYQKAVREKDYNLINKHLYRVQSISKSDYFFRHHLETIIDDTSASKEMKRFYRFKSLGSFFKENPHKVQISVLGKLIVKE

SEQ ID NO: 1234 - protein, 1154 aa, unidentified
  REGION 1..1154: note = Description of Unknown: uncultivated organism with predicted taxonomy: Bacteroidales
  REGION 1..1154: note = MG16-153 effector
MKKHILGLDLGVGSIGWALIETEDDQPKQIIGMGSRIVPISKDDSDQFSKGQAISKNADRTARRTTRKGYDRYQLRRALLTKVLRQNRMLPERMDENVIDLWKLRSDAATEGHQLTLPQIGRVLYHINQKRGYKHAKADDNVDSKQTKYVEAVNQRYAEIQEAKQTVGQHFYLELLRSKVESGNGPYYTFRIKDKVFPRAAYIAEFDQIMKVQKVYYPEVLTDEFIDTLRNRIIFYQRPLKSCKHLVSLCEFEMKPYKTKDGKIVYGGPKCAPRTSPLAQLCAMWETVNNITLTNRNNERYEFSLDERKQLVEHLCTHEALKLTDLYKILGITQKDSWYGGKAIGKGIKGNATLNQLRKALNGKYSEWLEMPIERIDAVDDETAEVFWQVSPKVEETPLFKLWHAVYSIQDADELAKTLRNKFGIDDQEVIDALCKIDFVKPGYANKSHKFIRRLLPYLMDGMMYSEACARIGINHSNSMTAVERDARQLSDHIELLQKNALRQPVIEKILNQMINLVNRLQQEYGPIDEARVELARELKQSREEREGAYRRNNQNERLNKEIIAKIEEMGIRPSRSRIQKYKMWEENNHRCMYCGKTVSLAEFLNGADVEIEHIIPRSILFDDSFSNKVCACRECNHEKGNMTALDYIETKPAAEQEAYKQRVDEAFKEGRISKTKRDHLLWHRSEIPTDFIERQLRQSQYIAVKAVEILQQGIRQVWTSGGSVTDFLRHQWGYDEILHTLNLPRYRQVEDLTEMVHYEHAGQEHDEERIKNWSKRIDHRHHAIDALTVALTRQAYIQRLNTLEASHDFMEKQVKEAGTQYNEKKSILEKWILEQPHFSVDDVTQSVDSILVSFRAGKRVTTPARRAIYQGGKRTIVQTGLQVPRGALTEDHIYGKLGDKFVYKYALTDQSMHPENIVDPTIRAIVQKRVAERGKDAFKEPLYSAEGMEIKSVRCYTSLSENGVVPVKQDEHGRNIGYAKKGNNHHVAIYQDKDGQYQEMVVSFWDAVERKKYGVPVVITNPRAVWDSIMDKDMPQEFLEKLPNDDWTYILSMQENEMFVLGMEEDEYNDAIEAKDYAALNKHLYRIQNISSLFYIFRYHTETKVDDKYEGIANGRNASMSLGALIPIRSFKALFAQFPHKVKIDIMGRITRA

SEQ ID NO: 1235 - protein, 1154 aa, unidentified
  REGION 1..1154: note = Description of Unknown: uncultivated organism with predicted taxonomy: Bacteroidales
  REGION 1..1154: note = MG16-154 effector
MKKKILGLDLGVGSIGWALIETEDNQPKQILGMGSRIVPISKDDNDQFSKGQAITKNADRTARRTTRKGYNRYQMRRALLTQALRNNNMLPERMDENVIDLWKLRSDAATEGHQLTLPQIGRVLYHINQKRGYKHSKADENGDSKQTKYVEAVNQRFKDIQEAHQTIGQHFYLELLRTRVHRENGDYYTYRIKDQVFPRAAYIAEFDQIMNVQRAYYPEVLTDEFIDTLRNRIIFYQRPLKSCKHLVSLCEFEMRPYKTKDGKIVYGGPKCAPRTSPLAQLCAMWETANNITLTNRNNERFEFTLDQRRQIVDFLCHNKEMKVTHLQKILGISKKDGWYGGKAIGKGIKGNATLNQLREALQGKYDQWLEMPIKHIDVVDAATSEVFWAVNPEVEETPLFKLWHAVYSLQNAEELAKTLREKFQITDEAVIEALCKIDFVKPGYANKSHKFIRRLLPYLMEGMMYSEACERININHSNSMTREEREQRPLSARIQLLQKNQLRQPVVEKVLNQMINIVNSLKDQYGEIDEARVELARELKQSRDERESAYKAMGQNERRNKEIAAKIAEFGIRPSRSRIQKYKMWEESQHQCFYCGKTIDLSEFLNGADVEIEHIIPRSILFDDSFSNKVCACRRCNQEKGNQTAMEYMETKSAAEQETYKQRVDEAFTAKRISKTKRDHLLWRKADIPADFIERQLRQSQYIAVKAVEVLQDGIRQVWTSGGSVTDFLRHQWGYDEILHTLNLPRYRQVEGLTEFVDFEHAGQKHTEERIKNWSKRIDHRHHAIDALTVALTQQGYIQRLNTLEASHDFMEKQVKEAGTKYNEKKSILEKWINEQPHFSVEEVTNAVDGILVSFRAGKRVTTPARRAIYKGGKRVIAQRGIEVPRGALTEETIYGKLGDKFTVKYPLDHPSMKPENIVDPTIRALVQKRVAERGKDAFKEPLYSAEGMEIKSVRCFANVTDNSVVPIKYNEEGQPIGYAKKGNNHHVAIYTDKSGKPQESVVSFWDAVERKRYGVPVVITNPHEVWDNLLNTDFPEEFLAKLPEDDWQYLFSMQENEMFVLEMEDDEFYDAIERQDYASLNKHLYRVQKIRSGEYTFRYHTETKVDDKYEGVANGTNTSFQLGALVSIRGFSSLFAKHPHKVKIDLLGHIHKA

SEQ ID NO: 1236 - protein, 1217 aa, unidentified
  REGION 1..1217: note = Description of Unknown: uncultivated organism with predicted taxonomy: Bacteroidales
  REGION 1..1217: note = MG16-155 effector
MKRILGLDLGVGSIGWSLIQADDEGNPQSILDIGCRIVPLSPDDTNEFSSGNAISKNRKRTQKRTCRKGYDRYQQRRQNLTDELRGLGMLPDERLIKLPVLDLWQLRADAATPGKKLTLPEIGRILYHINQKRGYLHSKTDEDDKAQRDYVQAINNRFAHIKAEGKTIGQYLAGKLADSEVTTDKGQFYTFRIKEQVFPRKAYQEEFDQIIACQRIHYPDILTEEVIHRLSDEIIFYQRPLKSCKHLISQCEFAMREYKTADGKRIQAGPKVAPRSSPLFQVCKIWESVNNIEMKNRNGESYPFSEEERLKLFNFLDNNEKLTVTDLKRILGLSVKDKWWGGKAIGKGLQGNTTKIALKKALQGHEGLLSFHLKTVDSRHIDTETGVILQEIAPGFEKEPLYRLWHIIYSIKEPDEMASALKQQFGIEDPEVLSRLAKIDFVKAGYGNKSARFIRQILPYLQKGLKYSEACDYISINHSNSLTTAENKSRKLQPRMQQLQKNELRQPIIEKILNQMVNVVNALLDKHVSIDEVRVELARELKQSRDERNSTFLNNSKRERENKIISERIQEMGIRPSRNRIQKYRLWEESKHICFYCGQPVGVREFMEGVDVEIEHIIPRSLFFDDSFSNKVCACRKCNAEKGNRTAYDYVKKKGENEFADYTRRIEEAFEKKEISKTKRERLLTSAKDIPEDFIDRQLRQSQYISKKAVEMLKQVCRNVWTTSGSVTDFVRHQWGYDNILHDLNFKRYKDAGQTEIIVCDQMGQVRQVERIKDWTKRLDHRHHAIDALTIASTKQSYIQRLNHLNASRDQMFQELETQSNKVREEYSLLENWMKERPHIPVSVVSQIVDGILVSFKTGKRLTTPGKRYTYKGGKREIAQSGIIVPRGALSEDSVYGVISCLEENVPVKKLFEHPDIIFKPYIRTKVENRIKEYDGDWKAALKSLKKAPIFLGDGETKPLEYATCWKKEYVIRYPLASIQKKDVKYIVDQHIRQLVSERLNAVGEKDAFKEPLFSDKAEKNPIKSVRLFTGLTHNSLSPVKYLDGFPIGYSKPGNNHHFCYYRNENGELFEHIVSFWHAVDRKKYGIPVIIEDTDVLWDEMANRDLPQDFLKYLPPVGLKLEVSLQQNEMFILGMKDEDYERSIKEKDLRMLNQYLYRVQKISSQYIVFRRNTDTGKDEDSKAQSIGQFVRVSSIKGWIQCNPHKIRVNVLGEISEI

SEQ ID NO: 1237 - protein, 1154 aa, unidentified
  REGION 1..1154: note = Description of Unknown: uncultivated organism with predicted taxonomy: Bacteroidales
  REGION 1..1154: note = MG16-156 effector
MKKKILGLDLGVGSIGWALIETENDQPKQIIGMGSRIVPISKDDNDQFSKGQAISKNADRTARRTTRKGYDRYQLRRSLLTQVLRQNGMLPERMDENVIDLWKLRSDAASEGHQLTLAQIGRVLYHINQKRGYKHAKADNNGDSKQTKYVEAVNQRYKEIQESKQTIGQHFYLELLRSKVDGVRGPYYTFRIKDKVFPRAAYLDEFDQIMRVQRDYYPDVLTEELIDTLRNRIIFYQRPLKSCKHLVGLCEFEMRPYKTQEGNIVYSGPRCAPRTSPLAQLCAMWESVNNITLTNRNNERYEFSLEERQQIVEHLCTHEVLKITDLYKILDISKKDGWYGGKAIGKGLKGNTTLNQLRKAMNGKYQEWLEMPIERVDDVDNTTAEVFWVVSPKVEETPLFKLWHAVYSLQDTDELAKTLCSKFGITDQEVIEALCKIDFVKPGYANKSHKFIRRLLPYLMKGMMYSEACERIGINHSNSMTAAERNARPLAEHIELLQKNALRQPVIEKILNQMINLVNRLQQEYGPIDEARVELARELKQSREERESAYKAINKNERENAERAAKIAEFGIRPSRSRVQKYKMWEESQHRCFYCGKMVDLAQFLNGADVEIEHIVPRSILFDDSFSNKVCACRECNKEKGNLTAMEYIETKPVGEQEAYKQRVAEAFDAHRISKTKRDHLLWRRADIPQDFIERQLRQSQYIAVKAVEILQKGIRTVWTSGGSVTDFLRHQWGYDEILHTLNLPRYRQVDELTEMVHYEHAGQEHDEERIKNWTKRIDHRHHAIDALTVALTRQSYIQRLNTLEASHDIMEKQVKEAGTQYNEKKSILEKWVAEQPHFPVADVTENVDGILVSFRAGKRVTTPARRAIYKGGKRTIVQTGLQVPRGSLTEETVYGRLEDKFVVKYPLDHPSMKPENIVDPTIRALVQKRVEEKGKDAFKEPIYSAEGMEIKSVRCYTSLSENGVVPVKFDEKGQPIGFAKKGNNHHVAIYQDKDGQYQEMVVSFWDAVERKKYGVPSVITNPRELWNSIMDKDLPQEFLLKLPQDDWQYVLSMQENEMFVLGMEEDEFHDALERHDYCSLNKHLYRVQKISHGEYVLRYHTETKVDDKYKGVEKGRDASLKLGALVSIRSFGSLFSKFPHKVKIDIMGRITKA

SEQ ID NO: 1238 - protein, 1223 aa, unidentified
  REGION 1..1223: note = Description of Unknown: uncultivated organism with predicted taxonomy: Fibrobacter
  REGION 1..1223: note = MG16-157 effector
MKKILGLDLGVSSIGWSVISVDDNGDPSDILGMGSRIVPLSTDDANEFSTGNAISKNQKRTQKRTARKGYDRYQLRRENLTVELRKHKMLPDEHLIKLPVLKLWTLRASAATEGHQLTLPEIGRVLYHINQKRGYKHAKADEAGDKKQTDYVAAVNQRFAMIKERGQTIGQYFAEKLKENEVVTEKGKFYTYRTKEQVFPRGAYIAEFDQIITVQRKFYPQILTEEFINRLRNEIIFYQRNLKSCKHLVSICEFEKHEYKNKEGKTVFDGPKVAPRTSPLFQICRIWEFVNNIRLENGYKEARELTQEERLKVVEFLDNHEKMTAKDFSKLLKLNKDNEWDLKKYFGKNGIQGNTTKTKLATAIANVPNANDLLRFDLTLENSNFVNEATGEVLKVISSDFQNEPLYMLWHTVYSLSDKDELKSSLEKKYHITDESIVDNLFRIDFIKPGFGNKSAKAIRRILPFLQEGLVYSEACAEAGYNHSNSLTKTENEARTLLARLPQIKRNELRQPVIEKILNQMVNVVNAIYDEYGQIDEIRVELARELKQSKDERKATAANIAKRERENKAIAAKIEEFGIRPSRNRIQKYRLWEESEQKCFYCGQPVDAREFLSGLDVEVEHIIPKSLLFDDSFANKVCACRKCNAAKGNRTAFDYMKSQSSNAFDAYIKRVNDFYKDGKISKTKNERLLTTQSEIPSDFIERQLRQTQYIAKKALEMLKEVCYNVYATSGSVTDFIRHTWGYDEILHQLNFDRYKKGGLTELREFDHKGATHTEERIQNWSKRLDHRHHAIDALVIAMTRQSIIQRLNHLNTERDAMFQEVEKQSKEWKNDYSLLQEWLRERKHFSTDEVAQKVSDILASFKAGKRVATIGKRIKYEQGKKKALQTGIVIPRGPLSEESVYGKIKVLDPSKPIKFLFENPQSIISAEIRTAITNRLSKFENDIKKAIQSLKDDPIILANGKNLETADCYKEEYVIKYSLNGFKAKDIESVVDGHIKEILYKRLEEFNGNEKEAFKDIENKPIFADSAHKIPIRNVRCFTGLSAVVPVKQDNNGNNIGFVKPGNNHHIAIYKDENGNLQESVVTFWHAVERKKYGLPIIITNPAEVWEIAKAKDCPSEFLACLPNEKWSFVQSLQINEMFIMGLDDETYEKTLSEHNYTLINQHLYRVQKLTSNDYFLRFHLETKIDDSAEAKQMGKVLRKSLKTFIQDNPHKVKVSVLGKLIT

SEQ ID NO: 1239 - protein, 1217 aa, unidentified
  REGION 1..1217: note = Description of Unknown: uncultivated organism with predicted taxonomy: Bacteroidetes
  REGION 1..1217: note = MG16-158 effector
MRKILGLDLGVGSIGWSLIETDTKDNPVAILGMGSRIVPLSTDDSNEFSSGNAISKNQKRTQKRTQRKGYDRYQLRRALLTEKMRELGMLSDERLIKLPVLELWQLRANAATPGKQLELKEIGRVLYHINQKRGYKHSRSDDGDEKSQREYVQQVNQRFRDIRDEGLTIGQHFANKLAENEVITPKGKFYTYRIKEQVFPREAYIEEFDRIMDCQQVFYPDILTDTIIREIRNEIIFYQRPLKSCKHLVSVCEFAMREYKTSDGKSILSGPKVAPRSSPLFQVCKIWESVNNLTLKNRSGQVYHFSDEQRQRMFDFLDNHERMTVTDLYKLLNISKKDGWWGGKSIGKGLQGNITKAALAKALSNHRDLLRFQLETIDSKRIDTETGEILKVISSSFEKEPLYSLWHIVYSMHERSEVAAALERQFGITDPDTIDRLFAIDFIKAGYGNKSARFIREILPYLQAGMQYSDACNYIGINHSNSLTTEENANRALLDKLPQLKKNELRQPVIEKILNQMVAVVNALLSRFGPIDEIRVELARELKQSRDERNNAFLNNNKRERENKVLEERIREYGISPSRSRIQKYRLWEESNHLCFYCGQPVGAAEFLSGSGVEIEHIIPRSLLFDDSYANKVCSCRKCNAEKGNSTAYDYMKAKPEGDFEDYLKRIETFFSEKRISKAKRDKLLTPATDIPQDFIDRQLRQSQYISRKAVDMLKLVCRNVWTTSGSVTDFLRHNWGYDQILHDLNLPRYKEGGMTEVVHYEHNGQEHDEERIIGWTKRMDHRHHAIDALTIACTRQSYIQRLNTLNASRDAMHAEIEKQNAYWQEKHSLLEEWTRQRPHLPVSVVRDYVDGILVSFKPGKKVATPGKRYTYNGKKELAQDGLLIPRGALSEESVYGQITSIVEHVPVKRLFEDTSLIFKPYIRNLVEQRIEEYHGDWKKARLSIGKKPIWLDKGETIALEYATCWKKEYVIRYPVSSLREKDVDSIVDRHIREIVQKRIDEVGEKDAFKTPLFYDAAQKIPIKSIRCFTGLDAVEAVKYANGIPIGFSKPGNNHHIAIYRDKEGNRFEHVVSFWHAVERKRFGLPVIIQDTDSVGDQIQGISLPESFLKNLPAPGATLELSLQQNEMFILGMKEDEFNDAIREKDNTALNKHLYRVQKLGSLYYVFRYHTETQIDDSNNAIIMHKFYRCRSLSAFDALNPHKVRVSITGEIMQGDD

SEQ ID NO: 1240 - protein, 971 aa, unidentified
  REGION 1..971: note = Description of Unknown: uncultivated organism with predicted taxonomy: Bacteroidetes
  REGION 1..971: note = MG16-159 effector
MKKVLGLDLGVGSIGWCLIEKDDDNTPKRIIRMGSRIVPISSDEESGYTRGNAISKNADRTAKRTSRKCYDRYQLRRQALLNLLKRLGMEPSKKLIFEQNPLELWQKRADAASKEITIEELGRVLLHINQKRGYKHSRLSNSDSKETAYVQEVNSRYDDLKAEGLTIGQHFAAKLKENEQTSADGKKYYTYRIKEQVYPRHAYEEETEQILEVQSRYHADILTPDVCKEIKDIIFYQRDLKSCKNLVSLCEFESYTITKDGKEMTIGPKVAPRTSPLAQLSSILETANNITIRNRRNDELYISPEQRKAIADFLDNHEVMKLTDLYKILNIGRKDGWWAGKAIGKGLKGNTTKCQIREALSNLSKEQIESLTAFKLEYDEYVDAETGEVRKRINNTLAEKQPLYRLWHLLYSIKDVDELSGALRRLGIENEESIQNLCNLDFRTAGYANKSAKAIGRILPYLMDGMMYSDACELAGFDHSRRINPDRVLLTSLPQIQKNELRQPVVEKILNQLVNVVNALLEKEGPIDESRVELARELKQSKDERNEAFRRNNQNERLNKEYAERIKEYGLTPTRNRIMKMKMWEESEYTCMYCGQPVNVTEFLQGADVEREHIIPRGLLFDNSFTNQVCSCRRCNSQKGMRTAYDFIADDKGQEGLDSYIDRINDLFNRKQISRSKFNRLLVSHKAYMSRKAQGKETEEDKELWENFIDRQLRQSQYIARKSVEMLQQVCKNVYSTSGSVTDFVRHQWGYDEILHDLNFERYMKAGLTSMVKQLHSGKEVEVERITNWTKRLDNRHHAVDALAIACTTQGMIQRLNTLNASREGILDELNSKEERVVDPERSMLEKWIYTQPHISYAQAKEAIDNIIISQRPNTRITVPGKRYITKNGKRALVQTGIIVPRGALHAEFVYGRIMKQEADGVTLTPQYVRKYKLGIGAQGFLFNGKEFYKEELKRDSKTGLSSIVVTDKIK

SEQ ID NO: 1241 - protein, 1051 aa, unidentified
  REGION 1..1051: note = Description of Unknown: uncultivated organism with predicted taxonomy: Fibrobacter
  REGION 1..1051: note = MG16-160 effector
MKKILGLDLGVSSIGWSVISVDENGDPSEILGMGSRIVPLSTDDANEFSTGNAISKNQKRTQKRTTRKGYDRYQLRRENLTAELRKHQMLPDEHLIKLPVLDLWTLRANAATEGHQLSLPEIGRVLYHINQKRGYKHAKADEAGDKKQTEYVENVNKRFAMIKELGLTIGQFFANKLKESEVISEKGTFYTYRTKEQVFPRGAYIAEFDQIIEVQRKFYPQVLTDEFINRLRNEIIFYQRNLKSCKHLVSLCEFEKHEYKNKDGKIVFDGPKVAPRTSPLFQICRIWEFVNNIRLDGYKETKALSQDERLKVVDFLDNHEKMTAKDFIKLLGLDKNDEWDLKRYFGKNGVQGNSTKTQLAAALANIPNTSELLRFNLALENSNYVNKSTGEVLKVISSDFQNEPLYMLWHTVYSISDKEELKNALNKKYGITDESVINSLFKIDFVKPGFGNKSAKAIRRILPFLQEGLVYSDACAEAGYNHSDSLTKSENEARTLLARLPQIKKNELRKPVIEKILNQMVNVVNAIYDEYGQIDEIRVELARELKQSKDERNTTASNIAKRERENEKIEAKIQEFGIRSSRNRIQKYRLWEESEQKCFYCGDTVNVKEFLSGLDVEVEHVIPKSLLFDDSFANKVCACRKCNAAKGNKTAYDFMEGQKKEVFDAYVKRVNDFYKDGKISKTKKERLLTTQSKIPSDFIERQLRQTQYIAKKALEMLKNVCYNVYATSGSITDFIRHIWGYDEILHQLNFERYKKGGLTEFREYDHKGETHTEERIQNWSKRLDHRHHAIDALVIAMTRQSIIQRLNHLNTERDAMFQEVEKQSKEWKNDYSMLQEWLRERKHFSTEDVAKKVSNILVSFKAGKRVATIGKRVKYEHEKKFILQTGIVIPRGPLSEESVYGKIKVLDRNKPLKYLFENPQFIANADIKSAVTNRLIQHENDVKKAVLSLKKSPIVLANGKTLETADCYKEEYVIKYSLNGFKAKDIDSVVDTHIKDVLYKRLEEYDGNEKEAFKDIENNPIYADATHKIKIRNVRCFTGLSAVVPVKKDEN

SEQ ID NO: 1242 - protein, 1153 aa, unidentified
  REGION 1..1153: note = Description of Unknown: uncultivated organism with predicted taxonomy: Bacteroidales
  REGION 1..1153: note = MG16-161 effector
MKKNILGLDLGVGSIGWALIETEDDQPKQIIGMGSRIVPISKDDSDQFSKGQAISKNADRTARRTTRKGYDRYQLRRAMLTETLRHNGMLPERMDENVIDLWKLRSDAATEGHQLTLPQIGRVLYHINQKRGYKHAKADDNGDSKQTKYVEAVNQRYVEIQETHQTIGQHFYLELLRSKVESGNGPYYTFRIKDKVFPRAAYIAEFDQIMNVQKAYYPEVLTDELIETLRNRIIFYQRPLKSCKHLVSLCEFEMRPYKTKEGKIVYGGPKCAPRTSPLAQLCAMWEAANNITLTNRNNERYNFSLEERKQIVEHLCSHEALKLTDLYKILGITKKDGWYGGKAIGKGIKGNSTLNQLRKALNGKYGEWLEMPIEHMDVVDEETAEVLWQVSPQVEETPLFKLWHAVYSLQDADELAKTLRNKFNITDQDVIDALCKIDFVKPGYANKSHKFIRRLLPYLIEGMMYSEACARIYINHSNSMTVAERDARPLAEHIELLQKNALRQPVIEKILNQMINLVNRLQQEYGPIDEARVELARELKQSREERENAYKRNNQNERLNKEIAAKIEEMGIRPSRSRIQKYKMWEESDHRCMYCGKMVSLAEFLNGADVEIEHIIPRSILFDDSYSNKVCACRDCNREKDNLTALDYLETKTGAELEAYKQRVDDAFKEGRISKTKRDHLLWRREDIPSDFIERQLRQSQYIAVKAVEILQQGIRKVWTSGGSVTDFLRHQWGYDEVLHTLNLPRYHKVEGMTEFVQYEHAGQTHEEERIKNWTKRVDHRHHAIDALTVALTRQAYIQRLNTLEASHDLMEKQVKDAGTLYNEKKSILEKWINEQPHFSVDEVTRQVDGILISFRAGKRVTTPARRAIYKGGKRIIVQTGLQVPRGALTEETVYGKLGDKFVVKYPLAHPSMKSENIVDPTIRAIVQKRIDERGKEAFKEPLYSAEGMEIKSVRCYTSLSENGVVPVKQDGQGNNIGFAKKGNNHHVAIYQDKNGQYQEMVVSFWDAVERKKYGIPVVITNPHAVWDSVLDKESPQEFLEKLPNDDWKYILSMQENEMFVLGMEDGDFEHAIETQNYAALNKHLYRVQKVSSKFWCFRYHTETMVDDKYGDTKNEQWSFQMGKAFRASSFDGLFRQFPHKVKIDIMGRITKA

SEQ ID NO: 1243 - protein, 1224 aa, unidentified
  REGION 1..1224: note = Description of Unknown: uncultivated organism with predicted taxonomy: Prevotella
  REGION 1..1224: note = MG16-162 effector
MKKVLGLDLGTNSIGWCLIEKSDDNIPQRILRMGSRIVPISSDEESGYTKGNAVSKNAERTHKRTARKCYDRYQLRRQALMSLLKRLGMEPSNELIFEQTPMKIWQTRADAATKKISLPELGRVLLHINQKRGYKHSRLNNFDAKETSYVQEVNSRYDELKAEGLTVGQHFALKLKKNEKTSANGRKYYTYRIKEQVYPRHAYEEEARIILNTQRIFYSDILTEDVCKEFLDTIFYQRDLKSCKNLVSLCEFESYTIKKDGKEITIGPKVCPRTSPLAQLSSILETANNITIRNKRNDELYISPEQRQAIADFLDNNEVMKLTNLYNILHIGKKDGWWAGKAIGKGLKGNTTKMQIRAALSNLPSEQVNMLLKFELEFEDYVDKETGEVRQRVDNTQVEKQPLYRLWHLIYSIKDEDELSNALRRMDIKDEETIRKLCSLDFRSAGYAKKSAKAIGRILPYLMEGMMYSQACEQAGFDHSRRVDPGRTLLSALPQIQKNEFRQPVVEKILQQLVNIINSLISKEGTIDEIRVELARELKQSKDERNEAFKRNNQNEKKNKEYAEHIKEYQLTPTRNRLLKWKLYEESDHACMYCGQPIKVREFLQGADVEREHIIPKGLLFDNSFTNQVCSCRSCNSKKGMRTAYDFIEAEKGEEGLRSYIEHINYLFDKKNISRSKYNRLLVSYKAYLQRKVQGKETEEDKNLWENFIDRQLRQSQYIARKAIEMLQQICKNVYSTSGRVTDFVRHQWGYDEILHDLNFDRYKKAGLTTMVTQLQSGDEVEVERIKDWTKRLDNRHHAVDALAIACTTQGMIQRLNTLNASRDEMQAELNDKNGSIMDPNRSMLEKWVSIQPHITYAEAKNEVDKIIISQRPNTRITVPGKRYIQKNGKRTPVQTGIIVPRGALHAEFVYGRIMKQKPTSDGVVKIPQYVRKYKLGIGAQGYLFNGKEFYKEELKKDPRTGLSTIAVTDKINDVLEKIVDGGIRKRILERLNRGFEDGKDYRSNVPRALANLKNLDDDPIYSDDAKTRPILSVRKEVVSTTMVIVRNDRNGRPLAFAEPDGNHHVAFYKNENGLIEERIVTKWHAVQRKLHHVPIIIDNPSATWSDMLGRTDVPEEILKELPKDNSIFMLSLQIGEAFVMGMEESDYQKAIEEGNKQVLAEHLYFVQNLSSSNYRLRRHVESSYDITGMNKEDQRFLNIKSIGALFNYNPHKVKITVLGDIIP

SEQ ID NO: 1244 - protein, 1261 aa, unidentified
  REGION 1..1261: note = Description of Unknown: uncultivated organism with predicted taxonomy: Bacteroides
  REGION 1..1261: note = MG16-163 effector
FLYFFAIFAKNKKQIIQYTMKKILGLDLGTNSIGWAVVNAEENWKPVSIESMGSRIIPLSSDDTNEFTKGNAITKNQSRTEKRTARKRYDRYQLRREYLTATLRKLKMLPDESLIKLPILELWELRGKAACKGQQLSLPELGRVLYHINQKRGYKHAKSDESSDTKQKAYVAEVNARYAMIKKRNQTIGQYFAEKLKESEIETPKGKFYTYRTKEQVFPRKAYEAEFDQIMACQKVFYPDILTEKEINKLRNEIIFYQRRLKSCKHLVSICDFEKQEYKNKEGKIVFGGPKVAPKSSPLFQICKIWEEVNNLTLKNRKNDELFISLEQRQAMVDFLETHEKLTLSDMYAILGISKKDGWWGGKAIGRGLQGNTTKIALKKALGDFENAERLLQFNLYKTDSNLVDDTTGEIIQIIDSKLEKEPLYDLWHTIYSISDKEEFGKALKRKYNITDEDIINRLYSIDFVKPGFGNKSTKAMRRILPYLQEGLKYSDACEYAGFKHSESLTKSENEARPLLDMLPSINKNELRQPIVEKILNQMINVVNALMNEYGKFDSIRVELARELKQSKDERNTTFLQNEAMQRLNESITKRLESENIKPTKRIIEKYKFIFPTKGCFDKRTGKFITKNFEDLSTINYCIYCGQPFSLSAALNGDGYEVEHILPRDLICDNSQNNKVLSCRRCNSIKSNKTAFDFMRSQEKNAFEAYLERVETWYQDGIISPGKRERLLLSHEDYLERKRLGKETDEDKKYWEEFVSRQARETQYISRESIRILKQCCRNVNATSGAVTAILRHLWGYDEILHQLNFERYKNAGLTETVIWESNHGKNKHSREQIVDWSKRVDHRHHAIDALVVACTQQGFIQRINTLNADETKGLMKKQIETAGLKYVEKMALRDKYLISLTPFKTQAVANAVNNILVSFKPGKRTATTGKRIEYKEGKRHIVQKGIIIPRGPLHEEGVYGSIKINGEKQIVKKYKLGKGAQGFVFTGKETYEEKVNKKTGEIQIEDKIKNVLDSIVDGNIRTKVLQRLNQGFEEGKDYRNDVKKALENLNNLDKNPIYADDNKTIPIHTVRCITGLSAIVPIKYNNQGKPIGFVKPGNNHHIAIYQDEEGNLKEHSVTFWHAVERKKYGIPVIIENPTKLWDEIKDKQLPESFLEKLPEVNWTFKVSLQQNEMFILGMEDDTYDVAMGNKDFTLISKFLYRVQSISESDYWFRLHIESQNDKTPQAKQAKKFHRIKSLKGFYQLHPHKVHISVIGKIKEL

SEQ ID NO: 1245 - protein, 1222 aa, unidentified
  REGION 1..1222: note = Description of Unknown: uncultivated organism with predicted taxonomy: Prevotella
  REGION 1..1222: note = MG16-164 effector
MKKVLGLDLGVGSIGWCLVEKDDKNIPLRIIRMGSRIVPITKEEENGYTRGNAISKNADRTVKRTARKCYDRYQLRRKALVNLLKRCGMMPDKGLILEQSPLDLWQKRADAASKEISLEEVGRVLLHINQKRGYKHSRLSNSDKKETAYVQEVNSRYDKLKAEGLTVGQHFAAKLKENEQISADGKKYYNYRIKEQVYPRHAYEEEAKRILEVQSQFHTDVLTTNVCKEIFDTIFYQRDLKSCKNLVSFCEFESYTIKRNGKDITIGPKVAPRTSPLAQLSSILETANNITIRNRRNDELYISPEQRQAIANFLDNNEVMKLTDLYKILNIGRKDGWWAGKAIGKGLKGNTTKCQIRKALSKLSQEQIDKLTSFNLIFDEYVDEETGELRKRINNSHAEHQPLYRLWHLIYSIKDNDELSIALRSLGIEDEECIHNLCNLDFRTAGYANKSAKAIGRILPYLMEGMMYSEACNRAGFDHSRRVNPERELLTSLPQIQKNELRQPIVEKILNQLVNVVNALLEKEGTIDEIRVELARELKQSKDERNETYRRNNQNEKKNKEYAERIKKYELTPTRNRIMKMKMLEESEYKCMYCGQPVKEKEFLQGADVEREHIIPRALLFDNSFTNQVCSCRSCNSQKGMRTAYDFIADDKGQEGLEAYIERINDLFNKKKISRSKLNRLLVSYKAYVSRKAQGKETEEDVQLWENFIDRQLRQSQYIAKKSVEILQQVCKNVYTTSGSVTDFVRHQWGYDEILHDLNFERFKKANLTTMVKQLHSGKEVEVERIKDWTKRLDNRHHAVDALAIACTTQGMIQRLNTLNASRDAMLDELNNKEQRMIDSERSMLEKWIISQPHVSCVEAKKEIDKILISLRPNTRITVPGKRYITKNGKRTLVQTGIIVPRGALHAEFVYGRIMKQEADGVTLTPQYVRKYKLGIGTQGYIFNGNETYKEELKKDKKTGLSQIVVTDKIKDVLDKIVDGGIRKRILERLNRGFEDGTDYRTNTAKALENLKNLDEDPIYSDDAKTRPIRTVRKYVNSSTMVAVRKDDNGKPVSFVVPDDNHHVAFYKDKDGVITESIVTKWQAVQRKLKHIPVIVDNPTQTWNDLVGRNDVPEELLQSLPKDNSEFLLSLQIGEAFIMGMEDADFHRAIEEKDIHNLAEHLYFVQNISSNNYRMRRHVEASFDTSDMNKEDQRFLNVSSIGAFFNYNPHKVKVTILGDIIK

SEQ ID NO: 1246 - protein, 1159 aa, unidentified
  REGION 1..1159: note = Description of Unknown: uncultivated organism
  REGION 1..1159: note = MG16-165 effector
MKKHILGLDLGVGSIGWALIETEDDQPKQIIGMGSRIVPISKDDSDQFSKGQAISKNADRTARRTTRKGYDRYQLRRALLTQVLRQNGMLPERMDENVIDLWKLRSDAATEGHQLTLPQIGRVLYHMNQKRGYKHAKADDNGDSKQTKYVEAVNQRYAEIKEARQTIGQHFYLELLRSKVESGNGPYYTFRIKDKVFPRAAYIAEFDQIMQVQRAYYPEVLTDELIDTLRNRIIFYQRPLKSCKHLVSLCEFEMKPYKTKDGKIVYGGPKCAPRTSPLAQFCAMWETANNITLTNRNNEQYDFSLEERRQLVEHLCTHEVLKLTDLYKILGITKKDGWYGGKAIGKGIKGNATLNQLRKALNGKYSDWLEMPIERIDAVDNETAEVFWQVSPKVEETPLFKLWHAVYSIQDAEELAKTLRNKFGIDDQDVIEALCKIDFVKPGYANKSHKFIRRLLPYLMEGMMYSEACARIGINHSNSMTAAERDARPLAERIELLQKNALRQPVIEKILNQMINLVNRLQQEYGPIDEARVELARELKQSREEREGAYRRNNQNERLNKEIAAKIEEMGIRPSRSRIQKYKMWEESNHRCMYCGKTVSLAEFLNGADVEIEHIIPRSILFDDSFSNKVCACRECNHEKGNMTALDYLETKPATEVEAYKQRVDEAFKEGQISKTKRDHLLWHRSDIPTDFIDRQLRQSQYIAVKAVEILQQGIRQVWTSGGSVTDFLRHQWGYDEILHTLNLPRYRQVEDLTEIVHYEHAGQEHDEERIKNWSKRIDHRHHAIDALTVALTRQAYIKRLNSLNAEFTREEMLKEVEEANTVYNEKKSLLEKWILEQPHFSVDDVTNSVDSILVSFRAGKRVTTPARRAIYQGGKRTIVQRGLQVPRGALTEETIYGKLGDKFVVKYPLDHPSMKPENIVDPTIRALVQKRVAERGKDAFKEPLFSAEGMEIKSVRCFTSLSENGVVPVKQDEQGRNIGYAKKGNNHHVAIYKDKDGQYQEMVVSFWDAVERKKYGVPVVITNPHDVWDSIMDKDMPQEFLEKLPKDDWSYLLSMQENEMFVLGMEEDEFNDAIEAKDYATLNKHLYRVQKVARNDYWFRYHTETTVDDKYGEGDESKVNLGWSVEMGKVYRVRSCGALFDLFPHKVKIDIMGRITKA

SEQ ID NO: 1247 - protein, 1092 aa, unidentified
  REGION 1..1092: note = Description of Unknown: uncultivated organism with predicted taxonomy: Bacteroidales
  REGION 1..1092: note = MG16-166 effector
MKKVLGLDLGVGSIGWCLIEKEDDNTPKRILRMGTRIVPIGSDEESSYTKGNAFSKNADRTAKRTARKCYDRYQLRRHALVDLLKQLGMEPTHKLIYEQTPLGLWQKRADAASKEITLEELGRVLLHINQKRGYKHSRLDNSKSKETAYVQEVNSRYDQLKDEGLTIGQHFAAKLKENEQTSADGKKYYNYRIKEQVYPRHAYEEEVKKILDVQQQYYADLLTDDVCKEIFNIIFYQRDLKSCKNLVSHCEFESYTITKNGKEITIGPKVAPKTSPLAQLSSILETVNNISIRNRRNDELYISPEQKKALADFLDNNEVMKLTDLYRILNIEKKDGWWAGKAIGKGLKGNTTKCEIRKALGNLTKEQVNSLTAFDLVFEEYVDVETGEVRKRVDNNHAEKQPLYRLWHLIYSIKNEEELKGALRNMGIEDEETLQKLSNLDFRNPGYANKSAKAIGRILPYLMEGMMYSQACEQAGFDHSRRINPERQLLKALPQIQKNELRQPVVEKILQQLVNIVNALLAKEGNIDEIRVELARELKQNREERNEAFKRNAQNEKLNKEYAERIKEYGLTPTRNRIMKMKMWEESENTCMYCGQPVDVVEFLQGADVEREHIIPRGLLFDNSFTNQVCSCRKCNSQKGMRTAYDFIEDEKGQEGLESYIKHINYLFDKKKINRSKLNRLLVSHKAYINRKSLGKETEEDKQLWENFIDRQLRLSQYIAKKSVEMLQQICRNVYVTSGSVTDFVRHQWGYDELLHDLNFERYKKAGLTAMVKQLHSGKEVEVERIKDWTKRLDNRHHAVDALAIACTTQGMIQRLNTLNASRDDMLEELNSKKRVADPNRSMLEKWLYAQPHVSYALAKEELDKIIVSQRPNTRITVPGKRYVTKNGKQTLAQTGIVVPRGALHAEFVYGRIMKQEADGKTLTPQFVRKYKLGIGAQGFLFNGKEFYKEDLKKDAKTGLSTIVVTDKIKEVLDKVVDGGIRRRILDRLNRGFEEGTDYRANVGKALANLKNLDEDPIYSDDAKTRPIRTVRKYVNSSTMVAVRKDKNGRPLSFVEPDGNHHVAFYQDDNGIITESIVTRWQAVQRKLSDIP

SEQ ID NO: 1248 - protein, 1162 aa, unidentified
  REGION 1..1162: note = Description of Unknown: uncultivated organism with predicted taxonomy: Bacteroidales
  REGION 1..1162: note = MG16-167 effector
MKTKILGLDLGVGSIGWALIETEDNQPKQILGMGSRIVPISKDDGDQFSKGQAITKNADRTARRTARKGYNRYQMRRALLTQALRNNNMLPERMDENVIDLWKLRSDAATEGHQLTLPQIGRVLYHINQKRGYKHSKADENGDSKQTKYVEEVNRRYKDIQEAHQTIGQHFYLELLRSKIERANGPYYTYRIKDQVFPRAAYIAEFDQIMNVQRIYYPEVLTDEFIDTLRNRIIFYQRPLKSCKHLVSLCEFEARPYKTKDGKIVYGGPKCAPRTSPLAQLCAIWETANNITLTNRNNERFEFTLEQRRQIVDFLCHNKEMKVSHLQKILGISKKDGWYGGKAIGKGIKGNATLNQLRDALQGKYDQWLEMPIKHIDVVDATTSEVFWAVSPDVEETPLFRLWHAVYSLQNADELAKTLREKFQITDEAVIEALCKIDFVKPGYANKSHKFIRRLLPYLMEGMMYSEACERININHSNSMTREEREQRPLSARIQLLQKNQLRQPVVEKVLNQMINIVNSLKDQYGEIDEARVELARELKQSRDERESAYKAMGQNERRNKEIAAKIAEFGIRSSRSRIQKYKMWEESLHQCFYCGKTIDLSEFLNGADVEIEHIIPRSILFDDSFSNKVCACRRCNQEKGNQTAMEYMETKSASEQEAYKQRVDEAFTTKRISLTKRDHLLWHKADIPSDFIDRQERLSQYIAVKAVDLLQQGIRQVWASSGTVTFFMRHQWGYDEILHTLNLPRYRRVEGMTEFVDFEHAGQKHTEERIKNWSKRIDHRHHAIDALTIALTRQAYIQSLNTLSSEITREEMIEIIKETGKVYKEKTSLLDKWARELPHFSVEDVTNAVDGILVSFRAGKRVTTPARRAIYKGGKRVIAQRGIEVPRGALTKDTIYGKQGESYVVKYPLTHQSMKADNIVDPTIRALVKARLAAYNNNANEAFKTPLYSAEGMEIKSVRCVARLTENGVIPIKYNKQGMAIGYAEKGNNHHVAIYKEKDKKTFDITVSFYDAVERKRYGVPVVITNPHEVWDSVLNKDLPQEFLAKLPNDNWQFILSMQENEMFVLGMEDDEFDDAIERQDYATLNKHLYRVQKIAHNDYWFRYHTETTVDDKYGDGEDNKVNLGWSVEMGKVCRIRSCDALFAKHPHKVKVDLLGHIHKA

SEQ ID NO: 1249 - protein, 901 aa, unidentified
  REGION 1..901: note = Description of Unknown: uncultivated organism with predicted taxonomy: Barnesiella viscericola
  REGION 1..901: note = MG16-168 effector
MKNILGLDLGTTSVGWALIKVDDKNNPIDIQDMGVRIVPLAENEGDKFTKGQDITVNADRTRARGQRRNYDRFQLRRQALTEKLRSLNMLPDEHLIKLPIMELWQLRANAVTQKVSLNELGRILYHLNQKRGYKHSRTDAKDSKQRAYVKEINNRYGELIKSGMTIGQFFAKKLSETAVTVEGKTFYVYRIKDQIFPRKAYEEEYDSIMKCQQTFYQEILTNDVIDEIRNRIIYYQRDLRSCKHLVSVCEFEKRCFYDAEGNVKRNKKGEIIYDGPKVVPRTSPLFQIFKNWQSINNLRFHNRKNEYLYITKEQKQQIANIMDIHKVLKLEDVQNVLDITSESGWYCDKAIKAGIKGNTTKHAILSVLSSLPQSKITELTRFNLETEATNLVDEETGEVLVRIKSTYQEEPLYRLWHIIYSIKNEDERFNAISNLLKEFCIEDDSIASALKDLDFVTPGYANLSAKAISKILPYMMEGIDYSESCAYVGYNHSDSITKEENKRRELLDQIPALKKNELRQPTVEKILNQTINIFNQINTNLKKNGERIDEVRIELARELKQSKDERKETENGIRKQQKMNDEYANILKEEGIRPTRNRVLKYRLWRESNETCFYCERPINFNEFLKFSDIEREHIIPKKLIFDDSFANQVCSCRKCNKEKGGRTALDYMQTTPNLQMYLDKVDKMFQEHKISGKKHLHLLASYEDYLIRKKEGKETKDDIKIWETPIERQLRLSQYISRKAQELLRTACRDVIATSGSITDLIRHTWGYDTILHELNFDCYKKAGLTEFIKDEKTGKNREVIQDWTKRLDHRHHAIDALAVACTSRSIIQRINTLHASREDIRKEIKSTRKEWQENDLLQQWIKEKMPFDRKYVLHKVASILVSMKAGKKATVPGKRKIYK

SEQ ID NO: 1250 - protein, 1154 aa, unidentified
  REGION 1..1154: note = Description of Unknown: uncultivated organism with predicted taxonomy: Bacteroidales
  REGION 1..1154: note = MG16-169 effector
MKKKILGLDLGVGSIGWALIETENDQPKQIIGMGSRIVPISKDDNDQFSKGQAISKNADRTARRTTRKGYDRYQLRRSLLTQVLRQNGMLPERMDENVIDLWKLRSDAASEGHQLTLAQIGRVLYHINQKRGYKHAKADNNGDSKQTKYVEAVNQRYKEIQESKQTIGQHFYLELLRSKVDGVRGSYYTFRIKDKVFPRAAYMDEFDQIMRVQRDYYPDVLTEELIDTLRNRIIFYQRPLKSCKHLVGLCEFEMRPYKTQEGNIVYSGPRCAPRTSPLAQLCAMWESVNNITLTNRNNERYEFSLEERQQIVEHLCTHEVLKITDLYKLLDISKKDGWYGGKAIGKGLKGNTTLNQLRKAMNGKYQEWLEMPIERVDDVDNTTAEVFWVVSPKVEETPLFKLWHAVYSLQDTDELAKTLCSKFGITDQEVIEALCKIDFVKPGYANKSHKFIRRLLPYLMKGMMYSEACERIGINHSNSMTAAERNARPLAEHIELLQKNALRQPVIEKILNQMINLVNRLQQEYGPIDEARVELARELKQSREERESAYKAINKNEHENAERAAKIAEFGIRPSRSRVQKYKMWEESQHRCFYCGKMVDLAQFLNGADVEIEHIVPRSILFDDSFSNKVCACRECNKEKGNLTAMEYIETKPVGEQEAYKQRVAEAFDAHRISKTKRDHLLWRRADIPQDFIERQLRQSQYIAVKAVEILQKGIRTVWTSGGSVTDFLRHQWGYDEILHTLNLPRYRQVDELTEMVHYEHAGQEHDEERIKNWTKRIDHRHHAIDALTVALTRQSYIQRLNTLEASHDIMEKQVKEAGTQYNEKKSILEKWVAEQPHFPVADVTENVDGILVSFRAGKRVTTPARRAIYKGGKRTIVQTGLQVPRGSLTEETVYGRLEDKFVVKYPLDHPSMKPENIVDPTIRALVQKRVEEKGKDAFKEPIYSAEGMEIKSVRCYTSLSENGVVPVKFDEKGQPIGFAKKGNNHHVAIYQDKDGQYQEMVVSFWDAVERKKYGVPSVITNPRELWNSIMDIDLPQEFLLKLPQDDWQYVLSMQENEMFVLGMEEDEFHDALERHDYCSLNKHLYRVQKISHGEYVLRYHTETKVDDKYKGVEKGRDASLKLGALVSIRSFGSLFSKFPHKVKIDIMGRITKA

SEQ ID NO: 1251 - protein, 1217 aa, unidentified; identical to SEQ ID NO: 1219
  REGION 1..1217: note = Description of Unknown: uncultivated organism
  REGION 1..1217: note = MG16-170 effector

SEQ ID NO: 1252 - protein, 1153 aa, unidentified; identical to SEQ ID NO: 1242
  REGION 1..1153: note = Description of Unknown: uncultivated organism with predicted taxonomy: Bacteroidales
  REGION 1..1153: note = MG16-171 effector

SEQ ID NO: 1253 - protein, 815 aa, unidentified
  REGION 1..815: note = Description of Unknown: uncultivated organism with predicted taxonomy: Prevotella brevis
  REGION 1..815: note = MG16-172 effector
MKKHILGLDLGVGSIGWALIETEDDQPKQIIGMGSRIVPISKDDSDQFSKGQAISKNADRTARRTTRKGYDRYQLRRALLTQVLRQNGMLPERMDENVIDLWKLRSDAATEGHQLTLPQIGRVLYHMNQKRGYKHAKADDNGDSKQTKYVEAVNQRYTEIQEAKQTVGQHFYLELLRSKVESGNGPYYTFRIKDKVFPRAAYIAEFDQIMKVQKAYHPEVLTDEFIDTLRNRIIFYQRPLKSCKHLVSLCEFEMKPYKNKDGKIVYGGPKCAPRTSPLAQLCTMWETVNNITLTNRNNERYEFSLDERRQLVEHLCTHEVLKLTDLYKILGITKKDGWYGGKAIGKGIKGNATLNQLRKALNGKYSDWLEMPIERIDAVDNETAEVFWQVSPKVEETPLFKLWHAVYSIQDAEELAKTLRNKFGIDDQEVIDALCKIDFVKPGYANKSHKFIRRLLPYLMEGMMYSEACARIGINHSNSMTAAERDARPLAEHIELLQKNALRQPVIEKILNQMINLVNRLQQEYGPIDEARVELARELKQSREEREGAYRRNNQNERLNKEIAAKIEEMGIRPSRSRIQKYKMWEETNHRCMYCGKTVSLAEFLNGADVEIEHIIPRSILFDDSFSNKVCACRECNHEKGNMTALDYIETKPAAEVEAYKQRVDEAFKEGQISKTKRDHLLWHKSDIPTDFIDRQLRQSQYIAVKAVEILQQAIRQVWTSGGSVTDFLRHQWGYDEILHTLNLPRYRQVEDLTEIVHYEHAGQEHEEERIKNWSKRIDHRHHAIDALTVALTRQAYIQRLNSLNAEFTREEMLK

SEQ ID NO: 1254 - protein, 1266 aa, unidentified; identical to SEQ ID NO: 1226
  REGION 1..1266: note = Description of Unknown: uncultivated organism with predicted taxonomy: Bacteroides
  REGION 1..1266: note = MG16-173 effector

SEQ ID NO: 1255 - protein, 1149 aa, unidentified
  REGION 1..1149: note = Description of Unknown: uncultivated organism with predicted taxonomy: Bacteroidetes
  REGION 1..1149: note = MG16-174 effector
MKKKILGLDLGVGSIGWALIETEDNQPKQILGMGSRIVPISKDDNDQFSKGQAITKNADRTQRRTTRKGYNRYQMRRALLTQALRNNNMLPERMDENVIDLWKLRSDAATEGHQLTLSQIGRVLYHMNQKRGYKHSKADDNGDSKQTKYVEEVNQRYKEIQEAHQTIGQHFYLELLRSKIERANGPYYTYRIKDQVFPRAAYMAEFDQIMQTQRVFYPEVLTDEFIDTLRNRIIFYQRPLKSCKHLVSLCEFEARPYKTKEGKIVYGGPKCAPRTSPLAQLCAIWETTNNITLTNRNNEKYEFTLEHRRQIVDFLCHNKEMKVSHLQKILGIGRNDGWYGGKAIGKGIKGNATLNQLRDALQGKYDQWLEMPIKRVDVVDATTGEVFWAVSAEIEETPLFRLWHAVYSLQNAEELAKTLREKFLITDESVIEALCRIDFVKPGYANKSHKFIRRLLPYLMEGMMYSEGCERININHSNSMTREEREQRPLKEHIQLLQKNQLRQPVVEKVLNQMINIVNSLKDQYGEIDEARVELARELKQSRDERESAYKAMGKNERRNKEIAEKIAEFGIRPSRSRIQKYKMWEESMHQCFYCGKTIDLAEFLNGADVEIEHIIPRSILFDDSFSNKVCACRRCNQEKSNQTAMEYMETKPVGELEAYKRRVDEAFTAKRISKTKRDHLLWRKADIPTDFIERQLRQSQYIAVKAVEVLQDGIRQVWTSGGSVTDFLRHQWGYDEILHTLNLPRYRQVEGLTEFVDYEHAGQKHTEERIKNWTKRIDHRHHAIDALTVALTQQGYIQRLNTLEASHDFMEKQVKETGTHYNEKKSILEKWINEQPHFSVEDVTSAVDGILVSFRAGKRVTTPARRAIYKGGKRVIVQRGIEVPRGALTNEFVYTKKGNKYARKYPINAISNPDNIVDETIRQLVKSRLIACGGNTNEAFKTPLYSAEGMEIKTVRCFNNKLSDRGVVAIKYNENNEPIGYAETDNNHHMAIYRQKDGSLKEKIVSFWDAVERKRYGVPVVIANPHEVWDSLLNTEFPQEFLAKLPKDDWQYVLSMQENEMFVLGMEDDEFNDAIERQDYTALNKHLYRVQSISHDDYYFCHHTETKATEKSESLKLGKTLRIRGVNSLKNYFPHKVKVDILGHIHKV

SEQ ID NO: 1256 - protein, 1258 aa, unidentified
  REGION 1..1258: note = Description of Unknown: uncultivated organism with predicted taxonomy: Prevotella
  REGION 1..1258: note = MG16-175 effector
MKNILGLDLGTTSVGWALIKVDDKNNPIDIQDMGVRIVPLAENEGDKFTKGQDITVNADRTRARGQRRNYDRFQLRRQALTEKLRSLNMLPDEHLIKLPIMELWQLRANAVTQKVSLNELGRILYHLNQKRGYKHSRTDAKDSKQRAYVKEINNRYGELIKSGMTIGQFFAKKLSETAVTVEGKTFYVYRIKDQIFPRKAYEEEYDSIMKCQQTFYQEILTNDVIDEIRNRIIYYQRDLRSCKHLVSVCEFEKRCFYDAEGNVKRNKKGEIIYDGPKVVPRTSPLFQIFKNWQSINNLRFHNRKNEYLYITKEQKQQIANIMDIHKVLKLEDVQNVLDITSESGWYCDKAIKAGIKGNTTKHAILSVLSSLPQSKITELTRFNLETEATNLVDEETGEVLVRIKSTYQEEPLYRLWHIIYSIKNEDERFNAISNLLKEFCIEDDSIASALKDLDFVTPGYANLSAKAISKILPYMMEGIDYSESCAYVGYNHSDSITKEENKRRELLDQIPALKKNELRQPTVEKILNQTINIFNQINTNLKKNGERIDEVRIELARELKQSKDERKETENGIRKQQKMNDEYANILKEEGIRPTRNRVLKYRLWRESNETCFYCERPINFNEFLKFSDIEREHIIPKKLIFDDSFANQVCSCRKCNKEKGGRTALDYMQTTPNLQMYLDKVDKMFQEHKISGKKHLHLLASYEDYLIRKKEGKETKDDIKIWETPIERQLRLSQYISRKAQELLRTACRDVIATSGSITDLIRHTWGYDTILHELNFDCYKKAGLTEFIKDEKTGKIREVIQDWTKRLDHRHHAIDALAVACTSRSIIQRINTLHASREDIRKEIKSTRKEWQENDLLQQWIKEKMPFDRKYVLHKVASILVSMKAGKKATVPGKRKIYKNGKPTIIQSGMRIPRGQLHEQTVYGAITQFSKNNKGKVFQTKEIVTRYKMGVGSMGYVFSGKETCDVINDKKNKSLVIIDGIEKAINYIVDRHIRDVVRNRLNEAFPENETYRSEAEKALAEGKKYDGKERCQKALDQLRKLSEKPLYADKNKNIIIKSARCYTGLSAVQPLRYNNNHEPISYVLTKNNHHVALYKDENGKFQECIYTFWQVVERSKFKLPLIITDTKALWNEIQQRENKGDTFPDSLIQSLPLPNWTFIESLQLNDMFVMDINDDDFEHYIATNNYEELGKKLYRIQNISSFDYSFRLHTDTTSKTTSDAALSKRYIRIKSIKAYIEHNPHKVKISLLGKIIRNTE

SEQ ID NO: 1257 - protein, 1154 aa, unidentified
  REGION 1..1154: note = Description of Unknown: uncultivated organism with predicted taxonomy: Bacteroidales
  REGION 1..1154: note = MG16-176 effector
MKKKILGLDLGVGSIGWALIETEDNQPQKILGMGSRIVPISKDDNDQFSKGQAITKNADRTARRTTRKGYNRYQMRRALLTQALRNNNMLPERMDENVIDLWKLRSDAATEGHQLTLPQIGRVLYHINQKRGYKHSKADKNGDSKQTKYVEAVNQRFKDIQEIHQTIGQHFYLELLRTRVHRENGDYYTYRIKDQVFPRAAYIAEFDQIMNVQRAYYPEVLTDEFIDTLRNCIIFYQRPLKSCKHLVSLCEFEMRPYKTKDGKIVYGGPKCAPRTSPLAQLCAMWETANNITLTNRNNERFEFTLDQRRQIVDFLCHNKEMKVTHLQKILGISKKDGWYGGKAIGKGIKGNATLNQLREALQGKYDQWLEMPIKRIDVVDATTSEVFWAVSPEIEETPLFKLWHAVYSLQNADELAKTLREKFQITDEAVIEALCKIDFVKPGYANKSHKFIRRLLPYLMEGMMYSEACKRININHSNSMTREEREQRPLSARIQLLQKNQLRQPVVEKVLNQMINIVNSLKDQYGEIDEARVELARELKQSRDERESAYKAMGQNERRNKEIAAKIAEFGIRPSRSRIQKYKMWEESLHQCFYCGKTIDLSEFLNGADVEIEHIIPRSILFDDSFSNKVCACRRCNQEKGNQTAMEYMETKSAAEQETYKQRVDEAFTAKRISKTKRDHLLWRKADIPADFIERQLRQSQYIAVKAVEVLQDGIRQVWTSGGSVTDFLRHQWGYDEILHTLNLPRYRQVEGLTEFVDFEHAGQKHTEERIKNWSKRIDHRHHAIDALTVALTQQGYIQRLNTLEASHDFMEKQVKEAGTKYNEKKSILEKWINEQPHFSVEEVTNAVDGILVSFRAGKRVTTPARRAIYKGGKRVIAQRGIEVPRGALTEETIYGKLGDKFTVKYPLDHPSMKPENIVDPTIRALVQKRVAERGKDAFKDPLYSAEGMKIKSVRCFANVTDNSVVPIKYNGEGQPIGYAKKGNNHHVAIYTDKSGKPQESVVSFWDAVERKRYGVPVVITNPHEVWDNLLNTDFPQEFLAKLPEDDWQYLFSMQENEMFVLGMEDDEFYDAIERQDYASLNKHLYRVQKIRSGEYTFRYHTETKVDDKYEGVANGTNTSFQLGALVSIRGFSSLFAKHPHKVKVDILGHIHKA

SEQ ID NO: 1258 - protein, 1154 aa, unidentified; identical to SEQ ID NO: 1234
  REGION 1..1154: note = Description of Unknown: uncultivated organism with predicted taxonomy: Bacteroidia
  REGION 1..1154: note = MG16-177 effector

SEQ ID NO: 1259 - protein, 1104 aa, unidentified
  REGION 1..1104: note = Description of Unknown: uncultivated organism with predicted taxonomy: Porphyromonas sp. oral taxon 278
  REGION 1..1104: note = MG16-178 effector
MKKKILGLDLGVGSIGWALIETENDQPKQIIGMGSRIVPISKDDNDQFSKGQAISKNADRTARRTTRKGYDRYQLRRSLLTQVLRQNGMLPERMDENVIDLWKLRSDAASEGHQLTLAQIGRVLYHINQKRGYKHAKADNNGDSKQTKYVEAVNQRYKEIQESKQTIGQHFYLELLRSKVDGVRGPYYTFRIKDKVFPRAAYMDEFDQIMRVQRDYYPDVLTEELIDTLRNRIIFYQRPLKSCKHLVGLCEFEMRPYKTQEGNIVYSGPRCAPRTSPLAQLCAMWESVNNITLTNRNNERYEFSLEERQQIVEHLCTHEVLKITDLYKILDISKKDGWYGGKAIGKGLKGNTTLNQLRKALNGKYQEWLEMPIERVDDVDNTTAEVFWVVSPKVEETPLFKLWHAVYSLQDTDELAKTLCSKFGITDQEVIEALCKIDFVKPGYANKSHKFIRRLLPYLMKGMMYSEACERIGINHSNSMTAAERNARPLAEHIELLQKNALRQPVIEKILNQMINLVNRLQQEYGPIDEARVELARELKQSREERESAYKAINKNERENAERAAKIAEFGIRPSRSRVQKYKMWEESQHRCFYCGKMVDLAQFLNGADVEIEHIVPRSILFDDSFSNKVCACRECNKEKGNLTAMEYIETKPVGEQEAYKQRVAEAFDAHRISKTKRDHLLWRRADIPQDFIERQLRQSQYIAVKAVEILQKGIRTVWTSGGSVTDFLRHQWGYDEILHTLNLPRYRQVDELTEMVHYEHAGQEHDEERIKNWTKRIDHRHHAIDALTVALTRQSYIQRLNTLEASHDIMEKQVKEAGTQYNEKKSILEKWVAEQPHFPVADVTENVDGILVSFRAGKRVTTPARRAIYKGGKRTIVQTGLQVPRGSLTEETVYGRLEDKFVVKYPLDHPSMKPENIVDPTIRALVQKRVEEKGKDAFKEPIYSAEGMEIKSVRCYTSLSENGVVPVKFDEKGQPIGFAKKGNNHHVAIYQDKDGQYQEMVVSFWDAVERKKYGVPSVITNPRELWNSIMDIDLPQEFLLKLPQDDWQYVLSMQENEMFVLGMEEDEFHDALERHDYCSLNKHLYRVQKISHGEYVLRYHTET

SEQ ID NO: 1260 - protein, 1217 aa, unidentified; identical to SEQ ID NO: 1219
  REGION 1..1217: note = Description of Unknown: uncultivated organism
  REGION 1..1217: note = MG16-179 effector

SEQ ID NO: 1261 - protein, 1130 aa, unidentified
  REGION 1..1130: note = Description of Unknown: uncultivated organism with predicted taxonomy: Bacteroidales
  REGION 1..1130: note = MG16-180 effector
MKKKILGLDLGVGSIGWALIETENDQPKQIVGMGSRIVPISKDDNDQFSKGQAISKNADRTARRTTRKGYDRYQLRRALLTQVLRQNGMLPERMDENVIDLWKLRSDAATEGLQLTLPQIGRVLYHINQKRGYKHAKADDNGDSKQTKYVEAVNQRYADLQGEKQTIGQHFYLELLRSKVEGASGPYYTFRIKDKVFPRAAYIAEFDQIMRVQRAYYPEILTEELIDTLRNRIIFYQRPLKSCKHLVSLCEFEMRPYKTKDGKIVYSGPKCAPRTSPLAQLCAMWETANNITLTNRNNERYEFSLEERQQIVEHLCTHDALKLTDLYKILGISKKDGWYGGKAIGKGIKGNVTLNQLRKALNGKYGQWLEMPIEHVDVVDNTTAEVFWAVSPKVEETPLFKLWHAVYSLQDAEELAKTLRNKFGITDQEVIDALCKIDFVKPGYANKSHKFIRRLLPYLMEGMQYSEACTRIGINHSNYMTAAERDARPLAERIELLQKNALRQPVIEKILNQMINLVNRLQQEYGPIDEARVELARELKQSREERENAFKRNNQNERLNKEIADKIEEMGIRPSRSRIQKYKMWEESNHRCMYCGKTVSLAEFLNGADVEIEHIIPRSILFDDSFSNKVCACRECNHEKDNMTALDYLETKPAVEVDAYKQRVDEAFKEGRISKTKRDHLLWHKSDIPQDFIDRQLRQSQYIAVKAVEILQQGIRQVWTSGGSVTDCLRHQWGYDEILHTLNLPRYRQVEDLTEIVHYEHAGQEHDEERIKNWSKRIDHRHHAIDALTVALTRQAYITRLNSLNAEFTREEMLKEVEEANTVYNEKKSLLEKWVNEQPHFSVEDVTQSVDGILVSFRAGKRVTTPARRAIYNGGKRTIVQRGLQVPRGALTNEFVYTKNGNKYARKYPINAISNPENIVDPTIRQLIKARLAAFNGNAKEAFKEPLYSAEGMEIRTVRCYNNKLSDRGVVAMKYNERREPIGYAETDNNHHLAIYRDSKGELQESIVSFYEAVKRKIAGLPIMDEHPEPDWNLVQTMQENEMFVLGMNDEDFEKSIANDDYQLLNKHLYRVQSISHDDYYFCLHTESKATDKNECMKLGSILRIRGVNSLQKYNPHKVKIDIMGRITKA

SEQ ID NO: 1262 - protein, 1154 aa, unidentified; identical to SEQ ID NO: 1237
  REGION 1..1154: note = Description of Unknown: uncultivated organism with predicted taxonomy: Bacteroidales
  REGION 1..1154: note = MG16-181 effector

SEQ ID NO: 1263 - protein, 1219 aa, unidentified
  REGION 1..1219: note = Description of Unknown: uncultivated organism with predicted taxonomy: Prevotella
  REGION 1..1219: note = MG16-182 effector
MKKVLGLDLGVGSIGWCLIEKDDDNTPKRIIRMGSRIVPISSDEESGYTRGNAISKNADRTAKRTSRKCYDRYQLRRQALLNLLKRLGMEPSKKLIFEQNPLELWQKRADAASKEITIEELGRVLLHINQKRGYKHSRLSNSDSKETAYVQEVNSRYDDLKAEGLTIGQHFAAKLKENEQTSADGKKYYTYRIKEQVYPRHAYEEETEKILEVQSRYHADILTPDVCKEIKDIIFYQRDLKSCKNLVSLCEFESYTITKDGKEMTIGPKVAPRTSPLAQLSSILETANNITIRNRRNDELYISPEQRKAIADFLDNHEVMKLTDLYKILNIGRKDGWWAGKAIGKGLKGNTTKCQIREALSNLSKEQIESLTAFKLEYDEYVDAETGEVRKRINNTLAEKQPLYRLWHLLYSIKDVDELSGALRRLGIENEESIQNLCNLDFRTAGYANKSAKAIGRILPYLMDGMMYSDACELAGFDHSRRINPDRVLLTSLPQIQKNELRQPVVEKILNQLVNVVNALLEKEGPIDESRVELARELKQSKDERNEAFRRNNQNERLNKEYAERIKEYGLTPTRNRIMKMKMWEESEYTCMYCGQPVNVTEFLQGADVEREHIIPRGLLFDNSFTNQVCSCRRCNSQKGMRTAYDFIADDKGQEGLDSYIDRINDLFNRKQISRSKFNRLLVSHKAYMSRKAQGKETEEDKELWENFIDRQLRQSQYIARKSVEMLQQICKNVYFTSGSVTDFVRHQWGYDEILHDLNFERYMKAGLTSMVKQLHSGKEVEVERITNWTKRLDNRHHAVDALAIACTTQGMIQRLNTLNASREGILDELNSKEERVVDPERSMLEKWIYTQPHISYAQAKEAIDNIIISQRPNTRITVPGKRYITKNGKRALVQTGIIVPRGALHAEFVYGRIMKQEADGVTLTPQYVRKYKLGIGAQGFLFNGKEFYKEELKRDSKTGLSSIVVTDKIKDVLEKVVDGGIRHRILERLNRGFEEGADYRANVAQALSNLKNLDEDPIFSDDAKTRPIRTVRKYVSSSTMVAVRKDGNGKPMSFVEPDGNHHVAFYKNEDGTITESIVTKWQAVQRKLNRIPIIIDNPSQTWSEIMGRNDVPEELLQTLPKDKTTFLLSLQIGEAFIMGMDEADFQKAFEEKDMQTLAEHLYFVQSISSSDYRFRRHIEAQYDTNDINKEDKRFLRIRKIQALFEYNPHKAKITVLGD

SEQ ID NO: 1264 - protein, 756 aa, unidentified
  REGION 1..756: note = Description of Unknown: uncultivated organism with predicted taxonomy: Prevotella
  REGION 1..756: note = MG16-183 effector
MKKVLGLDLGVGSIGWCLIEKDDDNTPKRIIRMGSRIVPISSDEESGYTRGNAISKNADRTAKRTSRKCYDRYQLRRQALLNLLKRLGMEPSKKLIFEQNPLELWQKRADAASKEITIEELGRVLLHINQKRGYKHSRLSNSDSKETAYVQEVNSRYDDLKAEGLTIGQHFAAKLKENEQTSADGKKYYTYRIKEQVYPRHAYEEETEQILEVQSRYHADILTPDVCKEIKDIIFYQRDLKSCKNLVSLCEFESYTITKDGKEMTIGPKVAPRTSPLAQLSSILETANNITIRNRRNDELYISPEQRKAIADFLDNHEVMKLTDLYKILNIGRKDGWWAGKAIGKGLKGNTTKCQIREALSNLSKEQIESLTAFKLEYDEYVDAETGEVRKRINNTLAEKQPLYRLWHLLYSIKDVDELSGALRRLGIENEESIQNLCNLDFRTAGYANKSAKAIGRILPYLMDGMMYSDACELAGFDHSRRINPDRVLLTSLPQIQKNELRQPVVEKILNQLVNVVNALLEKEGPIDESRVELARELKQSKDERNEAFRRNNQNERLNKEYAERIKEYGLTPTRNRIMKMKMWEESEYTCMYCGQPVNVTEFLQGADVEREHIIPRGLLFDNSFTNQVCSCRRCNSQKGMRTAYDFIADDKGQEGLDSYIDRINDLFNRKQISRSKFNRLLVSHKAYMNRKAQGKETEEDKELWENFIDRHLRLSPYIARKSVEMLQQICKNVYSTSGSVTDFVRHQWGYDEILH

SEQ ID NO: 1265 - protein, 1154 aa, unidentified
  REGION 1..1154: note = Description of Unknown: uncultivated organism with predicted taxonomy: Bacteroidales
  REGION 1..1154: note = MG16-184 effector
MKKKILGLDLGVGSIGWALIETENDQPKQIIGMGSRIVPISKDDNDQFSKGQAISKNADRTARRTTRKGYDRYQLRRSLLTQVLRQNGMLPERMDENVIDLWKLRSDAASEGHQLTLAQIGRVLYHINQKRGYKHAKADNNGDSKQAKYVEAVNQRYKEIQESKQTIGQHFYLELLRSKVDGVRGPYYTFRIKDKVFPRAAYMDEFDQIMRVQRDYYPDVLTEELIDTLRNRIIFYQRPLKSCKHLVGLCEFEMRPYKTQEGNIVYSGPRCAPRTSPLAQLCAMWESVNNITLTNRNNERYEFSLEERQQIVEHLCTHEVLKITDLYKILDISKKDGWYGGKAIGKGLKGNTTLNQLRKAMNGKYQEWLEMPIERVDDVDNTTAEVFWVVSPKVEETPLFKLWHAVYSLQDTDELAKTLCSKFGITDQEVIEALCKIDFVKPGYANKSHKFIRRLLPYLMKGMMYSEACERIGINHSNSMTAAERNARPLAEHIELLQKNALRQPVIEKILNQMINLVNRLQQEYGPIDEARVELARELKQSREERESAYKAINKNERENAERAAKIAEFGIRPSRSRVQKYKMWEESQHRCFYCGKMVDLAQFLNGADVEIEHIVPRSILFDDSFSNKVCACRECNKEKGNLTAMEYIETKPVGEQEAYKQRVAEAFDAHRISKTKRDHLLWRRADIPQDFIERQLRQSQYIAVKAVEILQKGIRTVWTSGGSVTDFLRHQWGYDEILHTLNLPRYRQVDELTEMVHYEHAGQEHDEERIKNWTKRIDHRHHAIDALTVALTRQSYIQRLNTLEASHDIMEKQVKETGTQYNEKKSILEKWVAEQPHFPVADVTENVDGILVSFRAGKRVTTPARRAIYKGGKRTIVQTGLQVPRGSLTEETVYGRLEDKFVVKYPLDHPSMKPENIVDPTIRALVQKRVEEKGKDAFKEPIYSAEGMEIKSVRCYTSLSENGVVPVKFDEKGQPIGFAKKGNNHHVAIYQDKDGQYQEMVVSFWDAVERKKYGVPSVITNPRELWNSIMDKDLPQEFLLKLPQDDWQYVLSMQENEMFVLGMEEDEFHDALERHDYCSLNKHLYRVQKISHGEYVLRYHTETKVDDKYKGVEKGRDASLKLGALVSIRSFGSLFSKFPHKVKIDIMGRITKA

SEQ ID NO: 1266 - protein, 930 aa, unidentified
  REGION 1..930: note = Description of Unknown: uncultivated organism with predicted taxonomy: Fibrobacter
  REGION 1..930: note = MG16-185 effector
MKKILGLDLGVSSIGWSVISVDKNGDPSEILGMGSRIVPLSTDDANEFSTGNAISKNQKRTQKRTARKGYDRYQLRRENLTAELRKHQMLPDERLIKLPVLDLWTLRANAATEGCKLSLPEIGRVLYHINQKRGYKHAKADEAGDKKQTEYIENVNKRFAMIKELGLTIGQFFANKLKESEVVSEKGTFYTYRTKEQVFPRGAYIAEFDQIIEVQRKFYPQVFTDEFINRLRNEIIFYQRNLKSCKHLVSLCEFEKREYKNKDGKIVFDGPKVAPRTSPLFQICRIWEFVNNIRLDGYKETKALSQDERLKVVDFLDNHEKMTAKDFIKLLGLDKNDEWDLKRYFGKNGVQGNSTKTQLAAALANIPNTSELLRFNLALENSNYVNKSTGEVLKVISSDFQNEPLYMLWHTVYSISDKEELKNALNKKYGITDESVINSLFKIDFVKPGFGNKSAKAIRRILPFLQEGLVYSDACAEAGYNHSDSLTKSENEARTLLARLPQIKKNELRQPVIEKILNQMVNVVNAIYDEYGQIDEIRVELARELKQSKDERNTTASNIAKRERENEKIEAKIQEFGIRSSRNRIQKYRLWEESEQKCFYCGDTVNVKEFLSGLDVEVEHVIPKSLLFDDSFANKVCACRKCNAAKGNKTAYDFMEGQKKEVFDAYVKRVNDFYKDGKISKTKKERLLTTQSKIPSDFIERQLRQTQYIAKKALEMLKNVCYNVYATSGSITDFIRHIWGYDEILHQLNFERYKKGGLTEFREYDHKGETHTEERIQNWSKRLDHRHHAIDALVIAMTRQSIIQRLNHLNTERDAMFQEVEKQSKEWKNDYSMLQEWLRERKHFSTEDVAKKVSNILVSFKAGKRVATIGKRVKYEHEKKFILQTGIVIPRGPLSEESVYGKIKVLDRNKPLKYLFENPQSIVNTDIKSA

SEQ ID NO: 1267 - protein, 1222 aa, unidentified
  REGION 1..1222: note = Description of Unknown: uncultivated organism with predicted taxonomy: Prevotella
  REGION 1..1222: note = MG16-186 effector
MKKVLGLDLGVGSIGWCLVEKDDKNIPLRIIRMGSRIVPITKEEENGYTRGNAISKNADRTVKRTARKCYDRYQLRRKALVNLLKRCGMMPDKGLILEQSPLDLWQKRADAASKEISLEEVGRVLLHINQKRGYKHSRLSNSDKKETAYVQEVNSRYDKLKAEGLTVGQHFAAKLKENEQISADGKKYYNYRIKEQVYPRHAYEEEAKRILEVQSQFHTDVLTTNVCKEIFDTIFYQRDLKSCKNLVSFCEFESYTIKRNGKDITIGPKVAPRTSPLAQLSSILETANNITIRNRRNDELYISPEQRQAIANFLDNNEVMKLTDLYKILNIGRKDGWWAGKAIGKGLKGNTTKCQIRKALSKLSQEQIDKLTSFNLIFDEYVDEETGELRKRINNSHAEHQPLYRLWHLIYSIKDNDELSIALRSLGIEDEVCIHNLCNLDFRTAGYANKSAKAIGRILPYLMEGMMYSEACNRAGFDHSRRVNPERELLTSLPQIQKNELRQPIVEKILNQLVNVVNALLEKEGTIDEIRVELARELKQSKDERNETYRRNNQNEKKNKEYAERIKKYELTPTRNRIMKMKMLEESEYKCMYCGQPVKEKEFLQGADVEREHIIPRALLFDNSFTNQVCSCRSCNSQKGMRTAYDFIADDKGQEGLEAYIERINDLFNKKKISRSKLNRLLVSYKAYVSRKAQGKETEEDVQLWENFIDRQLRQSQYIAKKSVEILQQVCKNVYTTSGSVTDFVRHQWGYDEILHDLNFERFKKANLTTMVKQLHSGKEVEVERIKDWTKRLDNRHHAVDALAIACTTQGMIQRLNTLNASRDAMLDELNNKEQRMIDSERSMLEKWIISQPHVSCVEAKKEIDKILISLRPNTRITVPGKRYITKNGKRTLVQTGIIVPRGALHAEFVYGRIMKQEADGVTLTPQYVRKYKLGIGTQGYIFNGNETYKEELKKDKKTGLSQIVVTDKIKDVLDKIVDGGIRKRILERLNRGFEDGTDYRTNTAKALENLKNLDEDPIYSDDAKTRPIRTVRKYVNSSTMVAVRKDDNGKPVSFVVPDDNHHVAFYKDKDGVITESIVTKWQAVQRKLNHIPIIVDNPTQTWNDLVGRNDVPEELLQSLPKDNSEFLLSLQIGEAFIMGMEDADFHRAIEEKDIHNLAEHLYFVQNISSNNYRMRRHVEASFDTSDMNKEDQRFLNVSSIGAFFNYNPHKVKVTILGDIIK

SEQ ID NO: 1268 - protein, 1155 aa, unidentified
  REGION 1..1155: note = Description of Unknown: uncultivated organism with predicted taxonomy: Bacteroidales
  REGION 1..1155: note = MG16-187 effector
MKKKILGLDLGVGSIGWALIETEDNQPQKILGMGSRIVPISKDDNDQFSKGQAITKNADRTARRTTRKGYNRYQMRRALLTQVLRNNNMLPERMDENVIDLWKLRSDAATEGHQLTLPQIGRVLYHINQKRGYKHSKADENGDSKQTKYVEAVNQRFKDIQEAHQTIGQHFYLELLRTRVHRENGDYYTYRIKDQVFPRAAYIAEFDQIMSVQRAYYPEVLTDEFIDTLRNRIIFYQRPLKSCKHLVSLCEFEMRPYKTKDGKIVYGGPKCAPRTSPLAQLCAMWETANNITLTNRNNERFEFTLDQRRQIVDFLCHNKEMKVTHLQKILGISKKDGWYGGKAIGKGIKGNATLNQLREALQGKYDQWLEMPIKRIDVVDATTSEVFWAVNPDVEETPLFKLWHAVYSLQNADELAKTLREKFQITDEAVIEALCKIDFVKPGYANKSHKFIRRLLPYLMEGMMYSEACERININHSNSMTREEREQRPLSARIQLLQKNQLRQPVVEKVLNQMINIVNSLKDQYGEIDEARVELARELKQSRDERESAYRAMGQNERRNKEIAAKIAEFGIRPSRSRIQKYKMWEKSLHQCFYCGKTIDLSEFLNGADVEIEHIIPRSILFDDSFSNKVCACRRCNQEKGNQTAMEYMETKSAAEQEAYKQRVDEAFTAKRISKTKRDHLLWRKADIPSDFIERQLRQSQYIAVKAVEVLQDGIRQVWTSGGSVTDFLRHQWGYDEILHTLNLPRYHQVEGLTEFVDFEHAGQKHTEERIKNWSKRIDNRHHAIDALTVALTQQGYIQRLNTLEASHDFMEKQVKEAGTKYNEKKSILEKWINEQPHFSVEDVTNAVDGILVSFRAGKRVTTPARRAIYKGGKRVIVQRGIEVPRGALTEETIYGKLGDKFTVKYPLDHPSMKPENIVDPTIRALVQKRVAERGKDAFKEPLYSAEGMKIKSVRCYTSLSENGVVPVKYDEAGKPIGYAKKGNNHHIAIYQDKDGQYQEMVVSFWDAVERKRYGVPVVITNPHEVWDSLLNKDLPQEFLAKLPNDNWQFVLSMQENEMFVLGLEDDEFNDAIERQDYAALNKHLYRVQKISHREYTFRYHTETKVDDKYEGMENGRTTSISLGASIPFKSISALLAKFPHKVKVDLLGHIHSKK

SEQ ID NO: 1269 - protein, 1222 aa, unidentified
  REGION 1..1222: note = Description of Unknown: uncultivated organism
  REGION 1..1222: note = MG16-188 effector
MKKVLGLDLGVGSIGWCLIEKDDNNTPKRILRMGSRIVPISSDEETGYTKGNAISKNADRTAKRTARKCYDRYQLRRQALVNLLKRLGMEPNKNLMLEQTPMELWQKRADAASKEISLEELGRVLLHINQKRGYKHSRLSNSDSKETAYVQEVNSRYDDLKAEELTVGQHFAAKLKENEQISADGKKYYNYRIKEQVYPRHAYEEETKKILEVQSRYHSDVLTPDVCKEMMDIIFYQRDLKSCKNLVSLCEFESYTITKDGKEITIGPKVAPRTSPLAQLSSILETANNITIRNKRNDELYISPEQRKAIADFLDNHEVMKLTDLYKILNIGRKDGWWAGKAIGKGLKGNTTKCQIREALSAHPKEQVDSLIAFQLEFDEYVDEETGEVSKRINNTLAEQQPLYKLWHMLYSIKDNRELSGALQHLGIEDNESIEKLCNLDFRTAGYANKSAKAIGRILPYLMEGVMYSEACERAGLDHSRRIDPNRPLLKHLPQIQKNELRQPVVEKILNQLVNIVNALLEKEGAIDEIRVELARELKQSKDERNETFKRNNQNERQNKEYAERIKKYGLTPTRNRIMKLKMWEESEHACMYCEQPVDPIEFLKGSDVEREHIIPRGLLFDNSFTNQVCSCRRCNSKKGMRTAYDFIADDKGQEGLNAYIEHINDLFDKKKISRSKLNRLLVSHKAYISRKAQGKETEEDKDLWENFIDRQLRQSQYIAKKSVEMLQLVCKNVYVTSGSVTDFVRHQWGYDELLHDLNFERFKKAGLTTMVKQLHSGEEVEVERIANWTKRLDNRHHAVDALAIACTTQSMIQRLNTLNASRDDMLEELNSKDQRLVDPERSMLEKWVFIQPHITYADAKKEIDKIVISQRPNTRITVPGKRYITKNGKRTLVQTGIIVPRGALHAEFVYGRIMKQKTDGVTMTPQYVRKYKLGIGAQGFLFNGKEFYKEELKKDSKTGLSKIVVTDKIKDVLEKIVDGGIRQRILERLNRGFEEGTDYRANVAQALANLKNLDEDPIYSDDAKTRPIRTVRKYVSSSTMVAVRKDDNGKPVAFVEPDGNHHVAFYKDENGVITETIVTKWQAVQRKLYHIPIIIDNPSQTWNEVLERKDIPEELLQSLPKDSFTFLLSLQIGEAFIMGMEEADYQRALEEKDMQTLAKHLYFVQSISSCDYRFRRHVEAQYDTNDINKEDLRFLRIRNLQALFEYNPQKVKVTVLGDLIH

SEQ ID NO: 1270 - protein, 1222 aa, unidentified
  REGION 1..1222: note = Description of Unknown: uncultivated organism
  REGION 1..1222: note = MG16-189 effector
MKKVLGLDLGVGSIGWCLIEKDDNNTPKRILRMGSRIVPISSDEETGYTKGNAISKNADRTAKRTARKCYDRYQLRRQALVNLLKRLGMEPNKNLMLEQTPMELWQKRADAASKEISLEELGRGLLHINQKRGYKHSRLSNSDSKETAYVQEVNSRYDDLKAEELTVGQHFAAKLKENEQISADGKKYYNYRIKEQVYPRHAYEEETKKILEVQSRYHSDVLTPDVCKEMMDIIFYQRDLKSCKNLVSLCEFESYTITKDGKEITIGPKVAPRTSPLAQLSSILETANNITIRNKRNDELYISPEQRKAIADFLDNHEVMKLTDLYKILNIGRKDGWWAGKAIGKGLKGNTTKCQIREALSAHPKEQVDSLIAFQLEFDEYVDEETGEVSKRINNTLAEQQPLYKLWHMLYSIKDNRELSGALQHLGIEDNESIEKLCNLDFRTAGYANKSAKAIGRILPYLMEGVMYREACERAGLDHSRRIDPNRPLLKHLPQIQKNELRQPVVEKILNQLVNIVNALLEKEGAIDEIRVELARELKQSKDERNETFKRNNQNERQNKEYAERIKKYGLTPTRNRIMKLKMWEESEHACMYCEQPVDPIEFLKGSDVEREHIIPRGLLFDNSFTNQVCSCRRCNSKKGMRTAYDFIADDKGQEGLNAYIEHINDLFDKKKISRSKLNRLLVSHKAYISRKAQGKETEEDKDLWENFIDRQLRQSQYIAKKSVEMLQLVCKNVYVTSGSVTDFVRHQWGYDELLHDLNFERFKKAGLTTMVKQLHSGEEVEVERIANWTKRLDNRHHAVDALAIACTTQSMIQRLNTLNASRDDMLEELNSKDQRLVDPERSMLEKWVFIQPHITYADAKKEIDKIVISQRPNTRITVPGKRYITKNGKRTLVQTGIIVPRGALHAEFVYGRIMKQKTDGVTMTPQYVRKYKLGIGAQGFLFNGKEFYKEELKKDSKTGLSKIVVTDKIKDVLEKIVDGGIRQRILERLNRGFEEGTDYRANVAQALANLKNLDEDPIYSDDAKTRPIRTVRKYVSSSTMVAVRKDDNGKPVAFVEPDGNHHVAFYKDENGVITETIVTKWQAVQRKLYHIPIIIDNPSQTWNEVLERKDIPEELLQSLPKDSFTFLLSLQIGEAFIMGMEEADYQRALEEKDMQTLAKHLYFVQSISSCDYRFRRHVEAQYDTNDINKEDLRFLRIRNLQALFEYNPQKVKVTVLGDLIH

SEQ ID NO: 1271 - protein, 1224 aa, unidentified
  REGION 1..1224: note = Description of Unknown: uncultivated organism with predicted taxonomy: Prevotella ruminicola
  REGION 1..1224: note = MG16-190 effector
MKKVLGLDLGVGSIGWCLIEKDDNNTPRRILRMGSRIVPISSDEESGYTRGNAISKNADRTAKRTARKCYDRYQLRRQALVNLLKILGMEPNKNLMFEQTPLELWQKRADAASKEITLEELGRVLLHINQKRGYKHSRLSNSDSKETAYVQEVNSRYVVLRAEGLTVGQHFAAKLKENEQESTDGKKYYNYRIKEQVYPRHAYEEEVKKILEVQSQYHSDVLTSDVCKEIGDIIFYQRDLKSCKNLVSFCEFESYTIKKDGKKITIGPKVAPRTSPLAQLSSILETANNITIRNRRNDELYISPEQRKAIAEFLDNHEVMKLTDLYKILNIGKKDGWWAGKAIGKGLKGNTTKCQIREALSGLPKEQVDSLTAFKLEIDEYVDEETGEVRKRIDNTKAEKQPLYRLWHLLYSIKDNDELTGALRHLGIENKEIIEKLCKIDSRTAGYANKSAKAIGRILPYLMDGVMYSEACGRAGYDHSRRVNPDRVLLTHLPQIQKNELRQPVVEKILNQLVNIVNALLEKEGAIDEIRVELARELKQSKDERNEVFKRNSQNERKNKEYAERIKEYGLTPTRNRIMKMRMWEESEYTCMYCGQPVNVSEFLKGADVEREHIIPRGLLFDNSFTNQVCSCRRCNSKKGMRTAYDFIADEKGQEGLDIYIDRINDLFNRKKISRSKFNRLMASHKAYMSRKAQGKETDEDKELWENFIDRQLRQSQYIAKKSVEMLQQVCKNVYTTSGSVTDFVRHQWGYDELLHELNFERFKKAGLTAMVKQLQSGKEVEVERIKDWTKRLDNRHHAVDALAIACTTQGMIQRLNTLNASRADMLEELSSNDRRLVDPDRSMLEKWIYVQPHISYAEAKNEIDKIVISQRPNTRITVPGKRYVIKSGKRTLAQTGIIVPRGALHAEFVYGRIQKQEADGDTKTYQYVRKYKLGIGAQGFLFNGKEFYKEELKKDSKTGLSSIVVTDKIKDVLDKIVDGGIRQRILERLNRGFEEGADYRANVARALENLKNLDEDPIYSDDAKTRPIRTVRKYVSSSTMVAVRKDSNGKAISFVEPDGNHHVAFYKDENDVITENIVTKWLAVQRKLNHMPIIIDNPSQTWSEILKRNDVPEELLQSLPKDSSTFLLSLQIGEAFIMGMEDGDYQKALEEKDMQTLADHLYFVQNISSNNYRLRRHVESSFDTTDMNKEDQRFLNIKSVNSFFNSNPHKVKITILGDIITDV

SEQ ID NO: 1272 - protein, 1155 aa, unidentified
  REGION 1..1155: note = Description of Unknown: uncultivated organism with predicted taxonomy: Labilibaculum filiforme
  REGION 1..1155: note = MG16-191 effector
MKKKILGLDLGVGSIGWALIETEDNQPQKILGMGSRIVPISKDDNDQFSKGQAITKNADRTARRTTRKGYNRYQMRRALLTQVLRNNNMLPERMDENVIDLWKLRSDAATEGHQLTLPQIGRVLYHINQKRGYKHSKADENGDSKQTKYVEAVNQRFKDIQEAHQTIGQHFYLELLRTRVHRENGDYYTYRIKDQVFPRAAYIAEFDQIMSVQRAYYPEVLTDEFIDTLRNRIIFYQRPLKSCKHLVSLCEFEMRPYKTKDGKIVYGGPKCAPRTSPLAQLCAMWETANNITLTNRNNERFEFTLDQRRQIVDFLCHNKEMKVTHLQKILGISKKDGWYGGKAIGKGIKGNATLNQLREALQGKYDQWLEMPIKRIDVVDATTSEVFWAVNPDVEETPLFKLWHAVYSLQNADELAKTLREKFQITDEAVIEALCKIDFVKPGYANKSHKFIRRLLPYLMEGMMYSEACERININHSNSMTREEREQRPLSARIQLLQKNQLRQPVVEKVLNQMINIVNSLKDQYGEIDEARVELARELKQSRDERESAYKAMGQNERRNKEIAAKIAEFGIRPSRSRIQKYKMWEKSLHQCFYCGKTIDLSEFLNGADVEIEHIIPRSILFDDSFSNKVCACRRCNQEKGNQTAMEYMETKSAAEQEAYKQRVDEAFTAKRISKTKRDHLLWRKADIPSDFIERQLRQSQYIAVKAVEVLQDGIRQVWTSGGSVTDFLRHQWGYDEILHTLNLPRYHQVEGLTEFVDFEHAGQKHTEERIKNWSKRIDNRHHAIDALTVALTQQGYIQRLNTLEASHDFMEKQVKEAGTKYNEKKSILEKWINEQPHFSVEDVTNAVDGILVSFRAGKRVTTPARRAIYKGGKRVIVQRGIEVPRGALTEETIYGKLGDKFTVKYPLDHPSMKPENIVDPTIRALVQKRVAERGKDAFKEPLYSAEGMKIKSVRCYTSLSENGVVPVKYDEAGKPIGYAKKGNNHHIAIYQDKDGQYQEMVVSFWDAVERKRYGVPVVITNPHEVWDSLLNKDLPQEFLAKLPNDNWQFVLSMQENEMFVLGLEDDEFNDAIERQDYAALNKHLYRVQKISHREYTFRYHTETKVDDKYEGMENGRTTSISLGASIPFKSISALLAKFPHKVKVDLLGHIHSKK

SEQ ID NO: 1273 - protein, 1222 aa, unidentified
  REGION 1..1222: note = Description of Unknown: uncultivated organism with predicted taxonomy: Bacteroidales
  REGION 1..1222: note = MG16-192 effector
MKKVLGLDLGVGSIGWCLIEKDDNNTPKRILRMGSRIVPISSDEETGYTKGNAISKNADRTVKRTARKCYDRYQLRRKALVNLLKRLGMEPNENLMFEQTPIELWQKRADAASKEVSLEELGRVLLHINQKRGYKHSRISNSDIKETAYVQEVNSRYDDLKAEGLTIGQHFAAKLKENEQETADGKKYYNYRIKEQVYPRHAYEEEVKQILEVQSQYNPDVLSSDVCKEIMDIIFYQRDLKSCKNLVSLCEFESYTITKDGKVINIGPKVAPRTSPLAQLSSILETANNITIRNRKNDELYISPEQRKAIADFLDNHEVMKLTDLYNILNIGRKDGWWAGKAIGKGLKGNTTKCQIREALSGLPKEQVDSLTAFNLEIDENVDEETGEVRKRINNTQAEQQPLYKLWHMLYSIKDNKELAGALNHLGIEDEESIEKLCKLDFRTAGYANKSAKAIGRILPYLMEGMMYSEACELAGFDHSRRINPDRVLLTHLPQIQKNELRQPVVEKILNQLVNIVNALLENEGAIDEIRVELARELKQSKDERNEAFKRNNQNERLNKELAERIMKYGLTPTRNRILKLKMWEESEHSCMYCGQPVDPVEFLKGVDVEREHIIPRGLLFDNSFTNQVCSCRRCNSKKGMRTAYDFIADDKGQEGLDTYIDRINDLFNRKKISRSKFNRLLASHKAYISRKSQGKETDEDKELWENFIDRQLRQSQYIAKKSVEILLQVCKNVYTTSGSVTDFVRHQWGYDELLHELNFERFKKAGLTAMVKQLHSGKEVEVERIKDWTKRLDNRHHAVDALAIACTTQGMIQRLNTLNASRDVILEELNSNDQRLVDPDRSMLEKWIYVQPHISYAEAKNEVDKIVISQRPNTRITVPGKRYVTKNGKRTLAQTGIIVPRGALHAEFVYGRIMRQEADGVTMTPQYVRKYKLGIGAQGFLFKGDEVYKEEVKKNSKTGLSKIVVTDKIKDVLDKIVDGDIRQRILERLNRGFEEGVDYRVNVAKALANFKNLDDDPVYSDDAMTRPIRTVRKYVSSSTMVAIRMDSNGRPIAFVEPDDNHHVAFYKDEDDEKKEIVVTKLLAVQRKLNHIPIIIDNPSQTWSEVLGRNDVPEELLQSLPKDKSIFLLSLQKGEAIIMGLEEMDYQRAILAKDMRTLCNHLFYVQSASSRDYRFRRHVEVKYDTKDINKDDMRFLRIRTINELFKINPHKVKVTVLGDIIE

SEQ ID NO: 1274 - protein, 1226 aa, unidentified
  REGION 1..1226: note = Description of Unknown: uncultivated organism
  REGION 1..1226: note = MG16-193 effector
MKKILGLDLGVGSIGWSVISVDENGDPSEILGMGSRIVPLSTDDANEFSTGNAISKNQKRTQKRTARKGYDRYQLRRENLTAELRKHQMLPDEHLIKLPVLDLWTLRANAATEGFKLSLPEIGRVLYHINQKRGYKHAKADEAGDKKQTEYVENVNKRFAMIKDLGLTIGQFFASKLKESEVVSEKGKFYTYRTKEQVFPRGAYIAEFDQIIEVQRKFYPQVFTDEFINRLRNEIIFYQRNLKSCKHLVSLCEFEKHEYKNKDGKIVFDGPKVAPRTSPLFQICRIWEFVNNIRLENGYKEARTLSQDERLKVVDFLDNHEKMTAKDFTKLLELNKNDEWDLKRYFGKNGTQGNTTKTQLATALANIPNASELLQFNLTLENSNYVNEKTGEVLKVVSSDFQNEPLYMLWHTVYSLSDKEGLKNTLNKKYGITEESVINNLFKIDFVKPGFGNKSAKAIRRILPFLREGLVYSDACVEAGYNHSDSLTKSENEARTLLSRLPQIKKNELRQPVIEKILNQMVNIVNAIYDEYGQIDEIRVELARELKQTKDERNTTASNIAKRERENKNIEAKIQEFGIRSSRNRIQKYRLWEESDQKCFYCGQPVQAKEFLSGLDVEVEHIIPKSLLFDDSFANKVCACRKCNAAKGNKTAYDFMKGQKEEVFDAYVKRVNDFYKDGKISKTKKERLLTTQSDIPSDFIERQLRQTQYIAKKAIEMLKDICYNVYATSGSVTDFIRHTWGYDEILHQLNFDRYKKGGLTELREYDHKGETHTEERIQNWSKRLDHRHHAIDALVIAMTRQSIIQRLNHLNTERDAMFQEVEKQSKEWKNDYSMLQEWLRERKHFPTEDVAKKVSDILVSFKAGKRVATIGKRVKYEHGKKIVLQTGITIPRGPLCEESVYGKIKVLDRNKPLKYLLENPQYIVNADIKFAITNRLAQYENDVKKAVQSLKKSPVVLANGKKLENADCYKEEFVIKYSLNGFKAKDIDSVVDNRIRNVLYKRLEEYNGNEKEAFKDIENNPIYADATHKIKIRNVRCFTGLSAVVPVKKDENGNAIGFVKPGNNHHVAIYKDENGNLQESVVTFWHAVERKKYGLPIVITNPIDAWKLAREQNCPKEFLDSLPNENWIYEQSLQENEMFVMGLDDNMYDKAVAEKNYALLNQHLYRVQKISSSDYYFRYHLETKLDDSASAIEIGKYKRIRSFKAFALAKPHKVKISLLGKLITRV

SEQ ID NO: 1275 - protein, 760 aa, unidentified
  REGION 1..760: note = Description of Unknown: uncultivated organism with predicted taxonomy: Sediminibacterium sp. C3
  REGION 1..760: note = MG16-194 effector
MKKVLGLDLGVGSIGWCLVEKDDNNTPTRILRMGSRIVPISSDEETGYTKGNAISKNADRTAKRTARKCYDRYQLRRKALQEMLKRLGIEPNKKLMLEQAPLELWQKRADAVSTKIALEDLGRVLLHINQKRGYKHSRLNNSDSKETAYVQEVNNRYDELKAEGLTVGQHFAAKLKDNEQTSADGKKYYNYRIKEQVFPRHAYEEEAKKILETQSRYYPDLLTPDVCKEIMNIIFYQRDLKSCKNLISYCEFESYTITKDGKEITIGPKVAPRTSPLAQLSSILESANNITIRNRKNDELYISPEQRKALADFLDNHEVMKVSDLYGILNIGRKDGWWAGKAIGKGLKGNTTKCQLREALKNLPQEKINALTSFNLEYDEYVDEETGEVRKRVNNHLAERQPLYRLWHLIYSIKDSDELAAALRRFGIDDEESILNLCNLDFRTPGYANKSAKAIGRILPYLAEGVMYSDACNMAGFDHTRRLNPNRPLLTSLPQIQKNELRQPVVEKILQQVVNIVNTLIEKEQSIDEIRVELARELKQSKDERNETFRRNSQNEKKNKEFAEHIKEYNLTPTRNRILKWKLYEESDHSCMYCGQSINIRDFLQGADAEREHIVPRGLLFDNSFTNQVCACRSCNSKKGMRTAYDFIEDEKGEEGLHSYIEHINYLFNKKNISRSKFNRLLVSHKAYLKRKALGKETEEDKELWDNFIDRQLRLSQYIAKKSVEMLQQVCRNVYSTSGSVTDFVRHQWGYDELLHDLNF

SEQ ID NO: 1276 - protein, 1248 aa, unidentified
  REGION 1..1248: note = Description of Unknown: uncultivated organism with predicted taxonomy: Bacteroides
  REGION 1..1248: note = MG16-195 effector
KMKNILGLDLGTTSIGWALIKTDNNNIPCEIRGMGVRRVPLAENEGDKFAQGQSVTINADRTKARGIRRNNDRYKLRRQALSEKLSSLGIEPNDSLMKLHMMDLWQLRANAATDRVSLPELGRILHHLNKKRGYKHSSKDEDKSMRDFLKNVRERYSELHCLNMTLGQFFAKKLLETAVTKGDKTYYVFRIKDLVFPRKAYEEEYDTIMQCQKKFYPNVLTDEVIDYIRNHIIYYQREPRSCKHLVSVCEFEKRHFYDKEGQLKRNNRNEIIYDGPKVAPRTSPIFQLYITCQSANNIRFHNKKKDYLYITREQRQRIVHFMDTNEKLKLADVKRILEINDKSEWYCDNAIKNGIKGNTTKCAIVNALSSLPQEKIAEITRFHLETEPTKDVDTETGEVLVKIKNNYQHEPLYRLWHIIYSIKKEEERTHAVTKFLQSFGVDNDDIVQKLSNIDFTTPGYGNISAKAICRILPYMMEGIEYSEACEYVGINHSNSLSKEENERRELMCQLPAIKKNSLRQPTVEKILNQTINVFNRINAELSQTGECINEVRVELARELKQSKDERHDTSEVIKALENKNKEYKTFIEKEYKLKATRKNLLRYRLWIESNQSCFYCLKPIKFTPFANESEEEREHILPKALHYDDSFANQVCSCKDCNSTKGGRTAMDYMRTTPYLQHYIDRVNKLYQANKISGKKYSHLLASYDDYQLRKKEGKETKEDILIWEKPIDRQLRLSQYISKKAMEILSFGCRDVVATSGSITAIIRHAWGWDTILEELNIQTYRNANLTEVIEVKSKGQNKKMETIKNWTKRLDNRHHAIDALVVACTSSSIIQRINTLNASKQKMRDEITSARKKWDENNILTQWIREKNPLNRKEVLEHVSSIFISMKAGKKVTVPGKRKEFKHGKAMIKQEGLRIPRGPLHEEGLYGSILIEGKKEIVIRYKLGKGTIGYLFTGKEKCEVKKNGNEYTLKDGIAAILDSIVDKHIRNLVENRLNRIFPDGETYRSEAEKALKEGREYNGEKRCKEALEQLKGLDDDPLFHDKDETRIIKSIRCKTGLNAVRPIRFNDNNEAITYVLPKNNHHVAIYRDENGKFIECVCTFWDAVGRVNQNIPCIISNIEEVWNDIHRREANGEYFSVEFKNTLPKEDWTFVESMQQNEMFVMDMDRETLERNIASGNYSVISQHLYRVQALSAGDYIFRIHTDTKSERTKEANLSKRFIRLSLKKFVASEHQKVQLSILGGITIAQ

SEQ ID NO: 1277 - protein, 891 aa, unidentified
  REGION 1..891: note = Description of Unknown: uncultivated organism with predicted taxonomy: Gammaproteobacteria bacterium
  REGION 1..891: note = MG16-196 effector
MKKVLGLDLGVGSIGWCLIEKDDNNTPKRILRMGSRIVPISSDEETGYTKGNAISKNADRTAKRTARKCYDRYQLRRKALVNLLKRLGMEPNENLMFEQTPIELWQKRADAASKEVSLEELGRVLLHINQKRGYKHSRISNSDSKETAYVQEVNSRYDDLKAEGLTIGQHFAAKLKENEQETADGKKYYNYRIKEQVYPRHAYEEEVKQILEVQSQYNPDVLSSDVCKEIMDIIFYQRDLKSCKNLVSLCEFESYTITKDGKVINIGPKVAPRTSPLAQLSSILETANNITIRNRKNDELYISPEQRKAIADFLDNHEVMKLTDLYNILNIGRKDGWWAGKAIGKGLKGNTTKCQIREALSGLPKEQVDSLTAFNLEIDENVDEETGEVRKRINNTQAEQQPLYKLWHMLYSIKDNKELAGALNHLGIEDEESIEKLCKLDFRTAGYANKSAKAIGRILPYLMEGMMYSEACELAGFDHSRRINPDRVLLTHLPQIQKNELRQPVVEKILNQLVNIVNALLENEGAIDEIRVELARELKQSKDERNEAFKRNSQNERENKEYAERIKEYGLTPTRNRIMKMRMWEESEYTCMYCGQPVNVVEFLKGADVEREHIIPRGLLFDNSFTNQVCSCRRCNSKKGMRTAYDFIADDKGQEGLDTYIDRINDLFNRKKISRSKFNRLLASHKAYISRKSQGKETDEDKELWENFIDRQLRQSQYIAKKSVEILLQVCKNVYTTSGSVTDFVRHQWGYDELLHELNFERFKKAGLTAMVKQLHSGKEVEVERIKDWTKRLDNRHHAVDALAIACTTQGMIQRLNTLNASRDVILEELNSNDQRLVDPDRSMLEKWIYVQPHISYAEAKNEVDKIVISQRPNTRITVPGKRYVTKNGKR

SEQ ID NO: 1278 - protein, 1250 aa, unidentified
  REGION 1..1250: note = Description of Unknown: uncultivated organism with predicted taxonomy: Bacteroides
  REGION 1..1250: note = MG16-197 effector
MKNILGLDLGTTSVGWALIKAEDNNTPVEIQGMGVRIVPLAENEGDKFTRGQDVTVNADRTTARGIRRNYDRYQLRRQALTEKLRQLNMLPDENLIKLPVLELWQLRANAAKEKVTLSELGRVLYHLNQKRGYKHSQADKKDSKQRAYVKEINSRYTELNSLGMTIGQFFAQKLEETAVTHDGKTLFVYRIKDQIYPRQAYEEEYDIIMKCQQGFYPDILTDEVIDEIKNRIIYYQRDLRSCKHLVSICEFEKRCFYDAEGNVKRNEKGEIIYDGPKVAPRTSPLFQIFKNWQSINNIRFHNRRNEYLFISKEQRQVIAGVMDNAETLKLKDVQSVLGLTSKSGWYCDKAMKSGIKGNTTKCAILSALSSLPDSTIKDITRFNLETEETKNVDEETGEILLRIKNTYLDEPLYRLWHIIYSIKNVDERFNAIAKFLKEFNVEDASVVNALNDIDFVTPGYANLSSKAMCKMLPYLMDGLDYSDSCEYVGYNHSGSLTKEENANRELLNQIPALKKGELRQPTVEKILNQTINVFNQLSARLEKRGERIDEVRVELARELKQSKDERKEASDGIRKQQKRNEEYAKMLVEEGVRPTRNRILRYRLWEESNKRCFYCGQPISFNEFIKSSDAEREHVIPKALMFDDSFANQVCSCRECNKEKGGRTALDYMRTKSNLQAYLDRVDDMYQSHQIGGKKHSHLLASYDDYLSRKKEGKETKEDIMIWETPIERQLRLSQYISKKAQEILKTACREVVATSGTITDLIRHTWGYDTILHELNFPNYKEAGLTSFVTDEKTNQQREVIKDWSKRLDHRHHAVDALAVACTSRSIVQHINTLHASRDEMRKEVNSARKDWKDNNLLQQWIMEKKPFDRQYVLHKVASILVSMKAGKRTTVPGKRKVYKNGKPITIQTGLRIPRGQLHEQTIYGAIKQYDKDGKETTKIVTRYKVEDIFKGKETCDVVLDKKTNQYYINDEIEKALSYVVDKHIRDVIKERLNEAFPDGETYRSEAEKALVEGKPYKGENRCKQAFEQLKTLDEHPLYADKNKSIVIKKVRCYTGLSAVQPLRYNNNNDPISYVLTKNNHHVAIYADENGKYKECIYTFWQAVERSKYRLPLIIKDPKALWDEITQRENNGENFPDSLIKSLPMRDWTFIESLQSNDMFVMDMDDNDFEICISTNNYEELGKHIYRIQSISTLDYFFRLHTDTTSTTTPEAALSKRFIRIKSFKSYIAHNPHKIQVSLLGKIFTNQND

SEQ ID NO: 1279 - protein, 818 aa, unidentified
  REGION 1..818: note = Description of Unknown: uncultivated organism with predicted taxonomy: Bacteroidales
  REGION 1..818: note = MG16-198 effector
MKKVLGLDLGVGSIGWCLIEKDDNNTPKRILRMGSRIVPISSDEETGYTKGNAISKNADRTAKRTARKCYDRYQLRRQALVNLLKRLGMEPNKNLMFEQTPIELWQKRADAASKEVSLEELGRVLLHINQKRGYKHSRISNSDIKETAYVQEVNSRYDDLKAEGLTIGQHFAAKLKENEQETADGKKYYNYRIKEQVYPRHAYEEEVKQILEVQSQYNPDVLSSDVCKEIMDIIFYQRDLKSCKNLVSLCEFESYTITKDGKVINIGPKVAPRTSPLAQLSSILETANNITIRNRKNDELYISPEQRKAIADFLDNHEVMKLTDLYNILNIGRKDGWWAGKAIGKGLKGNTTKCQIREALSGLPKEQVDSLTAFNLEIYENVDEETGEVRKRINNTQAEQQPLYKLWHMLYSIKDNKELAGALNHLGIEDEESIEKLCKLDFRTAGYANKSAKAIGRILPYLMEGMMYSEACELAGFDHSRRINPDRVLLTHLPQIQKNELRQPVVEKILNQLVNIVNALLENEGAIDEIRVELARELKQSKDERNEAFKRNNQNERLNKELAERIMKYGLTPTRNRILKLKMWEESEHSCMYCGQPVDPVEFLKGVDVEREHIIPRGLLFDNSFTNQVCSCRRCNSKKGMRTAYDFIADDKGQEGLDTYIDRINDLFNRKKISRSKFNRLLASHKAYINRKALGKETDEDKELWENFIDRQLRQSQYIAKKSVDMLQQVCKNVYTTSGSVTDFVRHQWGYDELLHELNFERFKKAGLTAMVKQLHSGKEIEVERIKDWTKRLDNRHHAVDALAIACTTQGMIQRLNT

SEQ ID NO: 1280 - protein, 988 aa, unidentified
  REGION 1..988: note = Description of Unknown: uncultivated organism with predicted taxonomy: Gammaproteobacteria bacterium
  REGION 1..988: note = MG16-199 effector
MKKVLGLDLGVGSIGWCLIEKDDNNTPKRILRMGSRIVPISSDEETGYTKGNAISKNADRTAKRTARKCYDRYQLRRKALVSLLKRLGMEPNENLMFEQTPIELWQKRADAASKEVSLEELGRVLLHINQKRGYKHSRISNSDSKETAYVQEVNSRYDDLKAEGLTIGQHFAAKLKENEQETADGKKYYNYRIKEQVYPRHAYEEEVKQILEVQSQYNPDVLSSDVCKEIMDIIFYQRDLKSCKNLVSLCEFESYTITKDGKVINIGPKVAPRTSPLAQLSSILETANNITIRNRKNDELYISPEQRKAIADFLDNHEVMKLTDLYNILNIGRKDGWWAGKAIGKGLKGNTTKCQLREALSGLPKEQVDSLTAFNLEIYENVDEETGEVRKRINNTQAEQQPLYKLWHMLYSIKDNKELAGALNHLGIEDEESIEKLCKLDFRTAGYANKSAKAIGRILPYLMEGMMYSEACELAGFDHSRRINPDRVLLTHLPQIQKNELRQPVVEKILNQLVNIVNALLENEGAIDEIRVELARELKQSKDERNEAFKRNNQNERLNKELAERIMKYGLTPTRNRILKLKMWEESEHSCMYCGQPVDPVEFLKGVDVEREHIIPRGLLFDNSFTNQVCSCRRCNSKKGMRTAYDFIADDKGQEGLDTYIDRINDLFNRKKISRSKFNRLLASHKAYISRKSQGKETDEDKELWENFIDRQLRQSQYIAKKSVDMLQQVCKNVYTTSGSVTDFVRHQWGYDELLHELNFERFKKAGLTAMVKQLHSGKEVEVERIKDWTKRLDNRHHAVDALAIACTTQGMIQRLNTLNASRDVILEELNSNDQRLVDPDRSMLEKWIYVQPHISYAEAKNEVDKIVISQRPNTRITVPGKRYVTKNGKRTLAQTGIIVPRGALHAEFVYGRIMRQEADGVTMTPQYVRKYKLGIGAQGFLFKGDEVYKEEVKKNSKTGLSKIVVTDKIKDVLDKIVDGDIRQRILE

SEQ ID NO: 1281 - protein, 1233 aa, unidentified
  REGION 1..1233: note = Description of Unknown: uncultivated organism with predicted taxonomy: Fibrobacter
  REGION 1..1233: note = MG16-200 effector
MKKILGLDLGVGSIGWSVISVDENGDPSEILGMGSRIVPLSTDDANEFSTGNAISKNQKRTQKRTTRKGYDRYQLRRENLTAELRKHQMLPDEHLIKLPVLDLWTLRANAATEGQKLSLPEIGRVLYHINQKRGYKHAKADEAGEKKQTEYVENVNKRFAMIKDLGLTIGQFFARKLKESEVVSEKGKFYTYRTKEQVFPRGAYIAEFDQIIEVQRKFYPQVFTDEFINRLRNEIIFYQRNLKSCKHLVSLCEFEKHEYTNKDGKIVFDGPKVAPRTSPLFQICRIWEFVNNIRLENGYKEARTLSQDERLKVVDFLDNHEKMTAKDFTKLLGLNKNDEWDLKRYFGKNGTQGNTSKTQLATALANVPNASELLQFNLTLENSNYVNEKTGEVLKVVSSDFQNEPLYMLWHTVYSLSDKEELKNALNKKYGITDESVINNLFKIDFVKPGFGNKSAKAIRRILPFLQEGLVYSDACAEAGYNHSDSLTKSENEARTLLARLPQIKKNELRQPVIEKILNQMVNVVNAIYDEYGQIDEIRVELARELKQSKDERNTTASNIAKKERENKNIEAKIQEFGIRSSRNRIQKYRLWEESEQKCFYCGQPVQAKEFLSGLDVEVEHIIPKSLLFDDSFANKVCACRKCNADKGNKTAYDFMKGQKTEVFDAYVKRVNDFYKDGKISKTKKERLLTTQSEIPSDFIERQLRQTQYIAKKALEMLKDVCYNVYATSGSVTDFIRHTWGYDEILHQLNFDRYKKGGLTELREYDHKGETHTEERIQDWSKRLDHRHHAIDALVIAMTRQSIIQRLNHLNTERDAMFQEVEKQSKEWKNDYSMLQEWLRERKHFSTEDVAKKVSDILVSFKAGKRVATIGKRVKYEHGKKKVLQTGVVIPRGPLSEESVYGKIKVLDRNKPLKYLFENPQSIANADIKFAVTNRLAQYEHDVKKAVQSLKKSPIVLANGKNLENADCYKEEYVIKYSLNGFKAKDIDSVVDSHIKDVLYKRLEEYDGNEKEAFKDIEDNPIYADDAHKIKIRNVRCFTGLSAVVPVKKDENGNAISFVKPGNNHHVAIYKDENGTLQESVVTFWHAVERKKYGLPIIVTKPAEAWKLAIEKNCPKEFLDCLPKENWTFVESLQVNEMFVIGMNDEEFGNAIVDKDYALLNQHLYRVQKITTKEYCFRLHTETKVDDKYKGVKDAMKSKAMGKLKMIQSMDSWQKANPHKVKISLLGKLITRE

SEQ ID NO: 1282 - protein, 1242 aa, unidentified
  REGION 1..1242: note = Description of Unknown: uncultivated organism with predicted taxonomy: Prevotella
  REGION 1..1242: note = MG16-201 effector
MKRILGLDLGTNSIGWAVVNTDENDKPVSIENMGSRIVPLTSDDTNEFTKGNAITKNQARTVKRTARKGYDRYQLRREHLTAELRKLKMLPDERLIKLPVLELWELRGRAASKGNQLTLSEIGRVLYHINQKRGYKHAKSDESADTKQKAYVAEVNARYAKIKERNQTIGQFFAEKLKENEIETSKGKFYTYRIKEQVFPRKAYEAEFDQIMECQKEFYPDILTNEEINRLRNEIIFYQRRLKSCKHLVSFCDFEKREYINKVGKVVYGGPKVAPKSSPLFQICKIWEEVNNLTLKNRKNDELFITIDQRQAMVDFLDTHEKLTLSDMYSILGISKKDGWWGGKAIGRGLQGNTTKIALKKALGDFANADNLLQFNLKQTDSNLVDEVTGEILQVIDPKLEKEPLYDLWHTIYSISDKEELANALKKKYNIHDEDIINRLYAIDFVKSGFGNKSTKAMRRILPYLQQGLKYSDACEYAGFRHSDSLTKAENEARQLLEKLPPVQKNALHQPIVEKILNQMINVVNALMIEYGQFASIRVELARELKQSKDERNTTFLQNEAMQKLNESIATRLSSEGIKPTKRTIEKYKFIFPTKGCIDNRTGKFVTKNFDNLLTVNQCIYCGQPFSLSAALNGDGYEIEHIIPRDLICDNSQNNKVLSCRNCNSKKSNRTAFDFMRSQDNATFEAYLERVELWYQKGIISPAKRERLLLSYEDYLERKKKGKITDIDKKYWEDFVSRQAGETQYISREAIRILKQCCRYVNATSGSITATLRHLWGYDEILHQLNFERYKQAGLTEIVTWESNHGKNKHSKEQIVDWSKRIDHRHHAIDALVVACTQQGFIQRINTLNADETKDLMKKQIEASGIKYEEKKVLLDKYLTSLIPFKTQIVADAVNKILVSFKAGKKTATIGKRIEYKHGNKHIVQKGIIIPRGALHEEGVYGRIEINGKKEIVKKYKLGKGAQGFVFTGKETYAEKINKKTGGIQIEDKIKNVLDSIVDSNIRAKVLQRLNQGFEEGQDYRNNVKKALDNLNNLDENPIFADKNNTIPIRTVRCRTGLSAVVPIKKDERGEAIGFVKPGNNHHIAIYRDKEGKLKEHAVTFWHAVERKKYGIPVVIENPLEVWDSIRDKQLPETFLEKLPDINWTFEMSLQQNEMFVLGMEDDTFENAMRDKEYDLISNYLYRVQSISESDYWFRLHLETQNDKTTSAKLAKKYYRTKSIKGFYSLNPHKVYISVIGKIKEL

SEQ ID NO: 1283 - protein, 1155 aa, unidentified
  REGION 1..1155: note = Description of Unknown: uncultivated organism
  REGION 1..1155: note = MG16-202 effector
MNKKILGLDLGVGSIGWALIKTEDDMPKEIIGMGSRIVPLSKDDNDQFSKGQAITKNADRTARRTARKGYDRYQLRRALLTQVLRQNGMLPERMDEQVLDLWQLRSDAATEGCQLTLPQIGRVLYHINQKRGYKHAKSDDNGDSKQTKYVEAVNNRYADLQAAHQTIGQHFYEELYRSRVEREKGFYYTYRIKDQVFPRAAYIAEFDQIMHVQKAFYPDVLTDELIDTLRNRIIFYQRPLKSCKHLVSLCEFEMRPYKTKDGKVVYGGPKCAPRTSPLAQLCAMWETANNITLTNRNNEQLLISPEQRKQIVDFLCSHDVLKLTDLYKILGINKKDGWYGGKAIGKGIKGNATLNQLRAALNGKHAEWLEMPIEIEDKVDEVTGEVVKMVQSSVEQTPLFQLWHAVYSLQNADELAKTLREKFGIAEQEIINALCKIDFVKPGYANKSHKFIRRILPYLMDGYMYSEACEKVGIRHSNSMTVAERNTRSLRARIELLTKNSLRQPVVEKILNQMINLVNRLQQEYGTIDEARVELARELKQSRDERESAYKAMGQNERRNKEIAAKIAEFGIRPSRSRIQKYKMWEESQHRCFYCGEMMDLTQFLNGADVEIEHIIPRSILFDDSYSNKVCACRRCNQEKGNMTAMEYMEAKPSAEFEAYKQRVDDVFNKDHRISKTKRDHLLWRRADIPQDFIDRQLRQSQYIAKKAVEILKDGIREVWTSGGSVTDFLRHQWGYDEILHTLNLPRYQQVEGLTETIQYEHAGQTHEEERIKNWTKRIDHRHHAIDALTVALTQQAYIQRLNTLEASHDHMQKVVNEAGTQYNEKKSLLEKWVAEQPHFSVADVTDKVDGILVSFRAGKRVTTPARRAIYQGGKRTIVQTGIQVPRGALTEETVYGKLGDKFIVKYPLDHPSMKPENIVDPTIRALVQRRVAEKGKEAFNEPLCSAEGMKIKSVRCFTSLSEKGVVPVKHNEAGEPIGYAKKGNNHHIAIYQDKKGEYHEMVVSFWDAVERKKYGVPVVIEHPHELWDSLLDKELPQEFLAKLPLDDWQFILSMQENEMFVLGMEEDEFNDAIERQEYNTLNKHLYRVQKISHADYTFRYHTETKVDDKYEGIEKGRDTSLKLGALVSIRSFGSLFTKFPHKVKIDIMGRITRT

SEQ ID NO: 1284 - protein, 1003 aa, unidentified
  REGION 1..1003: note = Description of Unknown: uncultivated organism with predicted taxonomy: Bacteroides sp. CAG:144
  REGION 1..1003: note = MG16-203 effector
MKNILGLDLGTTSVGWALIQADDNNHPIAISDMGVRIVPLAENEGDKFTKGQDITVNADRTRARGIRRNYDRFQLRRNALTEKLRQLNMLPDEHLIKLPVLELWSLRANAVSQKVTLNELGRVLYHINQKRGYKHSRTDGTDSKQRAYVKDINDRYAELKNSGKTIGQLFAQKLSETAVSHDGKTFYVFRIKDQIFPRKAYEEEYDAVMKCQQQYYPQILTNEVIDEIRNRIIFYQRELRSCKHLVSVCEFEKRCFYDANHNVLRNNKGEVVYSGPKVAPRTSPLFQVFKNWQAVNNIRFHNRRNEYLYITKEQKQQMVNIMDHQEVLKLKDVHGVLGLSAKSGWYCDKSIKSGIKGNTTKLAILNALSSLPAENTKELTRFHLEFEETSLVDEETGEIIVQIKNNYLDEPLYRLWHIIYSIKDDAERYNAIVRFLAEFHVDAPDVAHSLKDIDFVTPGYANLSAKAICKILPYMMEGVGYSEACEFVGYNHSGSVTKAENDARELLEHIPAIKKNELRQPTVEKILNQMINVFNRINDNLKSNGERIDEVRIELARELKQSKEERDETSKGISKQQKLNDEYANLLKESGIRPTRNKITRYRLWREANETCFYCGQPVNFNEFVKFSEAEREHIIPKSLILDDSFANQVCSCRKCNAEKGGRTAIDYMRTTPYLQAYLTKVDEMFQGHKISGKKHAHLLASYEDYLVRKQQGKETKEDVNIWEAPIDRQLRLSQYITKKAHELLRTACRDVLATSGSITDLTRHVWGYDTILHELNLPRYKSAGITEVITDERTGREQEVIRDWNKRLDHRHHAIDALAVACTSRSMIQRINTLHASREEMREEVSSPRKDWKENDLLRQWIKEQRPFERQYVLHKVESILVSMKAGKKATVPGKRKVFKNGKPVVVQSGLRIPRGQLHEQTVYGAITLYDKTPEGRREIVARYKMGVGSVGFVFSGKESCDVVFDKKKEQYVLVDGIEKAINYIVDRHIRDIVRERLNEAF

SEQ ID NO: 1285 - protein, 1222 aa, unidentified
  REGION 1..1222: note = Description of Unknown: uncultivated organism with predicted taxonomy: Bacteroidales
  REGION 1..1222: note = MG16-204 effector
MKKVLGLDLGVGSIGWCLIEKDDNNTPKRILRMGSRIVPISSDEESGYTKGNAISKNADRTAKRTARKCYDRYQLRRQALVNLLKRLGMEPSKNLMLEQTPMELWQKRADAASKEISLEELGRVFLHINQKRGYKHSRLSNSDSKETAYVQEVNSRYDDLKAEGLTVGQHFAAKLKENEQETADGKKYYNYRIKEQVYPRHAYEEEVKKILEVQSRYHSDVLTPDVCKEILDIIFYQRDLKSCKNLVSLCEFESYTITKDGKEITIGPKVAPRTSPLAQLSSILETANNITIRNRRNDELYISPEQRRAIAEFLDNHEVMKLTDLYKMLNIGRKDGWWAGKAIGKGLKGNTTKCQIREALSALPKEQVDSLTAFQLEFDEYVDEETGEVRKRINNTLAEQQPLYKLWHMLYSIKDNDELSGALRHLGIEDEESIDKLCKCDFRTAGYANKSAKAIGRILPYLMEGVMYSDACERAGFDHSRRINSDRTLLTHLPQIQKNELRQPVVEKILNQLVNIVNALLEKEGAIDEIRVELARELKQSKDERNEAFRRNNQNERLNKELAERIKKYGLTPTRNRIMKLKMWEESEHSCMYCKQPVDPVEFLKGADVEREHIIPRALLFDNSFTNQVCSCRRCNSKKGMRTAYDFIADEKGQEGLNAYIEHINDLFDKKKISRSKLNRLLVSHKAYISRKAQGKETDEDKELWENFIDRQLRQSQYIAKKSVEMLQLVCKNVYTTSGSVTDFVRHQWGYDELLHELNFERFKKAGLTAMVKQMHSGKEIEVERIKDWTKRLDNRHHAVDALAIACTTQGMIQRLNTLNASREEMLEELSINDQRLIDPERSMLEKWLFVQPHISYAEAKNEINKIVISQRPNTRITVPGKRYVIKNGKRTLAQTGIIVPRGALHAEFVYGQIMKQEADGVTKTLQYVRKYKLGIGAQGFLFNGKEFYKEELKKDSKTGLSSIVVTDKIKDVLEKIVDGGIRQRILERLNRGFEEGADYRANVAQALANLKNLDEDPIYSDDAKTRPIRTVRKYVSSSTMVAVRKDGNGKPMSFVEPDGNHHVAFYKDENGVITESIVTKWLAVQRKLNHIPIIIDNPSQTWCEVLERNDVPEELLQSLPKDNSTFLLSLQIGEAFIMGMEDADYQKALLAKDVRTLCDHLFYVQNASSHDYRFRRHVEAKYDTNDMNKDDMRFLRIRTIDDLFNNNPHKVKVTVLGVIVE

SEQ ID NO: 1286 - protein, 1233 aa, unidentified; identical to SEQ ID NO: 1281
  REGION 1..1233: note = Description of Unknown: uncultivated organism with predicted taxonomy: Fibrobacter
  REGION 1..1233: note = MG16-205 effector

SEQ ID NO: 1287 - protein, 1011 aa, unidentified
  REGION 1..1011: note = Description of Unknown: uncultivated organism with predicted taxonomy: Gammaproteobacteria bacterium
  REGION 1..1011: note = MG16-206 effector
MKKVLGLDLGVGSIGWCLIEKDDNNTPKRILRMGSRIVPISSDEETGYTKGNAISKNADRTVKRTARKCYDRYQLRRKALVNLLKRLGMEPNKNLMFEQTPIELWQKRADAASKEVSLEELGRVLLHINQKRGYKHSRISNSDSKETAYVQEVNSRYDDLKAEGLTIGQHFAAKLKENEQETADGKKYYNYRIKEQVYPRHAYEEEVKQILEVQSQYNPDVLSSDVCKEIMDIIFYQRDLKSCKNLVSLCEFESYTITKDGKVINIGPKVAPRTSPLAQLSSILETANNITIRNRKNDELYISPEQRKAIADFLDNHEVMKLTDLYNILNIGRKDGWWAGKAIGKGLKGNTTKCQIREALSGLPKEQVDSLTAFHLEIDEYVDEETGEVRKRINNTQAEQQPLYKLWHMLYSIKDNNELAGALNHLGIEDEESIEKLCKLDFRTVGYANKSAKAIGRILPYLMEGMMYSEACELAGFDHSRRINPDRVLLTHLPQIQKNELRQPVVEKILNQLVNIVNALLENEGAIDEIRVELARELKQSKDERNEAFKRNNQNERLNKELAERIMKYGLTPTRNRILKLKMWEESEHSCMYCGQPVDPVEFLKGVDVEREHIIPRGLLFDNSFTNQVCSCRRCNSKKGMRTAYDFIADDKGQEGLDTYIDRINDLFNRKKISRSKFNRLLASHKAYISRKSQGKETDEDKELWENFIDRQLRQSQYIAKKSVEILQQVCKDVYTTSGSVTDFVRHQWGYDELLHELNFERFKKAGLTAMVKQLHSGKEVEVERIKDWTKRLDNRHHAVDALAIACTTQGMIQRLNTLNASRDVILEELNSNDQRLVDPDRSMLEKWIYVQPHISYAEAKNEVDKIVISQRPNTRITVPGKRYVTKNGKRTLAQTGIIVPRGALHAEFVYGRIMRQEADGVTMTPQYVRKYKLGIGAQGFLFKGDEVYKEEVKKNSKTGLSIIVVTDKIKDVLDKIVDGDIRQRILERLNRGFEEGVDYRANVPQALANL

SEQ ID NO: 1288 - protein, 957 aa, unidentified
  REGION 1..957: note = Description of Unknown: uncultivated organism
  REGION 1..957: note = MG16-207 effector
MKNILGLDLGTTSVGWALIQSDDNNHPITISDMGVRIVPLAENEGDKFTKGQDITVNADRTRARGIRRNYDRFQLRRNALTEKLRQLNMLPDEHLIKLPVLELWSLRANAVSQKVTLNELGRVLYHINQKRGYKHSRTDGTDSKQRAYVKDINDRYAELKSSGMTIGQLFAQKLSETAVSHDGKTLYVFRIKDQIFPRKAYEEEYDAVMKCQQQYYPQILTNEVIDEIRNRIIFYQRELRSCKHLVSVCEFEKRCFYDANHNVLRNNKGEVVYSGPKVAPRTSPLFQVFKNWQAVNNIRFHNRRNESLYITKEQKQQMVDIMDRQEVLKLKDVHEVLGLTAKSGWYCDKSIKSGIKGNTTKLAILNALSPLPAEKTKELTRFHLEFEETSLVDEETGEIIVRIKNNYLDEPLYRLWHIIYSIKDDAERYNAIVRFLAEFHVDAPEVANSLKDIDFVTPGYANLSAKAICKILPYMMEGVGYSDACEFVGYNHSGSMTKAENDARELLEHIPAIKKNELRQPTVEKILNQMINVFNRINDNLKSNGERIDEVRIELARELKQSKEERDETSKGISKQQKLNDEYANLLKGKGIRPTRNKITRYRLLMESNETCFYCGQPVNFNEFVKFSEAEREHIIPKSLILDDSFANQVCSCRKCNAEKGGRTAIDYMRTTPHLQAFLSKVDEMFQGHKISGKKHAHLLASYEDYLVRKKQGKETKEDVNIWETPIDRQLRLSQYITKKAHELLRTACRDVLATSGSITDLTRHVWGYDTILHELNLPRYKSAGITEVITDERTGREQEVIKDWNKRLDHRHHAIDALAVACTSRSMIQRINTLHASREEMREEVSSPRRDWKENDLLRQWIKEQLPFERQYVLHKVESILVSMKAGKKATVPGKRKVFKNGKPVVVQSGLRIPRGQLHEQTVYGAITLYDKAPEGRREIVARYKMGVGSVGFVFL

SEQ ID NO: 1289 - protein, 1234 aa, unidentified
  REGION 1..1234: note = Description of Unknown: uncultivated organism
  REGION 1..1234: note = MG16-208 effector
MYLCSRKTNKTLYNMKKVLGLDLGVSSIGWALITKDNNNQPIDILKIGSRTVPLLDGEEEGFSNGNGISANSSRTQKRTARKCNNRYKLRREKLTDGLRALNMLPNAMLFNLNPLELWQLRAKAVTDKVSLPELGRILFHLNQKRGYKHSKDNEQDSKQTEYVATINKRYIDLQEKGLTIGQYFAQKLKESEKIQENGVCYTYRIKDQVYPRAAYEEECHKILLNQQRFYPEVLTDDVIKDFFNFIYYQRPLKSCKHLVSRCELEKQLLSSDDDVANYAPKVAPLSSPLAQLDKIWEAVNNFTIRDKRNDELFITLEQRKEIVNYLQEHLTINRSKMREILGISKTKRWFIKADNLRVLQGNKTRIKIAEALSKGDLSQEEINGYLRFDLGYDCQVDTQTGEIAATIIKATFEEQPLYQLWHYIYSIPEERDLKNKLMKFGIHDETVLDALCGISFKTIGYAKKSTRAIRKILPYLAEGFKYSEACYLAGYNHSNSITKDEEANRKLKEYIPQIQKNELRQPVVEKILNQMINIVNSLLKDGPINEIRVELARELKQSKDEREKTSKDIRANKKKNDECAERVKEYGFSPTRNRIMRYKMWVETNHRCIYCNDGVNVKDFLSGVDVEREHIIPKALLFDDSFSNQTCSCRKCNRDKGSRTALDYIRDCGREEEYITRVNELLEKRQISKTKYNHLLTSYRDYLERKTQGKETQEDKDLWEHFIDRQLRQSQMIARKSFEVLRQICHNVYATSGSVTDFLRHQWGYDNILHDLNFERFSKSDNIEEITIVGRDGIETKVKRIKGWNKRIDNRHHAVDALTIALTTQSMIQRLNTLYASRDAMHGDIEASKQKFNEKKSILEKWTAIQPHFTYSQASEAISRILISQRGGKRITTPGKRYEFKGGKKILKQTGIVVPRTALHDEFIYGQISRYDAKGLLTKEIVRKYGIFGGMGCLFTGKETYKEETVSDKKTGISTIKISDGIKDVLDKIVDGGVRKRILERLNRGFEEGKDYRSDTKKALDNLRHLDEDPIFLDDARTIPIKTVRKFTHSTKAIPLRYNDSHQPIAFVEPGGNHHVALYKAPDGTIKEHICTNWHAVQRRLFGLPAIIDKPSEIWVKALENDKFPEDLLSHLPEENLNFIVSLQIGDAFILGMEEEEYQQAISNNNYKLLSEKMYYIQNLSSLNYRFRRHVEAQFDTHQMNKEDLRFYNIKSIGAFFNLNPHRVNVSLIGEIIV

SEQ ID NO: 1290 - protein, 911 aa, unidentified
  REGION 1..911: note = Description of Unknown: uncultivated organism with predicted taxonomy: Chryseobacterium vrystaatense
  REGION 1..911: note = MG16-209 effector
NLTIMKRILGLDLGTNSIGWAVVNTDENDKPVSIENMGSRIVPLTSDDTNEFTKGNAITKNQARTVKRTARKGYDRYQLRREHLTAELRKLKMLPDERLIKLPVLELWELRGRAASKGNQLTLSEIGRVLYHINQKRGYKHAKSDESADTKQKAYVAEVNARYAMIKERNQTIGQFFAEKLKENEIETSKGKFYTYRIKEQVFPRKAYEAEFDQIMECQKEFYPDILTNEEINRLRNEIIFYQRRLKSCKHLVSFCDFEKREYINKVGKVVYGGPKVAPKSSPLFQICKIWEEVNNLTLKNRKNDELFITIEQRQAMVDFLDTHEKLTLNDMYSILGISKKDGWWGGKAIGRGLQGNTTKIALKKALGDIANADNLLQFNLKQTDSNLVDEVTGEILQVIDPKLEKEPLYDLWHTIYSISDKEELANALKKKYNIHDEDIINRLYAIDFVKSGFGNKSTKAMRRILPYLQQGLKYSDACEYAGFRHSDSLTKAENEARQLLEKLPPVQKNALHQPIVEKILNQMINVVNALMIEYGQFASIRVELARELKQSKDERNTTFLQNEAMQKLNESIATRLSSEGIKPTKRTIEKYKFIFPTKGCIDNRTGKFVTKNFDNLLTVNQCIYCGQPFSLSAALNGDGYEIEHIIPRDLICDNSQNNKVLSCRNCNSKKSNRTAFDFMRSQDNATFEAYLERVELWYQKGIISPAKRERLLLSYEDYLERKKKGKITDIDKKYWEDFVSRQAGETQYISREAIRILKQCCRYVNATSGSITATLRHLWGYDEILHQLNFERYKQAGLTEIVTWESNHGKNKHSKEQIVDWSKRIDHRHHAIDALVVACTQQGFIQRINTLNADETKDLMKKQIEASGIKYEEKKVLLDKYLTSLIPFKTQIVADAVNKILVSFKAGKKT

SEQ ID NO: 1291 - protein, 1152 aa, unidentified
  REGION 1..1152: note = Description of Unknown: uncultivated organism
  REGION 1..1152: note = MG16-210 effector
MKKILGLDLGVASIGWALIEADEQNAPKSILAMGSRIVPLSTDDATEFSQGKAISKNRNRTQKRTQRKGYDRYQMRRAALTEELRAHHMLPDEILIKLPVLELWQLRADAATRQLTLPEIGRVLYHINQKRGYRHAKSDSDEEKAQRDYVQAVNDRYAELKAEGKTIGQHFADKLKENCIITEKGPFYTYRIKEQVYPRAAYMEEFDLVIACQKEFYPEVFTDAFINRLRNEIIFYQRSLKSCKHLINQCEFSQRAYKKADGSIVIAGPKVAPRTSPLFQICKIWESVNNLKLTNRKGEEYPFTLSQRKELVEFLDEHEKLTLTDLYKIIGVKKNDGWWGGKAIGKGLQGNTTKCLIKKALGDKYADLLRFDLHIIESKNIDTETGEVLEIISPGLEKEPLFRLWHILYSMQDKDEMAAALHRQFGITEEDIIDALYKIDFVKPGYGNKSSRFMREILPYLQKGMMYSDACNYIGINHSNSITSEENAVRELKSRLPQLQKNELRQPVIEKVLNQMVNVVNALLDKYGEIDEIRVELARELKQSKDERNEVFLRNNKRERENAEIIKRIEEYGVRPSRSRIQKYRLWEESNQICFYCGNTVGVKEFLSGVDAEIEHIIPRSLFFDDSFSNKVCACRACNQEKGNRTAYDYMQSKSEIEFDNYLRRVENYYNEKKISKTKRERLLTAAKDIPQDFLDRQLRQSQYISKKAIEMLKQICRYVWATSGSVTDFIRHNWGYDKILHDLNFERYKSGGLTEMVHYDHQGQEHDEERIKEWTKRLDHRHHALDALTIASTQQGYIQRLNHLNTERDQMFAELEMQREEYKGRYSLLEEWIKERPHISVEDAKVAVDQIAVSFKAGKKVATPGKRYIYKSGKRILAQDGILVPRGALSEESVYGSISTIERNVPAKNLFEHPERIFKGYIRKLVEERIAECGGDWKKARASINKRPIFLDDEGQKKLEYATCWKEESVFHYPIKSIKKNDVDWIVDGHIREIIRKRIEEVGEKNAFNEPIYADKACNIPIRHVRMFTGLSAVEPIKYVDGQPVGFVKPGNNHHIAIYVDTQGNKVEQAVTFWHALERKKYGFPVIIDDTDTVWEKVDQMDLPEAFIKNLPEPGLKLYTSLQQNEMFILGMGEDEYNDAVAAKDYKSLCK

SEQ ID NO: 1292 - protein, 1242 aa, unidentified
  REGION 1..1242: note = Description of Unknown: uncultivated organism with predicted taxonomy: Prevotella
  REGION 1..1242: note = MG16-211 effector
MKKILGLDLGTNSIGWAVVNTDDNGIPTHIEGMGSRIVPLSPDDTNEFTKGNAITKNQSRTEKRTARKRYDRYQLRRENLTAELRKLKMLPDEKLIKLSVLELWELRGKAASKGNQLTLSEIGRILYHINQKRGYKHAKSDENADTKQKAYVAEVNARYAMIKERNQTIGQFFAEKLKENEIETPKGKFYTYRIKDQVFPRKAYEAEFDQIMECQKEFYPEILTEKVINKLRNEIIFYQRKLKSCKHLVSICDFEKQEYINKDGKSIYRGPKVAPKSSPLFQICKIWEEVNNLSLKNRKNDELFITLEQRQAMVNFLETHEKLTLSDMYSILGISKQDGWWGGKAIGKGLKGNVTKIALKNALGDFENADRLLQFNLKQIDSNLVDEVTGEILQVIDPKMEKEPLYDLWHTIYSISDKEELANALKKKYNIHDEDVINRLYSIDFVKSGFGNKSSKAMRRILPYLQQGLKYSDACEYAGFRHSDSLTKAENDARQLLEKLPPIQKNTLRQPIVEKILNQMINVVNALMIEYGQFDSIRVELARELKQSKDERNTTFLQNEAMQRLNESIAKRLSFEDIKPTKRTIEKYKFIFPTKGCIDKRTGKFVTKSFDGLSTINQCIYCGQPFSLSAALNGDGYEIEHIIPRDLLCDNSQNNKVLSCRKCNSRKSNKTAFDFMRSQDESIFEEYLERIELWYKNGIISPTKREHLLLSHEDYLERKKKGKVTDIDKKYWEDFVSRQVGETQYISRESIRILKQCCRTVNATSGKITAILRHLWGYDEILHQLNFERYKKAGLTETKTWESNHGKNKHSKEQIVDWSKRIDHRHHAIDALVVACTQQGVIQRINTLNADETKDLMKKQIESANIKYEEKKVLLDKYLTSLVPFNTKTVAEAVNKILVSFKAGKKTATVGKRIEYKHGKKHIVQKGIIIPRGALHEEGVYGKIEINGKKEIVKKYKLGKGAQGFVFTGKETYAEKVNKKTGAIQIEDKIKDVLDSIVDGNIRAKILQRLNRGFVEGEDYRNNVKQALDNLNNLDENPIFADDNNNIPIRTVRCRTGLSAVEIIKRNEGGEAIGFVKPGNNHHIAIYRDKEGKLKEHAVTFWHAVERKKYGIPVVIENPLEVWDSIRDKQLPETFLEKLPDINWTFEMSLQQNEMFVLGMEDDTFENAMRDNDYAKLGQYIYKVQNISEKQYRFSLHTATKFDVKRMNKTDKSFYNIRSLDALFALHPHKVYISVIGKIKEL

SEQ ID NO: 1293 - protein, 1224 aa, unidentified; identical to SEQ ID NO: 1243
  REGION 1..1224: note = Description of Unknown: uncultivated organism with predicted taxonomy: Prevotella ihumii
  REGION 1..1224: note = MG16-212 effector

SEQ ID NO: 1294 - protein, 1217 aa, unidentified
  REGION 1..1217: note = Description of Unknown: uncultivated organism with predicted taxonomy: Treponema pedis
  REGION 1..1217: note = MG16-213 effector
MKKILGLDLGVASVGWALIEADEQNAPKSILAMGSRIVPLSTDDATEFSQGKAISKNRNRTQKRTQRKGYDRYQMRRAALTEELRANDMLPDETLIKLPVLELWQLRADAVTRQLTLPEIGRVLYHINQKRGYRHAKSDSEEEKSQRDYVQAINDRYAELKAEGKTIGQHFADKLKENCIITEKGPFYTYRIKEQVYPRAAYMEEFDRVISCQKGFYPTVFTDAFINRLRNEIIFYQRNLKSCKHLINQCEFSQRAYKKADGSIVIAGPKVAPRTSPLFQICKIWECVNNLRLTNRKGEEYPFTLEQRKELVDFLDNHEKLTLSDLYKILGIRKSDGWYGGKAIGKGLQGNTTKCLIKKALGDKYADLLRFDLQTIGSKSIDTETGEVLEIISPELEKEPLFRLWHILYSMQDKDEMAAALQRQFGITEGDIIDALYKIDFVKPGYGNKSSRFMREILPYLQKGMMYSDACNYIGINHSNSVTSEENAVRELKSRLPQLQKNELRQPVIEKVLNQMVNVVNALLDKYGEIDEIRVELARELKQSKDERNEVFLRNNKRERENAEITKRIEEYGIRPSRSRIQKYRLWEESNHICFYCGQPVGAKEFLSGVDVEIEHIIPRSLFFDDSFSNKVCACRKCNQDKGNSTAFDFMKAKPEVEFDNYLRRVESYYNEKRISKTKRDRLLTAAKDIPEDFINRQLRQSQYISKKAVEMLKQVCRYVWTTSGSVTDFLRQTWGYNNILHDLNFERYKSGGLTEIRQYDHKGQEQSKECIIGWTKRLDHRHHALDALTIASTQQGYIQRLNHLNTERDEMFAELKKQSEEHKEKHSLLEDWMKERPHLSVEAVKEAVDQIAVSFKAGKKVATPGKRYIYKGGKRVLAQDDILVPRGALSEESVYGSISTIERNVPAKNLFEHPERIFKGYIRKLVEERIAEYGGDWKKARASLNKRPIFLDDKGQRKLEYATCWKEEMVLRYPIEKIDKGKVDKIVDSHILDIIRKRIEEAGEKNAFKEPIYADEACTIPIRHVRLFTGLTAVEPIKYADGQPVGFVKPGNNHHIAFYVDAQGNKSEHVVTFWHALERKKYGFPIIIEDTDAVWEKVDQMDLPEAFVRNLPEPGLKLDMSLQQNEMFILGMGEDTYRDAMAAKDYKTLCKHLYRVQNIANLDYYFRLHIDTSDDKSNEAQKIKKFYRVRSISSLMDLNPKKVKISILGEIFPLDD

SEQ ID NO: 1295 - protein, 1224 aa, unidentified
  REGION 1..1224: note = Description of Unknown: uncultivated organism with predicted taxonomy: Sediminibacterium sp. C3
  REGION 1..1224: note = MG16-214 effector
MKKVLGLDLGVGSIGWCLLEKDDKNVPIRIIRMGSRIVPISTDEETGFTKGNAISKNADRTAKRTARKCYDRYQLRRQALVNLLRRLGMEPSKNLMLEQTPMELWQKRADAASKEISLVELGRVLLHINQKRGYKHSRLSNSDSKETAYVQEVNSRYDDLKAEGLTVGQHFAAKLKENEQLSAAGKKYYNYRIKEQVYPRCAYEEEVKKILEVQSQYHSDVLTADACKEMMDIIFYQRDLKSCKNLVSLCEFESYTITKNGKEITIGPKVAPRTSPLAQLSSILETANNITIRNKRNDELYISPEQRKAIADFLDTHEVLKLSDLYKILNIGRKDGWWAGKAIGKGLKGNTTKCQIRKALSKLPKDLVDSLTAFQLEFEECVDQETGEVRKRINNTLVEKQPLYHLWHLIYSIKDVDELSGALRHLGIEDEESIRNLCDLDFRTAGYANKSAKAIGRILPYLMEGVMYSEACERAGFDHSRRIDPNRTLLKHLPPIQKNELRQPVVEKILNQLVNIINALIEKEGAIDEIRVELARELKQSKDERNETFKRNNQNERQNKEYAERIKEYGLTPTRNRIMKMKMWEESEYTCMYCGQPVNVTEFLKGADVEREHIIPRGLLFDNSFTNQVCSCRRCNSKKGMRTAYDFIADDKGQEGLNAYIDRINDLFDKKKISRSKLNRLLVSHKAYISRKAQGKETEEDKELWENFIDRQLRQSQYIAKKSVEMLLQVCKNVYTTSGSVTDFVRHQWGYDELLHDLNFDRFKKAGLTAMVKQLHSGKEVEVERIKDWTKRLDNRHHAVDALTIACTTQGMIQRLNTLNASREDILEELNSKDQRLVDPERSMLEKWIVVQPHISYSEAKNEIDKIVISQRPNTRMTVPGKRYVTKNGKRTLAQTGIVVPRGALHAEFVYGRIMKQEPDGITMTPQYVRKYKLGIGAQGFLFNGKEFYKEELKKDSKTGLSKIVVTDKIKEVLDKIVDGGIRQRILERLNRGFEEGADYRANVAQALTNLKNLDEDPIYSDDAKTRPIRTVRKYVSSSTMVAVRKDDKGKPVAFVEPDGNHHVAFYKNENGVISETIVTKWQAVQRKVNHIPIIIDNPSQTWSKVLGRNNVPEELLQSLPRDSSSFLLSLQIGEAFIMGMEEAEFQKALEEKDMQTLAEHLYFVQNISSNNYRMRRHVESSFDTTDMNKEDQRFFNIQSISSFFNSNPHKVKITILGDIVVDV

SEQ ID NO: 1296 - protein, 1222 aa, unidentified
  REGION 1..1222: note = Description of Unknown: uncultivated organism with predicted taxonomy: Prevotella
  REGION 1..1222: note = MG16-215 effector
MKKVLGLDLGVGSIGWCLIEKDDNNTPKRIIRMGSRIVPISSDEETGYTKGNAISKNADRTAKRTARKCYDRYQLRRQALVNLLKQLGMGPSKNLMLEQTPIELWQKRADAASKEITLEELGRVLLHINQKRGYKHSRLSNSDSKETAYVQEVNSRYDDLKAEGLTIGQHFAAKLKENEQESADGKRYYNYRIKEQVYPRHAYEEEAKRILEVQSRYHSDVLTSDVCKEMMDIIFYQRDLKSCKNLVSLCEFESYTITKDGKEITIGPKVAPRTSPLAQLSSILETANNITIRNRKNDELYISPEQRKAIADFLDNHEVMKLTDLYKILKIGRKDGWWAGKAIGKGLKGNTTKCQIREALSALPKEQVDSLTAFQLEIDEYVDEETGEVRKRINNTKAEKQPLYRLWHLLYSIKDVDELSGALHNLGIEDEESIEKLCNLDFRTAGYANKSAKAIGRILPYLMEGVMYSDACERAGFDHSRRINPDRVLLTHLPQIQKNELRQPVVEKILNQLVNIVNALLEKEGTIDEIRVELARELKQSRDERNETFKRNNQNERQNKVYAERIKEYGLTPTRNRIMKMKMWEESEYTCMYCGQPVNVTEFLKGADVEREHIIPRGLLFDNSFTNQVCSCRRCNSKKGMRTAYDFIADDKGQDGLNAYIDRINNLFDKKKISRSKLNRLLVSHKAYISRKAQGKETDEDKELWENFIDRQLRQSQYIAKKSVEMLQQVCKNVYTTSGSVTDFVRHQWGYDDLLHDLNFERFKKAGLTAMVKQLHSGKEVEMERIKDWTKRLDNRHHAVDALAIACTTQGMIQRLNTLNASRDEILEELNSKDQRVVDPERSMLEKWVYAQPHISYAEAKNEIDKIVISQRPNTRITVPGKRYVTKNGKRTLAQTGIIVPRGALHAEFVYGRIMKQEADGVTMTPQYVRKYKLGIGTQGFLFKGDEVYKEELKKDSKTGLSKIVVTDKIMDVLEKIVDGGIRQRILERLNRGFEEGTDYRANVAQALANLKNLDEDPIYSDDAKTRPIRTVRKYVSSSTMVAVRKDSNGKPISFVEPDDNHHVAFYMYQDGERTESVVTKWQAVQRKLNHIPIIIDNPSQTWNEVLGRNDVPDELLQSLPQDKSIFLLSLQKGEAVVMGLEEMNYQRALEKKDMRTLCNHLFYVQSASSHDYRFRRHVEAKYDTKDMNKDDMRFLRIRTVDELFKNNPHKVKVTVLGDIVE

SEQ ID NO: 1297 - protein, 1222 aa, unidentified
  REGION 1..1222: note = Description of Unknown: uncultivated organism with predicted taxonomy: Bacteroidales
  REGION 1..1222: note = MG16-216 effector
MKKVLGLDLGVGSIGWCLIEKDDDNTPKRIIRMGSRIVPISSDEETGYTKGNAISKNADRTAKRTARKCYDRYQLRRQALVNLIKRLYMLPNKELMLEQTPLEIWQKRADAASKEITLEALGRVLLHINQKRGYKHSRLSNADRKETAYVQEVNSRYDELKAEGLTIGQHFAAKLKENEQTSNDGKKYYNYRIKEQVYPRHAYEEEVKKILEIQSQFHADVLTPDVCREIMDIIFYQRDLKSCKNLVSLCEFESHTITKDGKEITIGPKVAPRTSPLAQLSSILETSNNITIRNRRNDELYISPEQRKAIADFLDNHEVMKLTDLYRILNISRKEGWWAGKAIGKGLKGNTTKCQIREALGSLPKEQVDSLTAFRLEFEEYVDEETGEVRQRVNNTLAEQQPLYKLWHMLYSIKDNKELSGALHHLGIDDEKSINKLSNLDFRTAGYANKSAKAIGRILPYLMDGIMYSEACERAGFDHSRRINPGRTLLTSLPQIQKNDLRQPIVEKILNQLVNIVNALLEKEGTIDEIRVELARELKQSKDERNEAFKRNNQNERQNKEYAERIKEYGLTPTRNRIMKMKMWEESEYTCMYCGQPINVTEFLQGADVEREHIIPRALLFDNSFTNQVCSCRRCNSQKGMRTAYDFIADDKGQEGLDLYIERINDLFDRKKISRSKLNRLLVSHKAYVSRKAQGKETEEDKELWENFIDRQLRQSQYIAKKSVEMLQQVCKNVYTTTGSVTDFVRHQWGYDEILHDLNFERFKKAELTTMVTQLHSGKEVEVERITNWTKRLDNRHHAVDALAIACTTQGMIQRLNTLSACRNEMLDELNSKDERVIDPERSMLEKWINSQPHICYAQAKDEVDKIIVSQRPNTRITVPGKRYVTKNGKRTQAQTGIIVPRGALHAEFVYGRIMKQEADGMTLTPQYVRKYKLGIGAQGFLFKGDETYKEDVKKDKKTGLSQIVVTDKIKDVLDKIVDGGIRRRILERLNRGFEEGTDYRANVAKALANLKNLDDDPIYSDDAKTRPIRTVRKYVSSSTMVAVRKNDDGKPISFVEPDGNHHVAFYKDEDGVVTESLVTKWQAVQRKLNHIPIIIENPSQVWNEVLGTNDIPNELLQSLPKDKSIFLLSMQIGEAFVMGMDETAYKRAIEKNDTQALADHLYFVQNLSSNNYRLRRHVESSFDTTDMNKEDLRFLNVKSIGALFNYNPHKVKLTILGDIIL

SEQ ID NO: 1298 - protein, 917 aa, unidentified
  REGION 1..917: note = Description of Unknown: uncultivated organism with predicted taxonomy: Porphyromonas catoniae
  REGION 1..917: note = MG16-217 effector
MKKVLGLDLGVGSIGWCLIEKDDNNTPKRILRMGSRIVPISSDEETGYTKGNAISKNADRTTKRTARKCYDRYQLRRQALVNLLKKLGMEPSKNLMLEQTPMELWQKRADAASKEVSLDELGRVLLHINQKRGYKHSRLSNSDSKETAYVQEVNSRYKDLKAEGLTIGQHFAAKLKENEQETADGKKYYNYRIKEQVYPRHAYEEEVKKILEVQSQYHSDLLTSDVCKEIADIIFYQRDLKSCKNLVSFCEFESYAITKDGKEITIGPKVAPRTSPLAQLSSILETANNITIRNRKNDELYISPEQRKAIADFLDNHEVMKLTDLYKILNIGKKDGWWAGKAIGKGLKGNTTKCQIREALANLPKEQVDSLTVFQLDIDNYVDEETGEVRQRINNTKAEKQPLYRLWHLLYSIKDVDELSGALRHLGIEDEESIEKLSKLDFRTAGYANKSAKAIGRILPYLMEGMMYSDACERAGFDHSRRINPDRALLTYLPQIQKNELRQPVVEKILNQLVNIVNALLDKEGAIDEIRIELARELKQSKDERNEAFKRNNQNERQNKEYAERIKVYGLTPTRNRIMKMKMWEESEYTCMYCGQPVNVTEFLQGADVEREHIIPRGLLFDNSFTNQVCSCRRCNSKKGMRTAYDFIADDKGQEGLDAYIDRINDLFNKKKISRSKLNRLLVSHKAYIIRKTQGKETEEDKELWENFIDRQLRQSQYIAKKSVEMLQQVCKNVYTTSGSVTDFVRHQWGYDELLHDLNFERFKKAGLTAMVKQLHSGEEVEVERIANWTKRLDNRHHAVDALAIACTTQSMIQRLNTLNASRDDMLEELNSKDQRLVDPERSMLEKWVFIQPHITYADAKKEIDKIVISQRPNTRITVPGKRYVAKNGKRTLAQTGIIVPRGALHAEFVYGRIMKQ

SEQ ID NO: 1299 - protein, 1224 aa, unidentified
  REGION 1..1224: note = Description of Unknown: uncultivated organism with predicted taxonomy: Prevotella
  REGION 1..1224: note = MG16-218 effector
MKKVLGLDLGVGSIGWCLIEKDDNNTPRRILRMGSRIVPISSDEESGYTRGNAISKNADRTAKRTARKCYDRYQLRRQALVNLLKKLGMEPNKNLMFEQTPLELWQKRADAASKEITLEELGRVLLHINQKRGYKHSRLSNSDSKETAYVQEVNSRYVVLRAEGLTVGQHFAAKLKENEQESADGKKYYNYRIKEQVYPRHAYEEEVKKILEVQSQYHSDVLTSDVCKEIGDIIFYQRDLKSCKNLVSFCEFESYTIKKDGKKITIGPKVAPRTSPLAQLSSILETANNITIRNRRNDELYISPEQRKAIAEFLDNHEVMKLTDLYKILNIGKKDGWWAGKAIGKGLKGNTTKCQIREALSGLPKEQVDSLTAFKLEIDECVDEETGEVRKRIDNTKAEKQPLYRLWHLLYSIKDNDELTGALRHLGIENKEIIEKLCKIDSRTAGYANKSAKAIGRILPYLMDGVMYSEACGRAGYDHSRRVNPDRVLLTHLPQIQKNELRQPVVEKILNQLVNIVNALLEKEGAIDEIRVELARELKQSKDERNEVFKRNSQNERKNKEYAERIKEYGLTPTRNRIMKMRMWEESEYTCMYCGQPVNVSEFLKGADVEREHIIPRGLLFDNSFTNQVCSCRRCNSKKGMRTAYDFIADEKGQEGLDIYIDRINDLFNRKKISRSKFNRLMASHKAYMRRKAQGKETDEDKELWENFIDRQLRQSQYIAKKSVEMLQQVCKNVYTTSGSITDFVRHQWGYDELLHELNFERFKKAGLTAMVKQLQSGKEVEVERIKDWTKRLDNRHHAVDALAIACTTQGMIQRLNTLNASRADMLEELSSNDRRLVDPDRSMLEKWIYVQPHISYAEAKNEIDKIVISQRPNTRITVPGKRYVIKSGKRTLAQTGIIVPRGALHAEFVYGRIQKQEADGDTKTYQYVRKYKLGIGAQGFLFNGKEFYKEELKKDSKTGLSSIVVTDKIKDVLDKIVDGGIRQRILERLNRGFEEGADYRANVARALENLKNLDEDPIYSDDAKTRPIRTVRKYVSSSTMVAVRKDSNGKAISFVEPDGNHHVAFYKDENDVITENIVTKWLAVQRKLNHMPIIIDNPSQTWSEILKRNDVPEELLQSLPKDSSTFLLSLQIGEAFIMGMEDGDYQKALEEKDMQTLADHLYFVQNISSNNYRLRRHVESSFDTTDMNKEDQRFLNIKSVNSFFNSNPHKVKITILGDIITDV

SEQ ID NO: 1300 - protein, 1228 aa, unidentified
  REGION 1..1228: note = Description of Unknown: uncultivated organism with predicted taxonomy: Fibrobacter
  REGION 1..1228: note = MG16-219 effector
MKKILGLDLGVGSIGWSVISVDENGDPSEILGMGSRIIPLSTDDANEFSTGNAISKNQKRTQKRTARKGYDRFQLRRENLTAELRKLHMLPDEKLIKLPILELWTLRAKAATEGNKLSLPEIGRILYHINQKRGYKHAKADEAGDKQQTEYVAAVNSRYAMIKERCQTIGQYFAEKIRESEVISEKGKFYTFRTKEQVFPRKAYEEEFDKIIAVQRQYYPDVLTDSAINRLRNEIIFYQRNLKSCKHLVSLCEFEKHEYKNKEGQIVYDGPKVAPRTSPLAQICRIWEFVNNISLENGYKERRELSLEEKQKVIHFLDNNEKMTATDFSKLLGLGKKNEWDLKRYFGKNGVKGNETKVSLRNALKDFPNVEELLQFNLTLDNSNYVNESTGEVLKVISPSFQNEPLYDLWHTVYSLSDKDELSNALGKKFGISDKNAIQQLFKIDFVKPGFSNKSAKAVRRILPFLQQGLMYSEACAEAGYNHSNSLTKTENEARSLLDRLPQIKKNELRQPVVEKILNQMVNVVNAIYDDYGTIDEIRVELARELKQSKDERNTTFNNIAKRERENKGIAERIKNEYGLIPNRNKIEKYRLWEEAEQKCFYCGQTVNVKEFLSGFDVEVEHVIPKSLLFDNSYANKVCACRKCNANKGNKTAFDFMKSQSEDAFNNYVSRVEEYYKNGKISRTKHDRLLTPQSEIPSDFIERQLRQTQYISKKALEMLKEVCCKVYATNGSVTDFIRHTWGYDEILHQLNFDRYKQGGLTEVREFDNKGIIHKEERIQNWSKRLDHRHHAIDALVIAMTKQSIIQRLNHLNTERDAMFQEVDKQSAEWKNDFSLLQEWLRERKHFSTKDVADRVAEILISFKAGKRVATTGKRIKYEKGQKKVLQEGIVIPRGALSEESVYGKIKVIDPHKPLKFLFENPQTIVSPQIKTAVIDRLSKFGNDVKKAIASIKKEPLTLASDKVINDADCFKEEYVIKYPLEGFKAKDIQFVVDKHIREDVLPKRLAEFDGNEKNAFKNIDKNPIFADANHNIPIKHVRCFTGLSAVVPVKHDDAGKAIGFVKPGNNHHVAIYKDECGKLHESLVSFWNAVERKIKKVPVVITQPQDAWNIAENAHCSEEFTASLPNKTWTFVQSLQVNEMFVLGLEESAYQKAVREKDYNLINKHLYRVQSISKSDYFFRHHLETIIDDTSASKEMKRFYRFKSLGSFFKENPHKVQISVLGKLIVKE

SEQ ID NO: 1301 - protein, 1222 aa, unidentified
  REGION 1..1222: note = Description of Unknown: uncultivated organism with predicted taxonomy: Sediminibacterium sp. C3
  REGION 1..1222: note = MG16-220 effector
MKKVLGLDLGVGSIGWCLIEKDDDNTPKRIIRMGSRIVPISSDEETGYTKGNAISKNADRTAKRTARKCYDRYQLRRQALVNLIKRLYMLPNKELMLEQTPLEIWQKRADAASKEITLEALGRVLLHINQKRGYKHSRLSNADRKETAYVQEVNSRYDELKAEGLTIGQHFAAKLKENEQTSNDGKKYYNYRIKEQVYPRHAYEEEVKKILEIQSQFHADVLTPDVCREIMDIIFYQRDLKSCKNLVSLCEFESHTITKDGKEITIGPKVAPRTSPLAQLSSILETSNNITIRNRRNDELYISPEQRKAIADFLDNHEVMKLTDLYRILNISRKEGWWAGKAIGKGLKGNTTKCQIREALGSLPKEQVDSLTAFRLEFEEYVDEETGEVRQRVNNTLAEQQPLYKLWHMLYSIKDNKELSGALHHLGIDDEKSINKLSNLDFRTAGYANKSAKAIGRILPYLMDGIMYSEACERAGFDHSRRINPGRTLLTSLPQIQKNDLRQPIVEKILNQLVNIVNALLEKEGTIDEIRVELARELKQSKDERNEAFKRNNQNERQNKEYAERIKEYGLTPTRNRIMKMKMWEESEYTCMYCGQPINVTEFLQGADVEREHIIPRALLFDNSFTNQVCSCRRCNSQKGMRTAYDFIADDKGQEGLDLYIERINDLFDRKKISRSKLNRLLVSHKAYVSRKAQGKETEEDKELWENFIDRQLRQSQYIAKKSVEMLQQVCKNVYTTTGSVTDFVRHQWGYDEILHDLNFERFKKAELTTMVTQLHSGKEVEVERITNWTKRLDNRHHAVDALAIACTTQGMIQRLNTLNACRNEMLDELNSKDERVIDPERSMLEKWINSQPHICYAQAKDEVDKIIVSQRPNTRITVPGKRYVTKNGKRTQAQTGIIVPRGALHAEFVYGRIMKQEADGMTLTPQYVRKYKLGIGAQGFLFKGDETYKEDVKKDKKTGLSQIVVTDKIKDVLDKIVDGGIRRRILERLNRGFEEGTDYRANVAKALANLKNLDDDPIYSDDAKTRPIRTVRKYVSSSTMVAVRKNDDGKPISFVEPDGNHHVAFYKDEDGVVTESLVTKWQAVQRKLNHIPIIIENPSQVWNEVLGTNDIPNELLQSLPKDKSIFLLSMQIGEAFVMGMDETAYKRAIEKNDTQALADHLYFVQNLSSNNYRLRRHVESSFDTTDMNKEDLRFLNVKSIGALFNYNPHKVKLTILGDIIL

SEQ ID NO: 1302 - protein, 1018 aa, unidentified
  REGION 1..1018: note = Description of Unknown: uncultivated organism with predicted taxonomy: Sediminibacterium sp. C3
  REGION 1..1018: note = MG16-221 effector
MKKVLGLDLGVGSIGWCLIEKDDNNTPKRILRMGSRIVPISSDEESGYTKGNAVSKNADRTAKRTARKCYDRYQLRRQALINLLKRFGMEPNKNLMLEQTPIKLWQKRADAASKEVSLEELGRVLFHINQKRGYKHSRLSNSDSKETAYVQEVNSRYDDLKAEGLTVGQHFAAKLKENEQESADGKKYYNYRIKEQVYPRHAYEEEVKKILEVQSRYHSDILTPDVCKEIMDIIFYQRDLKSCKNLVSLCEFESYTITKDGKEITIGPKVAPRTSPLAQLSSILETANNITIRNRKNDELYISPEQRKAIADFLDNHEVMKLTDLYKILNIGRKDGWWAGKAIGKGLKGNTTKYQIREALANLPKEKVDSLTAFQLEFDEYVDEETGEVRKRINNTKAEKQPLYKLWHLLYSIKDNKELSGALCHLGIEDEESIEKLGKLDFRTAGYANKSAKAIGRILPYMMEGMMYSDACERAGFDHSKRIDPNRTLLTHLPQIQKNELRQPVVEKILNQLVNIVNALLEKEGTIDEIRVELARELKQSKDERNETFKRNSQNERNNKEYAERIKEYGLTPTRNRIMKMKMWEESEYTCVYCGQPVNVTEFLKGADVEREHIIPRGLLFDNSFTNQVCSCRLCNSKKGMRTAYDFIADDKGQAGLETYIDRINDLFNRKKISRSKFNRLLVSYKAYISRKAKGKETEEDKELWENFIDRQLRQSQYIAKKSVEMLQQVCKNVYTTSGSVTDFVRHQWGYDEILHDLNFERFKKAGLTAMVKQLHSGKEVEVERIMDWTKRLDNRHHAVDALTIACTTQGMIQRLNTLNASRDEMLEELNSKDQRVVDPERSMLEKWIFVQPHISYVEAKNEIDKIVISQRPNTRITVPGKRYVNKNGKRTLVQTDIIVPRGALHAEFVYGRILKQEADGVTMTPQYVRKYKLGIGAQGFLFNGKEFYKEELKKDSKTGLSSIVVTDKIKDVLEKIVDGGIRQRILERLNRGFEEGTDYRANVAKALANLKNLDEDP

SEQ ID NO: 1303 - protein, 1222 aa, unidentified
  REGION 1..1222: note = Description of Unknown: uncultivated organism with predicted taxonomy: Prevotella sp. ne3005
  REGION 1..1222: note = MG16-222 effector
MKKVLGLDLGVGSIGWCLLEKDDKNVPIRIIRMGSRIVPISTDEETGFTKGNAISKNADRTAKRTARKCYDRYQLRRQALVNLLRRLGMEPSKNLMLEQPPMELWQKRADAASKEISLVELGRVLLHINQKRGYKHSRLSNSDSKETAYVQEVNSRYDDLKAEGLTVGQHFAAKLKENEQLSADGKKYYNYRIKEQVYPRCAYEEEVKKILEVQSQYHSDVLTADACKEIMDIIFYQRDLKSCKNLVSLCEFESYTITKNGKEITIGPKVAPRTSPLAQLSSILETANNITIRNKRNDELYISPEQRKAIADFLDTHEVLKLTDLYKILNIGRKDGWWAGKAIGKGLKGNTTKCQIRKALSKLPKDLVDSITAFQLEFEEYVDQETGEVRKRINNTLVEKQPLYHLWHLIYSIKDVDELSGALRHLGIEDEESIRNLCDLDFRTAGYANKSAKAIGRILPYLMEGVMYSEACERAGLDHSRRIDPNRTLLKHLPPIQKNELRQPVVEKILNQLVNIVNALLEKEGAIDEVRVELARELKQSKDERNETFKRNNQNERQNKEYAERIKKYSLTPTRNRIMKLKMWEESEHACMYCEEPVDPIEFLKGADVEREHIIPRGLLFDNSFTNQVCSCRRCNSKKGMRTAYDFIADDKGQEGLNAYIDRINDLFDKKKISRSKLNRLLVSHKAYISRKAQGKETEEDKELWENFIDRQLRQSQYIAKKSVEMLLQVCKNVYTTSGSVTDFVRHQWGYDELLHDLNFDRFKKAGLTAMVKQLHSGKEVEVERIKDWTKRLDNRHHAVDALTIACTTQGMIQRLNTLNASREDILEELNSKDQRLVDPERSMLEKWVFVQPHISYSEAKNEIDKIVISQRPNTRMTVPGKRYVTKNGKRTLAQTGIVVPRGALHAEFVYGRIMKQEPDGITMTPQYVRKYKLGIGAQGFLFNGKEFYKEELKKDSKTGLSKIVVTDKIKEVLDKIVDGGIRQRILERLNRGFEEGADYRANVAQALTNLKNLDEDPIYSDDAKTRPIRTVRKYVSSSTMVAVRKDDKGKPVAFVEPDGNHHVAFYKDENGVISETIVTKWQAVQRKLNHIPIIIDNPSQTWSEVLGRNNVPEELLQSLPKDSSSFLLSLQIGEAFIMGMEEAELQKALEEKDMQKLAEHLYFVQNISSNNYRMRRHVESSFDTTDMNKEDQRFLNISSLDALYRLNPHKVKLTVLGDIVP

SEQ ID NO: 1304 - protein, 1222 aa, unidentified
  REGION 1..1222: note = Description of Unknown: uncultivated organism with predicted taxonomy: Prevotella copri
  REGION 1..1222: note = MG16-223 effector
MKKVLGLDLGVGSIGWCLVEKDDKNIPLRIIRMGSRIVPITKEEENGYTRGNAISKNADRTTKRTARKCYDRYQLRRKALVNLLKRCGMMPDKGLILEQSPLDLWQKRADAASKEISLEELGRVLLHINQKRGYKHSRLSNSDKKETAYVQEVNSRYDKLKAEGLTVGQHFAAKLKENEQISADGKKYYNYRIKEQVYPRHAYEEEAKRILEVQSQFHTDVLTTNVCKEIFDIIFYQRDLKSCKNLVSFCEFESYTINKNGKDITIGPKVAPRTSPLAQLSSILETANNITIRNRRNDELYISPEQRQAIANFLDNNEVMKLTDLYKILNIGRKDGWWAGKAIGKGLKGNTTKCQIRKALSKLSQEQIDKLTSFDLIFDEYVDEETGEVRKRINNSHAERQPLYRLWHLVYSIKDNDELSGALRGLGIEDEECIHNLCNLDFRTAGYANKSAKAIGRILPYLMEGMMYSEACNRAGFDHSRRVNPERELLTSLPQIQKNELRQPIVEKILNQLVNVVNALLEKEGTIDEIRVELARELKQSKDERNETYRRNNQNEKKNNEYAERIKEYGLTPTRNRIMKMKMLEESEYKCMYCGQPVREKEFLQGADVEREHIIPKALLFDNSFTNQVCSCRSCNSQKGMRTAYDFIADDKGQEGLEAYIERINDLFNKKKISRSKLNRLLVSHKAYVSRKAQGKETEEDVQLWENFIDRQLRQSQYIAKKSVEILQQVCKNVYTTSGSVTDFVRHQWGYDEILHDLNFEHFKKANLTTMVKQLHSGKEVEVERIKDWTKRLDNRHHAVDALAIACTTQGMIQRLNTLNASRDAMLDELNNKEQRMIDSERSMLEKWIISQPHVSYAEAKKEIDKILISLRPNTRITVPGKRYITKNGKRTLVQTGIIVPRGALHAEFVYGRIMKQEADGVTLTPQYVRKYKLGIGTQGYIFNGNETYKEELKKDKKTGLSQIVVTDKIKDVLEKIVDGGIRKRILERLNRGFEDGTDYRTNTAKALENLKNLDEDPIYSDDAKTRPIRTVRKYVNSSTMVAVRKNDNGKPVSFVEPDDNHHVAFYKDKDGVITESIVTKWQAVQRKLKHIPVIVDNPTQTWNDLVGRNDVSEELLQSLPKDNSEFLLSLQKGEAVILGLEEAAYQKAIDSNDMHTLSNHLYFVQSASLSDYRFRRHVESSFDKMGMNKEDQRFLNVKSIGAFFNYNPHKVKVTILGDIIK

SEQ ID NO: 1305 - protein, 848 aa, unidentified
  REGION 1..848: note = Description of Unknown: uncultivated organism with predicted taxonomy: Bacteroides sp. CAG:770
  REGION 1..848: note = MG16-224 effector
MKKVLGLDLGVGSIGWCLIEKDDNNVPKRILRIGSRIVPISSDEETGYTKGNAVSKNADRTAKRTARKCYDRYQLRRQALVSLLKRLGMEPNKKLMFEQTPMELWQKRADAASKEVSLEELGRVLLHINQKRGYKHSRLSNSDSKETAYVQEVNSRYDDLKAEGLTVGQHFAAKLKENEQESADGKKYYNYRIKEQVYPRHAYEEEVKKILEIQSQYHSEVLSSDVCKDIMDIIFYQRDLKSCKNLVSLCEFESYTITKDGKEITIGPKVAPRTSPLAQLSSILETANNITIRNRKNDELYISPEQRKAIADFLDNHEVMKLTDLYKILNIGRKDGWWAGKAIGKGLKGNTTKCQIREALSALSKEQIDSLTAFLLEIDEYVDEETGEVRKRINNTLAEQQPLYKLWHMLYSIKDNKELSGALNHLGIEDKESIEKLCKLDFRTAGYANKSAKAIGRILPYLMEGMMYSDACERAGFDHSRRINPERVLLTHLPQIQKNELRQPVVEKILNQLVNIVNALLEKEGAIDEIRVELARELKQSKDERNEAFKRNNQNERQNKELAERIKNYGLTPTRNRIMKLKMWEESEHSCMYCKQPVDPIEFLKGADVEREHIIPRGLLFDNSFTNQVCSCRRCNSQKGMRTAYDFIADDKGQEGLNAYIEHINDLFEKKKISRSKLNRLLVSHKAYLSRKAQGRETEEDKELWENFIDRQLRQSQYIAKKSVEMLQQVCKNVYTTSGSVTDFVRHQWGYDELLHELNIERFKKAGLTAMVKQLHSGKEVEVERIKDWTKRLDNRHHAVDAFAIACTTQGMIQRLNTLNASRDEMFEELNTKDQRLIDPERSMLEKW

SEQ ID NO: 1306 - protein, 1164 aa, unidentified
  REGION 1..1164: note = Description of Unknown: uncultivated organism with predicted taxonomy: Bacteroidales
  REGION 1..1164: note = MG16-225 effector
MATKKILGLDLGVGSIGWALIEMEDDKASSILGMGSRIVPLTTDDSTQFSKGQAITKNADRTARRTARKGYDRYQLRRAKLTQVLRQHNMLPERMDEHVIDLWRLRADAATEGKQLTLQQIGRVLYHINQKRGYKHAKADVSADSKQTKYVATVNQRYKDLQNLNQTIGQFFYQQLVDTAVQTPSGPYYTFRIKDKVFPRAAYVAEFDQIMQVQKIFYPEVLTTELINTLRNEIIFYQRPLKSCKHLVGLCEFEMKAYTNKHTGQVVYSGPKCAPRTSPLAQLCAIWEGVNNITLFNKHNEYLDITLEQRKAMVEHLCNNEKMTAKDLQKILGISSKEGWSVEKAIGKGLKGNMTLHQLRKALSKKYSDLLQFDLLMTDHVDEATGEVISRISEAIEQEPLYRLWHVVYSVQEREELGKALHKQFGIDDEAVVEALFKIDFVKPGYANKSHKFIRKLLPYLMKGYKYSEACDHIYVNHSNSMTKEQNATRELVDKIPLLLKNELRQPIIEKILNQMINIVNTLKEQHGNIDEVRVELARELKQSKDERAQTTERINKNERENKAIEERIREHGIRPSRARIQKYKMWEESQHQCFYCGKSISAAEFLSGADVEVEHIIPKSILFDDSFSNKVCACRDCNHTKDNLTARDFMETRGQAELDAYLARVNTAFEEGRISKTKRDHLLWHKEEIPQDFIDRQLRQSQYISKKAVEILRSAIRDVYATSGSVTDFLRHIWGYDQILHNLNLPKYRDAELTEFVTYDHRGQEHQEERIKNWSKRIDHRHHAIDALTIALTRQGYIQRLNNLNASHDDIAEAVRKVNPLMEKKYSLLEKYIYIQPHFTVQEVTDKVDGILVSFRAGKKVTTPAKRAIYRKGKRINVQDGLLVPRGALTEETVYGKLGNKYVVKYPLTHPSMKVDDIVDPTIREIVRARLAAFSGKAKDAFAKPLYSDAAQKMEIKTVRCYTGLQDKAVASVRFNAQGEPIGFAKTGNNHHIAIYQDAKGQYQESVVSFWQAVERKRYGLPIVIEDPKAIWDKLLDSDLPQEFLSTLPQDDWQFVVSLQANEMFILGMEDGDFEMAMQNKDYQLLNKYLYRVQKIRGKEYTFRYHIETTVDDKYSNEKGESKPNPALSMQMKKLISIRSFGGWLAQHPHKVRVNLLGEISEV

SEQ ID NO: 1307 - protein, 811 aa, unidentified
  REGION 1..811: note = Description of Unknown: uncultivated organism
  REGION 1..811: note = MG16-226 effector
MVPLCYRSATVNGLKKPACILYAPFGDVQDANEMRMVEDAKWNENYWYLKSRHLMWRKHFFIYFYYLTQNFACIYQKKVLPLQRKGFGINTNTYIMTKNILGLDLGVGSIGWALIQTEDDQPKRIIGMGSRIVPLTKDDSDQFTKGQAISKNADRTTRRTTRKGYDRYQLRRALLTQVLRQNGMLPECMDENMIDLWKLRSDAATDGKQLTLQQIGRVLYHINQKRGYKHAKSDNDGDSKQTKYVEEVNLRYKEIQEKNVTVGQHFYAELLNSKVESGNGPYYTFRIKDKVFPRAAYIAEFDQIMRVQKCYYPDVLTDELIETLRNRIIFYQRPLKSCKHLVGLCEFEMRPYKKDGKIVYGGPKCAPRTSPLAQLCAMWETVNNITLTNRNNERLEISNEQRQQLVQFLCTHETLKLTDLYKILGITKKDGWYGGKAIGKGIKGNVTLNQLRKALDGKYSQWLEMPIERIDVVDKNTAEAFWAVSPKVDETPLFQLWHAVYSLQNAEELTKTLQNKFGITDSQVIDALCKIDFVKPGYANKSHKFIRRLLPYLMEGMMYSEACACIQVNHSNSMTKAEREARPLAEKIELLQKNALRQPVIEKILNQMINLVNRLQQEYGSIDEARVELARELKQSRDERKDAFDRNNENEKRNKKISALISEQGIRPSRSRIQKYKMWEESEHRCMYCGKVVNLSEFLNGADVEIEHIIPRSILFDDSFSNKVCACRDCNREKDNMTAMDYMASKPEGEFEAYKQRVDEAFNAHRISKTKRDHLLWRRADIPQAFIDRQLRLSQYIATKAVEILQQGIRQ

SEQ ID NO: 1308 - protein, 854 aa, unidentified
  REGION 1..854: note = Description of Unknown: uncultivated organism with predicted taxonomy: Bacteroidales
  REGION 1..854: note = MG16-228 effector
MADFLNQHDKMGVKDLQKILGISPKDGWWAGKAIGKGLKGNTTFTQLREALGNLPDAEHLLEMKLHLVDSAVDTTTGELIRQVSPQVEEEPLFRLWHLVYSLQNEDELRKALRKQFGIDDEEILAKLCKIDFVKPGYANKSHKFIRKLLPYLMEGYQYHEACAHIGVNHSDSLTAEQNAARPLLDKIPLLEKNELRQPVIEKILNQMINVVNALKAEYGDIDDVRIELARELKSSKEEREAAFKRNNENERQNKIYEDRIREYGIRPSRSRIQKYKMWEESNHLCFYCGKPVNVTDFLAGAEVEIEHIIPQSVLFDDSYSNKVCACRTCNHTKGNQTAREFMETHSKAEYESYLLRVDDAFNAHRISKTKRDHLLWRKEDIPQDFIDRQLRQSQYIAKKAAEILRQGYRNVYATSGSVTDFLRHQWGYDEILHRLNLPRYQQVEGLTELVTYDHCGQEHQQERIKGWTKRLDHRHHAIDALTIALTQQSVIQRLNTLNTSREQMFDDLGKRTDTPEYTEKRSLLENWIDAQPHFSVQEVTDKVDGILVSFRAGKRAATPAKRAVYQNGKRHIVQTGLQVPRGALSEETVYGKLGNKYVVKYPLGHQSMKVDDIVDPTIREIVRTRLNAFGGKAKDAFAEPLYSDAAHQMQIKTVRCYMGLQDKAVVPVRFNAKGEPVGFVKMGNNHHIAIYRDANGQFQESVVSFWQAVERKRYGIPVVIEHPHEVWDKLINIDNIPQEFLETLPRDDWQFVVSLQQNEMFILGMDDADFEAAMEQKDYRTLNKYLYRVQKIATKNYYFRYHTETSVDDKYDGEKNEMWSKNMKKLINIRSFDAFFSQHPHKVRINLLGEVSAL

SEQ ID NO: 1309 - protein, 887 aa, unidentified
  REGION 1..887: note = Description of Unknown: uncultivated organism with predicted taxonomy: Bacteroidales
  REGION 1..887: note = MG16-229 effector
LAQLCTVWEAVNNITLTNRQNETFEITQEQRVAMADFLNQHDKMGVKDLQKILGISPKDGWWAGKAIGKGLKGNTTFTQLREALGNLPDAEHLLEMKLHLVDSAVDTTTGELIRQVSPQVEEEPLFRLWHLVYSLQNEDELRKALRKQFGIDDEEILAKLCKIDFVKPGYANKSHKFIRKLLPYLMEGYQYHEACAHIGVNHSDSLTAEQNAARPLLDKIPLLEKNELRQPVIEKILNQMINVVNALKAEYGDIDDVRIELARELKSSKDEREAAFKRNNENERQNKIYEDRIREYGIRPSRSRIQKYKMWEESNHLCFYCGKPVNVTDFLAGAEVEIEHIIPQSVLFDDSYSNKVCACRTCNHTKGNQTAREFMETHSKAEYESYLLRVDDAFNAHRISKTKRDHLLWRKEDIPQDFIDRQLRQSQYIAKKAAEILRQGYRNVYATSGSVTDFLRHQWGYDEILHRLNLPRYQQVEGLTELVTYDHCGQEHQQERIKGWTKRLDHRHHAIDALTIALTQQSVIQRLNTLNTSREQMFDDLGKRTDTPEYTEKRSLLENWIDAQPHFSVQEVTDKVDGILVSFRAGKRAATPAKRAVYQNGKRHIVQTGLQVPRGALSEETVYGKLGNKYVVKYPLGHQSMKVDDIVDPTIREIVRTRLNAFGGKAKDAFAEPLYSDAAHQMQIKTVRCYMGLQDKAVVPVRFNAKGEPVGFVKMGNNHHIAIYRDANGQFQESVVSFWQAVERKRYGIPVVIEHPHEVWDKLINIDNIPQEFLETLPRDDWQFVVSLQQNEMFILGMDDADFEAAMEQKDYRTLNKYLYRVQKIATKNYYFRYHTETSVDDKYDGEKNEMWSKNMKKLINIRSFDAFFSQHPHKVRINLLGEVSAL

SEQ ID NO: 1310 - protein, 1175 aa, unidentified
  REGION 1..1175: note = Description of Unknown: uncultivated organism with predicted taxonomy: Bacteroides sp. CAG:545
  REGION 1..1175: note = MG16-230 effector
EFTSGNAASKNQKRTQKRTARKGYDRYQMRRQALTEKLRELKMLPDERLIKLPVLELWTLRAKAATPGEKLTLPEIGRVLYHINQKRGYRHAKSDDSADKEQRDYVQTVNKRYQEIKDEGTTIGQHFAIKLKESEIVTEKGPFYNYRIKEQVFPRDAYIEEFDRIMDCQKTFYPEELSEDNIDEIRNKIIFYQRNLKSCKHLVSQCEFMTRSFLDAEHKPILNSSGELVMSGPKVAPKSSPIFQACKIWEEINNLSIRNKENDELHISPEQKKDIFEYLDNNEKINATALYKILGIGKGDGWSVDKALSKGFTGNTTKVAIAKALGKEHNTKKSDLLRFVLRLKENGVNKDTGEIIYEIDPTCENEPLYRLWHVIYSINDKDALRHALTNQFGINDGESLRELTKIDFVKQGYGSRSAKFMRKLLPALMDGARYSEACDMIGINHSGSLTKSENEARELLHKIPQLQKNELRQPVVEKILNQMINVVNAVIDQFGSIDEIRVEMARELKLSKEGRAATAKNIRDREKMNNEMAEKIKELGITPSKNKILKYRLWQESGQKCFYCGQPVGAAEFLSGLDVEIEHIVPKALLFDDSFSNKVCACRKCNAEKSNTTAYDYMKSKGENEFNDYLRRVDAAFNEHKISFTKRSRLLTPADKLPKDFISRQLVQTQYISRKAMEILKQVCHNVYGSSGEVTSYLRRIWGYDEILHSLDLPRYREGGMTAEVSYDHRGQTHTEERIKDWSKRLDHRHHAIDALTIACTRQSIIQRLNNLSAMTAVAGESMSLDKWTLAQPHFSVQEASDNVSRILVSFKAGKKVTTPGKRYVYRGGKRVLAQEGLLIPRGALCEESVYGRIHSLEKEVPVKKLFERVDDIVKPGIRTTVEERLRACDNDVKVACASLKKEPLYLDAEKTIPLEYGTCYKAEYVMRYALSALKPKDVEFIVDEHIRKVVSERLSEYGNDPKKAFAEPLYADKSKTIPIRAVRCYTGLAQVVPVKKDSKGNDIGFVKPGNNHHIAIYRDAEGTYHESIVTFWDSVERKKYGLPVIIRKPGEIWDILIDKNIPEELAAGIPAPDWKFVMSMQQNEMFVLGMEDDEFRDAMEVKDYKTLGAHLYRVQKLTSIYYVFRHQYETQLDDSKGAQIMKKFYRAQSFKALFSLHPRKVSVSLLGEMALKDD

SEQ ID NO: 1311 - protein, 890 aa, unidentified
  REGION 1..890: note = Description of Unknown: uncultivated organism with predicted taxonomy: Bacteroides sp. CAG:770
  REGION 1..890: note = MG16-231 effector
MKADDLFKILGLAKNSGWSADRAMSKGMVGNTTRVALMKALKGRRDIDEILRFDLREVESNQVNADTGEVLMEIGAECESEPLYRLWHIIYSISDKNEQKATLEKQFGITDESMLESLCRIDFVKQGYSSRSFKFMRKILPSLMDGAKYSEACDVIGINHSDSITKAENQTRKLLTKLPQLQKNELRQPVVEKILNQMINVVNAVIDKYGSIDEIRVEMARELKLSKAGRESAAKNIRTREKANEEIAKRIEELGLVPSKNKILKYRLWEESGKRCFYCGQPVSAAEFLNGLDVEIEHVVPKSLLFDDSFSNKVCACRKCNAEKGNATAFDFMKGRGENAFEDYLKRVETAFKENKISQTKRNRLLTPADKIPKDFIARQLVQTQYISRKAMEILNQVCRNVYGSSGDVTAYLRRIWGYDEILHSLDLPRYREGNLTGDVTYVHRGQTHTEERIRDWSKRLDHRHHAIDALTIACTRQSIIQRLNILNAKTAIGEEQMSLDKWTLAQAHFSVADVADHVADILVSFKSGKRVTTPGKRYVYKAGRRIVAQENILVPRGALSEESVYGRIKSIEEKVPVKKLFERADDIVKPRIRHLIRERLATCGGDCSKAVSSLKKSPLYLDEENTIMLEYGSCFKPEYVIKYSLNSIKAKDAVSIVDNHVREVVTERLAAFGDDPKKAFAEPLYADETGKIQIKTVRCYTGLSQVVPVKKDADGNDIGFVKPGNNHHIAIYKDADGKYQESIVTFRDAVERKKYGIPVVVRNPVEVLDTIIDKNVPEDLAGGLPSPEWTFVMSMQQNEMFVLGMGDDEFNDAMAGMDYKSLGEHLYRVQKLASLYYVFRSQYETKLDDSNNALAMRKFYRIRSFNALFSLNPRKVSISLLGEISLKDD

SEQ ID NO: 1312 - protein, 1133 aa, unidentified
  REGION 1..1133: note = Description of Unknown: uncultivated organism with predicted taxonomy: Bacteroides sp. CAG:770
  REGION 1..1133: note = MG16-232 effector
MLPDERLIKLPVLELWTLRAKAATPGEKLTLPEIGRVLYHINQKRGYRHAKSDDSADKEQRDYVQTVNKRYQEIKDEGTTIGQHFAIKLKESEIVTEKGPFYNYRIKEQVFPRDAYIEEFDRIMDCQKTFYPEELSEDNIDEIRNKIIFYQRNLKSCKHLVSQCEFMTRSFLDAEHKPILNSSGELVMSGPKVAPKSSPIFQACKIWEEINNLSIRNKENDELHISPEQKKDIFEYLDNNEKINATALYKILGIGKGDGWSVDKALSKGFTGNTTKVAIAKALGKEHNTKKSDLLRFVLRLKENGVNKDTGEIIYEIDPTCENEPLYRLWHVIYSINDKDALRHALTNQFGINDGESLRELTKIDFVKQGYGSRSAKFMRKLLPALMDGARYSEACDMIGINHSGSLTKSENEARELLHKIPQLQKNELRQPVVEKILNQMINVVNAVIDQFGSIDEIRVEMARELKLSKEGRAATAKNIRDREKMNNEMAEKIKELGITPSKNKILKYRLWQESGQKCFYCGQPVGAAEFLSGLDVEIEHIVPKALLFDDSFSNKVCACRKCNAEKSNTTAYDYMKSKGENEFNDYLRRVDAAFNEHKISFTKRSRLLTPADKLPKDFISRQLVQTQYISRKAMEILKQVCHNVYGSSGEVTSYLRRIWGYDEILHSLDLPRYREGGMTAEVSYDHRGQTHTEERIKDWSKRLDHRHHAIDALTIACTRQSIIQRLNNLSAMTAVAGESMSLDKWTLSQPHFSVQEVSDNVSRILVSFKAGKKVTTPGKRYVYRGGKRVLAQEGLLIPRGALCEESVYGRIHSLEKEVPVKKLFERIDDIVKPGIRAAVEERLRACDNDVKVACASLKKEPLYLDVEKTIPLEYGTCYKAKYVMRYALSALKPKDVEFIVDEHIRKVVSERLSEYGNDPKKAFAEPLYADKSKTIPIRAVRCYTGLAQVVPVKKDSKGNDIGFVKPGNNHHIAIYRDAEGTYHESIVTFWDSVERKKYGLPVIIRKPGEIWDILIDKNIPEELAAGLPAPDWQFVMSMQQNEMFVLGMEDDEFRDAMEGKDYKTLGAHLYRVQKLASIDYYFRSQYETALDNSAGARMMKKFYRINSIKSLFALHPRKVSVSLLGEMALKDD

SEQ ID NO: 1313 - protein, 1010 aa, unidentified
  REGION 1..1010: note = Description of Unknown: uncultivated organism with predicted taxonomy: Bacteroides sp. CAG:545
  REGION 1..1010: note = MG16-233 effector
MDCQKTFYPEELSEDNIDEIRNKIIFYQRDLKSCKHLVSQCEFMTRSFLDADHKPILNSSGELVMSGPKVAPKSSPIFQACKIWEEINNLSIRNKENDELHISPEQKKDIFEYLDNNEKINATALYKILGIGKGDGWSVDKALSKGFTGNTTKVAIAKALGKEHNTKKSDLLRFDLRLKENGVNKDTGEIIYEIDPTCENEPLYRLWHVIYSINDKDALRHALTNQFGINDEESLRELTKIDFVKQGYGSRSAKFMRKLLPALMDGARYSEACDMIGINHSGSLTKSENEARELLHKIPQLQKNELRQPVVEKILNQMINVVNAVIDQFGSIDEIRVEMARELKLSKEGRAATAKNIRDREKMNNEMAEKIKELGITPSKNKILKYRLWQESGQKCFYCGQPVGAAEFLSGLDVEIEHIVPKALLFDDSFSNKVCACRKCNAEKSNTTAYDYMKSKGENEFNDYLRRVDAAFNEHKISFTKRSRLLTPADKLPKDFISRQLVQTQYISRKAMEILKQVCHNVYGSSGEVTSYLRRIWGYDEILHALDLPRYREGGMTAEVSYDHRGQTHTEERIKDWSKRLDHRHHAIDALTIACTRQSIIQRLNNLSAMTAVAGESMSLDKWTLAQPHFSVQEVSDNVSRILVSFKAGKKVTTPGKRYVYRGGKRVLAQEGLLIPRGALCEESVYGRIHSLEKEVPVKKLFERVDDIVKPGIRTAVEERLRACDNDVKVACASLKKEPLYLDAEKTIPLEYGTCYKAEYVMRYALSALKPKDVEFIVDEHIRKVVSERLSEYGNDPKKAFAEPLYADKSKTIPIRAVRCYTGLAQVVPVKKDSKGNDIGFVKPGNNHHIAIYRDAEGTYHENIVTFWDSVERKKYGLPVIIRKPGEIWDILIDKNIPEELAAGLPAPDWQFVMSMQQNEMFVLGMEDDEFRDAMEVKDYKTLGAHLYRVQKLTSIDYYFRSQYETTLDDSAGARMMKKFYRIKSIKSLFALHPRKVSVSLLGEMALKDD

SEQ ID NO: 1314 - protein, 1121 aa, unidentified
  REGION 1..1121: note = Description of Unknown: uncultivated organism with predicted taxonomy: Bacteroides sp. CAG:770
  REGION 1..1121: note = MG16-234 effector
MDLWTLRARAATPGEKLSLAEIGRVLYHLNQKRGYRHSKEDDSADKTQRDYVQAVNKRFQEIKNEGLTIGQHFAVKLKESEVITDKGAFYNYRIKEQVFPRAAYVEEFDRIIQCQREFYPEVLTEANVNEIRNEIIYYQRPLKSCKHLVSVCEFMQRELFDAEHNPIRNGKGEIVVAGPKCAPKSSPLAQVCKIWEEVNNIRITNKENDEYFISIDNKHEIFDFLNTHEKMKADDLFKILGLAKNSGWSADRAMSKGMVGNTTRVALMKALKGRRDIEEVLRFDLSAVESNQVNADTGEVLMEISAECGREPLYRLWHIIYSISDKNEQKSALKSQFGILDESMLESLCRIDFVKQGYSSRSFKFMRKILPSLMDGAKYSEACDAVGINHSDSITKAENQARELLVKLPQLQKNELRQPVVEKILNQMINVVNAVIDKYGAIDEIRVEMARELKLSKEGRESAAKNIRAREKANEEIAKRIEELGLVPSKNKILKYRLWEESGKRCFYCGQPVSAAEFLNGLDVEIEHVIPKSLLFDDSFSNKVCACRKCNAEKDNATAFDFMKGRGENAFEDYLKRVETAFKENRISQTKKNRLLTPADKIPKDFISRQLVQTQYISRKAMEILNQVCRNVYGSSGDVTAYLRRIWGYDEILHSLDLPRYREGNLTGDVTYVHRGQTHTEERIKDWSKRLDHRHHAIDALTIACTRQSIIQRLNTLNAKTAIGEEQISLDKWTLAQAHFSVADVADHVADILVSFKSGKRVTTPGKRYVYKAGRRRVVQENILVPRGALSEESVYGRIKSIEEKVPVKKLFERVDDIVKPRIRRLIRERLEACGGDCSKAVSSLKKSPLYLDEEKTIMLEYGSCFKYSYVKKSKLIQRDKKDDFINVSLIVDKHIREVVTARLAAFGGDTKKAFAEPLYADEAGKIQIRTVRCYTNSTVVPVKKDADGNDIGFVKPGNNHHIAIYKDADGTYYWKLVTLWNAVDRKRYGLPIIVRNPYEISDIIIDSNIPDALASGLPEPNWSFVMSLQQNEMFVLGMSEEEFRCAIENKDYKTLGMHLYRVQKLSHLRFRSQYETRLDDSSEAKNMKKFYEIRSLKSFWSLNPRKVSISLLGEISLKDD

SEQ ID NO: 1315 - protein, 1121 aa, unidentified; identical to SEQ ID NO: 1314
  REGION 1..1121: note = Description of Unknown: uncultivated organism with predicted taxonomy: Bacteroides sp. CAG:770
  REGION 1..1121: note = MG16-235 effector

SEQ ID NO: 1316 - protein, 1045 aa, unidentified
  REGION 1..1045: note = Description of Unknown: uncultivated organism with predicted taxonomy: Bacteroides sp. CAG:770
  REGION 1..1045: note = MG16-236 effector
KLKESEIITDKGAFYNYRIKEQVFPRAAYVEEFDRIIQCQREFYPEVFTEAIVNEIRNEIIYYQRPLKSCKHLVSVCEFMQRELFDAEHNPIRNGKGEIVVAGPKCAPKSSPLAQVCKIWEEVNNIRITNKENDEYFISIDNKHEIFDFLNTHEKMKADDLFKILGLAKNSGWSADRAMSKGMVGNTTRVALMKALKGRRDIDEILRFDLREVESNQVNADTGEVLMEIGAECESEPLYRLWHIIYSISDKNEQKATLEKQFGITDESMLESLCRIDFVKQGYSSRSFKFMRKILPYLMDGAKYSEACDAVGINHSDSITKAKNQARELLVKLPQLQKNELRQPVVEKILNQMINVVNAVIDKYGAIDEIRVEMARELKLSKEGRESAAKNISDRKKANEEIARRIEELGLVPSKNKILKYRLWEESGKRCFYCGQPVSAAEFLNGLDVEIEHVIPKSLLFDDSFSNKVCACRKCNAEKDNATAFDFMKGRGENAFEDYLKRVETAFKENKISQTKRNRLLTPADKIPKDFISRQLVQTQYISRKAMEILNQVCRNVYGSSGDVTASLRRIWGYDEILHSLDLPRYREGNLTGDVTYVHKGQTHTEERIKDWSKRLDHRHHAIDALTIASTRQSIIQRLNTLNAKTAIGEEQISLDKWTLAQAHFSVADVADHVADILVSFKSGKKVATPGKRYVYKAGRRRVVQENILVPRGALSEESVYGRIKSIEEKIPVKKLFERADDIVKPRIRRLIRERLEACGGDCSKAVSSLKKSPLYLDEEKTIMLEYGSCFKPEYVIKYSLNSIKAKDAVSIVDKHVREVVTERLAAFGDDPKKAFAEPLYADEAGKIQIKTVRCYTGLSQVVPVKKDADGNDIGFVKPGNNHHIAIYKDADGKYQECIVTFRDAVERKKYGIPVVVRKPAAVLDTVIDKNVPEDLAGGLPSPEWTFVMSMQQNEMFVLGMGDDEFNDAMAGRDYKSLGEHLYRVQSISHADYYFRSQYETMLDNSKNAMAMKKYYRIRSFKALFALNPRKVSISLLGEISLKDD

SEQ ID NO: 1317 - protein, 956 aa, unidentified
  REGION 1..956: note = Description of Unknown: uncultivated organism with predicted taxonomy: Bacteroides sp. CAG:770
  REGION 1..956: note = MG16-237 effector
PILNSSGELVMSGPKVAPKSSPIFQACKIWEEINNLSIRNKENDELHISPEQKKDIFEYLDNNEKINATALYKILGIGKGDGWSVDKALSKGFTGNTTKVAIAKALGKDHNTKKSDLLRFDLRLKENGVNKDTGEIIYEIDPTCENEPLYRLWHVIYSINDKDALRHALTNQFGINDEESLRELTKIDFVKQGYGSRSAKFMRKLLPALMDGARYSEACDMIGINHSGSLTKSENEARELLHKIPQLQKNELRQPVVEKILNQMINVVNAVIDQFGSIDEIRVEMARELKLSKEGRAATAKNIRDREKMNNEMAEKIKELGITPSKNKILKYRLWQESGQKCFYCGQPVGAAEFLSGLDVEIEHIVPKALLFDDSFSNKVCACRKCNAEKSNTTAYDYMKSKGENEFNDYLRRVDAAFNEHKISFTKRSRLLTPADKLPKDFISRQLVQTQYISRKAMEILKQVCHNVYGSSGEVTSYLRRIWGYDEILHSLDLPRYREGGMTAEVSYDHRGQTHTEERIKDWSKRLDHRHHAIDALTIACTRQSIIQRLNNLSAMTAVAGESMSLDKWTLAQPHFSVQEVSDNVSRILVSFKAGKKVTTPGKRYVYRGGKRVLAQEGLLIPRGALCEESVYGRIHSLEKEVPVKKLFERVDDIVKPGIRAAVEERLRACDNDVKVACASLKKEPLYLDVEKTIPLEYGTCYKVEYVMRYALSALKPKDVEYIVDEHIRKVVSERLSEYGNDPKKAFAEPLYADKSKTIPIRAVRCYTGLAQVVPVKKDSKGNDIGFVKPGNNHHIAIYRDAEGTYHESIVTFWDSVERKKYGLPVIIRKPGEIWDILIDKNIPEELAAGLPAPDWQFVMSMQQNEMFVLGMEDDEFRDAMEVKDYKTLGEHLYRVQKLTSLYYVFRHQYETQLDDSKGAQIMKKFYRVRSFNAMFALHPRKVSVSLLGEMALKDD

SEQ ID NO: 1318 - protein, 970 aa, unidentified
  REGION 1..970: note = Description of Unknown: uncultivated organism with predicted taxonomy: Bacteroides sp. CAG:545
  REGION 1..970: note = MG16-238 effector
MRIYDKEFPGRRSQTNIEQFRRTRNAGPKVAPKSSPIFQACKIWEEINNLSIRNKENDELHISPEQKKDIFEYLDNNEKINATALYKILGIGKGDGWSVDKALSKGFTGNTTKVAIAKALGKEHNTKKSDLLRFDLRLKENGVNKDTGEIIYEIDPTCENEPLYRLWHVIYSINDKDALRHALTNQFGINDEESLRELTKIDFVKQGYGSRSAKFMRKLLPALMDGARYSEACDMIGINHSGSLTKSENEARELLHKIPQLQKNELRQPVVEKILNQMINVVNAVIDQFGSIDEIRVEMARELKLSKEGRAATAKNIRDREKMNNEMAEKIKELGITPSKNKILKYRLWQESGQKCFYCGQPVGAAEFLSGLDVEIEHIVPKALLFDDSFSNKVCACRKCNAEKSNTTAYDYMKSKGENEFNDYLRRVDAAFNEHKISFTKRSRLLTPADKLPKDFISRQLVQTQYISRKAMEILKQVCHNVYGSSGEVTSYLRRIWGYDEILHSLDLPRYREGGMTAEVSYDHRGQTHTEERIKDWSKRLDHRHHAIDALTIACTRQSIIQRLNNLSAMTAVAGESMSLDKWTLAQPHFSVQEVSDNVSRILVSFKAGKKVTTPGKRYVYRGGKRVLAQEGLLIPRGALCEESVYGRIHSLEKEVPVKKLFERVDDIVKPGIRTAVEERLRACDNDVKVACASLKKEPLYLDVEKTIPLEYGTCYKAKYVMRYALSALKPKDVEFIVDEHIRKVVSERLSEYGNDPKKAFAEPLYADKSKMIPIRAVRCYTGLAQVVPVKKDSKGNDIGFVKPGNNHHIAIYRDAEGTYHESIVTFWDSVERKKYGLPVIIRKPGEIWDILIDKNIPEELAAGLPAPDWQFVMSMQQNEMFVLGMEDDEFRDAMEGKDYKTLGAHLYRVQKLTSIDYYFRSQYETTLDDSAGARMMKKFYRITSIKSLFALHPRKVSVSLLGEMALKDD

SEQ ID NO: 1319 - protein, 788 aa, unidentified
  REGION 1..788: note = Description of Unknown: uncultivated organism with predicted taxonomy: Bacteroides sp. CAG:770
  REGION 1..788: note = MG16-239 effector
LTSQFGINDEASLAELSKIDFVKQGYGSRSVKFMRKLLPSLMDGAKYSEACDVIGVNHSGSLTKSENEARELLQRIPQLQKNELRQPVVEKILNQMINVVNAVIEKFGGVDEIRVEMARELKLSKEGRAATAKNIRDREKENKEIAEKIIELGVTPSKNKILKYRLWQEAGQKCFYCGQPVGATEFLNGLDVEIEHVVPKALLFDDSFSNKVCACRKCNAEKRNSTAYDYMKSKGENAFNDYLRRVDTAFSEHKISFTKRSRLLTPADKIPKDFISRQLVQTQYISRKAMEILKQVCHNVYGSSGEVTSYLRRIWGYDEILHSLDLPRYREGGMTAEVSYEHRGQTHTEERIKDWSKRLDHRHHAIDALTIACTRQSVIQRLNNLSSMTAVAGEAMSLDKWTLAQPHFSVQEVSDKVGGILVSFKAGKKVTTPGKRYTYRGGKRILAQDGLLIPRGALSEESVYGRISALEKNVLVKKLFERVEDIVKPGIRAVVEDRLKACDNDVKAACTSLKEEPLYLDAEKTIPLEYGTCYKREYVIKYPISSLKTKDVESIIDGHIRQIVSERLSEYGNDPKKAFAEPLYADDAKTIPVRTVRCYTGLDQVVPVKKDVAGNDIGFVKPGNNHHIAIYRDADGKFHECVVTFWDAVERKKYGIPVIVRNPDEVWDVVIDKNVPEELAAGLPALGWSFVMSLQQNEMFILGMEDDEFRDAMAEADYKALGAHLYRVQKLTGSDYYFRSHYETLLDDSAGARIMKKFYRVRSFNALFNLHPRKVAVSLLGEMSLKND

SEQ ID NO: 1320 - protein, 1182 aa, unidentified
  REGION 1..1182: note = Description of Unknown: uncultivated organism with predicted taxonomy: Bacteroides sp. CAG:709
  REGION 1..1182: note = MG16-240 effector
LSPDESSEFTSGNAASKNQKRTQKRTARKGYDRYQMRRQALTDKLRKLKMLPDEHLIKLPILDLWTLRARAATPGEKLTLPEIGRVLYHINQKRGYRHSRSDDSADKEQREYVQAINKRFQEIREEGVTIGQHFVKKLKESEVVTDKGAFYNYRIKEQVFPRDAYVAEFDKVMDCQKVFYPEELSEANINEFRNEIIFYQRNLKSCKHLVSRCEFMTRSFLDEGHRPVLDASGKLVISGPKVAPKSSPIFQVCKIWEEINNLSIRNKENDELHISPEQKKEIFEYLDNNEKITSAALYKILGIGKGDGWSVDKALSKGFTGNTTKVAISKALGKANDAKKRDLLRFDLRLKENGVNKDTGEIICEIDPECENEPLYKLWHVIYSINDKDAQRHALTSQFGINDEASLAELSKIDFVKQGYGSRSVKFMRKLLPSLMDGAKYSEACDVIGVNHSGSLTKSENEARELLQRIPQLQKNELRQPVVEKILNQMINVVNAVIEKFGGVDEIRVEMARELKLSKEGRAATAKNIRDREKENKEIAEKIIELGVTPSKNKILKYRLWQEAGQKCFYCGQPVGATEFLNGLDVEIEHVVPKALLFDDSFSNKVCACRKCNAEKRNSTAYDYMKSKGENAFNDYLRRVDTAFSEHKISFTKRSRLLTPADKIPKDFISRQLVQTQYISRKAMEILKQVCHNVYGSSGEVTSYLRRIWGYDEILHSLDLPRYREGGMTAEVSYEHRGQTHTEERIKDWSKRLDHRHHAIDALTIACTRQSVIQRLNNLSSMTAVAGEAMSLDKWTLAQPHFSVQEVSDKVGGILVSFKAGKKVTTPGKRYTYRGGKRILAQDGLLIPRGALSEESVYGRISALEKNVPVKKLFERVEDIVKPGIRAVVEDKLKACDNDVNAACASLKKEPLYLDAEKTIPLEYGTCYKRKYVIKYPISSLKAKDVESIIDGHIRQIVSERLSEYGNDPKKAFAEPLYADDAKTIPVRTVRCYTGLDQVVPVKKDVAGNDIGFVKPGNNHHIAIYRDADGKFHECVVTFWDAVERKKWGIPVIVRNPDEVWDVVIDKNVPEELAAGLPALGWSFVMSLQQNEMFVLGMEDDEFRDAMAEADYKALGAHLYRVQKLAGSDYYFRSHYETLLDDSAGARIMKKFYRISSSKALFALHPRKVAVSLLGEMSLKND

SEQ ID NO: 1321 - protein, 1180 aa, unidentified
  REGION 1..1180: note = Description of Unknown: uncultivated organism with predicted taxonomy: Bacteroides sp. CAG:770
  REGION 1..1180: note = MG16-242 effector
PDESSEFTSGNAASKNQKRTQKRTARKGYDRYQMRRQALTDKLRKLKMLPDEHLIKLPVLDLWTLRARAATPGEKLTLPEIGRVLYHINQKRGYRHSRSDDSADKEQREYVQAINKRFQEIREEGVTIGQHFVKKLKESEVVTDKGAFYNYRIKEQVFPRDAYVAEFDRVMDCQKVFYPEELSEANINEFRNEIIFYQRNLKSCKHLVSRCEFMTRSFLDEGHRPVLDASGKLVISGPKVAPKSSPIFQVCKIWEEINNLSIRNKENDELHISPEQKKEIFEYLDNNEKITSAALYKILGIGKGDGWSVDKALSKGFTGNTTKVAISKALGKANDAKKRDLLRFDLRLKENGVNKDTGEIICEIDPECENEPLYKLWHVIYSINDKDAQRHALTSQFGINDEASLAELSKIDFVKQGYGSRSVKFMRKLLPSLMDGAKYSEACDVIGVNHSGSLTKSENEARELLQRIPQLQKNELRQPVVEKIINQMINVVNAVIEKFGGVDEIRVEMARELKLSKEGRAATAKNIRDREKENKEIAEKIIELGVTPSKNKILKYRLWQEAGQKCFYCGQPVGATEFLNGLDVEIEHVVPKALLFDDSFSNKVCACRKCNAEKRNSTAYDYMKSKGENAFNDYLRRVDTAFSEHKISFTKRSRLLTPADKIPKDFISRQLVQTQYISRKAMEILKQVCHNVYGSSGEVTSYLRRIWGYDEILHSLDLPRYREGGMTAEVSYEHRGQTHTEERIKDWSKRLDHRHHAIDALTIACTRQSVIQRLNNLSSMTAVAGEAMSLDKWTLAQPHFSVQEVSDKVGGILVSFKAGKKVTTPGKRYVYRGGKRILAQEGLLIPRGALCEESVYGRISALEKNVPVKKLFERVEDIVKPGIRAVVEDRLMACDNDVNAACASLKKEPLYLDAEKTIPLEYGTCYKAKYVMKYALSALKPKDVEYIVDEHIRKVVSERLSEYGNDPKKAFAEPLYADDAKTIPVRTVRCYTGLDQVVPVKKDVAGNDIGFVKPGNNHHIAIYRDADGKFHECVVTFWDAVERKKYGMPVIVRNPDEVWDDVIDKNVPEELAAGLPALGWSFVMSLQQNEMFILGMEDDEFRDAMAEADYKALGAHLYRVQKLAGSDYYFRSHYETLLDDSAGARIMKKFYRISSSKALFALHPRKVAVSLLGEMSLKND

SEQ ID NO: 1322 - protein, 1221 aa, unidentified
  REGION 1..1221: note = Description of Unknown: uncultivated organism with predicted taxonomy: Bacteroides sp. CAG:709
  REGION 1..1221: note = MG16-243 effector
MKKNLGLDLGVGSIGWSLINADKDNKPIAILGLGSRIISLSPDESSEFTSGNAASKNQKRTQKRTARKGYDRYQMRRQALTDKLRKLKMLPDEHLIKLPVLDLWTLRARAATPGEKLTLPEIGRVLYHINQKRGYRHSRSDDSADKEQREYVQAINKRFQEIREEGVTIGQHFVKKLKESEVVTDKGAFYNYRIKEQVFPRDAYVAEFDRVMDCQKVFYPEELSEANINEFRNEIIFYQRNLKSCKHLVSRCEFMTRSFLDEEHRPVLDASGKLVISGPKVAPKSSPIFQVCKIWEEINNLSIRNKENDELHISPEQKKEIFEYLDNNEKITSAALYKILGISKGDGWSVDKALSKGFTGNTTKVAISKALGKANDAKKRDLLRFDLRLKENGVNKDTGEIICEIDPECENEPLYKLWHVIYSINDKDAQRHALTSQFGINDEASLAELSKIDFVKQGYGSRSVKFMRKLLPSLMDGAKYSEACDVIGVNHSGSLTKSENEARELLQRIPQLQKNELRQPVVEKILNQMINVVNAVIEKFGGVDEIRVEMARELKLSKEGRAATAKNIRDREKENKEIAEKIIELGVTPSKNKILKYRLWQEAGQKCFYCGQPVGATEFLNGLDVEIEHVVPKTLLFDDSFSNKVCACRKCNAEKRNSTAYDYMKSKGENAFNDYLRRVDTAFSEHKISFTKRSRLLTPADKIPKDFISRQLVQTQYISRKAMEILKQVCHNVYGSSGEVTSYLRRIWGYDEILHSLDLPRYREGGMTAEVSYEHRGQTHTEERIKDWSKRLDHRHHAIDALTIACTRQSVIQRLNNLSSMTAVAGEAMSLDKWTLAQPHFSVQEVSDKVGGILVSFKAGKKVTTPGERYTYRGGKRILAQDGLLIPRGALSEESVYGRISALEKNVPVKKLFERVEDIVKPGIRAVVEDRLMACDNDVNAACASLKKEPLYLDAEKTIPLEYGTCYKAKYVMKYALSALKPKDVEYIVDEHIRKVVSERLSEYGNDPKKAFAEPLYADDAETIPVRTVRCYTGLDQVVPVKRDVAGNDIGFVKPGNNHHIAIYRDADGKFHECVVTFWDAVERKKCGIPVIVRNPDEVWDVVIDKNVPEELAAGLPALGWSFVMSLQQNEMFILGMEDDEFRDAMAEADYKALGAHLYRVQKLAGSDYYFRSHYETLLDDSAGARIMKKFYRISSSKALFALHPRKVAVSLLGEMSLKND

SEQ ID NO: 1323 - protein, 1159 aa, unidentified
  REGION 1..1159: note = Description of Unknown: uncultivated organism with predicted taxonomy: Bacteroidales
  REGION 1..1159: note = MG16-245 effector
MKKKVLGLDLGVGSIGWALIETTDNQPEEIVGMGCRIVPIGKDDSDQFSKGQAISKNADRTARRTARKGYDRYQLRRALLTQVLRQNGMLPERMDENVIDLWKLRSDAATEGEKLTLPQIGRVLYHINQKRGYKHAKADDSADKKQTDYVAAVNQRYADLQAENKTIGQHFYLELLRSKVEGASGPYYTFRIKDKVFPRAAYIEEFDQIMHVQRTYYPTILTNELIDTLRNRIIFYQRPLKSCKHLVSLCEFEMRPYKTKDGRIVYGGPKCAPRTSPLAQLCAMWETVNNITLTNRDNEKLDITLEQRKQMVEFLCANKELKLTNLYKILGISKKDGWYGGKAIGKGLKGNATLLQLREALGGKYDQWLEMPVELKDSKWVDTETGEVIKEVAETIEQTPLFRLWHAVYSLQNADELAKTLREKFEITDKAVIDALCKIDFVKPGYANKSHKFIRRLLPYLMNGYQFSEACAHIGINHSNSMTAEERDSRTLVERIELLPKNALRQPVIEKILNQMINLVNRLQQEYGPIDEARIELARELKQSREERDNAYKAINKNERENAAIAAKIAEFGIRPSRSRIQKYKMWEESNHRCFYCGKTMDIAQFLNGADVEIEHIIPRSILFDDSYSNKVCACRDCNREKDNATAMEYMAGKPTGEFEAYKQRVDEAFTEHRISKTKRDHLLWRRADIPQDFIERQLRQSQYIAVKAVEILQTGIRRVWTSGGSVTDFLRHQWGYDEILHTLNLPRYRKVDELTEIVHFEHAGQEHEEERIKNWTKRIDHRHHAIDALTVALTQQSYIQRLNTLEASHEWMEKQVKEANTAYNEKKSILERWVADQPHFSVADVTNKVDGILVSFRAGKRVTTPARRAIYSGGKRKIVQTGLQVPRGALTEDTIYGKREEGFVVKYPLDHPSMKVENILDPTIQNLVKEHIAAFGGNAKEAFKMPLFSAKGMQIKSVRCKTNLSENSVVPVKVNADGQPIGYAKKGNNHHVAIYQDKKGEYQELVVSFWDAVERKHYGVPVVIINPHEVWTDLVNKDLSQDFLNKLPHDDWQFVLSMQENEMFVLGLEDDEFNDAIERQDYNLLNKHLYRVQKISSKDYSFRYHTETKVDDKYDGIENGRSTSMSLGALFRFKSINGLFSQFPHKVKIDIMGRITKA

SEQ ID NO: 1324 - protein, 972 aa, unidentified
  REGION 1..972: note = Description of Unknown: uncultivated organism with predicted taxonomy: Bacteroides sp. CAG:770
  REGION 1..972: note = MG16-246 effector
SYTIKKDGKEITIGPKVAPRTSPLAQLSSFLETANNITIRNKRNDELYISPEQRKAIADFLDNNEVMKLTDLYKILNIGRKDGWWAGKAIGKGLKGNTTKCQIRKALSNFPKDQINSLTAFQLEFDEYVDEETGEVLKRVNNTQAEKQPLYRLWHLLYSIKDVDELSGALRHLGIEDEESITKLCNLDFRTAGYANKSAKAIGRILPYLMEGMMYSDACERAGFDHSRRINPDRDLLKSLPQIQKNELRQPVVEKILNQLVNIVNALLEKEGIIDEIRVELARELKQSKDERNEAFKRNNQNERQNKEYAERIKEYGLTPTRNRIMKMKMWEESEYTCMYCGQPVNVTEFLQGADVEREHIIPRALLFDNSFTNQVCSCRRCNSQKGMRTAYDFIEDDKGQEGLNAYIERINDLFNRKKISRSKFNRLLVSHKAYISRKAQGKETEENKELWENFIDRQLRQSQYIARKSVEMLQQVCKDVYTTSGSVTDFVRHQWGYDEILHDLNFERFKKAGLTTMVTQLHSGKEVEVERIKDWTKRLDNRHHAVDALAIACTTQGMIQRLNTLNASREGILDELNSKEERVVDPERSMLEKWIYTQPHISYAQAKEAIDNIIISQRPNIRITVPGKRYITKNGKRTLAQTGIIVPRGALHAEFVYGRIMKQGADGVTLTPQYVRKYKLGIGAQGFLFNGKEFYKEELKKDSKTDLSSIIVTDKIKDVLEKVVDGGIRQRILERLNRGFEEGTDYRANVAQALANLKNLDEDPIFSDDAKTRPIRTVRKYVSSSTMVAVRKDCNGKPIAFVEPDGNHHVAIYKDENGMITESIVTKWQAVQRKLNHIPVIIDNPSQTWSEIMGKNDVPEELLQTLPKDKSTLLLSLQIGEAFIMGMDDAEYQKAVEEKDMQALAEHLYFVQSISSSDYRFRRHIESQYDTNDINKEDLRFLRIRKIQALFEYNPQKVKVTVLGDIILLNT

SEQ ID NO: 1325 - protein, 1162 aa, unidentified
  REGION 1..1162: note = Description of Unknown: uncultivated organism with predicted taxonomy: Porphyromonas sp. oral taxon 278
  REGION 1..1162: note = MG16-247 effector
MKKRILGLDLGVGSIGWALIETTDNKPEQIVGMGCRIVPISKDDNDQFSKGQAISKNADRTARRTARKGYDRYQLRRALLTQVLRQNGMLPDRMDENAIDLWKLRSDAATEGEQLTLPQIGRVLYHINQKRGYKHAKSDDNGDKKQTDYVAAVNQRYVDLQAEDKTIGQHFYLELLNSRVEGVNGPYYTFRIKDKVFPRAAYIAEFDQIMRVQQPFYPDVLTDELIDTLRNRIIFYQRPLKSCKHLVSLCEFEMRPYKTKDGRIVYGGPKCAPRTSPLAQLCAMWETVNNITLTNRNNEKLDITLDQRKQMVDFLCSNKELKLTNLYKILGISKKDGWYGGKAIGKGIKGNATLLQLREALGGKYDQWLEMPIELKDSKWVDAETGEVMKEVTEAVEQTPQFRLWHAVYSLQNVDELAKTLRTTFQITDEAVIEALCKIDFVKPGYANKSHKFIRRLLPYLMDGYQYSEACAHIGINHSNSMTAEERDERPLAERIELLPKNALRQPVIEKILNQMINLVNRLQQEYGPIDEARVELARELKQSRDERDSAYKAINKNERENAAIAAKIAEFGIRSSRSRIQKYKMWEESSHRCFYCGKTMDITQFLSGADVEIEHIIPRSILFDDSFSNKVCACRECNREKGNMTAMEYMEHKPAGEFEAYKQRVDEAFTDHRISKTKRDHLLWRRADIPQDFIDRQLRQSQYIAVKAVEILQTGVRRVWTSGGSVTDFLRHQWGYDEILHTLNLPRYRQVEALTEIVHYEHAGQEHNEERIKNWTKRTDHRHHAIDALTVALTQQSYIQRLNTLEASHDWMEKQVKEANTPYNEKKSVLERWVADQPHFSVAEVTDKVDGILVSFRAGKRVTTPARRAVYRGGKRTIVQTGLLVPRGALTEDTIYGKCEDGFVVKYPLDHPTMKPENIVDPTIRRLVEKRIAAYGGNTKEAFKTPLYSAEGMEIKSVRCLTNLSEKGVVPVKYDKTGQPIGFAKKGNNHHVAIYKSDNDKPFDQVVSFWDAVERKRYSVPIVIDNPHEVWDGLLNRDMPQEFLDKLPHDDWQFVLSMQENEMFVLGLEDDEFNDAIERQDYNSLNKHLYRVQKITHNDYWFRFHTETTVDDKYGDQENQVVNVAWSTEMKKVFRFKSQGALFAQFPHKVKIDIMGRITKA

SEQ ID NO: 1326 - protein, 863 aa, unidentified
  REGION 1..863: note = Description of Unknown: uncultivated organism with predicted taxonomy: Coprobacter sp.
  REGION 1..863: note = MG16-248 effector
KLDITLEQRKQMVEFLCTNKELKLTNLYKILGISKKDGWYGGKAIGKGLKGNATLLQLREALGGKYDKWLEMPVELKDSKWVDTETGEVIKEVAETVEQTPLFKLWHAVYSLQNEDELAKTLREKFQITDAIVIDALCKIDFVKPGYANKSHKFIRRLLPYLMAGYQYSEACAHIGINHSNSMTKEEREARPLTEQIELLHKNALRQPVIEKVLNQMINLVNRLQQEYGPIDEARVELARELKQSREERDSAYKAINKNERDNAAIAAKIAEFGVRPSRSRIQKYKMWEESNHRCFYCGKIMDITQFLNGADVEIEHIIPRSILFDDSYSNKVCACRDCNHEKDNSTAMEYMESKPAGEFEAYKQRVDEAFSAHRISKTKRDHLLWRRGDIPQDFIERQLRQSQYIAVKAVEILQAGIRHVWTSGGSVTDFLRHQWGYDEILHTLNLPRYRKVDELTEIVHFEHAGQEHEEERIKNWTKRIDHRHHAIDALTVALTQQSYIQRLNTLEASHDWMEKQVKEVNTPYNEKKSVLERWIADQPHFSVSDVTDKVDGILVSFRAGKRVTTPARRAIYPGGKRTIVQTGLQVPRGALTEDTIYGKREEGFAVKYPLDHPSMKAENILDPTIRRLVEERIAAFGGNAKEAFKTPLYSAKGMEIKSVRCKTNLSENGVVPVKRNALGQPIGFAKKGNNHHVAIYKTGNEKPFDQVVSFWDAVERKRYGVSVVIDNPREMWNGLLNKELPQDFLNKLPHDDWQFVLSMQENEMFVLGMENDEFNDAIERHDYNTLNKHLYRVQKIAHNDYWFRFHIETSVDDKYGDKEKQVLNMAWSTELKKVYRFNSQGALFAQFPHKVKIDIIGRITKV

SEQ ID NO: 1327 - protein, 970 aa, unidentified
  REGION 1..970: note = Description of Unknown: uncultivated organism with predicted taxonomy: Bacteroides sp. CAG:144
  REGION 1..970: note = MG16-249 effector
ISQCEFAMREYTTADGKRIQAGPKVAPRSSPLFQVCKIWESVNNIEMKNRNGESYPFSEEERLKLFNFLDNNEKLTVTDLKRILGLSVKDKWWGGKAIGKGLQGNTTKIALKKALQGHEGLLSFHLKTVDSRHIDTETGVILQEIAPGFEKEPLYRLWHIIYSIKEPDEMASALKQQFGIEDPEVLSRLAKIDFVKAGYGNKSARFIRQILPYLQKGLKYSEACDYISINHSNSLTTAENKSRKLQPRMQQLQKNELRQPIIEKILNQMVNVVNALLDKHVSIDEVRVELARELKQSRDERNSTFLNNSKRERENKIISERIQEMGIRPSRNRIQKYRLWEESKHICFYCGQPVGVREFMEGVDVEIEHIIPRSLFFDDSFSNKVCACRKCNAEKGNRTAYDYVKKKGENEFADYTRRIEEAFEKKEISKTKRERLLTSAKDIPEDFIDRQLRQSQYISKKAVEMLKQVCRNVWTTSGSVTDFVRHQWGYDNILHDLNFKRYKDAGQTEIIVCDQMGQVRQVERIKDWTKRLDHRHHAIDALTIASTKQSYIQRLNHLNASRDQMFQELETQSNKVREEYSLLENWMKERPHIPVSVVSQIVDGILVSFKTGKRLTTPGKRYTYKGGKREIAQSGIIVPRGALSEDSVYGVISCLEENVPVKKLFEHPDIIFKPYIRTKVENRIKEYDGDWKAALKSLKKAPIFLGDGETKPLEYATCWKKEYVIRYPLASIQKKDVKYIVDQHIRQLVSERLNAVGEKDAFKEPLFSDKAEKNPIKSVRLFTGLTHNSLSPVKYLDGFPIGYSKPGNNHHFCYYRNENGELFEHIVSFWHAVDRKKYGIPVIIEDTDVLWDEMANRDLPQDFLKYLPPVGLKLEVSLQQNEMFILGMKDEDYERSIKEKDLRMLNQYLYRVQKISSQYIVFRRNTDTGKDEDSKAQSIGQFVRVSSIKGWIQCNPHKIRVNVLGEISEI

SEQ ID NO: 1328 - protein, 758 aa, unidentified
  REGION 1..758: note = Description of Unknown: uncultivated organism with predicted taxonomy: Sediminibacterium sp. C3
  REGION 1..758: note = MG16-250 effector
MYSEACERAGFDHSRRIDPNRTLLTHLPQIQKNELRQPVVEKILNQLVNIINALIEKEGAIDEIRVELARELKQSKDERNETFKRNNQNERQNKEYAERIKEYGLTPTRNRIIKMKMWEESEYTCMYCGQPVNVTEFLKGADVEREHIIPRGLLFDNSFTNQVCSCRRCNSKKGMRTAYDFIADDKGQEGLNAYIDRINNLFDKKKISRSKLNRLLVSHKAYISRKAQGKETEEDKELWENFIDRQLRQSQYIAKKSVEMLQQVCKNVYTTSGSVTDFVRHQWGYDELLHDLNFDRFKKAGLTAMVKQLHSGKEVEVERIKDWTKRLDNRHHAVDALAIACTTQGMIQRLNTLNASRDVMLEELSSNDQRLVDPERSMLEKWIYVQPHISYAEAKNEVDKIVISQRPNTRITVPGKRYVTKNGKRTLAQTGIIVPRGALHAEFVYGRIMKQEADGFTMTPQYVRKYKLGIGAQGFLFNGKEFYKEELKKDSKTGLSSIVVTDKIKDVLDKIVDGGIRKRILERLNRGFVGGADYRANIAQALANLKNLDEDPIYSDDAKTRPIRTVRKYVSSSTMVAVRKDSNGKPMSFIEPDGNHHVAFYKDENGVIKESIVTKWQAVQRKLNHIPIIIDNPSQTWSEVLGRNDVPEELLQSLPKDSSTFLLSLQIGEAFIMGMEDSDYQKALEERDMRTLSEHLYFVQNISSNNYRLRRHVESSFDITDMNKEDQRFLNIKSVNSFFNNNPHKVKITILGDIIADL

SEQ ID NO: 1329 - protein, 808 aa, unidentified
  REGION 1..808: note = Description of Unknown: uncultivated organism with predicted taxonomy: Bacteroides sp. CAG:144
  REGION 1..808: note = MG16-251 effector
NALNDLDFVTPGYANLSAKAISKILPYMMEGLDYSDSCEYVGYNHSDSLTKEENEKRELLDKIPALKKNELRQPTVEKILNQTINVFNEINANFISKGERVDEVRVELARELKQSKEEREETERGIRKQQKANDGYAKLLKEGGVRPTRNRILKYRLWRESNETCFYCGQPINFNEFLKFSDVEREHVIPKKLLFDDSFANQVCSCRKCNAEKGGRTAFDYMRTKQNLQDYLDKVDKMFQEHKIGGKKHSHLLASYDDYLSRKKEGKETKDDVKIWEEPIERQLRLSQYISKKSQELLKMACRNVVATSGNITDLVRHTWGYDTILHELNFPCYKEAGLTTFIKDENTGQQREVIKDWTKRLDHRHHAIDALAVACTSRSIVQRINTLHASREEMREDVKSPRKDWEDNDLLQQWIKEKMPFDRDYVLHKVASILVSMKAGKKATVPGKRKIYKNGKPITVQSRLRIPRGQLHEQTVYGAIKQYSKDKKGNVIESREIVTRYKMGVGSVGLVFNGKETCDVIYNKKKECYEIIDGIEKSINYIVDKHIREVVRERINEAFPNGETYRSEAENALAEGRVYNGKERCQKALEQLKSLDEHPLYADKNHHIVIKSVRCFTGLGAVQPLRYNNDNEPISFVLTKNNHHVAIYADENGDYKECIYTFWQVVERSKYKLPLIIKDPKALWEEIRQRENNGERFPDTLIASLPSPNWAFVESLQLNDMFVLDIDDEDFENFIANDNYEEIGKKLYRIQNISSGDYFLRLHTDTTSDRSNSKLTKKFLRKSLMGFLNSNPHKVSISILGKMKIVK

SEQ ID NO: 1330 - protein, 936 aa, unidentified
  REGION 1..936: note = Description of Unknown: uncultivated organism with predicted taxonomy: Bacteroidales
  REGION 1..936: note = MG16-252 effector
QVCKIWESVNNLSLKNRSGEVYHFSQEERRKMFDFLDNHDKMTVTDLYKLLGISKKEGWWGGKAIGKGLQGNTTKAALAKALGERQDLLQFQLETIDSRQIDTETGEVLKTISPSFEKEPLYRLWHILYSMHERSEVAAALERQFGITAPDTVDRLFAIDFVKAGYGNKSARFIREILPYLQAGMQYSQACDYIGINHSNSLTIEENASRVLLDRLPQLQKNELRQPVIEKILNQMVAVVNALLSQYGPIDEIRVELARELKQSRDERNDAYLSINKRERENKVIEERIREYGISPSKSRIQKYRLWEESNHLCFYCGHPVGAAEFLSGSGVEIEHIIPRSLLFDDSFANKVCACRKCNAEKGNSTAFDYMKSKPANDFEDYLKRVEKYFTEKRISKTKRERLLTPASEIPQDFIDRQLRQSQYISKKAVEMLKLVCRNVWTTSGSITDFLRHNWGYDQILHDLNLPRYSLGGMTESVHYEHNGQKHEEERIIGWTKRLDHRHHAIDALTIASTQQSYIQRLNTLSASRDVMHAEVEKQGVQWQEKHSLLEEWTAQRPHLPYSTVRDYVDGILVSFKPGKKVATPGKRYTYKNGKKELVQDGLLIPRGALSEESVYGQITTIEPSVPVKKLFEDPSLIFKPYIRELVERRIKECGGDWKKARASIGKKPIWLDTEETVALEFATCWKKEYVMKYPVSSLKAKDVDSIVDRHIREIVRRRIDEVGEKEAFKTPIYTDDAQSIPLRSVRLFTGLDAVEPVKYVDGVPVGFSKPGNNHHIAIYRDKDGNRSEHVVSFWHAVERKRYGLPVIIRDTDSVWDQIEGESLPESFLKNLPQPGLKLELSLQQNEMLILGMKEDEFNDAIREKDTRRLNKHLYRVQKLSTMYYVFRYHTETQIDDSKGALEMHKFYRTVSFRALDALFPHKVRISVTGELIPIQ

SEQ ID NO: 1331 - protein, 851 aa, unidentified
  REGION 1..851: note = Description of Unknown: uncultivated organism
  REGION 1..851: note = MG16-253 effector
KLKDVHEVLGINSKSGWYCDKAIKSGIKGNSTKCAIISALSSLPNSIIREITRFNLETETSNMVDEETGELLVRIKSTYQEEPLYRLWHIIYSIKNDAERLNTILVFLKEFGIEDVSIANALNDIDFVTPGYSNLSAKAISKILPYMMEGLDYSESCEYVGYNHSDSLTKEENEKRELLDQIPAIKKNELRQPTVEKILNQTINVFNQINADLGKKGERVDEVRVELARELKQSKEEREETDKGIRKQQKANEEYADILKKKGVRPTRNRILKYRLWKESEEACFYCGRDIDFHEFLRFSDVEREHVIPKKLLFDDSFANQVCSCRRCNAEKGGRTALDYMRTKPNLQEYLDKVDKLFQEHKIGGKKHAHLLASYDDYLSRKKEGKETKDDIMIWEEPIDRQLRLSQYISKKAQELLKAACREVMATSGSITDLIRHTWGYDTILHELNFPRYKDAGLTEIIKDEETGMQREVIPDWSKRLDHRHHAIDALAVACTSRSIVQRINTLNASREIIREEIKTSRKEWEDNDLLQQWIKEKMPFDRQYVVQKVASILVSMKAGKKATVPGKRKIYKNGKPVIMQTGLRIPRGQLHEQTVYGAIKHHSKDKKGNVIETKEIVTRYKMGAGSVGFVFTGKETCDVVFDKKNERYVIVDGIGKAINYIVDRHIREIVRERINEAFPDGETYLSEAEKALAEGRLYNSKDRCQKALEQLKSLDEHPLYADKNKTIVIKSVRCFTGLNAVQPLRYNSKHEPISFVLTKNNHHVAIYVDEKGEYQECVYTFWQVVERAKYRLPLIIQDPKTIWDEIRQREKDGDSFPDDLITSLPLPNWTFVESLQQNDMFVMDMDDDTF

SEQ ID NO: 1332 - protein, 919 aa, unidentified
  REGION 1..919: note = Description of Unknown: uncultivated organism with predicted taxonomy: Marinilabiliaceae
  REGION 1..919: note = MG16-254 effector
NRIIFYQRPLKSCKHLVSLCEFEARPYKTKDGKIVYGGPKCAPRTSPLAQLCAMWETANNITLTNRNNERFEFTLDQRRQIVDFLCHNKEMKVTHLQKILGISKKDGWYGGKAIGKGIKGNATLNQLREALQGKYDQWLEMPIKHIDVVDATTSEVFWAVSPEVEETPLFKLWHAVYSLQNADELAKTLREKFQITDEAVIEALCKIDFVKPGYANKSHKFIRRLLPYLMEGMMYSEACERININHSNSMTREEREQRPLSARIQLLQKNQLRQPVVEKVLNQMINIVNSLKDQYGEIDEARVELARELKQSRDERESAYKAMGQNERRNKEIAEKISEFGIRPSRSRIQKYKMWEESLHQCFYCGKTIDLSEFLNGADVEIEHIIPRSILFDDSFSNKVCACRRCNQEKGNQTAMEYMETKSAAEQEAYKQRVDEAFTAKRISKTKRDHLLWRKTDIPADFIERQLRQSQYIAVKAVEVLQDGIRQVWTSGGSVTDFLRHQWGYDEILHTLNLPRYRQVEGLTELVDFEHAGQKHTEERIKNWSKRIDHRHHAIDALTVALTQQGYIQRLNTLEASHDFMEKQVKEAGTKYNEKKSILEKWINEQPHFSVEEVTNAVDRILVSFRAGKRVTTPARRAIYKGSKKTIVQTGLQVPRGALTNDFVYTKHGKKYARKYPINAISNPENIVDATIRQLVKARLASHGGNINDAFKTPLYSAEGMEIKTVRCYNNKLSDRGVVAIKYNEQKEPIGFAETDNNHHMAIYKLADGSLKERVVSFWDAVERKRYGLPIIITNPNEVWSIVLEKDLPQDFLNKLPEDKWEYVLSLQENEMFVLGMEDDEFNDAIDTHDYNLLNKHLYRVQSISYGDYYFCHHTETKATDKNESIKLGKTLRIRGVNSLKSYFPHKVQVDLLGHIHKV

SEQ ID NO: 1333 - protein, 1221 aa, unidentified
  REGION 1..1221: note = Description of Unknown: uncultivated organism with predicted taxonomy: Bacteroidetes
  REGION 1..1221: note = MG16-255 effector
MKRVLGLDLGVGSVGWALVEKDERNIPINVNKIGSRTVPLSNDEENNFSKGAAIPTNKDRTIKRTARKCNNRYKLRREQLTNGLRALKMLPDETLFKLDPLQLWELRAKAATEKVSLPELGRVLYHLNQKRGYKHSKDNEQDSKQTDYVATVNKRYKDLQSKNLTIGQYFAQKLKESEHIQEGGKSYSFRIKDNVYPRAAYEEECKRILSTQKQFYPDILTDNNVKDLFQFIYYQRPLRSCKHLISRCSLEEQLHDVKEKDFYAPKVAPISSPLAQLDKIWEAVNNFTVRGKRNEELYITHEQRSAIVEHLEHNKDIKLTAIQKILGIGKSKEWFIKKEQLKPLQGDITRIKLAEALSSGHLSKEKIENLLLLKIDFEEMADTTTGEVMGGIVVKNNIESQPLYQLWHAIYSIDDEKALRKTLAKLGIDDDDVMDALCKISFKTSGYAKKSTRAIKKILPYLMEGYQYSDACQMAGYNHSNSITKEEEASRPLQDHIPQIQKNELRQPVVEKILNQMINIVNTLLKDGPIDEIRVELARELKRSKDEREMANIRMNRNKRRNDEIASIIQNEYGLIPTKNRIMKYKMWEETDGFCIYCGTKIKLAEFLGGVDSEREHIIPKSLLFDDSFSNQSCACRKCNKEKGNRTALDYMRDIGKEKQYVEHIAELLEKDKISKTKYSNLLASYKDYLERKAKGKETEEDKNLWENFIDRQLRLSQNIARSAMELLRQVCHNVYATSGSVTDFVRHQWGYDNILHDLNFSRFAKSGNTEFITVVGADGKETQQERIKGWSKRMDNRHHAVDALAIALTTQSMIQRINNLNASREFMQKDVEASKEKFKEKKSLLEKWVAIQPHLSYGQAKDAISGILVSQRSGKHITTPGKRYEYKGGSKILRQQGLVVPRTALHDEFVYGRISRYDKNGILQPEIVRKYGILGGMGCLFDGKETYKETEKTDKKIGLPKIKIEDKIKDVLDKIVDGGVRKRILERLNRGFEEGKDYRNDTKKALDNLRNLDEDPIYLDDAHTIPIKTVRKFTHSTKAIPLRYNDKNEPIAFVEPGGNHHVALYETADGTVKEHVCTNWHAVQRRMYGFPAIIDNPSDAWQQASNNDKLPEDLLMHLPDDNSKFLLSMQIGDAFILGMEEYEYQAAINEKNYKLLGEYLYFVQKLSSNDYAFRRHVESKYEEKQTNKDDGRFIRIRSIDKYENYNPHKVKITLLGEIFP

SEQ ID NO: 1334 - protein, 829 aa, unidentified
  REGION 1..829: note = Description of Unknown: uncultivated organism with predicted taxonomy: Bacteroides sp. CAG:144
  REGION 1..829: note = MG16-256 effector
ERLHSIIRFLKDFDVEDILIANALNDLDFVTPGYANLSAKAISKILPYMMEGLGYSDSCEYVGYNHSDSLTKDENEKRELLDKIPALKKNELRQPTVEKILNQTINVFNEINANLISKGERVDEVRVELARELKQSKEEREETERGIRKQQKANDEYAKLLKEGGVRPTRNRILKYRLWRESNETCFYCGQPINFNEFLKFSDVEREHVIPKKLLFDDSFANQVCSCRKCNAEKGGRTAFDYMRTKQNLQDYLDKVDKMFQEHKIGGKKHSHLLASYDDYLSRKKEGKETKDDVKIWEEPIERQLRLSQYISKKSQELLKMACRNVVATSGNITDLVRHTWGYDTILHELNFPCYKEAGLTTFIKDENTGQQREVIKDWTKRLDHRHHAIDALAVACTSRSIVQRINTLHASREEMREDVKSPRKDWEDNDLLQQWIKEKMPFDRDYVLHKVASILVSMKAGKKATVPGKRKIYKNGKPITVQSRLRIPRGQLHEQTVYGAIKQYSKDKKGNVIESREIVTRYKMGVGSVGLVFNGKETCDVIYNKKKECYEIVDGIEKSINYIVDKHIREVVRERINEAFPNGETYRSEAENAFAEGRVYNGKERCQKALEQLKSLDEHPLYADKNHHIVIKSVRCFTGLGAVQPLRYNNDNEPISFVLTKNNHHVAIYADENGDYKECIYTFWQVVERSKYKLPLIIKDPKALWEEIRQRENNGERFPDTLIASLPSPNWAFVESLQLNDMFVLDIDDEDFENFIANENYEEIGKKLYRIQNISSGDYFLRLHTDTTSDRSNSKLTKKFLRKSLMGFLNSNPHKVSISILGKMKIVK

SEQ ID NO: 1335 - protein, 1159 aa, unidentified
  REGION 1..1159: note = Description of Unknown: uncultivated organism with predicted taxonomy: Bacteroidia
  REGION 1..1159: note = MG16-257 effector
MIKHILGLDLGVGSIGWALIETENDQPKQIIGIGSRIVPLSKDDSDQFSKGQAISKNADRTARRTTRKGYDRYQLRRALLTQVLRQNGMLPERMDENVIDLWKLRSDAATEGHQLTLPQIGRVLYHINQKRGYKHAKADNNGDSKQTKYVETVNQRYAEIQETGQTIGQHFYLELLHSKVESGNGPYYTYRIKDKVFPRAAYIAEFDQIIKVQKAYYPEVLTDELIDTLRNRIIFYQRPLKSCKHLVSLCEFEMKPYKTKEGKIVYGGPKCAPRTSPLAQLCAMWETANNITLTNRNNEQYDFSLDERRQLVEHLCTHEVLKLTDLYKILGITKKDGWYGGKAIGKGIKGNATLNQLRKALNGKYGEWLEMPIEHIDAVDNETAEVFWQVSPKVEETPLFRLWHAVYSIQDADELAQTLRNKFGITEQEVIDALCKIDFVKPGYANKSHKFIRRLLPYLMDGMMYSEACKLLRINHSNSMTTEERDARPLAERIELLPKNALRQPVIEKILNQMINLVNRLQQEYGPIDEARVELARELKQSREEREGAYRRNNQNERLNKEIFAKIEEMGIRPSRSRIQKYKMWEESNHRCMYCGKTVSLAEFLNGAEVEIEHIIPRSILFDDSFSNKVCACRECNHEKGNLTALDYLETKPTAEQEAYKQRVDEAFKEGRISKTKRDHLLWHRSDIPTDFIDRQLRQSQYIAVKAVEILQQGIRQVWTSGGSVTDFLRHLWGYDEILHTLNLPRYRQVEELTEIVHYEHAGQEHDEERIKNWSKRIDHRHHAIDALTVALTRQAYIQRLNSLNAEFTREEMLKEVEEANTVYNEKKSLLEKWVNEQPHFSVDDVTQSVDSILVSFRAGKRVTTPARRAIYQGGKRTIVQRNIQVPRGALTNEFVYTKNGNKYARKYPIDAISNPENIVDPTIRQLIKARLAAFNGNAKEAFKEPLFSAEGMEIRTIRCYNNKLADKGVVAVKYNERQEPIGFSETDSNHHIAIYRDKSGKYQEMVVSFWDAVERKKFGVPVVISNPHDVWDSIMDKDLPQEFLVKLPKDDWTYILSMQENEMFVLGMEEDEFNDAIEAKDNAVLNKHLYRIQNISSLFYNFRYHTETKVDDKYAGIENGRNASMSLGALVPIRSFGSLFALFPHKVKIDIMGRITKA

SEQ ID NO: 1336 - protein, 943 aa, unidentified
  REGION 1..943: note = Description of Unknown: uncultivated organism with predicted taxonomy: Bacteroidales
  REGION 1..943: note = MG16-258 effector
VLTDELIDTLRNRIIFYQRPLKSCKHLVSLCEFEMRPYKTKDGRIVYGGPKCAPRTSPLAQLCAMWETVNNITLTNRNNEKLDITLDQRKQMVDFLCSNKELKLTNLYKILGISKKDGWYGGKAIGKGIKGNATLLQLREALGGKYDQWLEMPIELKDSKWVDAETGEVMKEVTEAVEQTPQFRLWHAVYSLQNVDELAKTLRTTFQITDEAVIEALCKIDFVKPGYANKSHKFIRRLLPYLMDGYQYSEACAHIGINHSNSMTAEERDERPLAERIELLPKNALRQPVIEKILNQMINLVNRLQQEYGPIDEARVELARELKQSRDERDSAYKAINKNERENAAIAAKIAEFGIRSSRSRIQKYKMWEESSHRCFYCGKTMDITQFLSGADVEIEHIIPRSILFDDSFSNKVCACRECNREKGNMTAMEYMEHKPAGEFEAYKQRVDEAFTDHRISKTKRDHLLWRRADIPQDFIDRQLRQSQYIAVKAVEILQTGVRRVWTSGGSVTDFLRHQWGYDEILHTLNLPRYRQVEALTEIVHYEHAGQEHNEERIKNWTKRTDHRHHAIDALTVALTQQSYIQRLNTLEASHDWMEKQVKEANTPYNEKKSVLERWVADQPHFSVAEVTDKVDGILVSFRAGKRVTTPARRAVYRGGKRTIVQTGLLVPRGALTEDTIYGKCEDGFVVKYPLDHPTMKPENIVDPTIRRLVEKRIAAYGGNTKEAFKTPLYSAEGMEIKSVRCLTNLSEKGVVPVKYDKTGQPIGFAKKGNNHHVAIYKSDNDKPFDQVVSFWDAVERKRYSVPIVIDNPHEVWDGLLNRDMPQEFLDKLPHDDWQFVLSMQENEMFVLGLEDDEFNDAIERQDYNSLNKHLYRVQKITHNDYWFRFHTETTVDDKYGDQENQVVNVAWSTEMKKVFRFKSQGALFAQFPHKVKIDIMGRITKA

SEQ ID NO: 1337 - protein, 921 aa, unidentified
  REGION 1..921: note = Description of Unknown: uncultivated organism with predicted taxonomy: Prevotella saccharolytica
  REGION 1..921: note = MG16-259 effector
FVNNIRLENGYKEARALSQDERLKVVDYLDNHEKMTARDFTKLLGLDKNDEWDLKKYFGKNGVQGNITKTQLATALANVSNASELLRFNLALENSNYVNESTGEVLKVISSDFQNEPLYMLWHTVYSLSDKEELKNALNKKYGITDESVLNNLFKIDFVKPGFGNKSAKAIRRILPFLQDGLVYSDACAEAGYNHSNSLTKSENEARTLLSRLPQIKKNELRQPVIEKILNQMVNVVNAIYDEYGQIDEIRVELARELKQSKDERNTTASNIAKRERENKNIEAKIQEFGIRSSRNRIQKYRLWEESEQKCFYCGQPVQAKEFLSGLDVEVEHVIPKSLLFDDSFANKVCACRKCNAAKGNKTAYDFMKGQKEEVFDAYVKRVNDFYKDGKISKTKKERLLTTQSEIPSDFIERQLRQTQYIAKKALEMLKDVCYNVYATSGSVTDFIRHTWGYDEILHQLNYDRYKKGGLTEFREYDHKGETHTEERIQDWSKRLDHRHHAIDALVIAMTRQSIIQRLNHLNTERDAMFQEVEKQRKEWKNDYSMLQEWLRERKHFSAEDVAKKVSDILVSFKAGKRVATIGKRVKYEHGKKNVLQTGIVIPRGPLSEESVYGKIKVLDRNKPVKHLFENPESIVNADIKSAVTNRLIQNKSDVKKAVQSLKKSPIVLANGKTLENADCYKEEYVIKYSLNGFKAKDIDSIVDTHIKDVLYKRLEEYNGNEKEAFKDIENNPIYADAAHKIKIRNVRCFTGLSAVVPVKKDENGNAIGFVKPGNNHHVAIYKDENGNLQESVATFWHAVERKKYGLPIVITNPIDAWKLARERNCPKEFLDCLPKENWTFVQSLQINEMFVMGLTNEAYEKAVAEKDYALLNQYLYRVQKLTSNDYFVRYHLETVLDDSAEARSIKKFYRFKSLGSLFKE

SEQ ID NO: 1338 - protein, 777 aa, unidentified
  REGION 1..777: note = Description of Unknown: uncultivated organism with predicted taxonomy: Bacteroides sp. CAG:770
  REGION 1..777: note = MG16-260 effector
LYITHEQRSAIVEHLEHNKDIKLTAIQKILGIGKSKEWFIKKEQLKPLQGDITRIKLAEALSSGHLSKEKIENLLLLKIDFEEMADTTTGEVMGGIVVKNNIESQPFYQLWHAIYSIDDEKALRKTLAKLGIDDDDVMDALCKISFKTSGYAKKSTRAIKKILPYLMEGYQYSDACQMAGYNHSNSITKEEEASRPLQDHIPQIQKNELRQPVVEKILNQMINIVNTLLKDGPIDEIRVELARELKRSKDEREMANIRMNRNKRRNDEIASIIQNEYGLIPTKNRIMKYKMWEETDGFCIYCGTKIKLAEFLGGVDSEREHIIPKSLLFDDSFSNQSCACRKCNKEKGNRTALDYMRDIGKEKQYVEHIAELLEKDKISKTKYSNLLASYKDYLERKAKGKETEEDKNLWENFIDRQLRLSQNIARSAMELLRQVCHNVYATSGSVTDFVRHQWGYDNILHDLNFSRFAKSGNTEFITVVGADGKETQQERIKGWSKRMDNRHHAVDALAIALTTQSMIQRINNLNASREFMQKDVEASKEKFKEKKSLLEKWVAIQPHLSYGQAKDAISGILVSQRSGKHITTPGKRYEYKGGSKILRQQGLVVPRTALHDEFVYGRISRYDKNGILQPEIVRKYGILGGMGCLFDGKETYKETEKTDKKIGLPKIKIEDKIKDVLDKIVDGGVRKRILERLNRGFEEGKDYRNDTKKALDNLRNLDEDPIYLDDAHTIPIKTVRKFTHSTKAIPLRYNDKNEPIAFVEPGGNHHVALYETADGTV

SEQ ID NO: 1339 - protein, 934 aa, unidentified
  REGION 1..934: note = Description of Unknown: uncultivated organism with predicted taxonomy: Bacteroidales
  REGION 1..934: note = MG16-261 effector
ATEGHKLSLPELGRILYHINQKRGYKHAKADEAGDKQQTEYVAAVNSRHAMIKERHQTIGQYFAEEIRKSEIISEKGKFYTFRTKEKVFPRKAYEEEFDKIIATQRQFYPTVLTGTTINRLRNEIIFYQRKLKSCKHLVSLCEFEKHEYKNKEGKTVFDGPKVAPRTSPLAQICRIWEFVNNISLENGYKERKELSLEEKQKVVNFLDNNDKMTATDFSKLLGLGKKNGWDLKRYFGKNGVKGNETKVSLRNALKNLPNVEDLLRFNPTLDNSNYVNEATGEVLKVISPSFQNEPLYELWHTVYSLSDKDDLSNALNKKFGISDENAVQKLFKIDFVKPGFSNKSAKAIRRILPFLQQGLMYSEACAEAGYNHSNSLTKTGNEARVLLERLPQIKKNELRQPVVEKILNQMVNVVNAIYDDYGAIDEIRVELARELKQSKDERNTTFNNIAKRERENKGIAERIKNEYGLIPNRNKIEKFRLCEESDHKCFYCGQAVNAKEFLLGSDVEVEHVIPKSLLFDDSFANKVCACRKCNAQKGNKTAFDFMKSQSEDEFNNYVSRVEEYYKNGKISRTKHDRLLTPQTEIPSDFIERQLRQTQYISKKALELLREICHNVYATSGSVTDFIRHTWGYDEILHQLNFDRYKQSGLTEIREFDNKGEIHKEERIQKWNKRLDHRHHAIDALVIAMTKQSIIQRLNHLNTERDAMFQEVEKQSIEWKNDFSLLQEWLRERKHFSTKDVANRVANILISFKAGKRVATIGKRIKYEKGQKKVLQEGIVIPRGALSEESVYGKIKVIDPHKPLKFLFENPQTVISPQIKAAVVNRLSKFENDFKKTIVSIKKEPLTLASGKVINDADCYKEEYVIKYPLEGFKAKDIPYIIDKRIREVVEKRLSEYDGNEKNAFKDLENNPVFVDANHKISIKHIRCFTGLSA

SEQ ID NO: 1340 - protein, 821 aa, unidentified
  REGION 1..821: note = Description of Unknown: uncultivated organism with predicted taxonomy: Porphyromonas catoniae
  REGION 1..821: note = MG16-262 effector
SIGWCLIEKDDNNVPKRILRIGSRIVPISSDEETGYTKGNAISKNADRTAKRTARKCYDRYQLRRQALVNLLKRLGMEPNKNLMLEQTPMELWQKRADAASKEISLEELGRVLLHINQKRGYKHSRLSNSDSKETAYVQEVNSRYNDLKAEGLTIGQHFAAKLKENEQKSTDGKKYYNYRIKEQVYPRHAYEEETKKILEVQSRYHSDVLTPDVRNEMMETIFYQRDLKSCKNLVSLCEFESYTITKDGKEITIGPKVAPRTSPLAQLSSILETANNITIRNRRNDELYISPEQRKAIADFLDNHEVMKLTDLYKILNIGRKDGWWAGKAIGKGLKGNTTKCQIREALSALPKEQVDSLTAFQLEFDEYVDEETGEVRKRINNTQAEQQPLYKLWHMLYSIKDNTELSGALNHLGIEDNESIEKLCKLDFRTAGYANKSAKAIGRILPYLMEGVMYSQACERAGLDHSRRIDPNRPMLKRLPQIQKNELRQPVVEKILNQLVNIVNALLEEEGAIDEIRVELARELKQSKDERNETFKRNNQNERQNKEYAGRIKEYGLTPTRNRIMKMKMWEESEYTCMYCGQPVNVTEFLKGADVEREHIIPKSLLFDNSFTNQVCSCRRCNSKKGMRTAYDFIADDKGQEGLNAYIDRINNLFDKKKISRSKFNRLLVSHKAYISRKAQGKETEEDIELWENFIDRQLRQSQYIAKKSVEMLLQVCKNVYTTSGSVTDFVRHQWGYDELLHDLNFDRFKKAGLTAMVKQLHSGKEVEVERIKDWTKRLDNRHHAVDALAIACTTQGMIQRLNTLNASRDEMLEELNGK

SEQ ID NO: 1341 - protein, 973 aa, unidentified
  REGION 1..973: note = Description of Unknown: uncultivated organism with predicted taxonomy: Sediminibacterium sp. C3
  REGION 1..973: note = MG16-263 effector
MLKRLGIEPNKKLMLEQAPLELWQKRADAVSTKIALEDLGRVLLHINQKRGYKHSRLNNSDSKETAYVQEVNNRYDELKAEGLTVGQHFAAKLKDNEQTSADGKKYYNYRIKEQVFPRHAYEEEAKKILETQSRYYPDLLTPDVCKEIMNIIFYQRDLKSCKNLISYCEFESYTITKDGKEITIGPKVAPRTSPLAQLSSILESANNITIRNRKNDELYISPEQRKALADFLDNHEVMKLSDLYGILNIGRKDGWWAGKAIGKGLKGNTTKCQIREALKNLPQEKINALTSFNLEYDEYVDEETGEVRKRVNNHLAERQPLYRLWHLIYSIKDSDELAAALRRFGIDDEESILNLCNLDFRTPGYANKSAKAIGRILPYLAEGVMYSDACNMAGFDHTRRLNPNRPLLTSLPQIQKNELRQPVVEKILQQVVNIVNTLIEKEQSIDEIRVELARELKQSKDERNETFRRNSQNEKKNKEFAEHIKEYNLTPTRNRILKWKLYEESDHSCMYCGQSINIRDFLQGADAEREHIVPRGLLFDNSFTNQVCACRSCNSKKGMRTAYDFIEDEKGEEGLHSYIEHINYLFNKKNISRSKFNRLLVSHKAYLKRKALGKETEEDKELWENFIDRQLRLSQYIAKKSVEMLQQVCRNVYSTSGSVTDFVRHQWGYDELLHDLNFERYKRAGLTAMVTQLRSGKEVEVERIKDWTKRLDNRHHAVDALAIACTTQGMIQRLNTLNASREDILDELNKTEERNDDSERSMLEKWICSQPHISYAEAKDELDKIIISQRPSTRLTVPGKRYVKKDGKRTPVQAGILVPRGALHAEFVYGRIMKYGADGVTLTPQYVRKYKMGIGAQGYLFSGKEFYKEEQKKDSKTGQTSTVVTDKIKEVLDKVVDGGIRRRILERLNRGFEDGKDYRSNVPQALANLKNLDEDPIYSDDAKTRRILTVRKYVASSTMVAIRKDADGKPLAF

SEQ ID NO: 1342 - protein, 906 aa, unidentified
  REGION 1..906: note = Description of Unknown: uncultivated organism
  REGION 1..906: note = MG16-264 effector
QDGWWGGKAIGRGLQGNTTKIALKNALGDFDNAEKLLQFNLKNTDSGLIDEVTGEVIQMIDAKVEKEPLYDLWHTVYSISDKAELANALKKKFNIYDEDIINSLYAIDFVKQGFGNKSAKAMRRILPYLQQGMKYSDACEYAGFSHSDSLTKTENEARQLLEKLPPIQKNALRQPIVEKILNQMINVVNALMVEYGQFESIRVELARELKQSKDDRNTTFLQNEAMEKLNEAIAKRLTSEGITPTKRIMEKYKFIFPTKGCIDKKTGKFVTKNFDALATVNQCIYCGKPFSLSAALNGEGYEIEHIIPRDMICDNSQSNKVLSCRSCNSKKSNKTEFDFMRSQDKAVFDDYIKRVEKWFDDGIISPSKRERLLLSHEDYLERKKKGKTTEEDKKYWEEFVSRQAGETQYISRESIRILKQCCRNVNATSGTVTATLRHLWGYDEILHQLNFERYKQAGLTETVTWTSNHGKNEHSKEQIVDWSKRIDHRHHAIDALVVACTQQGFIQRINTLNADDTKDLMRKQIESAGIKFEEKKVLLDKYLASFVPFTTKVVADEVNKILVSFKAGKKSASTGKRIKYVKRKKEVLQEGVIIPRGALHEEGVYGQIEINGEKVIVKKYKLGKGAQGFVFTGKETYEEKVNKKTGEVQVDDKIKNVLDSIVDGNIRAKVLQRLNQGFEEGKDYRNDVKKALDNLNNLDKNPIFADENKTIPIRTVRCRTGLSAVVPVKRNEQGEPIGFVKPGNNHHIAIYRDKEGQLQEHTVTFWHAVERKKYGLPVIIENPTEVWDSIMDRQLPESFLEKLPDVNWTFEMSLQQNEMFVLGMEDETFENAIREKNYSMIGAYLYRVQSISESDYWFRLHIETQNDKTPSAKLAMKYHRVKSLKAFYGLNPHKVYVSVIGKMKEL

SEQ ID NO: 1343 - protein, 992 aa, unidentified
  REGION 1..992: note = Description of Unknown: uncultivated organism
  REGION 1..992: note = MG16-265 effector
MNIIFYQRDLKSCKNLVSLCEFESYAITKNGKEITIGPKVAPRTSPLAQLSCILETANNITIRNRKNDELYISPEQRKAIADFLDNHEIMKLTDLYKILEIGRKDGWWAGKAIGKGLKGNTTKSQIRKALSSLPKEQVDSLTAFQLEYDEYVDEETGEVRKRINNALAEKQPLYRLWHLLYSIKDVDELSGALRHIGIEDDESIQKLCNLDFRTAGYANKSAKAIGRILPYLMEGLMYSEACERAGFDHSRRINPERTLLTSLPQIQKNELRQPVVEKILNQLVNIVNALLEKEGHIDEIRVELARELKQSKDERNETFKRNSQNERKNKEYAERIKEYGLTPTRNRIMKMKMWEESEHSCMYCGQPVDVKEFLQGADVEREHIVPRGLLFDNSFTNQVCSCRRCNSQKGMRTAYDFIEDDKGEAGLNSYIEHINYLFDKKQISRNKFNRLLVSHKAYINRKAQGKETEEDKELWENFIDRQLRQSQYIAKKSVEMLQLVCRNVYTTSGSVTETVRRLWGYNELLHDLNFERFKKAGLTTMVTQLHSGEEIEVERIKDWTKRLDNRHHAVDALAIACTTQGMIQRLNTLNASRDDMLKELNSQEQRVVDPEHSMLEKWIYTQPHISYVQAKEAIEKIIISQRPNTRITVPGKRYVTKNGKRTLVQTGIVVPRGALHAEFVFGRIMKQEADGKILTPQYVRKYKLGIGAQGFLFNGKEFYKEELKKDSKTGLSTIVVTDKIKDVLEKIVDGGIRKRILERLNRGFGEGTDYRANVAKALDNLKNLDEDPIFSDDAKTRPIRTVRKYVSSTTMVAVRKDSEGQPLAFVEPDGNHHVAFYKDEDGVITESIVTKWQAVQRKLNHIPIIIDNPSQTWNEVIGRNDIPDELLQTLPKDKSTLMLSLQIGEALIMGMEEADYQKAIEEKNMLALAEHLYFVQNISIGNYRLRRHVETSYDVKDMNKEDLRFLNIASIAALFNYNPHKVKITVLGDIIP

SEQ ID NO: 1344 - protein, 960 aa, unidentified
  REGION 1..960: note = Description of Unknown: uncultivated organism with predicted taxonomy: Porphyromonas sp. oral taxon 278
  REGION 1..960: note = MG16-266 effector
RKHQMLPDEHLIKLPVLDLWTLRANAATEGFKLSLPEIGRVLYHINQKRGYKHAKADEAGDKKQTEYVENVNKRFAMIKDLGLTIGQFFASKLKESEVVSEKGKFYTYRTKEQVFPRGAYIAEFDQIIEVQRKFYPQVFTDEFINRLRNEIIFYQRNLKSCKHLVSLCEFEKHEYKNKDGKIVFDGPKVAPRTSPLFQICRIWEFVNNIRLENGYKEARTLSQDERLKVVDFLDNHEKMTAKDFTKLLELNKNDEWDLKRYFGKNGTQGNTTKTQLATALANIPNASELLQFNLTLENSNYVNEKTGEVLKVVSSDFQNEPLYMLWHTVYSLSDKEGLKNTLNKKYGITEESVINNLFKIDFVKPGFGNKSAKAIRRILPFLREGLVYSDACVEAGYNHSDSLTKSENEARTLLSRLPQIKKNELRQPVIEKILNQMVNIVNAIYDEYGQIDEIRVELARELKQTKDERNTTASNIAKRERENKNIEAKIQEFGIRSSRNRIQKYRLWEESDQKCFYCGQPVQAKEFLSGLDVEVEHIIPKSLLFDDSFANKVCACRKCNAAKGNKTAYDFMKGQKEEVFDAYVKRVNDFYKDGKISKTKKERLLTTQSDIPSDFIERQLRQTQYIAKKAIEMLKDICYNVYATSGSVTDFIRHTWGYDEILHQLNFDRYKKGGLTELREYDHKGETHTEERIQNWSKRLDHRHHAIDALVIAMTRQSIIQRLNHLNTERDAMFQEVEKQSKEWKNDYSMLQEWLRERKHFPTEDVAKKVSDILVSFKAGKRVATIGKRVKYEHGKKIVLQTGITIPRGPLCEESVYGKIKVLDRNKPLKYLLENPQYIVNADIKFAITNRLAQYENDVKKAVQSLKKSPVVLANGKKLENADCYKEEFVIKYSLNGFKAKDIDSVVDNRIRNVLYKRLEEYNGNEKEAFKDIENNPIYADATHKIKIRNVRCFTGLSAV

SEQ ID NO: 1345 - protein, 765 aa, unidentified
  REGION 1..765: note = Description of Unknown: uncultivated organism
  REGION 1..765: note = MG16-267 effector
ILPYLMEGVMYRQAWERAGLHHSRRIDPNRPMLKRLPQIQKNELRQPVVEKILNQLVNIVNALLEEEGAIDEIRVDLARHLNKNKYQRNETFKRNNQNERQNKEYAGRIKEYGLTPTRNRIMKMKMWEESEYTCMYCGQPVNVTEFLKGADVEREHIIPKSLLFDNSFTNQVCSCRRCNSKKGMRTAYDFIADDKGQEGLNAYIDRINNLFDKKKISRSKFNRLLVSHKAYISRKAQGKETEEDIELWENFIDRQLRQSQYIAKKSVEMLLQVCKNVYTTSGSVTDFVRHQWGYDELLHDLNFERFKKAGLTAMVKQLHSGEEVEVERIANWTKRLDNRHHAVDALAIACTTQSMIQRLNTLNASRDDMLEELNSKDQRLVDPERSMLEKWVFIQPHITYADAKKEIDKIVISQRPNTRITVPGKRYVAKNGKRTLAQTGIIVPRGALHAEFVYGRIMKQETDGMTMTPQYVRKYKLGIGAQGFLFNGKEFYKEELKKDSKTGLSKIVVTDKIKDVLEKIVDGGIRQRILERLNRGFEEGTDYRANVAQALANLKNLDEDPIYSDDAKTRPIRTVRKYVSSSTMVAGRKGDNGKPVAFVEPDGNHHVAFYKDENGVITETIVTKWQAVQHKLYHIPIIIDNPSQTWSEVLGRNDVPEELLQSLPKDSSTFLLSLQIGEAFIMGMEDADYGRALEGKDVQSLAEHLYFVQNISSNNYRLRRHVESSFDTTDMNKEDQRFLNISSLDALFRINPHKVKLTVLGDIIP

SEQ ID NO: 1346 - protein, 983 aa, unidentified
  REGION 1..983: note = Description of Unknown: uncultivated organism with predicted taxonomy: Prevotella
  REGION 1..983: note = MG16-268 effector
VFKKRHNHKKFQSIREPSLFDDMDILDNDILYITQEQRHSMFEYMETHDRLKLCDVLRILGLNEHSGWYAGKAIGVGLQGNTTKNTILKALRTLPKEKRDMITRFELKITSRNEINENTGEVIRHIDSSYTDEPLYRLWHIIYSIQNDEERRNAISKFLQSFDIVDEVVVDKLCGIDFVKAGYGNKSAKAISKLLPYLMDGINYSDACEYVGYRHSDYLTKEENIDRELKDIIPAIKKNALRQPVVEKILNQTINIVNAVNRELRENGQGQVDIIRIELARELKMDRESRHRKFTQNNSRKRQNEEYADKINEHGIIPTRNRVIKYRLWEEANMQCFYCGQPINITELLRDPTIEKEHIIPKALLLDNSYSNLVCSCRKCNQEKGARTAYDYMRQKSDLDAYIKRINKLAETQKISQTKRLHLLASYEDYLVRKRLGKATEEDRNLWEEFINRQLSLSQYISRKAMEILQTGCRKVYATSGSITDIERHLWGYDTILHELNFPRYKCAGLTTVIKEEYEEGIITEKEVITNWSKRKDNRHHAIDALVIACTTQDTIQRINTLHASRDELQKETSGNPVFYSEKSTLLERWIKGKQPIPRHEVLEQVKQIAISIKAGKKVTTPGKRKTYKQGKPKLIQTGLLIPRGQLHEETIYGQINVPVKTKNGTIRQEPKSVVRYKLGCGKGFVFSGKETCKVEKDKKTDEYFITDEIDKALSYIVDKHIREVIRQRLNRPFPEGETYRTKAEQAQKDGRIYDGEEECKQALQGIRNLDIDPLFADKDGRIPILRVRCFTGLTLLQPLRYNSEGKPISFVSLGNNHHIALYKQTNGDIVEHVVTFWHAVERSTRGIPIVIKRPDDVWNDILNKPSDELPESFLNQLPYPNATYITSMQQNEMFILGMSQDEYQDAIACNNQTELCRHLYRVQSLSTNQYYFRLHIESENDKTLAGMKAGKFIRCKSIGSFLRLNPHKVTVTLLGKIIINNS

SEQ ID NO: 1347 - protein, 992 aa, unidentified
  REGION 1..992: note = Description of Unknown: uncultivated organism with predicted taxonomy: Bacteroidales
  REGION 1..992: note = MG16-269 effector
MDIIFYQRDLKSCKNLVSLCEFESHTITKDGKEITIGPKVAPRTSPLAQLSSILETSNNITIRNRRNDELYISPEQRKAIADFLDNHEVMKLTDLYRILNISRKEGWWAGKAIGKGLKGNTTKCQIREALGSLPKEQVDSLTAFRLEFEEYVDEETGEVRQRVNNTLAEQQPLYKLWHMLYSIKDNKELSGALHHLGIDDEKSINKLSNLDFRTAGYANKSAKAIGRILPYLMDGIMYSEACERAGFDHSRRINPGRTLLTSLPQIQKNDLRQPIVEKILNQLVNIVNALLEKEGTIDEIRVELARELKQSKDERNEAFKRNNQNERQNKEYAERIKEYGLTPTRNRIMKMKMWEESEYTCMYCGQPINVTEFLQGADVEREHIIPRALLFDNSFTNQVCSCRRCNSQKGMRTAYDFIADDKGQEGLDLYIERINDLFDRKKISRSKLNRLLVSHKAYVSRKAQGKETEEDKELWENFIDRQLRQSQYIAKKSVEMLQQVCKNVYTTTGSVTDFVRHQWGYDEILHDLNFERFKKAELTTMVTQLHSGKEVEVERITNWTKRLDNRHHAVDALAIACTTQGMIQRLNTLSACRNEMLDELNSKDERVIDPERSMLEKWINSQPHICYAQAKDEVDKIIVSQRPNTRITVPGKRYVTKNGKRTQAQTGIIVPRGALHAEFVYGRIMKQEADGMTLTPQYVRKYKLGIGAQGFLFKGDETYKEDVKKDKKTGLSQIVVTDKIKDVLDKIVDGGIRRRILERLNRGFEEGTDYRANVAKALANLKNLDDDPIYSDDAKTRPIRTVRKYVSSSTMVAVRKNDDGKPISFVEPDGNHHVAFYKDEDGVVTESLVTKWQAVQRKLNHIPIIIENPSQVWNEVLGTNDIPNELLQSLPKDKSIFLLSMQIGEAFVMGMDETAYKRAIEKNDTQALADHLYFVQNLSSNNYRLRRHVESSFDTTDMNKEDLRFLNVKSIGALFNYNPHKVKLTILGDIIL

SEQ ID NO: 1348 - protein, 1159 aa, unidentified
  REGION 1..1159: note = Description of Unknown: uncultivated organism with predicted taxonomy: Bacteroidales
  REGION 1..1159: note = MG16-270 effector
MKKKVLGLDLGVGSIGWALIETTDNQPEEIVGMGCRIVPIGKDDSDQFSKGQAISKNADRTARRTARKGYDRYQLRRALLTQVLRQNGMLPERMDENVIDLWKLRSDAATEGEKLTLPQIGRVLYHINQKRGYKHAKADDSADKKQTDYVAAVNQRYADLQAENKTIGQHFYLELLRSKVEGASGPYYTFRIKDKVFPRAAYIEEFDQIMHVQRTYYPTILTDELIDTLRNRIIFYQRPLKSCKHLVSLCEFEMRPYKTKDGRIVYGGPKCAPRTSPLAQLCAMWETVNNITLTNRDNEKLDITLEQRKQMVEFLCANKELKLTNLYKILGISKKDGWYGGKAIGKGLKGNATLLQLREALGGKYDQWLEMPVELKDSKWVDTETGEVIKEVTEKIEQTPLFRLWHAVYSLQNADELAKTLREKFQITDKAVIDALCKIDFVKPGYANKSHKFIRRLLPYLMNGYQFSEACARIGINHSNSMTAEERDSRTLVEQIELLPKNALRQPVIEKILNQMINLVNRLQQEYGPIDEARIELARELKQSREERDNAYKAINKNERENAAIAAKIAEFGIRPSRSRIQKYKMWEESNHRCFYCGKTMDIAQFLNGADVEIEHIIPRSILFDDSYSNKVCACRDCNREKGNSTAMEYMEGKPTGEFEAYKQRVDEAFTEHRISKTKRDHLLWRRADIPQDFIERQLRQSQYIAVKAVEILQTGIRRVWTSGGSVTDFLRHQWGYDEILHTLNLPRYRKVDELTEIVHFEHAGQEHEEERIKNWTKRIDHRHHAIDALTVALTQQSYIQRLNTLEASHEWMEKQVKEANTAYNEKKSVLERWVADQPHFSVADVTDKVDGILVSFRAGKRVTTPARRAIYSGGKRKIVQTGLQVPRGALTEDTIYGKREEGFVVKYPLDHPSMKVENILDPTIRNLVKEHIVAFGGNAKEAFKMPLYSAKGMQIKSVRCKTNLSENSVVPVKVNADGQPIGYAKKGNNHHVAIYQDKKGEYQELVVSFWDAVERKHYGVPVVIINPHEVWTDLVNKDLSQDFLNKLPHDDWQFVLSMQENEMFVLGLEDDEFNDAIERHDYNLLNKHLYRVQNISNKDYSFRYHTETKVDDKYDGIENGRSTSMTLGALFRFKSISGLLSHFPHKVKIDIMGRITKA

SEQ ID NO: 1349 - protein, 1161 aa, unidentified
  REGION 1..1161: note = Description of Unknown: uncultivated organism with predicted taxonomy: Bacteroidales
  REGION 1..1161: note = MG16-271 effector
MTKKILGLDLGVGSIGWALIETQDDKPSQILGIGSRIVPISNDDSDQFQKGQAITKNAERTQRRTARKGYDRYQLRRALLTNLLREKNMLPDYMNESAIDLWRLRSDAATEGKKLSLKEIGRVLYHINQKRGYKHSKADVSADSKQTKYVQEVNKRFQELKELGQTIGQHFYQMLQQSVVQSEKGVYYTYRIKDKVYPRRAYEEEFDKIMSTQKVFYPDILTDEFIDTLRNRIIFYQRPLKSCKHLVGLCEFEMRPYKKADGSIVYSGPKCAPRTSPLAQICAVWEAVNNIKLTNRNNEIYPISQEERQAMVDFLQTHKEMKVADMQRILGIKKSDGWWGGKAIGKGIKGNQTLCQLREALGEKYQELLKMEIKKIDSGFFDAETAEVIEIIDPACENEPLFQLWHVVYSVQDKDELRKALLKKFNIDDEQVVENLYNLDFVKPGYANKSHKFIRRILPYLMQGEMYSVACARVGINHSNSRTKEELNTRPLVEHIKLLQKNTLRQPVIEKILNQMINIVNALRDKYGEIAEVRVELARELKQNKEERETTYKNNSKNERLNREITERIKEMGIRPSRMRVQKYKLWEESLHQCFYCGKTVGAAEFLSGADVEIEHIIPRSVLFDDSYSNKVCACRECNHAKNNQTAFDFMKAQSTDKFEAYKSRVDDAFKEKRISKTKRDHLLWGLEDIPQDFIDRQLRQSQYIAAKAVEILQTAIRDVHATSGSVTELLRHQWGYDEILHHLNLPRYNKADLTEIVQYDHAGQKHTVERIKNWNKRLDQRHHAVDALTIALTKQSYIQRLNTLNASRETIYNEVEQADAKLRNEEKRTLLENWVAIQPHFPVKDVEDKVAGILVSFRAGKRVTTPAKRAVYRNGKRINVQKGLLVPRGALTEETVYGKLGDRFVVKYPHQHPSMSPDNIVDPTIRELVKKRLSEFNNDPKQAFATPLYSDKAQKMEIKSVRCFAPGVSAQGSTPVRFNNDGNPIGYSKTGNNHHIAIYKDANGKYKESVVSFTEAVHRKLIGLPIVIDNPKQVWDKVINMNLPEDYLLTLPQDNWEFVVSMQVNDMFIMGLTDVEFEDAIHEKDYALLNQHLYRVQKLSSTKYYFRYHLETSVDDKYDGVANEKLSMEIGKLINLRSPNAMAVNVHKVRISILGEITPL

SEQ ID NO: 1350 - protein, 763 aa, unidentified
  REGION 1..763: note = Description of Unknown: uncultivated organism with predicted taxonomy: Bacteroides sp. CAG:770
  REGION 1..763: note = MG16-272 effector
EAYTIKKDGKEITIGPKVAPRTSPLAQLSSIFETANNITIRNRRNDELYISPEQRRAIADFLDNHEVMKLTDLYKILNIGRKDGWWAGKAIGKGLKGNTTKCQIREALSILPKEQVDSLTAFQLEFDEYVDEETGEVRKRINNARAEQQPLYKLWHLLYSIKDNDELSGALRHLGIEDEESIEKLCKLDFRTAGYANKSSKAIGRILPYLMEGVMYSEACERAGFDHSRRINPDRILLTHLPQIQKNELRQPVVEKILNQLVNIVNALLEKEGAIDEIRVELARELKQSKDERNEAFKRNNQNERQNKDYAERIKEYGLTPTRNRIMKMRMWEESEYTCMYCGQPVNVTEFLKGADVEREHIIPRGLLFDNSFTNQVCSCRRCNSKKGMRTAYDFIADEKGQEGLDTYIDRINDLFNRKKISRSKLNRLFVSYKAYMSRKAQGKETDEDKDLWENFIDRQLRQSQYIAKKSVEMLQQVCKNVYTTSGSVTDFVRHQWGYDELLHELNFERFKKAGLTAMVKQLHSGKEIEVERIKDWTKRLDNRHHAVDALAIACTTQGMIQRLNTLNASRDEMQEELSSKEQRLVDPERSMLEKWIFAQPHISYAEAKNEIDKIIISQRPNTRITVPGKRYVTKNGKRTLAQTGIIVPRGALHAEFVYGRIMKQEADGVTMIPQYVRKYKLGIGAQGFLFNGKEFYKEELKKDSKTGLSSIVVTDKIKDVLEKIVDGGIRQRILERLNRGFEEGTDYRSNVAQALDNLKNLD

SEQ ID NO: 1351 - protein, 1016 aa, unidentified
  REGION 1..1016: note = Description of Unknown: uncultivated organism with predicted taxonomy: Bacteroidetes
  REGION 1..1016: note = MG16-273 effector
VLLHINQKRGYKHSRLSNSDSKETAYVQEVNSRYDDLMAEGLTIGQHFAAKLKENEQESIDGKKYYNYRIKEQVYPRHAYEEEAKKILEVQSRYHSDVLTPDVCKEMMGIIFYQRDLKSCKNLVSLCEFESYTITKDGKEITIGPKVAPRTSPLAQLSSILETANNITIRNKRNDELYISPEQRKAIADFLDNHEVMKLTDLYKILNIGRKDGWWAGKAIGKGLKGNTTKCLIREALSALPKEQVDTLTSFQLEFDEYVDEETGEIRKRINNTLAEQQPLYKLWHMLYSIKDNTELSGALHHLGIEDKESLEKLCRLDFRTAGYASKSAKAIGRILPYLMEGVMYSEACERAGLDHSRRIDPNRTLLTHLPQIQKNELRQPVVEKILNQLVNVVNALLEKEGAIDEIRIELARELKQSKDERNETFKRNNQNERQNKEYAERIKKYGLTPTRNRIMKLKMWEESEHACMYCEQPVDPIEFLKGADVEREHIIPRGLLFDNSFTNQVCSCRRCNSKKGMRTAYDFIADDKGQEGLNAYIEHINDLFDKKKISRSKLNRLLVSHKAYISRKAQGKETEEDKELWENFIDRQLRLSQYIAKKSVEMLQQVCKNVYATSGSITDFVRHQWGYDELLHDLNFERFKKAGLTTMVKQLHSGEEVEVERIANWTKRLDNRHHAVDALAIACTTQSMIQRLNTLNASRDDMLEEQNSKDQRLVDPERSMLEKWVFIQPHITYADAKKEIDKIVISQRPNTRITVPGKRYITKNGKRTLVQTGIIVPRGALHAEFVYGRIMKRDIDGVTMTPQYVRKYKLGIGAQGFLFNGKEFYKEELKKDSKTGLSKIVVTDKIKDVLEKIVDGGIRQRILERLNRGFEEGADYRANVAQALANLKNLDEDPVYSDDAKTRPIRTVRKYVSSSTMVAVRKDDKGKPVAFVEPDGNHHVAFYKDDNGVITETIVTKWQAVQRKLYHIPIIIDNPSQTWSEVLERNDVPDELLQSLPKDSSTFLLSLQIGEAFIM

SEQ ID NO: 1352 - protein, 951 aa, unidentified
  REGION 1..951: note = Description of Unknown: uncultivated organism with predicted taxonomy: Bacteroidales
  REGION 1..951: note = MG16-274 effector
LFITREQKQQIANIMDNKEVLKLKDVHEVLGINSKSGWYCDKAIKSGIKGNSTKCAIISALSSLPNSTIREITRFNLETETTNMVDEETGELLVRIKSTYQEEPLYRLWHIIYSIKNDAERLNTILVFLKEFGIEDVSIANALNDIDFVTPGYANLSAKAISKILPYMMEGLDYSESCEYVGYNHSDSLTKEENEKRELLDQIPAIKKNELRQPTVEKILNQTINVFNQINAELGKKGERVDEVRVELARELKQSKEEREETDKGIRKQQKANEEYADILKKKGVRPTRNRILKYRLWKESEEACFYCGRDIDFHEFLRFSDIEREHVIPKKLLFDDSFANQVCSCRRCNAEKGGRTALDYMRTKPNLQEYLDKVDKMFQEHKIGGKKHTHLLASYDDYLSRKKEGKETKDDILIWEEPIDRQLRLSQYISKKAQELLKTACREVMATSGSITDLIRHTWGYDTILHELNFPRYKDAGLTEIIKDEETGMQRELIPDWSKRLDHRHHAIDALAVACTSRSIVQRINTLHASREIIRDEIKTSRKEWEDNDLLQQWIKEKMPFDRQYVVQKVASILVSMKAGKKATVPGKRKIYKNGKPVIMQTGLRIPRGQLHEQTVYGAIKHHSKDKKGNVIETKEIVTRYKMGVGSVGFVFTGKETCDVVFDKKNERYVIVDGIGKAINYIVDRHIREIVRERINEAFPDGETYLSEAEKALAEGKPYNGKGRSQKALEQLKALDEHPLYADKNKTIVIKSVRCFTGLNAVQPLRYNSKHEPISFVLTKNNHHVAIYVDEKGEYQECVYTFWQVVERAKYRLPLIIQDPKTIWDEIRQREKDGDSFPDDLITSLPLPNWTFVESLQQNDMFVMDMDDDTFKENVTSNNYKELGEKLYRVQNLSTHDYFFRLHSDTTSKTTPDLAQCKKFIRIKSFKAYFEHNPHKVQLSLLGKIILKND

SEQ ID NO: 1353 - protein, 984 aa, unidentified
  REGION 1..984: note = Description of Unknown: uncultivated organism with predicted taxonomy: Bacteroidetes
  REGION 1..984: note = MG16-275 effector
YENKEGKIVFGGPKVAPKSSPLFQICKIWEAVNNITLKNRKNDELYITLEQRKAMVDFLDTHEKLTLKEVYSILGISKQDGWWGGKAIGRGLQGNTTKIALKNALGDFDNAEKLLQFNLKNTDSGLIDEVTGEVIQMIDAKVEKEPLYDLWHTVYSISDKAELANALKKKFNIYDEDIINSLYAIDFVKQGFGNKSAKAMRRILPYLQQGMKYSDACEYEGFSHSDSLTKTENEARQLLEKLPPIQKNALRQPIVEKILNQMINVVNALMVEYGQFESIRVELARELKQSKDDRNTTFLQNEAMEKLNEAIAKRLTSEGITPTKRIMEKYKFIFPTKGCIDKKTGKFVTKNFDALATVNQCIYCGKPFSLSAALNGEGYEIEHIIPRDMICDNSQSNKVLSCRSCNSKKSNKTAFDFMRSQDKAMFDDYIKRVEKWFDDGIISPSKRERLLLSHEDYMERKKKGKTTEEDKKYWEEFVSRQAGETQYISRESIRILKQCCRNVNATSGTVTATLRHLWGYDEILHQLNFERYKQAGLTETVTWTSNHGKNEHSKEQIVDWSKRIDHRHHAIDALVVACTQQGFIQRINTLNADDTKDLMRKQIESAGIKFEEKKVLLDKYLASFVPFTTKVVADEVNKILVSFKAGKKSASTGKRIKYVKGKKEVLQEGVIIPRGALHEEGVYGQIEINGEKVIVKKYKLGKGAQGFVFTGKETYEEKVNKKTGEVQVDDKIKNVLDSIVDGNIRAKVLQRLNQGFEEGKDYRNDVKKALDNLNNLDKNPIFADENKTIPIRTVRCRTGLSAVVPVKCNEQGEPIGFVKPGNNHHIAIYRDKEGQLQEHTVTFWHAVERKKYGLPVIIENPTEVWDSIMDRQLPESFLEKLPVVNWTFEMSLQQNEMFVLGMEDETFENAIREKNYSMIGAYLYRVQSISESDYWFRLHIETQNDKTPSAKLAMKYHRVKSLKAFYGLNPHKVYVSVIGKMKEL

SEQ ID NO: 1354 - protein, 1348 aa, unidentified
  REGION 1..1348: note = Description of Unknown: uncultivated organism with predicted taxonomy: Clostridiales
  REGION 1..1348: note = MG18-1 effector
MDQSKEYYIGLDGGTDSVGWAVLNPDYTVVKKRGKSLWGVRLFESGQTAAERRLARSARRRTDRKKWRLKLLKELFAEEVAACDPAFFARLAESRYWEDDKKVDGADTLFHDADFTDKDYHRQFPTIYHLRRHLMCCTEKPDIRLLYLAVAHMIKNRGHFLNEGQDLNQVRRFDDVWQNLCAAVSDVLGIELAVENGAKAAEVLTSSVKIKEKTKQLESVLGEGESEADRSVCKALAGLLAGAKVSAVDLFNGDEALKECGKFSLAEKSIEELEPDLGDALGEERFSLLQYAYAAYNWAVFARLLPEGKTISEVKTEEYEAYKADLRALKQLVKQYASDQYYRVFRSAKIKGNYASYVGKTNCGNEKSNPESCKPEEFFAFLKKELKPLWSQNIPAAASLAAKLESGTLLRRQRSGENAAIPYQAHLQELQIILKNMQQFYPFLQKADENGFTPAYKIEKLLTFRIPYYVGPLNDAHKEKGFCWIVKKADVPVLPWNFDQVVDENACEDAFIGRMSATCTYLVGENVLPQNSPLYCRFMVLNELNNLRIRSEKITPALKQAIFTQLFCAGKGGKVTQKKLLDFLHSQGIDANKQDISGIDGDFKASMAPAVKLQSIFTEPLPPEILERLAFALTVSGESHKMLQNRIRAILPNADNAVIRKVCALKFTGWGRLSQKLLTEIYDVDQTTGECRSLMDLLWSTNNNLMQLLSGDFTFAAGIDAYNAAQNGTENIFDYDHLVKDLYVSPSVKRGLWQTLLLVKEVRKIMGCDPARVFIEMARGVSPEQKNKRTVSRKDQLLALYKACKEDARDWCGELEALPEDKLRSDKLYLYYTQMGRCMYSGEPIRLDDLMHDTANQLYDIDHIYPQSKTKDDSLTNRVLVKRQLNAIKSNDYPLPQTMRQTALWKALLEKGLISKQKYLRLTRTTPFTEEELAGFINRQLVETRQSTKAAAHLLEQLLPNTEVVYVKAGLAADFRQEFGFVKCRDANDFHHAKDAYLNAVVGNVYHEKFTKNPLRFVRSGQEYSLNLSALFQNWNIYKGGRVIWQKGEDGSLETVRARMAKNDPMVTRYCTEGRGALYDLQPMKKSKGQLPLKSSDERLQHIDRYGGYNKLAGAYFTLAAYYKKGKRVKSIESVPLYLAAKLQRDPAALQQYLADQLGTDRVEILVPEIKLGTLFKWNGYPMTLSGRTGPQLLFRNAAELRTNAEQEQYIKKMSRYLEKCKGRKEPLPIRPAYDKLTPEENLQLYDAFTQWLTSGIYAKRLSLQGKFLLEKRDAFAALSPEAQVRQLMEILHLFQCNPVAANLSELGGAAHAGILLASKNIDGKVPVSIVHQSVTGYFTQEVCLNDL

SEQ ID NO: 1355 - protein, 1379 aa, unidentified
  REGION 1..1379: note = Description of Unknown: uncultivated organism with predicted taxonomy: Phascolarctobacterium succinatutens
  REGION 1..1379: note = MG18-3 effector
MQKLKNCDYYIGLDMGDASVGWAVTDTNYNILKFNGKALWGIRLFDSANTAASTRVFRSGRRRIDRTTWRLKMLQELFAEEIAKVDPGFFMRLEDSRLHLDDKRDKAVYNLFVDKNYTDKDFYQQYPTMYHLRYALATQAGPFDVRLLYLAVQHIAKHRGHFLFDNLDASKVNDFNAVFSEVENYVRDEMGIEDWSCQNIDELAKVLCDVNLGRTTKQKAMQSLLPAQTKQQKAIIQLFSGGKAKLAELFVDEELDECEKKSVSFQDDDLNEFEPVLTAALGERYEGLLRFKAIYDWSLLAKILHLDTSKKDEGEQHLLSECKVQVYEDHKRDLAVLKSMLKGKPLYNKIFRQDGDISYEKYAKGIKGRNQIDFCKDLKKQLEGIAEYKKIMQEITSIDDAKTEEERLLFRITNGFAFPKQTTKDNGIIPIQVHLAELKCILDNAEGYLPFLGETDNNGLSVREKIEQIVKFRIPYYVGPLAGTRMSREQGRCWVVRKNEKIYPWNFTEIVNLEESAEKFITNMTAKCTYLVGEDVLPKESLLYSEFMVRNAINNITVDGERLPVDVLEKIFKQLFLAKTSKVTKKTLERFFRQENISFQNIGGIDDKINASMKSYNDFRRIFGEDYIQLHRDEIENIIRWITLFCDEKKMLVTKIKNTYPQISDDEIKAIKKLKYKDWGRLSATLLNSSTIAYEDKAFGELVTIISALRHTNKNFMELLSSYCSYDFIGKIKEFNGSRQSSNGKLTYKDVEELYVSPSVKRSIWQTLTILEEIKKIMGCEPKRIFIEMARSKEESKRTDSRLKKLQDLYKKCREENIDFMPRKDEFNALKTQLSSKKEDDLRSDKLYLYYTQMGRCMYTGERIELASLYDNNLYDIDHIYPRSKTKDDSLSNRVLVKKQVNAAKTDTYPLDAAIRIKMHSFWKLLYDKGFIDERKYERLTRSTQLRDEELAGFISRQLVETRQSTKAVATILKTAYKHSEVVYVKAGNVSDFRHQFKFVKCREVNDLHHAKDAYLNIVVGNCYYVKFTANPLNFIKKNQDSRSYSLKPEIFYKFNIKRDDDIAWLGGEDGTMATVARTMHKNNILFTRQAVEGKGELFKQNPLKANSGQLPLKAGLSIEKYGGYNSLTTAYFAVVKSEGKKGAVQLSIEAIPLVYAKQGEIAVQNYLTEVVQLCKPEIMLSKIKKYSLFKINGFPMHISGRTDNRILFYGAGQLCIDEADADYLKKALKYEADIAENELVIADTNADDIQKQNAQKRLDYYNQKWRIGRKINMHIYDMLLAKSGNSLYKNRPASQTTDLQEQRDVFEKLSLADQIHVIGEVLKLFKCASASANLKLLDKGNACGVIKVSNNILKFKQCILINQSPTGVFEQKVDLMKL

SEQ ID NO: 1356 - protein, 1379 aa, unidentified
  REGION 1..1379: note = Description of Unknown: uncultivated organism with predicted taxonomy: Phascolarctobacterium succinatutens
  REGION 1..1379: note = MG18-4 effector
MQKLKNCDYYIGLDMGDASVGWAVTDTNYNILKFNGKALWGIRLFDSANTAASTRVFRSGRRRIDRTTWRLKMLQELFADEIAKVETGFFMRLEDSRLQLDDKREKAVYNLFVDKSYTDKEFYQQYPTMYHLRYALATQKGPFDVRLLYLAVQHIAKHRGHFLFDNLDASKVNDFNAVFSEVENYVRDEMGIEDWSCQNIDELAKVLCDVNLGRTTKQKAMQSLLPAQTKQQKAIIQLFSGGKAKLAELFVDEELDECEKKSVSFQDDDLNEFEPVLTAALGERYEGLLRFKAIYDWSLLAKILHLDTSKKDEDEQHLLSECKVQVYEDHKRDLAVLKSMLKGKPLYNKIFRQDGDISYEKYAKGIKGRNQLDFCKDLKKQLDGIAEYKKIMQEITSIDAAGTEEERLLFRIANGFAFPKQTTKDNGIIPIQVHLAELKCILDNAEGYLQFLGETDNNGLSVREKIEQIVKFRIPYYVGPLAGTRMSREQGRCWVVRKNEKIYPWNFTEIVNLEESAEKFITNMTAKCTYLVGEDVLPKESLLYSEFMVRNAINNITVDGERLPVDVLEKIFKQLFLAKTSKVTKKTLERFFRQENISFQNIGGIDDKINASMKSYNDFRRIFGEDYIQLHRDEIENIIRWITLFCDEKKMLVTKIKNTYPQIADDQIKAIKKLKYKDWGRLSATLLNSSAIAYEDKAFGELVTIISALRHTNKNFMELLSSYCSYDFIGKIKEFNGSRQSSNGKLTYKDVEELYVSPSVKRSIWQTLTILEEIKKIMGCEPKRIFIEMARSKEESKRTDSRLKKLQDLYKKCREENIDFMPHTDELNAFKIQLSSKKEDDLRSDKLYLYYTQMGRCMYTGERIELASLYNDNLYDIDHIYPRSKTKDDSLSNRVLVKKEVNAAKTDIYPLDAAIRTKMHSFWKLLYDKGFIDERKYERLTRSTQLRDEELAGFISRQLVETRQSTKAVATILKTAYKHSEIVYVKAGNVSDFRQKFEFVKCRDVNDLHHAKDAYLNIVVGNCYHVKFTDKPMDFIKKNQDNRSYSLKPEIFYKFSIKRDSEIAWVGGKDGTITTVTKTMHKNNILFTRQPVEGKGELFKQQPLKAKSGQLPLKAGLSVEKYGGYDSLTTAYFALVKSEGKKGAVQLSIEGIPLVYAKQGEKAVQNYLTDVLQLCEPEIKIPKIKKYSLFKINGFPMHISGRQLKQLQFYVASQLCIDEYSIAYLKKAFKYENNLAVNDEIIADKNADEEKKQKARKRLDFYEKTWGIGKENNIRIYDILLAKSANNLYKKRPASQSATLEKRRENFKGLFVSKQIHVLKEILNLFKCLSATADLQLLGAGKNVGKVTWNTNISNVKQCILINQSPTGIFEQEVDLMKL

SEQ ID NO: 1357 - protein, 1379 aa, unidentified
  REGION 1..1379: note = Description of Unknown: uncultivated organism with predicted taxonomy: Phascolarctobacterium succinatutens
  REGION 1..1379: note = MG18-5 effector
MQRLKNCDYYIGLDMGDASVGWAVTDTNYNILKFNGKALWGIRLFDSANTAASTRVFRSGRRRIDRTTWRLKMLQELFAEEIAKVDPGFFMRLEDSRLHLDDKRDKAVYNLFVDKNYTDKDFYQQYPTMYHLRYALAMQAGPFDVRLLYLAVQHIAKHRGHFLFDNLDASKVNDFNAVFSEVENYVRDEMGIEDWSCQNIDELAKVLCDVNLGRTTKQKAMQSLLPAQTKQQKAIIQLFSGGKAKLAELFGDAELDECEKKSVSFQDDDLDELEPVLTAALGERYEGLLRFKAIYDWSLLAKILHLDTSKKDEDEQHLLSECKVQVYEDHKRDLAVLKSMLKGKPLYNKIFRQDGDISYEKYAKGIKGRNQLDFCKDLKKQLDGIAEYKKIMQEITSIDAAGTEEERLLFRIANGFAFPKQTTKDNGIIPIQVHLAELKCILDNAEGYLQFLGETDNNGLSVREKIEQIVKFRIPYYVGPLAGTRMSREQGRCWVVRKNEKIYPWNFTQVVNLEESAEKFITNMTAKCTYLVGEDVLPKESLLYSEFMVRNAINNITVDGERLPVDVLEKIFKQLFLAKTSKVTKKTLERFFRQENISFQNIGGIDDKINASMKSYNDFRRIFGEDYIQLHRDEIENIIRWITLFCDEKKMLVTKIKNTYPQIADDQIKAIKKLKYKDWGRLSATLLNSSAIAYEDKAFGELVTIISALRHTNKNFMELLSSYCSYDFIGKIKEFNGSRQSSNGKLTYKDVEELYVSPSVKRSIWQTLTILEEIKKIMGCEPKRIFIEMARSKEESKRTDSRLKKLQDLYKKCREENIDFMPRKDEFNTLKTQLSSKKEDDLRIDKLYLYYTQMGRCMYTGEKIELASLYDNNLYDIDHIYPRSKTKDDSLSNRVLVKKQVNAAKTDTYPLDAAIRTKMHSFWKLLYDKGFIDERKYERLTRSTQLRDEELAGFISRQLVETRQSTKAVAAILKTAYQNSEVVYVKAGNVSDFRKQFKFVKCRDVNDLHHAKDAYLNIVVGNCYHVKFTANPLNFITKNQDNRRYSLKPEIFYKFSIKRDGEIAWIGGKDGTITTVTKTMHKNNILFTRQPVEGKGELFKQQPLKAKSGQLPLKAGLSVEKYGGYDSLTTAYFALVKSEGKKGAVQLSIEGIPLVYAKQGEKAVQNYLTDVLQLCEPEIKIPKIKKYSLFKINGFPMHISGRQLKQLQFYVASQLCIDEYSIAYLKKAFKYENNLAVNDEIIADKNADEEKKQKARKRLDFYEKTWGIGKENNIRIYDILLAKSANNLYKKRPASQSATLEKRRENFKGLFVSKQIHVLKEILNLFKCLSATADLQLLGAGKNVGKVTWNTNISNVKQCILINQSPTGIFEQEVDLMKL

SEQ ID NO: 1358 - protein, 1379 aa, unidentified
  REGION 1..1379: note = Description of Unknown: uncultivated organism with predicted taxonomy: Phascolarctobacterium
  REGION 1..1379: note = MG18-6 effector
MQKLKNCDYYIGLDMGDASVGWAVTDTNYNILKFNGKALWGIRLFDSANTAASTRVFRSGRRRIDRTTWRLKMLQELFAEEIAKVDPGFFMRLEDSRLHLDDKRDKAVYNLFVDKNYTDKDFYQQYPTMYHLRYALATQAGPFDVRLLYLAVQHIAKHRGHFLFDNLDASKVNDFNAVFSEVENYVRDEMGIEDWSCQNIDELAKVLCDVNLGRTTKQKAMQSLLPAQTKQQKAIIQLFSGGKAKLAELFVDEELDECEKKSVSFQDDDLNEFEPVLTAALGERYEGLLRFKAIYDWSLLAKILHLDTSKKDEGEQHLLSECKVQVYENHKRDLAVLKSMLKGKPLYNKIFRQDGDISYEKYAKGIKGRNQIDFCKDLKKQLEGIAEYKKIMQEITSIDDAKTEEERLLFRITNGFAFPKQTTKDNGIIPIQVHLAELKCILDNAEGYLPFLGETDNNGLSVREKIEQIVKFRIPYYVGPLAGTRMSREQGRCWVVRKNEKIYPWNFTEIVNLEESAEKFITNMTAKCTYLVGEDVLPKESLLYSEFMVRNAINNITVDGERLPVDVLEKIFKQLFLAKTSKVTKKTLERFFRQENISFQNIGGIDDKINASMKSYNDFRRIFGEDYIQLHRDEIENIIRWITLFCDEKKMLVTKIKNTYPQISDDEIKAIKKLKYKDWGRLSATLLNSSNIAYEDKAFGELVTIISALRHTNKNFMELLSSYCSYDFIGKIKEFNGSRQSSNGKLTYKDVEELYVSPSVKRSIWQTLTILEEIKKIMGCEPKRIFIEMARSKEESKRTDSRLKKLQDLYKKCREENIDFMPRKDEFNALKTQLSSKKEDDLRSDKLYLYYTQMGRCMYTGERIELASLYDNNLYDIDHIYPRSKTKDDSLSNRVLVKKQVNAAKTDTYPLDAAIRIKMHSFWKLLYDKGFIDERKYERLTRSTQLRDEELAGFISRQLVETRQSTKAVAAILKTAYQNSEVVYVKAGNVSDFRQQFNFVKCRDVNDLHHAKDAYLNIVVGNCYHVKFTANPLNFITKNQDNRRYSLKPEIFYKFNIKRDDDIAWLGGEDGTMAIVARTMHKNNILFTRQAVEGKGELFKQNPLKANSGQLPLKAGLSVEKYGGYDSLTTAYFAVVKSEGKKGAVQLSIEGIPLVYARQGEDAIKKYLIEVVHLCNPIIKLNKIKKYSLFKINGFPMHISGRHGKQLIFYVAGQLCLDEESIAYLKKAFKYESDLAINEEIIDDKNAAEENKQKAHEKLGFYENTWGISEASNMRLYDILIAKSANNFYKNRPASQTSVLKQQRDKFAKLPLSKQIRVINEAINLFKCASATADFKLLEKGSACGKIQVSTNITKCKQCILINQSPTGVFEQEVDLMKL

SEQ ID NO: 1359 - protein, 1383 aa, unidentified
  REGION 1..1383: note = Description of Unknown: uncultivated organism with predicted taxonomy: Acidaminococcales
  REGION 1..1383: note = MG18-7 effector
MQNKKNVDYYVGLDMGDASVGWAVTDLNYNILKFNGKALWGIRLFDSAETAAARRGFRSARRRIDRVSWRISMLQELFAEEIAKVDAGFFQRLKDSRLQVEDKQEKTAYNLFVGQNYTDKDFYQQYPTMYHLRYALATQAGPFDVRLLYLAVQHIVKHRGHFLFENLDASKVGDFVAVFGEVESYVHDEMELDEWYCHDIDALAKVLCNANLGITAKQKAIQNLLPAKTKQEKAIVQLLSGGKAKLCDLFCDEELAECEKKSISFQEDNLDELEPILEAILQERYEALLRFKAVYDWSLLAKILRLDADKKSENEMHLLSECKVKVYEEHKKDLAVLKSMLKGKPLYNKLFRQDGEDTYANYAQGIKGINQVDFCKSLKKQLESIGEYKKQMQQLTSFEDAQTDVERLLFRVANGLAFPKQTTKDNGIIPIQVHLAELQCILAHAEKYLPFLKNADANGLSVREKITQIVKFRIPYYVGPLAGTRLSREQGRCWVERRAELKNEKIYPWNFDKVVDLEASAENFITNMTAKCTYLVGEDVLPKESLLYSEFMVRNALNNLTIDGERLPVSLLQKIYKQLFLEKTFKVTKKALERFFKQENVSYHDIGGIDDKINASMKAYNDFKRIFGEAYIEMHRDEIENIIRWITLFCDEKKMLETKIRKTYPQIPDDKIKAIKKLKYKDWGRLSATLLDSGKIAYEDASVGERITIISALRHTNKNFMELLSSNCQYDFIGKIKDFNGSKQSDNGKLTYKDVEELYVSPSVKRSIWQTLTILEEIKKIMGCEPKRIFIEMARSKEESLRTNSRLQRLQDLYKKCKEENIDFMPKADELTDIRSQLQCKNEEDLRSDKLYLYYTQMGRCMYTGERIELASLYDQNKYDVDHIYPRSKTKDDSLNNRVLVKKEINSAKTDNYPIDADIRKKMHAFWKMLYDKGFIDQKKYERLTRSTQLTDEELAGFINRQLVETRQSTKATADILKSAYEHSEVVYVKAGNVSDFRQQFDFVKCREVNDLHHAKDAYLNIVVGNCYHVKFTINPLMFIRGNQDNRRYSLKPEVFYAHDIKRNGEIAWLAGDNGTMATVKRVMQKNNVLFTRLAVEGKGELFKQNPLKAKSGQLPLKAGLSIDKYGGYDSLSTAYFALVESEGKKGAVQFTIEAIPLVYAKQGEATIKKYLTEVVQLCKPEIKVMRIKKYSLLKINGFPMHISGRTGKQLIFYVASQLCIDENSVAYLKKALKYESNLEENEAILADKNADESMKQKAFNRLEFYKNTWEISAVANLQIYDMLLAKSANNLYKNRPASQTATLKEKREQFAKLSLSKQIHVIKEILNLFKCASASADFKLLDKGTSCGTLKVSNNITKLKQCVLINQSPTGVFEQEVDLMKL

SEQ ID NO: 1360 - protein, 1379 aa, unidentified
  REGION 1..1379: note = Description of Unknown: uncultivated organism
  REGION 1..1379: note = MG18-8 effector
MQKSKNCDYYIGLDMGDASVGWAVTDTNYNISKFNGKALWGIRLFDYANTAASTRVFRSGRRRIDRTTWRLKMLQELFADEIAKVDTGFFMRLEDSRLQLDDKREKAVYNLFVDKSYTDKEFYQQYPTMYHLRYALATQKGPFDVRLLYLAVQHIAKHRGHFLFDNLDASKVNDFNAVFSEVENYVRDEMGIEDWSCQNIDELAKVLCDVNLGRTTKQKAMQSLLPAQTKQQKAIIQLFSGGKAKLAELFVDEELDECEKKSVSFQDDDLNEFEPVLTAALGERYEGLLRFKAIYDWSLLAKILHLDTSKKDEGEQHLLSECKVQVYEDHKRDLAVLKSMLKGKPLYNKIFRQDGDISYEKYAKGIKGRNQIDFCKDLKKQLEGIAEYKKIMQEITSIDDAKTVEEHLLFRITNGFAFPKQTTKDNGIIPIQVHLAELKCILDNAEGYLPFLGETNNNGLSVREKIEQIVKFRIPYYVGPLAGTRMSREQGRCWVVRKNEKIYPWNFTEIVNLEESAEKFITNMTAKCTYLVGEDVLPKESLLYSEFMVRNAINNITVDGERLPVDVLEKIFKQLFLAKTSKVTKKTLERFFRQENISFQNIGGIDDKINASMKSYNDFRRIFGEDYIQLHRDEIENIIRWITLFCDEKKMLVTKIKNTYPQIADDQIKAIKKLKYKDWGRLSATLLNSSAIAYEDKAFGELVTIISALRHTNKNFMELLSSYCSYDFIGKIKEFNGSRQSSNGKLTYKDVEELYVSPSVKRSIWQTLTILEEIKKIMGREPKRIFIEMARSKEESKRTDSRLKKLQDLYKKCKEENIDFVPRKDEFNALKTQLSSKKEDDLRSDKLYLYYTQMGRCMYTGERIELASLYDNNLYDIDHIYPRSKTKDDSLSNRVLVKKQVNAAKTDTYPLDAAIRIKMHSFWKLLYDKGFIDERKYERLTRSTQLRDEELAGFISRQLVETRQSTKAVATILKTAYKHSEVVYVKAGNVSDFRQQFKFVKCREVNDLHHAKDAYLNIVVGNCYYVKFTANPLNFIKKNQDSRSYSLKPEIFYKFNIKRDDDIAWLGGEDGTMATVARTMHKNNILFTRQAVEGKGELFKQNPLKANSGQLPLKAGLSIEKYGGYNSLTTAYFAVVKSEGKKGAVQLSIEAIPLVYAKQGEIAVQNYLTEVVQLCKPEIMLSKIKKYSLFKINGFPMHISGRTDNRILFYGAGQLCIDEADADYLKKALKYEADIAENELVIADTNADDIQKQNAQKRLDYYNQKWRIGRKINMHIYDMLLAKSGNSLYKNRPASQTTDLQEQRDVFEKLSLADQIHVIGEVLKLFKCASASANLKLLDKGNACGVIKVSNNILKFKQCILINQSPTGVFEQEVDLMKL

SEQ ID NO: 1361 - protein, 1379 aa, unidentified
  REGION 1..1379: note = Description of Unknown: uncultivated organism with predicted taxonomy: Phascolarctobacterium succinatutens
  REGION 1..1379: note = MG18-9 effector
MQKLQNKDYYIGLDMGDASVGWAVTDANYNILKFNGKALWGIRLFDSANTAASTRVFRSGRRRIDRTTWRLKMLQELFAEEIAKVDPGFFMRLEDSRLHLDDKRDKAVYNLFVDKNYTDKDFYQQYPTMYHLRYALATQAGPFDVRLLYLAVQHIAKHRGHFLFDNLDASKVNDFNAVFSEVENYVRDEMGIEDWSCQNIDELAKVLCDVNLGRTTKQKAMQSLLPAQTKQQKAIIQLFSGGKAKLAELFVDEELDECEKKSVSFQDDDLNEFEPVLTAALGERYEGLLRFKAIYDWSLLAKILHLDTSKKDEDEQHLLSECKVQVYEDHKRDLAVLKSMLKGKPLYNKIFRQDGDISYEKYAKGIKGRNQLDFCKDLKKQLDGIAEYKKIMQEITSIDAAGTEEERLLFRIANGFAFPKQTTKDNGIIPIQVHLAELKCILDNAEGYLQFLGETDNNGLSVREKIEQIVKFRIPYYVGPLAGTRMSREQGRCWVVRKNEKIYPWNFTQVVNLEESAEKFITNMTAKCTYLVGEDVLPKESLLYSEFMVRNAINNITVDGERLPVDVLEKIFKQLFLAKTSKVTKKTLERFFRQENISFQNIGGIDDKINASMKSYNDFRRIFGEDYIQLHRDEIENIIRWITLFCDEKKMLVTKIKNTYPQIADDQIKAIKKLKYKDWGRLSATLLNSSAIAYEDKAFGELVTIISALRHTNKNFMELLSSYCSYDFIGKIKEFNGSRQSSNGKLTYKDVEELYVSPSVKRSIWQTLTILEEIKKIMGCEPKRIFIEMARSKEESKRTDSRLKKLQDLYKKCREENIDFMPRKDEFNTLKTQLNSKKEDDLRSDKLYLYYTQMGRCMYTGEKIELASLYDNNLYDIDHIYPRSKTKDDSLSNRVLVKKQVNAAKTDTYPLDAAIRTKMHSFWKLLYDKGFIDERKYQRLTRSTQLRDEELAGFISRQLVETRQSTKAVATILKTAYQNSEVVYVKAGNVSDFRQQFKFVKCREVNDLHHAKDAYLNIVVGNCYHVKFTANPLNFITKNQDNRRYSLKPEIFYKFSIKRDGEIAWLGGEDGTMATVARTMHKNNILFTRQAVEGKGELFDQQPLKAKGGQLPLKAGLSIEKYGGYNSLTTAYFAVVKSEGKKGAVQLSIEAIPLVYAKQGEIAVQKYLTEVVQLCKPEIMLPKIKKYSLFKINGFPMHISGRTGNRMLFYGAGQLCLDEADVDYLKKALKYENDIAENELVIADKNSDDIQKQQAQKNLDYYNQKWRISRKVNMHIYDMLLAKSGNNLYKNRPASQTTDLQEQREFFEKLSLANQIHVIGEVLKLFKCASASANLKLLDKGNACGVIKVSNNILKFKQCVLINQSPTGVFEQEVDLMKL

SEQ ID NO: 1362 - protein, 1379 aa, unidentified; identical to SEQ ID NO: 1361
  REGION 1..1379: note = Description of Unknown: uncultivated organism with predicted taxonomy: Phascolarctobacterium
  REGION 1..1379: note = MG18-10 effector

SEQ ID NO: 1363 - protein, 1379 aa, unidentified
  REGION 1..1379: note = Description of Unknown: uncultivated organism with predicted taxonomy: Phascolarctobacterium succinatutens
  REGION 1..1379: note = MG18-11 effector
MQKLKNCDYYIGLDMGDASVGWAVTDTNYNILKFNGKALWGIRLFDSANTAASTRVFRSGRRRIDRTTWRLKMLQELFAEKIAKVDPGFFMRLEDSRLHLDDKRDKAVYNLFVDKNYTDKDFYQQYPTMYHLRYALATQAGPFDVRLLYLAVQHIAKHRGHFLFDNLDASKVNDFNAVFSEVENYVRDEMGIEDWSCQNIDELAKVLCDVNLGRTTKQKAMQSLLPAQTKQQKAIIQLFSGGKAKLAELFVDEELDECEKKSVSFQDDDLNEFEPVLTAALGERYEGLLRFKAIYDWSLLAKILHLDTSKKDEDEQHLLSECKVQVYEDHKRDLAVLKSMLKGKPLYNKIFRQDGDISYEKYAKGIKGRNQIDFCKDLKKQLEGIAEYKKIMQEITSIDDAKTEEERVLFRITNGFAFPKQTTKDNGIIPIQVHLAELKCILDNAEGYLPFLGETDNNGLSVREKIEQIVKFRIPYYVGPLAGTRMSREQGRYWVVRKNEKIYPWNFTEIVNLEESAEKFITNMTAKCTYLVGEDVLPKESLLYSEFMVRNAINNITVDGERLPVDVLEKIFKQLFLAKTSKVTKKTLERFFRQENISFQNIGGIDDKINASMKSYNDFRRIFGEDYIQLHRDEIENIIRWITLFCDEKKMLVTKIKNTYPQISDDEIKAIKKLKYKDWGRLSATLLNSSTIAYEDKAFGELVTIISALRHTNKNFMELLSSYCSYDFIGKIKEFNGSRQSSNGKLTYKDVEELYVSPSVKRSIWQTLTILEEIKKIMGCEPKRIFIEMARSKEESKRTDSRLKKLQDLYKKCREENIDFMPRKDEFNALKTQLSSKKEEDLRSDKLYLYYTQMGRCMYTGERIELASLYDNNLYDIDHIYPRSKTKDDSLSNRVLVKKQVNAAKTDTYPLDAAIRTKMHSFWKLLYDKGFIDERKYERLTRSTQLRDEELAGFISRQLVETRQSTKAVAAILKIAYQNSEVVYVKAGNVSDFRQQFKFVKCREVNDLHHAKDAYLNIVVGNCYHVKFTANPLNFITKNQDNRRYSLKPEIFYKFSIKRDGEIAWLGGEDGTMATVARTMHKNNILFTRQAVEGKGELFDQQPLKAKGGQLPLKAGLSIEKYGGYNSLTTAYFAVVKSEGKKGAVQLSIEAIPLVYAKQGEIAVQKYLTEVVQLCKPEIMLPQIKKYSLFKINGFPMHISGRTGNRMLFYGAGQLCLDEADVDYLKKALKYENDIAENELVIADKNSDDIQKQQAQKNLDYYNQKWRIGRKVNMHIYDMLLAKSGNNLYKNRPASQTTDLQEQREFFEKLSLANQIHVIGEVLKLFKCASASANLKLLDKGNACGVIKVSNNILKFKQCVLINQSPTGVFEQEVDLMKL

SEQ ID NO: 1364 - protein, 1379 aa, unidentified
  REGION 1..1379: note = Description of Unknown: uncultivated organism with predicted taxonomy: Phascolarctobacterium succinatutens
  REGION 1..1379: note = MG18-12 effector
MQKSKNCDYYIGLDMGDASVGWAVTDTNYNILKFNGKALWGIRLFDSANTAASTRVFRSGRRRIDRTTWRLKMLQELFAEEIAKVDPGFFMRLEDSRLHLDDKRDKAVYNLFVDKNYTDKDFYQQYPTMYHLRYALATQAVPFDVRLLYLAVQHIAKHRGHFLFDNLDASKVNDFNAVFSEVENYVRDEMGIEDWSCQNIDELAKVLCDVNLGRTTKQKAMQSLLPAQTKQQKAIIQLFSGGKAKLAELFVDEELDECEKNSVSFQDDDLNEFEPVLTAALGERYEGVLRFKAIYDWSLLAKILHLDTSKKDEDEQHLLSECKVQVYEDHKRDLAVLKSMLKGKPLYNKIFRQDGDISYEKYAKGIKGRNQIDFCKDLKKQLEGIAEYKKIMQEITNIDDAKTEEERLLFRITNGFAFPKQTTKDNGIIPIQVHLAELKCILDNAEGYLPFLGETDNNGLSVREKIEQIVKFRIPYYVGPLAGTRMSREQGRCWVVRKNEKIYPWNFTEIVNLEESAEKFITNMTAKCTYLVGEDVLPKESLLYSEFMVRNAINNITVDGERLPVDVLEKIFKQLFLAKTSKVTKKTLERFFRQENISFQNIGGIDDKINASMKSYNDFRRIFGEDYIQLHRDEIENIIRWITLFCDEKKMLVTKIKNTYPQISDDEIKAIKKLKYKDWGRLSATLLNSRAIGYEDKAVGEIITIISALRHTNKNLMELLSNYCPYDFIGKIKDFNGSRQSSNGKLTYKDVEELYVSPSVKRSIWQTLTILEEIKKIMGCEPKRIFIEMARSKEESKRTDSRLKKLQDLYKKCKEENIDFMPRKDEFNALKTQLSSKKEDDLRSDKLYLYYTQMGRCMYTGERIELASLNDNNLYDIDHIYPRSKTKDDSLSNRVLVKKQVNAAKTDTYPLDAAIRIKMHSFWKLLYDKGFIDERKYERLTRSTQLRDEELAGFISRQLVETRQSTKAVATILKTAYKHSEVVYVKAGNVSDFRQQFKFVKCREVNDLHHAKDAYLNIVVGNCYYVKFTANPLNFIKKNQDSRSYSLKPEIFYKFNIKRDDDIAWLGGEDGTMATVARTMHKNNILFTRQPLEGKGELFKQNPLKAKSGQLPLKAGLSVEKYGGYDSLTTAYFALVKSEGKKGSVQLSIEGIPLVYAKQGEKAVQDYLTEVVQLCKPEIKIPKIKKYSLFKINGFPMHISGRTGKQLVFYGAGQLCIADDVADYLKKALKYETDIAEKEKTLADQNADDIQKQKAQKGLDFYEQKWGISGAVNVQLYDMFIAKSANNLYKNRPASQTITLKEKREHFVKLTLSKQIHIIKEILNLFKCASASADFKLIDKGTSCGTLKISNNITKLKECILINQSPTGVFEQEVDLMKL

SEQ ID NO: 1365 - protein, 1379 aa, unidentified; identical to SEQ ID NO: 1356
  REGION 1..1379: note = Description of Unknown: uncultivated organism with predicted taxonomy: Phascolarctobacterium succinatutens
  REGION 1..1379: note = MG18-13 effector

SEQ ID NO: 1366 - protein, 1379 aa, unidentified; identical to SEQ ID NO: 1361
  REGION 1..1379: note = Description of Unknown: uncultivated organism with predicted taxonomy: Phascolarctobacterium
  REGION 1..1379: note = MG18-14 effector

SEQ ID NO: 1367 - protein, 1379 aa, unidentified
  REGION 1..1379: note = Description of Unknown: uncultivated organism with predicted taxonomy: Phascolarctobacterium succinatutens
  REGION 1..1379: note = MG18-15 effector
MQKLKNCDYYIGLDMGDASVGWAVTDTNYNILKFNGKALWGIRLFDSANTAASTRVFRSGRRRIDRTTWRLKMLQELFAEEIAKVDPGFFMRLEDSRLHLDDKRDKAVYNLFVDKNYTDKDFYQQYPTMYHLRYALATQAGPFDVRLLYLAVQHIAKHRGHFLFDNLDASKVNDFNAVFSEVENYVRDEMGIEDWSCQNIDEFAKVLCDVNLGRTTKQKAMQSLLPAQTKQQKAIIQLFSGGKAKLAELFVDEELDECEKKSVSFQDDDLNEFEPVLTAALGERYEGLLRFKAIYDWSLLAKILHLDTSKKDEDEQHLLSECKVQVYEDHKRDLAVLKSMLKGKPLYNKIFRQDGDISYEKYAKGIKGRNQIDFCKDLKKQLEGIAEYKKIMQEITNIDDAKTEEERLLFRITNGFAFPKQTTKDNGIIPIQVHLAELKCILDNAEGYLPFLGETDNNGLSVREKIEQIVKFRIPYYVGPLAGTRMSREQGRCWVVRKNEKIYPWNFTEIVNLEESAEKFITNMTAKCTYLVGEDVLPKESLLYSEFMVRNAINNITVDGERLPVDVLEKIFKQLFLAKTSKVTKKTLERFFRQENISFQNIGGIDDKINASMKSYNDFRRIFGEDYIQLHRDKIENIIRWITLFCDEKKMLVTKIKNTYPHISDDKIKAIKKLKYKDWGRLSATLLNSSAIAYEDKAFGELVTIISALRHTNKNFMELLSSYCYYDFIGKIKEFNGSRQSSNGKLTYKDVEELYVSPSVKRSVWQTLTILEEIKKIMGCEPKRIFIEMARSKEESKRTDSRLKKLQDLYKKCREENIDFMPRKDEFNVLKTQLSSKNEEDLRSDKLYLYYTQMGRCMYTGEIIELASLYDNNLYDIDHIYPRSKTKDDSLSNRVLVKKQVNAAKTDIYPLDAAIRTKMHSFWKLLYDKGFIDERKYERLTRSMQLRDEELAGFISRQLVETRQSTKAVAAILKTAYQNSEVVYVKAGNVSDFRQQFKFEKCREVNDLHHAKDAYLNIVVGNCYHVKFTANPLNFITKNQDNRRYSLKPEIFYKFSIKRDGEIAWLGGEDGTMATVARTMHKNNILFTRQAVEGKGELFDQQPLKAKGGQLPLKAGLSIEKYGGYNSLTTAYFAVVKSEGKKGAVQLSIEAIPLVYAKQGEIAVQKYLTEVVQLCKPEIMLPKIKKYSLFKINGFPMHISGRTGNRMLFYGAGQLCLDEADVDYLKKALKYENDIAENELVIADKNSDDIQKQQAQKNLDYYNQKWRIGRKVNMHIYDMLLAKSGNNLYKNRPASQTTDLQEQREFFEKLSLANQIHVIGEVLKLFKCASASANLKLLDKGNACGVIKVSNNILKFKQCVLINQSPTGVFEQEVDLMKL

SEQ ID NO: 1368 - protein, 1379 aa, unidentified; identical to SEQ ID NO: 1364
  REGION 1..1379: note = Description of Unknown: uncultivated organism with predicted taxonomy: Phascolarctobacterium succinatutens
  REGION 1..1379: note = MG18-16 effector

SEQ ID NO: 1369 - protein, 1379 aa, unidentified; identical to SEQ ID NO: 1361
  REGION 1..1379: note = Description of Unknown: uncultivated organism with predicted taxonomy: Phascolarctobacterium
  REGION 1..1379: note = MG18-17 effector

SEQ ID NO: 1370 - protein, 1379 aa, unidentified; identical to SEQ ID NO: 1361
  REGION 1..1379: note = Description of Unknown: uncultivated organism with predicted taxonomy: Phascolarctobacterium succinatutens
  REGION 1..1379: note = MG18-18 effector

SEQ ID NO: 1371 - protein, 1379 aa, unidentified; identical to SEQ ID NO: 1361
  REGION 1..1379: note = Description of Unknown: uncultivated organism with predicted taxonomy: Phascolarctobacterium
  REGION 1..1379: note = MG18-19 effector

SEQ ID NO: 1372 - protein, 1379 aa, unidentified; identical to SEQ ID NO: 1361
  REGION 1..1379: note = Description of Unknown: uncultivated organism with predicted taxonomy: Phascolarctobacterium
  REGION 1..1379: note = MG18-20 effector

SEQ ID NO: 1373 - protein, 1379 aa, unidentified; identical to SEQ ID NO: 1361
  REGION 1..1379: note = Description of Unknown: uncultivated organism with predicted taxonomy: Phascolarctobacterium
  REGION 1..1379: note = MG18-21 effector

SEQ ID NO: 1374 - protein, 1379 aa, unidentified; identical to SEQ ID NO: 1356
  REGION 1..1379: note = Description of Unknown: uncultivated organism with predicted taxonomy: Phascolarctobacterium
  REGION 1..1379: note = MG18-22 effector

SEQ ID NO: 1375 - protein, 1379 aa, unidentified
  REGION 1..1379: note = Description of Unknown: uncultivated organism with predicted taxonomy: Phascolarctobacterium succinatutens
  REGION 1..1379: note = MG18-23 effector
MQKLKNCDYYIGLDMGDASVGWAVTDTNYNILKFNGKALWGIRLFDSANTAASTRVFRSGRRRIDRTTWRLKMLQELFAEEIAKVDPGFFMRLEDSRLHLDDKRDKAVYNLFVDKNYTDKDFYQQYPTMYHLRYALATQAGPFDVRLLYLAVQHIAKHRGHFLFDNLDASKVNDFNAVFSEVENYVRDEMGIEDWSCQNIDELAKVLCDVNLGRTTKQKAMQSLLPAQTKQQKAIIQLFSGGKAKLAELSVDEELDECEKKSVSFQDDDLNEFEPVLTAALGERYEGLLRFKAIYDWSLLAKILHLDTSKKDEGEQHLLSECKVQVYENHKRDLAVLKSMLKGKPLYNKIFRQDGDISYEKYAKGIKGRNQIDFCKDLKKQLEGIAEYKKIMQEITSIDDAKTEEERLLFRITNGFAFPKQTTKDNGIIPIQVHLAELKCILDNAEGYLPFLGETDNNGLSVREKIEQIVKFRIPYYVGPLAGTRMSREQGRCWVVRKNEKIYPWNFTEIVNLEESAEKFITNMTAKCTYLVGEDVLPKESLLYSEFMVRNAINNITVDGERLPVDVLEKIFKQLFLAKTSKVTKKTLERFFRQENISFQNIGGIDDKINASMKSYNDFRRIFGEDYIQLHRDEIENIIRWITLFCDEKKMLVTKIKNTYPQISDDEIKAIKKLKYKDWGRLSATLLNSSTIAYEDKAFGELVTIISALRHTNKNFMELLSSYCSYDFIGKIKEFNGSRQSSNGKLTYKDVEELYVSPSVKRSIWQTLTILEEIKKIMGCEPKRIFIEMARSKEESKRTDSRLKKLQDLYKKCREENIDFMPRKDEFNALKTQLSSKKEEDLRSDKLYLYYTQMGRCMYTGERIELASLYDNNLYDIDHIYPRSKTKDDSLSNRVLVKKQINAAKTDTYPLDAAIRTKMHSFWKLLYDKGFIDERKYERLTRSTQLRDEELAGFISRQLVETRQSTKAVAAILKTAYQNSEVVYVKAGNVSDFRQQFKFVKCREVNDLHHAKDAYLNIVVGNCYHVKFTANPLNFITKNQDNRRYSLKPEIFYKFSIKRDGEIAWLGGEDGTMATVVRTMHKNNILFTRQAVEGKGELFDQQPLKAKGGQLPLKAGLSIEKYGGYNSLTTAYFAVVKSEGKKGAVQLSIEAIPLVYAKQGEIAVQKYLTEVVQLCKPEIMLPKIKKYSLFKINGFPMHISGRTGNRMLFYGAGQLCLDEADVDYLKKALKYENDIAENELVIADKNSDDIQKQQAQKNLDYYNQKWRIGRKVNMHIYDMLLAKSGNNLYKNRPASQTTDLQEQREFFEKLSLANQIHVIGEVLKLFKCASASANLKLLDKGNACGVIKVSNNILKFKQCVLINQSPTGVFEQEVDLMKL

SEQ ID NO: 1376 - protein, 1379 aa, unidentified
  REGION 1..1379: note = Description of Unknown: uncultivated organism with predicted taxonomy: Phascolarctobacterium
  REGION 1..1379: note = MG18-24 effector
MQKLKNCDYYIGLDMGDASVGWAVTDTNYNILKFNGKALWGIRLFDSANTAASTRVFRSGRRRIDRTTWRLKMLQELFAEEIAKVDSGFFMRLEDSRLQLDDKREKAVYNLFVDKNYTDKEFYQQYPTMYHLRYALATQKGPFDVRLLYLAVQHIAKHRGHFLFDNLDASKVNDFNAVFSEVENYVRDEMGIEDWSCQNIDELAKVLCDVNLGRTIKQKAMQSLLPAQTKQQKAIIQLFSGGKAKLAELFLDEELDECEKKSVSFQDDDLDELEPVLTAALGERYEGLLRFKAIYDWSLLAKILHLDAEKKDDSEQHLLSECKVQVYEEHKRDLTVLKSMLKGKPLYNKIFRQDGDISYEKYAKGIKGRNQIDFCKDLKKQLEGIAEYKKIMQEITNIDDAKTEEERLLFRITNGFAFPKQTTKDNGIIPIQVHLAELKCILDNAEGYLPFLGETDNNGLSVREKIEQIVKFRIPYYVGPLAGTRMSREQGRCWVVRKNEKIYPWNFTEIVNLEESAEKFITNMTAKCTYLVGEDVLPKESLLYSEFMVRNAINNITVDGERLPVDVLEKIFKQLFLAKTSKVTKKTLERFFRQENISFQNIGGIDDKINASMKSYNDFRRIFGEDYIQLHRDEIENIIRWITLFCDEKKMLVTKIKNTYPQISDDEIKAIKKLKYKDWGRLSATLLNSSTIAYEDKAFGELVTIISALRHTNKNFMELLSSYCYYDFIGKIKEFNGSRQSSNGKLTYKDVEELYVSPSVKRSIWQTLTILEEIKKIMGCEPKRIFIEMARSKEESKRTDSRLKKLQDLYKKCREENIDFMPRKDEFNALKTQLSSKKEENLRSDKLYLYYTQMGRCMYTGERIELASLYDNNLYDIDHIYPRSKTKDDSLSNRVLVKKQVNAAKTDTYPLDAAIRTKMHSFWKLLYDKGFIDERKYERLTRSTQLRDEELAGFISRQLVETRQSTKAVAAILKTAYQNSEVVYVKAGNVSDFRQQFKFVKCREVNDLHHAKDAYLNIVVGNCYHVKFTANPLNFITKNQDNRRYSLKPEIFYKFSIKRDGEIAWLGGEDGTMATVARTMHKNNILFTRQAVEGKGELFDQQPLKAKGGQLPLKAGLSIEKYGGYNSLTTAYFAVVKSEGKKGAVQLSIEAIPLVYAKQGEIAVQKYLTEVVQLCKPEIKIPKIKKYSLFKINGFPMHISGRTGNRLVFYGAGQLCISENETVYLKRALKYRDSIEENENIITAKDTDDKQKEKAQKRLDFYKQTWGISREANMRIYDILLAKSGNNLYKNRPASQTKDLQEQRGTFEKLPLSKQIYVIGEFLNLFKCASTSADFKLLGKGNSCGVIKTTNNVTKCKQCVLINQSPTGVFEQEVDLMKL

SEQ ID NO: 1377 - protein, 1379 aa, unidentified; identical to SEQ ID NO: 1361
  REGION 1..1379: note = Description of Unknown: uncultivated organism with predicted taxonomy: Phascolarctobacterium succinatutens
  REGION 1..1379: note = MG18-25 effector

SEQ ID NO: 1378 - protein, 1379 aa, unidentified; identical to SEQ ID NO: 1361
  REGION 1..1379: note = Description of Unknown: uncultivated organism with predicted taxonomy: Phascolarctobacterium succinatutens
  REGION 1..1379: note = MG18-26 effector

SEQ ID NO: 1379 - protein, 1379 aa, unidentified
  REGION 1..1379: note = Description of Unknown: uncultivated organism with predicted taxonomy: Phascolarctobacterium succinatutens
  REGION 1..1379: note = MG18-27 effector
MQKLKNCDYYIGLDMGDASVGWAVTDTNYNILKFNGKALWGIRLFDSANTAASTRVFRSGRRRIDRTTWRLKMLQELFAEEIAKVDPGFFMRLEDSRLHLDDKRDKAVYNLFVDKNYTDKDFYQQYPTMYHLRYALATQAGPFDVRLLYLAVQHIAKHRGHFLFDNLDASKVNDFNAVFSEVENYVRDEMGIEDWSCQNIDELAKVLCDVNLGRTTKQKAMQSLLPAQTKQQKAIIQLFSGGKAKLAELFVDEELDECEKKSVSFQDDDLNEFEPVLTAALGERYEGLLRFKAIYDWSLLAKILHLDTSKKDEDEQHLLSECKVQVYEDHKRDLAVLKSMLKGKPLYNKIFRQDGDISYEKYAKGIKGRNQIDFCKDLKKQLEGIAEYKKIMQEITNIDDAKTEEERLLFRITNGFAFPKQTTKDNGIIPIQVHLAELKCILDNAEGYLPFLGETDNNGLSVREKIEQIVKFRIPYYVGPLAGTRMSREQGRCWVVRKHEKIYPWNFTEIVNLEESAEKFITNMTAKCTYLVGEDVLPKESLLYSEFMVRNAINNITVDGERLPVDVLEKIFKQLFLAKTSKVTKKTLERFFRQENISFQNIGGIDDKINASMKSYNDFRRIFGEDYIQLHRDEIENIIRWITLFCDEKKMLVTKIKNTYPQISDDEIKAIKKLKYKDWGRLSATLLNSSTIAYEDKAFGELVTIISALRHTNKNFMELLSSYCYYDFIGKIKEFNGSRQSSNGKLTYKDVEELYVSPSVKRSIWQTLTILEEIKKIMGCEPKRIFIEMARSKEESKRTDSRLKKLQDLYKKCREENIDFMPRKDEFNALKTQLSSKKEENLRSDKLYLYYTQMGRCMYTGERIELASLYDNNLYDIDHIYPRSKTKDDSLSNRVLVKKQVNAAKTDTYPLDAAIRTKMHSFWKLLYDKGFIDERKYERLTRSTQLRDEELAGFISRQLVETRQSTKAVAAILKTAYQNSEVVYVKAGNVSDFRQQFKFVKCREVNDLHHAKDAYLNIVVGNCYHVKFTANPLNFITKNQDNRRYSLKPEIFYKFSIKRDGEIAWLGGEDGTMATVARTMHKNNILFTRQAVEGKGELFDQQPLKAKGGQLPLKAGLSIEKYGGYNSLTTAYFAVVKSEGKKGAVQLSLEAIPLVYAKQGEIAVQKYLTEVVQLCKPEIMLPKIKKYSLFKINGFPMHISGRTGKQLIFYGAGQLCIADDVADYLKKALMYETNIAEKEKTLADQNADDIQKQKAQKGLDFYEQKWGISGAVNVQLYDMFIAKSANNLYKNRPVSQTITLKEKREHFVKLTVSKQIHIIKEILNLFKCASASADFKLIDKGTSCGTLKISNNINKLKECILINQSPTGVFEQEVDLMKL

SEQ ID NO: 1380 - protein, 1379 aa, unidentified
  REGION 1..1379: note = Description of Unknown: uncultivated organism with predicted taxonomy: Phascolarctobacterium
  REGION 1..1379: note = MG18-28 effector
MQKLKNCDYYIGLDMGDASVGWAVTDTNYNILKFNGKALWGIRLFDSANTAASTRVFRSGRRRIDRTTWRLKMLQELFAEEIAKVDPGFFMRLEDSRLHLDDKRDKAVYNLFVDKNYTDKDFYQQYPTMYHLRYALATQAGPFDVRLLYLAVQHIAKHRGHFLFDNLDASKVNDFNAVFSEVENYVRDEMGIEDWSCQNIDELAKVLCDVNLGRTTKQKAMQSLLPAQTKQQKAIIQLFSGGKAKLAELFVDEELDECEKKSVSFQDDDLNEFEPVVTAALGERYEGLLRFKAIYDWSLLAKILHLDTSKKDEGEQHLLSECKVQVYEDHKRDLAVLKSMLKGKPLYNKIFRQDGDISYEKYAKGIKGRNQIDFCKDLKKQLEGIAEYKKIMQEITSIDDAKTEEERLLFRITNGFAFPKQTTKDNGIIPIQVHLAELKCILDNAEGYLPFLGETDNNGLSVREKIEQIVKFRIPYYVGPLAGTRMSREQGRCWVVRKNEKIYPWNFTEIVNLEESAEKFITNMTAKCTYLVGEDVLPKESLLYSEFMVRNAINNITVDGERLPVDVLEKIFKQLFLAKTSKVTKKTLERFFRQENISFQNIGGIDDKINASMKSYNDFRRIFGEDYIQLHRDEIENIIRWITLFCDEKKMLVTKIKNTYPQISDDEIKAIKKLKYKDWGRLSATLLNSSNIAYEDKAFGELVTIISALRHTNKNFMELLSSYCSYDFIGKIKEFNGSRQSSNGKLTYKDVEELYVSPSVKRSIWQTLTILEEIKKIMGCEPKRIFIEMARSKEESKRTDSRLKKLQDLYKKCREENIDFMPRKDEFNALKTQLSSKKEEDLRSDKLYLYYTQMGRCMYTGERIELASLYDNNLYDIDHIYPRSKTKDDSLSNRVLVKKQVNAAKTDIYPLDAAIRTKMHSFWKLLYDKGFIDERKYERLTRSTQLRDEELAGFISRQLVETRQSTKAVAAILKTAYQNSEVVYVKAGNVSDFRQQFNFVKCRDVNDLHHAKDAYLNIVVGNCYHVKFTANPLNFITKNQDNRRYSLKPEIFYKFSIKRDGEIAWLGGEDGTMATVARTMHKNNILFTRQAVEGKGELFDQQPLKAKGGQLPLKAGLSIEKYGGYNSLTTAYFAVVKSEGKKGAVQLSIEAIPLVYAKQGEIAVQKYLTEVVQLCKPEIMLPKIKKYSLFKINGFPMHISGRTGNRMLFYGAGQLCLDEADVNYLKKALKYENDIAENELVIADKNSDDIQKQQAQKNLDYYNQKWRIGRKVNMHIYDMLLAKSGNNLYKNRPASQTTDLQEQREFFEKLSLANQIHVIGEVLKLFKCASASANLKLLDKGNACGVIKVSNNILKFKQCVLINQSPTGVFEQEVDLMKL

SEQ ID NO: 1381 - protein, 1379 aa, unidentified
  REGION 1..1379: note = Description of Unknown: uncultivated organism with predicted taxonomy: Phascolarctobacterium succinatutens
  REGION 1..1379: note = MG18-29 effector
MQKLKNCDYYIGLDMGDASVGWAVTDTNYNILKFNGKALWGIRLFDSANTAASTRVFRSGRRRIDRTTWRLKMLQELFAEEIAKVDPGFFMRLEDSRLHLDDKRDKAVYNLFVDKNYTDKDFYQQYPTMYHLRYALATQAGPFDVRLLYLAVQHIAKHRGHFLFDNLDASKVNDFNAVFSEVENYVRDEMGIEDWSCQNIDELAKVLCDVNLGRTTKQKAMQSLLPAQTKQQKAIIQLFSGGKAKLAELFVDAELDECEKKSVSFQDDDLNEFEPVLTAALGERYEGLLRFKAIYDWSLLAKILHLDTSKKDEDEQHLLSECKVQVYEDHKRDLAVLKSMLKGKPLYNKIFRQDGDISYEKYAKGIKGRNQIDFCKDLKKQLEGIAEYKKIMQEITSIDDAKTEEERLLFRITNGFAFPKQTTKDNGIIPIQVHLAELKCILDNAEGYLPFLGETDNNGLSVREKIEQIVKFIIPYYVGPLAGTRMSREQGRCWVVRKNEKIYPWNFTEIVNLEESAEKFITNMTAKCTYLVGEDVLPKESLLYSEFMVRNAINNITVDGERLPVDVLEKIFKQLFLAKTSKVTKKTLERFFRQENISFQNIGGIDDKINASMKSYNDFRRIFGEDYIQLHRDEIENIIRWITLFCDEKKMLVTKIKNTYPQISDDEIKAIKKLKYKDWGRLSATLLNSSAIAYEDKAFGELVTIISALRHTNKNFMELLSSYCSYDFIGKIKEFNGSRQSSNGKLTYKDVEELYVSPSVKRSIWQTLTILEEIKKIMGCEPKRIFIEMARSKEESKRTDSRLKKLQDLYKKCREENIDFMPRKDEFNTLKTQLSSKKEDDLRSDKLYLYYTQMGRCMYTGEKIELASLYDNNLYDIDHIYPRSKTKDDSLSNRVLVKKQVNAAKTDTYPLDAAIRTKMHSFWKLLYDKGFIDERKYQRLTRSTQLRDEELAGFISRQLVETRQSTKAVAAILKTAYQNSEVVYVKAGNVSDFRQQFKFVKCREVNDLHHAKDAYLNIVVGNCYHVKFTANPLNFITKNQDNRRYSLKPEIFYKFSIKRDGEIAWLGGEDGTMATVARTMHKNNILFTRQAVEGKGELFDQQPLKAKGGQLPLKAGLSIEKYGGYNSLTTAYFAVVKSEGKKGAVQLSIEAIPLVYAKQGEIAVQKYLTKVVQLCKPEIMLPKIKKYSLFKINGFPMHISGRTGNRMLFYGAGQLCLDEADVDYLKKALKYENDIAENELVIADKNSDDIQKQQAQKNLDYYNQKWRIGRKVNMHIYDMLLAKSGNNLYKNRPASQTTDLQEQREFFEKLSLANQIHVIGEVLKLFKCASASANLKLLDKGNACGVIKVSNNILKFKQCVLINQSPTGVFEQEVDLMKL

SEQ ID NO: 1382 - protein, 1148 aa, unidentified
  REGION 1..1148: note = Description of Unknown: uncultivated organism with predicted taxonomy: Phascolarctobacterium succinatutens
  REGION 1..1148: note = MG18-30 effector
MQKLKNCDYYIGLDMGDASVGWAVTDTNYNILKFNGKALWGIRLFDSANTAASTRVFRSGRRRIDRTTWRLKMLQELFAEEIAKVDPGFFMRLEDSRLHLDDKRDKVVYNLFVDKNYTDKDFYQQYPTMYHLRYALATQAGPFDVRLLYLAVQHIAKHRGHFLFDNLDASKVNDFNAVFSEVENYVRDEMGIEDWSCQNIDELAKVLCDVNLGRTTKQKAMQSLLPAQTKQQKAIIQLFSGGKAKLAELFVDEELDECEKKSVSFQDDDLNEFEPVLTAALGERYEGLLRFKAIYDWSLLAKILHLDTSKKDEDEQHLLSECKVQVYEDHKRDLAVLKSMLKGKPLYNKIFRQDGDISYEKYAKGIKGRNQIDFCKDLKKQLEGIAEYKKIMQEITNIDDAKTEEERLLFRITNGFAFPKQTTKDNGIIPIQVHLAELKCILDNAEGYLPFLGETDNNGLSVREKIEQIVKFRIPYYVGPLAGTRMSREQGRCWVVRKNEKIYPWNFTEIVNLEESAEKFITNMTAKCTYLVGEDVLPKESLLYSEFMVRNAINNITVDGERLPVDVLEKIFKQLFLAKTSKVTKKTLERFFRQENISFQNIGGIDDKINASMKSYNDFRRIFGEDYIQLHRDKIENIIRWITLFCDEKKMLVTKIKNTYPQIADDQIKAIKKLKYKDWGRLSATLLNSSAIAYEDKAFGELVTIISALRHTNKNFMELLSSYCSYDFIGKIKDFNGSRQSSNGKLTYKDVEELYVSPSVKRSIWQTLTILEEIKKIMGREPKRIFIEMARSKEESKRTDSRLKKLQDLYKKCREENIDFMPRKDEFNALKTQLSSKKEEDLRSDKLYLYYTQMGRCMYTGERIELASLYDDNLYDIDHIYPRSKTKDDSLSNRVLVKKEVNAAKTDIYPLDAAIRTKMHSFWKLLYDKGFIDERKYERLTRSTQLRDEELAGFISRQLVETRQSTKAVAAILKTAYQNSEVVYVKAGNVSDFRQQFKFVKCRDVNDLHHAKDAYLNIVVGNCYHVKFTANPLNFITKNQDNRRYSLKPEIFYKFSIKRDSEIAWIGGKDGTITTVTKTMHKNNILFTRQPVEGKGELFKQNPLKAKNGQLPLKAGLSVEKYGGYNSLSTAYFAVVKSEGKMEQFSYL

SEQ ID NO: 1383 - protein, 1148 aa, unidentified; identical to SEQ ID NO: 1382
  REGION 1..1148: note = Description of Unknown: uncultivated organism with predicted taxonomy: Phascolarctobacterium succinatutens
  REGION 1..1148: note = MG18-31 effector

SEQ ID NO: 1384 - protein, 1379 aa, unidentified
  REGION 1..1379: note = Description of Unknown: uncultivated organism with predicted taxonomy: Phascolarctobacterium succinatutens
  REGION 1..1379: note = MG18-32 effector
MQKLQNKDYYIGLDMGDASVGWAVTDANYNILKFNGKALWGIRLFDSANTAASTRVFRSGRRRIDRTTWRLKMLQELFAEEIAKVDPGFFMRLEDSRLHLDDKRDKAVYNLFVDKNYTDKDFYQQYPTMYHLRYALATQAGPFDVRLLYLAVQHIAKHRGHFLFDNLDASKVYDFNAVFSEVENYVRDEMGIEDWSCQNIDELAKVLYDVNLGRTTKQKAMQSLLPAQTKQQKAIIQLFSGGKAKLAELFVDEELDECEKKSVSFQDDDLNEFEPVLTAALGERYEGLLRFKAIYDWSLLAKILHLDTSKKDEDEQHLLSECKVQVYEDHKRDLAVLKSMLKGKPLYNKIFRQDGDISYEKYAKGIKGRNQIDFCKDLKKQLEGIAEYKKIMQEITSIDDAKTEEERLLFRITNGFAFPKQTTKDNGIIPIQVHLAELKCILDNAEGYLPFLGETDNNGLSVREKIEQIVKFRIPYYVGPLAGTRMSREQGRCWVVRKNEKIYPWNFTEIVNLEESAEKFITNMTAKCTYLVGEDVLPKESLLYSEFMVRNAINNITVDGERLPVDVLEKIFKQLFLAKTSKVTKKTLERFFRQENISFQNIGGIDDKINASMKSYNDFRRIFGEDYIQLHRDEIENIIRWITLFCDEKKMLVTKIKNTYPHISDDKIKAIKKLKYKDWGRLSATLLNSSAIAYEDDAFGERVTIISALRHTNKNFMELLSNYCSYDFIGKIKDFNGSRQSSNSKLTYKDVEELYVSPSVKRSIWQTLTILEEIKKIMGHEPKRIFIEMARSKEESKRTDSRLKKLQDLYKQCREENIDFMPRKDEFNTLKTQLSSKKEDDLRIDKLYLYYTQMGRCMYTGEIIELASLYDNNLYDIDHIYPRSKTKDDSLSNRVLVKKQVNAAKTDIYPLDAAIRTKMHSFWKLLYDKGFIDERKYERLTRSTQLRDEELAGFISRQLVETRQSTKAVAAILKTAYQNSEVVYVKAGNVSDFRQQFKFVKCREVNDLHHAKDAYLNIVVGNCYHVKFTANPLNFITKNQDNRRYSLKPEIFYKFSIKRDSEIAWIGGKDGTITTVTKTMHKNNILFTRQPVEGKGELFKQNPLKAKNGQLPLKAGLSVEKYGGYNSLSTAYFAVVKSEGKKGAVQLSIEAIPLVYAKQGEEAVQDYLTEVVQLCNPEIRIPKIKKYSLFKINGFPMHISGKTVKQIIFYAAGQLCLADDVAEYLKKALKYEAYIALNEGLISDKNADDTQKQKAQQRLDYFKQKWGISSDANMKIYDILLAKSANNLYKNRPASQTKDLQEQRCVFEKLSLAEQIHIIGEVLNLFKCASASANLKLLGKGTSCGVIKTSNNITKCEQCILINQSPTGVFEQEVDLMKL

SEQ ID NO: 1385 - protein, 1379 aa, unidentified; identical to SEQ ID NO: 1361
  REGION 1..1379: note = Description of Unknown: uncultivated organism with predicted taxonomy: Phascolarctobacterium succinatutens
  REGION 1..1379: note = MG18-33 effector

SEQ ID NO: 1386 - protein, 1379 aa, unidentified; identical to SEQ ID NO: 1361
  REGION 1..1379: note = Description of Unknown: uncultivated organism with predicted taxonomy: Phascolarctobacterium succinatutens
  REGION 1..1379: note = MG18-34 effector

SEQ ID NO: 1387 - protein, 1379 aa, unidentified; identical to SEQ ID NO: 1364
  REGION 1..1379: note = Description of Unknown: uncultivated organism with predicted taxonomy: Phascolarctobacterium succinatutens
  REGION 1..1379: note = MG18-35 effector

SEQ ID NO: 1388 - protein, 1379 aa, unidentified; identical to SEQ ID NO: 1361
  REGION 1..1379: note = Description of Unknown: uncultivated organism with predicted taxonomy: Phascolarctobacterium succinatutens
  REGION 1..1379: note = MG18-36 effector

SEQ ID NO: 1389 - protein, 1379 aa, unidentified
  REGION 1..1379: note = Description of Unknown: uncultivated organism with predicted taxonomy: Phascolarctobacterium succinatutens
  REGION 1..1379: note = MG18-37 effector
MQKLKNCDYYIGLDMGDASVGWAVTDTNYNILKFNGKALWGIRLFDSANTAASTRVFRSGRRRIDRTTWRLKMLQELFAEEIAKVDPGFFMRLEDSRLHLDDKRDKAVYNLFVDKNYTDKDFYQQYPTMYHLRYALATQAGPFDVRLLYLAVQHIAKHRGHFLFDNLDASKVNDFNAVFSEVENYVRDEMGIEDWSCQNIDELAKVLCDVNLGRTTKQKAMQSLLPAQTKQQKAIIQLFSGGKAKLAELFVDEELDECEKKSVSFQDDDLNEFEPVLTAALGERYEGLLRFKAIYDWSLLAKILHLDTSKKDEDEQHLLSECKVQVYEDHKRDLAVLKSMLKGKPLYNKIFRQDGDISYEKYAKGIKGRNQIGFCKDLKKQLEGIAEYKKIMQEITNIDDAKTEEERLLFRITNGFAFPKQTTKDNGIIPIQVHLAELKCILDNAEGYLPFLGETDNNGLSVREKIEQIVKFRIPYYVGPLAGTRMSREQGRCWVVRKHEKIYPWNFTEIVNLEESAEKFITNMTAKCTYLVGEDVLPKESLLYSEFMVRNAINNITVDGERLPVDVLEKIFKQLFLAKTSKVTKKTLERFFRQENISFQNIGGIDDKINASMKSYNDFRRIFGEDYIQLHRDEIENIIRWITLFCDEKKMLVTKIKNTYPQISDDEIKAIKKLKYKDWGRLSATLLNSSTIAYEDKAFGELVTIISALRHTNKNFMELLSSYCYYDFIGKIKEFNGSRQSSNGKLTYKDVEELYVSPSVKRSIWQTLTILEEIKKIMGCEPKRIFIEMARSKEESKRTDSRLKKLQDLYKKCREENIDFMPRKDEFNALKTQLSSKKEENLRSDKLYLYYTQMGRCMYTGERIELASLYDNNLYDIDHIYPRSKTKDDSLSNRVLVKKQVNAAKTDTYPLDAAIRTKMHSFWKLLYDKGFIDERKYERLTRSTQLRDEELAGFISRQLVETRQSTKAVAAILKTAYQNSEVVYVKAGNVSDFRQQFKFVKCREVNDLHHAKDAYLNIVVGNCYHVKFTANPLNFITKNQDNRRYSLKPEIFYKFSIKRDGEIAWLGGEDGTMATVARTMHKNNILFTRQAVEGKGELFDQQPLKAKGGQLPLKAGLSIEKYGGYNSLTTAYFAVVKSEGKKGAVQLSIEAIPLVYAKQGEIAVQKYLTEVVQLCKPEIMLPKIKKYSLFKINGFPMHISGRTGKQLIFYGAGQLCIADDVADYLKKALMYETNIAEKEKTLADQNADDIQKEKAQKGLDFYEQKWGISGAVNVQLYDMFIAKSANNLYKNRPVSQTITLKEKREHFVKLTVSKQIHIIKEILNLFKCASASDDFKLIDKGTSCGTLKISNNINKLKECILINQSPTGVFEQEVDLMKL

SEQ ID NO: 1390 - protein, 1379 aa, unidentified
  REGION 1..1379: note = Description of Unknown: uncultivated organism with predicted taxonomy: Phascolarctobacterium
  REGION 1..1379: note = MG18-38 effector
MQKLKNCDYYIGLDMGDASVGWAVTDTNYNILKFNGKALWGIRLFDSANTAASTRVFRSGRRRIDRTTWRLKMLQELFAEEIAKVDPGFFMRLEDSRLHLDDKRDKAVYNLFVDKNYTDKDFYQQYPTMYHLRYALATQAGPFDVRLLYLAVQHIAKHRGHFLFDNLDASKVNDFNAVFSEVENYVRDEMGIEDWSCQNIDELAKVLCDVNLGRTTKQKAMQSLLPAQTKQQKAIIQLFSGGKAKLAELFVDEELDECEKKSVSFQDDDLNEFEPVLTAALGERYEGLLRFKAIYDWSLLAKILHLDTSKKDEDEQHLLSECKVQVYEDHKRDLAVLKSMLKGKPLYNKIFRQDGDISYEKYAKGIKGRNQIDFCKDLKKQLEGIAEYKKIMQEITNIDDAKTEEERLLFRITNGFAFPKQTTKDNGIIPIQVHLAELKCILDNAEGYLPFLGETDNNGLSVREKIEQIVKFRIPYYVGPLAGTRMSREQGRCWVVRKNEKIYPWNFTEIVNLEESAEKFITNMTAKCTYLVGEDVLPKESLLYSEFMVRNAINNITVDGERLPVDVLEKIFKQLFLAKTSKVTKKTLERFFRQENISFQNIGGIDDKINASMKSYNDFRRIFGEDYIQLHRDKIENIIRWITLFCDEKKMLVTKIKNTYPQIADDQIKAIKKLKYKDWGRLSATLLNSSAIAYEDKAFGELVTIISALRHTNKNFMELLSSYCSYDFIGKIKDFNGSRQSSNGKLTYKDVEELYVSPSVKRSIWQTLTILEEIKKIMGREPKRIFIEMARSKEESKRTDSRLKKLQDLYKKCREENIDFMPRKDEFNALKTQLSSKKEEDLRSDKLYLYYTQMGRCMYTGERIELASLYDDNLYDIDHIYPRSKTKDDSLSNRVLVKKEVNAAKTDIYPLDAAIRTKMHSFWKLLYDKGFIDERKYERLTRSTQLRDEELAGFISRQLVETRQSTKAVAAILKTAYQNSEVVYVKAGNVSDFRQQFKFVKCRDVNDLHHAKDAYLNIVVGNCYHVKFTANPLNFITKNQDNRRYSLKPEIFYKFSIKRDSEIAWIGGKDGTITTVTKTMHKNNILFTRQPVEGKGELFKQNPLKAKNGQLPLKAGLSVEKYGGYNSLSTAYFAVVKSEGKKGAVQLSIEAIPLVYAKQGEKAVQDYLTEVVQLCNPEIRIPKIKKYSLFKINGFPMHISGKTVKQIIFYAAGQLCLADDVADYLKKALKYEAYIALNEGLISDKNADDTQKQKAQQRLDYFKQKWGISSDANMKIYDILLAKSANNLYKNRPASQTKDLQEQRCVFEKLSLAEQIHIIGEVLNLFKCASASANLKLLGKGNSCGVIKTSNNITKCKQCILINQSPTGVFEQEVDLMKL

SEQ ID NO: 1391 - protein, 1379 aa, unidentified
  REGION 1..1379: note = Description of Unknown: uncultivated organism with predicted taxonomy: Phascolarctobacterium
  REGION 1..1379: note = MG18-39 effector
MQKLQNKDYYIGLDMGDASVGWAVTDANYNILKFNGKALWGIRLFDSANTAASTRVFRSGRRRIDRTTWRLKMLQELFAEEIAKVDPGFFMRLEDSRLHLDDKRDKAVYNLFVDKNYTDKDFYQQYPTMYHLRYALATQAGPFDVRLLYLAVQHIAKHRGHFLFDNLDASKVNDFNAVFSEVENYVRDEMGIEDWSCQNIDELAKVLCDVNLGRTTKQKAMQSLLPAQTKQQKAIIQLFSGGKAKLAELFVDEELDECEKKSVSFQDDDLNEFEPVLTAALGERYEGLLRFKAIYDWSLLAKILHLDTSKKDEDEQHLLSECKVQVYEDHKRDLAVLKSMLKGKPLYNKIFRQDGDISYEKYAKGIKGRNQLDFCKDLKKQLDGIAEYKKIMQEITSIDAAGTEEERLLFRIANGFAFPKQTTKDNGIIPIQVHLAELKCILDNAEGYLQFLGETDNNGLSVREKIEQIVKFRIPYYVGPLAGTRMSREQGRCWVVRKNEKIYPWNFTQVVNLEESAEKFITNMTAKCTYLVGEDVLPKESLLYSEFMVRNAINNITVDGERLPVDVLEKIFKQLFLAKTSKVTKKTLERFFRQENISFQNIGGIDDKINASMKSYNDFRRIFGEDYIQLHRDEIENIIRWITLFCDEKKMLVTKIKNTYPQIADDQIKAIKKLKYKDWGRLSATLLNSSAIAYEDKAFGELVTIISALRHTNKNFMELLSSYCSYDFIGKIKEFNGSRQSSNGKLTYKDVEELYVSPSVKRSIWQTLTILEEIKKIMGCEPKRIFIEMARSKEESKRTDSRLKKLQDLYKKCREENIDFMPRKDEFNTLKTQLSSKKEDDLRIDKLYLYYTQMGRCMYTGEKIELASLYDNNLYDIDHIYPRSKTKDDSLSNRVLVKKQVNAAKTDTYPLDAAIRTKMHSFWKLLYDKGFIDERKYQRLTRSTQLRDEELAGFISRQLVETRQSTKAVAAILKTAYQNSEVVYVKAGNVSDFRQQFKFVKCREVNDLHHAKDAYLNIVVGNCYHVKFTANPLNFITKNQDNRRYSLKPEIFYKFSIKRDSEIAWIGGKDGTITTVTKTMHKNNILFTRQPVEGKGELFKQQPLKAKSGQLPLKAGLSVEKYGGYDSLTTAYFALVKSEGKKGAVQLSIEGIPLVYAKQGEIAVQKYLTEVVQLCKPEIMLPKIKKYSLFKINGFPMHISGRQLKQLQFYVASQLCIDEYSIAYLKKAFKYENNLAVNDEIIADKNADEEKKQKARKRLDFYEKTWGIGKENNMRIYDILLAKSANNLYKKRPASQSATLEKRRENFKGLFVSKQIHVLKEILNLFKCLSATADLQLLGAGKNVGKVTWNTNISNVKQCILINQSPTGIFEQEVDLMKL

SEQ ID NO: 1392 - protein, 1379 aa, unidentified
  REGION 1..1379: note = Description of Unknown: uncultivated organism with predicted taxonomy: Phascolarctobacterium succinatutens
  REGION 1..1379: note = MG18-40 effector
MQKLKNCDYYIGLDMGDASVGWAVTDTNYNILKFNGKALWGIRLFDSANTAASTRVFRSGRRRIDRTTWRLKMLQELFAEEIAKVDPGFFMRLEDSRLHLDDKRDKAVYNLFVDKNYTDKDFYQQYPTMYHLRYALATQAGPFDVRLLYLAVQHIAKHRGHFLFDNLDASKVNDFNAVVSEVENYVRDEMGIEDWSCQNIDELAKVLCDVNLGRTTKQKAMQSLLPAQTKQQKAIIQLFSGGKAKLAELFADEELDECEKKSVSFQDDDLNEFEPVLTAALGERYEGLLRFKAIYDWSLLAKILHLDTSKKDKDEQPLLSECKVQVYEDHKRDLAVLKSMLKGKPLYNKIFRQDGDISYEKYAKGIKGRNQIDFCKDLKKQLEGIAEYKKIMQEITSIDDAKTEEERLLFRITNGFAFPKQTTKDNGIIPIQVHLAELKCILDNAEGYLPFLGETDNNGLSVREKIEQIVKFIIPYYVGPLAGTRMSREQGRCWVVRKNEKIYPWNFTEIVNLEESAEKFITNMTAKCTYLVGEDVLPKESLLYSEFMVRNAINNITVDGERLPVDVLEKIFKQLFLAKTSKVTKKTLERFFRQENISFQNIGGIDDKINASMKSYNDFRRIFGEDYIQLHRDEIENIIRWITLFCDEKKMLVTKIKNTYPQISDDEIKAIKKLKYKDWGRLSATLLNSSAIAYEDKAFGELVTIISALRHTNKNFMELLSSYCSYDFIGKIKEFNGSRQSSNGKLTYKDVEELYVSPSVKRSIWQTLTILEEIKKIMGCEPKRIFIEMARSKEESKRTDSRLKKLQDLYKKCREENIDFMPRKDEFNTLKTQLSSKKEDDLRSDKLYLYYTQMGRCMYTGEKIELASLYDNNLYDIDHIYPRSKTKDDSLSNRVLVKKQVNAAKTDTYPLDAAIRTKMHSFWKLLYDKGFIDERKYQRLTRSTQLRDEELAGFISRQLVETRQSTKAVAAILKTAYQNSEVVYVKAGNVSDFRQQFKFVKCREVNDLHHAKDAYLNIVVGNCYHVKFTANPLNFITKNQDNRRYSLKPEIFYKFSIKRDGEIAWLGGEDGTMATVARTMHKNNILFTRQPLEGKGELFKQNPLKAKSGQLPLKAGLSVEKYGGYDSLTTAYFALVKSEGKKGSVQLSIEGIPLVYAKQGEKAVKDYLTEVVQLCKPEIKIPKIKKYSLFKINGFPMHISGRQGKQLIFYVAGQLCINEDSIAYLKKVFKYESDLAVNEEILADENGDEVRKQKARNRLAFYDNTWGISLEANMQLYDMLLAKSANNLYKNRPASQTSTLKEQREQFSILPLSKQIHVIKEILKLFKCASATADFKLLEKGSTCGKIQVSTNITKCKQCILINQSPTGVFEQEVDLMKL

SEQ ID NO: 1393 - protein, 1291 aa, unidentified
  REGION 1..1291: note = Description of Unknown: uncultivated organism with predicted taxonomy: Phascolarctobacterium succinatutens
  REGION 1..1291: note = MG18-41 effector
MQKLQNKDYYIGLDMGDASVGWAVTDANYNILKFNGKALWGIRLFDSANTAASTRVFRSGRRRIDRTTWRLKMLQELFADEIAKVDPGFFMRLEDSRLHLDDKRENAVYNLFVDKNYTDKEFHQQYPTMYHLRYALATKKGPFDIRLLYLAVQHIAKHRGHFLFDNLDASTVNDFNAVFSEVENYVHDEMGLEDWSCQNKDALAKVLCDVNLGRTTKQKAMQSLLPAKSKQQKAILQLFSGGKAKLAELFDDEELDDCEKKSISFQDDDLDEIEPVLTAALGERYEGLLRFKAIYDWSLLAKILHLDTSKKDEDEQHLLSECKVQVYEDHKRDLAVLKSMLKGKPLYNKIFRQDGDISYEKYAKGIKGRNQIDFCKDLKKQLEGIAEYKKIMQEITSIDDAKTEEERVLFRITNGFAFPKQTTKDNGIIPIQVHLAELKCILDNAEGYLSFLGETDNNGLSVREKIEQIVKFRIPYYVGPLAGTRMSREQGRCWVVRKNEKIYPWNFTEIVNLEESAEKFITNMTAKCTYLVGEDVLPKESLLYSEFMVRNAINNITVDGERLPVDVLEKIFKQLFLAKTSKVTKKTLERFFRQENISFQNIGGIDDKINASMKSYNDFRRIFGEDYIQLHRDEIENIIRWITLFCDEKKMLVTKIKNTYPQISDDEIKAIKKLKYKDWGRLSATLLNSSTIAYEDKAFGELVTIISALRHTNKNFMELLSSYCYYDFIGKIKEFNGSRQSSNGKLTYKDVEELYVSPSVKRSIWQTLTILEEIKKIMGCEPKRIFIEMARSKEESKRTDSRLKKLQDLYKKCREENIDFMPRKDEFNALKIQLNSKKDYDLRSDKLYLYYTQMGRCMYTGERIELASLYDDNLYDIDHIYPRSKTKDDSLSNRVLVKKEVNAAKTDIYPLDAAIRTKMHSFWKLLYDKGLIDERKYERLTRSTQLRDEELAGFISRQLVETRQSTKAVAAILKTAYQNSEVVYVKAGNVSDFRQQFKFVKCRDVNDLHHAKDAYLNIVVGNCYHVKFTAHPLNFITKNQDNRRYSLKPEIFYKFSIKRDGEIAWLGGEDGTMATVARTMHKNNILFTRQAVEGKGELFDQQPLKAKGGQLPLKAGLSIEKYGGYNSLTTAYFAVVKSEGKKGAVQLSIEAIPLVYAKQGEIAVQKYLTEVVQLCKPEIMLPKIKKYSLFKINGFPMHISGRTGNRMLFYGAGQLCLDEADVDYLKKALKYENDIAENELVIADKNSDDIQKQQAQKNLDYYNQKWRIGRKVNMHIYDMLLAKSGNNLYKI

SEQ ID NO: 1394 - protein, 1379 aa, unidentified; identical to SEQ ID NO: 1355
  REGION 1..1379: note = Description of Unknown: uncultivated organism with predicted taxonomy: Phascolarctobacterium succinatutens
  REGION 1..1379: note = MG18-42 effector

SEQ ID NO: 1395 - protein, 1379 aa, unidentified; identical to SEQ ID NO: 1364
  REGION 1..1379: note = Description of Unknown: uncultivated organism with predicted taxonomy: Phascolarctobacterium succinatutens
  REGION 1..1379: note = MG18-43 effector

SEQ ID NO: 1396 - protein, 1379 aa, unidentified
  REGION 1..1379: note = Description of Unknown: uncultivated organism with predicted taxonomy: Phascolarctobacterium succinatutens
  REGION 1..1379: note = MG18-44 effector
MQKLKNCDYYIGLDMGDASVGWAVTDTNYNILKFNGKALWGIRLFDSANTAASTRVFRSGRRRIDRTTWRLKMLQELFAEEIAKVDPGFFMRLEDSRLHLDDKRDKAVYNLFVDKNYTDKDFYQQYPTMYHLRYALATQAGPFDVRLLYLAVQHIAKHRGHFLFDNLDASKVNDFNAVFSEVENYVRDEMGIEDWSCQNIDEFAKVLCDVNLGRTTKQKAMQSLLPAQTKQQKAIIQLFSGGKAKLAELFVDEELDECEKKSVSFQDDDLNEFEPVLTAALGERYEGLLRFKAIYDWSLLAKILHLDTSKKDEDEQHLLSECKVQVYEDHKRDLAALKSMLKGKPLYNKIFRQDGDISYEKYAKGIKGRNQIDFCKDLKKQLEGIAEYKKIMQEITSIDDAKTEEERLLFRITNGFAFPKQTTKDNGIIPIQVHLAELKCILDNAEGYLPFLGETDNNGLSVREKIEQIVKFRIPYYVGPLAGTRMSREQGRYWVVRKNEKIYPWNFTEIVNLEESAEKFITNMTAKCTYLVGEDVLPKESLLYSEFMVRNAINNITVDGERLPVDVLEKIFKQLFLAKTSKVTKKTLERLFRQENISFQNIGGIDDKINASMKSYNDFRRIFGEDYIQLHRDKIENIIRWITLFCDEKKMLVTKIKNTYPQIADDQIKAIKKLKYKDWGRLSATLLNSSAIAYEDKAFGELVTIISALRHTNKNFMELLSSYCYYDFIGKIKEFNGSRQSSNGKLTYKDVEELYVSPSVKRSVWQTLTILEEIKKIMGCEPKRIFIEMARSKEESKRTDSRLKKLQDLYKKCREENIDFMPRKDEFNVLKTQLSSKNEEDLRSDKLYLYYTQMGRCMYTGEIIELASLYDNNLYDIDHIYPRSKTKDDSLSNRVLVKKQVNAAKTDIYPLDAAIRTKMHSFWKLLYDKGFIDERKYERLTRSMQLRDEELAGFISRQLVETRQSTKAVAAILKTAYQNSEVVYVKAGNVSDFRQQFKFVKCREVNDLHHAKDAYLNIVVGNCYHVKFTANPLNFITKNQDNRRYSLKPEIFYKFSIKRDGEIAWLGGEDGTMATVARTMHKNNILFTRQAVEGKGELFDQQPLKAKGGQLPLKAGLSIEKYGGYNSLTTAYFAVVKSEGKKGAVQLSIEAIPLVYAKQGEIAVQKYLTEVVQLCKPEIMLPQIKKYSLFKINGFPMHISGRTGNRMLFYGAGQLCLDEADVDYLKKALKYENDIAENELVIADKNSDDIQKQQAQKNLDYYNQKWRIGRKVNMHIYDMLLAKSGNNLYKNRPASQTTDLQEQREFFEKLSLANQIHVIGEVLKLFKCASASANLKLLDKGNACGVIKVSNNILKFKQCVLINQSPTGVFEQEVDLMKL

SEQ ID NO: 1397 - protein, 1379 aa, unidentified
  REGION 1..1379: note = Description of Unknown: uncultivated organism with predicted taxonomy: Phascolarctobacterium succinatutens
  REGION 1..1379: note = MG18-45 effector
MQKLKNCDYYIGLDMGDASVGWAVTDTNYNILKFNGKALWGIRLFDSANTAASTRVFRSGRRRIDRTTWRLKMLQELFAEEIAKVDPGFFMRLEDSRLHLDDKRDKAVYNLFVDKNYTDKDFYQQYPTMYHLRYALATQAGPFDVRLLYLAVQHIAKHRGHFLFDNLDASKVNDFNAVFSEVENYVRDEMGIEDWSCQNIDELAKVLCDVNLGRTTKQKAMQSLLPAQTKQQKAIIQLFSGGKAKLAELFVDEELDECEKKSVSFQDDDLNEFEPVLTAALGERYEGLLRFKAIYDWSLLAKILHLDTSKKDEDEQHLLSECKVQVYEDHKRDLAVLKSMLKGKPLYNKIFRQDGDISYEKYAKGIKGRNQIDFCKDLKKQLEGIAEYKKIMQEITNIDDAKTEEERLLFRITNGFAFPKQTTKDNGIIPIQVHLAELKCILDNAEGYLPFLGETDNNGLSVREKIEQIVKFRIPYYVGPLAGTRMSREQGRCWVVRKHEKIYPWNFTEIVNLEESAEKFITNMTAKCTYLVGEDVLPKESLLYSEFMVRNAINNITVDGERLPVDVLEKIFKQLFLAKTSKVTKKTLERFFRQENISFQNIGGIDDKINASMKSYNDFRRIFGEDYIQLHRDEIENIIRWITLFCDEKKMLVTKIKNTYPQISDDEIKAIKKLKYKDWGRLSATLLNSSTIAYEDKAFGELVTIISALRHTNKNFMELLSSYCYYDFIGKIKEFNGSRQSSNGKLTYKDVEELYVSPSVKRSIWQTLTILEEIKKIMGCEPKRIFIEMARSKEESKRTDSRLKKLQDLYKKCREENIDFMPRKDEFNALKTQLSSKKEENLRSDKLYLYYTQMGRCMYTGERIELASLYDNNLYDIDHIYPRSKTKDDSLSNRVLVKKQVNAAKTDTYPLDAAIRTKMHSFWKLLYDKGFIDERKYERLTRSTQLRDEELAGFISRQLVETRQSTKAVAAILKTAYQNSEVVYVKAGNVSDFRQQFKFVKCREVNDLHHAKDAYLNIVVGNCYHVKFTANPLNFITKNQDNRRYSLKPEIFYKFSIKRDGEIAWLGGEDGTMATVARTMHKNNILFTRQAVEGKGELFDQQPLKAKGGQLPLKAGLSIEKYGGYNSLTTAYFAVVKSEGKKGAVQLSIEAIPLVYAKQGEIAVQKYLTEVVQLCKPEIMLPKIKKYSLFKINGFPMHISGRTGKQLIFYGAGQLCIADDVADYLKKALMYETNIAEKEKTLADQNADDIQKQKAQKGLDFYEQKWGISGAVNVQLYDMFIAKSANNLYKNRPVSQTITLKEKREHFVKLTVSKQIHIIKEILNLFKCASASADFKLIDKGTSCGTLKISNNINKLKECILINQSPTGVFEQEVDLMKL

SEQ ID NO: 1398 - protein, 1158 aa, unidentified
  REGION 1..1158: note = Description of Unknown: uncultivated organism with predicted taxonomy: Phascolarctobacterium
  REGION 1..1158: note = MG18-46 effector
MQKLKNCDYYIGLDMGDASVGWAVTDTNYNILKFNGKALWGIRLFDSANTAASTRVFRSGRRRIDRTTWRLKMLQELFAEEIAKVDPGFFMRLEDSRLHLDDKRDKAVYNLFVDKNYTDKDFYQQYPTMYHLRYALATQAGPFDVRLLYLAVQHIAKHRGHFLFDNLDASKVNDFNAVFSEVENYVRDEMGIEDWSCQNIDELAKVLCDVNLGRTTKQKAMQSLLPAQTKQQKAIIQLFSGGKAKLAELFVDEELDECEKKSVSFQDDDLNEFEPVLTAALGERYEGLLRFKAIYDWSLLAKILHLDTSKKDEDEQHLLSECKVQVYEDHKRDLAVLKSMLKGKPLYNKIFRQDGDISYEKYAKGIKGRNQIDFCKDLKKQLEGIAEYKKIMQEITSIDDAKTEEERVLFRITNGFAFPKQTTKDNGIIPIQVHLAELKCILDNAEGYLPFLGETDNNGLSVREKIEQIVKFRIPYYVGPLAGTRMSREQGRCWVVRKHEKIYPWNFTEIVNLEESAEKFITNMTAKCTYLVGEDVLPKESLLYSEFMVRNAINNITVDGERLPADVLEKIFKQLFLEKTSKVTKKTLERFFRQENISFQNIGGIDDKINASMKSYNDFKRIFGEDYIQLHREEIENIIRWITLFCDEKKMLVTKIKNTYTQISDDEIKAIKKLKYKDWGRLSATLLNSRAIGYEDKAVGEIITIISALRHTNKNLMELLSNYCPYDFIGEIKDFNGSRQSSNGKLTYKDVEELYVSPSVKRSIWQTLTILEEIKKIMGCESKRIFIEMARSKEESKRTDSRLKKLQDLYKKCKEENIDFMPRKDEFNALKTQLSSKKEDDLRSDKLYLYYTQMGRCMYTGERIELASLYDNNLYDIDHIYPRSKTKDDSLSNRVLVKKQVNAAKTDTYPLDAAIRTKMHSFWKLLYDKGFIDERKYERLTRSTQLRDEELAGFISRQLVETRQSTKAVAAILKTAYQNSEVVYVKAGNVSDFRQQFKFVKCREVNDLHHAKDAYLNIVVGNCYHVKFTANHLNFITKNQDNRRYSLKPEIFYKFSIKRDGEIAWLGGEDGTMATVARTMHKNNILFTRQAVEGKGELFDQQPLKAKGGQLPLKAGLSIEKYGGYNSLTTAYFAVVKSEGKKGAVQLSIEAIPLVYAK

SEQ ID NO: 1399 - protein, 1383 aa, unidentified; identical to SEQ ID NO: 1359
  REGION 1..1383: note = Description of Unknown: uncultivated organism with predicted taxonomy: Phascolarctobacterium
  REGION 1..1383: note = MG18-47 effector

SEQ ID NO: 1400 - protein, 1379 aa, unidentified
  REGION 1..1379: note = Description of Unknown: uncultivated organism with predicted taxonomy: Phascolarctobacterium succinatutens
  REGION 1..1379: note = MG18-48 effector
MQKLKNCDYYIGLDMGDASVGWAVTDTNYNILKFNGKALWGIRLFDSANTAASTRVFRSGRRRIDRTTWRLKMLQELFAEEIAKVDPGFFMRLEDSRLHLDDKRDKAVYNLFVDKNYTDKDFYQQYPTMYHLRYALATQAGPFDVRLLYLAVQHIAKHRGHFLFDNLDASKVNDFNAVFSEVENYVRDEMGIEDWSCQNIDELAKVLCDVNLGRTTKQKAMQSLLPAQTKQQKAIIQLFSGGKAKLAELFVDEELDECEKKSVSFQDDDLNEFEPVLTAALGERYEGLLRFKAIYDWSLLAKILHLDTSKKDEDEQHLLSECKVQVYEDHKRDLAVLKSMLKGKPLYNKIFRQDGDISYEKYAKGIKGRNQIDFCKDLKKQLEGIAEYKKIMQEITNIDDAKTEEERLLFRITNGFAFPKQTTKDNGIIPIQVHLAELKCILDNAEGYLPFLGETDNNGLSVREKIEQIVKFRIPYYVGPLAGTRMSREQGRCWVVRKHEKIYPWNFTEIVNLEESAEKFITNMTAKCTYLVGEDVLPKESLLYSEFMVRNAINNITVDGERLPVDVLEKIFKQLFLAKTSKVTKKTLERFFRQENISFQNIGGIDDKINASMKSYNDFRRIFGEDYIQLHRDEIENIIRWITLFCDEKKMLVTKIKNTYPQISDDEIKAIKKLKYKDWGRLSATLLNSSTIAYEDKAFGELVTIISALRHTNKNFMELLSSYCYYDFIGKIKEFNGSRQSSNGKLTYKDVEELYVSPSVKRSIWQTLTILEEIKKIMGCEPKRIFIEMARSKEESKRTDSRLKKLQDLYKKCREENIDFMPRKDEFNALKTQLSSKKEENLRSDKLYLYYTQMGRCMYTGERIELASLDDNNLYDIDHIYPRSKTKDDSLSNRVLVKKQVNAAKTDTYPLDAAIRTKMHSFWKLLYDKGFIDERKYERLTRSTQLRDEELAGFISRQLVETRQSTKAVAAILKTAYQNSEVVYVKAGNVSDFRQQFKFVKCREVNDLHHAKDAYLNIVVGNCYHVKFTANPLNFITKNQDNRRYSLKPEIFYKFSIKRDGEIAWLGGEDGTMATVARTMHKNNILFTRQAVEGKGELFDQQPLKAKGGQLPLKAGLSIEKYGGYNSLTTAYFAVVKSEGKKGAVQLSIEAIPLVYAKQGEIAVQKYLTEVVQLCKPEIMLPKIKKYSLFKINGFPMHISGRTGKQLIFYGAGQLCIADDVADYLKKALMYETNIAEKEKTLADQNADDIQKQKAQKGLDFYEQKWGISGAVNVQLYDMFIAKSANNLYKNRPVSQTITLKEKREHFVKLTVSKQIHIIKEILNLFKCASASADFKLIDKGTSCGTLKISNNINKLKECILINQSPTGVFEQEVDLMKL

SEQ ID NO: 1401 - protein, 1379 aa, unidentified
  REGION 1..1379: note = Description of Unknown: uncultivated organism with predicted taxonomy: Phascolarctobacterium succinatutens
  REGION 1..1379: note = MG18-49 effector
MQKLKNCDYYIGLDMGDASVGWAVTDTNYNILKFNGKALWGIRLFDSANTAASTRVFRSGRRRIDRTTWRLKMLQELFAEEIAKVDPGFFMRLEDSRLHLDDKRDKAVYNLFVDKNYTDKDFYQQYPTMYHLRYALATQAGPFDVRLLYLAVQHIAKHRGHFLFDNLDASKVNDFNAVFSEVENYVRDEMGIEDWSCQNIDELAKVLCDVNLGRTTKQKAMQSLLPAQTKQQKAIIQLFSGGKAKLAELFVDAELDECEKKSVSFQDDDLNEFEPVLTAALGERYEGLLRFKAIYDWSLLAKILHLDTSKKDEDEQHLLSECKVQVYEDHKRDLAVLKSMLKGKPLYNKIFRQDGDISYEKYAKGIKGRNQIDFCKDLKKQLEGIAEYKKIMQEITSIDDAKTEEERLLFRITNGFAFPKQTTKDNGIIPIQVHLAELKCILDNAEGYLPFLGETDNNGLSVREKIEQIVKFIIPYYVGPLAGTRMSREQGRCWVVRKNEKIYPWNFTEIVNLEESAEKFITNMTAKCTYLVGEDVLPKESLLYSEFMVRNAINNITVDGERLPVDVLEKIFKQLFLAKTSKVTKKTLERFFRQENISFQNIGGIDDKINASMKSYNDFRRIFGEDYIQLHRDEIENIIRWITLFCDEKKMLVTKIKNTYPQISDDEIKAIKKLKYKDWGRLSATLLNSSAIAYEDKAFGELVTIISALRHTNKNFMELLSSYCSYDFIGKIKEFNGSRQSSNGKLTYKDVEELYVSPSVKRSIWQTLTILEEIKKIMGCEPKRIFIEMARSKEESKRTDSRLKKLQDLYKKCREENIDFMPRKDEFNTLKTQLSSKKEDDLRSDKLYLYYTQMGRCMYTGEKIELASLYDNNLYDIDHIYPRSKTKDDSLSNRVLVKKQVNAAKTDTYPLDAAIRTKMHSFWKLLYDKGFIDERKYQRLTRSTQLRDEELAGFISRQLVETRQSTKAVAAILKTAYQNSEVVYVKAGNVSDFRQQFKFVKCREVNDLHHAKDAYLNIVVGNCYHVKFTANPLNFITKNQDNRRYSLKPEIFYKFSIKRDGEIAWLGGEDGTMATVARTMHKNNILFTRQAVEGKGELFDQQPLKAKGGQLPLKAGLSIEKYGGYNSLTTAYFAVVKSEGKKGAVQLSIEAIPLVYAKQGEIAVQKYLTEVVQLCKPEIMLPKIKKYSLFKINGFPMHISGRTGNRMLFYGAGQLCLDEADVDYLKKALKYENDIAENELVIADKNSDDIQKQQAQKNLDYYNQKWRIGRKVNMHIYDMLLAKSGNNLYKNRPASQTTDLQEHREFFEKLSLANQIHVIGEVLKLFKCASASANLKLLDKGNACGVIKVSNNILKFKQCVLINQSPTGVFEQEVDLMKL

SEQ ID NO: 1402 - protein, 1379 aa, unidentified; identical to SEQ ID NO: 1361
  REGION 1..1379: note = Description of Unknown: uncultivated organism with predicted taxonomy: Phascolarctobacterium succinatutens
  REGION 1..1379: note = MG18-50 effector

SEQ ID NO: 1403 - protein, 1275 aa, unidentified
  REGION 1..1275: note = Description of Unknown: uncultivated organism with predicted taxonomy: Phascolarctobacterium succinatutens
  REGION 1..1275: note = MG18-51 effector
MHKLKNCDYYIGLDMGDASVGWAVTDTNYNILKFNGKALWGIRLFDSANTAASTRVFRSGRRRIDRTTWRLKMLQELFAEEIAKVDPGFFMRLEDSRLHLDDKRDKAVYNLFVDKNYTDKDFYQQYPTMYHLRYALATQAGPFDVRLLYLAVQHIAKHRGHFLFDNLDASKVNDFNAVFSEVENYVRDEMGIEDWSSQNIDELAKVLCDVNLGRTTKQKAMQSLLPAQTKQQKAIIQLFSGGKAKLAELFVDEELDECEKKSVSFQDDDLNEFEPVLTAALGERYEGLLRFKAIYDWSLLAKILHLDTSKKDEDEQHLLSECKVQVYEDHKRDLAVLKSMLKGKPLYNKIFRQDGDISYEKYAKGIKGRNQIDFCKDLKKQLEGIAEYKKIMQEITNIDDAKTEEERLLFRITNGFAFPKQTTKDNGIIPIQVHLAELKCILDNAEGYLPFLGETDNNGLSVREKIEQIVKFRIPYYVGPLAGTRMSREQGRCWVVRKHEKIYPWNFTEIVNLEESAEKFITNMTAKCTYLVGEDVLPKESLLYSEFMVRNAINNITVDGERLPVDVLEKIFKQLFLAKTSKVTKKTLERFFRQENISFQNIGGIDDKINASMKSYNDFRRIFGEDYIQLHRDEIENIIRWITLFCDEKKMLVTKIKNTYPQIADDQIKAIKKLKYKDWGRLSATLLNSSAIAYEDKAFGELVTIISALRHTNKNFMELLSSYCSYDFIGKIKEFNGSRQSSNGKLTYKDVEELYVSPSVKRSIWQTLTILEEIKKIMGREPKRIFIEMARSKEESKRTDSRLKKLQDLYKKCREENIDFMPRKDEFNALKTQLSSKKEEDLRSDKLYLYYTQMGRCMYTGERIELASLDDNNLYDIDHIYPRSKTKDDSLSNRVLVKKEVNAAKTDIYPLDAVIRTKMHSFWKLLYDKGFIDERKYERLTRSTQLRDEELAGFISRQLVETRQSTKAVAAILKTAYKHSEIVYVKAGNVSDFRQKFEFVKCRDVNDLHHAKDAYLNIVVGNCYHVKFTANPLNFITKNQDNRRYSLKPEIFYKFSIKRDSEIAWIGGKDGTITTVTKTMHKNNILFTRQPVEGKGELFKQQPLKAKSGQLPLKAGLSVEKYGGYDSLTTAYFALVKSEGKKGAVQLSIEGIPLVYAKQGEIAVQKYLTEVVQLCKPEIILPKIKKYSLFKINGFPMHISGRQLKQLQFYVASQLCIDEYSIAYLKKAFKYENNLAVNDEIIADKNADEEKKQKARKRLDFYEKTWGIGKENNMR

SEQ ID NO: 1404 - protein, 1379 aa, unidentified
  REGION 1..1379: note = Description of Unknown: uncultivated organism with predicted taxonomy: Phascolarctobacterium succinatutens
  REGION 1..1379: note = MG18-52 effector
MQKLKNCDYYIGLDMGDASVGWAVTDTNYNILKFNGKALWGIRLFDSANTAASTRVFRSGRRRIDRTTWRLKMLQELFAEEIAKVDPGFFMRLEDSRLHLDDKRDKAVYNLFVDKNYTDKDFYQQYPTMYHLRYALATQAGPFDVRLLYLAVQHIAKHRGHFLFDNLDASKVNDFNAVFSEVENYVRDEMGIEDWSCQNIDELAKVLCDVNLGRTTKQKAMQSLLPAQTKQQKAIIQLFSGGKAKLAELFVDEELDECEKKSVSFQDDDLNEFEPVLTAALGERYEGLLRFKAIYDWSLLAKILHLDTSKKDEDEQHLLSECKVQVYEDHKRDLAVLKSMLKGKPLYNKIFRQDGDISYEKYAKGIKGRNQIDFCKDLKKQLEGIAEYKKIMQEITNIDDAKTEEERLLFRITNGFAFPKQTTKDNGIIPIQVHLAELKCILDNAEGYLPFLGETDNNGLSVREKIEQIVKFRIPYYVGPLAGTRMSREQGRCWVVRKHEKIYPWKFTEIVNLEESAEKFITNMTAKCTYLVGEDVLPKESLLYSEFMVRNAINNITVDGERLPVDVLEKIFKQLFLAKTSKVTKKTLERFFRQENISFQNIGGIDDKINASMKSYNDFRRIFGEDYIQLHRDEIENIIRWITLFCDEKKMLVTKIKNTYPQISDDEIKAIKKLKYKDWGRLSATLLNSSTIAYEDKAFGELVTIISALRHTNKNFMELLSSYCYYDFIGKIKEFNGSRQSSNGKLTYKDVEELYVSPSVKRSIWQTLTILEEIKKIMGCEPKRIFIEMARSKEESKRTDSRLKKLQDLYKKCREENIDFMPRKDEFNALKTQLSSKKEENLRSDKLYLYYTQMGRCMYTGERIELASLYDNNLYDIDHIYPRSKTKDDSLSNRVLVKKQVNAAKTDTYPLDAAIRTKMHSFWKLLYDKGFIDERKYERLTRSTQLRDEELAGFISRQLVETRQSTKAVAAILKTAYQNSEVVYVKAGNVSDFRQQFKFVKCREVNDLHHAKDAYLNIVVGNCYHVKFTANPLNFITKNQDNRRYSLKPEIFYKFSIKRDGEIAWLGGEDGTMATVARTMHKNNILFTRQAVEGKGELFDQQPLKAKGGQLPLKAGLSIEKYGGYNSLTTAYFAVVKSEGKKGAVQLSIEAIPLVYAKQGEIAVQKYLTEVVQLCKPEIMLPKIKKYSLFKINGFPMHISGRTGKQLIFYGAGQLCIADDVADYLKKALMYETNIAEKEKTLADQNADDIQKQKAQKGLDFYEQKWGISGAVNVQLYDMFIAKSANNLYKNRPVSQTITLKEKREHFVKLTVSKQIHIIKEILNLFKCASASADFKLIDKGTSCGTLKISNNINKLKECILINQSPTGVFEQEVDLMKL

SEQ ID NO: 1405 - protein, 1379 aa, unidentified
  REGION 1..1379: note = Description of Unknown: uncultivated organism with predicted taxonomy: Firmicutes
  REGION 1..1379: note = MG18-53 effector
MQKLQNKDYYIGLDMGDASVGWAVTDANYNILKVNGKALWGIRLFDSANTAASTRVFRSGRRRIDRTTWRLKMLQELFADEIAKVDPGFFMRLEDSRLHLDDKRDKAVYNLFVDKNYTDKDFYQQYPTMYHLRYALATQAGPFDVRLLYLAVQHIAKHRGHFLFDNLDASKVNDFNAVFSEVENYVRDEMGIEDWSCQNIDELAKVLCDVNLGRTTKQKAMQSLLPAQTKQQKAIIQLFSGGKAKLAELFVDEELDECEKKSVSFQDDDLNEFEPVLTAALGERYEGLLRFKAIYDWSLLAKILHLDTSKKDEDEQHLLSECKVQVYEDHKRDLAVLKSMLKGKPLYNKIFRQDGDISYEKYAKGIKGRNQIDFCKDLKKQLEGIAEYKKIMQEITSIDDAKTEEERLLFRITNGFAFPKQTTKDNGIIPIQVHLAELKCILDNAEGYLPFLGETDNNGLSVREKIEQIVKFRIPYYVGPLAGTRMSREQGRCWVVRKNEKIYPWNFTEIVNLEESAEKFITNMTAKCTYLVGEDVLPKESLLYSEFMVRNAINNITVDGERLPVDVLEKIFKQLFLAKTSKVTKKTLERFFRQENISFQNIGGIDDKINASMKSYNDFRRIFGEDYIQLHRDEIENIIRWITLFCDEKKMLVTKIKNTYPQIADDQIKAIKKLKYKDWGRLSATLLNSSAIAYEDKAFGELVTIISALRHTNKNFMELLSSYCSYDFIGKIKVFNGSRQSSNGKLTYKDVEELYVSPSVKRSIWQTLTILEEIKKIMGCEPKRIFIEMARSKEESKRTDSRLKKLQDLYKKCREENIDFMPRKDEFNALKTQLSSKKEEDLRSDKLYLYYTQMGRCMYTGERIELASLYDNNLYDIDHIYPRSKTKDDSLSNRVLVKKQVNAAKTDIYPLDAAIRTKMHSFWKLLYDKGFIDERKYERLTRNTQLGDEELAGFISRQLVETRQSTKAVAAILKTAYQNSEVVYVKAGNVSDFRQQFKFVKCRDVNDLHHAKDAYLNIVVGNCYHVKFTANPLNFITKNQDNRRYSLKPEIFYKFSIKRDSEIAWIGGKDGTITTVTKTMHKNNILFTRQPVEGKGELFKQNPLKAKNGQLPLKAGLSVEKYGGYNSLSTAYFAVVKSEGKKGAVQLSIEAIPLVYAKQGEEAVQDYLTEVVQLCNPEIRIPKIKKYSLLKINGFPMHISGKTVKQIIFYAAGQLCLADDVADYLKKALKYEVYIALNEGLISDKNADDTQKQKAQQRLDYFKQKWGISSDANMKIYDILLAKSANNLYKNRPASQTKDLQEQRCVFEKLSLAEQIHIIGEVLNLFKCASASANLKLLGKGNSCGVIKTSNNITKCKQCILINQSPTGVFEQEVDLMKL

SEQ ID NO: 1406 - protein, 1379 aa, unidentified
  REGION 1..1379: note = Description of Unknown: uncultivated organism with predicted taxonomy: Phascolarctobacterium
  REGION 1..1379: note = MG18-54 effector
MQKLKNCDYYIGLDMGDASVGWAVTDTNYNILKFNGKALWGIRLFDSANTAASTRVFRSGRRRIDRTTWRLKMLQELFAEEIAKVDPGFFMRLEDSRLQLDDKREKAVYNLFVDKNYTDKEFYQQYPTMYHLRYALATQKGHFDVRLLYLAVQHIAKHRGHFLFDNLDASKVNDFNAVFSEVENYVRDEMGIEDWSCQNVDELAKVLCDVNLGRTIKQKAMQSLLPAQTKQQKAIIQLFSGGKAKLAELFLDEELDECEKKSVSFQDDDLDELEPVLTAALGERYEGLLRFKAIYDWNLLAKILHLDAEKKDDSEQHLLSECKVQVYEEHKRDLTVLKSMLKGKPLYNKIFRQDGDISYEKYAKGIKGRNQIDFCKDLKKQLEGIAEYKKIMQEITSIDDAKTEEERLLFRIANGFAFPKQTTKDNGIIPIQVHLAELKCILDNAESYLPFLGETDNNGLSVREKIEQIVKFRIPYYVGPLAGTRMSREQGRCWVVRKNEKIYPWNFTEIVNLEESAEKFITNMTAKCTYLVGEDVLPKESLLYSEFMVRNAINNITVDGERLPVDVLEKIFKQLFLAKTSKVTKKTLERFFRQENISFQNIGGIDNKINASMKSYNDFRRIFGEDYIQLHRDEIENIIRWITLFCDEKKMLATKIRNTYPQISDDKIKAIKKLKYKDWGRLSATLLNSSAIAYEDKGFGELVTIISALRHTNKNFMELLSSYCSYDFIGKIKEYNSGRQNSNSKLTYKDVEELYVSPSVKRSIWQTLTILEEIKKITGHEPKRIFIEMARSKEESKRTDSRLKKLQDLYKQCKEENIDFMPHTDELNAFKIQLSSKKEDDLRSDKLYLYYTQMGRCMYTGERIEIASLYDDNLYDIDHIYPRSKTKDDSLSNRVLVKKEVNAAKTDIYPLDAAIRTKMHTFWKLLYDKGFIDERKYERLIRSKQLRDEELAGFISRQLVETRQSTKAVATILKTAYKHSEIVYVKAGNVSDFRQKFEFVKCRDVNDLHHAKNAYLNIVVGNCYYVKFTAKPLDFIKKNQDNRSYSLKPEIFYKFSIKRDSEIAWVGGKDGTITTVTKTIHKNNILFTRQPVEGKGELFKQNPLKANSGQLPLKAGLSVEKYGGYDSLTTAYFALVKSEGKKGAVQLSIEAIPLVYAKQGENAVQKYLTDVVQLCKPEIKIPKIKKYSLFKINGFPMHIYGRTGNRLVFYGAGQLCISENETVYLKRALKYRDSIEKNENIITAKDTDDKQKEKAQKRLDFYKQTWGISREANMRIYDILLAKSGNNLYKNRPASQTKDLQEQRGTFEKLPLSKQIYVIGEFLNLFKCASTSADFKLLGKGNSCGVIKTTNNVTKCKQCVLINQSPTGVFEQEVDLMKL

SEQ ID NO: 1407 - protein, 1379 aa, unidentified
  REGION 1..1379: note = Description of Unknown: uncultivated organism with predicted taxonomy: Phascolarctobacterium
  REGION 1..1379: note = MG18-55 effector
MQKLQNKDYYIGLDMGDASVGWAVTDANYNILKFNGKALWGIRLFDSANTAASTRVFRSGRRRIDRTTWRLKMLQELFAEEIAKVDPGFFMRLEDSRLHLDDKRDKAVYNLFVDKNYTDKDFYQQYPTMYHLRYALATQAGPFDVRLLYLAVQHIAKHRGHFLFDNLDASKVNDFNAVFSEVENYVRDEMGIEDWSCQNIDELAKVLCDVNLGRTTKQKAMQSLLPAQTKQQKAIIQLFSGGKAKLAELFVDEELDECEKKSVSFQDDDLNEFEPVLTAALGERYEGLLRFKAIYDWSLLAKILHLDTSKKDEDEQHLLSECKVQVYEDHKRDLAVLKSMLKGKPLYNKIFRQDGDISYEKYAKGIKGRNQLDFCKDLKKQLDGIAEYKKIMQEITSIDAAGTEEERLLFRIANGFAFPKQTTKDNGIIPIQVHLAELKCILDNAEGYLQFLGETDNNGLSVREKIEQIVKFRIPYYVGPLAGTRMSREQGRCWVVRKNEKIYPWNFTQVVNLEESAEKFITNMTAKCTYLVGEDVLPKESLLYSEFMVRNAINNITVDGERLPVDVLEKIFKQLFLAKTSKVTKKTLERFFRQENISFQNIGGIDDKINASMKSYNDFRRIFGEDYIQLHRDEIENIIRWITLFCDEKMMLVTKIKNTYPQIADDQIKAIKKLKYKDWGRLSATLLNSSAIAYEDKAFGELVTIISALRHTNKNFMELLSSYCSYDFIGKIKEFNGSRQSSNGKLTYKDVEELYVSPSVKRSIWQTLTILEEIKKIMGCEPKRIFIEMARSKEESKRTDSRLKKLQDLYKKCREENIDFMPRKDEFNTLKTQLSSKKEDDLRIDKLYLYYTQMGRCMYTGEKIELASLYDNNLYDIDHIYPRSKTKDDSLSNRVLVKKQVNAAKTDTYPLDAAIRTKMHSFWKLLYDKGFIDERKYQRLTRSTQLRDEELAGFISRQLVETRQSTKAVAAILKTAYQNSEVVYVKAGNVSDFRQQFKFVKCREVNDLHHAKDAYLNIVVGNCYHVKFTANPLNFITKNQDNRRYSLKPEIFYKFSIKRDGEIAWLGGEDGTMATVARTMHKNNILFTRQAVEGKGELFDQQPLKAKGGQLPLKAGLSIEKYGGYNSLTTAYFAVVKSEGKKGAVQLSIEAIPLVYAKQGEIAVQKYLTEVVQLCKPEIMLPKIKKYSLFKINGFPMHISGRQLKQLQFYVASQLCIDEYSIAYLKKAFKYENNLAVNDEIIADKNADEEKKQKARKRLDFYEKTWGIGKENNMRIYDILLAKSANNLYKKRPASQSATLEKRRENFKGLFVSKQIHVLKEILNLFKCLSATADLQLLGAGKNVGKVTWNTNISSVKQCILINQSPTGIFEQEVDLMKL

SEQ ID NO: 1408 - protein, 1379 aa, unidentified
  REGION 1..1379: note = Description of Unknown: uncultivated organism with predicted taxonomy: Phascolarctobacterium succinatutens
  REGION 1..1379: note = MG18-56 effector
MQKLQNKDYYIGLDMGDASVGWAVTDANYNILKFNGKALWGIRLFDSANTAASTRVFRSGRRRIDRTTWRLKMLQELFAEEIAKVDPGFFMRLEDSRLHLDDKRDKAVYNLFVDKNYTDKDFYQQYPTMYHLRYALATQAGPFDVRLLYLAVQHIAKHRGHFLFDNLDASKVNDFNAVFSEVENYVRDEMGIEDWSCQNIDELAKVLCDVNLGRTTKQKAMQSLLPAQTKQQKAIIQLFSGGKAKLAELFVDEELDECEKKSVSFQDDDLNEFEPVLTAALGERYEGLLRFKAIYDWSLLAKILHLDTSKKDEDEQHLLSECKVQVYEDHKRDLAVLKSMLKGKPLYNKIFRQDGDISYEKYAKGIKGRNQLDFCKDLKKQLDGIAEYKKIMQEITSIDAAGTEEERLLFRIANGFAFPKQTTKDNGIIPIQVHLAELKCILDNAEGYLQFLGETDNNGLSVREKIEQIVKFRIPYYVGPLAGTRMSREQGRCWVVRKNEKIYPWNFTQVVNLEESAEKFITNMTAKCTYLVGEDVLPKESLLYSEFMVRNAINNITVDGERLPVDVLEKIFKQLFLAKTSKVTKKTLERFFRQENISFQNIGGIDDKINASMKSYNDFRRIFGEDYIQLHRDEIENIIRWITLFCDEKKMLVTKIKNTYPQIADDQIKAIKKLKYKDWGRLSATLLNSSAIAYEDKAFGELVTIISALRHTNKNFMELLSSYCSYDFIGKIKEFNGSRQSSNGKLTYKDVEELYVSPSVKRSIWQTLTILEEIKKIMGCEPKRIFIEMARSKEESKRTDSRLKKLQDLYKKCREENIDFMPRKDEFNTLKTQLNSKKEDDLRSDKLYLYYTQMGRCMYTGEKIELASLYDNNLYDIDHIYPRSKTKDDSLSNRVLVKKQVNAAKTDTYPLDAAIRTKMHSFWKLLYDKGFIDERKYQRLTRSTQLRDEELAGFISRQLVETRQSTKAVATILKTAYQNSEVVYVKAGNVSDFRQQFKFVKCREVNDLHHAKDAYLNIVVGNCYHVKFTANPLNFITKNQDNRRYSLKPEIFYKFSIKRDGEIAWLGGEDGTMATVARTMHKNNILFTRQAVEGKGELFDQQPLKAKGGQLPLKAGLSIEKYGGYNSLTTAYFAVVKSEGKKGAVQLSIEAIPLVYAKQGEIAVQKYLTEVVQLCKPEIMLPKIKKYSLFKINGFPMHISGRTGNRMLFYGAGQLCLDEADVDYLKKALKYENDIAENELVIADKNSDDIQKQQAQKNLDYYNQKWRIGRKVNMHIYDMLLAKSGNNLYKNRPASQTTDLQEQREFFEKLSLANQIHVIGEVLKLFKCASASANLKLLDKGNACGVIKVSNNILKFKQCVLINQSPTGVFEQEVDLMKL

SEQ ID NO: 1409 - protein, 1379 aa, unidentified
  REGION 1..1379: note = Description of Unknown: uncultivated organism with predicted taxonomy: Phascolarctobacterium succinatutens
  REGION 1..1379: note = MG18-57 effector
MQKLKNCDYYIGLDMGDASVGWAVTDTNYNILKFNGKALWGIRLFDSANTAASTRVFRSGRRRIDRTTWRLKMLQELFAEEIAKVDPGFFMRLEDSRLHLDDKRDKAVYNLFVDKNYTDKDFYQQYPTMYHLRYALATQTGPIDVRLLYLAVQHIAKHRGHFLFDNLDASKVNDFNAVFSEVENYVRDEMGIEDWSCQNIDELAKVLCDVNLGRTTKQKAMQSLLPAQTKQQKAIIQLFSGGKAKLAELFVDEELDECEKKSVSFQDDDLNEFEPVLTAALGERYEGLLRFKAIYDWSLLAKILHLDTSKKDEDEQHLLSECKVQVYEEHKRDLAVLKSMLKGKPLYNKIFRQDGDISYEKYAKGIKGRNQIDFCKDLKKQLEGIAEYKKIMQEITSIDDAKTEEERLLFRITNGFAFPKQTTKDNGIIPIQVHLAELKCILDNAEGYLPFLGETDNNGLSVREKIEQIVKFRIPYYVGPLAGTRMSREQGRCWVVRKNEKIYPWNFTEIVNLEDSAEKFITNMTAKCTYLVGEDVLPKESLLYSEFMVRNAINNITVDGERLPVDVLEKIFKQLFLAKTSKVTKKTLERFFRQENISFQNIGGIDDKINASMKSYNDFRRIFGEDYIQLHRDEIENIIRWITLFCDEKKMLVTKIKNTYPQISDDEIKAIKKLKYKDWGRLSATLLNSSTIAYEDKAFGELVTIISALRHTNKNFMELLSSYCSYDFIGKIKEFNGRRQSSNGKLTYKDVEELYVSPSVKRSIWQTLTILEEIKKIMGCEPKRIFIEMARSKEESKRTDSRLKKLHDLYKKCREENIDFMPRKDEFNALKTQLSSKKEENLRSDKLYLYYTQMGRCMYTGERIELASLHDNNLYDIDHIYPRSKTKDDSLSNRVLVKKQINAAKTDTYPLDAAIRTKMHSFWKLLYDKGFIDERKYERLTRSTQLRDEELAGFISRQLVETRQSTKAVAAILKTAYQNSEVVYVKAGNVSDFRQQFKFVKCREVNDLHHAKDAYLNIVVGNCYHVKFTANPLNFITKNQDNRRYSLKPEIFYKFSIKRDGEIAWLGGEDGTMATVARTMHKNNILFTRQAVEGKGELFDQQPLKAKGGQLPLKAGLSIEKYGGYNSLTTAYFAVVKSEGKKGAVQLSIEAIPLVYAKQGEIAVQKYLTEVVQLCKPEIMLPKIKKYSLFKINGFPMHISGRTGNRMLFYGAGQLCLDEADVDYLKKALKYENDIAENELVIADKNSDDIQKQQAQKNLDYYNQKWRIGRKVNMHIYDMLLAKSGNNLYKNRPASQTTDLQEQREFFEKLSLANQIHVIGEVLKLFKCASASANLKLLDKGNACGVIKVSNNILKFKQCVLINQSPTGVFEQEVDLMKL

SEQ ID NO: 1410 - protein, 1379 aa, unidentified
  REGION 1..1379: note = Description of Unknown: uncultivated organism with predicted taxonomy: Phascolarctobacterium succinatutens
  REGION 1..1379: note = MG18-58 effector
MQKLKNCDYYIGLDMGDASVGWAVTDTNYNILKFNGKALWGIRLFDSANTAASTRVFRSGRRRIDRTTWRLKMLQELFAEEIAKVDPGFFMRLEDSRLHLDDKRDKAVYNLFVDKNYTDKDFYQQYPTMYHLRYALAMQAGPFDVRLLYLAVQHIAKHRGHFFFDNLDASKVNDFNAVFSEVENYVRDEMGIEDWSCQNIDELAKVLCDVNLGRTTKQKAMQSLLPAQTKQQKAIIQLFSGGKAKLAELFVDEELDECEKKSVSFQDDDLNEFEPVLTAALGERYEGLLRFKAIYDWSLLAKILHLDTSKKDEDEQHLLSECKVQVYEDHKRDLAVLKSMLKGKPLYNKIFRQDGDISYEKYAKGIKGRNQIDFCKDLKKQLEGIAEYKKIMQEITSIDDAKTEEERLLFRITNGFAFPKQTTKDNGIIPIQVHLAELKCILDNAEGYLPFLGETDNNGLSVREKIEQIVKFRIPYYVGPLAGTRMSREQGRCWVVRKNEKIYPWNFTEIVNLEESAEKFITNMTAKCTYLVGEDVLPKESLLYSEFMVRNAINNITVDGERLPVDVLEKIFKQLFLAKTSKVTKKTLERFFRQENISFQNIGGIDDKINASMKSYNDFRRIFGEDYIQLHRDEIENIIRWITLFCDEKKMLVTKIKNTYPQISDDEIKAIKKLKYKDWGRLSATLLNSSTIAYEDKAFGELVTIISALRHTNKNFMELLSSYCSYDFIGKIKEFNGSRQSSNGKLTYKDVEELYVSPSVKRSIWQTLTILEEIKKIMGCEPKRIFIEMARSKEESKRTDSRLKKLQDLYKKCREENIDFMPRKDEFNALKTQLSSKKEEDLRSDKLYLYYTQMGRCMYTGERIELASLHDNNLYDIDHIYPRSKTKDDSLSNRVLVKKQVNAAKTDIYPLDAAIRTKMHSFWKLLYDKGFIDERKYERLTRSTQLRDEELAGFISRQLVETRQSTKAVAAILKTAYQNSEVVYVKAGNVSDFRQQFKFVKCREVNDLHHAKDAYLNIVVGNCHHVKFTANPLNFITKNQDNRRYSLKPEIFYKFSIKRDGEIAWLGGEDGTMATVARTMHKNNILFTRQAVEGKGELFDQQPLKAKGGQLPLKAGLSIEKYGGYNSLTTAYFAVVKSEGKKGAVQLSIEAIPLVYAKQGEIAVQKYLTEVVQLCKPEIMLPKIKKYSLFKINGFPMHISGRTGNRMLFYGAGQLCLDEADVDYLKKALKYENDIAENELVIADKNSDDIQKQQAQKNLDYYNQKWRIGRKVNMHIYDMLLAKSGNNLYKNRPASQTTDLQEQREFFEKLSLANQIHVIGEVLKLFKCASASANLKLLDKGNACGVIKVSNNILKFKQCVLINQSPTGVFEQEVDLMKL

SEQ ID NO: 1411 - protein, 1379 aa, unidentified; identical to SEQ ID NO: 1405
  REGION 1..1379: note = Description of Unknown: uncultivated organism with predicted taxonomy: Phascolarctobacterium succinatutens
  REGION 1..1379: note = MG18-59 effector

SEQ ID NO: 1412 - protein, 1345 aa, unidentified
  REGION 1..1345: note = Description of Unknown: uncultivated organism
  REGION 1..1345: note = MG18-60 effector
NGKALWGIRLFDSANTAASTRVFRSGRRRIDRTTWRLKMLQELFAEEIAKVDPGFFMRLEDSRLHLDDKRDKAVYNLFVDKNYTDKDFYQQYPTMYHLRYALATQAGPFDVRLLYLAVQHIAKHRGHFLFDNLDASKVNDFNAVFSEVENYVRDEMGIEDWSCQNIDELAKVLCDVNLGRTTKQKAMQSLLPAQTKQQKAIIQLFSGGKAKLAELFVDAELDECEKKSVSFQDDDLNEFEPVLTAALGERYEGLLRFKAIYDWSLLAKILHLDTSKKDEDEQHLLSECKVQVYEDHKRDLAVLKSMLKGKPLYNKIFRQDGDISYEKYAKGIKGRNQIDFCKDLKKQLEGIAEYKKIMQEITSIDDAKTEEERLLFRITNGFAFPKQTTKDNGIIPIQVHLAELKCILDNAEGYLPFLGETDNNGLSVREKIEQIVKFIIPYYVGPLAGTRMSREQGRCWVVRKNEKIYPWNFTEIVNLEESAEKFITNMTAKCTYLVGEDVLPKESLLYSEFMVRNAINNITVDGERLPVDVLEKIFKQLFLAKTSKVTKKTLERFFRQENISFQNIGGIDDKINASMKSYNDFRRIFGEDYIQLHRDEIENIIRWITLFCDEKKMLVTKIKNTYPQISDDEIKAIKKLKYKDWGRLSATLLNSSAIAYEDKAFGELVTIISALRHTNKNFMELLSSYCSYDFIGKIKEFNGSRQSSNGKLTYKDVEELYVSPSVKRSIWQTLTILEEIKKIMGCEPKRIFIEMARSKEESKRTDSRLKKLQDLYKKCREENIDFMPRKDEFNTLKTQLSSKKEDDLRSDKLYLYYTQMGRCMYTGEKIELASLYDNNLYDIDHIYPRSKTKDDSLSNRVLVKKQVNAAKTDTYPLDAAIRTKMHSFWKLLYDKGFIDERKYQRLTRSTQLRDEELAGFISRQLVETRQSTKAVAAILKTAYQNSEVVYVKAGNVSDFRQQFKFVKCREVNDLHHAKDAYLNIVVGNCYHVKFTANPLNFITKNQDNRRYSLKPEIFYKFSIKRDGEIAWLGGEDGTMATVARTMHKNNILFTRQAVEGKGELFDQQPLKAKGGQLPLKAGLSIEKYGGYNSLTTAYFAVVKSEGKKGAVQLSIEAIPLVYAKQGEIAVQKYLTEVVQLCKPEIMLPKIKKYSLFKINGFPMHISGRTGNRMLFYGAGQLCLDEADVDYLKKALKYENDIAENELVIADKNSDDIQKQQAQKNLDYYNQKWRIGRKVNMHIYDMLLAKSGNNLYKNRPASQTTDLQEQREFFEKLSLANQIHVIGEVLKLFKCASASANLKLLDKGNACGVIKVSNNILKFKQCVLINQSPTGVFEQEVDLMKL

SEQ ID NO: 1413 - protein, 1259 aa, unidentified
  REGION 1..1259: note = Description of Unknown: uncultivated organism with predicted taxonomy: Phascolarctobacterium succinatutens
  REGION 1..1259: note = MG18-61 effector
MLQELFAEEIAKVDPGFFMPLEDSRLHLDDKRDKAVYNLFVDKNYTDKDFYQQYPTMYHLRYALATQAGPFDVRLLYLAVQHIAKHRGHFLFDNLDASKVNDFNAVFSEVENYVRDEMGIEDWSCQNIDELAKVLCDVNLGRTTKQKAMQSLLPAQTKQQKAIIQLFSGGKAKLAELFVDEELDECEKKSVSFQDDDLNEFEPVLTAALGERYEGLLRFKAIYDWSLLAKILHLDTSKKDEDEQHLLSECKVQVYEDHKRDLAVLKSMLKGKPLYNKIFRQDGDISYEKYAKGIKGRNQIDFCKDLKKQLEGIAEYKKIMQEITNIDDAKTEEERLLFRITNGFAFPKQTTKDNGIIPIQVHLAELKCILDNAEGYLPFLGETDNNGLSVREKIEQIVKFRIPYYVGPLAGTRMSREQGRCWVVRKHEKIYPWNFTEIVNLEESAEKFITNMTAKCTYLVGEDVLPKESLLYSEFMVRNAINNITVDGERLPVDVLEKIFKQLFLAKTSKVTKKTLERFFRQENISFQNIGGIDDKINASMKSYNDFRRIFGEDYIQLHRDEIENIIRWITLFCDEKKMLVTKIKNTYPQISDDEIKAIKKLKYKDWGRLSATLLNSSTIAYEDKAFGELVTIISALRHTNKNFMELLSSYCYYDFIGKIKEFNGSRQSSNGKLTYKDVEELYVSPSVKRSIWQTLTILEKIKKIMGCEPKRIFIEMARSKEESKRTDSRLKKLQDLYKKCREENIDFMPRKDEFNALKTQLSSKKEENLRSDKLYLYYTQMGRCMYTGERIELASLYDNNLYDIDHIYPRSKTKDDSLSNRVLVKKQVNAAKTDTYPLDAAIRTKMHSFWKLLYDKGFIDERKYERLTRSTQLRDEELAGFISRQLVETRQSTKAVAAILKTAYQNSEVVYVKAGNVSDFRQQFKFVKCRELNDLHHAKDAYLNIVVGNCYHVKFTANPLNFITKNQDNRRYSLKPEIFYKFSIKRDGEIAWLGGEDGTMATVARTMHKNNILFTRQAVEGKGELFDQQPLKAKGGQLPLKAGLSIEKYGGYNSLTTAYFAVVKSEGKKGAVQLSIEAIPLVYAKQGEIAVQKYLTEVVQLCKPEIMLPKIKKYSLFKINGFPMHISGRTGNRMLFYGAGQLCLDEADVDYLKKALKYENDIAENELVIADKNSDDIQKQQAQKNLDYYNQKWRIGRKVNMHIYDMLLAKSGNNLYKNRPASQTTDLQEQREFFEKLSLANQIHVIGEVLKLFKCASA

SEQ ID NO: 1414 - protein, 1379 aa, unidentified
  REGION 1..1379: note = Description of Unknown: uncultivated organism with predicted taxonomy: Phascolarctobacterium succinatutens
  REGION 1..1379: note = MG18-62 effector
MQKSKNCDYYIGLDMGDASVGWAVTDTNYNILKFNGKALWGIRLFDSANTAASTRVFRSGRRRIDRTTWRLKMLQELFAEEIAKVDPGFFMRLEDSRLHLDDKRDKAVYNLFVDKNYTDKDFYQQYPTMYHLRYALATQAVPFDVRLLYLAVQHIAKHRGHFLFDNLDASKVNDFNAVFSEVENYVRDEMGIEDWSCQNIDELAKVLCDVNLGRTTKQKAMQSLLPAQTKQQKAIIQLFSGGKAKLAELFVDEELDECEKNSVSFQDDDLNEFEPVLTAALGERYEGLLRFKAIYDWSLLAKILHLDTSKKDEDEQHLLSECKVQVYEDHKRDLAVLKSMLKGKPLYNKIFRQDGDISYEKYAKGIKGRNQIDFCKDLKKQLEGIAEYKKIMQEITNIDDAKTEEERLLFRITNGFAFPKQTTKDNGIIPIQVHLAELKCILDNAEGYLPFLGETDNNGLSVREKIEQIVKFRIPYYVGPLAGTRMSREQGRCWVVRKHEKIYPWNFTEIVNLEESAEKFITNMTAKCTYLVGEDVLPKESLLYSEFMVRNAINNITVDGERLPVDVLEKIFKQLFLAKTSKVTKKTLERFFRQENISFQNIGGIDDKINASMKSYNDFRRIFGEDYIQLHRDEIENIIRWITLFCDEKKMLVTKIKNTYPQISDDEIKAIKKLKYKDWGRLSATLLNSSTIAYEDKAFGELVTIISALRHTNKNFMELLSSYCYYDFIGKIKEFNGSRQSSNGKLTYKDVEELYVSPSVKRSIWQTLTILEEIKKIMGCEPKRIFIEMARSKEESKRTDSRLKKLQDLYKKCREENIDFMPRKDEFNALKTQLSSKKEENLRSDKLYLYYTQMGRCMYTGERIELASLYDNNLYDIDHIYPRSKTKDDSLSNRVLVKKQVNAAKTDTYPLDAAIRIKMHSFWKLLYDKGFIDERKYERLTRSTQLRDEELAGFISRQLVETRQSTKAVATILKTAYKHSEVVYVKAGNVSDFRQQFKFVKCREVNDLHHAKDAYLNIVVGNCYYVKFTANPLNFIKKNQDSRSYSLKPEIFYKFNIKRDDDIAWLGGEDGTMATVARTMHKNNILFTRQPLEGKGELFKQNPLKAKSGQLPLKAGLSVEKYGGYDSLTTAYFALVKSEGKKGSVQLSIEGIPLVYAKQGEKAVQDYLTEVVQLCKPEIKIPKIKKYSLFKINGFPMHISGRTGTQLVFYGAGQLCIADDVADYLKKALKYETDIAEKEKTLADQNADDIQKQKAQKGLDFYEQKWGISGAVNVQLYDMFIAKSANNLYKNRPASQTITLKEKREHFVKLTLSKQIHIIKEILNLFKCASASADFKLIDKGTSCGTLKISNNITKLKECILINQSPTGVFEQEVDLMKL

SEQ ID NO: 1415 - protein, 1379 aa, unidentified
  REGION 1..1379: note = Description of Unknown: uncultivated organism
  REGION 1..1379: note = MG18-63 effector
MQKLKNCDYYIGLDMGDASVGWAVTDTNYNILKFNGKALWGIRLFDSANTAASTRVFRSGRRRIDRTTWRLKMLQELFAEEIAKVDPGFFMRLEDSRLQLDDKREKAVYNLFVDKSYTDKEFYQQYPTMYHLRYALATQKGPFDVRLLYLAVQHIAKHRGHFLFDNLDASKVNDFNAVFSEVENYVRDEMGIEDWSCQNIDELAKVLCDVNLGRTTKQKAMQSLLPAQTKQQKAIIQLFSGGKAKLAELFVDEELDECEKKSVSFQDDDLNEFEPVLTAALGERYEGLLRFKAIYDWSLLAKILHLDTSKKDEDEQHLLSECKVQVYEDHKRDLAVLKSMLKGKPLCNKIFRQDGDISYEKYAKGIKGRNQIDFCKDLKKQLEGIAEYKKIMQEITSIDDAKTEEERLLFRITNGFAFPKQTTKDNGIIPIQVHLAELKCILDNAEGYLPFLGETDNNGLSVREKIEQIVKFRIPYYVGPLAGTRMSREQGRCWVVRKHEKIYPWNFTEIVNLEESAEKFITNMTAKCTYLVGEDVLPKESLLYSEFMVRNAINNITVDGERLPVDVLEKIFKQLFLAKTSKVTKKTLERFFRQENISFQNIGGIDDKINASMKSYNDFRRIFGEDYIQLHRDEIENIIRWITLFCDEKKMLVTKIKNTYPQISDDEIKAIKKLKYKDWGRLSATLLNSSTIAYEDKAFGELVTIISALRHTNKNFMELLSSYCYYDFIGKIKEFNGSRQSSNGKPTYKDVEELYVSPSVKRSIWQTLTILEEIKKIMGCEPKRIFIEMARSKEESKRTDSRLKKLQDLYKKCREENIDFMPRKDEFNALKTQLSSKKEENLRSDKLYLYYTQMGRCMYTGERIELASLYDNNLYDIDHIYPRSKTKDDSLSNRVLVKKQVNAAKTDTYPLDAAIRTKMHSFWKLLYDKGFIDERKYERLTRSTQLRDEELAGFISRQLVETRQSTKAVAAILKTAYQNSEVVYVKAGNVSDFRQQFKFVKCREVNDLHHAKDAYLNIVVGNCYHVKFTANPLNFITKNQDNRRYSLKPEIFYKFSIKRDGEIAWLGGEDGTMATVARTMHKNNILFTRQAVEGKGELFDQQPLKAKGGQLPLKAGLSIEKYGGYNSLTTAYFAVVKSEGKKGAVQLSIEAIPLVYAKQGEIAVQKYLTEVVQLCKPEIMLPKIKKYSLFKINGFPMHISGRTGNRMLFYGAGQLCLDEADVDYLKKALKYENDIAENELVIADKNSDDIQKQQAQKNLDYYNQKWRIGRKVNMHIYDMLLAKSGNNLYKNRPASQTTDLQEQREFFEKLSLANQIHVIGEVLKLFKCASASANLKLLDKGNACGVIKVSNNILKFKQCVLINQSPTGVFEQEVDLMKL

SEQ ID NO: 1416 - protein, 1379 aa, unidentified
  REGION 1..1379: note = Description of Unknown: uncultivated organism with predicted taxonomy: Phascolarctobacterium succinatutens
  REGION 1..1379: note = MG18-64 effector
MQKLKNCDYYIGLDMGDASVGWAVTDTNYNILKFNGKALWGIRLFDSANTAASTRVFRSGRRRIDRTTWRLKMLQELFADEIAKVDTGFFMRLEDSRLQLDDKREKAVYNLFVDKSYTDKEFYQQYPTMYHLRYALATQKGPFDVRLFYLAVQHIAKHRGHFLFDNLDASKVNDFNAVFSEVENYVRDEMGIEDWSCQNIDELAKVLCDVNLGRTTKQKAMQSLLPAQTKQQKAIIQLFSGGKAKLAELFVDEELDECEKKSVSFQDDDLDEIEPVLTAALGERYEGLLRFKAIYDWSLLAKILHLDAEKKDDSEQHLLSECKVQVYEEHKRDLAVLKSMLKGKPLYNKIFRQDGDISYEKYAKGIKGCNQIDFCKDLKKQLEGIAEYKKIMQEITSIDDAKTEEERLLFRITNGFAFPKQTTKDNGIIPIQVHLAELKCILDNAEGYLPFLGETDNNGLSVREKIEQIVKFRIPYYVGPLAGTRMSREQGRCWVVRKNEKIYPWNFTEIVNLEESAEKFITNMTAKCTYLVGEDVLPKESLLYSEFMVRNAINNITVDGERLPVDVLEKIFKQLFLAKTSKVTKKTLERFFRQENISFQNIGGIDDKINASMKSYNDFRRIFGEDYIQLHRDEIENIIRWITLFCDEKKMLVTKIKNTYPQISDDEIKAIKKLKYKDWGRLSATLLNSSTIAYEDKAFGELVTIISALRHTNKNFMELLSSYCSYDFIGKIKEFNGSRQSSNGKLTYKDVEELYVSPSVKRSIWQTLTILEEIKKIMGCEPKRIFIEMARSKEESKRTDSRLKKLQYLYKKCREENIDFMPRKDEFNALKTQLSSKKEEDLRSDKLYLYYTQMGRCMYTGESIELASLYDNNLYDIDHIYPRSKTKDDSLSNRVLVQKQVNAAKTDIYPLDAAIRTKMHSFWNLLYDKGFIDERKYERLMRSTQLRDEELAGFISRQLVETRQSTKAVAAILKTAYQNSEVVYVKAGNVSDFRQQFKFVKCRDVNDLHHAKDAYLNIVVGNCYHVKFTANPLNFITKNQDNRRYSLKPEIFYKFSIKRDGEIAWLGGEDGTMATVARTMHKNNILFTRQAVEGKGELFDQQPLKAKGGQLPLKAGLSIEKYGGYNSLTTAYFAVVKSEGKKGAVQLSIEAIPLVYAKQGEIAVQKYLTEVVQLCKPEIKIPKIKKYSLFKINGFPMHISGRTGKQLVFYGAGQLCIADDVADYLKKALKYETDIAEKEKTLADQNADDIQKQKAQKGLDFYEQKWGISGAVNVQLYDMFIAKSANNLYKNRPASQTITLKEKREHFVKLTLSKQIHIIKEILNLFKCASASADFKLIDKGTSCGTLKISNNITKLKECILINQSPTGVFEQEVDLMKL

SEQ ID NO: 1417 - protein, 1379 aa, unidentified
  REGION 1..1379: note = Description of Unknown: uncultivated organism with predicted taxonomy: Firmicutes
  REGION 1..1379: note = MG18-65 effector
MQKLKNCDYYIGLDMGDASVGWAVTDTNYNILKFNGKALWGIRLFDSANTAASTRVFRSGRRRIDRTTWRLKMLQELFAEEIAKVDPGFFMRLEDSRLHLDDKRDKAVYNLFVDKNYTDKDFYQQYPTMYHLRYALATQAGPFDVRLLYLAVQHIAKHRGHFLFDNLDASKVNDFNAVFSEVENYVRDEMGIEDWSCQNIDELAKVLCDVNLGRTTKQKAMQSLLPAQTKQQKAIIQLFSGGKAKLAELFADEELDECEKKSVSFQDDDLNEFEPVLTAALGERYEGLLRFKAIYDWSLLAKILHLDTSKKDKDEQPLLSECKVQVYEDHKRDLAVLKSMLKGKPLYNKIFRQDGDISYEKYAKGIKGRNQIDFCKDLKKQLEGIAEYKKIMQEITSIDDAKTEEERLLFRITNGFAFPKQTTKDNGIIPIQVHLAELKCILDNAEGYLPFLGETDNNGLSVREKIEQIVKFIIPYYVGPLAGTRMSREQGRCWVVRKNEKIYPWNFTEIVNLEESAEKFITNMTAKCTYLVGEDVLPKESLLYSEFMVRNAINNITVDGERLPVDVLEKIFKQLFLAKTSKVTKKTLERFFRQENISFQNIGGIDDKINASMKSYNDFRRIFGEDYIQLHRDEIENIIRWITLFCDEKKMLVTKIKNTYPQISDDEIKAIKKLKYKDWGRLSATLLNSSAIAYEDKAFGELVTIISALRHTNKNFMELLSSYCSYDFIGKIKEFNGSRQSSNGKLTYKDVEELYVSPSVKRSIWQTLTILEEIKKIMGCEPKRIFIEMARSKEESKRTDSRLKKLQDLYKKCREENIDFMPRKDEFNTLKTQLSSKKEDDLRSDKLYLYYTQMGRCMYTGEKIELASLYDNNLYDIDHIYPRSKTKDDSLSNRVLVKKQVNAAKTDTYPLDAAIRTKMHSFWKLLYDKGFIDERKYQRLTRSTQLRDEELAGFISRQLVETRQSTKAVAAILKTAYQNSEVVYVKAGNVSDFRQQFKFVKCREVNDLHHAKDAYLNIVVGNCYHVKFTANPLNFITKNQDNRRYSLKPEIFYKFSIKRDGEIAWLGGEDGTMATVARTMHKNNILFTRQPLEGKGELFKQNPLKAKSGQLPLKAGLSVEKYGGYDSLTTAYFALVKSEGKKGSVQLSIEGIPLVYAKQGEKAVKDYLTEVVQLCKPEIKIPKIKKYSLFKINGFPMHISGRQGKQLIFYVAGQLCINEDSIAYLKKVFKYESDLAVNEEILADENGDEVRKQKARNRLAFYDNTWGISLEANMQLYDMLLAKSANNLYKNRPASQTSTLKEQREQFSILPLSKQIHVIKEILKLFKCASATADFKLLEKGSTCGKIQVSTNITKCKQCILINQSPTGVFEQEVDLMKL

SEQ ID NO: 1418 - protein, 1379 aa, unidentified
  REGION 1..1379: note = Description of Unknown: uncultivated organism with predicted taxonomy: Phascolarctobacterium succinatutens
  REGION 1..1379: note = MG18-66 effector
MQKLKNCDYYIGLDMGDASVGWAVTDTNYNILKFNGKALWGIRLFDSANTAASTRVFRSGRRRIDRTTWRLKMLQELFAEEIAKVDPGFFMRLEDSRLQLDDKREKAVYNLFVDKSYTDKEFYQQYPTMYHLRYALATQKGPFDVRLLYLAVQHIAKHRGHFLFDNLDASKVNDFNAVFSEVENYVRDEMGIEDWSCQNIDELAKVLCDVNLGRTTKQKAMQSLLPAQTKQQKAIIQLFSGGKAKLAELFVDEELDECEKKSVSFQDDDLNEFEPVLTAALGERYEGLLRFKAIYDWSLLAKILHLDTSKKDEDEQHLLSECKVQVYEDHKRDLAVLKSMLKGKPLCNKIFRQDGDISYEKYAKGIKGRNQIDFCKDLKKQLEGIAEYKKIMQEITSIDDAKTEEERLLFRITNGFAFPKQTTKDNGIIPIQVHLAELKCILDNAEGYLPFLGETDNNGLSVREKIEQIVKFRIPYYVGPLAGTRMSREQGRCWVVRKHEKIYPWNFTEIVNLEESAEKFITNMTAKCTYLVGEDVLPKESLLYSEFMVRNAINNITVDGERLPVDVLEKIFKQLFLAKTSKVTKKTLERFFRQENISFQNIGGIDDKINASMKSYNDFRRIFGEDYIQLHRDEIENIIRWITLFCDEKKMLVTKIKNTYSQISDDEIKAIKKLKYKDWGRLSATLLNSSTIAYEDKAFGELVTIISALRHTNKNFMELLSSYCYYDFIGKIKEFNGSRQSSNGKPTYKDVEELYVSPSVKRSIWQTLTILEEIKKIMGCEPKRIFIEMARSKEESKRTDSRLKKLQDLYKKCREENIDFMPRKDEFNALKTQLSSKKEENLRSDKLYLYYTQMGRCMYTGERIELASLYDNNLYDIDHIYPRSKTKDDSLSNRVLVKKQVNAAKTDTYPLDAAIRTKMHSFWKLLYDKGFIDERKYERLTRSTQLRDEELAGFISRQLVETRQSTKAVAAILKTAYQNSEVVYVKAGNVSDFRQQFKFVKCREVNDLHHAKDAYLNIVVGNCYHVKFTANPLNFITKNQDNRRYSLKPEIFYKFSIKRDGEIAWLGGEDGTMATVARTMHKNNILFTRQAVEGKGELFDQQPLKAKGGQLPLKAGLSIEKYGGYNSLTTAYFAVVKSEGKKGAVQLSIEAIPLVYAKQGEIAVQKYLTEVVQLCKPEIMLPKIKKYSLFKINGFPMHISGRTGNRMLFYGAGQLCLDEADVDYLKKALKYENDIAENELVIADKNSDDIQKQQAQKNLDYYNQKWRIGRKVNMHIYDMLLAKSGNNLYKNRPASQTTDLQEQREFFEKLSLANQIHVIGEVLKLFKCASASANLKLLDKGNACGVIKVSNNILKFKQCVLINQSPTGVFEQEVDLMKL

SEQ ID NO: 1419 - protein, 1379 aa, unidentified
  REGION 1..1379: note = Description of Unknown: uncultivated organism
  REGION 1..1379: note = MG18-67 effector
MQKLKNCDYYIGLDMGDASVGWAVTDTNYNILKFNGKALWGIRLFDSANTAASTRVFRSGRRRIDRTTWRLKMLQELFAEKIAKVDPGFFMRLEDSRLHLDDKRDKAVYNLFVDKNYTDKDFYQQYPTMYHLRYALATQAGPFDVRLLYLAVQHIAKHRGHFLFDNLDASKVNDFNAVFSEVENYVRDEMGIEDWSCQNIDELAKVLCDVNLGRTTKQKAMQSLLPAQTKQQKAIIQLFSGGKAKLAELFVDEELDECEKKSVSFQDDDLNEFEPVLTAALGERYEGLLRFKAIYDWSLLAKILHLDTSKKDEDEQHLLSECKVQVYEDHKRDLAVLKSMLKGKPLYNKIFRQDGDISYEKYAKGIKGRNQIDFCKNLKKQLEGIAEYKKIMQEITSIDDAKTEEERVLFRITNGFAFPKQTTKDNGIIPIQVHLAELKCILDNAEGYLPFLGETDNNGLSVREKIEQIVKFRIPYYVGPLAGTRMSREQGRYWVVRKNEKIYPWNFTEIVNLEESAEKFITNMTAKCTYLVGEDVLPKESLLYSEFMVRNAINNITVDGERLPVDVLEKIFKQLFLAKTSKVTKKTLERFFRQENISFQNIGGIDDKINASMKSYNDFRRIFGEDYIQLHRDEIENIIRWITLFCDEKKMLVTKIKNTYPQISDDEIKAIKKLKYKDWGRLSATLLNSSTIAYEDKAFGELVTIISALRHTNKNFMELLSSYCSYDFIGKIKEFNGSRQSSNGKLTYKDVEELYVSPSVKRSIWQTLTFLEEIKKIMGCEPKRIFIEMARSKEESKRTDSRLKKLQDLYKKCREENIDFMPRKDEFNALKTQLSSKKEEDLRSDKLYLYYTQMGRCMYTGERIELASLYDNNLYDIDHIYPRSKTKDDSLSNRVLVKKQVNAAKTDTYPLDAAIRTKMHSFWKLLYDKGFIDERKYERLTRSTQLRDEELAGFISRQLVETRQSTKAVAAILKIAYQNSEVVYVKAGNVSDFRQQFKFVKCREVNDLHHAKDAYLNIVVGNCYHVKFTANPLNFITKNQDNRRYSLKPEIFYKFSIKRDGEIAWLGGEDGTMATVARTMHKNNILFTRQAVEGKGELFDQQPLKAKGGQLPLKAGLSIEKYGGYNSLTTAYFAVVKSEGKKGAVQLSIEAIPLVYAKQGEIAVQKYLTEVVQLCKPEIMLPQIKKYSLFKINGFPMHISGRTGNRMLFYGAGQLCLDEADVDYLKKALKYENDIAENELVIADKNSDDIQKQQAQKNLDYYNQKWRIGRKVNMHIYDMLLAKSGNNLYKNRPASQTTDLQEQREFFEKLSLANQIHVIGEVLKLFKCASASANLKLLDKGNACGVIKVSNNILKFKQCVLINQSPTGVFEQEVDLMKL

SEQ ID NO: 1420 - protein, 1379 aa, unidentified
  REGION 1..1379: note = Description of Unknown: uncultivated organism with predicted taxonomy: Phascolarctobacterium succinatutens
  REGION 1..1379: note = MG18-68 effector
MQKLKNCDYYIGLDMGDASVGWAVTDTNYNILKFNGKALWGIRLFDSANTAASTRVFRSGRRRIDRTTWRLKMLQELFAEEIAKVDPGFFMRLEDSRLHLDDKRDKEVYNLFVDKNYTDKDFYQQYPTMYHLRYALATQAGPFDVRLLYLAVQHIAKHRGHFLFDNLDASKVNDFNAVFSEVENYVRDEMGIEDWSCQNIDELAKVLCDVNLGRTTKQKAMQSLLPAQTKQQKAIIQLFSGGKAKLAELFVDAELDECEKKSVSFQDDDLNEFEPVLTAALGERYEGLLRFKAIYDWSLLAKILHLDTSKKDEDEQHLLSECKVQVYEDHKRDLAVLKSMLKGKPLYNKIFRQDGDISYEKYTKGIKGRNQIDFCKDLKKQLEGIAEYKKIMQEITSIDDAKTEEERVLFRITNGFAFPKQTTKDNGIIPIQVHLAELKCILDNVEGYLPFLGETDNNGLSVREKIEQIVKFRIPYYVGPLAGTRMSREQGRYWVVRKNEKIYPWNFTEIVNLEESAEKFITNMTAKCTYLVGEDVLPKESLLYSEFMVRNAINNITVDGERLPVDVLEKIFKQLFLAKTSKVTKKTLERFFRQENISFQNIGGIDDKINASMKSYNDFRRIFGEDYIQLHRDEIENIIRWITLFCDEKKMLVTKIKNTYPQISDDEIKAIKKLKYKDWGRLSATLLNSSAIAYEDKAFGELVTIISALRHTNKNFMELLSSYCSYDFIGKIKEFNGSRQSSNGKLTYKDVEELYVSPSVKRSIWQTLTILEEIKKIMGCEPKRIFIEMARSKEESKRTDSRLKKLQDLYKKCREENIDFMPRKDEFNTLKTQLSSKKEDDLRSDKLYLYYTQMGRCMYTGEKIELASLYDNNLYDIDHIYPRSKTKDDSLSNRVLVKKQVNAAKTDTYPLDAAIRTKMHSFWKLLYDKGFIDERKYQRLTRSTQLRDEELAGFISRQLVETRQSTKAVAAILKTAYQNSEVVYVKAGNVSDFRQQFKFVKCREVNDLHHAKDAYLNIVVGNCYHVKFTANPLNFITKNQDNRRYSLKPEIFYKFSIKRDGEIAWLGGEDGTMATVARTMHKNNILFTRQAVEGKGELFDQQPLKAKGGQLPLKAGLSIEKYGGYNSLTTAYFAVVKSEGKKGAVQLSIEAIPLVYAKQGEIAVQKYLTKVVQLCKPEIMLPKIKKYSLFKINGFPMHISGRTGNRMLFYGAGQLCLDEADVDYLKKALKYENDIAENELVIADKNSDDIQKQQAQKNLDYYNQKWRIGRKVNMHIYDMLLAKSGNNLYKNRPASQTTDLQEQREFFEKLSLANQIHVIGEVLKLFKCASASANLKLLDKGNACGVIKVSNNILKFKQCVLINQSPTGVFEQEVDLMKL

SEQ ID NO: 1421 - protein, 1379 aa, unidentified
  REGION 1..1379: note = Description of Unknown: uncultivated organism with predicted taxonomy: Phascolarctobacterium succinatutens
  REGION 1..1379: note = MG18-69 effector
MQKLKNCDYYIGLDMGDASVGWAVTDTNYNILKFNGKALWGIRLFDSANTAASTRVFRSGRRRIDRTTWRLKMLQELFAEEIAKVDPGFFMRLEDSRLHLDDKRDKAVYNLFVDKNYTDKDFYQQYPTMYHLRYALATQAGPFDVRLLYLAVQHIAKHRGHFLFDNLDASKVNDFNAVFSEVENYVRDEMGIEDWSCQNIDELAKVLCDVNLGRTTKQKAMQSLLPAQTKQQKAIIQLFSGGKAKLAELFVDAELDECEKKSVSFQDDDLNEFEPVLTAALGERYEGLLRFKAIYDWSLLAKILHLDTSKKDEDEQHLLSECKVQVYEDHKRDLAVLKSMLKGKPLYNKIFRQDGDISYEKYAKGIKGRNQIDFCKDLKKQLEGIAEYKKIMQEITSIDDAKTEEERVLFRITNGFAFPKQTTKDNGIIPIQVHLAELKCILDNVEGYLPFLGETDNNGLSVREKIEQIVKFRIPYYVGPLAGTRMSREQGRYWVVRKNEKIYPWNFTEIVNLEESAEKFITNMTAKCTYLVGEDVLPKESLLYSEFMVRNAINNITVDGERLPVDVLEKIFKQLFLAKTSKVTKKTLERFFRQENISFQNIGGIDDKINASMKSYNDFRRIFGEDYIQLHRDEIENIIRWITLFCDEKKMLVTKIKNTYPQISDDEIKAIKKLKYKDWGRLSATLLNSSAIAYEDKAFGELVSIISALRHTNKNFMELLSSYCSYDFIGKIKEFNGSRQSSNGKLTYKDVEELYVSPSVKRSIWQTLTILEEIKKIMGCEPKRIFIEMARSKEESKRTDSRLKKLQDLYKKCREENIDFMPRKDEFNTLKTQLSSKKEDDLRSDKLYLYYTQMGRCMYTGEKIELASLYDNNLYDIDHIYPRSKTKDDSLSNRVLVKKQVNAAKTDIYPLDAAIRTKMHSFWKLLYDKGFIDERKYQRLTRSTQLRDEELAGFISRQLVETRQSTKAVAAILKTAYQNSEVVYVKAGNVSDFRQQFKFVKCREVNDLHHAKDAYLNIVVGNCYHVKFTANPLNFITKNQDNRRYSLKPEIFYKFSIKRDGEIAWLGGEDGTMATVARTMHKNNILFTRQAVEGKGELFDQQPLKAKGGQLPLKAGLSIEKYGGYNSLTTAYFAVVKSEGKKGAVQLSIEAIPLVYAKQGEIAVQKYLTKVVQLCKPEIMLPKIKKYSLFKINGFPMHISGRTGNRMLFYGAGQLCLDEADVDYLKKALKYENDIAENELVIADKNSDDIQKQQAQKNLDYYNQKWRIGRKVNMHIYDMLLAKSGNNLYKNRPASQTTDLQEQREFFEKLSLANQIHVIGEVLKLFKCASASANLKLLDKGNACGVIKVSNNILKFKQCVLINQSPTGVFEQEVDLMKL

SEQ ID NO: 1422 - protein, 1379 aa, unidentified; identical to SEQ ID NO: 1360
  REGION 1..1379: note = Description of Unknown: uncultivated organism with predicted taxonomy: Negativicutes
  REGION 1..1379: note = MG18-70 effector

SEQ ID NO: 1423 - protein, 1379 aa, unidentified
  REGION 1..1379: note = Description of Unknown: uncultivated organism with predicted taxonomy: Phascolarctobacterium succinatutens
  REGION 1..1379: note = MG18-71 effector
MQKLKNCDYYIGLDMGDASVGWAVTDTNYNILKFNGKALWGIRLFDSANTAASTRVFRSGRRRIDRTTWRLKMLQELFAEEIAKVDPGFFMRLEDSRLHLDDKRDKEVYNLFVDKNYTDKDFYQQYPTMYHLRYALATQAGPFDVRLLYLAVQHIAKHRGHFLFDNLDASKVNDFNAVFSEVENYVRDEMGIEDWSCQNIDELAKVLCDVNLGRTTKQKAMQSLLPAQTKQQKAIIQLFSGGKAKLAELFADEELDECEKKSVSFQDDDLNEFEPVLTAALGERYEGLLRFKAIYDWSLLAKILHLDTSKKDKDEQHLLSECKVQVYEDHKRDLAVLKSMLKGKPLYNKIFRQDGDISYEKYAKGIKGRNQIDFCKDLKKQLEGIAEYKKIMQEITSIDDAKTEEERLLFRITNGFAFPKQTTKDNGIIPIQVHLAELKCILDNAEGYLPFLGETDNNGLSVREKIEQIVKFIIPYYVGPLAGTRMSREQGRCWVVRKNEKIYPWNFTEIVNLEESAEKFITNMTAKCTYLVGEDVLPKESLLYSEFMVRNAINNITVDGERLPVDVLEKIFKQLFLAKTSKVTKKTLERFFRQENISFQNIGGIDDKINASMKSYNDFRRIFGEDYIQLHRDEIENIIRWITLFCDEKKMLVTKIKNTYPQISDDEIKAIKKLKYKDWGRLSATLLNSSAIAYEDKAFGELVTIISALRHTNKNFMELLSSYCSYDFIGKIKEFNGSRQSSNGKLTYKDVEELYVSPSVKRSIWQTLTILEEIKKIMGCEPKRIFIEMARSKEESKRTDSRLKKLQDLYKKCREENIDFMPRKDEFNTLKTQLSSKKEDDLRSDKLYLYYTQMGRCMYTGEKIELASLYDNNLYDIDHIYPRSKTKDDSLSNRVLVKKQVNAAKTDTYPLDAAIRTKMHSFWKLLYDKGFIDERKYQRLTRSTQLRDEELAGFISRQLVETRQSTKAVAAILKTAYQNSEVVYVKAGNVSDFRQQFKFVKCREVNDLHHAKDAYLNIVVGNCYHVKFTANPLNFITKNQDNRRYSLKPEIFYKFSIKRDGEIAWLGGEDGTMATVARTMHKNNILFTRQAVEGKGELFDQQPLKAKGGQLPLKAGLSIEKYGGYNSLTTAYFAVVKSEGKKGAVQLSIEAIPLVYAKQGEIAVQKYLTEVVQLCKPEIMLPKIKKYSLFKINGFPMHISGRTGNRMLFYGAGQLCLDEADVDYLKKALKYENDIAENELVIADKNSDDIQKQQAQKNLDYYNQKWRIGRKVNMHIYDMLLAKSGNNLYKNRPASQTTDLQEQREFFEKLSLANQIHVIGEVLKLFKCASASANLKLLDKGNACGVIKVSNNILKFKQCVLINQSPTGVFEQEVDLMKL

SEQ ID NO: 1424 - protein, 1379 aa, unidentified
  REGION 1..1379: note = Description of Unknown: uncultivated organism with predicted taxonomy: Phascolarctobacterium succinatutens
  REGION 1..1379: note = MG18-72 effector
MQKSKNCDYYIGLDMGDASVGWAVTDTNYNILKFNGKALWGIRLFDSANTAASTRVFRSGRRRIDRTTWRLKMLQELFAEEIAKVDPGFFMRLEDSRLHLDDKRDKAVYNLFVDKNYTDKDFYQQYPTMYHLRYALATQAVPFDVRLLYLAVQHIAKHRGHFLFDNLDASKVNDFNAVFSEVENYVRDEMGIEDWSCQNIDELAKVLCDVNLGRTTKQKAMQSLLPAQTKQQKAIIQLFSGGKAKLAELFVDEELDECEKNSVSFQDDDLNEFEPVLTAALGERYEGLLRFKAIYDWSLLAKILHLDTSKKDEDEQHLLSECKVQVYEDHKRDLAVLKSMLKGKPLYNKIFRQDGDISYEKYAKGIKGRNQIDFCKDLKKQLEGIAEYKKIMQEITNIDDAKTEEERLLFRITNGFAFPKQTTKDNGIIPIQVHLAELKCILDNAEGYLPFLGETDNNGLSVREKIEQIVKFRIPYYVGPLAGTRMSREQGRCWVVRKNEKIYPWNFTEIVNLEESAEKFITNMTAKCTYLVGEDVLPKESLLYSEFMVRNAINNITVDGERLPVDVLEKIFKQLFLAKTSKVTKKTLERFFRQENISFQNIGGIDDKINASMKSYNDFRRIFGEDYIQLHRDEIENIIRWITLFCDEKKMLVTKIKNTYPQISDDEIKAIKKLKYKDWGRLSATLLNSRAIGYEDKAVGEIITIISALRHTNKNLMELLSNYCPYDFIGKIKDFNGSRQSSNGKLTYKDVEELYVSPSVKRSIWQTLTILEEIKKIMGCEPKRIFIEMARSKEESKRTDSRLKKLQDLYKKCKEENIDFMPRKDEFNALKTQLSSKKEDDLRSDKLYLYYTQMGRCMYTGERIELASLYDNNLYDIDHIYPRSKTKDDSLSNRVLVKKQVNAAKTDTYPLDAAIRIKMHSFWKLLYDKGFIDERKYERLTRSTQLRDEELAGFISRQLVETRQSTKAVAAILKTAYQNSEVVYVKAGNVSDFRQQFKFVKCREVNDLHHAKDAYLNIVVGNCYHVKFTANPLNFITKNQDNRRYSLKPEIFYKFSIKRDGEIAWLGGEDGTMATVARTMHKNNILFTRQPLEGKGELFKQNPLKAKSGQLPLKAGLSVEKYGGYDSLTTAYFALVKSEGKKGSVQLSIEGIPLVYAKQGEKAVQDYLTEVVQLCKPEIKIPKIKKYSLFKINGFPMHISGRQGKQLIFYVAGQLCINEDSIAYLKKAFKYESDLAVNEEILADENGDEVRKQKARNRLAFYDNTWGISLEANMQLYDMLLAKSANNLYKNRPASQTSTLKEQREQFSILPLSKQIHVIKEILKLFKCASATADFKLLEKGSTCGKIQVSTNITKCKQCILINQSPTGVFEQEVDLMKL

SEQ ID NO: 1425 - protein, 1379 aa, unidentified
  REGION 1..1379: note = Description of Unknown: uncultivated organism with predicted taxonomy: Phascolarctobacterium
  REGION 1..1379: note = MG18-73 effector
MQKLKNCDYYIGLDMGDASVGWAVTDTNYNILKFNGKALWGIRLFDSANTAASTRVFRSGRRRIDRTTWRLKMLQELFAEEIAKVDPGFFMRLEDSRLHLDDKRDKAVYNLFVDKNYTDKDFYQQYPTMYHLRYALATQAGPFDVRLLYLAVQHIAKHRGHFLFDNLDASKVNDFNAVFSEVENYVRDEMGIEDWSCQNIDELAKVLCDVNLGRTTKQKAMQSLLPAQTKQQKAIIQLFSGGKAKLAELFVDEELDECEKKSVSFQDDDLNEFEPVLTAALGERYEGLLRFKAIYDWSLLAKILHLDTSKKDEDEQHLLSECKVQVYEDHKRDLAVLKSMLKGKPLYNKIFRQDGDISYEKYAKGIKGRNQIDFCKDLKKQLEGIAEYKKIMQEITNIDDAKTEEERLLFRITNGFAFPKQTTKDNGIIPIQVHLAELKCILDNAEGYLPFLGETDNNGLSVREKIEQIVKFRIPYYVGPLAGTRMSREQGRCWVVRKHEKIYPWNFTEIVNLEESAEKFITNMTAKCTYLVGEDVLPKESLLYSEFMVRNAINNITVDGERLPVDVLEKIFKQLFLAKTSKVTKKTLERFFRQENISFQNIGGIDDKINASMKSYNDFRRIFGEDYIQLHRDEIENIIRWITLFCDEKKMLVTKIKNTYPQISDDEIKAIKKLKYKDWGRLSATLLNSSTIAYEDKAFGELVTIISALRHTNKNFMELLSSYCSYDFIGKIKEFNGSRQSSNGKLTYKDVEELYVSPSVKRSIWQTLTILEEIKKIMGREPKRIFIEMARSKEESKRTDSRLKKLQDLYKKCREENIDFMPRKDEFNALKTQLSSKKEEDLRSDKLYLYYTQMGRCMYTGERIELASLDDNNLYDIDHIYPRSKTKDDSLSNRVLVKKEVNAAKTDIYPLDAVIRTKMHSFWKLLYDKGFIDERKYERLTRSTQLRDEELAGFISRQLVETRQSTKAVAAILKTAYKHSEIVYVKAGNVSDFRQKFEFVKCRDVNDLHHAKDAYLNIVVGNCYHVKFTANPLNFITKNQDNRRYSLKPEIFYKFSIKRDSEIAWIGGKDGTITTVTKTMHKNNILFTRQPVEGKGELFKQQPLKAKSGQLPLKAGLSVEKYGGYDSLTTAYFALVKSEGKKGAVQLSIEGIPLVYAKQGEIAVQKYLTEVVQLCKPEIMLPKIKKYSLFKINGFPMHISGRQLKQLQFYVASQLCIDEYSIAYLKKAFKYENNLAVNDEIIADKNADEEKKQKARKRLDFYEKTWGIGKENNMRIYDILLAKSANNLYKKRPASQSATLEKRRENFKGLFVSKQIHVLKEILNLFKCLSATADLQLLGAGKNVGKVTWNTNISNVKQCILINQSPTGIFEQEVDLMKL

SEQ ID NO: 1426 - protein, 1379 aa, unidentified
  REGION 1..1379: note = Description of Unknown: uncultivated organism with predicted taxonomy: Phascolarctobacterium succinatutens
  REGION 1..1379: note = MG18-74 effector
MQKLQNKDYYIGLDMGDASVGWAVTDANYNILKFNGKALWGIRLFDSANTAASTRVFRSGRRRIDRTTWRLKMLQELFAEEIAKVDPGFFMRLEDSRLHLDDKRDKAVYNLFVDKNYTDKDFYQQYPTMYHLRYALATQAGPFDVRLLYLAVQHIAKHRGHFLFDNLDASKVNDFNAVFSEVENYVRDEMGIEDWSCQNIDELAKVLCDVNLGRTTKQKAMQSLLPAQTKQQKAIIQLFSGGKAKLAELFVDEELDECEKKSVSFQDDDLNEFEPVLTAALGERYEGLLRFKAIYDWSLLAKILHLDTSKKDEDEQHLLSECKVQVYEDHKRDLAVLKSMLKGKPLYNKIFRQDGDISYEKYAKGIKGRNQIDFCKDLKKQLEGITEYKKIMQEITSIDDAKTEEERVLFRITNGFAFPKQTTKDNGIIPIQVHLAELKCILDNAEGYLPFLGETDNNGLSVREKIEQIVKFRIPYYVGPLAGTRMSREQGRCWVVRKNEKIYPWNFTQVVNLEESAEKFITNMTAKCTYLVGEDVLPKESLLYSEFMVRNAINNITVDGERLPVDVLEKIFKQLFLAKTSKVTKKTLERFFRQENISFQNIGGIDDKINASMKSYNDFRRIFGEDYIQLHRDEIENIIRWITLFCDEKKMLVTKIKNTYPQIADDQIKAIKKLKYKDWGRLSATLLNSSAIAYEDKAFGELVTIISALRHTNKNFMELLSSYCSYDFIGKIKEFNGSRQSSNGKLTYKDVEELYVSPSVKRSIWQTLTILEEIKKIMGCEPKRIFIEMARSKEESKRTDSRLKKLQDLYKKCREENIDFMPRKDEFNTLKTQLSSKKEDDLRIDKLYLYYTQMGRCMYTGEKIELASLYDNNLYDIDHIYPRSKTKDDSLSNRVLVKKQVNAAKTDTYPLDAAIRTKMHSFWKLLYDKGFIDERKYQRLTRSTQLRDEELAGFISRQLVETRQSTKAVAAILKTAYQNSEVVYVKAGNVSDFRQQFKFVKCREVNDLHHAKDAYLNIVVGNCYHVKFTANPLNFITKNQDNRRYSLKPEIFYKFSIKRDSEIAWIGGKDGTITTVTKTMHKNNILFTRQAVEGKGELFDQQPLKAKGGQLPLKAGLSIEKYGGYNSLTTAYFAVVKSEGKKGAVQLSIEAIPLVYAKQGEIAVQKYLTEVVQLCKPEIMLPKIKKYSLFKINGFPMHISGRTGNRMLFYGAGQLCLDEADVDYLKKALKYENDIAENELVIADKNSDDIQKQQAQKNLDYYNQKWRIGRKVNMHIYDMLLAKSGNNLYKNRPASQTTDLQEQREFFEKLSLANQIHVIGEVLKLFKCASASANLKLLDKGNACGVIKVSNNILKFKQCVLINQSPTGVFEQEVDLMKL

SEQ ID NO: 1427 - protein, 1379 aa, unidentified; identical to SEQ ID NO: 1358
  REGION 1..1379: note = Description of Unknown: uncultivated organism with predicted taxonomy: Phascolarctobacterium
  REGION 1..1379: note = MG18-75 effector

SEQ ID NO: 1428 - protein, 1124 aa, unidentified
  REGION 1..1124: note = Description of Unknown: uncultivated organism with predicted taxonomy: Phascolarctobacterium succinatutens
  REGION 1..1124: note = MG18-76 effector
MQRLKNCDYYIGLDMGDASVGWAVTDTNYNILKFNGKALWGIRLFDSANTAASTRVFRSGRRRIDRTTWRLKMLQELFAEEIAKVDPGFFMRLEDSRLHLDDKRDKAVYNLFVDKNYTDKDFYQQYPTMYHLRYALAMQAGPFDVRLLYLAVQHIAKHRGHFLFDNLDASKVNDFNAVFSEVENYVRDEMGIEDWSCQNIDELAKVLCDVNLGRTTKQKAMQSLLPAQTKQQKAIIQLFSGGKAKLAELFGDAELDECEKKSVSFQDDDLDELEPVLTAALGERYEGLLRFKAIYDWSLLAKILHLDTSKKDEDEQHLLSECKVQVYEDHKRDLAVLKSMLKGKPLYNKIFRQDGDISYEKYAKGIKGRNQLDFCKDLKKQLDGIAEYKKIMQEITSIDAAGTEEERLLFRIANGFAFPKQTTKDNGIIPIQVHLAELKCILDNAEGYLQFLGETDNNGLSVREKIEQIVKFRIPYYVGPLAGTRMSREQGRCWVVRKNEKIYPWNFTQVVNLEESAEKFITNMTAKCTYLVGEDVLPKESLLYSEFMVRNAINNITVDGERLPVDVLEKIFKQLFLAKTSKVTKKTLERFFRQENISFQNIGGIDDKINASMKSYNDFRRIFGEDYIQLHRDEIENIIRWITLFCDEKKMLVTKIKNTYPQIADDQIKAIKKLKYKDWGRLSATLLNSSAIAYEDKAFGELVTIISALRHTNKNFMELLSSYCSYDFIGKIKEFNGSRQSSNGKLTYKDVEELYVSPSVKRSIWQTLTILEEIKKIMGCEPKRIFIEMARSKEESKRTDSRLKKLQDLYKKCREENIDFMPRKDEFNTLKTQLSSKKEDDLRIDKLYLYYTQMGRCMYTGEKIELASLYDNNLYDIDHIYPRSKTKDDSLSNRVLVKKQVNAAKTDTYPLDAAIRTKMHSFWKLLYDKGFIDERKYERLTRSTQLRDEELAGFISRQLVETRQSTKAVAAILKTAYQNSEVVYVKAGNVSDFRKQFKFVKCRDVNDLHHAKDAYLNIVVGNCYHVKFTANPLNFITKNQDNRRYSLKPEIFYKFSIKRDGEIAWIGGKDGTITTVTKTMHKNNILFTRQPVEGKGELFKQQPLKAKSGQLPLKAGLSVEKYGG

SEQ ID NO: 1429 - protein, 811 aa, unidentified
  REGION 1..811: note = Description of Unknown: uncultivated organism with predicted taxonomy: Clostridiales
  REGION 1..811: note = MG18-77 effector
MQKLKNCDYYIGLDMGDASVGWAVTDTNYNILKFNGKALWGIRLFDSANTAASTRVFRSGRRRIDRTTWRLKMLQELFAEEIAKVDPGFFMRLEDSRLHLDDKRDKAVYNLFVDKNYTDKDFYQQYPTMYHLRYALATQAGPFDVRLLYLAVQHIAKHRGHFLFDNLDASKVNDFNAVFSEVENYVRDEMGIEDWSCQNIDELAKVLCDVNLGRTTKQKAMQSLLPAQTKQQKAIIQLFSGGKAKLAELFVDEELDECEKKSVSFQDDDLNEFEPVLTAALGERYEGLLRFKAIYDWSLLAKILHLDTSKKDEDEQHLLSECKVQVYEDHKRDLAVLKSMLKGKPLYNKIFRQDGDISYEKYAKGIKGRNQIDFCKDLKKQLEGIAEYKKIMQEITNIDDAKTEEERLLFRITNGFAFPKQTTKDNGIIPIQVHLAELKCILDNAEGYLPFLGETDNNGLSVREKIEQIVKFRIPYYVGPLAGTRMSREQGRCWVVRKHEKIYPWNFTEIVNLEESAEKFITNMTAKCTYLVGEDVLPKESLLYSEFMVRNAINNITVDGERLPVDVLEKIFKQLFLAKTSKVTKKTLERFFRQENISFQNIGGIDDKINASMKSYNDFRRIFGEDYIQLHRDEIENIIRWITLFCDEKKMLVTKIKNTYPQISDDEIKAIKKLKYKDWGRLSATLLNSSTIAYEDKAFGELVTIISALRHTNKNFMELLSSYCYYDFIGKIKEFNGSRQSSNGKLTYKDVEELYVSPSVKRSIWQTLTILEEIKKIMGCEPKRIFIEMARSKEESKRTDSRLKKLQGRKY

SEQ ID NO: 1430 - protein, 1379 aa, unidentified; identical to SEQ ID NO: 1397
  REGION 1..1379: note = Description of Unknown: uncultivated organism with predicted taxonomy: Phascolarctobacterium
  REGION 1..1379: note = MG18-78 effector

SEQ ID NO: 1431 - protein, 1379 aa, unidentified
  REGION 1..1379: note = Description of Unknown: uncultivated organism with predicted taxonomy: Phascolarctobacterium succinatutens
  REGION 1..1379: note = MG18-79 effector
MQKLKNCDYYIGLDMGDASVGWAVTDTNYNILKFNGKALWGIRLFDSANTAASTRVFRSGRRRIDRTTWRLKMLQELFAEEIAKVDPGFFMRLEDSRLHLDDKRDKAVYNLFVDKNYTDKDFYQQYPTMYHLRYALATQAGPFDVRLLYLAVQHIAKHRGHFLFDNLDASKVNDFNAVFSEVENYVRDEMGIEDWSCQNIDELAKVLCDVNLGRTTKQKAMQSLLPAQTKQQKAIIQLFSGGKAKLAELFVDEELDECEKKSVSFQDDDLNEFEPVLTAALGERYEGLLRFKAIYDWSLLAKILHLDTSKKDEDEQHLLSECKVQVYEDHKRDLAVLKSMLKGKPLYNKIFRQDGDISYEKYAKGIKGRNQIDFCKDLKKQLEGIAEYKKIMQEITNIDDAKTEEERLLFRITNGFAFPKQTTKDNGIIPIQVHLAELKCILDNAEGYLPFLGETDNNGLSVREKIEQIVKFRIPYYVGPLAGTRMSREQGRCWVVRKHEKIYPWKFTEIVNLEESAEKFITNMTAKCTYLVGEDVLPKESLLYSEFMVRNAINNITVDGERLPVDVLEKIFKQLFLAKTSKVTKKTLERFFRQENISFQNIGGIDDKINASMKSYNDFRRIFGEDYIQLHRDEIENIIRWITLFCDEKKMLVTKIKNTYPQISDDEIKAIKKLKYKDWGRLSATLLNSSTIAYEDKAFGELVTIISALRHTNKNFMELLSSYCYYDFIGKIKEFNGSRQSSNGKLTYKDVEELYVSPSVKRSIWQTLTILEEIKKIMGCEPKRIFIEMARSKEESKRTDSRLKKLQDLYKKRREENIDFMPRKDEFNALKTQLSSKKEENLRSDKLYLYYTQMGRCMYTGERIELASLHDNNLYDIDHIYPRSKTKDDSLSNRVLVKKQVNAAKTDTYPLDAAIRTKMHSFWKLLYDKGFIDERKYERLTRSTQLRDEELAGFISRQLVETRQSTKAVAAILKTAYQNSEVVYVKAGNVSDFRQQFKFVKCREVNDLHHAKDAYLNIVVGNCYHVKFTANPLNFITKNQDNRRYSLKPEIFYKFSIKRDGEIAWLGGEDGTMATVARTMHKNNILFTRQAVEGKGELFDQQPLKAKGGQLPLKAGLSIEKYGGYNSLTTAYFAVVKSEGKKGAVQLSIEAIPLVYAKQGEIAVQKYLTEVVQLCKPEIMLPKIKKYSLFKINGFPMHISGRTGKQLIFYGAGQLCIADDVADYLKKALMYETNIAEKEKTLADQNADDIQKQKAQKGLDFYEQKRGISGAVNVQLYDMFIAKSANNLYKNRPVSQTITLKEKREHFVKLTVSKQIHIIKEILNLFKCASASADFKLIDKGTSCGTLKISNNINKLKECILINQSPTGVFEQEVDLMKL

SEQ ID NO: 1432 - protein, 1379 aa, unidentified; identical to SEQ ID NO: 1375
  REGION 1..1379: note = Description of Unknown: uncultivated organism with predicted taxonomy: Phascolarctobacterium succinatutens
  REGION 1..1379: note = MG18-80 effector

SEQ ID NO: 1433 - protein, 1383 aa, unidentified
  REGION 1..1383: note = Description of Unknown: uncultivated organism with predicted taxonomy: Phascolarctobacterium succinatutens
  REGION 1..1383: note = MG18-81 effector
MQNKKNVDYYVGLDMGDASVGWAVTDLNYNILKFNGKALWGIRLFDSAETAAARRGFRSARRRIDRVSWRISMLQELFADEIAKVDAGFFQRLKDSRLQVEDKQEKTAYNLFVGQNYTDKDFYQQYPTMYHLRYALATQAGPFDVRLLYLAVQHIVKHRGHFLFENLDASKVGDFVAVFGEVESYVHDEMELDEWYCHDIDALAKVLCNANLGITAKQKAIQNLLPAKTKQEKAIVQLLSGGKAKLCDLFCDEELAECEKKSISFQEDNLDELEPILEAILQERYEALLRFKAVYDWSLLAKILRLDADKKSENEMHLLSECKVKVYEEHKKDLAVLKSMLKGKPLYNKLFRQDGEDTYANYAQGIKGINQVDFCKSLKKQLESIGEYKKQMQQLTSFEDAQTDVERLLFRVANGLAFPKQTTKDNGIIPIQVHLAELQCILAHAEKYLPFLKNADANGLSVREKITQIVKFRIPYYVGPLAGTRLSREQGRCWVERRAELKNEKIYPWNFDKVVDLEASAENFITNMTAKCTYLVGEDVLPKESLLYSEFMVRNALNNLTIDGERLPVSLLQKIYKQLFLEKTFKVTKKALERFFKQENVSYHDIGGIDDKINASMKAYNDFKRIFGEAYIEMHRDEIENIIRWITLFCDEKKMLETKIRKTYPQIPDDKIKAIKKLKYKDWGRLSATLLDSGKIAYEDASVGERITIISALRHTNKNFMELLSSNCQYDFIGKIKDFNGSKQSDNGKLTYKDVEELYVSPSVKRSIWQTLTILEEIKKIMGCEPKRIFIEMARSKEESLRTNSRLQRLQDLYKKCKEENIDFMPKADELTDIRSQLQCKNEEDLRSDKLYLYYTQMGRCMYTGERIELASLYDQNKYDVDHIYPRSKTKDDSLNNRVLVKKEINSAKTDNYPIDADIRKKMHAFWKMLYDKGFIDQKKYERLTRSTQLTDEELAGFINRQLVETRQSTKATADILKSAYEHSEVVYVKAGNVSDFRQQFDFVKCREVNDLHHAKDAYLNIVVGNCYHVKFTINPLMFIRGNQDNRRYSLKPEVFYAHDIKRNGEIAWLAGDNGTMATVKRVMQKNNVLFTRLAVEGKGELFKQNPLKAKSGQLPLKAGLSIDKYGGYDSLSTAYFALVESEGKKGAVQFTIEAIPLVYAKQGEATIKKYLTEVVQLCKPEIKVMRIKKYSLLKINGFPMHISGRTGKQLIFYVASQLCIDENSVAYLKKALKYESNLEENEAILADKNADESMKQKAFNRLMFYKDTWGISAEANLQLYDMLLAKSANNLYKNRPASQTATLKEKREQFAKLSLSKQIHVIKEILNLFKCASASADFKLLDKGAACGILKVSNNITKLKQCVLINQSPTGVFEQEVDLMRL

SEQ ID NO: 1434 - protein, 1379 aa, unidentified
  REGION 1..1379: note = Description of Unknown: uncultivated organism with predicted taxonomy: Phascolarctobacterium succinatutens
  REGION 1..1379: note = MG18-82 effector
MQKSKNCDYYIGLDMGDASVGWAVTDTNYNILKFNGKALWGIRLFDSANTAASTRVFRSGRRRIDRTTWRLKMLQELFAEEIAKVDPGFFMRLEDSRLHLDDKRDKAVYNLFVDKNYTDKDFYQQYPTMYHLRYALATQAVPFDVRLLYLAVQHIAKHRGHFLFDNLDASKVNDFNAVFSEVENYVRDEMGIEDWSCQNIDELAKVLCDVNLGRTTKQKAMQSLLPAQTKQQKAIIQLFSGGKAKLAELSVDEELDECEKNSVSFQDDDLNEFEPVLTAALGERYEGVLRFKAIYDWSLLAKILHLDTSKKDEDEQHLLSECKVQVYEDHKRDLAVLKSMLKGKPLYNKIFRQVGDISYEKYAKGIKGRNQIDFCKDLKKQLEGIAEYKKIMQEITNIDDAKTEEERLLFRITNGFAFPKQTTKDNGIIPIQVHLAELKCILDNAEGYLPFLGETDNNGLSVREKIEQIVKFRIPYYVGPLAGTRMSREQGRCWVVRKNEKIYPWNFTEIVNLEESAEKFITNMTAKCTYLVGEDVLPKESLLYSEFMVRNAINNITVDGERLPVDVLEKIFKQLFLAKTSKVTKKTLERFFRQENISFQNIGGIDDKINASMKSYNDFRRIFGEDYIQLHRDEIENIIRWITLFCDEKKMLVTKIKNTYPQISDDEIKAIKKLKYKDWGRLSATLLNSRAIGYEDKAVGEIITIISALRHTNKNLMELLSNYCPYDFIGKIKDFNGSRQSSNGKLTYKDVEELYVSPSVKRSIWQTLTILEEIKKIMGCEPKRIFIEMARSKEESKRTDSRLKKLQDLYKKCKEENIDFMPRKDEFNALKTQLSSKKEDDLRSDKLYLYYTQMGRCMYTGERIELASLNDNNLYDIDHIYPRSKTKDDSLSNRVLVKKQVNAAKTDTYPLDAAIRIKMHSFWKLLYDKGFIDERKYERLTRSTQLRDEELAGFISRQLVETRQSTKAVATILKTAYKHSEVVYVKAGNVSDFRQQFKFVKCREVNDLHHAKDAYLNIVVGNCYYVKFTANPLNFIKKNQDSRSYSLKPEIFYKFNIKRDDDIAWLGGEDGTMATVARTMHKNNILFTRQPLEGKGELFKQNPLKAKSGQLPLKAGLSVEKYGGYDSLTTAYFALVKSEGKKGSVQLSIEGIPLVYAKQGEKAVQDYLTEVVQLCKPEIKIPKIKKYSLFKINGFPMHISGRTGKQLVFYGAGQLCIADDVADYLKKALKYETDIAEKEKTLADQNADDIQKQKAQKGLDFYEQKWGISGAVNVQLYDMFIAKSANNLYKNRPASQTITLKEKREHFVKLTLSKQIHIIKEILNLFKCASASADFKLIDKGTSCGTLKISNNITKLKECILINQSPTGVFEQEVDLMKL

SEQ ID NO: 1435 - protein, 1379 aa, unidentified
  REGION 1..1379: note = Description of Unknown: uncultivated organism with predicted taxonomy: Phascolarctobacterium succinatutens
  REGION 1..1379: note = MG18-83 effector
MQKLQNKDYYIGLDMGDASVGWAVTDANYNILKFNGKALWGIRLFDSANTAASTRVFRSGRRRIDRTTWRLKMLQELFAEEIAKVDPGFFMRLEDSRLHLDDKRDKAVYNLFVDKNYTDKDFYQQYPTMYHLRYALATQAGPFDVRLLYLAVQHIAKHRGHFLFDNLDASKVNDFNAVFSEVENYVRDEMGIEDWSCQNIDELAKVLCDVNLGRTTKQKAMQSLLPAQTKQQKAIIQLFSGGKAKLAELFVDEELDECEKKSVSFQDDDLNEFEPVLTAALGERYEGLLRFKAIYDWSLLAKILHLDTSKKDEDEQHLLSECKVQVYEDHKRDLAVLKSMLKGKPLYNKIFRQDGDISYEKYAKGIKGRNQIDFCKDLKKQLEGIAEYKKIMQEITNIDDAKTEKERLLFRITNGFAFPKQTTKDNGIIPIQVHLAELKCILDNAEGYLPFLGETDNNGLSVREKIEQIVKFRIPYYVGPLAGTRMSREQGRCWVVRKNEKIYPWNFTEIVNLEESAEKFITNMTAKCTYLVGEDVFPKESLLYSEFMVRNAINNITVDGERLPVDVLEKIFKQLFLAKTSKVTKKTLERFFRQENISFQNIGGIDDKINASMKSYNDFRRIFGEDYIQLHRDEIENIIRWITLFCDEKKMLVTKIKNTYPHISDDKIKAIKKLKYKDWGRLSATLLNSSAIAYEDDAFGERVTIISALRHTNKNFMELLSNYCSYDFIGKIKDFNGSRQSSNSKLTYKDVEELYVSPSVKRSIWQTLTILEEIKKIMGREPKRIFIEMARSKEESKRTDSRLKKLQDLYKKCREENIDFMPRKDEFNALKTQLSSKKEEDLRSDKLYLYYTQMGRCMYTGERIELASLYDNNLYDIDHIYPRSKTKDDSLSNRVLVKKQVNAAKTDIYPLDAAIRTKMHSFWKLLYDKGFIDERKYERLTRSTQLRDEELAGFISRQLVETRQSTKAVAAILKTAYQNSEVVYVKAGNVSDFRQQFNFVKCRDVNDLHHAKDAYLNIVVGNCYHVKFTANPLNFITKNQDNRRYSLKPEIFYKFSIKRDGEIAWLGGEDGTMATVARTMHKNNILFTRQAVEGKGELFDQQPLKAKGGQLPLKAGLSIEKYGGYNSLTTAYFAVVKSEGKKGAVQLSIEAIPLVYAKQGEIAVQKYLTEVVQLCKPEIMLPKIKKYSLFKINGFPMHISGRTGNRMLFYGAGQLCLDEADVNYLKKALKYENDIAENELVIADKNSDDIQKQQAQKNLDYYNQKWRIGRKVNMHIYDMLLAKSGNNLYKNRPASQTTDLQEQREFFEKLSLANQIHVIGEVLKLFKCASASANLKLLDKGNACGVIKVSNNILKFKQCVLINQSPTGVFEQEVDLIKL

SEQ ID NO: 1436 - protein, 1379 aa, unidentified
  REGION 1..1379: note = Description of Unknown: uncultivated organism with predicted taxonomy: Phascolarctobacterium succinatutens
  REGION 1..1379: note = MG18-84 effector
MQKSKNCDYYIGLDMGDASVGWAVTDTNYNILKFNGKALWGIRLFDSANTAASTRVFRSGRRRIDRTTWRLKMLQELFAEEIAKVDPGFFMRLEDSRLHLDDKRDKAVYNLFVDKNYTDKDFYQQYPTMYHLRYALATQAVPFDVRLLYLAVQHIAKHRGHFLFDNLDASKVNDFNAVFSEVENYVRDEMGIEDWSCQNIDELAKVLCDVNLGRTTKQKAMQSLLPAQTKQQKAIIQLFSGGKAKLAELFVDEELDECEKNSVSFQDDDLNEFEPVLTAALGERYEGLLRFKAIYDWSLLAKILHLDTSKKDEDEQHLLSECKVQVYEDHKRDLAVLKSMLKGKPLYNKIFRQDGDISYEKYAKGIKGRNQIDFCKDLKKQLEGIAEYKKIMQEITNIDDAKTEEERLLFRITNGFAFPKQTTKDNGIIPIQVHLAELKCILDNAEGYLPFLGETDNNGLSVREKIEQIVKFRIPYYVGPLAGTRMSREQGRCWVVRKNEKIYPWNFTEIVNLEESAEKFITNMTAKCTYLVGEDVLPKESLLYSEFMVRNAINNITVDGERLPVDVLEKIFKQLFLAKTSKVTKKTLERFFRQENISFQNIGGIDDKINASMKSYNDFRRIFGEDYIQLHRDEIENIIRWITLFCDEKKMLVTKIKNTYPQISDDEIKAIKKLKYKDWGRLSATLLNSRAIGYEDKAVGEIITIISALRHTNKNLMELLSNYCPYDFIGKIKDFNGSRQSSNGKLTYKDVEELYVSPSVKRSIWQTLTILEEIKKIMGCEPKRIFIEMARSKEESKRTDSRLKKLQDLYKKCKEENIDFMPRKDEFNALKTQLSSKKEDDLRIDKLYLYYTQMGRCMYTGERIELASLYDNNLYDIDHIYPRSKTKDDSLSNRVLVKKQVNAAKTDTYPLDAAIRIKMHSFWKLLYDKGFIDERKYERLTRSTQLRDEELAGFISRQLVETRQSTKAVATILKTAYKHSEVVYVKAGNVSDFRQQFKFVKCREVNDLHHAKDAYLNIVVGNCYYVKFTANPLNFIKKNQDSRSYSLKPEIFYKFNIKRDDDIAWLGGEDGTMATVARTMHKNNILFTRQPLEGKGELFKQNPLKAKSGQLPLKAGLSVEKYGGYDSLTTAYFALVKSEGKKGSVQLSIEGIPLVYAKQGEKAVQDYLTEVVQLCKPEIKIPKIKKYSLFKINGFPMHISGRTGKQLVFYGAGQLCIADDVADYLKKALKYETDIAEKEKTLADQNADDIQKQKAQKGLDFYEQKWGISGAVNVQLYDMFIAKSANNLYKNRPASQTITLKEKREHFVKLTLSKQIHIIKEILNLFKCASASADFKLIDKGTSCGTLKISNNITKLKECILINQSPTGVFEQEVDLMKL

SEQ ID NO: 1437 - protein, 1379 aa, unidentified
  REGION 1..1379: note = Description of Unknown: uncultivated organism with predicted taxonomy: Phascolarctobacterium
  REGION 1..1379: note = MG18-85 effector
MQKLQNKDYYIGLDMGDASVGWAVTDANYNILKFNGKALWGIRLFDSANTAASTRVFRSGRRRIDRTTWRLKMLQELFADEIAKVDPGFFMRLEDSRLHLDDKRENAVYNLFVDKNYTDKEFHQQYPTMYHLRYALATKKGPFDIRLLYLAVQHIAKHRGHFLFDNLDASTVNDFNAVFSEVENYVHDEMGLEDWSCQNKDALAKVLCDVNLGRTTKQKAMQSLLPAKSKQQKAILQLFSGGKAKLAELFDDEELDDCEKKSISFQDDDLDEIEPVLTAALGERYEGLLRFKAIYDWSLLAKILHLDTGKKEEGEQHLLSECKVQVYEEHKRDLAVLKSMLRGNFLYNKIFRQDGDISYEKYAKGIKGRNQFDFCKDLKKQLECIAEYKKIMQEITSIDAAGTEEERLLFRIANGFAFPKQTTKDNGIIPIQVHLAELKCILDNAEGYLPFLGETDNNSLSVREKIEQIVKFRIPYYVGPLAGTRMSREQGRCWVVRKNEKIYPWNFTEIVNLEESAEKFITNMTAKCTYLFGEDVLPKESLLYSEFMVRNAINNITVDGERLPFDVLEKIFKQLFLAKTSKVTKKTLARFFRQENISFQNIGGIDDKINASMKSYNDFRRIFGEDYIQLHRDEIENIIRWITLFCDEKKMLVTKIKNTYPQISDDEIKAIKKLKYKDWGRLSATLLNSSTIAYEDKAFGELVTIISALRHTNKNFMELLSSYCSYDFIGKIKEFNGSRQSSNGKLTYKDVEELYVSPSVKRSIWQTLTILEEIKKIMGCEPKRIFIEMARSKEESKRTDSRLKKLQDLYKKCREENIDFMPRKDEFNALKTQLSSKKEEDLRSDKLYLYYTQMGRCMYTGERIELASLYDNNLYDIDHIYPRSKTKDDSLSNRVLVKKQINAAKTDTYPLDAAIRTKMHSFWKLLYDKGFIDERKYERLTRSTQLRDEELAGFISRQLVETRQSTKAVAAILKTAYQNSEVVYVKAGNVSDFRQQFKFVKCREVNDLHHAKDAYLNIVVGNCYHVKFTANPLNFITKNQDNRRYSLKPEIFYKFSIKRDGEIAWLGGEDGTMATVARTMHKNNILFTRQAVEGKGELFDQQPLKAKGGQLPLKAGLAIEKYGGYNSLTTAYFAVVKSEGKKGAVQLSIEAIPLVYAKQGEIAVQKYLTEVVQLCKPEIMLPKIKKYSLFKINGFPMHISGRTGNRMLFYGAGQLCLDEADVNYLKKALKYENDIAENELVIADKNSDDIQKQQAQKKLDYYNQKWRIGRKVNMHIYDMLLAKSGNNLYKNRPASQTTDLQEQREFFEKLSLANQIHVIGEVLKLFKCASASANLKLLDKGNACGVIKVSNNILKFKQCVLINQSPTGVFEQEVDLMKL

SEQ ID NO: 1438 - protein, 1379 aa, unidentified; identical to SEQ ID NO: 1361
  REGION 1..1379: note = Description of Unknown: uncultivated organism with predicted taxonomy: Phascolarctobacterium succinatutens
  REGION 1..1379: note = MG18-86 effector

SEQ ID NO: 1439 - protein, 1379 aa, unidentified
  REGION 1..1379: note = Description of Unknown: uncultivated organism with predicted taxonomy: Phascolarctobacterium succinatutens
  REGION 1..1379: note = MG18-87 effector
MQKLKNCDYYIGLDMGDASVGWAVTDTNYNILKFNGKALWGIRLFDSANTAASTRVFRSGRRRIDRTTWRLKMLQELFAEEIAKVDPGFFMRLEDSRLHLDDKRDKAVYNLFVDKNYTDKDFYQQYPTMYHLRYALATQAGPFDVRLLYLAVQHIAKHRGHFLFDNLDASKVNDFNAVFSEVENYVRDEMGIEDWSCQNIDELAKVLCDVNLGRTTKQKAMQSLLPAQTKQQKAIIQLFSGGKAKLAELFVDAELDECEKKSVSFQDDDLNEFEPVLTAALGERYEGLLRFKAIYDWSLLAKILHLDTSKKDEDEQHLLSECKVQVYEDHKRDLAVLKSMLKGKPLYNKIFRQDGDISYEKYAKGIKGRNQIDFCKDLKKQLEGIAEYKKIMQEITSIDDAKTEEERLLFRITNGFAFPKQTTKDNGIIPIQVHLAELKCILDNAEGYLPFLGETDNNGLSVREKIEQIVKFIIPYYVGPLAGTRMSREQGRCWVVRKNEKIYPWNFTEIVNSEESAEKFITNMTAKCTYLVGEDVLPKESLLYSEFMVRNAINNITVDGERLPVDVLEKIFKQLFLAKTSKVTKKTLERFFRQENISFQNIGGIDDKINASMKSYNDFRRIFGEDYIQLHRDEIENIIRWITLFCDEKKMLVTKIKNTYPQISDDEIKAIKKLKYKDWGRLSATLLNSSAIAYEDKAFGELVTIISALRHTNKNFMELLSSYCSYDFIGKIKEFNGSRQSSNGKLTYKDVEELYVSPSVKRSIWQTLTILEEIKKIMGCEPKRIFIEMARSKEESKRTDSRLKKLQDLYKKCREENIDFMPRKDEFNTLKTQLSSKKEDDLRSDKLYLYYTQMGRCMYTGEKIELASLYDNNLYDIDHIYPRSKTKDDSLSNRVLVKKQVNAAKTDTYPLDAAIRTKMHSFWKLLYDKGFIDERKYERLTRSTQLRDEELAGFISRQLVETRQSTKAVAAILKTAYQNSEVVYVKAGNVSDFRQQFKFVKCREVNDLHHAKDAYLNIVVGNCYHVKFTANPLNFITKNQDNRRYSLKPEIFYKFSIKRDGEIAWLGGEDGTMATVARTMHKNNILFTRQAVEGKGELFDQQPLKAKGGQLPLKAGLSIEKYGGYNSLTTAYFAVVKSEGKKGAVQLSIEAIPLVYAKQGEIAVQKYLTEVVQLCKPEIMLPKIKKYSLFKINGFPMHISGRTGNRMLFYGAGQLCLDEADVDYLKKALKYENDIAENELVIADKNSDDIQKQQAQKNLDYYNQKWRIGRKVNMHIYDMLLAKSGNNLYKNRPASQTTDLQEQREFFEKLSLANQIHVIGEVLKLFKCASASANLKLLDKGNACGVIKVSNNILKFKQCVLINQSPTGVFEQEVDLMKL

SEQ ID NO: 1440 - protein, 1379 aa, unidentified; identical to SEQ ID NO: 1358
  REGION 1..1379: note = Description of Unknown: uncultivated organism with predicted taxonomy: Phascolarctobacterium
  REGION 1..1379: note = MG18-88 effector

SEQ ID NO: 1441 - protein, 1379 aa, unidentified
  REGION 1..1379: note = Description of Unknown: uncultivated organism with predicted taxonomy: Firmicutes
  REGION 1..1379: note = MG18-89 effector
MQKLKNCDYYIGLDMGDASVGWAVTDTNYNILKFNGKALWGIRLFDSANTAASTRVFRSGRRRIDRTTWRLKMLQELFAEEIAKVDPGFFMRLEDSRLHLDDKRDKAVYNLFVDKNYTDKDFYQQYPTMYHLRYALATQAGPFDVRLLYLAVQHIAKHRGHFLFDNLDASKVNDFNAVFSEVENYVRDEMGIEDWSCQNIDELAKVLCDVNLGRTTKQKAMQSLLPAQTKQQKAIIQLFSGGKAKLAELFVDEELDECEKKSVSFQDDDLNEFEPVLTAALGERYEGLLRFKAIYDWSLLAKILHLDTSKKDEGEQHLLSECKVQVYEDHKRDLAVLKSMLKGKPLYNKIFRQDGDISYEKYAKGIKGRNQIDFCKDLKKQLEGIAEYKKIMQEITSIDDAKTEEERLLFRITNGFAFPKQTTKDNGIIPIQVHLAELKCILDNAEGYLPFLGETDNNGLSVREKIEQIVKFRIPYYVGPLAGTRMSREQGRCWVVRKNEKIYPWNFTEIVNLEESAEKFITNMTAKCTYLVGEDVLPKESLLYSEFMVRNAINNITVDGERLPVDVLEKIFKQLFLAKTSKVTKKTLERFFRQENISFQNIGGIDDKINASMKSYNDFRRIFGEDYIQLHRDEIENIIRWITLFCDEKKMLVTKIKNTYPQISDDEIKAIKKLKYKDWGRLSATLLNSSTIAYEDKAFGELVTIISALRHTNKNFMELLSRYCSYDFIGKIKEFNGRRQSSNGKLTYKDVEELYVSPSVKRSIWQTLTILEEIKKIMGCEPKRIFIEMARSKEESKRTDSRLKKLQDLYKKCREENIDFMPRKDEFNVLKTQLSSKKEEDLRSDKLYLYYTQMGRCMYTGERIELASLYDNNLYDIDHIYPRSKTKDDSLSNRVLVKKQINAAKTDTYPLDAAIRTKMHSFWKLLYDKGFIDERKYERLTRSTQLRDEELAGFISRQLVETRQSTKAVAAILKTAYQNSEVVYVKAGNVSDFRQQFKFVKCREVNDLHHAKDAYLNIVVGNCYHVKFTANPLNFITKNQDNRRYSLKPEIFYKFSIKRDGEIAWLGGEDGTMETVARTMHKNNILFTRQAVEGKGELFDQQPLKAKGGQLPLKAGLSIEKYGGYNSLTTAYFAVVKSEGKKGAVQLSIEAIPLVYAKQGEIAVQKYLTEVVQLCKPEIMLPKIKKYSLFKINGFPMHISGRTGNRMLFYGAGQLCLDEADVNYLKKALKYENDIAENELVIADKNSDDIQKQQAQKNLDYYNQKWRIGRKVNMHIYDMLLAKSGNNLYKNRPASQTTDLQEQREFFEKLSLANQIHVIGEVLKLFKCASASANLKLLDKGNACGVIKVSNNILKFKQCVLINQSPTGVFEQEVDLMKL

SEQ ID NO: 1442 - protein, 1379 aa, unidentified
  REGION 1..1379: note = Description of Unknown: uncultivated organism with predicted taxonomy: Phascolarctobacterium
  REGION 1..1379: note = MG18-90 effector
MQRLKNCDYYIGLDMGDASVGWAVTDTNYNILKFNGKALWGIRLFDSANTAASTRVFRSGRRRIDRTTWRLKMLQELFAEEIAKVDPGFFMRLEDSRLHLDDKRDKAVYNLFVDKNYTDKDFYQQYPTMYHLRYALATQAGPFDVRLLYLAVQHIAKHRGHFLFDNLDASKVNDFNAVFSEVENYVRDEMGIEDWSCQNIDELAKVLCDVNLGRTTKQKAMQSLLPAQTKQQKAIIQLFSGGKAKLAELFVDEELDECEKKSVSFQDDDLNEFEPVLTAALGERYEGLLRFKAIYDWSLLAKILHLDTSKKDEDEQHLLSECKVQVYEDHKRDLAVLKSMLKGKPLYNKIFRQDGDISYEKYAKGIKGRNQIDFCKDLKKQLEGIAEYKKMMQEITSIDDAKTEEERLLFRITNGFAFPKQTTKDNGIIPIQVHLAELKCILDNAEGYLPFLGETDNNGLSVREKIEQIVKFRIPYYVGPLAGTRMSREQGRCWVVRKNEKIYPWNFTEIVNLEESAEKFITNMTAKCTYLVGEDVLPKESLLYSEFMVRNAINNITVDGERLPVDVLEKIFKQLFLAKTSKVTKKTLERFFRQENISFQNIGGIDDKINASMKSYNDFRRIFGEDYIQLHRDEIENIIRWITLFCDEKKMLVTKIKNTYPQISDDEIKAIKKLKYKDWGRLSATLLNSSTIAYEDKAFGELVTIISALRHTNKNFMELLSSYCSYDFIGKIKEFNGSRQSSNGKLTYKDVEELYVSPSVKRSIWQTLTILEEIKKIMGCEPKRIFIEMARSKEESKRTDSRLKKLQDLYKKCREENIDFMPRKDEFNTLKTQLSSKKEDDLRIDKLYLYYTQMGRCMYTGEKIELASLYDNNLYDIDHIYPRSKTKDDSLSNRVLVKKQVNAAKTDTYPLDAAIRTKMHSFWKLLYDKGFIDERKYQRLTRSTQLRDEELAGFISRQLVETRQSTKAVAAILKTAYQNSEVVYVKAGNVSDFRQQFKFVKCREVNDLHHAKDAYLNIVVGNCYHVKFTANPLNFITKNQDNRRYSLKPEIFYKFSIKRDSEIAWIGGKDGTITTVTKTMHKNNILFTRQPVEGKGELFKQQPLKAKSGQLPLKAGLSVEKYGGYDSLTTAYFALVKSEGKKGAVQLSIEGIPLVYAKQGEIAVQKYLTEVVQLCKPEIMLPKIKKYSLFKINGFPMHISGRQLKQLQFYVASQLCIDEYSIAYLKKAFKYENNLAVNDEIIADKNADEEKKQKARKRLDFYEKTWGIGKENNMRIYDILLAKSANNLYKKRPASQSATLEKRRENFKGLFVSKQIHVLKEILNLFKCLSATADLQLLGAGKNVGKVTWNTNISNVKQCILINQSPTGIFEQEVDLMKL

SEQ ID NO: 1443 - protein, 1379 aa, unidentified
  REGION 1..1379: note = Description of Unknown: uncultivated organism with predicted taxonomy: Phascolarctobacterium succinatutens
  REGION 1..1379: note = MG18-91 effector
MQKLKNCDYYIGLDMGDASVGWAVTDTNYNILKFNGKALWGIRLFDSANTAASTRVFRSGRRRIDRTTWHLKMLQELFAEEIAKVDPGFFMRLEDSRLHLDDKRDKAVYNLFVDKNYTDKDFYQQYPTMYHLRYALATQAGPFDVRLLYLAVQHIAKHRGHFLFDNLDASKVNDFNAVFSEVENYVRDEMGIEDWSCQNIDELAKVLCDVNLGRTTKQKAMQSLLPAQTKQQKAIIQLFSGGKAKLAELFVDEELDECEKKSVSFQDDDLNEFEPVLTAALGERYEGLLRFKAIYDWSLLAKILHLDTSKKDEGEQHLLSECKVQVYEDHKRDLAVLKSMLKGKPLYNKIFRQDGDISYEKYAKGIKGRNQIDFCKDLKKQLEGIAEYKKIMQEITSIDDAKTEEERLLFRITNGFAFPKQTTKDNGIIPIQVHLAELKCILDNAEGYLPFLGETDNNGLSVREKIEQIVKFRIPYYVGPLAGTRMSREQGRCWVVRKNEKIYPWNFTEIVNLEESAEKFITNMTAKCTYLVGEDVLPKESLLYSEFMVRNAINNITVDGERLPVDVLEKIFKQLFLAKTSKVTKKTLERFFRQENISFQNIGGIDDKINASMKSYNDFRRIFGEDYIQLHRDEIENIIRWITLFCDEKKMLVTKIKNTYPQISDDEIKAIKKLKYKDWGRLSATLLNSSTIAYEDKAFGELVTIISALRHTNKNFMELLSSYCSYDFIGKIKEFNGRRQSSNGKLTYKEVEDLYVSPSVKRSIWQTLTILEEIKKIMGCEPKRIFIEMARSKEESKRTDSRLKKLQDLYKKCREENIDFMPRKDEFNALKTQLSSKKEEDLRSDKLYLYYTQMGRCMYTGERIELASLYDNNLYDIDHIYPRSKTKDDSLSNRVLVKKQVNAAKTDIYPLDAAIRTKMHSFWKLLYDKGFIDERKYERLTRSTQLRDEELAGFISRQLVETRQSTKAVAAILKTAYQNSEVVYVKAGNVSDFRQQFNFVKCRDVNDLHHAKDAYLNIVVGNCYHVKFTANPLNFITKNQDNRRYSLKPEIFYKFNIKRDDDIAWLGGADGTMATVARTMHKNNILFTRQPLEGKGELFKQNPLKAKSGQLPLKAGLSVEKYGGYDSLTTAYFALVKSEGKKGSVQLSIEGIPLVYAKQGEKAVQDYLTEVVQLCKPEIKIPKIKKYSLFKINGFPMHISGRQGKQLIFYVAGQLCINEDSIAYLKKAFKYESDLAVNEEILADENGDEVRKQKARNRLAFYDNTWGISLEANMQLYDMLLAKSANNLYKNRPASQTSTLKEQREQFSILPLSKQIHVIKEILKLFKCASATADFKLLEKGSTCGKIQVSTNITKCKQCILINQSPTGVFEQEVDLMKL

SEQ ID NO: 1444 - protein, 1379 aa, unidentified
  REGION 1..1379: note = Description of Unknown: uncultivated organism with predicted taxonomy: Phascolarctobacterium succinatutens
  REGION 1..1379: note = MG18-92 effector
MQKLKNCDYYIGLDMGDASVGWAVTDTNYNILKFNGKALWGIRLFDSANTAASTRVFRSGRRRIDRTTWRLKMLQELFAEEIAKVDPGFFMRLEDSRLHLDDKRDKAVYNLFVDKNYTDKDFYQQYPTMYHLRYALATQAGPFDVRLLYLAVQHIAKHRGHFLFDNLDASKVNDFNAVFSEVENYVRDEMGIEDWSCQNIDELAKVLCDVNLGRTTKQKAMQSLLPAQTKQQKAIIQLFSGGKAKLAELFVDAELDECEKKSVSFQDDDLNEFEPVLTAALGERYEGLLRFKAIYDWSLLAKILHLDTSKKDEDEQHLLSECKVQVYEDHKRDLAVLKSMLKGKPLYNKIFRQDGDISYEKYAKGIKGRNQIDFCKDLKKQLEGIAEYKKIMQEITSIDDAKTEEERVLFRITNGFAFPKQTTKDNGIIPIQVHLAELKCILDNVEGYLPFLGETDNNGLSVREKIEQIVKFRIPYYVGPLAGTRMSREQGRYWVVRKNEKIYPWNFTEIVNLEESAEKFITNMTAKCTYLVGEDVLPKESLLYSEFMVRNAINNITVDGERLPVDVLEKIFKQLFLAKTSKVTKKTLERFFRQENISFQNIGGIDDKINASMKSYNDFRRIFGEDYIQLHRDEIENIIRWITLFCDEKKMLVTKIKNTYPQISDDEIKAIKKLKYKDWGRLSATLLNSSAIAYEDKAFGELVTIISALRHTNKNFMELLSSYCSYDFIGKIKEFNGSRQSSNGKLTYKDVEELYVSPSVKRSIWQTLTILEEIKKIMGCEPKRIFIEMARSKEESKRTDSRLKKLQDLYKKCREENIDFMPRKDEFNTLKTQLSSKKEDDLRSDKLYLYYTQMGRCMYTGEKIELASLYDNNLYDIDHIYPRSKTKDDSLSNRVLVKKQVNAAKTDIYPLDAAIRTKMHSFWKLLYDKGFIDERKYQRLTRSTQLRDEELAGFISRQLVETRQSTKAVAAILKTAYQNSEVVYVKAGNVSDFRQQFKFVKCREVNDLHHAKDAYLNIVVGNCYHVKFTANPLNFITKNQDNRRYSLKPEIFYKFSIKRDGEIAWLGGEDGTMATVARTMHKNNILFTRQAVEGKGELFDQQPLKAKGGQLPLKAGLSIEKYGGYNSLTTAYFAVVKSEGKKGAVQLSIEAIPLVYAKQGEIAVQKYLTKVVQLCKPEIMLPKIKKYSLFKINGFPMHISGRTGNRMLFYGAGQLCLDEADVDYLKKALKYENDIAENELVIADKNSDDIQKQQAQKNLDYYNQKWRIGRKVNMHIYDMLLAKSGNNLYKNRPASQTTDLQEQREFFEKLSLANQIHVIGEVLKLFKCASASANLKLLDKGNACGVIKVSNNILKFKQCVLINQSPTGVFEQEVDLMKL

SEQ ID NO: 1445 - protein, 1379 aa, unidentified
  REGION 1..1379: note = Description of Unknown: uncultivated organism
  REGION 1..1379: note = MG18-93 effector
MQKSKNCDYYIGLDMGDASVGWAVTDTNYNILKFNGKALWGIRLFDSANTAASTRVFRSGRRRIDRTTWRLKMLQELFAEEIAKVDPGFFMRLEDSRLHLDDKRDKAVYNLFVDKNYTDKDFYQQYPTMYHLRYALATQAVPFDVRLLYLAVQHIAKHRGHFLFDNLDASKVNDFNAVFSEVENYVRDEMGIEDWSCQNIDELAKVLCDVNLGRTTKQKAMQSLLPAQTKQQKAIIQLFSGGKAKLAELFVDEELDECEKNSVSFQDDDLNEFEPVLTAALGERYEGVLRFKAIYDWSLLAKILHLDTSKKDEDEQHLLSECKVQVYEDHKRDLAVLKSMLKGKPLYNKIFRQDGDISYEKYAKGIKGRNQIDFCKDLKKQLEGIAEYKKIMQEITNIDDAKTEEERLLFRITNGFAFPKQTTKDNGIIPIQVHLAELKCILDNAEGYLPFLGETDNNGLSVREKIEQIVKFRIPYYVGPLAGTRMSREQGRCWVVRKNEKIYPWNFTEIVNLEESAEKFITNMTAKCTYLVGEDVLPKESLLYSEFMVRNAINNITVDGERLPVDVLEKIFKQLFLAKTSKVTKKTLERFFRQENISFQNIGGIDDKINASMKSYNDFRRIFGEDYIQLHRDEIENIIRWITLFCDEKKMLVTKIKNTYPQISDDEIKAIKKLKYKDWGRLSATLLNSRAIGYEDKAVGEIITIISALRHTNKNLMELLSNYCPYDFIGKIKDFNGSRQSSNGKLTYKDVEELYVSPSVKRSIWQTLTILEEIKKIMGCEPKRIFIEMARSKEESKRTDSRLKKLQDLYKKCKEENIDFMPRKDEFNALKTQLSSKKEDDLRSDKLYLYYTQMGRCMYTGERIELASLNDNNLYDIDHIYPRSKTKDDSLSNRVLVKKQVNAAKTDTYPLDAAIRIKMHSFWKLLYDKGFIDERKYERLTRSTQLRDEELAGFISRQLVEMRQSTKAVATILKTAYKHSEVVYVKAGNVSDFRQQFKFVKCREVNDLHHAKDAYLNIVVGNCYYVKFTANPLNFIKKNQDSRSYSLKPEIFYKFNIKRDDDIAWLGGEDGTMATVARTMHKNNILFTRQPLEGKGELFKQNPLKAKSGQLPLKAGLSVEKYGGYDSLTTAYFALVKSEGKKGSVQLSIEGIPLVYAKQGEKAVQDYLTEVVQLCKPEIKIPKIKKYSLFKINGFPMHISGRTGKQLVFYGAGQLCIADDVADYLKKALKYETDIAEKEKTLADQNADDIQKQKAQKGLDFYEQKWGISGAVNVQLYDMFIAKSANNLYKNRPASQTITLKEKREHFVKLTLSKQIHIIKEILNLFKCASASADFKLIDKGTSCGTLKISNNITKLKECILINQSPTGVFEQEVDLMKL

SEQ ID NO: 1446 - protein, 1379 aa, unidentified; identical to SEQ ID NO: 1423
  REGION 1..1379: note = Description of Unknown: uncultivated organism with predicted taxonomy: Phascolarctobacterium succinatutens
  REGION 1..1379: note = MG18-94 effector

SEQ ID NO: 1447 - protein, 1363 aa, unidentified
  REGION 1..1363: note = Description of Unknown: uncultivated organism
  REGION 1..1363: note = MG18-95 effector
MQKLKNCDYYIGLDMGDASVGWAVTDTNYNILKFNGKALWGIRLFDSANTAASTRVFRSGRRRIDRTTWRLKMLQELFAEEIAKVDPGFFMRLEDSRLHLDDKRDKEVYNLFVDKNYTDKDFYQQYPTMYHLRYALATQAGPFDVRLLYLAVQHIAKHRGHFLFDNLDASKVNDFNAVFSEVENYVRDEMGIEDWSCQNIDELAKVLCDVNLGRTTKQKAMQSLLPAQTKQQKAIIQLFSGGKAKLAELFADEELDECEKKSVSFQDDDLNEFEPVLTAALGERYEGLLRFKAIYDWSLLAKILHLDTSKKDKDEQHLLSECKVQVYEDHKRDLAVLKSMLKGKPLYNKIFRQDGDISYEKYAKGIKGRNQIDFCKDLKKQLEGIAEYKKIMQEITSIDDAKTEEERLLFRITNGFAFPKQTTKDNGIIPIQVHLAELKCILDNAEGYLPFLGETDNNGLSVREKIEQIVKFIIPYYVGPLAGTRMSREQGRCWVVRKNEKIYPWNFTEIVNLEESAEKFITNMTAKCTYLVGEDVLPKESLLYSEFMVRNAINNITVDGERLPVDVLEKIFKQLFLAKTSKVTKKTLERFFRQENISFQNIGGIDDKINASMKSYNDFRRIFGEDYIQLHRDEIENIIRWITLFCDEKKMLVTKIKNTYPQISDDEIKAIKKLKYKDWGRLSATLLNSSAIAYEDKAFGELVTIISALRHTNKNFMELLSSYCSYDFIGKIKEFNGSRQSSNGKLTYKDVEELYVSPSVKRSIWQTLTILEEIKKIMGCEPKRIFIEMARSKEESKRTDSRLKKLQDLYKKCREENIDFMPRKDEFNTLKTQLSSKKEDDLRSDKLYLYYTQMGRCMYTGEKIELASLYDNNLYDIDHIYPRSKTKDDSLSNRVLVKKQVNAAKTDTYPLDAAIRTKMHSFWKLLYDKGFIDERKYQRLTRSTQLRDEELAGFISRQLVETRQSTKAVAAILKTAYQNSEVVYVKAGNVSDFRQQFKFVKCREVNDLHHAKDAYLNIVVGNCYHVKFTANPLNFITKNQDNRRYSLKPEIFYKFSIKRDGEIAWLGGEDGTMATVARTMHKNNILFTRQPLEGKGELFKQNPLKAKSGQLPLKAGLSVEKYGGYDSLTTAYFALVKSEGKKGSVQLSIEGIPLVYAKQGEKAVKDYLTEVVQLCKPEIKIPKIKKYSLFKINGFPMHISGRQGKQLIFYVAGQLCINEDSIAYLKKVFKYESDLAVNEEILADENGDEVRKQKARNRLAFYDNTWGISLEANMQLYDMLLAKSANNLYKNRPASQTSTLKEQREQFSILPLSKQIHVIKEILKLFKCASATADFKLLEKGSTCGKIQVSTNILQVFLNRKWI

SEQ ID NO: 1448 - protein, 1222 aa, unidentified
  REGION 1..1222: note = Description of Unknown: uncultivated organism with predicted taxonomy: Clostridium sp. CAG:964
  REGION 1..1222: note = MG18-96 effector
RTTWRLKMLQELFAEEIAKVDPGFFMRLEDSRLHLDDKRDKAVYNLFVDKNYTDKDFYQQYPTMYHLRYALATQAGPFDVRLLYLAVQHIAKHRGHFLFDNLDASKVNDFNAVFSEVENYVRDEMGIEDWSCQNIDELAKVLCDVNLGRTTKQKAMQSLLPAQTKQQKAIIQLFSGGKAKLAELFVDAELDECEKKSVSFQDDDLNEFEPVLTAALGERYEGLLRFKAIYDWSLLAKILHLDTSKKDEDEQHLLSECKVQVYEDHKRDLAVLKSMLKGKPLYNKIFRQDGDISYEKYAKGIKGRNQIDFCKDLKKQLEGIAEYKKIMQEITSIDDAKTEEERVLFRITNGFAFPKQTTKDNGIIPIQVHLAELKCILDNVEGYLPFLGETDNNGLSVREKIEQIVKFRIPYYVGPLAGTRMSREQGRYWVVRKNEKIYPWNFTEIVNLEESAEKFITNMTAKCTYLVGEDVLPKESLLYSEFMVRNAINNITVDGERLPVDVLEKIFKQLFLAKTSKVTKKTLERFFRQENISFQNIGGIDDKINASMKSYNDFRRIFGEDYIQLHRDEIENIIRWITLFCDEKKMLVTKIKNTYPQISDDEIKAIKKLKYKDWGRLSATLLNSSAIAYEDKAFGELVTIISALRHTNKNFMELLSSYCSYDFIGKIKEFNGSRQSSNGKLTYKDVEELYVSPSVKRSIWQTLTILEEIKKIMGCEPKRIFIEMARSKEESKRTDSRLKKLQDLYKKCREENIDFMPRKDEFNTLKTQLSSKKEDDLRSDKLYLYYTQMGRCMYTGEKIELASLYDNNLYDIDHIYPRSKTKDDSLSNRVLVKKQVNAAKTDIYPLDAAIRTKMHSFWKLLYDKGFIDERKYQRLTRSTQLRDEELAGFISRQLVETRQSTKAVAAILKTAYQNSEVVYVKAGNVSDFRQQFKFVKCREVNDLHHAKDAYLNIVVGNCYHVKFTANPLNFITKNQDNRRYSLKPEIFYKFSIKRDGEIAWLGGEDGTMATVARTMHKNNILFTRQAVEGKGELFDQQPLKAKGGQLPLKAGLSIEKYGGYNSLTTAYFAVVKSEGKKGAVQLSIEAIPLVYAKQGEIAVQKYLTKVVQLCKPEIMLPKIKKYSLFKINGFPMHISGRTGNRMLFYGAGQLCLDEADVDYLKKALKYENDIAENELVIADKNSDDIQKQQAQKNLDYYNQKWRIGRKVNMHIYDMLLAKSGNN

SEQ ID NO: 1449 - protein, 1379 aa, unidentified; identical to SEQ ID NO: 1397
  REGION 1..1379: note = Description of Unknown: uncultivated organism with predicted taxonomy: Phascolarctobacterium succinatutens
  REGION 1..1379: note = MG18-97 effector

SEQ ID NO: 1450 - protein, 1379 aa, unidentified
  REGION 1..1379: note = Description of Unknown: uncultivated organism with predicted taxonomy: Phascolarctobacterium succinatutens
  REGION 1..1379: note = MG18-98 effector
MQKLKNCDYYIGLDMGDASVGWAVTDTNYNILKFNGKALWGIRLFDSANTAASTRVFRSGRRRIDRTTWRLKMLQELFAEKIAKVDPGFFMRLEDSRLHLDDKRDKAVYNLFVDKNYTDKVFYQQYPTMYHLRYALATQAGPFDVRLLYLAVQHIAKHRGHFLFDNLDASKVNNFNAVFSEVENYVRDEMGIEDWSCQNIDELAKVLCDVNLGRTTKQKAMQSLLPAQTKQQKAIIQLFSGGKAKLAELFVDEELDECEKKSVSFQDDDLNEFEPVLTAALGERYEGLLRFKAIYDWSLLAKILHLDTSKKDEGEQHLLSECKVQVYEDHKRDLAVLKSMLKGKPLYNKIFRQDGDISYEKYAKGIKGRNQIDFCKDLKKQLEGIAEYKKIMQEITSIDDAKTEEERLLFRITNGFAFPKQTTKDNGIIPIQVHLAELKCILDNAEGYLPFLGETDNNGLSVREKIEQIVKFRIPYYVGPLAGTRMSREQGRCWVVRKNEKIYPWNFTEIVNLEESAEKFITNMTAKCTYLVGEDVLPKESLLYSEFMVRNAINNITVDGERLPVDVLEKIFKQLFLAKTSKVTKKTLERFFRQENISFQNIGGIDDKINASMKSYNDFRRIFGEDYIQLHRDEIENIIRWITLFCDEKKMLVTKIKNTYPQISDDEIKAIKKLKYKDWGRLSATLLNSSTIAYEDKAFGELVTIISALRHTNKNFMELLSSYCSYDFIGKIKEFNGRRQSSNGKLTYKEVEDLYVSPSVKRSIWQTLTILEEIKKIMGCEPKRIFIEMARSKEESKRTDSRLKKLQDLYKKCREENIDFMPRKDEFNALKTQLSSKKEEDLRSDKLYLYYTQMGRCMYTGERIELASLYDNNLYDIDHIYPRSKTKDDSLSNRVLVKKQVNAAKTDIYPLDAAIRTKMHSFWKLLYDKGFIDERKYERLTRSTQLRDEELAGFISRQLVETRQSTKAVAAILKTAYQNSEVVYVKAGNVSDFRQQFNFVKCRDVNDLHHAKDAYLNIVVGNCYHVKFTANPLNFITKNQDNRRYSLKPEFFYKFNIKRDDDIAWLGGADGTMATVARTMHKNNILFTRQPLEGKGELFKQNPLKAKSGQLPLKAGLSVEKYGGYDSLTTAYFALVKSEGKKGSVQLSIEGIPLVYAKQGEKAVQDYLTEVVQLCKPEIKIPKIKKYSLFKINGFPMHISGRQGKQLIFYVAGQLCINEDSIAYLKKAFKYESDLAVNEEILADENGDEVRKQKARNRLAFYDNTWGISLEANMQLYDMLLAKSANNLYKNRPASQTSTLKEQREQFSILPLSKQIHVIKEILKLFKCASATADFKLLEKGSTCGKIQVSTNITKCKQCILINQSPTGVFEQEVDLMKL

SEQ ID NO: 1451 - protein, 1379 aa, unidentified; identical to SEQ ID NO: 1357
  REGION 1..1379: note = Description of Unknown: uncultivated organism with predicted taxonomy: Firmicutes
  REGION 1..1379: note = MG18-99 effector

SEQ ID NO: 1452 - protein, 1379 aa, unidentified
  REGION 1..1379: note = Description of Unknown: uncultivated organism with predicted taxonomy: Phascolarctobacterium succinatutens
  REGION 1..1379: note = MG18-100 effector
MHKLKNCDYYIGLDMGDASVGWAVTDTNYNILKFNGKALWGIRLFDSANTAASTRVFRSGRRRIDRTTWRLKMLQELFAEEIAKVDPGFFMRLEDSRLHLDDKRDKAVYNLFVDKNYTDKDFYQQYPTMYHLRYALATQAGPFDVRLLYLAVQHIAKHRGHFLFDNLDASKVNDFNAVFSEVENYVRDEMGIEDWSCQNIDELAKVLCDVNLGRTTKQKAMQSLLPAQTKQQKAIIQLFSGGKAKLAELFADEELDECEKKSVSFQDDDLNEFEPVLTAALGERYEGLLRFKAIYDWSLLAKILHLDTSKKDKDEQHLLSECKVQVYEDHKRDLAVLKSMLKGKPLYNKIFRQDGDISYEKYAKGIKGRNQIDFCKDLKKQLEGIAEYKKIMQEITNIDDAKTEEERLLFRITNGFAFPKQTTKDNGIIPIQVHLAELKCILDNAEGYLPFLGETDNNGLSVREKIEQIVKFRIPYYVGPLAGTRMSREQGRCWVVRKHEKIYPWNFTEIVNLEESAEKFITNMTAKCTYLVGEDVLPKESLLYSEFMVRNAINNITVDGERLPVDVLEKIFKQLFLAKTSKVTKKTLERFFRQENISFQNIGGIDDKINASMKSYNDFRRIFGEDYIQLHRDEIENIIRWITLFCDEKKMLVTKIKNTYPQISDDEIKAIKKLKYKDWGRLSATLLNSSAIAYEDKAFGELVTIISALRHTNKNFMELLSSYCYYDFIGKIKEFNGSRQSSNGKLTYKDVEELYVSPSVKRSIWQTLTILEEIKKIMGCEPKRIFIEMARSKEESKRTDSRLKKLQDLYKKCREENIDFMPRKDEFNALKTQLSSKKEEDLRSDKLYLYYTQMGRCMYTGERIELASLYDNNLYDIDHIYPRSKTKDDSLSNRVLVKKQVNAAKTDTYPLDAAIRTKMHSFWKLLYDKGFIDERKYERLTRSTQLRDEELAGFISRQLVETRQSTKAVAAILKTAYQNSEVVYVKAGNVSDFRQQFKFVKCREVNDLHHAKDAYLNIVVGNCYHVKFTANPLNFITKNQDNRRYSLKPEIFYKFSIKRDGEIAWLGGEDGTMATVARTMHKNNILFTRQAVEGKGELFDQQPLKAKGGQLPLKAGLSIEKYGGYNSLTTAYFAVVKSEGKKGAVQLSIEAIPLVYAKQGEIAVQKYLTEVVQLCKPEIKIPKIKKYSLFKINGFPMHISGRTGKQLVFYGAGQLCIADDVADYLKKALKYETDIAEKEKTLADQNADDIHKQKAQKGLDFYEQKWGISGAVNVQLYDMFIAKSANNLYKNRPASQTITLKEKREHFVKLTLSKQIHIIKEILNLFKCASASADFKLIDKGTSCGTLKISNNITKLKECILINQSPTGVFEQEVDLMKL

SEQ ID NO: 1453 - protein, 1379 aa, unidentified
  REGION 1..1379: note = Description of Unknown: uncultivated organism with predicted taxonomy: Firmicutes
  REGION 1..1379: note = MG18-101 effector
MQKLKNCDYYIGLDMGDASVGWAVTDTNYNILKFNGKALWGIRLFDSANTAASTRVFRSGRRRIDRTTWRLKMLQELFAEEIAKVDPGFFMRLEDSRLHLDDKRDKAVYNLFVDKIYTDKDFYQQYPTMYHLRYALATQAGPFDVRLLYLAVQHIAKHRGHFLFDNLDASKVNDFNAVFSEVENYVRDEMGIEDWSCQNIDELAKVLCDVNLGRTTKQKAMQSLLPAQTKQQKAIIQLFSGGKAKLAELFGDAELDECEKKSVSFQDDDLDELEPVLTAALGERYEGLLRFKAIYDWSLLAKILHLDTSKKDEDEQHLLSECKVQVYEDHKRDLAVLKSMLKGKPLYNKIFRQDGDISYEKYAKGIKGRNQIDFCKDLKKQLEGIAEYKKIMQEITSIDDAKTEEERLLFRITNGFAFPKQTTKDNGIIPIQVHLAELKCILDNAEGYLPFLGETDNNGLSVREKIEQIVKFRIPYYVGPLAGTRMSREQGRCWVVRKNEKIYPWNFTEIVNLEESAEKFITNMTAKCTYLVGEDVLPKESLLYSEFMVRNAINNITVDGERLPADVLEKIFKQLFLEKTSKVTKKTLERFFRQENISFQNIGGIDDKINASMKSYNDFRRIFGEDYIQLHRDEIENIIRWITLFCDEKKMLVTKIKNTYPQISDDEIKAIKKLKYKDWGRLSATLLNSRAIGYEDKAVGEIITIISALRHTNKNLMELLSNYCPYDFIGKIKDFNGSRQSSNGKLTYKDVEELYVSPSVKRSIWQTLTILEEIKKIMGCEPKRIFIEMARSKEESKRTDSRLKKLQDLYKKCKEENIDFMPRKDEFNALKTQLSSKKEDDLRSDKLYLYYTQMGCCMYTGERIELASLYNDNLYDIDHIYPRSKTKDDSLSNRVLVKKEVNAAKTDIYPLDAAIRTKMHSFWKLLYDKGFIDERKYERLTRSTQLRDEELAGFISRQLVETRQSTKAVAAILKTAYQNSEVVYVKAGNVSDFRQQFKFVKCRDVNDLHHAKDAYLNIVVGNCYHVKFTANPLNFITKNQDNRRYSLKPEIFYKFSIKRDSEIAWIGGKDGTITTVTKTMHKNNILFTRQPVEGKGELFKQNPLKAKNGQLPLKAGLSVEKYGGYNSLSTAYFAVVKSEGKKGAVQLSIEAIPLVYAKQGEEAVQDYLTEVVQLCNPEIRIPKIKKYSLFKINGFPMHISGKTVKQIIFYAAGQLCLADDVAEYLKKALKYEAYIALNEGLISDKNADDTQKQKAQQRLDYFKQKWGISSDANMKIYDILLAKSANNLYKNRPASQTKDLQEQRCVFEKLSLAEQIHIIGEVLNLFKCASASANLKLLGKGNSCGVIKTSNNITKCEKCILINQSPTGVFEQEVDLMKL

SEQ ID NO: 1454 - protein, 1378 aa, unidentified
  REGION 1..1378: note = Description of Unknown: uncultivated organism with predicted taxonomy: Firmicutes
  REGION 1..1378: note = MG18-102 effector
MQKLKNCDYYIGLDMGDASVGWAVTDTNYNILKFNGKALWGIRLFDSANTAASTRVFRSGRRRIDRTTWRLKMLQELFAEEIAKVDPGFFMRLEDSRLHLDDKRDKAVYNLFVDKNYTDKDFYQQYPTMYHLRYALATQAGPFDVRLLYLAVQHIAKHRGHFLFDNLDASKVNDFNAVFSEVENYVRDEMGIEDWSCQNIDELAKVLCDVNLGRTKQKAMQSLLPAQTKQQKAIIQLFSGGKAKLAELFVDEELDECEKKSVSFQDDDLNEFEPVLTAALGERYEGLLRFKAIYDWSLLAKILHLDTSKKDEDEQHLLSECKVQVYEDHKRDLAVLKSMLKGKPLYNKIFRQDGDISYEKYAKGIKGRNQIDFCKDLKKQLEGIAEYKKIMQEITNIDDAKTEEERLLFRITNGFAFPKQTTKDNGIIPVQVHLAELKCILDNAEGYLPFLGETDNNGLSVREKIEQIVKFRIPYYVGPLAGTRMSREQGRCWVVRKNEKIYPWNFTEIVNLEESAEKFITNMTAKCTYLVGEDVLPKESLLYSEFMVRNAINNITVDGERLPVDVLEKIFKQLFLAKTSKVTKKTLERFFRQENISFQNIGGIDDKINASMKSYNDFRRIFGEDYIQLHRDEIENIIRWITLFCDEKKMLVTKIKNTYPHISDDKIKAIKKLKYKDWGRLSATLLNSSAIAYEDDAFGERVTIISALRHTNKNFMELLSNYCSYDFIGKIKDFNGSRQSSNSKLTYKDVEELYVSPSVKRSIWQTLTILEEIKKIMGHESKRIFIEMARSKEESKRTDSRLKKLQDLYKKCREENIDFMPRKDEFNALKTQLSSKKEDDLRSDKLYLYYTQMGRCMYTGESIELASLYDNNLYDIDHIYPRSKTKDDSLSNRVLVKKQVNAAKTDIYPLDAAIRTKMHSFWKLLYDKGFIDERKYERLMRSTQLRDEELAGFISRQLVETRQSTKAVAAILKTAYQNSEVVYVKAGNVSDFRQQFKFVKCRDVNDLHHAKDAYLNIVVGNCYHVKFTANPLNFITKNQDNRRYSLKPEIFYKFSIKRDGEIAWLGGEDGTMATVARTMHKNNILFTRQAVEGKGELFDQQPLKAKGGQLPLKAGLSIEKYGGYNSLTTAYFAVVKSEGKKGAVQLSIEAIPLVYAKQGEIAVQKYLTEVVQLCKPEIKIPKIKKYSLFKINGFPMHISGRTGKQLVFYGAGQLCIADDVADYLKKALKYETDIAEKEKTLADQNADDIQKQKAQKGLDFYEQKWGISGAVNVQLYDMFIAKSANNLYKNRPASQTITLKEKREHFVKLTLSKQIHIIKEILNLFKCASASADFKLIDKGTSCGTLKISNNITKLKECILINQSPTGVFEQEVDLMKL

SEQ ID NO: 1455 - protein, 1379 aa, unidentified
  REGION 1..1379: note = Description of Unknown: uncultivated organism with predicted taxonomy: Phascolarctobacterium succinatutens
  REGION 1..1379: note = MG18-103 effector
MQRLKNCDYYIGLDMGDASVGWAVTDTNYNILKFNGKALWGIRLFDSANTAASTRVFRSGRRRIDRTTWRLKMLQELFAEEIAKVDPGFFMRLEDSRLHLDDKRDKAVYNLFVDKNYTDKDFYQQYPTMYHLRYALATQAGPFDVRLLYLAVQHIAKHRGHFLFDNLDASKVNDFNAVFSEVENYVRDEMGIEDWSCQNIDELAKVLCDVNLGCTTKQKAMQSLLPVQTKQQKAIIQLFSGSKAKLAELFGDAELDECEKKSVSFQDDDLNEFEPVLTAALGERYEGLLRFKAIYDWSLLAKILHLDAGKKDEGEQHLLSECKVQVYEEHKRDLAVLKSMLKGKPLYNKIFRQDGDISYEKYAKGIKGRNQLDFCKDLKKQLEGITEYKKIMQAITSIDDAKTDEERLLFRIANGFAFPKQTTKDNGIIPIQVHLAELKCILDNAEGYLPFLGETDNNGLSVREKIEQIVKFRIPYYVGPLAGTRMSREQGRCWVVRKNEKIYPWNFTEIVNLEESAEKFITNMTAKCTYLVGEDVLPKESLLYSEFMVRNAINNITVDGERLPVDVLEKIFKQLFLAKTSKVTKKTLERFFRQENISFQNIGGIDDKINASMKSYNDFRRIFGEDYIQLHRDEIENIIRWITLFCDEKKMLVTKIKNTYPQIADDQIKAIKKLKYKDWGRLSATLLNSSAIAYEDKAFGELVTIISALRHTNKNFMELLSSYCSYDFIGKIKEFNGSRQSSNGKLTYKDVEELYVSPSVKRSIWQTLTILEEIKKIMGREPKRIFIEMARSKEESKRTDSRLKKLQDLYKKCREENIDFMPRKDEFNALKTQLSSKKEEDLRSDKLYLYYTQMGRCMYTGERIELASLHDNNLYDIDHIYPRSKTKDDSLSNRVLVKKEVNAAKTDIYPLDAVIRTKMHSFWKLLYDKGFIDERKYERLTRSTQLRDEELAGFISRQLVETRQSTKAVAAILKTAYKHSEIVYVKAGNVSDFRQKFEFVKCRDVNDLHHAKDAYLNIVVGNCYHVKFTANPLNFITKNQDNRRYSLKPEIFYKFSIKRDSEIAWIGGKDGTITTVTKTMHKNNILFTRQAVEGKGELFDQQPLKAKGGQLPLKAGLSIEKYGGYNSLTTAYFAVVKSEGKKGAVQLSIEAIPLVYAKQGEIAVQKYLTEVVQLCKPEIMLPKIKKYSLFKINGFPMHISGRTGKQLIFYGAGQLCIADDVADYLKKALMYETNIAEKEKTLADQNADDIQKQKAQKGLDFYEQKWGISGAVNVQLYDMFIAKSANNLYKNRPVSQTITLKEKREHFVKLTVSKQIHIIKEILNLFKCASASADFKLIDKGTSCGTLKISNNINKLKECILINQSPTGVFEQEVDLMKL

SEQ ID NO: 1456 - protein, 1379 aa, unidentified
  REGION 1..1379: note = Description of Unknown: uncultivated organism with predicted taxonomy: Phascolarctobacterium
  REGION 1..1379: note = MG18-104 effector
MQKLKNCDYYIGLDMGDASVGWAVTDTNYNILKFNGKALWGIRLFDSANTAASTRVFRSGRRRIDRTTWRLKMLQELFADEIAKVDPGFFMRLEDSRLHLDDKRDKAVYNLFVDKNYTDKDFYQQYPTMYHLRYALATQAGPFDVRLLYLAVQHIAKHRGHFLFDNLDASKVNDFNAVFSEVENYVRDEMGIEDWSCQNIDELAKVLCDVNLGRTTKQKAMQSLLPAQTKQQKAIIQLFSGGKAKLAELFVDEELDECEKKSVSFQDDDLNEFEPVLTAALGERYEGLLRFKAIYDWSLLAKILHLDTSKKDEGEQHLLSECKVQVYEDHKRDLAVLKSMLKGKPLYNKIFRQDGDISYEKYAKGIKGRNQIDFCKDLKKQLEGIAEYKKIMQEITSIDDAKTEEERLLFRITNGFAFPKQTTKDNGIIPIQVHLAELKCILDNAEGYLPFLGETDNNGLSVREKIEQIVKFRIPYYVGPLAGTRMSREQGRCWVVRKNEKIYPWNFTEIVNLEESAEKFITNMTAKCTYLVGEDVLPKESLLYSEFMVRNAINNITVDGERLPVDVLEKIFKQLFLAKTSKVTKKTLERFFRQENISFQNIGGIDDKINASMKSYNDFRRIFGEDYIQLHRDEIENIIRWITLFCDEKKMLVTKIKNTYPQISDDEIKAIKKLKYKDWGRLSATLLNSSTIAYEDKAFGELVTIISALRHTNKNFMELLSSYCSYDFIGKIKEFNGSRQSSNGKLTYKDVEELYVSPSVKRSIWQTLTILEEIKKIMGCEPKRIFIEMARSKEESKRTDSRLKKLQDLYKKCREENIDFMPRKDEFNALKTQLSSKKEEDLRSDKLYLYYTQMGRCMYTGERIELASLYDNNLYDIDHIYPRSKTKDDSLSNRVLVKKQVNAAKTDTYPLDAAIRTKMHSFWKLLYDKGFIDERKYERLTRSTQLRDEELAGFISRQLVETRQSTKAVAAILKTAYQNSEVVYVKAGNVSDFRQQFKFVKCREVNDLHHAKDAYLNIVVGNCYHVKFTANPLNFITKNQDNRRYSLKPEIFYKFSIKRDGEIAWLGGEDGTMATVARTMHKNNILFTRQAVEGKGELFDQQPLKAKGGQLPLKAGLSIEKYGGYNSLTTAYFAVVKSEGKKGAVQLSIEAIPLVYAKQGEIAVQKYLTEVVQLCKPEIMLPQIKKYSLFKINGFPMHISGRTGNRMLFYGAGQLCLDEADVDYLKNALKYENDIAENELVIADKNSDDIQKQQAQKNLDYYNQKWRIGRKVNMHIYDMLLAKSGNNLYKNRPASQTTDLQEQREFFEKLSLANQIHVIGEVLKLFKCASASANLKLLDKGNACGVIKVSNNILKFKQCVLINQSPTGVFEQEVDLMKL

SEQ ID NO: 1457 - protein, 1379 aa, unidentified; identical to SEQ ID NO: 1452
  REGION 1..1379: note = Description of Unknown: uncultivated organism with predicted taxonomy: Phascolarctobacterium succinatutens
  REGION 1..1379: note = MG18-105 effector

SEQ ID NO: 1458 - protein, 1379 aa, unidentified; identical to SEQ ID NO: 1361
  REGION 1..1379: note = Description of Unknown: uncultivated organism with predicted taxonomy: Firmicutes
  REGION 1..1379: note = MG18-106 effector

SEQ ID NO: 1459 - protein, 1379 aa, unidentified
  REGION 1..1379: note = Description of Unknown: uncultivated organism with predicted taxonomy: Phascolarctobacterium succinatutens
  REGION 1..1379: note = MG18-107 effector
MQKLKNCDYYIGLDMGDASVGWAVTDTNYNILKFNGKALWGIRLFDSANTAASTRVFRSGRRRIDRTTWRLKMLQELFAEEIAKVDPGFFMRLEDSRLHLDDKRDKAVYNLFVDKNYTDKDFYQQYPTMYHLRYALAMQAGPFDVRLLYLAVQHIAKHRGHFLFDNLDASKVNDFNAVFSEVENYVRDEMGIEDWSCQNIDELAKVLCDVNLGRTTKQKAMQSLLPAQTKQQKAIIQLFSGGKAKLAELFGDAELDECEKKSVSFQDDDLDELEPVLTAALGERYEGLLRFKAIYDWSLLAKILHLDTSKKDEDEQHLLSECKVQVYEDHKRDLAVLKSMLKGKPLYNKIFRQDGDISYEKYAKGIKGRNQIDFCKDLKKQLEGIAEYKKIMQEITSIDDAKTEEERLLFRITNGFAFPKQTTKDNGIIPIQVHLAELKCILDNAEGYLPFLGETDNNGLSVREKIEQIVKFRIPYYVGPLAGTRMSREQGRCWVVRKNEKIYPWNFTEIVNLEESAEKFITNMTAKCTYLVGEDVLPKESLLYSEFMVRNAINNITVDGERLPVDVLEKIFKQLFLAKTSKVTKKTLERFFRQENISFQNIGGIDDKINASMKSYNDFRRIFGEDYIQLHRDEIENIIRWITLFCDEKKMLVTKIKNTYPQISDDEIKAIKKLKYKDWGRLSATLLNSSTIAYEDKAFGELVTIISALRHTNKNFMELLSSYCSYDFIGKIKEFNGSRQSSNGKLTYKDVEELYVSPSVKRSIWQTLTILEEIKKIMGCEPKRIFIEMARSKEESKRTDSRLKKLQDLYKKCREENIDFMPRKDEFNAFKTQLSSKKEEDLRSDKLYLYYTQMGRCMYTGERIELASLHDNNLYDIDHIYPRSKTKDDSLSNRVLVKKQVNAAKTDTYPLDAAIRTKMHSFWKLLYDKGFIDERKYERLTRSTQLRDEELAGFISRQLVETRQSTKAVAAILKTAYQNSAVVYVKAGNVSDFRQQFKFVKCREVNDLHHAKDAYLNIVVGNCYHVKFTASPLNFITKNQDNRRYSLKPEIFYKFSIKRDGEIAWLGGEDGTMATVARTMHKNNILFTRQAVEGKGELFDQQPLKAKGGQLPLKAGLSIEKYGGYNSLTTAYFAVVKSEGKKGAVQLSIEAIPLVYAKQGEIAVQKYLTEVVQLCKPEIMLPKIKKYSLFKINGFPMHISGRTGNRMLFYGAGQLCLDEADVDYLKKALKYENDIAENELVIADKNSDDIQKQQAQKNLDYYNQKWRIGRKVNMHIYDMLLAKSGNNLYKNRPASQTTDLQEQREFFEKLSLANQIHVIGEVLKLFKCASASANLKLLDKGNACGVIKVSNNILKFKQCVLINQSPTGVFEHEVDLMKL

SEQ ID NO: 1460 - protein, 1379 aa, unidentified
  REGION 1..1379: note = Description of Unknown: uncultivated organism with predicted taxonomy: Ruminococcaceae bacterium
  REGION 1..1379: note = MG18-108 effector
MQRLKNCDYYIGLDMGDASVGWAVTDTNYNILKFNGKALWGIRLFDSANTAASTRVFRSGRRRIDRTTWRLKMLQELFAEEIAKVDPGFFMRLEDSRLHLDDKRDKAVYNLFVDKNYTDKDFYQQYPTMYHLRYALATQAGPFDVRLLYLAVQHIAKHRGHFLFDNLDASKVNDFNAVFSEVENYVRDEMGIEDWSCQNIDELAKVLCDVNLGRTTKQKAMQSLLPAQTKQQKAIIQLFSGGKAKLAELFVDEELDECEKKSVSFQDDDLNEFEPVLTAALGERYEGLLRFKAIYDWSLLAKILHLDTSKKDEDEQHLLSECKVQVYEDHKRDLAVLKSMLKGKPLYNKIFRQDGDISYEKYAKGIKGRNQLDFCKDLKKQLDGIAEYKKIMQEITSIDAAGTEEERLLFRIANGFAFPKQTTKDNGIIPIQVHLAELKCILDNAEGYLQFLGETDNNGLSVREKIEQIVKFRIPYYVGPLAGTRMSREQGRCWVVRKNEKIYPWNFTQVVNLEESAEKFITNMTAKCTYLVGEDVLPKESLLYSEFMVRNAINNITVDGERLPVDVLEKIFKQLFLAKTSKVTKKTLERFFRQENISFQNIGGIDDKINASMKSYNDFRRIFGEDYIQLHRDEIENIIRWITLFCDEKKMLVTKIKNTYPQIADDQIKAIKKLKYKDWGRLSATLLNSSAIAYEDKAFGELVTIISALRHTNKNFMELLSSYCSYDFIGKIKEFNGSRQSSNGKLTYKDVEELYVSPSVKRSIWQTLTILEEIKKIMGCEPKRIFIEMARSKEESKRTDSRLKKLQDLYKKCREENIDFMPHTDELNAFKIQLSSKKEDDLRSDKLYLYYTQMGRCMYTGERIELASLYNDNLYDIDHIYPRSKTKDDSLSNRVLVKKEVNAAKTDIYPLDAAIRTKMHSFWKLLYDKGFIDERKYERLTRSTQLRDEELAGFISRQLVETRQSTKAVAAILKTAYQNSEVVYVKAGNVSDFRQQFKFVKCRDVNDLHHAKDAYLNIVVGNCYHVKFTANPLNFITKNQDNRRYSLKPEIFYKFSIKRDSEIAWIGGKDGTITTVTKTMHKNNILFTRQPVEGKGELFKQNPLKAKNGQLPLKAGLSVEKYGGYNSLSTAYFAVVKSEGKKGAVQLSIEAIPLVYAKQGEEAVQDYLTEVVQLCNPEIRIPKIKKYSLFKINGFPMHISGKTVKQIIFYAAGQLCLADDVAEYLKKALKYEAYIALNEGLISDKNADDTQKQKAQQRLDYFKQKWGISSDANMKIYDILLAKSANNLYKNRPASQTKDLQEQRCVFEKLSLAEQIHIIGEVLNLFKCASASANLKLLGKGNSCGVIKTSNNITKCEQCILINQSPTGVFEQEVDLMKL

SEQ ID NO: 1461 - protein, 1379 aa, unidentified
  REGION 1..1379: note = Description of Unknown: uncultivated organism with predicted taxonomy: Phascolarctobacterium succinatutens
  REGION 1..1379: note = MG18-109 effector
MQKLKNCDYYIGLDMGDASVGWAVTDTNYNILKFNGKALWGIRLFDSANTAASTRVFRSGRRRIDRTTWHLKMLQELFAEEIAKVDPGFFMRLEDSRLHLDDKRDKAVYNLFVDKNYTDKDFYQQYPTMYHLRYALATQAGPFDVRLLYLAVQHIAKHRGHFLFDNLDASKVNDFNAVFSEVENYVRDEMGIEDWSCQNIDELAKVLCDVNLGRTTKQKAMQSLLPAQTKQQKAIIQLFSGGKAKLAELFVDEELDECEKKSVSFQDDDLNEFEPVLTAALGERYEGLLRFKAIYDWSLLAKILHLDTSKKDEGEQHLLSECKVQVYEDHKRDLAVLKSMLKGKPLYNKIFRQDGDISYEKYAKGIKGRNQIDFCKDLKKQLEGIAEYKKIMQEITSIDDAKTEEERLLFRITNGFAFPKQTTKDNGIIPIQVHLAELKCILDNAEGYLPFLGETDNNGLSVREKIEQIVKFRIPYYVGPLAGTRMSREQGRCWVVRKNEKIYPWNFTEIVNLEESAEKFITNMTAKCTYLVGEDVLPKESLLYSEFMVRNAINNITVDGERLPVDVLEKIFKQLFLAKTSKVTKKTLERFFRQENISFQNIGGIDDKINASMKSYNDFRRIFGEDYIQLHRDEIENIIRWITLFCDEKKMLVTKIKNTYPQISDDEIKAIKKLKYKDWGRLSATLLNSSTIAYEDKAFGELVTIISALRHTNKNFMELLSSYCSYDFIGKIKEFNGSRQSSNGKLTYKDVEELYVSPSVKRSIWQTLTILEEIKKIMGCEPKRIFIEMARSKEESKRTDSRLKKLQDLYKKCREENIDFMPRKDEFNALKTQLSSKKEENLRSDKLYLYYTQMGRCMYTGERIELASLYDNNLYDIDHIYPRSKTKDDSLSNRVLVKKQINAAKTDTYPLDAAIRTKMHSFWKLLYDKGFIDERKYERLTRSTQLRDEELVGFISRQLVETRQSTKAVAAILKTAYQNSEVVYVKAGNVSDFRQQFKFVKCREVNDLHHAKDAYLNIVVGNCYHVKFTANPLNFITKNQDNRRYSLKPEIFYKFSIKRDGEIAWLGGEDGTMATVARTMHKNNILFTRQAVEGKGELFDQQPLKAKGGQLPLKAGLSIEKYGGYNSLTTAYFAVVKSEGKKGAVQLSIEAIPLVYAKQGEIAVQKYLTEVVQLCKPEIMLPKIKKYSLFKINGFPMHISGRTGNRMLFYGAGQLCLDEADVDYLKKALKYENDIAENELVIADKNSDDIQKQQAQKNLDYYNQKWRIGRKVNMHIYDMLLAKSGNNLYKNRPASQTTDLQEQREFFEKLSLANQIHVIGEVLKLFKCASASANLKLLDKGNACGVIKVSNNILKFKQCVLINQSPTGVFEQEVDLMKL

SEQ ID NO: 1462 - protein, 879 aa, unidentified
  REGION 1..879: note = Description of Unknown: uncultivated organism with predicted taxonomy: Clostridiales bacterium
  REGION 1..879: note = MG18-110 effector
MQKLKNCDYYIGLDMGDASVGWAVTDTNYNILKFNGKALWGIRLFDSANTTASTRVFRSGRRRIDRTTWRLKMLQELFAEEIAKVDPGFFMRLEDSRLHLDDKRDKAVYNLFVDKNYTDKDFYQQYPTMYHLRYALATQAGPFDVRLLYLAVQHIAKHRGHFLFDNLDASKVNDFNAVFSEVENYVRDEMGIEDWSCQNIDELAKVLCDVNLGRTTKQKAMQSLLPAQTKQQKAIIQLFSGGKAKLAELFVDEELDECEKKSVSFQDDDLNEFEPVLTAALGERYEGLLRFKAIYDWSLLAKILHLDTSKKDEDEQHLLSECKVQVYEDHKRDLAVLKSMLKGKPLYNKIFRQDGDISYEKYAKGIKGRNQIDFCKDLKKQLEGIAEYKKIMQEITNIDDAKTEEERLLFRITNGFAFPKQTTKDNGIIPIQVHLAELKCILDNAEGYLPFLGETDNNGLSVREKIEQIVKFRIPYYVGPLAGTRMSREQGRCWVVRKHEKIYPWNFTEIVNLEESAEKFITNMTAKCTYLVGEDVLPKESLLYSEFMVRNAINNITVDGERLPVDVLEKIFKQLFLAKTSKVTKKTLERFFRQENISFQNIGGIDDKINASMKSYNDFRRIFGEDYIQLHRDEIENIIRWITLFCDEKKMLVTKIKNTYPQISDDEIKAIKKLKYKDWGRLSATLLNSSTIAYEDKAFGELVTIISALRHTNKNFMELLSSYCYYDFIGKIKEFNGSRQSSNGKLTYKDVEELYVSPSVKRSIWQTLTILEEIKKIMGCEPKRIFIEMARSKEESKRTDSRLKKLQDLYKKCREENIDFMPRKDEFNALKTQLSSKKEENLRSDKLYLYYTQMGRCMYTGERLSLIHISEPTRPLYIS

SEQ ID NO: 1463 - protein, 1379 aa, unidentified; identical to SEQ ID NO: 1357
  REGION 1..1379: note = Description of Unknown: uncultivated organism with predicted taxonomy: Phascolarctobacterium succinatutens
  REGION 1..1379: note = MG18-111 effector

SEQ ID NO: 1464 - protein, 1379 aa, unidentified
  REGION 1..1379: note = Description of Unknown: uncultivated organism with predicted taxonomy: Phascolarctobacterium succinatutens
  REGION 1..1379: note = MG18-112 effector
MQKLKNCDYYIGLDMGDASVGWAVTDTNYNILKFNGKALWGIRLFDSANTAASTRVFRSGRRRIDRTTWRLKMLQELFAEEIAKVDPGFFMRLEDSRLHLDDKRDKAVYNLFVDKNYTDKDFYQQYPTMYHLRYALATQAGPFDVRLLYLAVQHIAKHRGHFLFDNLDASKVNDFNAVFSEVENYVRDEMGIEDWSCQNIDELAKVLCDVNLGRTTKQKAMQSLLPAQTKQQKAIIQLFSGGKAKLAELFVDAELDECEKKSVSFQDDDLNEFEPVLTAALGERYEGLLRFKAIYDWSLLAKILHLDTSKKDEDEQHLLSECKVQVYEDHKRDLAVLKSMLKGKPLYNKIFRQDGDISYEKYAKGIKGRNQIDFCKDLKKQLEGIAEYKKIMQEITSIDDAKTEEERLLFRITNGFAFPKQTTKDNGIIPIQVHLAELKCILDNAEGYLPFLGETDNNGLSVREKIEQIVKFIIPYYVGPLAGTRMSREQGRCWVVRKNEKIYPWNFTEIVNLEESAEKFITNMTAKCTYLVGEDVLPKESLLYSEFMVRNAINNITVDGERLPVDVLEKIFKQLFLAKTSKVTKKTLERFFRQENISFQNIGGIDDKINASMKSYNDFRRIFGEDYIQLHRDEIENIIRWITLFCDEKKMLVTKIKNTYPQISDDEIKAIKKLKYKDWVRLSATLLNSSAIAYDDKAFGELVTIISALRHTNKNFMELLSSYCSYDFIGKIKEFNGSRQSSNGKLTYKDVEELYVSPSVKRSIWQTLTILEEIKKIMGCEPKRIFIEMARSKEESKRTDSRLKKLQDLYKKCREENIDFMPRKDEFNTLKTQLSSKKEDDLRSDKLYLYYTQMGRCMYTGEKIELASLYDNNLYDIDHIYPRSKTKDDSLSNRVLVKKQVNAAKTDTYPLDAAIRTKMHSFWKLLYDKGFIDERKYERLTRSTQLRDEELAGFISRQLVETRQSTKAVAAILKTAYQNSEVVYVKAGNVSDFRQQFKFVKCREVNDLHHAKDAYLNIVVGNCYHVKFTANPLNFITKNQDNRRYSLKPEIFYKFSIKRDGEIAWLGGEDGTMATVARTMHKNNILFTRQAVEGKGELFDQQPLKAKGGQLPLKAGLSIEKYGGYNSLTTAYFAVVKSEGKKGAVQLSIEAIPLVYAKQGEIAVQKYLTEVVQLCKPEIMLPKIKKYSLFKINGFPMHISGRTGNRMLFYGAGQLCLDEADVDYLKKALKYENDIAENELVIADKNSDDIQKQQAQKNLDYYNQKWRIGRKVNMHIYDMLLAKSGNNLYKNRPASQTTDLQEQREFFEKLSLANQIHVIGEVLKLFKCASASANLKLLDKGNACGVIKVSNNILKFKQCVLINQSPTGVFEQEVDLMKL

SEQ ID NO: 1465 - protein, 1379 aa, unidentified
  REGION 1..1379: note = Description of Unknown: uncultivated organism with predicted taxonomy: Clostridiales
  REGION 1..1379: note = MG18-113 effector
MQKLKNCDYYIGLDMGDASVGWAVTDTNYNILKFNGKALWGIRLFDSANTAASTRVFRSGRRRIDRTTWRLKMLQELFADEIAKVDTGFFMRLEDSRLHLDDKRDKAVYNLFVDKNYTDKDFYQQYPTMYHLRYALATQKGPFDVRLLYLAVQHIAKHRGHFLFDNLDASKVNDFNAVFSEVENYVRDEMGIEDWSCQNIDELAKVLCDVNLGRTTKQKAMQSLLPAQTKQQKAIIQLFSGGKAKLAELFVDEELDECEKKSVSFQDDDLNEFEPVLTAALGERYEGLLRFKAIYDWSLLAKILHLDTSKKDEDEQHLLSECKVQVYEDHKRDLAVLKSMLKGKPLYNKIFRQDGDISYEKYAKGIKGRNQIDFCKDLKKQLEGIAEYKKIMQEITSIDDAKTEEERVLFRITNGFAFPKQTTKDNGIIPIQVHLAELKCILDNAEGYLPFLGETDNNGLSVREKIGQIVKFRIPYYVGPLAGTRMSREQGRCWVVRKNEKIYPWNFTEIVNLEESAEKFITNMTAKCTYLVGEDVLPKESLLYSEFMVRNAINNITVDGERLPVDVLEKIFKQLFLAKTSKVTKKTLERFFRQENISFQNIGGIDDKINASMKSYNDFRRIFGEDYIQLHRDEIENIIRWITLFCDEKKMLVTKIKNTYPQISDDEIKAIKKLKYKDWGRLSATLLNSSTIAYEDKAFGELVTIISALRHTNKNFMELLSSYCSYDFIGKIKEFNGSRQSSNGKLTYKDVEELYVSPSVKRSIWQTLTILEEIKKIMGCEPKRIFIEMARSKEESKRTDSRLKKLQDLYKKCREENIDFIPLKDEFNALKTQLSSKKEEDLRSDKLYLYYTQMGCCMYTGERIELASLYDNNLYDIDHIYPRSKTKDDSLSNRVLVKKQVNAAKTDIYPLDAAIRTKMHSFWKLLYDKGFIDERKYERLTRSTQLRDEELAGFISRQLVETRQSTKAVAAILKTAYQNSEVVYVKAGNVSDFRQQFKFVKCRDVNDLHHAKDAYLNIVVGNCYHVKFTANPLNFITKNQDNRRYSLKPEIFYKFSIKRDGEIAWLGGEDGTMATVARTMHKNNILFTRQPLEGKGELFKQNPLKAKSGQLPLKAGLSVEKYGGYDSLTTAYFALVKSEGKKGSVQLSIEGIPLVYAKQGEKAVQDYLTEVVQLCKPEIKIPKIKKYSLFKINGFPMHISGRTGKQLIFYGAGQLCIADDVADYLKKALKYETDIAEKEKTLADQNADEIQKQKAQKGLDFCEQKWGISGAVNVQLYDMFIAKSANNLYKNRPASQTITLKEKREHFVKLTLSKQIHIIKEILNLFKCASASADFKLIDKGTSCGTLKISNNITKLKECILINQSPTGVFEQEVDLMKL

SEQ ID NO: 1466 - protein, 1379 aa, unidentified
  REGION 1..1379: note = Description of Unknown: uncultivated organism with predicted taxonomy: Phascolarctobacterium
  REGION 1..1379: note = MG18-114 effector
MQKLKNCDYYIGLDMGDASVGWAVTDTNYNILKFNGKALWGIRLFDSANTAASTRVFRSGRRRIDRTTWRLKMLQELFAEEIAKVDPGFFMRLEDSRLHLDDKRDKAVYNLFVDKNYTDKDFYQQYPTMYHLRYALATQAGPFDVRLLYLAVQHIAKHRGHFLFDNLDASKVNDFNAVFSEVENYVRDEMGIEDWSCQNIDELAKVLCDVNLGRTTKQKAMQSLLPAQTKQQNAIIQLFSGGKAKLAELFVDEELDECEKKSVSFQDDDLNEFEPVLTAALGERYEGLLRFKAIYDWSLLAKILHLDTSKKDEDEQHLLSECKVQVYEDHKRDLAVLKSMLKGKPLYNKIFRQDGDISYEKYAKGIKGRNQIDFCKDLKKQLEGIAEYKKIMQEITSIDDAKTEEERVLFRITNGFAFPKQTTKDNGIIPIQVHLAELKCILDNAEGYLPFLGETDNNGLSVREKIEQIVKFRIPYYVGPLAGTRMSREQGRCWVVRKNEKIYPWNFTEIVNLEESAEKFITNMTAKCTYLVGEDVLPKESLLYSEFMVRNAINNITVDGERLPVDVLEKIFEQLFLAKTSKVTKKTLERFFRQENISFQNIGGIDDKINASMKSYNDFRRIFGEDYIQLHRDEIENIIRWITLFCDEKKMLVTKIKNTYPQISDDEIKAIKKLKYKDWGRLSATLLNSSTIAYEDKAFGELVTIISALRHTNKNFMELLSSYCSYDFIGKIKEFNGSRQSSNGKLAYKDVEELYVSPSGKRSIWQTLTILEEIKKIMGCEPKRIFIEMARSKEESKRTDSRLKKLQDLYKKCREENIDFMPRKDEFNVLKTQLSSKNEEDLRSDKLYLYYTQMGRCMYTGEIIELASLNDNNLYDIDHIYPRSKTKDDSLSNRVLVKKQVNAAKTDIYPLDAAIRTKMHSFWKLLYDKGFIDERKYERLTRSTQLRDEELAGFISRQLVETRQSTKAVAAILKTAYQNSEVVYVKAGNVSDFRQQFKFVKCREVNDLHHAKDAYQNIVVGNCYHVKFTANPLNFITKNQDNRRYSLKPEIFYKFSIKRDGEIAWLGGEDGTMATVARTMHKNNILFTRQAVEGKGELFDQQPLKAKGGQLPLKAGLSIEKYGGYNSLTTAYFAVVKSEGKKGAVQLSIEAIPLVYAKQGEIAVQKYLTEVVQLCKPEIMLPKIKKYSLFKINGFPMHISGRTGNRMLFYGAGQLCLDEADVDYLKKALKYENDIAENELVIADKNSDDIQKQQAQKNLDYYNQKWRIGRKVNMHIYDMLLAKSGNNLYKNRPASQTTDLQEQREFFEKLSLANQIHVIGEVLKLFKCASASANLKLLDKGNACGVIKVSNNILKFKQCVLINQSPTGVFEQEVDLMKL

SEQ ID NO: 1467 - protein, 1379 aa, unidentified
  REGION 1..1379: note = Description of Unknown: uncultivated organism with predicted taxonomy: Phascolarctobacterium succinatutens
  REGION 1..1379: note = MG18-115 effector
MHKLKNCDYYIGLDMGDASVGWAVTDTNYNILKFNGKALWGIRLFDSANTAASTRVFRSGRRRIDRTTWRLKMLQELFAEEIAKVDPGFFMRLEDSRLHLDDKRDKAVYNLFVDKNYTDKDFYQQYPTMYHLRYALATQAGPFDVRLLYLAVQHIAKHRGHFLFDNLDASKVNDFNAVFSEVENYVRDEMGIEDWSSQNIDELAKVLCDVNLGRTTKQKAMQSLLPAQTKQQKAIIQLFSGGKAKLAELFVDEELDECEKKSVSFQDDDLNEFEPVLTAALGERYEGLLRFKAIYDWSLLAKILHLDTSKKDEDEQHLLSECKVQVYEDHKRDLAVLKSMLKGKPLYNKIFRQDGDISYEKYAKGIKGRNQIDFCKDLKKQLEGIAEYKKIMQEITNIDDAKTEEERLLFRITNGFAFPKQTTKDNGIIPIQVHLAELKCILDNAEGYLPFLGETDNNGLSVREKIEQIVKFRIPYYVGPLAGTRMSREQGRCWVVRKHEKIYPWNFTEIVNLEESAEKFITNMTAKCTYLVGEDVLPKESLLYSEFMVRNAINNITVDGERLPVDVLEKIFKQLFLAKTSKVTKKTLERFFRQENISFQNIGGIDDKINASMKSYNDFRRIFGEDYIQLHRDEIENIIRWITLFCDEKKMLVTKIKNTYPQIADDQIKAIKKLKYKDWGRLSATLLNSSAIAYEDKAFGELVTIISALRHTNKNFMELLSSYCSYDFIGKIKEFNGSRQSSNGKLTYKDVEELYVSPSVKRSIWQTLTILEEIKKIMGREPKRIFIEMARSKEESKRTDSRLKKLQDLYKKCREENIDFMPRKDEFNALKTQLSSKKEEDLRSDKLYLYYTQMGRCMYTGERIELASLDDNNLYDIDHIYPRSKTKDDSLSNRVLVKKEVNAAKTDIYPLDAVIRTKMHSFWKLLYDKGFIDERKYERLTRSTQLRDEELAGFISRQLVETRQSTKAVAAILKTAYKHSEIVYVKAGNVSDFRQKFEFVKCRDVNDLHHAKDAYLNIVVGNCYHVKFTANPLNFITKNQDNRRYSLKPEIFYKFSIKRDSEIAWIGGKDGTITTVTKTMHKNNILFTRQPVEGKGELFKQQPLKAKSGQLPLKAGLSVEKYGGYDSLTTAYFALVKSEGKKGAVQLSIEGIPLVYAKQGEIAVQKYLTEVVQLCKPEIKIPKIKKYSLFKINGFPMHISGRTGKQLVFYGAGQLCIADDVADYLKKALKYETDIAEKEKTLADQNADDIQKQKAQKGLDFYEQKWGISGAVNVQLYDMFIAKSANNLYKNRPASQTITLKEKREHFVKLTLSKQIHIIKEILNLFKCASASADFKLIDKGTSCGTLKISNNITKLKECILINQSPTGVFEQEVDLMKL

SEQ ID NO: 1468 - protein, 1379 aa, unidentified
  REGION 1..1379: note = Description of Unknown: uncultivated organism with predicted taxonomy: Phascolarctobacterium succinatutens
  REGION 1..1379: note = MG18-116 effector
MQKLKNCDYYIGLDMGDASVGWAVTDTNYNILKFNGKALWGIRLFDSANTAASTRVFRSGRRRIDRTTWRLKMLQELFAEEIAKVDPGFFMRLEDSRLHLDDKRDKAVYNLFVDKNYTDKDFYQQYPTMYHLRYALATQAGPFDVRLLYLAVQHIAKHRGHFLFDNLDASKVNDFNAVFSEVENYVRDEMGIEDWSCQNIDELAKVLCDVNLGRTTKQKAMQSLLPAQTKQQKAIIQLFSGGKAKLAELFVDEELDECEKKSVSFQDDDLNEFEPVLTAALGERYEGLLRFKAIYDWSLLAKILHLDTSKKDEDEQHLLSECKVQVYEDHKRDLAVLKSMLKGKPLYNKIFRQDGDISYEKYAKGIKGRNQIDFCKDLKKQLEGIAEYKKIMQEITSIDDAKTEEERLLFRITNGFAFPKQTTKDNGIIPIQVHLAELKCILDNAEGYLPFLGETDNNGLSVREKIEQIVKFRIPYYVGPLAGTRMSREQGRCWVVRKNEKIYPWNFTEIVNLEESAEKFITNMTAKCTYLVGEDVLPKESLLYSEFMVRNAINNITVDGERLPVDVLEKIFKQLFLAKTSKVTKKTLERFFRQENISFQNIGGIDDKINASMKSYNDFRRIFGEDYIQLHRDEIENIIRWITLFCDEKKMLVTKIKNTYPQISDDEIKAIKKLKYKDWGRLSATLLNSSTIAYEDKAFGELVTIISALRHTNKNFMELLSSYCSYDFIGKIKEFNGSRQSSNGKLTYKDVEELYVSPSVKRSIWQTLTILEEIKKIMGCEPKRIFIEMARSKEESKRTDSRLKKLQDLYKKCREENIDFMPRKDEFNALKTQLSSKKEEDLRSDKLYLYYTQMGRCMYTGERIELASLYDNNLYDIDHIYPRSKTKDDSLSNRVLVKKQVNAAKTDIYPLDAAIRTKMHSFWKLLYDKGFIDERKYERLTRSTQLRDEELAGFISRQLVETRQSTKAVAAILKTAYQNSEVVYVKAGNVSDFRQQFKFVKCRDVNDLHHAKDAYLNIVVGNCYHVKFTANPLNFITKNQDNRRYSLKPEIFYKFNIKRDDDIAWLGGEDGTMATVARTMHKNNILFTRQAVEGKGELFKQNPLKANSGQLPLKAGLSVEKYGGYDSLTTAYFAVVKSEGKKGAVQLSIEGIPLVYARQGEDAIKKYLIEVVHLCNPIIKLNKIKKYSLFKINGFPMHISGRQGKQLIFYVAGQLCLDEESIAYLKKAFKYESDLAINEEIIDDKNAAEENKQKAHKRLDFYENTWGISEVANMQLYDILIAKSANNLYKNRPASQTSTLKQQRDMFAKLPLSKQIRVIKEAMNLFKCASATADFKLLGKGSVCGKIQVSTNITKCKQCILINQSPTGVFEQEVDLMKL

SEQ ID NO: 1469 - protein, 1379 aa, unidentified; identical to SEQ ID NO: 1397
  REGION 1..1379: note = Description of Unknown: uncultivated organism with predicted taxonomy: Phascolarctobacterium
  REGION 1..1379: note = MG18-117 effector

SEQ ID NO: 1470 - protein, 1379 aa, unidentified
  REGION 1..1379: note = Description of Unknown: uncultivated organism with predicted taxonomy: Phascolarctobacterium succinatutens
  REGION 1..1379: note = MG18-118 effector
MQKLKNCDYYIGLDMGDASVGWAVTDTNYNILKFNGKALWGIRLFDSANTAASTRVFRSGRRRIDRTTWRLKMLQELFAEEIAKVDPGFFMRLEDSRLHLDDKRDKAVYNLFVDKNYTDKDFYQQYPTMYHLRYALATQAGPFDVRLLYLAVQHIAKHRGHFLFDNLDASKVNDFNAVFSEVENYVRDEMGIEDWSCQNIDELAKVLCDVNLGRTTKQKAMQSLLPAQTKQQKAIIQLFSGGKAKLAELFVDAELDECEKKSVSFQDDDLNEFEPVLTAALGERYEGLLRFKAIYDWSLLAKILHLDTSKKDEDEQHLLSECKVQVYEDHKRDLAVLKSMLKGKPLYNKIFRQDGDISYEKYAKGIKGRNQIDFCKDLKKQLEGIAEYKKIMQEITSIDDAKTEEERVLFRITNGFAFPKQTTKDNGIIPIQVHLAELKCILDNVEGYLPFLGETDNNGLSVREKIEQIVKFRIPYYVGPLAGTRMSREQGRYWVVRKNEKIYPWNFTEIVNLEESAEKFITNMTAKCTYLVGEDVLPKESLLYSEFMVRNAINNITVDGERLPVDVLEKIFKQLFLAKTSKVTKKTLERFFRQENISFQNIGGIDDKINASMKSYNDFRRIFGEDYIQLHRDEIENIIRWITLFCDEKKMLVTKIKNTYPQISDDEIKAIKKLKYKDWGRLSATLLNSSAIAYEDKAFGELVTIISALRHTNKNFMELLSSYCSYDFIGKIKEFNGSRQSSNGKLTYKDVEELYVSPSVKRSIWQTLTILEEIKKIMGCEPKRIFIEMARSKEESKRTDSRLKKLQDLYKKCREENIDFMPRKDEFNTLKTQLSSKKEDDLRSDKLYLYYTQMGRCMYTGEKIELASLYDNNLYDIDHIYPRSKTKDDSLSNRVLVKKQVNAAKTDIYPLDAAIRTKMHSFWKILYDKGFIDERKYQRLTRSTQLRDEELAGFISRQLVETRQSTKAVAAILKTAYQNSEVVYVKAGNVSDFRQQFKFVKCREVNDLHHAKDAYLNIVVGNCYHVKFTANPLNFITKNQDNRRYSLKPEIFYKFSIKRDGEIAWLGGEDGTMATVARTMHKNNILFTRQAVEGKGELFDQQPLKAKGGQLPLKAGLSIEKYGGYNSLTTAYFAVVKSEGKKGAVQLSIEAIPLVYAKQGEIAVQKYLTKVVQLCKPEIMLPKIKKYSLFKINGFPMHISGRTGNRMLFYGAGQLCLDEADVDYLKKALKYENDIAENELVIADKNSDDIQKQQAQKNLDYYNQKWRIGRKVNMHIYDMLLAKSGNNLYKNRPASQTTDLQEQREFFEKLSLANQIHVIGEVLKLFKCASASANLKLLDKGNACGVIKVSNNILKFKQCVLINQSPTGVFEQEVDLMKL

SEQ ID NO: 1471 - protein, 1379 aa, unidentified; identical to SEQ ID NO: 1420
  REGION 1..1379: note = Description of Unknown: uncultivated organism with predicted taxonomy: Phascolarctobacterium succinatutens
  REGION 1..1379: note = MG18-119 effector

SEQ ID NO: 1472 - protein, 1379 aa, unidentified; identical to SEQ ID NO: 1421
  REGION 1..1379: note = Description of Unknown: uncultivated organism with predicted taxonomy: Phascolarctobacterium succinatutens
  REGION 1..1379: note = MG18-120 effector

SEQ ID NO: 1473 - protein, 1379 aa, unidentified; identical to SEQ ID NO: 1425
  REGION 1..1379: note = Description of Unknown: uncultivated organism with predicted taxonomy: Phascolarctobacterium succinatutens
  REGION 1..1379: note = MG18-121 effector

SEQ ID NO: 1474 - protein, 1379 aa, unidentified
  REGION 1..1379: note = Description of Unknown: uncultivated organism with predicted taxonomy: Phascolarctobacterium
  REGION 1..1379: note = MG18-122 effector
MQKLKNCDYYIGLDMGDASVGWAVTDTNYNILKFNGKALWGIRLFDSANTAASTRVFRSGRRRIDRTTWRLKMLQELFAEEIAKVDPGFFMRLEDSRLHLDDKRDKAVYNLFVDKNYTDKDFYQQYPTMYHLRYALATQAGPFDVRLLYLAVQHIAKHRGHFLFDNLDASKVNDFNAVFSEVENYVRDEMGIEDWSCQNIDELAKVLCDVNLGRTTKQKAMQSLLPAQTKQQKAIIQLFSGGKAKLAELFVDEELDECEKKSVSFQDDDLNEFEPVLTAALGERYEGLLRFKAIYDWSLLAKILHLDTSKKDEGEQHLLSECKVQVYEDHKRDLAVLKSMLKGKPLYNKIFRQDGDISYEKYAKGIKGRNQIDFCKDLKKQLEGIAEYKKIMQEITSIDDAKTEEERLLFRITNGFAFPKQTTKDNGIIPIQVHLAELKCILDNAEGYLPFLGETDNNGLSVREKIEQIVKFRIPYYVGPLAGTRMSREQGRCWVVRKNEKIYPWNFTEIVNLEESAEKFITNMTAKCTYLVGEDVLPKESLLYSEFMVRNAINNITVDGERLPVDVLEKIFKQLFLAKTSKVTKKTLERFFRQENISFQNIGGIDDKINASMKSYNDFRRIFGEDYIQLHRDEIENIIRWITLFCDEKKMLVTKIKNTYPQISDDEIKAIKKLKYKDWGRLSATLLNSSTIAYEDKAFGELVTIISALRHTNKNFMELLSSYCSYDFIGKIKEFNGSRQSSNGKLTYKDVEELYVSPSVKRSIWQTLTILEEIKKIMGCEPKRIFIEMARSKEESKRTDSRLKKLQDLYKKCREENIDFMHRKDEFNALKTQLSSKKEEDLRSDKLYLYYTQMGRCMYTGERIELASLYDNNLYDIDHIYPRSKTKDDSLSNRVLVKKQVNAAKTDIYPLDAAISTKMHSFWKLLYDKGFIDERKYERLTRSTQLRDEELAGFISRQLVETRQSTKAVAAILKTAYQNSEVVYVKAGNVSDFRQQFKFVKCRDVNDLHHAKDAYLNIVVGNCYHVKFTANPLNFITKNQDNRRYSLKPEIFYKFSIKRDSEIAWIGGKDGTITTVTKTMHKNNILFTRQPVEGKGELFKQNPLKAKNGQLPLKAGLSVEKYGGYNSLSTAYFAVVKSEGKKGAVQLSIEAIPLVYAKQGEEAVQDYLTEVVQLCNPEIRIPKIKKYSLFKINGFPMHISGKTVKQIIFYAAGQLCLADDVADYLKKALKYEAYIALNEGLISDKNADDTQKQKAQQRLDYFKQKWGISSDANMKIYDILLAKSANNLYKNRPASQTKDLQEQRCVFEKLSLAEQIHIIGEVLNLFKCASASANLKLLGKGNSCGVIKTSNNITKCKQCILINQSPTGVFEQEVDLMKL

SEQ ID NO: 1475 - protein, 1379 aa, unidentified
  REGION 1..1379: note = Description of Unknown: uncultivated organism with predicted taxonomy: Phascolarctobacterium succinatutens
  REGION 1..1379: note = MG18-123 effector
MQKSKNCDYYIGLDMGDASVGWAVTDTNYNILKFNGKALWGIRLFDSANTAASTRVFRSGRRRIDRTTWRLKMLQELFAEEIAKVDPGFFMRLEDSRLHLDDKRDKAVYNLFVDKNYTDKDFYQQYPTMYHLRYALATQAVPFDVRLLYLAVQHIAKHRGHFLFDNLDASKVNDFNAVFSEVENYVRDEMGIEDWSCQNIDELAKVLCDVNLGRTTKQKAMQSLLPAQTKQQKAIIQLFSGGKAKLAELFVDEELDECEKNSVSFQDDDLNEFEPVLTAALGERYEGVLRFKAIYDWSLLAKILHLDTSKKDEDEQHLLSECKVQVYEDHKRDLAVLKSMLKGKPLYNKIFRQDGDISYEKYAKGIKGRNQIDFCKDLKKQLEGIAEYKKIMQEITNIDDAKTEEERLLFRITNGFAFPKQTTKDNGIIPIQVHLAELKCILDNAEGYLPFLGETDNNGLSVREKIEQIVKFRIPYYVGPLAGTRMSREQGRCWVVRKHEKIYPWNFTEIVNLEESAEKFITNMTAKCTYLVGEDVLPKESLLYSEFMVRNAINNITVDGERLPVDVLEKIFKQLFLAKTSKVTKKTLERFFRQENISFQNIGGIDDKINASMKSYNDFRRIFGEDYIQLHRDEIENIIRWITLFCDEKKMLVTKIKNTYPQISDDEIKAIKKLKYKDWGRLSATLLNSSTIAYEDKAFGELVTIISALRHTNKNFMELLSSYCYYDFIGKIKEFNGSRQSSNGKLTYKDVEELYVSPSVKRSIWQTLTILEEIKKIMGCEPKRIFIEMARSKEESKRTDSRLKKLQDLYKKCREENIDFMPRKDEFNALKTQLSSKKEENLRSDKLYLYYTQMGRCMYTGERIELASLYDNNLYDIDHIYPRSKTKDDSLSNRVLVKKQVNAAKTDTYPLDAAIRTKMHSFWKLLYDKGFIDERKYERLTRSTQLRDEELAGFISRQLVETRQSTKAVAAILKTAYQNSEVVYVKAGNVSDFRQQFKFVKCREVNDLHHAKDAYLNIVVGNCYHVKFTANPLNFITKNQDNRRYSLKPEIFYKFSIKRDGEIAWLGGEDGTMATVARTMHKNNILFTRQAVEGKGELFDQQPLKAKGGQLPLKAGLSIEKYGGYNSLTTAYFAVVKSEGKKGAVQLSIEAIPLVYAKQGEIAVQKYLTEVVQLCKPEIMLPKIKKYSLFKINGFPMHISGRTGKQLIFYGAGQLCIADDVADYLKKALMYETDIAEKEKTLADQNADDIQKQKAQKGLDFYEQKWGISGAVNVQLYDMFIAKSANNLYKNRPVSQTITLKEKREHFVKLTVSKQIHIIKEILNLFKCASASADFKLIDKGTSCGTLKISNNINKLKECILINQSPTGVFEQEVDLMKL

SEQ ID NO: 1476 - protein, 1379 aa, unidentified
  REGION 1..1379: note = Description of Unknown: uncultivated organism with predicted taxonomy: Phascolarctobacterium succinatutens
  REGION 1..1379: note = MG18-124 effector
MQKLKNCDYYIGLDMGDASVGWAVTDTNYNILKFNGKALWGIRLFDSANTAASTRVFRSGRRRIDRTTWRLKMLQELFADEIAKVDTGFFMRLEDSRLQLDDKREKAAYNLFVDKSYTDKEFYQQYPTMYHLRYALATQKGPFDVRLLYLAVQHIAKHRGHFLFDNLDASKVNDFNAVFSEVENYVRDEMGIEDWSCQNIDEFAKVLRDVNLGRTTKQKAMQSLLPAQTKQQKAIIQLFSGGKAKLAELFVDEELDECEKKSVSFQDDDLNEFEPVLTAALGERYEGLLRFKAIYDWSLLAKILHLDTSKKDEDEQHLLSECKVQVYEDHKRDLAVLKSMLKGKPLYNKIFRQDGDISYEKYAKGIKGRNQIDFCKDLKKQLEGIAEYKKIMQEITSIDDAKTEEERLLFRITNGFAFPKQTTKDNGIIPIQVHLAELKCILENAEGYLPFLGETDNNGLSVREKIKQIVKFRIPYYVGPLAGTRMSREQGRCWVVRKNEKIYPWNFTEIVNLEESAEKFITNMTAKCTYLVGEDVLPKESLLYSEFMVRNAINNITVDGERLPVDVLEKIFKQLFLAKTSKVTKKTLERFFRQENISFQNIGGIDDKINASMKSYNDFRRIFGEDYIQLHRDEIENIIRWITLFCDEKKMLVTKIKNTYPQISDDEIKAIKKLKYKDWGRLSATLLNSSTIAYEDKAFGELVTIISALRHTNKNFMELLSSYCSYDFIGKIKEFNGSRQSSNGKLTYKDVEELYVSPSVKRSIWQTLTILEEIKKIMGCEPKRIFIEMVRSKEESKRTDSRLKKLQDLYKKCREENIDFMPRKDEFNALKTMLSSQKEEDLRSDKLYLYYTQMGRCMYTGERIELASLYDNNLYDIDHIYPRSKTKDDSLSNRVLVKKQVNAAKTDTYPLDAAIRTKMHSFWKLLYDKGFIDERKYERLTRSTQLRDEELAGFISRQLVETRQSTKAVAAILKTAYQNSEVVYVKAGNVSDFRQQFKFVKCRDVNDLHHAKDAYLNIVVGNCYHVKFTANPLNFITKNQDNRRYSLKPEIFYKFSIKRDGEIAWLGGEDGTMATVARTMHKNNILFTRQPLEGKGELFKQNPLKAKSGQLPLKAGLSVEKYGGYDSLTTAYFALVKSEGKKGSVQLSIEGIPLVYAKQGEKAVQDYLTEVVQLCKPEIKIPKIKKYSLFKINGFPMHISGRQGKQLIFYVAGQLCINEDSIAYLKKAFKYESDLAVNEEILADENGDEVRKQKARNRLAFYDNTWGISLEANMQLYDMLLAKSANNLYKNRPASQTSTLKEQREQFSILPLSKQIHVIKEILKLFKCASATADFKLLEKGSTCGKIQVSTNITKCKQCILINQSPTGVFEQEVDLMKL

SEQ ID NO: 1477 - protein, 1379 aa, unidentified; identical to SEQ ID NO: 1391
  REGION 1..1379: note = Description of Unknown: uncultivated organism with predicted taxonomy: Phascolarctobacterium
  REGION 1..1379: note = MG18-125 effector

SEQ ID NO: 1478 - protein, 1379 aa, unidentified
  REGION 1..1379: note = Description of Unknown: uncultivated organism with predicted taxonomy: Phascolarctobacterium
  REGION 1..1379: note = MG18-126 effector
MQKLKNCDYYIGLDMGDASVGWAVTDTNYNILKFNGKALWGIRLFDSANTAASTRVFRSGRRRIDRTTWRLKMLQELFADEIAKVDTGFFMRLEDSRLHLDDKRDKAVYNLFVDKNYTDKDFYQQYPTMYHLRYALATQKGPFDVRLLYLAVQHIAKHRGHFLFDNLDASKVNDFNAVFSEVENYVRDEMGIEDWSCQNIDELAKVLCDVNLGRTTKQKAMQSLLPAQTKQQKAIIQLFSGGKAKLAELFVDEELDECEKKSVSFQDDDLNEFEPVLTAALGERYEGLLRFKAIYDWSLLAKILHLDTSKKDEDEQHLLSECKVQVYEDHKRDLAVLKSMLKGKPLYNKIFRQDGDISYEKYAKGIKGRNQIDFCKDLKKQLEGIAEYKKIMQEITSIDDAKTEEERVLFRITNGFAFPKQTTKDNGIIPIQVHLAELKCILDNAEGYLPFLGETDNNGLSVREKIEQIVKFRIPYYVGPLAGTRMSREQGRCWVVRKNEKIYPWNFTEIVNLEESAEKFITNMTAKCTYLVGEDVLPKESLLYSEFMVRNAINNITVDGERLPVDVLEKIFKQLFLAKTSKVTKKTLERFFRQENISFQNIGGIDDKINASMKSYNDFRRIFGEDYIQLHRDEIENIIRWITLFCDEKKMLVTKIKNTYPQISDDEIKAIKKLKYKDWGRLSATLLNSSTIAYEDKAFGELVTIISALRHTNKNFMELLSSYCSYDFIGKIKEFNGSRQSSNGKLTYKDVEELYVSPSVKRSIWQTLTILEEIKKIMGCEPKRIFIEMARSKEESKRTDSRLKKLQDLYKKCREENIDFIPLKDEFNALKTQLSSKKEEDLRSDKLYLYYTQMGCCMYTGERIELASLYDNNLYDIDHIYPRSKTKDDSLSNRVLVKKQVNAAKTDIYPLDAAIRTKMHSFWKLLYDKGFIDERKYERLTRSTQLRDEELAGFISRQLVETRQSTKAVAAILKTAYQNSEVVYVKAGNVSDFRQQFKFVKCRDVNDLHHAKDAYLNIVVGNCYHVKFTANPLNFITKNQDNRRYSLKPEIFYKFSIKRDGEIAWLGGEDGTMATVARTMHKNNILFTRQPLEGKGELFKQNPLKAKSGQLPLKAGLSVEKYGGYDSLTTAYFALVKSEGKKGSVQLSIEGIPLVYAKQGEKAVQDYLTEVVQLCKPEIKIPKIKKYSLFKINGFPMHISGRTGKQLIFYGAGQLCIADDVADYLKKALKYETDIAEKEKTLADQNADEIQKQKAQKGLDFYEQKWGISGAVNVQLYDMFIAKSANNLYKNRPASQTITLKEKREHFVKLTLSKQIHIIKEILNLFKCASASADFKLIDKGTSCGTLKISNNITKLKECILINQSPTGVFEQEVDLMKL

SEQ ID NO: 1479 - protein, 1379 aa, unidentified; identical to SEQ ID NO: 1436
  REGION 1..1379: note = Description of Unknown: uncultivated organism with predicted taxonomy: Phascolarctobacterium
  REGION 1..1379: note = MG18-127 effector

SEQ ID NO: 1480 - protein, 1379 aa, unidentified
  REGION 1..1379: note = Description of Unknown: uncultivated organism with predicted taxonomy: Phascolarctobacterium
  REGION 1..1379: note = MG18-128 effector
MQKLKNCDYYIGLDMGDASVGWAVTDTNYNILKFNGKALWGIRLFDSANTAASTRVFRSGRRRIDRTTWHLKMLQELFAEEIAKVDPGFFMRLEDSRLHLDDKRDKAVYNLFVDKNYTDKDFYQQYPTMYHLRYALATQAGPFDVRLLYLAVQHIAKHRGHFLFDNLDASKVNDFNAVFSEVENYVRDEMGIEDWSCQNIDELAKVLCDVNLGRTTKQKAMQSLLPAQTKQQKAIIQLFSGGKAKLAELFVDEELDECEKKSVSFQDDDLNEFEPVLTAALGERYEGLLRFKAIYDWSLLAKILHLDTSKKDEDEQHLLSECKVQVYEDHKRDLAVLKSMLKGKPLYNKIFRQDGDISYEKYAKGIKGRNQIDFCKDLKKQLEGIAEYKKIMQEITNIDDAKTEEERLLFRITNGFAFPKQTTKDNGIIPIQVHLAELKCILDNAEGYLPFLGETDNNGLSVREKIEQIVKFRIPYYVGPLAGTRMSREQGRCWVVRKNEKIYPWNFTEIVNLEESAEKFITNMTAKCTYLVGEDVLPKESLLYSEFMVRNAINNITVDGERLPVDVLEKIFKQLFLAKTSKVTKKTLERFFRQENISFQNIGGIDDKINASMKSYNDFRRIFGEDYIQLHRDKIENIIRWITLFCDEKKMLVTKIKNTYPHISDDKIKAIKKLKYKDWGRLSATLLNSSAIAYEDDAFGERVTIISALRHTNKNFMELLSNYCSYDFIGKIKDFNGSRQSSNSKLTYKDVEELYVSPSVKRSIWQTLTILEEIKKIMGHEPKRIFIEMARSKEESKRTDSRLKKLQDLYKQCREENIDFMPHTDELNAFKIQLSSKKEDDLRSDKLYLYYTQMGRCMYTGEIIELASLYDNNLYDIDHIYPRSKTKDDSLSNRVLVKKQVNAAKTDIYPLDAAIRTKMHSFWKLLYDKGFIDERKYERLTRSTQLRDEELAGFISRQLVETRQSTKAVAAILKTAYQNSEVVYVKAGNVSDFRQQFKFVKCREVNDLHHAKDAYLNIVVGNCYHVKFTANPLNFITKNQDNRRYSLKPEIFYKFSIKRDGEIAWLGGEDGTMATVARTMHKNNILFTRQAVEGKGELFDQQPLKAKGGQLPLKAGLSIEKYGGYNSLTTAYFAVVKSEGKKGAVQLSIEAIPLVYAKQGEIAVQKYLTEVVQLCKPEIMLPKIKKYSLFKINGFPMHISGRTGNRMLFYGAGQLCLDEADVDYLKKALKYENDIAENELVIADKNSDDIQKQQAQKNLDYYNQKWRIGRKVNMHIYDMLLAKSGNNLYKNRPASQTTDLQEQREFFEKLSLANQIHVIGEVLKLFKCASASANLKLLDKGNACGVIKVSNNILKFKQCVLINQSPTGVFEQEVDLMKL

SEQ ID NO: 1481 - protein, 1379 aa, unidentified
  REGION 1..1379: note = Description of Unknown: uncultivated organism with predicted taxonomy: Phascolarctobacterium succinatutens
  REGION 1..1379: note = MG18-129 effector
MQKLKNCDYYIGLDMGDASVGWAVTDTNYNILKFNGKALWGIRLFDSANTAASTRVFRSGRRRIDRTTWRLKMLQELFAEKIAKVDPGFFMRLEDSRLHLDDKRDKAVYNLFVDKNYTDKDFYQQYPTMYHLRYALATQAGPFDVRLLYLAVQHIAKHRGHFLFDNLDASKVNDFNAVFSEVENYVRDEMGIEDWSCQNIDELAKVLCDVNLGRTTKQKAMQSLLPAQTKQQKAIIQLFSGGKAKLAELFVDEELDECEKKSVSFQDDDLNEFEPVLTAALGERNEGLLRFKAIYDWSLLAKILHLDTSKKDEDEQHLLSECKVQVYEDHKRDLAVLKSMLKGKPLYNKIFRQDGDISYEKYAKGIKGRNQIDFCKDLKKQLEGITEYKKIMQEITSIDDAKTEEERVLFRITNGFAFPKQTTKDNGIIPIQVHLAELKCILDNAEGYLPFLGETDNNGLSVREKIEQIVKFRIPYYVGPLAGTRMSREQGRYWVVRKNEKIYPWNFTEIVNLEESAEKFITNMTAKCTYLVGEDVLPKESLLYSEFMVRNAINNITVDGERLPVDVLEKIFKQLFLAKTSKVTKKTLERFFRQENISFQNIGGIDDKINASMKSYNDFRRIFGEDYIQLHRDEIENIIRWITLFCDEKKMLVTKIKNTYPQISDDEIKAIKKLKYKDWGRLSATLLNSSTIAYEDKAFGELVTIISALRHTNKNFMELLSSYCSYDFIGKIKEFNGSRQSSNGKLAYKDVEELYVSPSVKRSIWQTLTILEEIKKIMGCEPKRIFIEMARSKEESKRTDSRLKKLQDLYKKCREENIDFMPRKDEFNVLKTQLSSKNEEDLRSDKLYLYYTQMGRCMYTGEIIELASLYDNNLYDIDHIYPRSKTKDDSLSNRVLVKKQVNAAKTDIYPLDAAIRTKMHSFWKLLYDKGFIDERKYERLTRSTQLRDEELAGFISRQLVETRQSTKAVAAILKTAYQNSEVVYVKAGNVSDFRQQFKFVKCREVNDLHHAKDAYLNIVVGNCYHVKFTANPLNFITKNQDNRRYSLKPEIFYKFSIKRDGEIAWLGGEDGTMATVARTMHKNNILFTRQAVEGKGELFDQQPLKAKGGQLPLKAGLSIEKYGGYNSLTTAYFAVVKSEGKKGAVQLSIEAIPLVYAKQGEIAVQKYLTEVVQLCKPEIMLPKIKKYSLFKINGFPMHISGRTGKQLIFYGAGQLCIADDVADYLKKALMYETNIAEKEKTLADQNADDIQKQKAQKGLDFYEQKWGISGAVNVQLYDMFIAKSANNLYKNRPVSQTITLKEKREHFVKLTVSKQIHIIKEILNLFKCASASADFKLIDKGTSCGTLKISNNINKLKECILINQSPTGVFEQEVDLMKL

SEQ ID NO: 1482 - protein, 1379 aa, unidentified
  REGION 1..1379: note = Description of Unknown: uncultivated organism with predicted taxonomy: Phascolarctobacterium succinatutens
  REGION 1..1379: note = MG18-130 effector
MQKLQNKDYYIGLDMGDASVGWAVTDANYNILKFNGKALWGIRLFDSANTAASTRVFRSGRRRIDRTTWRLKMLQELFAEEIAKVDPGFFMRLEDSRLHLDDKRDKAVYNLFVDKNYTDKDFYQQYPTMYHLRYALATQAGPFDVRLLYLAVQHIAKHRGHFLFDNLDASKVNDFNAVFSEVENYVRDEMGIEDWSCQNIDELAKVLCDVNLGRTTKQKAMQSLLPAQTKQQKAIIQLFSGGKAKLAELFVDEELDECEKKSVSFQDDDLNEFEPVLTAALGERYEGLLRFKAIYDWSLLAKILHLDTSKKDEDEQHLLSECKVQVYEDHKRDLAVLKSMLKGKPLYNKIFRQDGDISYEKYAKGIKGRNQLDFCKDLKKQLDGIAEYKKIMQEITSIDAAGTEEERLLFRIANGFAFPKQTTKDNGIIPIQVHLAELKCILDNAEGYLQFLGETDNNGLSVREKIEQIVKFRIPYYVGPLAGTRMSREQGRCWVVRKNEKIYPWNFTQVVNLEESAEKFITNMTAKCTYLVGEDVLPKESLLYSEFMVRNAINNITVDGERLPVDVLEKIFKQLFLAKTSKVTKKTLERFFRQENISFQNIGGIDDKINASMKSYNDFRRIFGEDYIQLHRDEIENIIRWITLFCDEKKMLVTKIKNTYPQIADDQIKAIKKLKYKDWGRLSATLLNSSAIAYEDKAFGELVTIISALRHTNKNFMELLSSYCSYDFIGKIKEFNGSRQSSNGKLTYKDVEELYVSPSVKRSIWQTLTILEEIKKIMGCEPKRIFIEMARSKEESKRTDSRLKKLQDLYKKCREENIDFMPRKDEFNTLKTQLNSKKEDDLRRDKLYLYYTQMGRCMYTGEKIELASLYDNNLYDIDHIYPRSKTKDDSLSNRVLVKKQVNAAKTDTYPLDAAIRTKMHSFWKLLYDKGFIDERKYQRLTRSTQLRDEELAGFISRQLVETRQSTKAVATILKTAYQNSEVVYVKAGNVSDFRQQFKFVKCREVNDLHHAKDAYLNIVVGNCYHVKFTANPLNFITKNQDNRRYSLKPEIFYKFSIKRDGEIAWLGGEDGTMATVARTMHKNNILFTRQAVEGKGELFDQQPLKAKGGQLPLKAGLSIEKYGGYNSLTTAYFAVVKSEGKKGAVQLSIEAIPLVYAKQGEIAVQKYLTEVVQLCKPEIMLPKIKKYSLFKINGFPMHISGRTGNRMLFYGAGQLCLDEADVDYLKKALKYENDIAENELVIADKNSDDIQKQQAQKNLDYYNQKWRISRKVNMHIYDMLLAKSGNNLYKNRPASQTTDLQEQREFFEKLSLANQIHVIGEVLKLFKCASASANLKLLDKGNACGVIKVSNNILKFKQCVLINQSPTGVFEQEVDLMKL

SEQ ID NO: 1483 - protein, 1379 aa, unidentified
  REGION 1..1379: note = Description of Unknown: uncultivated organism with predicted taxonomy: Phascolarctobacterium succinatutens
  REGION 1..1379: note = MG18-131 effector
MQKLKNCDYYIGLDMGDASVGWAVTDTNYNILKFNGKALWGIRLFDSANTAASTRVFRSGRRRIDRTTWRLKMLQELFAEEIAKVDTGFFMRLEDSRLQLDDKREKAVYNLFVDKSYTDKEFYQQYPTMYHLRYALATQAGPFDVRLLYLAVQHIAKHRGHFLFDNLDASKVNNFNAVFSEVENYVRDEMGIEDWSCQNIDELAKVLCDVNLGRTTKQKAMQSLLPAQTKQQKAIIQLFSGGKAKLAELFVDEELDECEKKSVSFQDDDLNEFEPVLTAALGERYEGLLRFKAIYDWSLLAKILHLDTSKKDEGEQHLLSECKVQVYEDHKRDLAVLKSMLKGKPLYNKIFRQDGDISYEKYAKGIKGRNQIDFCKNLKKQLEGIAEYKKIMQEITSIDDAKTEEERLLFRITNGFAFPKQTTKDNGIIPIQVHLAELKCILDNAEGYLPFLGETDNNGLSVREKIEQIVKFRIPYYVGPLAGTRMSREQGRCWVVRKNEKIYPWNFTEIVNLEESAEKFITNMTAKCTYLVGEDVLPKESLLYSEFMVRNAINNITVDGERLPVDVLEKIFKQLFLAKTSKVTKKTLERFFRQENISFQNIGGIDDKINASMKSYNDFRRIFGEDYIQLHRDEIENIIRWITLFCDEKKMLVTKIKNTYPQISDDEIKAIKKLKYKDWGRLSATLLNSSTIAYEDKAFGELVTIISALRHTNKNFMELLSSYCSYDFIGKIKEFNGRRQSSNGKLTYKEVEDLYVSPSVKRSIWQTLTILEEIKKIMGCEPKRIFIEMARSKEESKRTDSRLKKLQDLYKKCREENIDFMPRKDEFNALKTQLSSKKEEDLRSDKLYLYYTQMGRCMYTGERIELASLYDNNLYDIDHIYPRSKTKDDSLSNRVLVKKQVNAAKTDIYPLDAAIRTKMHSFWKLLYDKGFIDERKYERLTRSTQLRDEELAGFISRQLVETRQSTKAVAAILKTAYQNSEVVYVKAGNVSDFRQQFKFVKCREVNDLHHAKDAYLNIVVGNCYHVKFTANPLNFITKNQDNRRYSLKPEIFYKFSIKRDGEIAWLGGEDGTMATVARTMHKNNILFTRQAVEGKGELFDQQPLKAKGGQLPLKAGLSIEKYGGYNSLTTAYFAVVKSEGKKGAVQLSIEAIPLVYAKQGEIAVQKYLTEVVQLCKPEIMLPKIKKYSLFKINGFPMHISGRTGNRMLFYGAGQLCLDEADVDYLKKALKYENDIAENELVIADKNSDDIQKQQAQKNLDYYNQKWRIGRKVNMHIYDMLLAKSGNNLYKNRPASQTTDLQEQREFFEKLSLANQIHVIGEVLKLFKCASASANLKLLDKGNACGVIKVSNNILKFKQCVLINQSPTGVFEQEVDLMKL

SEQ ID NO: 1484 - protein, 1379 aa, unidentified
  REGION 1..1379: note = Description of Unknown: uncultivated organism with predicted taxonomy: Phascolarctobacterium succinatutens
  REGION 1..1379: note = MG18-132 effector
MQKLKNCDYYIGLDMGDASVGWAVTDTNYNILKFNGKALWGIRLFDSANTAASTRVFRSGRRRIDRTTWRLKMLQELFAEEIAKVDPGFFMRLEDSRLHLDDKRDKAVYNLFVDKNYTDKDFYQQYPTMYHLRYALATQAGPFDVRLLYLAVQHIAKHRGHFLFDNLDASKVNDFNAVFSEVENYVRDEMGIEDWSCQNIDELAKVLCDVNLGRTTKQKAMQSLLPAQTKQQKAIIQLFSGGKAKLAELFVDAELDECEKKSVSFQDDDLNEFEPVLTAALGERYEGLLRFKAIYDWSLLAKILHLDTSKKDEDEQHLLSECKVQVYEDHKRDLAVLKSMLKGKPLYNKIFRQDGDISYEKYAKGIKGRNQIDFCKDLKKQLEGIAEYKKIMQEITSIDDAKTEEERVLFRITNGFAFPKQTTKDNGIIPIQVHLAELKCILDNVEGYLPFLGETDNNGLSVREKIEQIVKFRIPYYVGPLAGTRMSREQGRYWVVRKNEKIYPWNFTEIVNLEESAEKFITNMTAKCTYLVGEDVLPKESLLYSEFMVRNAINNITVDGERLPVDVLEKIFKQLFLAKTSKVTKKTLERFFRQENISFQNIGGIDDKINASMKSYNDFRRIFGEDYIQLHRDEIENIIRWITLFCDEKKMLVTKIKNTYPQISDDEIKAIKKLKYKDWGRLSATLLNSSAIAYEDKAFGELVTIISALRHTNKNFMELLSSYCSYDFIGKIKEFNGSRQSSNGKLTYKDVEELYVSPSVKRSIWQTLTILEEIKKIMGCEPKRIFIEMARSKEESKRTDSRLKKLQDLYKKCREENIDFMPRKDEFNTLKTQLSSKKEDDLRSDKLYLYYTQMGRCMYTGEKIELASLYDNNLYDIDHIYPRSKTKDDSLSNRVLVKKQVNAAKTDIYPLDAAIRTKMHSFWKLLYDKGFIDERKYQRLTRSTQLRDEELAGFISRQLVETRQSTKAVAAILKTAYQNSEVVYVKAGNVSDFRQQFKFVKCREVNDLHHAKDAYLNIVVGNCYHVKFTANPLNFITKNQDNRRYSLKPEIFYKFSIKRDGEIAWLGGEDGTMATVARTMHKNNILFTRQAVEGKGELFDQQPLKAKGGQLPLKAGLSIEKYGGYNSLTTAYFAVVKSEGKKGTVQLSIEAIPLVYAKQGEIAVQKYLTKVVQLCKPEIMLPKIKKYSLFKINGFPMHISGRTGNRMLFYGAGQLCLDEADVDYLKKALKYENDIAENELVIADKNSDDIQKQQAQKNLDYYNQKWRIGRKVNMHIYDMLLAKSGNNLYKNRPASQTTDLQEQREFFEKLSLANQIHVIGEVLKLFKCASASANLKLLDKGNACGVIKVSNNILKFKQCVLINQSPTGVFEQEVDLMKL

SEQ ID NO: 1485 - protein, 1235 aa, unidentified
  REGION 1..1235: note = Description of Unknown: uncultivated organism with predicted taxonomy: Phascolarctobacterium succinatutens
  REGION 1..1235: note = MG18-133 effector
VRLLYLAVQHIAKHRGHFLFDNLDASKVNDFNAVFSEVENYVRDEMGIEDWSCQNIDELAKVLCDVNLGRTTKQKAMQSLLPAQTKQQKAIIQLFSGGKAKLAELFVDEELDECEKKSVSFQDDDLNEFEPVLTAALGERYEGLLRFKAIYDWSLLAKILHLDTSKKDEGEQHLLSECKVQVYEDHKRDLAVLKSMLKGKPLYNKIFRQDGDISYEKYAKGIKGRNQIDFCKDLKKQLEGIAEYKKIMQEITSIDDAKTEEERLLFRITNGFAFPKQTTKDNGIIPIQVHLAELKCILDNAEGYLPFLGETDNNGLSVREKIEQIVKFRIPYYVGPLAGTRMSREQGRCWVVRKNEKIYPWNFTEIVNLEESAEKFITNMTAKCTYLVGEDVLPKESLLYSEFMVRNAINNITVDGERLPVDVLEKIFKQLFLAKTSKVTKKTLERFFRQENISFQNIGGIDDKINASMKSYNDFRRIFGEDYIQLHRDEIENIIRWITLFCDEKKMLVTKIKNTYPQISDDEIKAIKKLKYKDWGRLSATLLNSSTISYEDKAFGELVTIISALRHTNKNFMELLSSYCSYDFIGKIKEFNGSRQSSNGKLTYKDVEELYVSPSVKRSIWQTLTILEEIKKIMGCEPKRIFIEMARSKEESKRTDSRLKKLQDLYKKCREENIDFMHRKDEFNALKTQLSSKKEEDLRSDKLYLYYTQMGRCMYTGERIELASLYDNNLYDIDHIYPRSKTKDDSLSNRVLVKKQVNAAKTDIYPLDAAISTKMHSFWKLLYDKGFIDERKYERLTRSTQLRDEELAGFISRQLVETRQSTKAVAAILKTAYQNSEVVYVKAGNVSDFRQQFKFVKCRDVNDLHHAKDAYLNIVVGNCYHVKFTANPLNFITKNQDNRRYSLKPEIFYKFSIKRDSEIAWIGGKDGTITTVTKTMHKNNILFTRQPVEGKGELFKQNPLKAKNGQLPLKAGLSVEKYGGYNSLSTAYFAVVKSEGKKGAVQLSIEAIPLVYAKQGEEAVQDYLTEVVQLCNPEIRIPKIKKYSLFKINGFPMHISGKTVKQIIFYAAGQLCLADDVADYLKKALKYEAYIALNEGLISDKNADDTQKQKAQQRLDYFKQKWGISSDANMKIYDILLAKSANNLYKNRPASQTKDLQEQRCVFEKLSLAEQIHIIGEVLNLFKCASASANLKLLGKGNSCGVIKTSNNITKCKQCILINQSPTGVFEQEVDLMKL

SEQ ID NO: 1486 - protein, 1348 aa, unidentified
  REGION 1..1348: note = Description of Unknown: uncultivated organism with predicted taxonomy: Clostridiales
  REGION 1..1348: note = MG18-135 effector
MDQNKEYYIGLDGGTDSVGWAVLNPDYTVVKKRGKSLWGVRLFESGQTAAERRLARSARRRTDRRKWRLKLLKELFAEEVAACDPAFFARLAESRYWEDDKKVDGADTLFHDADFTDKDYHRQFPTIYHLRRHLMCCTEKPDIRLLYLAVAHMIKNRGHFLNEGQDLNQVRRFDDVWQNLCAAVSDVLGIELAVENGAKAAEVLTSSVKIKEKTKQLESVLGEGESEADRSVCKALAGLLAGAKVSAVDLFNGDEALKECGKFSLAEKSIEELEPDLGDALGEDRFSLLQYAYAAYNWAVFARLLPEGKTISEVKTEEYEAYKADLRALKQLVKQYAPDQYYRVFRSAKIKGNYASYVGKTNCGNEKSNPEPCKPEEFFAFLKKELKPLWSQSIPAAASLAAKLESGTLLRRQRSGENAAIPYQAHLQELQIILKNMQQFYPFLQKADENGFTPAYKIEKLLTFRIPYYVGPLNDAHKEKGFCWIVKKADMPVLPWNFDQVVDESACEDAFIGRMSATCTYLVGENVLPQNSPLYCRFMVLNELNNLRIRGEKITPALKQAIFTQLFCAGKGGKVTQKKLLDFLHSQGIDANKQDISGIDGDFKASMAPAVKLQSIFTEPLPPETLERLAFALTVSGESRKMLQNRIRAILPNADNAVIRKVCALNFTGWGRLSQKLLTEIYDVDQTTGECRSLMDLLWSTNNNLMQLLSGDFTFAAGIDAYNAAQNGTENIFDYDHLVKDLYVSPSVKRGLWQTLLLVKEVRKIMGCDPARVFVEMARGASPEQKNKRTVSRKDQLLALYKACKEDARDWCSELEALPEDKLRSDKLYLYYTQMGRCMYSGELIRLDDLMHDTANQLYDIDHIYPQSKTKDDSLTNRVLVKRQLNAIKSNDYPLPQAMRQTALWKALLEKGLISKQKYLRLTRTTPFTGEELAGFINRQLVETRQSTKAAAHLLEQLLPNTEVVYVKAGLAADFRQEFGFVKCRDANDFHHAKDAYLNAVVGNVYHEKFTKNPLRFVRSGQEYSLNLSALFQNWNIYKGGRVIWQKGEDGSLETVRARMAKNDPMVTRYCTEGRGALYKLQPLKKGKGQLPLKSSDEHPQPINRYGGYNEVKGAYFVLAAYLKKGKRVKSIESVPLYLAAKLQRDPAALQQYLADQLGTDRVEILVPEIKLGTLFKWNGYPMTLSGRTGPQLLFRNAAELRTNAEQEQYIKKMSRYLEKCKGRKEPLPIRPAYDKLTPEENLQLYDAFTQWLTSGIYAKRLFLQGKFLLEKRDVFAALNPEAQVRQLMEILHLFQCNPVAANLSELGGAAHAGILLASKNIDGKVPVSIVHQSVTGYFSQEVCLNDL

SEQ ID NO: 1487 - protein, 1348 aa, unidentified
  REGION 1..1348: note = Description of Unknown: uncultivated organism with predicted taxonomy: Clostridiales
  REGION 1..1348: note = MG18-136 effector
MDQNKEYYIGLDGGTDSVGWAVLNPDYTVVKKRGKSLWGVRLFESGQTAAERRLARSARRRTDRKKWRLKLLKELFAEEVAACDPAFFARLAESRYWEDDKKVDGADTLFHDADFTDKDYHRQFPTIYHLRRHLMCCTEKPDIRLLYLAVAHMIKNRGHFLNEGQDLNQVRRFDDVWQNLCAAVSDVLGIELAVENGAKAAEVLTSSVKIKEKTKQLESVLGEGESEADRSVCKALAGLLAGAKVSAVDLFNGDEALKECGKFSLAEKSIEELEPDLGDALGEERFSLLQYAYAAYNWSVFARLLPEGKTISEVKTEEYEAYKADLRALKQLVKQYAPDQYYRVFRSAKIKGNYASYVGKTNCGNEKSNPESCKPEEFFAFLKKELKPLWSQSIPAAASLAAKLESGTLLRRQRSGENAAIPYQAHLQELQIILKNMQQFYPFLQKADENGFTPAYKIEKLLTFRIPYYVGPLNDAHKEKGFCWIVKKADMPVLPWNFDQVVDENACEDAFIGRMSATCTYLVGENVLPQNSPLYCRFMVLNELNNLRIRGEKITPALKQAIFTQLFCAGKGGKVTQKKLLDFLHSQGIDANKQDISGIDGDFKASIAPAVKLQSIFTEPLPPETLERLAFALTVSGESRKMLQNRIRAILPNADNAVVRKVCALKFTGWGRLSQKLLTEIYDVDQTTGECRSLMDLLWSTNNNLMQLLSGDFTFAAGIDAYNAAQNGTENIFDYDHLVKDLYVSPSVKRGLWQTLLLVKEVRKIMGCDPARVFIEMARGASPEQKNKRTVSRKDQLLALYKACKEDARDWCGELEALPEDKLRSDKLYLYYTQMGRCMYSGEPIRLDDLMHDTANQLYDIDHIYPQSKTKDDSLTNRVLVKRQLNAIKSNDYPLPQAMRQTALWKALLEKGLISKQKYLRLTRTTPFTEEELAGFINRQLVETRQSTKAAAHLLEQLLPNTEVVYVKAGLAADFRQEFGFVKCRDANDFHHAKDAYLNAVVGNVYHEKFTKNPLRFVRSGQEYSLNLSALFQNWNIYKGGRVIWQKGEDGSLETVRARMAKNDPMVTRYCTEGRGALYDLQPMKKSKGQLPLKSSDERLQHIDRYGGYNKLAGAYFTLAAYYKKGKRVKSIESVPLYLAAKLQLNPAALQQYLADQLGTDRVEILVPEIKLGTLFKWNGYPMTLSGRTGPQLLFRNAAELRTNAEQEQYIKKMSRYLEKCKGRKEPLPIRPAYDKLTPEENLQLYDAFTQWLTSGIYAKRLSLQGKFLLEKRDAFAALSPEAQVRQLMEILHLFQCNPVAANLSELGGVAHAGILLASKNIDGKVPVSIVHQSVTGYFVQEVCLNDL

SEQ ID NO: 1488 - protein, 913 aa, unidentified
  REGION 1..913: note = Description of Unknown: uncultivated organism with predicted taxonomy: Dorea sp. OM02-2LB
  REGION 1..913: note = MG18-137 effector
NMQQFYPFLQKADENGFTPAYKIEKLLTFRIPYYVGPLNDAHKEKGFCWIVKKADMPVLPWNFDQVVDENACEDAFIGRMSATCTYLVGENVLPQNSPLYCRFMVLNELNNLRIRGEKITPALKQAIFTQLFCAGKGGKVTQKKLLDFLHSQGIDANKQDISGIDGDFKASMAPAVKLQSIFTEPLPPETLERLAFALTVSGESRKMLQNRIRAILPNADNAVVRKVCALKFTGWGRLSQKLLTEIYDVDQTTGECRSLMDLLWSTNNNLMQLLSGDFTFAAGIDAYNAAQNGTENIFDYDHLVKDLYVSPSVKRGLWQTLLLVKEVRKIMGCDPARVFIEMARGASPEQKNKRTVSRKDQLLALYKACKEDARDWCGELEALPEDKLRSDKLYLYYTQMGRCMYSGEPIRLDDLMHDTANQLYDIDHIYPQSKTKDDSLTNRVLVKRQLNAIKSNDYPLPQAMRQTALWKALLEKGLISKQKYLRLTRTTPFTEEELAGFINRQLVETRQSTKAAAHLLEQLLPNTEVVYVKAGLAADFRQEFGFVKCRDANDFHHAKDAYLNAVVGNVYHEKFTKNPLRFVRSGQEYSLNLSALFQNWNIYKGGRVIWQKGEDGSLETVRARMAKNDPMVTRYCTEGRGALYDLQPMKKSKGQLPLKSSDERLQHIDRYGGYNKLAGAYFTLAAYYKKGKRVKSIESVPLYLAAKLQLNPAALQQYLADQLGTDRVEILVPEIKLGTLFKWNGYPMTLSGRTGPQLLFRNAAELRTNAEQEQYIKKMSRYLEKCKGRKEPLPIRPAYDKLTPEENLQLYDAFTQWLTSGIYAKRLSLQGKFLLEKRDAFAALSPEAQVRQLMEILHLFQCNPVAANLSELGGVAHAGILLASKNIDGKVPVSIVHQSVTGYFVQEVCLNDL

SEQ ID NO: 1489 - protein, 988 aa, unidentified
  REGION 1..988: note = Description of Unknown: uncultivated organism with predicted taxonomy: Phascolarctobacterium
  REGION 1..988: note = MG18-138 effector
MQEITNIDDAKTEEERLLFRITNGFAFPKQTTKDNGIIPIQVHLAELKCILDNAEGYLPFLGETDNNGLSVREKIEQIVKFRIPYYVGPLAGTRMSREQGRCWVVRKHEKIYPWNFTEIVNLEESAEKFITNMTAKCTYLVGEDVLPKESLLYSEFMVRNAINNITVDGERLPVDVLEKIFKQLFLAKTSKVTKKTLERFFRQENISFQNIGGIDDKINASMKSYNDFRRIFGEDYIQLHRDEIENIIRWITLFCDEKKMLVTKIKNTYPQISDDEIKAIKKLKYKDWGRLSATLLNSSTIAYEDKAFGELVTIISALRHTNKNFMELLSSYCSYDFIGKIKEFNGSRQSSNGKLTYKDVEELYVSSSVKRSIWQTLTILKEIKKIMGCEPKRIFIEMARSKEESKRTDSRLKKLQDLYKKCREENIDFMPRKDEFNALKTLLSSQKEEDLRSDKLYLYYTQMGRCMYTGERIELASLYDNNLYDIDHIYPRSKTKDDSLSNRVLVKKQVNAAKTDTYPLDAAIRTKMHSFWKLLYDKGFIDERKYERLTRSTQLRDEELAGFISRQLVETRQSTKAVAAILKTAYQNSEVVYVKAGNVSDFRQQFKFVKCREVNDLHHAKDAYLNIVVGNCYHVKFTANPLNFITKNQDNRRYSLKPEIFYKFSIKRDGEIAWLGGEDGTMATVARTMHKNNILFTRQAVEGKGELFDQQPLKAKGGQLPLKAGLSIEKYGGYNSLTTAYFAVVKSEGKKGAVQLSIEAIPLVYAKQGEIAVQKYLTEVVQLCKPEIKIPKIKKYSLFKINGFPMHISGRTGKQLVFYGAGQLCIADDVADYLKKALKYETDIAEKEKTLADQNADDIHKQKAQKGLDFYEQKWGISGAVNVQLYDMFIAKSANNLYKNRPASQTITLKEKREHFVKLTLSKQIHIIKEILNLFKCASASADFKLIDKGTSCGTLKISNNITKLKECILINQSPTGVFEQEVDLMKL

SEQ ID NO: 1490 - protein, 1218 aa, unidentified
  REGION 1..1218: note = Description of Unknown: uncultivated organism with predicted taxonomy: Phascolarctobacterium succinatutens
  REGION 1..1218: note = MG18-139 effector
FLFDNLDASTVNDFNAVFSEVENYVHDEMGLEDWSCQNKDALAKVLCDVNLGRTTKQKAMQSLLPAKSKQQKAILQLFSGGKAKLAELFDDEELDDCEKKSISFQDDDLDEIEPVLTAALGERYEGLLRFKAIYDWSLLAKILHLDTGKKEEGEQHLLSECKVQVYEDHKRDLAVLKSMLKGKPLYNKIFRQDGDISYEKYAKGIKGRNQIDFCKDLKKQLEGIAEYKKIMQEITSIDDAKTEEERLLFRITNGFAFPKQTTKDNGIISIQVHLAELKFILDNAEGYLPFLGETDNNGLSVREKIEQIVKFRIPYYVGPLAGTRMSREQGRCWVVRKNEKIYPWNFTEIVNLEESAEKFITNMTAKCTYLVGEDVLPKESLLYSEFMVRNAINNITVDGERLPVDVLEKIFKQLFLAKTSKVTKKTLERFFRQENISFQNIGGIDDKINASMKSYNDFRRIFGEDYIQLHRDEIENIIRWITLFCDEKKMLVTKIKNTYPQISDYEIKAIKKLKYKDWGRLSATLLNSSTIAYEDKAFGELVTIISALRHTNKNFMELLSSYCYYDFIGKIKEFNGSRQSSNGKLTYKDVEELYVSPSVKRSIWQTLTILEEIKKIMGCEPKRIFIEMARSKEESKRTDSRLKKLQELYKKCREENIDFMPRKDEFNALKTQLSSKKEENLRSDKLYLYYTQMGRCMYTGERIELASLYDNNLYDIDHIYPRSKTKDDSLSNRVLVKKQVNAAKTDTYPLDAAIRTKMHSFWKLLYDKGFIDERKYERLTRSTQLRDEELAGFISRQLVETRQSTKAVAAILKTAYQNSEVVYVKAGNVSDFRQQFKFVKCREVNDLHHAKDAYLNIVVGNCYHVKFTANPLNFITKNQDNRRYSLKPEIFYKFSIKRDGEIAWLGGEDGTMATVARTMHKNNILFTRQAVEGKGELFDQQPLKAKGGQLPLKAGLSIEKYGGYNSLTTAYFAVVKSEGKKGAVQLSIEAIPLVYAKQGEIAVQKYLTEVVQLCKPEIMLPKIKKYSLFKINGFPMHISGRTGNRMLFYGAGQLCLDEADVDYLKKALKYENDIAENELVIADKNSDDIQKQQAQKNLDDYNQKWRIGRKVNMHIYDMLLAKSGNNLYKNRPASQTTDLQEQRELFEKLSLANQIHVIGEVLKLFKCASASANLKLLDKGNACGVIKVSNNILKFKQCVLINQSPTGVFEQEVDLMKL

SEQ ID NO: 1491 - protein, 947 aa, unidentified
  REGION 1..947: note = Description of Unknown: uncultivated organism with predicted taxonomy: Phascolarctobacterium succinatutens
  REGION 1..947: note = MG18-140 effector
VHLAELKFILDNAEGYLPFLGETDNNGLSVREKIEQIVKFRIPYYVGSLAGTRMSREQGRCWVVRKNEKIYPWNFTEIVNLEESAEKFITNMTAKCTYLVGEDVLPKESLLYSEFMVRNAINNITVDGERLPVDVLEKIFKQLFLAKTSKVTKKTLERFFRQENISFQNIGGIDDKINASMKSYNDFRRIFGEDYIQLHRDEIENIIRWITLFCDEKKMLVTKIKNTYPQISDYEIKAIKKLKYKDWGRLSATLLNSSTIAYEDKAFGELVTIISALRHTNKNFMELLSSYCYYDFIGKIKEFNGSRQSSNGKLTYKDVEELYVSPSVKRSIWQTLTILEEIKKIMGCEPKRIFIEMARSKEESKRTDSRLKKLQELYKKCREENIDFMPRKDEFNALKTQLSSKKEENLRSDKLYLYYTQMGRCMYTGERIELASLYDNNLYDIDHIYPRSKTKDDSLSNRVLVKKQVNAAKTDTYPLDAAIRTKMHSFWKLLYDKGFIDERKYERLTRSTQLRDEELAGFISRQLVETRQSTKAVAAILKTAYQNSEVVYVKAGNVSDFRQQFKFVKCREVNDLHHAKDAYLNIVVGNCYHVKFTANPLNFITKNQDNRRYSLKPEIFYKFSIKRDGEIAWLGGEDGTMATVARTMHKNNILFTRQAVEGKGELFDQQPLKAKGGQLPLKAGLSIEKYGGYNSLTTAYFAVVKSEGKKGAVQLSIEAIPLVYAKQGEIAVQKYLTEVVQLCKPEIMLPKIKKYSLFKINGFPMHISGRTGNRMLFYGAGQLCLDEADVDYLKKALKYENDIAENELVIADKNSDDIQKQQAQKNLDDYNQKWRIGRKVNMHIYDMLLAKSGNNLYKNRPASQTTDLQEQRELFEKLSLANQIHVIGEVLKLFKCASASANLKLLDKGNACGVIKVSNNILKFKQCVLINQSPTGVFEQEVDLMKL

SEQ ID NO: 1492 - protein, 947 aa, unidentified
  REGION 1..947: note = Description of Unknown: uncultivated organism with predicted taxonomy: Firmicutes
  REGION 1..947: note = MG18-141 effector
VHLAELKCILDNAEGYLPFLGETDNNGLSVREKIEQIVKFRIPYYVGPLAGTRMSREQGRCWVVRKNEKIYPWNFTEIVNLEESAEKFITNMTAKCTYLVGEDVLPKESLLYSEFMVRNAINNITVDGERLPVDVLEKIFKQLFLAKTSKVTKKTLERFFRQENISFQNIGGIDDKINASMKSYNDFRRIFGEDYIQLHRDEIENIIRWITLFCDEKKMLVTKIKNTYPQISDDEIKAIKKLKYKDWGRLSATLLNSSTIAYEDKAFGELVTIISALRHTNKNFMELLSSYCSYDFIGKIKEFNGSRQSSNGKLTYKDVEELYVSSSVKRSIWQTLTILKEIKKIMGCEPKRIFIEMARSKEESKRTDSRLKKLQDLYKKCREENIDFMPRKDEFNALKTQLSSKKEEDLRSDKLYLYYTQMGRCMYTGERIELASLYNDNLYDIDHIYPRSKTKDDSLSNRVLVKKQVNAAKTDIYPLDAAIRTKMHSFWKLIYDKGFIDERKYERLTRSTQLRDEELAGFISRQLVETRQSTKAVAAILKTAYQNSEVVYVKAGNVSDFRQQFKFVKCREVNDLHHAKDAYLNIVVGNCYHVKFTANPLNFITKNQDNRRYSLKPEIFYKFSIKRDGEIAWLGGEDGTMATVARTMHKNNILFTRQAVEGKGELFDQQPLKAKGGQLPLKAGLSIEKYGGYNSLTTAYFAVVKSEGKKGAVQLSIEAIPLVYAKQGEIAVQKYLTEVVQLCKPEIMLPKIKKYSLFKINGFPMHISGRQLKQLQFYVASQLCIDEYSIAYLKKAFKYENNLAVNDEIIADKNADEEKKQKARKRLDFYEKTWGIGKENNMRIYDILLAKSANNLYKKRPASQSATLEKRRENFKGLFVSKQIHVLKEILNLFKCLSATADLQLLGAGKNVGKVTWNTNISNVKQCILINQSPTGIFEQEVDLMKL

SEQ ID NO: 1493 - protein, 1056 aa, unidentified
  REGION 1..1056: note = Description of Unknown: uncultivated organism with predicted taxonomy: Clostridium sp. CAG:964
  REGION 1..1056: note = MG18-142 effector
AVYNLFVDKNYTDKDFYQQYPTMYHLRYALATQAGPFDVRLLYLAVQHIAKHRGHFLFDNLDASKVNDFNAVFSEVENYVRDEMGIEDWSCQNIDELAKVLCDVNLGRTTKQKAMQSLLPAQTKQQKAIIQLFSGGKAKLAELFVDAELDECEKKSVSFQDDDLNEFEPVLTAALGERYEGLLRFKAIYDWSLLAKILHLDTSKKDEDEQHLLSECKVQVYEDHKRDLAVLKSMLKGKPLYNKIFRQDGDISYEKYAKGIKGRNQIDFCKDLKKQLEGIAEYKKIMQEITSIDDAKTEEERVLFRITNGFAFPKQTTKDNGIIPIQVHLAELKCILDNVEGYLPFLGETDNNGLSVREKIEQIVKFRIPYYVGPLAGTRMSREQGRYWVVRKNEKIYPWNFTEIVNLEESAEKFITNMTAKCTYLVGEDVLPKESLLYSEFMVRNAINNITVDGERLPVDVLEKIFKQLFLAKTSKVTKKTLERFFRQENISFQNIGGIDDKINASMKSYNDFRRIFGEDYIQLHRDEIENIIRWITLFCDEKKMLVTKIKNTYPQISDDEIKAIKKLKYKDWGRLSATLLNSSAIAYEDKAFGELVTIISALRHTNKNFMELLSSYCSYDFIGKIKEFNGSRQSSNGKLTYKDVEELYVSPSVKRSIWQTLTILEEIKKIMGCEPKRIFIEMARSKEESKRTDSRLKKLQDLYKKCREENIDFMPRKDEFNTLKTQLSSKKEDDLRSDKLYLYYTQMGRCMYTGEKIELASLYDNNLYDIDHIYPRSKTKDDSLSNRVLVKKQVNAAKTDIYPLDAAIRTKMHSFWKLLYDKGFIDERKYQRLTRSTQLRDEELAGFISRQLVETRQSTKAVAAILKTAYQNSEVVYVKAGNVSDFRQQFKFVKCREVNDLHHAKDAYLNIVVGNCYHVKFTANPLNFITKNQDNRRYSLKPEIFYKFSIKRDGEIAWLGGEDGTMATVARTMHKNNILFTRQAVEGKGELFDQQPLKAKGGQLPLKAGLSIEKYGGYNSLTTAYFAVVKSEGKKGAVQLSIEAIPLVYACLLYT

SEQ ID NO: 1494 - protein, 1348 aa, unidentified; identical to SEQ ID NO: 1486
  REGION 1..1348: note = Description of Unknown: uncultivated organism with predicted taxonomy: Clostridiales
  REGION 1..1348: note = MG18-143 effector

SEQ ID NO: 1495 - protein, 1348 aa, unidentified; identical to SEQ ID NO: 1487
  REGION 1..1348: note = Description of Unknown: uncultivated organism with predicted taxonomy: Firmicutes
  REGION 1..1348: note = MG18-144 effector

SEQ ID NO: 1496 - protein, 951 aa, unidentified
  REGION 1..951: note = Description of Unknown: uncultivated organism with predicted taxonomy: Dorea sp. OM02-2LB
  REGION 1..951: note = MG18-145 effector
GPELVLWVGVILLRRQRSGENAAIPYQAHLQELQIILKNMQQFYPFLQKADENGFTPAYKIEKLLTFRIPYYVGPLNDAHKEKGFCWIVKKADMPVLPWNFDQVVDENACEDAFIGRMSATCTYLVGENVLPQNSPLYCRFMVLNELNNLRIRGEKITPALKQAIFTQLFCAGKGGKVTQKKLLDFLHSQGIDANKQDISGIDGDFKASMAPAVKLQSIFTEPLPPETLERLAFALTVSGESRKMLQNRIRAILPNADNAVVRKVCALKFTGWGRLSQKLLTEIYDVDQTTGECRSLMDLLWSTNNNLMQLLSGDFTFAAGIDAYNAAQNGTENIFDYDHLVKDLYVSPSVKRGLWQTLLLVKEVRKIMGCDPARVFIEMARGASPEQKNKRTVSRKDQLLALYKACKEDARDWCGELEALPEDKLRSDKLYLYYTQMGRCMYSGEPIRLDDLMHDTANQLYDIDHIYPQSKTKDDSLTNRVLVKRQLNAIKSNDYPLPQAMRQTALWKALLEKGLISKQKYLRLTRTTPFTEEELAGFINRQLVETRQSTKAAAHLLEQLLPNTEVVYVKAGLAADFRQEFGFVKCRDANDFHHAKDAYLNAVVGNVYHEKFTKNPLRFVRSGQEYSLNLSALFQNWNIYKGGRVIWQKGEDGSLETVRARMAKNDPMVTRYCTEGRGALYDLQPMKKSKGQLPLKSSDERLQHIDRYGGYNKLAGAYFTLAAYYKKGKRVKSIESVPLYLAAKLQLNPAALQQYLADQLGTDRVEILVPEIKLGTLFKWNGYPMTLSGRTGPQLLFRNAAELRTNAEQEQYIKKMSRYLEKCKGRKEPLPIRPAYDKLTPEENLQLYDAFTQWLTSGIYAKRLSLQGKFLLEKRDAFAALSPEAQVRQLMEILHLFQCNPVAANLSELGGVAHAGILLASKNIDGKVPVSIVHQSVTGYFVQEVCLNDL

SEQ ID NO: 1497 - protein, 947 aa, unidentified; identical to SEQ ID NO: 1491
  REGION 1..947: note = Description of Unknown: uncultivated organism with predicted taxonomy: Phascolarctobacterium succinatutens
  REGION 1..947: note = MG18-146 effector

SEQ ID NO: 1498 - protein, 1218 aa, unidentified; identical to SEQ ID NO: 1490
  REGION 1..1218: note = Description of Unknown: uncultivated organism with predicted taxonomy: Firmicutes
  REGION 1..1218: note = MG18-147 effector

SEQ ID NO: 1499 - protein, 1306 aa, unidentified
  REGION 1..1306: note = Description of Unknown: uncultivated organism with predicted taxonomy: Lactobacillus oryzae
  REGION 1..1306: note = MG18-148 effector
LQELFAEEIAKVDPGFFMRLEDSRLHLDDKRDKAVYNLFVDKNYTDKDFYQQYPTMYHLRYALATQAGPFDVRLLYLAVQHIAKHRGHFLFDNLDASKVNDFNAVFSEVENYVRDEMGIEDWSCQNIDELAKVLCDVNLGRTTKQKAMQSLLPAQTKQQKAIIQLFSGGKAKLAELFVDAELDECEKKSVSFQDDDLNEFEPVLTAALGERYEGLLRFKAIYDWSLLAKILHLDTSKKDEDEQHLLSECKVQVYEDHKRDLAVLKSMLKGKPLYNKIFRQDGDISYEKYAKGIKGRNQIDFCKDLKKQLEGIAEYKKIMQEITSIDDAKTEEERLLFRITNGFAFPKQTTKDNGIIPIQVHLAELKCILDNAEGYLPFLGETDNNGLSVREKIEQIVKFIIPYYVGPLAGTRMSREQGRCWVVRKNEKIYPWNFTEIVNLEESAEKFITNMTAKCTYLVGEDVLPKESLLYSEFMVRNAINNITVDGERLPVDVLEKIFKQLFLAKTSKVTKKTLERFFRQENISFQNIGGIDDKINASMKSYNDFRRIFGEDYIQLHRDEIENIIRWITLFCDEKKMLVTKIKNTYPQISDDEIKAIKKLKYKDWGRLSATLLNSSAIAYEDKAFGELVTIISALRHTNKNFMELLSSYCSYDFIGKIKEFNGSRQSSNGKLTYKDVEELYVSPSVKRSIWQTLTILEEIKKIMGCEPKRIFIEMARSKEESKRTDSRLKKLQDLYKKCREENIDFMPRKDEFNTLKTQLSSKKEDDLRIDKLYLYYTQMGRCMYTGEKIELASLYDNNLYDIDHIYPRSKTKDDSLSNRVLVKKQVNAAKTDIYPLDAAIRTKMHSFWKLLYDKGFIDERKYQRLTRSTQLRDEELAGFISRQLVETRQSTKAVAAILKTAYQNSEVVYVKAGNVSDFRQQFKFVKCREVNDLHHAKDAYLNIVVGNCYHVKFTANPLNFITKNQDNRRYSLKPEIFYKFSIKRDGEIAWLGGKDGTITTVTKTMHKNNILFTRQPVEGKGELFKQQPLKAKSGQLPLKAGLSVEKYGGYDSLTTAYFALVKSEGKKGAVQLSIEGIPLVYAKQGEKAVQNYLTDVLQLCEPEIKIPKIKKYSLFKINGFPMHISGRQLKQLQFYVASQLCIDEYSIAYLKKAFKYENNLAVNDEIIADKNADEEKKQKARKRLDFYEKTWGIGKENNMRIYDILLAKSANNLYKKRPASQSATLEKRRENFKGLFVSKQIHVLKEILNLFKCLSATADLQLLGAGKNVGKVTWNTNISNVKQCILINQSPTGIFEQEVDLMKL

SEQ ID NO: 1500 - protein, 947 aa, unidentified
  REGION 1..947: note = Description of Unknown: uncultivated organism with predicted taxonomy: Phascolarctobacterium
  REGION 1..947: note = MG18-149 effector
VHLAELKCILDNAEGYLPFLGETDNNGLSVREKIEQIVKFRIPYYVGPLAGTRMSREQGRCWVVRKNEKIYPWNFTEIVNLEESAEKFITNMTAKCTYLVGEDVLPKESLLYSEFMVRNAINNITVDGERLPVDVLEKIFKQLFLAKISKVTKKTLERFFRQENISFQNIGGIDDKINASMKSYNDFRRIFGEDYIQLHRDKIENIIRWITLFCDEKKMLVTKIKNTYPQIADDQIKAIKKLKYKDWGRLSATLLNSSAIAYEDKAFGELVTIISALRHTNKNFMELLSSYCSYDFIGKIKDFNGSRQSSNGKLTYKDVEELYVSPSVKRSIWQTLTILEEIKKIMGREPKRIFIEMARSKEESKRTDSRLKKLQDLYKKCREENIDFMPRKDEFNALKTQLSSKKEEDLRSDKLYLYYTQMGRCMYTGERIELASLYDDNLYDIDHIYPRSKTKDDSLSNRVLVKKEVNAAKTDIYPLDAAIRTKMHSFWKLLYDKGFIDERKYERLTRSTQLRDEELAGFISRQLVETRQSTKAVAAILKTAYQNSEVVYVKAGNVSDFRQQFKFVKCRDVNDLHHAKDAYLNIVVGNCYHVKFTANPLNFITKNQDNRRYSLKPEIFYKFSIKRDSEIAWIGGKDGTITTVTKTMHKNNILFTRQPVEGKGELFKQNPLKAKNGQLPLKAGLSVEKYGGYNSLSTAYFAVVKSEGKKGAVQLSIEAIPLVYAKQGEKAVQDYLTEVVQLCNPEIRIPKIKKYSLFKINGFPMHISGKTVKQIIFYAAGQLCLADDVADYLKKALKYEAYIALNEGLISDKNADDTQKQKAQQRLDYFKQKWGISSDANMKIYDILLAKSANNLYKNRPASQTKDLQEQRCVFEKLSLAEQIHIIGEVLNLFKCASASANLKLLGKGNSCGVIKTSNNITKCKQCILINQSPTGVFEQEVDLMKL

SEQ ID NO: 1501 - protein, 947 aa, unidentified
  REGION 1..947: note = Description of Unknown: uncultivated organism with predicted taxonomy: Firmicutes
  REGION 1..947: note = MG18-150 effector
VHLAELKCILDNAEGYLPFLGETDNNGLSVREKIEQIVKFRIPYYVGPLAGTRMSREQGRCWVVRKNEKIYPWNFTEIVNLEESAEKFITNMTAKCTYLVGEDVLPKESLLYSEFMVRNAINNITVDGERLPVDVLEKIFKQLFLAKISKVTKKTLERFFRQENISFQNIGGIDDKINASMKSYNDFRRIFGEDYIQLHRDKIENIIRWITLFCDEKKMLVTKIKNTYPQIADDQIKAIKKLKYKDWGRLSATLLNSSAIAYEDKAFGELVTIISALRHTNKNFMELLSSYCSYDFIGKIKDFNGSRQSSNGKLTYKDVEELYVSPSVKRSIWQTLTILEEIKKIMGREPKRIFIEMARSKEESKRTDSRLKKLQDLYKKCREENIDFMPRKDEFNALKTQLSSKKEEDLRSDKLYLYYTQMGRCMYTGERIELASLYDDNLYDIDHIYPRSKTKDDSLSNRVLVNKEVNAAKTDIYPLDAAIRTKMHSFWKLLYDKGFIDERKYERLTRSTQLRDEELAGFISRQLVETRQSTKAVAAILKTAYQNSEVVYVKAGNVSDFRQQFKFVKCRDVNDLHHAKDAYLNIVVGNCYHVKFTANPLNFITKNQDNRRYSLKPEIFYKFSIKRDSEIAWIGGKDGTITTVTKTMHKNNILFTRQPVEGKGELFKQNPLKAKNGQLPLKAGLSVEKYGGYNSLSTAYFAVVKSEGKKGAVQLSIEAIPLVYAKQGEKAVQDYLTEVVQLCNPEIRIPKIKKYSLFKINGFPMHISGKTVKQIIFYAAGQLCLADDVADYLKKALKYEAYIALNEGLISDKNADDTQKQKAQQRLDYFKQKWGISSDANMKIYDILLAKSANNLYKNRPASQTKDLQEQRCVFEKLSLAEQIHIIGEVLNLFKCASASANLKLLGKGNSCGVIKTSNNITKCKQCILINQSPTGVFEQEVDLMKL

SEQ ID NO: 1502 - protein, 781 aa, unidentified
  REGION 1..781: note = Description of Unknown: uncultivated organism with predicted taxonomy: Phascolarctobacterium
  REGION 1..781: note = MG18-151 effector
FQNIGGIDDKINASMKSYNDFRRIFGEDYIQLHRDEIENIIRWITLFCDEKKMLVTKIKNTYPQIADDQIKAIKKLKYKDWGRLSATLLNSSAIAYEDKAFGELVTIISALRHTNKNFMELLSSYCSYDFIGKIKEFNGSRQSSNGKLTYKDVEELYVSPSVKRSIWQTLTILEEIKKIMGCEPKRIFIEMARSKEESKRTDSRLKKLQDLYKKCREENIDFMPHTDELNAFKIQLSSKKEDDLRSDKLYLYYTQMGRCMYTGERIELASLYNDNLYDIDHIYPRSKTKDDSLSNRVLVKKEVNAAKTDIYPLDAVIRTKMHSFWKLLYDKGFIDERKYERLTRSTQLRDEELAGFISRQLVETRQSTKAVAAILKTAYKHSEIVYVKAGNVSDFRQKFEFVKCRDVNDLHHAKDAYLNIVVGNCYHVKFTANPLNFITKNQDNRRYSLKPEIFYKFSIKRDSEIAWIGGKDGTITTVTKTMHKNNILFTRQPVEGKGELFKQQPLKAKSGQLPLKAGLSVEKYGGYDSLTTAYFALVKSEGKKGAVQLSIEGIPLVYAKQGEIAVQKYLTEVVQLCKPEIMLPKIKKYSLFKINGFPMHISGRQLKQLQFYVASQLCIDEYSIAYLKKAFKYENNLAVNDEIIADKNADEEKKQKARKRLDFYEKTWGIGKENNMRIYDILLAKSANNLYKKRPASQSATLEKRRENFKGLFVSKQIHVLKEILNLFKCLSATADLQLLGAGKNVGKVTWNTDISNVKQCILINQSPTGIFEQEVDLMKL

SEQ ID NO: 1503 - protein, 947 aa, unidentified; identical to SEQ ID NO: 1500
  REGION 1..947: note = Description of Unknown: uncultivated organism with predicted taxonomy: Phascolarctobacterium succinatutens
  REGION 1..947: note = MG18-152 effector

SEQ ID NO: 1504 - protein, 1010 aa, unidentified
  REGION 1..1010: note = Description of Unknown: uncultivated organism with predicted taxonomy: Firmicutes
  REGION 1..1010: note = MG18-153 effector
VHCGFFILFFVQVDYTIYHKKIMQEITNIDDAKTEEERLLFRITNGFAFPKQTTKDNGIIPIQVHLAELKCILDNAEGYLPFLGETDNNGLSVREKIEQIVKFRIPYYVGPLAGTRMSREQGRCWVVRKHEKIYPWNFTEIVNLEESAEKFITNMTAKCTYLVGEDVLPKESLLYSEFMVRNAINNITVDGERLPVDVLEKIFKQLFLAKTSKVTKKTLERFFRQENISFQNIGGIDDKINASMKSYNDFRRIFGEDYIQLHRDEIENIIRWITLFCDEKKMLVTKIKNTYPQISDDEIKAIKKLKYKDWGRLSATLLNSSTIAYEDKAFGELVTIISALRHTNKNFMELLSSYCSYDFIGKIKEFNGSRQSSNGKLTYKDVEELYVSSSVKRSIWQTLTILKEIKKIMGCEPKRIFIEMARSKEESKRTDSRLKKLQDLYKKCREENIDFMPRKDEFNALKTLLSSQKEEDLRSDKLYLYYTQMGRCMYTGERIELASLYDNNLYDIDHIYPRSKTKDDSLSNRVLVKKQVNAAKTDTYPLDAAIRTKMHSFWKLLYDKGFIDERKYERLTRSTQLRDEELAGFISRQLVETRQSTKAVAAILKTAYQNSEVVYVKAGNVSDFRQQFKFVKCREVNDLHHAKDAYLNIVVGNCYHVKFTANPLNFITKNQDNRRYSLKPEIFYKFSIKRDGEIAWLGGEDGTMATVARTMHKNNILFTRQAVEGKGELFDQQPLKAKGGQLPLKAGLSIEKYGGYNSLTTAYFAVVKSEGKKGAVQLSIEAIPLVYAKQGEIAVQKYLTEVVQLCKPEIKIPKIKKYSLFKINGFPMHISGRTGKQLVFYGAGQLCIADDVADYLKKALKYETDIAEKEKTLADQNADDIHKQKAQKGLDFYEQKWGISGAVNVQLYDMFIAKSANNLYKNRPASQTITLKEKREHFVKLTLSKQIHIIKEILNLFKCASASADFKLIDKGTSCGTLKISNNITKLKECILINQSPTGVFEQEVDLMKL

SEQ ID NO: 1505 - protein, 1056 aa, unidentified
  REGION 1..1056: note = Description of Unknown: uncultivated organism with predicted taxonomy: Phascolarctobacterium succinatutens
  REGION 1..1056: note = MG18-154 effector
VQVYEDHKRDLAVLKSMLKGKPLYNKIFRQDGDISYEKYAKGIKGRNQIDFCKDLKKQLEGIAEYKKIMQEITNIDDAKTEEERLLFRITNGFAFPKQTTKDNGIIPIQVHLAELKCILDNAEGYLPFLGETDNNGLSVREKIEQIVKFRIPYYVGPLAGTRMSREQGRCWVVRKHEKIYPWNFTEIVNLEESAEKFITNMTAKCTYLVGEDVLPKESLLYSEFMVRNAINNITVDGERLPVDVLEKIFKQLFLAKTSKVTKKTLERFFRQENISFQNIGGIDDKINASMKSYNDFRRIFGEDYIQLHRDEIENIIRWITLFCDEKKMLVTKIKNTYPQISDDEIKAIKKLKYKDWGRLSATLLNSSTIAYEDKAFGELVTIISALRHTNKNFMELLSSYCYYDFIGKIKEFNGSRQSSNGKLTYKDVEELYVSPSVKRSIWQTLTILEEIKKIMGCEPKRIFIEMARSKEESKRTDSRLKKLQDLYKKCREENIDFMPRKDEFNALKTQLSSKKEENLRSDKLYLYYTQMGRCMYTGERIELASLYDNNLYDIDHIYPRSKTKDDSLSNRVLVKKQVNAAKTDTYPLDAAIRTKMHSFWKLLYDKGFIDERKYERLTRSTQLRDEELAGFISRQLVETRQSTKAVAAILKTAYQNSEVVYVKAGNVSDFRQQFKFVKCREVNDLHHAKDAYLNIVVGNCYHVKFTANPLNFITKNQDNRRYSLKPEIFYKFSIKRDGEIAWLGGEDGTMATVARTMHKNNILFTRQAVEGKGELFDQQPLKAKGGQLPLKAGLSIEKYGGYNSLTTAYFAVVKSEGKKGAVQLSIEAIPLVYAKQGEIAVQKYLTEVVQLCKPEIMLPKIKKYSLFKINGFPMHISGRTGKQLIFYGAGQLCIADDVADYLKKALMYETNIAEKEKTLADQNADDIQKQKAQKGLDFYEQKWGISGAVNVQLYDMFIAKSANNLYKNRPVSQTITLKEKREHFVKLTVSKQIHIIKEILNLFKCASASADFKLIDKGTSCGTLKISNNINKLKECILINQSPTGVFEQEVDLMKL

SEQ ID NO: 1506 - protein, 1046 aa, unidentified
  REGION 1..1046: note = Description of Unknown: uncultivated organism with predicted taxonomy: Phascolarctobacterium succinatutens
  REGION 1..1046: note = MG18-155 effector
LAVLKSMLKGKPLYNKIFRQDGDISYEKYAKGIKGRNQLDFCKDLKKQLDGIAEYKKIMQEITSIDAAGTEEERLLFRIANGFAFPKQTTKDNGIIPIQVHLAELKCILDNAEGYLQFLGETDNNGLSVREKIEQIVKFRIPYYVGPLAGTRMSREQGRCWVVRKNEKIYPWNFTQVVNLEESAEKFITNMTAKCTYLVGEDVLPKESLLYSEFMVRNAINNITVDGERLPVDVLEKIFKQLFLAKTSKVTKKTLERFFRQENISFQNIGGIDDKINASMKSYNDFRRIFGEDYIQLHRDEIENIIRWITLFCDEKKMLVTKIKNTYPQIADDQIKAIKKLKYKDWGRLSATLLNSSAIAYEDKAFGELVTIISALRHTNKNFMELLSSYCSYDFIGKIKEFNGSRQSSNGKLTYKDVEELYVSPSVKRSIWQTLTILEEIKKIMGCEPKRIFIEMARSKEESKRTDSRLKKLQDLYKKCREENIDFMPRKDEFNTLKTQLNSKKEDDLRSDKLYLYYTQMGRCMYTGEKIELASLYDNNLYDIDHIYPRSKTKDDSLSNRVLVKKQVNAAKTDTYPLDAAIRTKMHSFWKLLYDKGFIDERKYQRLTRSTQLRDEELAGFISRQLVETRQSTKAVATILKTAYQNSEVVYVKAGNVSDFRQQFKFVKCREVNDLHHAKDAYLNIVVGNCYHVKFTANPLNFITKNQDNRRYSLKPEIFYKFSIKRDGEIAWLGGEDGTMATVARTMHKNNILFTRQAVEGKGELFDQQPLKAKGGQLPLKAGLSIEKYGGYNSLTTAYFAVVKSEGKKGAVQLSIEAIPLVYAKQGEIAVQKYLTEVVQLCKPEIMLPKIKKYSLFKINGFPMHISGRTGNRMLFYGAGQLCLDEADVDYLKKALKYENDIAENELVIADKNSDDIQKQQAQKNLDYYNQKWRISRKVNMHIYDMLLAKSGNNLYKNRPASQTTDLQEQREFFEKLSLANQIHVIGEVLKLFKCASASANLKLLDKGNACGVIKVSNNILKFKQCVLINQSPTGVFEQEVDLMKL

SEQ ID NO: 1507 - protein, 759 aa, unidentified
  REGION 1..759: note = Description of Unknown: uncultivated organism with predicted taxonomy: Clostridium sp. CAG:964
  REGION 1..759: note = MG18-156 effector
VHLAELKCILDNAEGYLPFLGETDNNGLSVREKIEQIVKFRIPYYVGPLAGTRMSREQGRCWVVRKNEKIYPWNFTEIVNLEESAEKFITNMTAKCTYLVGEDVLPKESLLYSEFMVRNAINNITVDGERLPVDVLEKIFKQLFLAKTSKVTKKTLERFFRQENISFQNIGGIDDKINASMKSYNDFRRIFGEDYIQLHRDEIENIIRWITLFCDEKKMLVTKIKNTYPQISDDEIKAIKKLKYKDWGRLSATLLNSSTIAYEDKAFGELVTIISALRHTNKNFMELLSSYCSYDFIGKIKEFNGSRQSSNGKLTYKDVEELYVSSSVKRSIWQTLTILKEIKKIMGCEPKRIFIEMARSKEESKRTDSRLKKLQDLYKKCREENIDFMPRKDEFNALKTQLSSKKEEDLRSDKLYLYYTQMGRCMYTGERIELASLYNDNLYDIDHIYPRSKTKDDSLSNRVLVKKQVNAAKTDIYPLDAAIRTKMHSFWKLIYDKGFIDERKYERLTRSTQLRDEELAGFISRQLVETRQSTKAVAAILKTAYQNSEVVYVKAGNVSDFRQQFKFVKCREVNDLHHAKDAYLNIVVGNCYHVKFTANPLNFITKNQDNRRYSLKPEIFYKFSIKRDGEIAWLGGEDGTMATVARTMHKNNILFTRQAVEGKGELFDQQPLKAKGGQLPLKAGLSIEKYGGYNSLTTAYFAVVKSEGKKGAVQLSIEAIPLVYAKQGEIAVQKYLTEVVQLCKPEIMLPKIKKYSLFK

SEQ ID NO: 1508 - protein, 988 aa, unidentified
  REGION 1..988: note = Description of Unknown: uncultivated organism with predicted taxonomy: Ruminococcaceae bacterium
  REGION 1..988: note = MG18-157 effector
MYHLRYALATQAGPFDVRLLYLAVQHIAKHRGHFLFDNLDASKVNDFNAVFSEVENYVRDEMGIEDWSSQNIDELAKVLCDVNLGRTTKQKAMQSLLPAQTKQQKAIIQLFSGGKAKLAELFVDEELDECEKKSVSFQDDDLNEFEPVLTAALGERYEGLLRFKAIYDWSLLAKILHLDTSKKDEDEQHLLSECKVQVYEDHKRDLAVLKSMLKGKPLYNKIFRQDGDISYEKYAKGIKGRNQIDFCKDLKKQLEGIAEYKKIMQEITNIDDAKTEEERLLFRITNGFAFPKQTTKDNGIIPIQVHLAELKCILDNAEGYLPFLGETDNNGLSVREKIEQIVKFRIPYYVGPLAGTRMSREQGRCWVVRKHEKIYPWNFTEIVNLEESAEKFITNMTAKCTYLVGEDVLPKESLLYSEFMVRNAINNITVDGERLPVDVLEKIFKQLFLAKTSKVTKKTLERFFRQENISFQNIGGIDDKINASMKSYNDFRRIFGEDYIQLHRDEIENIIRWITLFCDEKKMLVTKIKNTYPQIADDQIKAIKKLKYKDWGRLSATLLNSSAIAYEDKAFGELVTIISALRHTNKNFMELLSSYCSYDFIGKIKEFNGSRQSSNGKLTYKDVEELYVSPSVKRSIWQTLTILEEIKKIMGREPKRIFIEMARSKEESKRTDSRLKKLQDLYKKCREENIDFMPRKDEFNALKTQLSSKKEEDLRSDKLYLYYTQMGRCMYTGERIELASLYDNNLYDIDHIYPRSKTKDDSLSNRVLVKKEVNAAKTDIYPLDAVIRTKMHSFWKLLYDKGFIDERKYERLTRSTQLRDEELAGFISRQLVETRQSTKAVAAILKTAYKHSEIVYVKAGNVSDFRQKFEFVKCRDVNDLHHAKDAYLNIVVGNCYHVKFTANPLNFITKNQDNRRYSLKPEIFYKFSIKRDSEIAWIGGKDGTITTVTKTMHKNNILFTRQPVEGKGELFKQQPLKAKSGHWPLKAG

SEQ ID NO: 1509 - protein, 814 aa, unidentified
  REGION 1..814: note = Description of Unknown: uncultivated organism with predicted taxonomy: Clostridium sp. CAG:964
  REGION 1..814: note = MG18-158 effector
FITNMTAKCTYLVGEDVLPKESLLYSEFMVRNAINNITVDGERLPVDVLEKIFKQLFLAKTSKVTKKTLERFFRQENISFQNIGGIDDKINASMKSYNDFRRIFGEDYIQLHRDEIENIIRWITLFCDEKKMLVTKIKNTYPQIADDQIKAIKKLKYKDWGRLSATLLNSSAIAYEDKAFGELVTIISALRHTNKNFMELLSSYCSYDFIGKIKEFNGSRQSSNGKLTYKDVEELYVSPSVKRSIWQTLTILEEIKKIMGCEPKRIFIEMARSKEESKRTDSRLKKLQDLYKKCREENIDFMPRKDEFNTLKTQLNSKKEDDLRSDKLYLYYTQMGRCMYTGEKIELASLYDNNLYDIDHIYPRSKTKDDSLSNRVLVKKQVNAAKTDTYPLDAAIRTKMHSFWKLLYDKGFIDERKYQRLTRSTQLRDEELAGFISRQLVETRQSTKAVATILKTAYQNSEVVYVKAGNVSDFRQQFKFVKCREVNDLHHAKDAYLNIVVGNCYHVKFTANPLNFITKNQDNRRYSLKPEIFYKFSIKRDGEIAWLGGEDGTMATVARTMHKNNILFTRQAVEGKGELFDQQPLKAKGGQLPLKAGLSIEKYGGYNSLTTAYFAVVKSEGKKGAVQLSIEAIPLVYAKQGEIAVQKYLTEVVQLCKPEIMLPKIKKYSLFKINGFPMHISGRTGNRMLFYGAGQLCLDEADVDYLKKALKYENDIAENELVIADKNSDDIQKQQAQKNLDYYNQKWRISRKVNMHIYDMLLAKSGNNLYKNRPASQTTDLQEQREFFEKLSLANQIHVIGEVLKLFKCASASA

SEQ ID NO: 1510 - protein, 767 aa, unidentified
  REGION 1..767: note = Description of Unknown: uncultivated organism with predicted taxonomy: Phascolarctobacterium succinatutens
  REGION 1..767: note = MG18-159 effector
MKSYNDFRRIFGEDYIQLHRDEIENIIRWITLFCDEKKMLVTKIKNTYPQISDDEIKAIKKLKYKDWGRLSTTLLNSSTIAYEDKAFGELVTIISALRHTNKNFMELLSSYCSYDFIGKIKEFNGSRQSSNGKLTYKDVEELYVSPSVKRSIWQTLTILEEIKKIMGCEPKRIFIEMARSKEESKRTDSRLKKLQDLYKKCREENIDFMPRKDEFNTLKTQLSSKKEDDLRIDKLYLYYTQMGRCMYTGEKIELASLYDNNLYDIDHIYPRSKTKDDSLSNRVLVKKQVNAAKTDTYPLDAAIRTKMHSFWKLLYDKGFIDERKYQRLTRSTQLRDEELAGFISRQLVETRQSTKAVAAILKTAYQNSEVVYVKAGNVSDFRQQFKFVKCREVNDLHHAKDAYLNIVVGNCYHVKFTANPLNFITKNQDNRRYSLKPEIFYKFSIKRDSEIAWIGGKDGTITTVTKTMHKNNILFTRQPVEGKGELFKQQPLKAKSGQLPLKAGLSVEKYGGYDSLTTAYFALVKSEGKKGAVQLSIEGIPLVYAKQGEIAVQKYLTEVVQLCKPEIMLPKIKKYSLFKINGFPMHISGRQLKQLQFYVASQLCIDEYSIAYLKKAFKYENNLAVNDEIIADKNADEEKKQKARKRLDFYEKTWGIGKENNMRIYDILLAKSANNLYKKRPASQSATLEKRRENFKGLFVSKQIHVLKEILNLFKCLSATADLQLLGAGKNVGKVTWNTNISNVKQCILINQSPTGIFEQEVDLMKL

SEQ ID NO: 1511 - protein, 815 aa, unidentified
  REGION 1..815: note = Description of Unknown: uncultivated organism with predicted taxonomy: Clostridiales
  REGION 1..815: note = MG18-160 effector
DVLPKQSPLYSRYMVLNELNNIRVDGIRLPVEVKQQAYKDLFLSLPKVSMKKFREYLRTINIQGEISGIDGEFQGSLKPHIDLKRIFGPARNLGAMGEDIIRWIVLFGEAKNILRKKIAEKYDLTEEQMKGVLRLHYSGWGRFSEKFLNGIRDVNKETGEVGDTVIESLWNSSQNLMELLGREHHFLGAISMHNDAFGSSDRITYQTVQDLYVAPAVKRQIWQALTIVKELKGVMGREPKRVFIEMARGPGEKKRTVSRKDALIELYKTLKSDERDWINEIAVQPEDRFRSDRLYFYYLQLGKCLYTGKPIDLDQIYNEMVYDVDHIYPQSKVKDDSLVNRVLVDSTKNKEKSDRYPIDKEIRDRMKPFWKMLLQQGFMEKEKYERLTRSTPFSDNELAEFIARQLVETRQSTKAVAEILQQVYPLSKIVYVKAGLVADFRRYMGHVKCREVNDYHHAKDAYLNIVAGNIYHTRFTDNPYNFIKEAKDKDQKYSLKLEKLLTRDIRRGDITAWDTTGNKTRGVVEKVLARNDIRFTRYPYTEKGQLFDVTLMKKGLGQLPIKANLPIEKYGGYNKVKGAYFMLVEHTDKKGKRIRTLKDVPVHLASQLATDVKKQEYCLDLGMKDPVIRYSKIKMKSLVEVDGFRMHISGRKGDALVLSHAHELVIGEYWEQYIKKLVKFRERAQAFSKSNRGMNLKITTYDGIDGNNNMELYDLFVSKLNNTIYQLKLSKQGTDLLDERERFLNLTIEEQVGILLEILNFFKCNRTSSDLKLLGKGGQAGNLSINSTISGYQTFKLINQSPTGVFEESVDLLKV

SEQ ID NO: 1512 - protein, 1098 aa, unidentified
  REGION 1..1098: note = Description of Unknown: uncultivated organism with predicted taxonomy: Firmicutes
  REGION 1..1098: note = MG21-1 effector
MTSHSIRYTLGLDIGIASVGWAVLRNGSDSEPYRIETLGVRIFDKAEVPKTGASLAAPRREARSSRRVVRRRRHRKERIKYLIEQEGIMTQAEMTRLFQNSSFEKSVYEIRVEALDRMLTREETVRLLIHFAQRRGYKSNSKAEEAKDNENGVIKQAISQNKQAMKAHGYRTFGEMLLMDERFYYTQPDGSRIFIPHNKASDYKVTAERSMLADELHMIFAAQRSLGSLWFSDTFETAYMDVWSSQRSFDEGPGGDSPYGGSQIEKMLGTSSDGESRAPKASYSAEYFRLLQDVNHLRIVSLDGTSSPLTQEQRDIVVAASKKSGTLTYTQLRKKLALADDQYFNALYYGDKTAVEVEKKRFGHLQFYHQLRTALDTVEKGAADTLTWAQRDEIARILTVYKADVRRTDELRKAGIPAEYIRALLPLSPTRAMHLSVTAIRKMIPHLEAGMSYSDAYSKAYGNQSTASAAPKKNKLSLNDIEEITNPVVRRAVSQSIKVINAIVRQYGAPERVRIELAREMGKNFKDRGKIAKSQADHAAKNERIKAQISEYKSDHITGQDIVKFKLFKEQDGICLYSGKSLDIARLFEPGYVDVDHIIPYSISFDDSYNNKVLVLSSENRQKGNRIPYAYFGQNSDRWEKYETLVSNTVRSYRKRKNLLLKSLSEAQIDGFKQRNLQDTQYLSKVIFRLIENHLQFAETAPGKKHTQPVNGAITAQVRKRLGIEKIREDGDLHHAVDAAVIACITPGMIQKITKYAQNHERFYATAKGYVDIETGEVLTRSEYEAMDDIRFPEPWPGFRSELEARVSEHPQEAIARLKLPHYENSEEIRPIFVSRMPNHKVTGAAHLETIRSKKGGAGSTVTKTALPDLKLDKNGEIAGYYRKEDDPLLYEALKARLKAFGGDGKKAFAEPFHKPKHNGEPGPIVKKVKIQESATLTVPVNHGIAANGSMVRLDVFHVDGDGYYFVPIYTSDTVKPELPNRAVVAGRRVQEWKVMDDSYFKFSLYPKDLIRIRSKKGIKLKAVNRNADLQEYSTNDCLCYFVKFNISTGALSVENHDRKFEQPGLGGKTLLSIEKYQVDVLGNYSPVALPEKRMKFR

SEQ ID NO: 1513 - protein, 915 aa, unidentified
  REGION 1..915: note = Description of Unknown: uncultivated organism with predicted taxonomy: Roseburia sp. AM23-20
  REGION 1..915: note = MG21-3 effector
HNTSGVYDLTVARTFIEEEAHKLFAAQRQFGNAFATENIENEYCEILLSQRHFSDGPGGERTFKFDLRGNCTFEKDELRAFKACYTFEFFKLLQDINHLRIIPEYRKGSNKQTRPLTPEERQKIIDLCLKSSSIDFSKLRKELKLADDEIFNRVGYDVKKKKSKKKDAEEQPEEQLTPEQQRTKCEEATKFTQMQSYHEMRKALDKVAKGTISKFSHDKLDEIGEILSLYKADDKRRERLEQIGLSNEEIEALLPLTFTKAGNLSLGAMRKLIPYLEQGLTYDKACEIVYGDHRAQYKGERMPLLSFGKLKEEGALDSVNNPVVLRAIAQTFKVVNAIIRRYGSPQAIHIELARDMKRNFADRQDIKSKQKDNWSENNRRREKVEEIKGSVATGQDIVKMKLYEDQNGVCLYSGKQLELHRLFEVGYAEVDHIVPYSKCFDDSYNNKVLVFSSENQRKGNRLPLEYMLAEGDEDKLDDYVTLVEANIKNTRKKQRLLKPCLTEQDITDWKARNLTDTQYITKAVADILRNYLAFEEDSPFIKKPVRSINGAVTDQVRKRLGLQKHREEGDLHHAMDAAVIAVTTDGYINRISRYTQRREFGKRIGCYKDKQTGEKVEIERQKGQAPLYIDPETGEKLTEQVFDHKYAPTFPAPWKEFTKELKARMAPNADEAIRQLYLPSYGSEEIKPIFVSQMPDRKISGQAHAETIRSARIDVDESGKERIIAVAKTPLTSLKLDKDGEIDGYYMPSSDRLLYEELKNRLIKTKTSGKTYGNAEQAFKEPVYKPKKDGSQGPRVYKVKTWKPTTSNVKVAGGIAKKGDIVRVDIFHITGGKDQGYYFVPIYVADTIKNTLPKHAVVTNFKSSKVEWKEMDDSNFIFSLYKGDLIHIELCADCRDKDSNNKIRKAKDMYVYYDG

SEQ ID NO: 1514 - protein, 1166 aa, unidentified
  REGION 1..1166: note = Description of Unknown: uncultivated organism with predicted taxonomy: Clostridiales
  REGION 1..1166: note = MG21-4 effector
MHYILGLDIGITSIGWAVIESDQDGAPFKIADLGVRIFKAAEQPKTGSSLALPRRSARSLRRRLWRKAHRKERIKLLLDRVGLITKENLEKLFSASSFEKDVYTLRSEGLDRKLNNEEWARVLYHLAQRRGYRSSSKAEEADTKNDAGKLLKAVKNNSDKMAQNNFRTVGEMFCKDSSDLFQVKDGSGHVIGRKTHNTSGVYDLTVARTFIEEEAHKLFAAQRQFGNAFATENIENEYCEILLSQRHFSDGPGGERTFKFDLRGNCTFEKDELRAFKACYTFEFFKLLQDINHLRIIPEYRKGSNKQTRPLTPEERQKIIDLCLKSSSIDFSKLRKELKLADDEIFNRVGYDVKKKKSKKKDAEEQPEEQLTPEQQRTKCEEATKFTQMQSYHEMRKALDKVAKGTISKFSHDKLDEIGEILSLYKADDKRRERLEQIGLSNEEIEALLPLTFTKAGNLSLGAMRKLIPYLEQGLTYDKACEIVYGDHRAQYKGERMPLLSFGKLKEEGALDSVNNPVVLRAIAQTFKVVNAIIRRYGSPQAIHIELARDMKRNFADRQDIKSKQKDNWSENNRRREKVEEIKGSVATGQDIVKMKLYEDQNGVCLYSGKQLELHRLFEVGYAEVDHIVPYSKCFDDSYNNKVLVFSSENQRKGNRLPLEYMLAEGDEDKLDDYVTLVEANIKNTRKKQRLLKPCLTEQDITDWKARNLTDTQYITKAVADILRNYLAFEEDSPFIKKPVRSINGAVTDQVRKRLGLQKHREEGDLHHAMDAAVIAVTTDGYINRISRYTQRREFGKRIGCYKDKQTGEKVEIERQKGQAPLYIDPETGEKLTEQVFDHKYAPTFPAPWKEFTKELKARMAPNADEAIRQLYLPSYGSEEIKPIFVSQMPDRKISGQAHAETIRSARIDVDESGKERIIAVAKTPLTSLKLDKDGEIDGYYMPSSDRLLYEELKNRLKAYGNAEQAFKEPVYKPKKDGSQGPRVYKVKTYKTTTSNVKVAGGIADNGSMVRIDVFHIKEGKDKGYYFIPIYVADTIKQKLPQKAVVAAKSIDQWKEMDDEDFIFSLYPGDLVRVEHKKDIVFKSTDKNSSDTISCKNLLTYYSGANISTGAITITNHDRSYIVHGLGIKTLQLLEKYEVDVLGNYHKVRLPEKRQAFNLKYSQKKQ

SEQ ID NO: 1515 - protein, 1166 aa, unidentified; identical to SEQ ID NO: 1514
  REGION 1..1166: note = Description of Unknown: uncultivated organism
  REGION 1..1166: note = MG21-5 effector

SEQ ID NO: 1516 - protein, 1166 aa, unidentified; identical to SEQ ID NO: 1514
  REGION 1..1166: note = Description of Unknown: uncultivated organism
  REGION 1..1166: note = MG21-6 effector

SEQ ID NO: 1517 - protein, 1136 aa, unidentified
  REGION 1..1136: note = Description of Unknown: uncultivated organism with predicted taxonomy: Clostridium sp. CAG:571
  REGION 1..1136: note = MG21-7 effector
MGYRIGLDIGITSVGWSVIEDDSNGNPIRIIDLGSRIFDAAEKPKDGSPLAKERRDARGLRRRLRRKKYRVERTKRLLERYDIITKKEVDEMYANKAHVKHLYNVYELRVLGIEQKLTNKELARVLISLVKKRGYKSNSKAEESNGEAGKLLTATRDNELLMQSKGYRTVAEMYLKDDKFKAKDKNGEILVDKDGSPLLKIKNSTGDYKNTTLRKLLVEEIKLILNKQKELNSKITDDFINEYLKIFESQRNFDDGPGFPSPYGGNLIENMLGNCTFEKEEKRAPKATYTFEYFKFLQTLNHIKIETINKKDDGTINKEKRELTSEEKEKLKELVFSKVTVTYSDVRKTLQLESNQRFNMFTYRDLLNYTEETNKEIEKEKKLKEFESYKKIKTALNHIEKNYITKLTTDDLDEIGYALTVYKSNDKRKEYLEKHTPNLSKEAIEELLKLSFSKVGNLSLKAMKKIIPELEKGVTYDKAVDKVYEDFRGTVDTQKKRKLRLKDFEQEISNPVVRRGLSQAIKVLNAITLRYNEKFGKPDVVVVELARELGKNFADRRTIEKRQSDNMQTNEKAKESIIALGKNNPTGKDIVKFKLWQDQDCKCIYSGKTIPVEELFTDLVDVDHIIPYSQCFDDSYNNKVLVLASENRQKGNRVPYKYLKESGKNLEEYEIRVNTLIRNNKKKQNLLRQDFTREDAEDWKERNLNDTKYICKYMYNLIRNHLEFSDNANFVRKVWTVNGKLTAHIRKRLGIEKVRDGDTHHAVDATVIAITTQNMINRLTRYYQYVDGRYMNNKGEYIDTYTGEIINAKEYEEKYGIYFPEPWPKFRKELDIRTNCKTRERMIECLEAEKIYTYEDYDDVEPIFVSRMPRRKVTGTAHLDTIRGIKEKDGELKTITKTELTKLKLKDGEIEGYPENCKRDDRLLYEALKNRLIEFNGDATKAFSEPFYKPKSDGTRGPVVNKVKIEANTTMGVKLNDNKAFAANGDCVRLDIFYVENEGYYFIPIYVSDTVKKELPNKACVAGKKYADWKEMRDENFIFSIYPKDLIYIQGKNKIKLNPVIKDKDSIEVEEILAYYVKAGISVAQIAIQTNDNKYNQSSLGIKNLKKLEKYEVDILGNYHKVKLPEKRLPFNINKK

SEQ ID NO: 1518 - protein, 1121 aa, unidentified
  REGION 1..1121: note = Description of Unknown: uncultivated organism with predicted taxonomy: Clostridiales
  REGION 1..1121: note = MG21-8 effector
MGGNAMKKEQKHCHYTLGLDIGIASIGWAVLGNNEDGTPNRIIDLGVRIFESAEVQKTGESLAAPRRDARSARRRLRRHRHRLERIRYLLVQQGVLTQEEMTHLYDKSDMVSPYQLRTEGLDRLLNAREFSKVLIHLAQRRGYQSNSTAEEAKNEKENGIIKTAILENQQRMGRGGYRTIGEMMYRDAAFWETINGIRYHCTRNKAGDYRFTVDRASILAEVSILFEAQRRLGAPWASVEMEDAYTAILSGQRSFDEGPGNDSHGNESPFRKAMSHNVGNCTLIPTELRAARADYTAEYFKLLQDLNHMRLVDNSGSHPLTQQQRAILEEMAFRSANLTYGQLRKKLGISDEVRFAGLYYGEDTIEKAEKRKWPQMQSYHKIRTALDKVSKDAIQTLTQDQLDAIGEILAGGVSDAKRINSFCLAGIPEEYHKALLPLSISKRAKLSIAAMRKLIPFLQQGMRYDEACKAAGLDFHGADGKVEKLSDFLNEITNPVVRRAVSQTIKVVKAVVDTYSNRKEMKLDAVRIELAREMHHSIKERNRMKKRQEENREKNEQVKAQILETKPGTRVTGLDIVKFKLYQEQDGICPYSGKPLLIERLYEPGYAEVDHIIPYSRCFDDSYSNKVLVLAEENQQKGNRTPYEYFGANEQRWHEFSARVRASVRDFKKRQKLLNTSFGEEQGKDFIQRNLNDTQHITRVVYNYLRNNLKFADSAYAKAPVRAVNGAVTAMLRGRWGIEKMRGNGDLHHCKDAVVIAATSDSMIKDLTKYYQEEEQLFMGKTHFVDPATGEVLTRKEFQQRFAPKFPQPWDRFREELEVRLDPTNPKEALMALNLSTYEFDPEEEIPPVFVSHMPKHTVTGAAHKETIRGKTETGTAVKTALTSLKLDKNGEIDGYYNPQTDPRLYQALVERLKKFGGDGAKAFAEPFYKPKRDGTPGPRVDKVKIAEKASLSVPTGRGEADNGEMIRIDVFRVPNERKPDDNYYFVPIYVADTKKAILPSKAVVGKKPPEAWKQMKPEHFLFSIFKGDLIYVESKKGISLALAKEAVGEKTIQVKSGLFYFCGADISDGSIKIETHDRRYYKKSLGIKELKAFEKRQVEVLGEVRKVKLPEKRLEFRGRK

SEQ ID NO: 1519 - protein, 1093 aa, unidentified
  REGION 1..1093: note = Description of Unknown: uncultivated organism
  REGION 1..1093: note = MG21-9 effector
MHYILGLDIGITSIGWAVIESDQDGKPFKIADLGVRIFKAAEQPKTGASLALPRRSARSLRRRLWRKAHRKERIKLLLDKVGLISKENLEKLFSASSFEKDVYTLRSEGLDRKLNNKEWARVLYHLAQRRGYRSSSKAEEADTKNDAGKLLKAVKNNSDKMAQNNFRTVGEMFCKDSSDLFQVKDGSGHVIGRKTHNTSGVYDLTVARIFIEEEAHKLFAAQRQFGNAFATESIENEYCEILLSQRHFSDGPGGERTFKFDLRGNCTFEKDELRAFKACYTFEFFKLLQDINHLRIIPEYRKGSNKQTRSLTPEERQKIIDLCLKSPDVKFSKLRKELKLEDDELFNRVNYDVKKKKSKKKDAEEQPEEQLTPEQQRTKCEEAAKFTQMQSYHEMRKALDKVAKGTISKFSHDKLDEIGEILSLYKADDKRRERLEQIGLSNEEIEGIGGKLFVLTGNLSLIAMRKLIPYLEQGLTYDKACEIVYSDHRAQYKGERMPLLSFGKLKEEGALDSVNNPVVLRAIAQTFKVVNAIIRRYGSPQAIHIELARDMKRNFTDRQDIKKKQDSNWSYNDKIREKVEELKGSAATGQDIVKMKLYEEQDGYCLYSGKQLDIRRLFEVGYAEVDHIVPYSKCFDDSYNNKVLVFSSENQRKGNRLPLEYMLAEGDEDKLDDYVTLVEARIKNTRKKQRLLKPCLTAEDSNDWKERNLTDTQYITKAVADILRNYLAFEEDSPFIKKPVRSINGAVTDQVRKRLGLQKHREEGDLHHAMDAAVIAVTTDGYINRISRYTQRREFGKRIGCYVDLETGEKLTKQAFEQKYEPTFPAPWNKFTKELKARMAPNADEAIRQLYLPSYGSEEIKPIFVSQMPDRKVSGQAHAETIRSARIDVDGNGKERIIAVAKTPLTSLKLDKDGEIDGYYMPSSDRLLYEELKNRLKAYGNAEQAFKEPVYKPKKDGSQGPRVYKVKTWKTTTSNVKVAGGIADNGSMVRIDVFHIKEGKDKGYYFVPIYVADTIKKELPQKAVVAAKPIDHWKEMDDKDFIFSLYPGDLIRVEHKKDIVFKSTDKNSSDTISCKNLLTYYVFANISTGAIAI

SEQ ID NO: 1520 - protein, 1136 aa, unidentified
  REGION 1..1136: note = Description of Unknown: uncultivated organism with predicted taxonomy: Clostridiales
  REGION 1..1136: note = MG21-10 effector
MGYRIGLDIGITSVGWSVIEDDSNGNPIRIIDLGSRIFDAAEKPKDGSPLAKERRDARGLRRRLRRKKHRIERTKRLLERYDIITKKEIDEMYANQAHVKHLYNVYELRVLGIEQRLTNKELARVLISLVKKRGYKSNSKAEESNGEAGKLLTATRENEILMQSKGYRTVAEMYLKDDKFKAKNKKGEILVDKDGTPLLKIKNSTGDYKNTTLRKLLIEEIKLILNKQKELNSKITDDFITEYLKIFESQRNFDDGPGFPSPYGGNLIENMLGNCTFEKEEKRAPKATYTFEYFKFLQTLNHIKIETINIKDDGTINKEKRELRSEEKEKLKELVFSKVTVTYSDVRKTLQLEPNQRFNMFTYRDLLNYTEETNKEIEKEKKLKEFESYKKIKTALNHIEKNYITKLTTDELDEIGYAVTVYKNDDKRKEYLENHTTNLSKEAIEELLNLSFSKVGNLSLKAMKKIIPELEKGVTYDKAVDKVYEDFRGTVNTQKKRKLRLKDFEQEISNPVVRRGLSQAIKVLNAITLRYNEKFGKPDVVVVELARELGKNFADRRTIEKRQSDNMQTNEKAKESIIALGKNNPTGKDIVKFKLWQDQDCKCIYSGKTIPVEELFTDLVDVDHIIPYSQCFDDSYNNKVLVLASENRQKGNRVPYKYLKESGKNVEEYEIRVNTLIRNNKKKQNLLRQDFTREDAEDWKERNLNDTKYICKYMYNLIRNHLEFSDNPNFVRKVWTVNGKLTAHIRKRLGIEKVRDGDTHHAVDATVIAITTQNMINRLTRYYQYVDGRYMNNKGEYIDIYTGEIINAKEYEEKNGIYFPEPWPKFRKELDIRTNCKTRERMIECLEAEKIYTYEDYDDVEPIFVSRMPRRKVTGTAHLDTIRGIKEKDGELKTITKTELTKLKLKDGEIEGYPDNCKRDDRLLYEALKNRLVEFNGDAAKAFSEPFYKPKSDGTRGPIVNKVKIEANTTMGVTLNDGKAFAANGDCVRLDIFYVENEGYYFIPIYVSDTVKKELPNKACVAGKKYADWKEMKEKDFIFSIYPKDLLYIQGKNKIKLNPVVKDKDPIEVEEILAYYLKIDISTATIEIKSNENKYVKRGLGGKGLKKLEKYEVDILGNYHKVKLPEKRLPFNINKK

SEQ ID NO: 1521 - protein, 1136 aa, unidentified
  REGION 1..1136: note = Description of Unknown: uncultivated organism with predicted taxonomy: Clostridiales
  REGION 1..1136: note = MG21-11 effector
MGYRIGLDIGITSVGWSVIEDDSKGNPIRIIDLGSRIFDAAENPQDGSALAKERRDARGLRRRLRRKKHRIERTKRLLERYDIITKKEIDEMYANQAHVKHLYNVYELRVLGIEQRLTNKELARVLISLVKKRGYKSNSKAEESNGEAGKLLTATRDNEILMQSKGYRTVAEMYLKDDKFKAKDKNEEILVDKDGIPLLKIKNSTGDYKNTTLRKLLIEEIKLILNKQKELNSKITDDFITEYLKIFESQRNFDDGPGFPSPYGGNLIENMLGNCTFEKEEKRAPKATYTFEYFKFLQTLNHIKIETINIKDDGTIKKEKRELTSDEKEKLKELVFSKVTVTYSDVRKTLQLEPNQRFNMFTYKDLLNYTEETNKEIEKEKKLKEFESYKKIKTALNHIEKNYITKLTTDELDEIGYALTVYKNDDKRKEYLENHTTNLSKEAIEELLKLSFSKVGNLSLKAMKKIIPELEKGVTYDKAVDKVYEDFRGTVNTQKKSKLRLKDFEQEISNPVVRRGLSQAIKVLNAITLRYNEKFGKPDVVVVELARELGKNFADRRTIEKRQSDNMQTNEKAKESIIALGKNNPTGKDIVKFKLWQDQDCKCIYSGKTIPVEELFTDLVDVDHIIPYSQCFDDSYNNKVLVLASENRQKGNRVPYKYLKESGKNLEEYEIRVNTLIRNNKKKQNLLRQDFTREDSEDWKERNLNDTKYICKYMYNLIRNHLEFSDNTNFVRKVWTVNGALTAHIRKRLGIEKVRDGDTHHAVDATVIAITTQGMVNKLTKYYQYVDGRYMNNKGEYIDTYTGEIINAKEYEEKYGIYFPEPWPKFRKELDIRTNCKTRERMIECIEAERIYTYEDYNDVEPIFVSRMPRRKVTGPAHVATIRGVKEKDGELKKITKTELTKLKLKDGEIEGYPENCKRDDRLLYEALKNRLIEFNGDATQAFSEPFYKPKSDGTRGPVVNKVKIEANTTMGVILNDKKAFAANGDCVRLDVFYVENEGYYFIPIYVSDTVKKELPNKACVAGKKYADWKEMKDEDFIFSIYPKDLIYIQGKNKIKLNPVIKDKEPIEVEEIFAYYVKAGISSAAITIQTNDSKYVQPSLGIKSLKKLEKYEVDILGNYHKVKLPEKRLPFNINKK

SEQ ID NO: 1522 - protein, 1088 aa, unidentified
  REGION 1..1088: note = Description of Unknown: uncultivated organism with predicted taxonomy: Helicobacter sp. MIT 11-5569
  REGION 1..1088: note = MG21-12 effector
MHYILGLDIGITSIGWAVIESDQDGVPFKIADLGVRIFKAAEQPKTGASLALPRRSARSLRRRLWRKAHRKERIKFLLDKVGLISKENLEELFLASGFEKDVYTLRAEGLDRKLNNEEWARVLYHLSQRRGYKSSSKAEESDKDNKEAGKLLNAVKSNSDKMKQNNFRTVGEMFCKDNSDLFQVKDGSGHIVGRKTHNTSGVYDLTIARNLIEAEVHKLFAAQRQLGNAFATESIENEYCEILLSQRHFSDGPGGERTFKFDLRGNCTFEKDELRAFKACYTFEYFKLLQDINHLRIIPEYRKGSAKQTRPLTPEERQKIIDLCLKSPSIDFSKLRKELKLADNELFNRVNYDVKKKKGKKKDTEEQSEEQLTPEQQRLKCEKAAKFQQMQSYHEICKALDKVAKGTISKLSHDQLDAIGEALSLYKADDKRRERLEQIVLSNEEIEALLPLDSTKAGNLSLIAMRKLIPYLEQGLTYDKACEQVYGDHRAQYNGERMPLLSFGNLKEEGALDSVNNPVVLRAIAQTFKVVNAIIRRYDSPQAIHIELARDMKRNFADRQDIKKKQDNNWSCNDRIRQKVEEYKGSAATGQDIVKMKLYEEQNGVCLYSGKQLDIHRLFEVGYAEVDHIVPYSKCFDDSYNNKVLVFSSENQSKGNRLPLEYMLAEGDEDKLDNYVTLVEAFIKNTRKRQRLLKPCLTAEDSSDWKERNLTDTQYITKAVADILRNYLAFEEDSPFAKKPVRSINGAVTDQVRKRLGLQKHREEGDLHHAMDAAVIAVTTDGYINRISRYTQRREFGKRIGCYKDKQTGEKVEIEKQKGQAPLYVDPETGEKLTEQAFDQKYAPTFPAPWPEFTKELKARMAPNADEAIRQLYLPSYGSEEIKPIFVSQMPDRKISGQAHAETIRSARVDVDESGKERIIAVAKTPLTSLKLDKDGEIENYYMPSSDRLLYEELKNRLKAYNNDPKEAFKEPVYKPKKDGSQGPRVYKVKTWKTTTSNVKVAGGIADNGSMVRIDVFYVKEGKDKGYYFIPIYVADTIKKELPQKAVVQGESMNNWKEMDDKDFIFSLYPGDLVRVEHKKNIEIGRAS

SEQ ID NO: 1523 - protein, 1132 aa, unidentified
  REGION 1..1132: note = Description of Unknown: uncultivated organism with predicted taxonomy: Clostridium
  REGION 1..1132: note = MG21-13 effector
MGYRIGLDIGITSVGWAAIEDDANGNPKRIIDLGSRIFEAAEKPKDGSPLAKDRRDARGLRRRLRRKKHRVERTKRLLERYNIITKKELEDLYENYRFQYNVYELRVMALDEKITNKDLARILISMVKKRGYKSNSKSEEIASGSDAGKLLTATKENEELMKEKGYRTVAEMYLKDDKFKLKNSNGEYILYKKGRKQIKIRNSINEYKNTALRKLLVDEIKLILEKQRELNSSINDNFIKEYLEIFESQRSFDEGPGEPSPYGGNQIEKMLGNCTFEKEEKRAAKASYTFEYFKLLQDINHIKINKYDLETRKIEKRELTEEERQKIIKIVKEKANVTYSSLRKELNLSRTERFNMLSYKNILMWSDETNEEVEKTAKFKEFESYNKIKTALNRVEKGYIEKLTTEELDKIGYALTVYKNDDKRIAYLKENTQNLTEEAIQELLKLSFTKVGNLSIKAMKKIIPELEKGITYDKAVDNVYEDFRGIVNTEKKRKLRLQDLEQEISNPVVRRGISQAIKVLNAITLRYNEKYGKPDVVVIELSREMGKNFNDRSKIKKSQEENMQRNENIRQAIIELGKSNPTGQDIVKYKLWQEQDNFCVYSGKKITVDMLFTEAVDVDHIIPYSMCFDDTYNNKVLVLASENRQKGNRVPYKYEKEIGRNIDEYVVRVGNIIKNPKKLRRLLREDFTKEDAKDWKNRNIQDTQYMCKLMYNLVRNHLEFSDNKNFERKVWTVNGSVTAHIRKRLGIEKTRDGDTHHAVDAAVIAITTQNMINRITKYYQYNDGKYMNNKGEYIDLETGEILDAKEYEAKNGIYFPEPWPKFRKELDIRVNCNSKERMIECLNAEKIFTYEDYEDVEPIFVSRMPRRKVTGMAHLETIRGLREENGSLKTITKTELAKLKLDKSGEIEGYPEKNKKDDKLLYDALKEQLTKFGGDGKVAFKKDFYKPRADGNKGPIVRKVQIEANATLGVTLKDREGFAGNGDCVRLDIFYVEGEGYYFVPIYVSDTIKEKLPNKACVQGKKYEEWKEMREEDFIFSLYPKDLIYVKGKNKIKLNATNKSGEQIEVEDTMAYYINAGISVAQITIQTHDNKYEQPSLGIKSLKELKKYEVDVLGNYHEVKIPEKRMPFNIKK

SEQ ID NO: 1524 - protein, 1169 aa, unidentified
  REGION 1..1169: note = Description of Unknown: uncultivated organism with predicted taxonomy: Clostridiales
  REGION 1..1169: note = MG21-14 effector
MGYRIGLDLGISSIGWACVEDKENGEPKRIIDLGTRIFDRAENPKDGAPLAAPRREARELRRRLRRRNHRIKRTKILLEKYDIISQQEIEKMYENYNFPNTPYELRVIGLDNKLTNKELARVLISLVKKRGYKSNSKSEESNDKETGKLLTATKDNENLMKEKGYRSVAEMYLKDEKFKMRLPNGQIATRIDKNTGKEIEIIKIKNSINDYKNTPLRKLLVEEIKLILNKQKEYNPKITDQFINEYLNIFTSQRNFDEGPGEPSPYAGNQIEKMLGKCTFEREEYRAPKSTYTFEYFKLLQDLNHIKIIKYELKQDNEIVQTVRTLTEEERKKLIELAKKTPTLNYYKIRKEIKLKENERFNMCRYKSTREFTDDVNKEAENDNKKIKEFQSYHEIRKALDKYKKEYIQELSTNDLDSIGYALCVYKNDKKRIEYIKTNVTQIPDEVINYLLPLSFSKVGNLSLKAMKKIIPYLEKGLTYDKAVNELGKIDSNYSDFRGVVNTEKRRKLSINNLEDNISNPVVRRAVSQTIKVLNAITLKYNSIYGKPDLVVVELARELGKSFKERQSIEKIYEENRTRNEKAIQEIRELGKTNVTGKDIVKYKLWKDQNEICIYSGKHIKVEDLFTDAVDIDHIIPYSQCFDDTYKNKVLVLASENRQKGNRTAYKYIKEAGKNLEEYEVRVNNYIKDYRKKERLLKADFSTEDAKNWKDRNIEDTQYISRLVYKLINNYMEFSDNPNVNRKVRNINGAVTHYIRNRLGIEKIRADGDEHHAVDACIIATTSNYMVNKITRYSQYIDGRFMNDRGEYIDIETGEIINKEEYEEEYGPKFPEPWEGFRRELEIRSSDDVANRAEKTPEELKNIMIQEINDEIKNGKLYSYIEHDDGINRFDDIEPIFVSRMPRRKVKGQAHMETIRGIEKENGKLKTVTKTPLTKLKLDDNNEIKNYSKKAKQDDKLLYDALVEQLKKFNGKGEEAFKEPFFKPKKDGSKGPIVNTVKIEENATLGVEFKEGKAFAGNGNMVRIDVFYVEGEGYYFIPIYVADTIKKELPNKACVANKGTDKWKTMDDKNFIFSLYPNDLIYIESEKGIKLNGNNDNKKEQIEVKKLFAYYVKAGISTAAITIDNQDGEYTQPGLGIKGLKKIEKYDIDVLGNYHKIKLPEKRIKFNIN

SEQ ID NO: 1525 - protein, 1133 aa, unidentified
  REGION 1..1133: note = Description of Unknown: uncultivated organism
  REGION 1..1133: note = MG21-15 effector
MGYRIGLDIGITSVGWAVIEDDIEGKPKRIIDLGSRIFDAAENPKDGSALAKVRRDARGIRRRGRRKKHRIERTLHLLERHHIISKKEWISMFENYNFQFNIYELRVKALEEKITNKDLARILVNFVKKRGYKSNSKSEENDSSNDAGKLLTATKENQNIMQEKGYRTIGELYLKDDRFKLKDKNGDYILDKNGQKIMKVRNTTNDYKGTALRTLISDEIKLILNKQKEYTSLITDEFIQEYISIFESQRNFDEGPGEPSPYAGNQIEKMLGFCTFEKEERRAPKATYTFEYFKLLQDINHIKIEKLSLDDNMQRVKSKRSLVKDEKEKIIELVKSKTKISYYDIRKALNLQENERFNMFTYKNVLLWNNETNAEVEKDKIFKEFESYNKIKTALNRIEKNYILKLNTDELDYIGYALTVYKNDEKRISFLKENTSLPDRIINELLNLSFTKVGNLSLKSMKKIIPYLENGLTYDKAVNSVYEDFRGEINTEKKQKLRLKDLEEDISNPVVRRGISQAIKVLNAITLRYNAKYGKPDVVVIELAREMGRNFKDRNIIKKSQEINMKNNEFVKERIVELGKENPRGQDIVKYKLWQEQDGVCIYSGKKIPIENLFTEAVDVDHIIPYSMCFDDTYNNKVLVLASENRQKGNRVPYKYEKEIGRDIEEYEVRVNNIIKNPYKRVKLLREDFTREDALEWKDRNIQDTQYICKLMYNLVKNHLEFSNNKNFDRKVWTVNGAITSHIRKRLGIEKTRDGDIHHAIDAVVIAITTQEMINKLTKYYQYKDGKYMNNKGEFIDLETGEILDAEKYEKENGIYFPEPWPKFRKELEIRTICPTKETMISYLHNEKIFTYDDYEDVEPIFVSRMPKRKITGTAHLETVRGFEKRDNEIYTITKTELKKLKLDKDGEIEGYPEKNKRDDRLLYDALREQLKRYNNDGEKAFKDDFYKPRKDGSRGPLVKKVQIESKTTLGVELKNKGFAANGDSVRIDVFYIEGDGYYFIPIYVSDTIKKELPNRACVPNKTYSEWKEMDEKNFIFSLYPKDLLYIKGKNKIKLNPTNKIDEPIEVEETMAYYVKAGISVASITIQTHDNKYQQPNLGIKTLKKLKKYEVDVLGNYHEVKLPEKRMPFNIKK

SEQ ID NO: 1526 - protein, 1166 aa, unidentified
  REGION 1..1166: note = Description of Unknown: uncultivated organism
  REGION 1..1166: note = MG21-16 effector
MHYILGLDIGITSIGWAVIESDQDGVPFKIADLGVRIFKAAEQPKTGASLALPRRSARSLRRRLWRKAHRKERIKLLLDKVGLISKKNLEKLFSASSFEKDVYTLRAEGLDRKLNNEEWARVLYHLAQRRGYRSSSKAEEADKDNKEAGKLLNAVKSNSDKMKQNNFRTVGEMFCKDNSDLFQVKDGSGHIVGRKTHNTSGVYDLTIARNLIEAEVHKLFAAQRQLGNAFATESIENEYCEILLSQRHFSDGPGGERTFKFDLRGNCTFEKDELRAFKACYTFEYFKLLQDINHLRIIPEYRKGSAKQIRPLTPEERQKIIDLCLKSPGLDFSKLRKELKLEDDELFNRVSYDVKKKKGKKKDTEEQSEEQLTPEQQRLKCEKAAKFQQMQSYHEMRVALDKVAKGTISKLSHDQLDGIGEVLSLYKADDKRRERLEQIGLSNEEIEALLPLKFTKAGNLSLTAMRKLIPYLEQGLTYDKACEIVYSDHRAQYNGERMPLLSFGKLKEEGALDSVNNPVVLRAIAQTFKVVNAIIRRYSSPQAIHIELARDMKRNFTDRQDIKKKQDNNWSYNDRIRQKVEELKGSAATGQDIVKMKLYEEQNGVCLYSGKQLDIHRLFEVGYAEVDHIVPYSKCFDDSYNNKVLVFSSENQSKGNRLPLEYMLAEGDEDKLDNYVTLVEAFIKNTRKRQRLLKPCLTAEDSSDWKERNLTDTQYITKAVADILRNYLAFEEDSPFAKKPVRSINGAVTDQVRKRLGLQKHREEGDLHHAMDAAVIAVTTDGYINRISRYTQRREFGKRIGCYKDKQTGEKVEIEKQKGQAPLYVDPETGEKLTEQAFDQKYAPTFPAPWPEFTKELKARMAPNADEAIRQLYLPSYGSEEIKPIFVSQMPNRKVSGQAHAETIRSARVDVDESGKERIIAVAKTPLASLKLDKDGEIENYYMPSSDRLLYEELKNRLKAYDSAEQAFKEPVYKPKKDGNRGPRVYKVKTWKKTTSNVKVAGGIADNGSMVRIDVFYVKGEGYYFIPIYVADTIKKELPQKAVVDKSVAVKHGWKEMNDKDFIFSLYPGDLIRVEHKSQIVLKSTQKNSKDTKVGKEFFLYYKSANISNGAIDASYHDQSYEKEGLGIKTLQSFEKYEVDVLGNYHKVHLPEKRQAFNLKYSQKEQ

SEQ ID NO: 1527 - protein, 1100 aa, unidentified
  REGION 1..1100: note = Description of Unknown: uncultivated organism with predicted taxonomy: Clostridiales
  REGION 1..1100: note = MG21-17 effector
MSDFHYALGLDIGIGSVGWAVLRNQPNGEPDRIQDLGVRIFDKAEQPKTGASLAAPRRDARSARRRLRRHRHRLERIRYLMEQHDIMSVSDIQAMYTAGGFKKSPYQLRAEALDRPLSKEETVRVLIHLAQRRGYKSNSMAEAAKDEKETGKVKSAIEENRACMEQHGYRTVGEMMFRDERFWQNNPDGTRYHKTRNKVEDYRFTVERSDIVNEAKQIFAAQRQFGTGWLDDGMETAYLSILESQRSFDEGPGGDSPFRGGIGERVGSCTFEPDEQRAAKATYTFEYFKLLQDLNHMRLAGNGMAPRPLTAQQREILKAAALQSASLSYGQLRKKLALDDDVFFSGLCYGDKLKEEAEKRKWPQMQSYHKMRTALDKVGKGTIGTLTEFQLNAIASILTQYKSDARRIAALREAGIPMQFDEALLPLSFSKYGNLSVKAMQRLIPLLEQGMRYDEACTQIYGDHRGLHSEQRKSKLSLNDMEEITNPVVRRAVSQTIKVVNAVVRTYGPPDVVRIELAREMSQNFDDRRKAEKRQEENRAANERVKEQIAEYKGDRATGLDIVKFKLYREQDGVCLYSGKNLDIGRLFEPGYADVDHIIPYSRCFDDSYQNKVLVLASENRQKGNRLPYEYFGQDETRWHEYEVRVENLIRNYRKRQKLLKKQLTEEESTGFIDRNLKDTQYITRSIYNLLRDNLAFAESRYSKKPVQTVNGAVTSMLRSRWGVQKIREDGDLHHCMDAAVIAATSPGLVQRLTEYSKRREALEEAPRGYVDPSTGELVEQSEQPRRDPFPKPWEQFHQELEARLATVDPRHQIDLLKLATYESDEEVKPVFVSRMPNHKVTGAAHAETIRSSKGGDGYTVTKTPLISLKLNKSGEIDGYYNWSSDKLLYDALLARLKEFGGDGAKAFAEPFYKPKRDGTPGPRVDKVKICERATTGLPVRDGIAANGSMVRIDVFYVEDEGYYFVPIYVADTKKECLPNKAVVAYKAYSDWKEMTDENFIFSLYPGDLVRIQSRKGIKLNIAKGGTGEKEIVRQDGMYYYQTANISSGAITISTHDRRYSQPSLGIKTLQSIEKYQVDVLGNYYKVDLPEKRMSFSEEG

SEQ ID NO: 1528 - protein, 1007 aa, unidentified
  REGION 1..1007: note = Description of Unknown: uncultivated organism with predicted taxonomy: Clostridiales bacterium 42_27
  REGION 1..1007: note = MG21-18 effector
AMFAAGGFKKSPYRLRAEALDRLLSKEETVRVLIHLAQRRGYKSNSMAEAAKDEKETGKVKSAVEENRACMEQHGYRTVGEMMFRDERFWQSNPDGTRYHQTRNEAEDYRFTVERSDIVNEAKQIFAAQRQFRADWMDDGMEAAYLSILESQRSFDEGPGGDSPFRGGIGEKVGFCTFEPEEHRAAKATYTFEYFKLLQDLNHMRLAGSGTAPQPLNAQQREILKAAALQSASLSYGQLRKKLALDDDVFFNGLYYGDKPREEAEKRKWPQMQSYHKIRTALNKAGKGTIRSLTEEQLNAITSILTQYKSDARRIEKLREAGIPELFDNALLPLSFSKYGNLSVKAMQRLIPLLEQGMRYDEACTQIYVDHRGLHPEQRKNRLSLNDMEEIINPVVRRAVSQTIKVVNAVVRTYGPPDVVRIELAREMSRNFDDRRKAEKRQEENRAANERAKEQIVEYKGDCATGLDIVKFKLYREQDGVCLYSGQNLDLSRLFEPGYVDVDHIIPYSRCFDDSYQNKTLVLASENRQKGNRLPYEYFGQDEARWHEYEVRVENLIRNYRKRQRLLKKRLTEDESAGFIDRNLKDTQYITRSIYNLLRDNLAFAESRYSKKPVQTVNGAVTSMLRSRWGVQKIREDGDLHHCMDAAVIAATSPGLVQRLTEYSKQREAFVKAPAGYVDPSTGGLVEQSEASRRDPFPKPWEQFHQELEARLDPIDPQHQIDLLKLATYESDEEVKPVFVSRMPNHKVTGAAHAETIRSSKGGDGYTVTKTPLANLKLNKLGEIDGYYNPGSDKLLYDALLARLKEFGGDGAKAFAEPFYKPKRDGTPGPRVDKVKICEKATTGLPVRDGIAANGSMVRIDVFYVEDEGYYFVPIYVADTKKESLPNKAVVAYKAYSDWKEMIDENFIFSLYPGDLVRIQSRKGIKLNIAKGGTGEKEVVRQDGMYYYRAAGITVGAIQIETHDRRYLQPSLGLKTLQSIEKYQVDVLGNYYKVDLPEKRMKFSKEG

SEQ ID NO: 1529 - protein, 1193 aa, unidentified
  REGION 1..1193: note = Description of Unknown: uncultivated organism
  REGION 1..1193: note = MG21-19 effector
MQQKMEKPEMPYVLGLCLSTTSVGWSVLETDETGIPFRIADLGVRTFQEAKTNYKRSKCRTSRRRLQRKSCIKSRVSELFERSGLITKEALEEIFVKSGFEKDIIVLRKDGLDRKLENDEWARVLYNFTQRRGYKVVSAAREISAKKIAEESKKQNSKSNLSNEDKVAQEEAKRHAGLLAAVNNNTKELKKDNYRTIGEMFCSSKDERFMVKDGSNREIGRTTRNKHGIYSFAVSRELIKDEISKLFDAQRKQGNKFADKSFQKEYENIVFSHNDKSQDLRGNCFFEKGEKCAFKGGYTFEYFKLLCELNNIRIISTESKVDEAVRKITESQRNTIIGLYKKSPKLTPKDLSKKLNLKSSEYLRSFNTKQMQSYHEIREALNKVTKNIANDLSNEQFDEIGEILSLYKNDDERREKLQELRINVGLGNNGLGDAEIKSLLELNFSGTGSLSLKAMKNLIPYLEKGLSYGEACEKVYGDHRTQCGGERMEYLSFKKLKEEGALDSINSPVVARATTQAFKVINAVICKYGSPQSVHIELSRDIKCGSRTRERIAQENEANRERREKLINEVENIKKQKHCEKVNATEQEILKLQLYKDQHGKCLYSGKELDKDKVISESGYAEIDHIIPYSQSFDNSEANKVLTLSEENRNKGNDVPVAYILRKHKNSEKEYDAFVKRVKSVTKEVSNTNKDRQKILEKRKQNLLISPNFKVDELEGLLVRETVGVQNIQKRIADILRNYLRFYGEMPMEQHIVVTKNSITEAICEQLGLQRYYTKVSALSSALNAILIAVTPANYEAKVTQYVQSREEHYTDDGYIDPENGKKLTIEEFDAKYMPESDLKCIYSYLKEEIEIWMSSASDKKSINAKRGKLEKLHKKLGLKGKYENEINNWKPIFVSQMPDRKISGQAHAETIRSARIDIDENGKERIIAVAKTPLTSLKLDKNGEIDGYYMPSSDRLLYEELKNRLIKTKTSGKTYGNAEQAFKEPVYKPKKDGSQGPRVYKVKTWKPTTSNVKVAGGIAKKGDIVRVDIFHITGGKDQGYYFVPIYVADTIKNTLPKHAVVTNFKSSKVEWKEMDDSNFIFSLYKGDLIHIELCADCRDKDSNNKIRKAKDMYVYYDGVDFYQSGKCTNQSIGELNGAINVSWHDGSCEDSIHIKEINVLEKYEVDVLGNYHKVRLPERRQAFNLKYSQKEQ

SEQ ID NO: 1530 - protein, 1100 aa, unidentified; identical to SEQ ID NO: 1527
  REGION 1..1100: note = Description of Unknown: uncultivated organism with predicted taxonomy: Clostridiales
  REGION 1..1100: note = MG21-20 effector

SEQ ID NO: 1531 - protein, 808 aa, unidentified
  REGION 1..808: note = Description of Unknown: uncultivated organism with predicted taxonomy: Clostridiales bacterium 42_27
  REGION 1..808: note = MG21-21 effector
VERTKRLLERYDIITKKEVEAMYANQAHVKHLYNVYELRVLGIEQKLTNKELARVLISLVKKRGYKSNSKAEESNGEAGKLLTATRDNELLMQSKGYRTVAEMYLKDDKFKAKDKNGEILVDKDGSPLLKIKNSTGDYKNTTLRKLLVEEIKLILNKQKELNSKITDDFINEYLKIFESQRNFDDGPGFPSPYGGNLIENMLGNCTFEKEEKRAPKATYTFEYFKFLQTLNHIKIETINKKDDGTINKEKRELTSEEKEKLKELVFSKVTVTYSDVRKTLQLESNQRFNMFTYRDLLNYTEETNKEIEREKKLKEFESYKKIKTTLNHIEKNYITKLTTDELDEIGYALTVYKNDDKRKEYLENHTTNLSKEAIEELLKLSFSKVGNLSLKAMKKIIPELEKGVTYDKAVDKVYEDFRGTVDTQKKRKLSIKDFEQEISNPVVRRGLSQAIKVLNAITLRYNEKFGKPDVVVVELARELGKNFADRKAIEKRQNDNMQTNEKAKESIIALGKNNPTGKDIVKFKLWQDQDCKCIYSGKTIPVEELFTDLVDVDHIIPYSQCFDDSYNNKVLVLASENRQKGNRVPYKYLKESGKNLEEYEIRVNTLIRNNKKKQNLLRQDFTREDAEDWKERNLNDTKYICKYMYNLIRNHLEFSDNPNFVRKVWTVNGALTAHIRKRLGIEKVRDGDTHHAVDATVIAITTQGMVNKLTKYYQYVDGRYMNNKGEYIDTYTGEIINAKEYEEKYGIYFPEPWPKFRKELDIRTNCKTRERMIECLEAEKVYTYEDYDDVEPIFVSRMPRRKVTGTAH

SEQ ID NO: 1532 - protein, 769 aa, unidentified
  REGION 1..769: note = Description of Unknown: uncultivated organism with predicted taxonomy: Clostridiales
  REGION 1..769: note = MG21-22 effector
MSEFHYALGLDIGIGSVGWAVLRNQPNGEPDRIQDLGVRIFDKAEQPKTGASLAAPRRDARSARRRLRRHRHRLERIRYLMEQRGMMSVSDIQAMYAAGGFQKSPYQLRAEALDRPLSKEEAVRVLIHLAQRRGYKSNSTAEAAKDEKETGKVKTAIEENRRCMDEHGYRTVGEMMYRDERFWQSNPDGTRYQQTRNKTDDYRFTVERSAIVDEAKQIFAAQRKLGADWSSEDLEAAYLSILEGQRSFDEGPGGESPFRGGIGDKVGFCTFEPDEKRAAKATYTFEYFKLLQDLNRMRLTGMGMPPEPLDDEQREVLKSAALRSASLSYGQIRKKLNLDDDVFFNDLYYGEKTKEEAEKRKWPQMQSYHKMRTALDKVGKDTIGTLTEEQLNAIATILTECKSDAKRIAALRMAGIPVQFDEALLPLSFSKYGSLSVQAMQKLIPLLEQGMRYDEACTQIYGDHRGLHSEQRKNRLSLTDMEEITNPVVRRAVSQTIKVINAVVRTYGPPDVVRIELAREMSRTFDERRKMEKRQDDNRAANERAKDQIAEYKGDHATGLDIVKFKLYQEQDGVCLYSGQNLDIARLFEPGYADVDHIIPYSRCFDDSYQNKVLVLASENRQKGNRLPYEYFGQDEARWHGYEVRVENLIHNYRKRQKLLKRRLTEEESTGFIDRNLKDTQYITRAVYNLIRDHLAFAESNYRKKPVQAVNGAVTAMLRGRWGVQKIREDGDLHHCLDAAVIAATTPGLVQCLTAYNKHRETWERPPAG

SEQ ID NO: 1533 - protein, 861 aa, unidentified
  REGION 1..861: note = Description of Unknown: uncultivated organism with predicted taxonomy: Roseburia inulinivorans
  REGION 1..861: note = MG21-23 effector
VLIHLAQRRGYQSNSTAEEAKNEKENGIIKSAILENQQRMERGGYRTIGEMMYRDAAFWETINGIRYHCTRNKAGDYRFTVDRASILSEVSILFEAQRRLGSPWASVEMEDAYTAILSGQRSFDEGPGNDSHGNESPFRKAMSHNVGNCTLIPTELRAARADYTAEYFKLLQDLNHMRLVDNSGSHPLTQQQRAILEEMAFRSANLTYGQLRKKLGLSDEVRFAGLYYGEDTIEKAEKRKWPQMQSYHKIRTALDKVSKNAIRTLTQDQLDAIGEILAGGVSDAKRINSFCLEGIPEEYHKALLPLSISKRAKLSIAAMRKLIPFLQQGMRYDEACKAAGLDFHGADGKVEKLSDFLNEITNPVVRRAVSQTIKVVKAVVDTYSKREEMKLDAVRIELAREMHHSIKERNRMKKRQEENREKNEQVKAQILETKPGTRVTGLDIVKFKLYQEQKGFCPYSGVEIKKERLYEPGYAEVDHIIPYSRCFDDSYSNKVLVLAEENRQKGNRTPYEYFGADEQRWHEFSARVRASVRDFKKRQKLLNTSFGEEQGKDFIQRNLNDTQHITRVVYNYLRNNLEFADSAYAKAPVQAVNGAVTAMLRGRWGIEKMRGDGDLHHCKDAVVIAATSDSMIKDLTKYYQEEEQLFMGKTNFVDPATGEVLTRKEFQQRFAPKFPQPWPRFREELEARLDPTNPKEALMALNLSTYEFDPEEEIPPVFVSHMPKHTVTGAAHKETIRGKTETGTVVKTALTSLKLDKNGEIDGYYNPQTDPRLYQALVERLRQFDGEGKKAFAEPFYKPKKDGTPGPRVDKVKIAEKASLSVSTGRGVADNGEMIRMDVFRVPNERKPDDSYYFVPIYVAD

SEQ ID NO: 1534 - protein, 1107 aa, unidentified
  REGION 1..1107: note = Description of Unknown: uncultivated organism with predicted taxonomy: Firmicutes
  REGION 1..1107: note = MG21-24 effector
MKKRKKKKKDKKDCHYTLGLDIGIASIGWAVLGNDEDGTPNRIIDLGVRIFESAEVQKTGESLAAPRRDARSARRRLRRHRHRLERIRYLLVQQGVLTQEEMTHLYDKSDMVSPYQLRTEGLDRLLNAREFSKVLIHLAQRRGYQSNSTAEEAKNEKENGIIKSAILENQQRMERGGYRTIGEMMYRDAAFWETINGIRYHCTRNKAGDYRFTVDRASILSEVSIFFEAQRRLGAPWASVEMEDAYTAILSGQRSFDEGPGNDSHGNESPFRKAMSHNVGNCTLIPTELRAARADYTAEYFKLLQDLNHMRLVDNSGSHPLTQQQRAILEEMAFRSANLTYGQLRKKLGLSDEVRFAGLYYGQDTIEKAEKRKWPQMQSYHKIRTALDKVSKNAIRTLTQDQLDAIGEILAGGVSDAKRINSFCLEGIPEEYHKALLPLSISKRAKLSIAAMRKLIPFLQQGMRYDEACKAAGLDFHGADGKVEKLSDFLNEITNPVVRRAVSQTIKVVKAVVDTYSKREEMKLDAVRIELAREMHHSIKERNRMKKRQEENREKNEQVKAQILETKPGTRVTGLDIVKFKLYQEQDGICLYSGKPMEIERLYEPGYAEVDHIIPYSRCFDDSYSNKVLVLAEENRQKGNRTPYEYFGADEQRWHEFSARVRASVRDFKKRQKLLNTSFGEEQKNEFTQRNLNDTQHITRVVYNYLRNNLEFADSAYAKAPVQAVNGAVTAMLRGRWGIEKMRGDGDLHHCKDAVVIAATSRSMIEDLTKYYQEEEQRFMGKTHFVDPATGEVLTRKEFPQPWPRFREELEARLDPIDPMEAVMALHLSTYEPEEEIAPVFVSHMPKHTVTGAAHEETIRSRTETGTVVKTALTSLKLDKNGGIEGYYNPQTDPRLYQALVERLRQFDGKGEKAFAEPFYKPKKDGTPGPRVDKVKIERKSSLSVSTGRGVADNGRMVRIDVFRVPDDGYYFVPIYVADTKKAVLPSKAVVAGKSPEAWKQMKPERFLFSLFKDDLIYVESRKGISLALAKEAVGEKTIQPKSGLFYFCGANISSGSIGIETDDRRYGKESLGLKTLTLIEKCQVDVLGNVSKVRLPEKRLEFRGRK

SEQ ID NO: 1535 - protein, 1058 aa, unidentified
  REGION 1..1058: note = Description of Unknown: uncultivated organism with predicted taxonomy: Clostridiales bacterium 42_27
  REGION 1..1058: note = MG21-25 effector
KAEQPKTGASLAAPRRDARSARRRLRRHRHRLERIHYLMEQRGIMPVADIQAMYAAGGFQKSPYQLRAEALDRPLIKEEAVRVLIHLAQRRGYKSNSTAEAAKDEKETGKVKTAIEENRRCMAEHGYRTVGEMMYRDERFWQKHPDGTRYHQTRNKAEDYRFTVERAAIVDEVRQIFAAQRRLGVVWMDEDMETAYLSVLESQRRFDEGPGGDSPFSGGIGERVGACTFEPDEKRAAKATYTFEYFKLLQDLNRMRLTGMGMPPEPLDDEQREVLKSAALRSASLSYGQIRKKLNLDDDVFFNDLYYGEKTKEEAEKRKWPQMQSYHKMRTALDKVGKGAIGTLTEEQLNAIATILTECKSDAKRIAALREAGIPPQFDEALLPLSFSKYGSLSVRAMQKLIPLLEEGLRYDEACTRVYGDHRGLRSEQRTNRLSLNDMEEITNPVVRRAVSQTIKVINAVVRTYGPPDVVRIELAREMSRTFDERRKMEKRQDDNRAANEQAKDQIAEYKGDHATGLDIVKFKLYREQDGVCLYSGQNLDIARLFEPGYADVDHIIPYSRCFDDSYQNKVLVLASENRQKGNRLPYEYFGQDEARWHGYEVRVENLIHNYRKRQKLLKRRLTEEESSGFIDRNLKDTQYITRAVYNLIRDHLAFAESNYRKKPVQAVNGAVTSMLRGRWGVQKIREDGDLHHCLDAAVIATTTPGLVQRLTAYNKHRETWERPPAGYVDPATGELIELPQEARHDPFPKPWERFRQELEARLDPIDPRHQIDLLKLETYESDEEIKPVFVSRMPNHKVTGAAHAETIRSSKGGDGFTVTKTPLTNLKLNKFGEIEGYYNPASDTLLYDALLARLKDFGGDGAKAFAQPFYKPKKDGSPGPRVDKVKICEKATVGLPVRDGIAANGSMVRIDVFYVEGDGYYFVPIYVADTKKESLPNKAAVAMKPYNLWKKMKDENFVFSLYPGDLVRIQSRKGIKLNLAKGGTGEKEIVRQEGMYYYRSAGIAVAQISVETHDRRYLQPSLGIKTLQSIEKYQVDVLGNYYKVDLPEKRMTFSKEG

SEQ ID NO: 1536 - protein, 1100 aa, unidentified
  REGION 1..1100: note = Description of Unknown: uncultivated organism with predicted taxonomy: Ruminococcaceae bacterium TF06-43
  REGION 1..1100: note = MG21-26 effector
MSEFHYALGLDIGIGSVGWAVLRNQPNGEPDRIQDLGVRIFDKAEQPKTGASLAAPRRDARSARRRLRRHRHRLERIRYLMEQRGIMPVADIQAMYAAGGFQKSPYQLRAEALDRPLIKEEAVRVLIHLAQRRGYKSNSTAEAAKDEKETGKVKTVIEENRRCMAEYGYRTVGEMMYRDERFWQKHPDGTRYHQTRNKAEDYRFTVERAAIVDEVRQIFAAQRKLGVVWMDEDMETTYLSVLESQRSFDEGPGGDSPFSGGIGERVGACTFEPDEKRAAKATYTFEYFKLLQDLNRMRLTGMGMPPEPLDDEQREVLKSAALRSASLSYGQIRKKLNLDDDVFFNDLYYGEKTKEEAEKRKWPQMQSYHKLRMALDKVGKGAIGTLTEEQLNAIATILTECKSDAKRIAALREAGIPPQFDEALLPLSFSKYGSLSVRAMQKLIPLLEEGLRYDEACTRVYGDHRGLRSEQRTNRLSLNDMEEITNPVVRRAVSQTIKVINAVVRTYGPPDVVRIELAREMSRTFDERRKMEKRQDDNRAANEQAKDQIAEYKGDHATGLDIVKFKLYREQDGVCLYSGQNLDIARLFEPGYADVDHIIPYSRCFDDSYQNKVLVLASENRQKGNRLPYEYFGQDEARWHGYEVRVENLIHNYRKRQKLLKRRLTEEESSGFIDRNLKDTQYITRAVYNLIRDHLAFAESNYRKKPVQAVNGAVTSMLRGRWGVQKIREDGDLHHCLDAAVIATTTPGLVQRLTAYNKHRETWERPPAGYVDPATGELIELPQEARRDPFPKPWERFRQELEARLDPIDPRHQIDLLKLETYESDEEIKPVFVSRMPNHKVTGAAHAETIRSSKGGDGFTVTKTPLTNLKLNKFGEIEGYYNPASDTLLYDALLARLKDFGGDGTKAFAQPFYKPKKDGTPGPRVDKVKICEKATVGLPVRDGIAANGSMVRIDVFYVEDDGYYFVPIYVADTKKESLPNKAVVAYKAYSEWKEMKDENFIFSLYPGDLVRIQSRKGIKLNLAKGGTGEKEIVRQEGMYYYRAAGITVGAIQIETHDRRYLQPSLGIKTLQSIEKYQVDVLGNYYKVDLPEKRMTFSKEG

SEQ ID NO: 1537 - protein, 1098 aa, unidentified
  REGION 1..1098: note = Description of Unknown: uncultivated organism with predicted taxonomy: Clostridiales
  REGION 1..1098: note = MG21-27 effector
LSLRYTLGLDIGIASVGWAVLENNIDGEPIKIERLGVRIFDKAEHPKTGASLAEPRREARGQRRTIRRKRHRKDRIKQLIQQNGIMTRVEMSEMFEHSQFETSVYELRVQALERALTKQEFVRVLIHLAQRRGYKSNSKSEEAKDKENGKVKSAISENKQCMEENGYRTIGEMLLHDDRFWECNPDGTKIFVPHNHLDDYRTTVERSMVEDEIRLIFSQQRALGVSYVTAEFEEAYLEIWGSQRNFDEGPGGKSPYGGNMIEKMLGHCTFEKDEPRAAKGSYSAEYFRLLQDVNHLRLVKNNGESSALTAEQKQIYIDLVMKSATASYAQLRKKLELSNDISFNMLRYGSDEIEKVERKKLGHMKFYHEMRKALNTVQKDAISTVSWEQRDEIARILLCYKSDDKRKAQLEKLDIPHEFIPALLTLSTSKTAHLSAKALRKLIPYLEKDMTYAEACKEVYGEHKSSITKKNKLSLFDIEPINNPVVRRAVSQTIRVINAVVREYGAPEVVRVELAREMGKPYDVRTQITKKQEANAKKNEELRQQIKKIKGAEPTGQDIVKFKLFQDQNGVCLYSGQNLDITRLFEAGYVDVDHIIPYSISFDDSYTNKVLVRSPENRQKGNRIPADYFKSDPARWQRFETLVNTRVHNWKKKRNLLTQALSEEQKNGFKQRNLVDTQYIARVIYNLINDHLQFAETGKYDKKRRTQAVNGAITAHVRKRLGIQKIREDGDLHHAVDAAVVACVSPGMIQKVTQYTKHRECIRKTKEGYLDTETGELMTREAYDAKYSPRFPAPWERFRQELEARLSDNPAEEIARLHLATYDSEEEIKPVFVSRKQTHKISGAAHEATIRSAKKPGGSISKKTLTSLSLNKKTGEIEGYYAPESDRLLYEALKKRLEEFDGNAKEAFAEPFYKPKRDGTRGPLVKKVKIYEKKTITVPVNGGNADNGSMIRVDVFYMEDDGYYYVPIYTADVIKGKLPNKAVVQGKTFEDWKEMDDRDFLFSMYPSDLLYIESRRGIKLKTKKGSSWQEEIARKAGLYYFKGLNISSGNLFIITHDHSYEQSSLGGKTLSCLKKYTVDALGNYSEVSLPEKRKPLRG

SEQ ID NO: 1538 - protein, 1100 aa, unidentified
  REGION 1..1100: note = Description of Unknown: uncultivated organism with predicted taxonomy: Clostridiales bacterium 42_27
  REGION 1..1100: note = MG21-28 effector
MSEFHYALGLDIGIGSVGWAVLRNQPNGEPDRIQDLGVRIFDKAEQPKTGASLAAPRRDARSARRRLRRHRHRLERIRYLMEQRGIMPVADIQAMYAAGGFQKSPYQLRAEALDRPLTKEEAVRVLIHLAQRRGYKSNSTAEAAKDEKETGKVKTAIEENRRCMAEHGYRTVGEMMYRDERFWQKHPDGTRYHQTRNKAEDYRFTVERAAIVDEVRQIFAAQRRLGTAWMDEYMETAYLSILESQRSFDEGPGGDSPFSGGIGERVGACTFEPDEKRAAKATYTFEYFKLLQDLSRMRLTGMGMPPEPLDAAQREVLKSAALRSASLSYGQIRKKLNLDDDVFFHGLYYGEKTKEEAEKRKWPQMQSYHKMRTALDKVGKGAIGTLTEEQLNAVATILTECKSDAKRIAALREAGIPPQFDEALLPLSFSKYGSLSVQAMQKLIPLLEEGLRYDEACTRVYGDHRGLHPEQRKNRLSLTDMDEITNPVVRRAVSQTIKVINAVVRTYGPPDVVRIELAREMSRTFDERRKMEKRQDDNRAANERAKDQIAEYKGDHATGLDIVKFKLYREQDGVCLYSGQNLDIARLFEPGYADVDHIIPYSRCFDDSYQNKVLVLASENRQKGNRLPYEYFGQDEARWHGYEVRVENLIHNYRKRQKLLKRRLTEEESSGFIDRNLKDTQYITRAVYNLIRDHLAFAESNYRKKPVQAVNGAVTAMLRGRWGVQKIREDGDLHHCLDAAVIAATTPGLVQRLTAYNKHRETWERSPAGYVDPATGEMIELPQEARRDPFPKPWERFRQELEARLDPIDPRHQIDLLKLETYESDEEIKPVFVSRMPNHKVTGAAHAETIRSSKGGDGFTVTKTPLTNLKLNKFGEIEGYYNPASDTLLYDALLARLKDFGGDGAKAFAQPFYKPKKDGSPGPRVDKVKICEKATVGLPVRDGIAANGSMVRIDVFYVEGDGYYFVPIYVADTKKESLPNKAAVAMKPYNLWKKMKDENFVFSLYPGDLVRIQSRKGIKLNLAKGGTGEKEIVRQEGMYYYRSAGIAVAQISVETHDRRYLQPSLGIKTLQSIEKYQVDVLGNYYKVDLPEKRMTFSKEG

SEQ ID NO: 1539 - protein, 1100 aa, unidentified
  REGION 1..1100: note = Description of Unknown: uncultivated organism with predicted taxonomy: Firmicutes
  REGION 1..1100: note = MG21-29 effector
MSEFHYALGLDIGIGSVGWAVLRNQPNGEPDRIQDLGVRIFDKAEQPKTGASLAAPRRDARSARRRLRRHRHRLERIRYLMEQRGMMSVSDIQAMYAAGGFQKSPYQLRAEALDRPLSKEEAVRVLIHLAQRRGYKSNSTAEAAKDEKETGKVKTAIEENRRCMAEHGYRTVGEMMYRDERFWQSNPDGTRYQQTRNKTDDYRFTVERSAIVDEAKQIFAAQRKLGADWSSEDLEAAYLSILEGQRSFDEGPGGQSPFRGGIGDKVGFCTFEPDQQRAAKATYTFEYFKLLQDLNHMRLAGRGMSPQPLNAQQREILKETALRSASLSYGQLRKKLALADDTFFSGLYYGDKSREEAEKRKWPQMQSYHKIRTALDKVGKGTISSLTEEQLNAIASILTQYKSDAKRIEALRLAGIPMQFDEALLPLSFSKYGSLSVQAMQKLIPLLEQGMRYDEACTQIYGDHRGLHSEQRKNRLSLTDMDEIANPVVRRAVSQTIKVINAVVRTYGPPDVVRIELAREMSRNFDERRKAEKRQDENRAANERAKEQIAEYKGDHATGLDIVKFKLYQEQDGVCLYSGKNLDPSRLFEPGYADVDHIVPYSRCFDDSYQNKVLVLASENRQKGNRLPYEYFGNDDVRWHEYEVRVENLIRNYRKRQKLLKRQLSEEESAGFIDRNLKDTQYITRAIYTLIRDNLVFAESNYKKRPVQTVNGAVTSMLRNRWGVQKIREDGDLHHCLDAAVIAATTPGLVQRLTEHSKRRETLEKAPAGYVDPATGELIELPQEARRDPFPKPWERFRQELEARLDPIDPRHQIDLLKLETYESDEEIKPVFVSRMPNHKVTGAAHAETIRSSKGGDGFTVTKTPLTNLKLNKFGEIEGYYNPASDTLLYDALLARLKDFGGDGAKAFAQPFYKPKKDGTPGPRVDKVKICEKATIGLPVRNGIAANGSMIRIDVFYVEDDGYYFVPIYVADTKREKLPNKAAVAMKPYNLWKEMKDENFVFSLYPGDLVRIQSRKGIKLNLAKGGTGEKEIVRQDGMYYYRSAGIAVAQIFVETHDRRYLQPSLGIKTLQSIEKYQVDVLGNYQKVDLPEKRMTFSKEG

SEQ ID NO: 1540 - protein, 836 aa, unidentified
  REGION 1..836: note = Description of Unknown: uncultivated organism with predicted taxonomy: Clostridiales bacterium 42_27
  REGION 1..836: note = MG21-30 effector
RVGACTFEPDEKRAAKATYTFEYFKLLQDLNRMRLTGMGMPPEPLDDEQREVLKSAALRSASLSYGQIRKKLNLDDDVFFNDLYYGEKTKEEAEKRKWPQMQSYHKLRMALDKVGKGAIGTLTEEQLNAIATILTECKSDAKRIAALREAGIPPQFDEALLPLSFSKYGSLSVRAMQKLIPLLEEGLRYDEACTRVYGDHRGLRSEQRTNRLSLNDMEEITNPVVRRAVSQTIKVINAVARTYGPPDVVRIELAREMSRTFDERRKMEKRQDDNRAANEQAKDQIAEYKGDHATGLDIVKFKLYREQDGVCLYSGQNLDIARLFEPGYADVDHIIPYSRCFDDSYQNKVLVLASENRQKGNRLPYEYFGQDEARWHGYEVRVENLIHNYRKRQKLLKRRLTEEESSGFIDRNLKDTQYITRAVYNLIRDHLAFAESNYRKKPVQAVNGAVTSMLRGRWGVQKIREDGDLHHCLDAAVIAATTPGLVQRLTAYNKHRETWERPPAGYVDPATGELIELPQEARRDPFPKPWERFRQELEARLDPIDPRHQIDLLKLETYESDEEIKPVFVSRMPNHKVTGAAHAETIRSSKGGDGFTVTKTPLTNLKLNKFGEIEGYYNPASDTLLYDALLARLKDFGGDGAKAFAQPFYKPKKDGSPGPRVDKVKICEKATVGLPVRDGIAANGSMIRIDVFYVEDDGYYFVPIYVADTKKESLPNKAAVAMKPYNLWKKMKDENFVFSLYPGDLVRIQSRKGIKLNLAKGGTGEKEIVRQEGMYYYRAAGITVGAIQIETHDRRYLQPSLGIKTLQSIEKYQVDVLGNYYKVDLPEKRMTFSKEG

SEQ ID NO: 1541 - protein, 1103 aa, unidentified
  REGION 1..1103: note = Description of Unknown: uncultivated organism
  REGION 1..1103: note = MG21-31 effector
MKKGQKHCHYTLGLDIGIASIGWAVLGNDEDGTPNRIIDLGVRIFDKAEVENTGESLAAPRRDARSARRRLRRHRHRLERIRYLLVQQGVLTQEEMTHLYDKSDMVSPYQLRTEGLDRLLNAREFSKVLIHLAQRRGYQSNSTAEEVKNEKENGIIKSAILENQQRMEQGGYRTIGEMMYRDAAFWETINGIRYHCTRNKAGDYRFTVDRASILAEVSIFFEAQRRLGSPWASVEMEDAYTGILSSQRSFDEGPGNDSHGNESPFRKAMSHNVGNCTLIPTELRAARADYTAEYFKLLQDLNHMRLVDNSGSHPLTQQQRAILEEMAFRSANLTYGQLRKKLGLSDEVRFAGLYYGEDTIEKAEKRKWPQMQSYHKIRTALDKVSKNAIQTLTQDQLDAIGEILAGGVSDAKRINSFCLEGIPEEYHKALLPLSISKRAKLSIAAMRKLIPFLQQGMRYDEACKAAGLDFHGADGKVEKLSDFLNEITNPVVRRAVSQTIKVVNAVVRIYGKPDAVRIELAREMHHSIKERNRMKKRQEENREKNEQVKAQILETKPGTRVTGLDIVKFKLYQEQDGICLYSGKPLEIERLYEPGYAEVDHIIPYSRCFDDSYSNKVLVLAEENQQKGNCTPYEYFGADEQRWHEFSVRVGASVRDFKKRQKLLNTSFGEEQGKDFIQRNLNDTQHITRVVYNYLRNNLEFADSAYAKAPVQAVNGAVTAMLRGRWGIEKMRGNGDLHHCKDAVVIAATSDSMIKDLTKYYQEEEQRFMGKTHFVDPATGEVLTRKEFPQPWPRFREELEARLDPTNPKEALMALNLSTYEFDPEEEIPPVFVSHMPKHTVTGAAHEETIRGKTETGTVVKTALTSLKLDKNGEIEGYYNPQTDPRLYQALVERLRQFDGKGEKAFAEPFYKPKKDGTPGPRVDKVKIERKSSLSVSTGRGVAKNGDMIRMDVFRIPNERKPDDSYYFVPIYVADTKKRILPSRAVVRGKLPEEWKQMKPEHFLFSLFKGDLIYVESKKEISLALAKEAVGEKTIQVKSGLFYFCGANISNGSIEIETHDRRYGKEGLGIKKLKVFEKRQVEVLGEVRKVKLPEKRLEFRGRK

SEQ ID NO: 1542 - protein, 1100 aa, unidentified
  REGION 1..1100: note = Description of Unknown: uncultivated organism with predicted taxonomy: Ruminococcaceae bacterium TF06-43
  REGION 1..1100: note = MG21-32 effector
MSEFHYALGLDIGIGSVGWAVLRNQPNGEPDRIQDLGVRIFDKAEQPKTGASLAAPRRDARSARRRLRRHRHRLERIRYLMEQRGMMSVSDIQAMYAAGGFQKSPYQLRAEALDRPLSKEEAVQVLIHLAQRRGYKSNSTAEAAKDEKETGKVKTAIEENRRCMAEHGYRTVGEMMYRDERFWQSNPDGTRYQQTRNKTDDYRFTVERSAIVDEAKQIFAAQRKLGADWSSEDLEAAYLSILEGQRSFDEGPGGESPFRGGIGDKVGFCTFEPDQQRAAKATYTFEYFKLLQDLNRMRLTGMGMPPEPLDDEQREVLKSAALRSASLSYGQIRKKLNLDDDVFFNDLYYGEKTKEEAEKRKWPQMQSYHKMRTALDKVGKDTIGTLTEEQLNAIATILTECKSDAKRIAALRMAGIPVQFDEALLPLSFSKYGSLSVQAMQKLIPLLEQGMRYDEACTQIYGDHRGLHSEQRKNRLSLTDMDEITNPVVRRAVSQTIKVINAIVRTYGPPDVVRIELAREMSRNFDERRKAEKRQDENRAANERAKEQIAEYKGDHATGLDIVKFKLYQEQDGVCLYSGKNLDPSRLFEPGYADVDHIVPYSRCFDDSYQNKVLVLASENRQKGNLLPYEYFGYDEVRWHEYEVRVENLIRNYRKRQKLLKRQLSEEESAGFIDRNLKDTQYITRSIYNLIRNNLVFAESNYKKRPVQTVNGAVTSMLRNRWGVQKIREDGDLHHCLDAAVIAATTPGLVQRLTEHSKRRETLEKAPASYVDPATGDLLELPQEARRDLFPKPWERFRQELEARLNPIDPRHQIDLLKLSTYESDEEIKPVFVSRMPNHKVTGAAHAETIRSRKGGDGFTVTKTPLTNLKLNKFGEIEGYYNPASDTLLYNALLSRLKDFGGDGAKAFAKPFYKPKKDGTPGPRVDKVKICEKATIGLPVRNGIAANGSMIRIDVFYVEDDGYYFVPIYVADTKKERLPNKAVVAYKAYSEWKEMKDENFIFSLYPGDLVRIQSRKGIKLTLTKGGTGEPEIVRQQGMYYYQTANISSGAVTISTHDRRYSQSSLGIKTLQSIEKYQVDVLGNYYKVDLPEKRMTFSKEG

SEQ ID NO: 1543 - protein, 1097 aa, unidentified
  REGION 1..1097: note = Description of Unknown: uncultivated organism with predicted taxonomy: Clostridiales
  REGION 1..1097: note = MG21-33 effector
LSLRYTLGLDIGIASVGWAVLENNIDGEPIKIERLGVRIFDKAEQPKTGASLAEPRREARGQRRTIRRRRHRKDRIKQLIQQNDIMTRVEMAEMFEHSQFETSVYELRVQALERALTKQEFVRVLIHLAQRRGYKSNSKSEEAKDKENGKVKSAISENKKCMEENGYRTIGEMLLNDDRFWEYNPDGTKIFVPHNHPDDYRTTVERSMVEDEIRLIFSRQHALGVPYATSEFEEAYLEIWGSQRNFDEGPGGKSPYGGNMIEKMLGHCTFEKDEPRAAKGSYSAEYFRLLQDVNHLRLVKNNGESCALTREQKQIYIDLVMKSAAASYAQLRKKLGLSNDISFNMLRYGSDEIGKVERKKLGHMKFYHEMRKALNTVQKDAISTVSWEQRDEIARILLCYKSDDKRKAQLEKLDIPREFIPALLTLSTSKTAHLSAKALRKLIPHLEKGMTYAEACKEVYGEQKSSITKKNKLSLFDIEPINNPVVRRAVSQTIRVINAVVREYGAPEVVRVELAREMGKPYDVRTQMTKKQEANAKRNEELRQQIKKIKGAEPTGQDIVKFKLFQDQNGVCLYSGQNLDITRLFEAGYVDVDHIIPYSISFDDSYTNKVLVRSPENRQKGNRIPADYFKSDPARWQRFETLVNTQVHNWKKKRNLLTQALSEEQKNGFKQRNLVDTQYIARVIYNLINDHLQFAETGKYDKKRRTQAVNGAITAHVRKRLGIQKIREDGDLHHAVDAAVVACVSPSMIQKITQYTKHRECIRKTKEGYLDTETGELMTREAYDAKYSPRFPAPWERFRQELEARLSDNPAEEIARLHLATYDSEEEIKPVFVSRKQTHKISGAAHEATLHRKADGGYINKVSLTKLTLDKKTGEIKNYYAPESDRLLYEALKKRLKEFDGNAKEAFAEPFYKPKRDGTRGPLVKKVKLYEKKTITVPVGGGNADNGSMIRVDVFYIEDDGYYYVPIYTADVIKGALPNRAVVADKSHGEWKVMNDKDFLFSMYPNDLLYIESRKGIKLKTKKGSSKQEQIVRKTGLYYFKGLNISSNALSIITHDHSYEQSSLGGKTLSCLKKYTVDALGNYSEVSLPEKRKPLRG

SEQ ID NO: 1544 - protein, 1100 aa, unidentified
  REGION 1..1100: note = Description of Unknown: uncultivated organism with predicted taxonomy: Clostridiales
  REGION 1..1100: note = MG21-34 effector
MSEFHYALGLDIGIGSVGWAVLRNQPNGEPDRIQDLGVRIFDKAEQPKTGASLAAPRRDARSARRRLRRHRHRLERIRYLMEQRGMMSVSDIQAMYAAGGFQKSPYQLRAEALDRPLSKEEAVRVLIHLAQRRGYKSNSTAEAAKDEKETGKVKTAIEENRRCMAEHDYRTVGEMMYRDERFWQSNPDGTRYQQTRNKTDDYRFTVERSAIVDEAKQIFAAQRKLGADWSSEDLEAAYLSILEGQRSFDEGPGGESPFRGGIGDKVGFCTFEPDQQRAAKATYTFEYFKLLQDLNHMRLAGRGMSPQPLNAQQREILKETALRSASLSYGQLRKKLALADDTFFSGLYYGDKSREEAEKRKWPQMQSYHKIRTALDKVGKGTISSLTEEQLNAIASILTQYKSDAKRIEALRMAGIPVQFDEALLPLSFSKYGSLSVQAMQKLIPLLEQGMRYDEACTQIYGDHRGLHSEQRKNRLSLTDMDEITNPVVRRAVSQTIKVINAIVRTYGPPDVVRIELAREMSRNFDERRKAEKRQDENRAANERAKEQIAEYKGDHATGLDIVKFKLYQEQDGVCLYSGKNLDPSRLFEPGYADVDHIVPYSRCFDDSYQNKVLVLASENRQKGNRLPYEYFGYDEVRWHEYEVRVENLIRNYRKRQKLLKRQLSEEESAEFIDRNLKDTQYITRTVYNLIRDHLAFAESAYRKKPVQAVNGAVTSMLRNRWGVQKIREDGDLHHCLDAAVIAATTPGLVQRLTAYSKHRETWERPPAGYVDPATGELIELPQEARRDPFPKPWERFRQELEARLDPIDPRHQIDLLKLETYESDEEIKPVFVSRMPNHKVTGAAHAETIRSSKGGDGFTVTKTPLTNLKLNKFGEIEGYYNPASDTLLYDALLARLKDFGGDGAKAFAQPFYKPKKDGTPGPRVDKVKICEKATVGLPVRDGIAANGSMVRIDVFYVEDDGYYFVPIYVADTKKESLPNKAVVAYKAYSEWKEMKDENFIFSLYPGDLVCIQSRKGIKLNLAKGGTGEKEIVRQEGMYYYRAAGITVGAIQIETHDRRYLQPSLGIKTLQSIEKYQVDVLGNYQKVDLPEKRMTFSKEG

SEQ ID NO: 1545 - protein, 1100 aa, unidentified
  REGION 1..1100: note = Description of Unknown: uncultivated organism with predicted taxonomy: Clostridiales
  REGION 1..1100: note = MG21-35 effector
MSEFHYALGLDIGIGSVGWAVLRNQPNGEPDRIQDLGVRIFDKAEQPKTGASLAAPRRDARSARRRLRRHRHRLERIRYLMEQRGIMPVADIQAMYAAGGFQKSPYQLRAEALDRPLTKEEAVRVLIHLAQRRGYKSNSTAEAAKDEKETGKVKTAIEENRRCMAEHGYRTVGEMMYRDERFWQKHPDGTRYHQTRNKAEDYRFTVERAAIVDEVRQIFAAQRRLGTVWMDEDMETAYLSILESQRSFDEGPGGDSPFSGGIGERVGACTFEPDEKRAAKATYTFEYFKLLQDLNRMRLTGMGMPPEPLDDEQREVLKSAALRSASLSYGQIRKKLNLDDDVFFNDLYYGEKTKEEAEKRKWPQMQSYHKLRTALDKVGKGAIGTLTEEQLNAVATILTECKSDAKRIAALREAGIPPQFDEALLPLSFSKYGSLSVRAMQKLIPLLEEGLRYDEACTRVYGDHRGLRPEQRTNRLSLNDMDEITNPVVRRAVSQTIKVINAVVRTYGPPDVVRIELAREMSRTFDERRKMEKRQDDNRAANERAKNQIAEYKGDHATGLDIVKFKLYREQDGVCLYSGQNLDIARLFEPGYADVDHIIPYSRCFDDSYQNKVLVLASENRQKGNRLPYEYFGQDEARWHGYEVRVENLIHNYRKRQKLLKRRLTEEESTGFIDRNLKDTQYITRAVYNLIRDHLAFAESNYRKKPVQAVNGAVTAMLRGRWGVQKIREDGDLHHCLDAAVIAATTPGLVQRLTAYNKHRETWERPPAGYVDPATGELIELPQEARRDPFPKPWERFRQELEARLDPIDPRHQIDLLKLETYESDEEIKPVFVSRMPNHKVTGAAHAETIRSSKGGDGFTVTKTPLTNLKLNKFGEIEGYYNPASDTLLYDALLARLKDFGGDGAKAFVQPFYKPKKDGSPGPRVDKVKICEKATVGLPVRDGIAANGSMVRIDVFYVEDDGYYFVPIYVADTKKESLPNKAAVAMKPYNLWKKMKDENFVFSLYPGDLVRIQSRKGIKLNLAKGGTGEKEIVRQEGMYYYRSAGIAVAQISVETHDRRYLQPSLGIKTLQSIEKYQVDVLGNYYKVDLPEKRMTFSKEG

SEQ ID NO: 1546 - protein, 1127 aa, unidentified
  REGION 1..1127: note = Description of Unknown: uncultivated organism
  REGION 1..1127: note = MG21-36 effector
MNYRIGLDLGIASVGWAVLEDDYMGKPKRIVKLGARIFDSAENPKDGSSLALNRREARETRRRLRRRNHRIKRTKNLLEKYNIMTTKEIEDMYATYKFQFNPYELRVKGLDEKLTNSELSRILISFVKRRGYKSNSKSEETNDKEMGKLLTATKENELLMKEKGYRTVGEMYLKDEKFKMQMPDGRILLKVRNTTDDYKNTPLRKLLLDEIKQILNKQKELNVNITSDFIDEYINIFTSQRNFDDGPGQPSIYAGNQIEKMLGKCTFEKEENRAAKATYTFEYFKLLQDINHIKIEKHIINETGKKEVLKRPLTEDERNIIINLAKTKVTLTYASLRIALNLAGNERFNMIHYKATNVFSDEINKEAEKERKFKEFESYHKMRVSMDKAEKNYILKLSTDELDVIGTVLTLYKNDNKRIEKLAQLNLPENIINEMLKLSFSKVGNLSIKAMKKIIPYLEKGYTYDKAVNEVYEDFRGVVNTEKKKKIALRDLEQELSNPVVKRSVSQAIKVLNAITRTYGEPDVINVELARELSKNFADRQNIKKNQENNMQSNEKAKEDILKLGKSNPTGQDIVKYKLWKEQDGTCVYSGKHISIEDLFTEAVDVDHIIPYSMCFDDTYKNKVLVLSSENRQKGNKIPYQYMQEKGRDLDEYEIRVNNIIKNYSKKQRLLKQKFTREDANEWKDRNIQDTQYISRLMYNLIKNHVQFSNNENFERKVFTVNGQITSHIRKRLGINKIRENGDEHHAIDAAIIATVSQGMIQRITKYYQYIDGRYEKNSGEYIDIETGEIITKEQYEAENGSNFPEPWPKFRKELDIRTTCKTKARMEECLLTEKIFYDDYDDVKPIFISRMPRRKITGQAHLDTIRGLRKSDEGLKTLTKTELTKLKLDKNGEIERYPESQKQDDKLLYNALVEQLRKFGGNGTEAFKKPFYKPKSDGTPGPLVKKVKLEDKTTLAVELNNGKAIAANGDMIRIDVFKVEGEGYYFVPIYVSDTIKNKLPNKASVASKPYAEWKEMQDKDFIFSLYPRDLFYVKSKNKIKLTSINKQDKESLDTNELFAYYVNADISTAAIACINHNGEYERRGLGIKRLQEFKKYEVDVLGNYHEVKLPEKRQDFSNLKKGGSLK

SEQ ID NO: 1547 - protein, 1100 aa, unidentified
  REGION 1..1100: note = Description of Unknown: uncultivated organism with predicted taxonomy: Clostridiales
  REGION 1..1100: note = MG21-37 effector
MSEFHYALGLDIGIGSVGWAVLRNQPNGEPDRIQDLGVRIFDKAEQPKTGASLAAPRRDARSARRRLRRHRHRLERIRYLMEQRGIMPVADIQAMYAAGGFQKSPYQLRAEALDRPLIKEEAVRVLIHLAQRRGYKSNSTAEAAKDEKETGKVKTAIEENRRCMAEYGYRTVGEMMYRDERFWQKHPDGTRYHQTRNKAEDYRFTVERAAIVDEVRQIFAAQRRLGVVWMDEDMETAYLSVLESQRSFDEGPGGDSPFSGGIGERVGACTFEPDEKRAAKATYTFEYFKLLQDLNRMRLTGMGMPPEPLDDEQREVLKSAALRSASLSYGQIRKKLNLDDDVFFNDLYYGEKTKEEAEKRKWPQMQSYHKLRMALDKVGKGAIGTLTEEQLNAIATILTECKSDAKRIAALREAGIPPQFDEALLPLSFSKYGSLSVRAMQKLIPLLEEGLRYDEACTRVYGDHRGLRSEQRTNRLSLNDMEEITNPVVRRAVSQTIKVINAVVRTYGPPDVVRIELAREMSRTFDERRKMEKRQDDNRAANEQAKDQIAEYKGDHATGLDIVKFKLYREQDGVCLYSGQNLDIARLFEPGYADVDHIIPYSRCFDDSYQNKVLVLASENRQKGNRLPYEYFGQDEARWHGYEVRVENLIHNYRKRQKLLKRRLTEEESTGFIDRNLKDTQYITRAVYNLIRDHLAFAESNYRKKPVQAVNGAVTAMLRGRWGVQKIREDGDLHHCLDAAVIAATTPGLVQRLTAYNKHRETWERPPAGYVDPATGELIELPQEARHDQFPKPWERFRQELEARLDPIDPRHQIDLLKLETYESDEEIQPVFVSRMPNHKVTGAAHAETIRSSKGGDGFTVTKTPLTNLKLNKFGEIEGYYNPESDKLLYDALLARLKAFGGDGAKAFDQPFYKPKKDGTPGPRVDKVKICEKATVGLPVRDGIAANGSMVRIDVFYVEDDGYYFVPIYVADTKKESLPNKAVVAYKAYSEWKEMKDENFIFSLYPGDLVRIQSRKGIKLNLAKGGTGEKEIVRQEGMYYYRAAGITVGAIQIETHDRRYLQPSLGIKTLQSIEKYQVDVLGNYYKVDLPEKRMTFSKEG

SEQ ID NO: 1548 - protein, 1100 aa, unidentified
  REGION 1..1100: note = Description of Unknown: uncultivated organism with predicted taxonomy: Clostridiales bacterium 42_27
  REGION 1..1100: note = MG21-38 effector
MSEFHYALGLDIGIGSVGWAVLRNQPNGEPDRIQDLGVRIFDKAEQPKTGASLAAPRRDARSARRRLRRHRHRLERIRYLMEQRGIMPVADIQAMYAAGGFQKSPYQLRAEALDRPLTKEEAVRVLIHLAQRRGYKSNSTAEAAKDEKETGKVKTAIEENRRCMAEHGYRTVGEMMYRDERFWQKHPDGTRYHQTRNKAEDYRFTVERAAIVDEVRQIFAAQRRLGTAWMDEDMETAYLSILESQRSFDEGPGGDSPFFGGIGERVGACTFEPDEKRAAKATYTFEYFKLLQDLSRMRLTGMGMPPEPLDAAQREVLKSAALRSASLSYGQIRKKLNLDDDVFFHGLYYGEKTKEEAEKRKWPQMQSYHKMRTALDKVGKGAIGTLTEEQLNAVATILTECKSDAKRIAALREAGIPPQFDEALLPLSFSKYGSLSVQAMQKLIPLLEEGLRYDEACTRVYGDHRGLHPEQRKNRLSLTDMDEITNPVVRRAVSQTIKVINAVVRTYGPPDVVRIELAREMSRTFDERRKMEKRQDDNRAANERAKDQIAEYKGDHATGLDIVKFKLYREQDGVCLYSGQNLDIARLFEPGYADVDHIIPYSRCFDDSYQNKVLVLASENRQKGNRLPYEYFGQDEARWHGYEVRVENLIHNYRKRQKLLKRRLTEEESSGFIDRNLKDTQYITRAVYNLIRDHLAFAESNYRKKPVQAVNGAVTAMLRGRWGVQKIREDGDLHHCLDAAVIAATTPGLVQRLTAYNKHRETWERSPAGYVDPATGEMIELPQEARRDPFPKPWERFRQELEARLDPIDPRHQIDLLKLETYESDEEIKPVFVSRMPNHKVTGAAHAETIRSSKGGDGFTVTKTPLTNLKLNKFGEIEGYYNPASDTLLYDALLARLKDFGGDGAKAFAQPFYKPKKDGSPGPRVDKVKICEKATVGLPVRDGIAANGSMVRIDVFYVEGDGYYFVPIYVADTKKESLPNKAAVAMKPYNLWKKMKDENFVFSLYPGDLVRIQSRKGIKLNLAKGGTGEKEIVRQEGMYYYRSAGIAVAQISVETHDRRYLQPSLGIKTLQSIEKYQVDVLGNYYKVDLPEKRMTFSKEG

SEQ ID NO: 1549 - protein, 1100 aa, unidentified
  REGION 1..1100: note = Description of Unknown: uncultivated organism with predicted taxonomy: Clostridiales
  REGION 1..1100: note = MG21-39 effector
MSEFHYALGLDIGIGSVGWAVLRNQTNGEPDRIQDLGVRIFDKAEQPKTGASLAAPRRDARSARRRLRRHRHRLERIRYLMEQRGMMSVSDIQAMYAAGGFQKSPYQLRAEALDRPLSKEEAVRVLIHLAQRRGYKSNSTAEAAKDEKETGKVKTAIEENRRCMAEHGYRTVGEMMYRDERFWQSNPDGTRYQQTRNKTDDYRFTVERSAIVDEAKQIFAAQRKLGADWSSEDLEAAYLSILEGQRSFDEGPGGESPFRGGIGDKVGFCTFEPDQQRAAKATYTFEYFKLLQDLNRMRLTGMGMPPEPLDDEQREVLKSAALRSASLSYGQIRKKLNLDDDVFFNDLYYGEKTKEEAEKRKWPQMQSYHKMRTALDKVGKDTIGTLSEEQLNAIATILTECKSDAKRIAALRMAGIPVQFDEALLPLSFSKYGSLSVQAMQKLIPLLEQGMRYDEACTQIYGDHRGLHSEQRKNRLSLTDMDEITNPVVRRAVSQTIKVINAIVRTYGPPDVVRIELAREMSRNFDERRKAEKRQDENRAANERAKEQIAEYKGDHATGLDIVKFKLYQEQDGVCLYSGKNLDPSRLFEPGYADVDHIVPYSRCFDDSYQNKVLVLASENRQKGNRLPYEYFGYDEVRWHEYEVRVENLIRNYRKRQKLLKRQLSEEESAGFIDRNLKDTQYITRSIYNLIRNNLVFAESNYKKRPVQTVNGAVTSMLRNRWGVQKIREDGDLHHCLDAAVIAATTPGLVQRLTEHSKRRETLEKAPAGYVDPATGELLELPQEARRDLFPKPWERFRQELEARLNPIDPRHQIDLLKLSTYESDEEIKPVFVSRMPNHKVTGAAHAETIRSRKGGDGFTVTKTPLTNLKLNKFGEIEGYYNPASDTLLYNALLSRLKDFGGDGAKAFAKPFYKPKKDGTPGPRVDKVKICEKATIGLPVRNGIAANGSMIRIDVFYVEDDGYYFVPIYVADTKREKLPNKAAVAMKPYNLWKEMKDENFVFSLYPGDLVRIQSRKGIKLNLAKGGTGEKEIVRQDGMYYYRSAGIAVAQIFVETHDRRYLQPSLGIKTLQSIEKYQVDVLGNYQKVDLPEKRMTFSKEG

SEQ ID NO: 1550 - protein, 1100 aa, unidentified
  REGION 1..1100: note = Description of Unknown: uncultivated organism with predicted taxonomy: Clostridiales
  REGION 1..1100: note = MG21-40 effector
MSDFHYALGLDIGIGSVGWAVLRNRPDGEPDRIQDLGVRIFDKAEQPKTGASLAAPRREARSARRRLRRHRHRLERIRYLMEQHGIMPISDIQAMYAAGGFEKSPYQLRAEALDRPLSREELVRVLIHLAQRRGYRSNSTAEAAKNEKETGKVKSAIEENRACMEQHGYRTVGEMMFRDERFWQNNPDGTRCHQTRNKAEDYRFTVERTAIVDEAKQIFTAQRRFGADWMDDGLEAAYLAVLESQRSFDEGPGGDSPFHGGIGERVGFCTFEPDEQRAAKATYTFEYFKLLQDLNHMRLAGNGTAPQPLNAQQREILKAAALQSASLSYGQIRKKLALDENVFFHHLYYGDKPKEEAEKRKWPQMQSYHKMRTALDKVGKGTINTLTETQLNAIATILTQYKSDARRIEALREAGIPAQFDDALLPLSFSKYGNLSVTAMQKLIPLLEQGMRYDEACTQIYGDHRGLHPEQRKNRLSLRDMREITNPVVRRAVSQTIKVVNAVVRTYGPPDVVRIELAREMSQNFEKRRKTEKRQDENRTANEKAKEQIAEYKGDRATGLDIVKFKLYREQDGVCLYSGRNLDLSRLFEPGYVDVDHIIPYSRCFDDSYQNKVLVLASENRQKGNRLPYEYFGQDEARWHGYEVRVENLIRNYRKRQKLLKKRLTEEESAGFIDRNLKDTQYITRSIYNLLRDNLAFAESDYRKKPVQTVNGAVTSMLRGRWGVQKIREDGDLHHCMDAAVIAAASPGLVQRLTEYSKRREAFEEVSRGYVDPATGELVELPEQLRRDPFPKPWERFRQELEARLDPIDPQHQIDLLKLATYESDEEIRPVFVSRMPNHKVTGAAHAETIRSSKGGDGFTVTKTPLANLKLNKFGEIEGYYNPASDTLLYNALLARLKDFGGDGAKAFAQPFYKPKKDGTPGPRVDKVKICEKATIGLPVRNGIAANGSMIRIDVFYVEDDGYYFVPIYVADTKKAELPNKAVVAYKAYSDWKEMIDENFLFSLYPGDLVRIQSRKGIKLNIAKGGTGEKEIVRQDGLYYYQGANIATGAIALATHDRRYLQSGLGLKTLQSIEKYQVDVLGNYYKVDLPEKRMKFSKEG

SEQ ID NO: 1551 - protein, 1102 aa, unidentified
  REGION 1..1102: note = Description of Unknown: uncultivated organism with predicted taxonomy: Firmicutes
  REGION 1..1102: note = MG21-41 effector
MKKGQKHCHYTLGLDIGIASIGWAVLGNDEDGTPNRIIDLGVRIFESAEVQKTGESLAAPRRDARSARRRLRRHRHRLERIRYLLVQQGVLTQEEMTHLYDKSDTVSPYQLRTEGLDRLLNAREFSKVLIHLAQRRGYQSNSTAEEAKNEKENGIIKSAILENQQRMERGGYRTIGEMMYRDAAFWETINGIRYHCTRNKAGDYRFTVDRASILAEVSILFEAQRRLGAPWASVEMEDAYTAILSGQRSFDEGPGGDSPFRKGISDRVGYCTLEPTEQRAAKADATFEYFKLLQDLNHMRLVDNSGSHPLTQQQRALLEEMAFRSANLTYGQLRKKLGLLDEVRFAGLYYGEDTIEKAEKRKWAQMQSYHKIRTALDKVSKDAISMFDKDQLDAIGEILTAYKADAARIEHLQTAGIQKEYHKALLSLSFSKYGKLSCCAMRKLIPFLQQGMRYDEACREVYQDHRTKEASEKKQRLSLNDIDEITNPVVRRAVSQTIKVVNAVVRTYGNPDAVRIELAREMSHSFDERNKMKKRQEDGWQKNEQVKAQILETKTGTRVTGLDIVKFKLYQEQDGICLYSGTPMEIERLYEPGYADVDHIIPYSRCFDDSYSNKVLVLASENRQKGNRTPYEYFGANEQRWHEFSVRVGASVRDFKKRQKLLNTSFGEEQGKEFIQRNLNDTQHITRVVYNYLRNNLEFADSAYAKAPVQAVNGAVTAMLRGRWGIEKMRGDGDLHHCKDAVVIAATSRSMVQRLTNYYKEEERLFMGKTHFVDPATGEVLTRKEFQQRFAPKFPQPWDRFREELEARLDPIDPMEAVMALHLSTYEPEEEIAPVFVSHMPKHTVTGAAHEETIRSRTETGTVVKTALTSLKLDKNGEIEGYYNPQTDPRLYQALVERLKKFGGDGAKAFAEPFYKPKKDGTPGPRVDKVKIERKSSLSVSTGRGVADNGRMVRIDVFRIPDDGYYFVPIYVADTKKATLPSKAVVAGKSPEAWKQMKPEHFLFSLFKGDLIYVESRKGISLALAEKATGEKTIQVKSGLFYFCGADISTGSIGMEIHDRRYTKRGLGIKTLTLIEKCQVDVLGNVSKVRLPETRLEFRGRK

SEQ ID NO: 1552 - protein, 818 aa, unidentified
  REGION 1..818: note = Description of Unknown: uncultivated organism with predicted taxonomy: Clostridiales
  REGION 1..818: note = MG21-42 effector
EKRELTSEEKEKLKELVFSKVTVTYSDVRKTLQLESNQRFNMFTYRDLLNYTEETNKEIEKEKKLKEFESYKKIKTALNHIEKNYITKLTTDDLDEIGYALTVYKSNDKRKEYLEKHTPNLSKEAIEELLKLSFSKVGNLSLKAMKKIIPELEKEVTYDKAVDKVYEDFRGTVDTQKKRKLSLKDFEQEISNPVVRRGLSQAIKVLNAITLRYNEKFGKPDVVVVELARELGKNFADRRTIEKRQSDNTQTNEKAKESIIALGKNNPTGKDIVKFKLWQDQDCKCIYSGKTIPVEELFTDLVDVDHIIPYSQCFDDSYNNKVLVLASENRQKGNRVPYKYLKESGKNLEEYEIRVNTLIRNSKKKQNLLRQDFTREDAEDWKERNLNDTKYICKYMYNLIRNHLEFSDNANFVRKVWTVNGALTAHIRKRLGIEKVRDGDTHHAVDATVIAITTQGMVNKLTKYYQYVDGRYMNNKGEYIDTYTGEIINAKEYEEKYGIYFPEPWPKFRKELDIRTNCKTRERMIECLESEKIYTYEDYDDVEPIFVSRMPRRKVTGPAHVATIRGIKEKDGELKTITKTELTKLKLKDGEIEGYPENCRRDDRLLYEALKNRLIEFNGDAVKAFSEPFYKPKSDGTRGPIVNKVKIEANTTMGVTLNDKKAFAANGDCVRLDIFYVENEGYYFIPIYVSDTVKKELPNKACVSGKKYADWKEMKDENFIFSIYPKDLIYIQGKNKIKLNPVIKDKDSIEVEDIFAYYIKAGISSAVITIQTNEGKYVQPSLGIKSLKKLEKYEVDILGNYHKVKLPEKRLPFNINKK

SEQ ID NO: 1553 - protein, 843 aa, unidentified
  REGION 1..843: note = Description of Unknown: uncultivated organism with predicted taxonomy: Clostridiales bacterium 42_27
  REGION 1..843: note = MG21-43 effector
FSGGIGERVGACTFEPDEKRAAKATYTFEYFKLLQDLSRMRLTGMGMPPEPLDAAQREALKSAALRSASLSYGQIRKKLNLDDDVFFHGLYYGEKTKEETEKRKWPQMQSYHKMRTALDKVGKGAIGTLTEEQLNAVATILTECKSDAKRIAALREAGIPPQFDEALLPLSFSKYGSLSVQAMQKLIPLLEEGLRYDEACTRVYGDHRGLHPEQRKNRLSLTDMDEITNPVVRRAVSQTIKVINAVVRTYGPPDVVRIELAREMSRTFDERRKMEKRQDDNRAANKRAKDQIAEYKGDHATGLDIVKFKLYQEQDGVCLYSGQNLDIARLFEPGYADVDHIIPYSRCFDDSYQNKVLVLASENRQKGNRLPYEYFGQDEARWHGYEVRVENLIHNYRKRQKLLKRRLTEEESSGFIDRNLKDTQYITRAVYNLIRDHLAFAESNYRKKPVQAVNGAVTAMLRGRWGVQKIREDGDLHPCLDAAVIAATTPGLVQRLTAYNKHRETWERSPAGYVDPATGEMLELPQEARRDPFPKPWERFRQELEARLDPIDPRHQIDLLKLETYESDEEIKPVFVSRMPNHKVTGAAHAETIRSSKGGDGFTVTKTPLTNLKLNKFGEIEGYYNPASDTLLYDALLARLKDFGGDGAKAFAQPFYKPKKDGTPGPRVDKVKICEKATVGLPVRDGIAANGSMVRIDVFYVEDDGYYFVPIYVADTKKESLPNKAVVAYKAYSEWKEMKDENFIFSLYPGDLVRIQSRKGIKLNLAKGGTGEKEIVRQEGMYYYRGSDISTGAISVSSHDRRYESRGIGVKTLQSIEKYQVDVLGNYYKVDLPEKRMTFSKEG

SEQ ID NO: 1554 - protein, 1128 aa, unidentified
  REGION 1..1128: note = Description of Unknown: uncultivated organism with predicted taxonomy: Clostridiales
  REGION 1..1128: note = MG21-44 effector
MNYRIGLDLGIASVGWAILEDDNKGNPKRIVKLGSRIFDAAENPKDGSSLALNRREARNTRRRLRRRNHRIKRTKNLLEKYNIITIKEIENMYATYKFQFNPYELRVKGLDEKLTNSELARVLISFVKRRGYKSNSKAEETSNKEMGKLLVATKENEILMKEKNYRTIGEMYLKDEKFKIQMPDGRVLLKVRNTTDEYKNTPLRKLLLDEIKQILEKQKELNSNITDSFIDEYINIFTSQRNFDDGPSQPSIYAGNQIEKMLGKCTFEKEENRSAKATYTFEYFKLLQDINHIKIEEYHLKENGTREVIKRTLTEEERNIIINLAKTKVTLTYDSLRTALKLTTNERFNMINYKRTDIFNDEENKKVEKDRRIKEFESYHKIRVAMDRIEKNYINKLNSDDLDTIGTVLTLYKNDNKRIEKLKEINLPEDIVNELLKLSFSKVGNLSIKAMKKIIPYLEQGYTYDKAVNEVYEDFRGIINTKKKKKIALRDLEQELSNPVVKRAVSQAIKVLNAITTTYGKPDIINIELARQLSKKFADRQNIKKKQEQNMQNNDKAREEILKLGKNNPTGQDIVKYKLWQEQDGICVYSGKHISIEDLFTEAVDVDHIIPYSMCFDDTYKNKVLVLASENRQKGNRIPYQYLKEKGRNLEEYEVRVNNIIKNYYKKKRLLRQNFTREDATEWKDRNIQDTQYISRLMYNLIKNHVQFSDNENFDRKVFTVNGQITSHVRKRLGINKIRENGDEHHAVDAAVIAIISQGMIQKITKYYQYIDGRYEKNSGEYIDLETGEILTKEQYEKENGINFPEPWPKFRTELDIRTTCQTKERMEECLVAEKIYYENYDDVKPVFISRMPRRKVTGQAHLDTIRGIRKNEEGIKTLTKTELTKLKLDKNGEIEKYPDSQKQDDKLLYKALVDQLRKFGGNGEEAFKRPFYKPKSDGTPGPLVKKVKLEDKTTLAVELNNGKAIAANGDMIRIDVFKVDGEGYYFVPIYVSDTIKSKLPNKACVAAKQYSEWKDMKDENFIFSLYPRDLIYIKSKNKIKLTSINKENKETKEISEMFAYYIKSGISTAAISIINHNGEYEQNSLGIKTLKEFKKFEVDVLGNYHEVKLPEKRQSFKNLKKKGGSLK

SEQ ID NO: 1555 - protein, 1100 aa, unidentified
  REGION 1..1100: note = Description of Unknown: uncultivated organism with predicted taxonomy: Clostridiales
  REGION 1..1100: note = MG21-45 effector
MSEFHYALGLDIGIGSVGWAVLRNQPYGEPDRIQDLGVRIFDKAEQPKTGASLAAPRRDARSARRRLRRHRHRLERIRYLMEQRGIMPVADIQAMYAAGGFQKSPYQLRAEALDRPLIKEEAVRVLIHLAQRRGYKSNSTAEAAKDEKETGKVKTAIEENRRCMAEYGYRTVGEMMYRDERFWQKHPDGTRYHQTRNKAEDYRFTVERAAIVDEVRQIFAAQRRLGVVWMDEDMETAYLSVLESQRSFDEGPGGDSPFSGGIGKRVGACTFEPDEKRAAKATYTFEYFKLLQDLNRMRLTGMGMPPEPLDDEQREVLKSAALRSASLSYGQIRKKLNLDDDVFFNDLYYGEKTKEEAEKRKWPQMQSYHKLRMALDKVGKGAIGTLTEEQLNAIATILTECKSDAKRIAALREAGIPPQFDEALLPLSFSKYGSLSVRAMQKLIPLLEEGLRYDEACTRVYGDHRGLRSEQRTNRLSLNDMEEITNPVVRRAVSQTIKVINAVARTYGPPDVVRIELAREMSRTFDERRKMEKRQDDNRAANEQAKDQIAEYKGDHATGLDIVKFKLYREQDGVCLYSGQNLDIARLFEPGYADVDHIIPYSRCFDDSYQNKVLVLASENRQKGNRLPYEYFGQDEARWHGYEVRVENLIHNYRKRQKLLKRRLTEEESSGFIDRNLKDTQYITRAVYNLIRDHLAFAESNYRKKPVQAVNGAVTSMLRGRWGVQKIREDGDLHHCLDAAVIAATTPGLVQRLTAYNKHRETWERPPAGYVDPATGELIELPQEARRDPFPKPWERFRQELEARLDPIDPRHQIDLLKLETYESDEEIKPVFVSRMPNHKVTGAAHAETIRSSKGGDGFTVTKTPLTNLKLNKFGEIEGYYNPASDTLLYDALLARLKDFGGDGAKAFAQPFYKPKKDGSPGPRVDKVKICEKATVGLPVRDGIAANGSMIRIDVFYVEDDGYYFVPIYVADTKKESLPNKAVVAYKAYSEWKEMKDENFIFSLYPGDLVRIQSRKGIKLNLAKGGTGEKEIVRQEGMYYYRAAGITVGAIQIETHDRRYLQPSLGIKTLQSIEKYQVDVLGNYYKVDLPEKRMTFSKEG

SEQ ID NO: 1556 - protein, 818 aa, unidentified; identical to SEQ ID NO: 1552
  REGION 1..818: note = Description of Unknown: uncultivated organism with predicted taxonomy: Clostridiales
  REGION 1..818: note = MG21-46 effector

SEQ ID NO: 1557 - protein, 1098 aa, unidentified; identical to SEQ ID NO: 1537
  REGION 1..1098: note = Description of Unknown: uncultivated organism with predicted taxonomy: Clostridiales
  REGION 1..1098: note = MG21-47 effector

SEQ ID NO: 1558 - protein, 848 aa, unidentified
  REGION 1..848: note = Description of Unknown: uncultivated organism with predicted taxonomy: Clostridiales bacterium 42_27
  REGION 1..848: note = MG21-48 effector
LMEQRGIMPVADIQAMYAAGGFQKSPYQLRAEALDRPLIKEEAVRVLIHLAQRRGYKSNSTAEAAKDEKETGKVKTAIEENRRCMAEHGYRTVGEMMFRDERVWQKHPDGTRYHQTRNKAEDYRFTVERAAIVDEVRQIFAAQRRLGVVWMDEDMETAYLSVLESQRSFDEGPGGDSPFSGGIGERVGACTFEPDEKRAAKATYTFEYFKLLQDLNRMRLTGMGMPPEPLDDEQREVLKSAALRSASLSYGQIRKKLNLDDDVFFNDLYYGEKTKEEAEKRKWPQMQSYHKLRMALDKVGKGAIGTLTEEQLNAIATILTECKSDAKRIAALREAGIPPQFDEALLPLSFSKYGSLSVRAMQKLIPLLEEGLRYDEACTRVYGDHRGLRSEQRTNRLSLNDMEEITNPVVRRAVSQTIKVINAVVRTYGPPDVVRIELAREMSRTFDERRKMEKRQDDNRAANEQAKDQIAEYKGDHATGLDIVKFKLYREQDGVCLYSGQNLDIARLFEPGYADVDHIIPYSRCFDDSYQNKVLVLASENRQKGNRLPYEYFGQDEARWHGYEVRVENLIHNYRKRQKLLKRRLTEEESTGFIDRNLKDTQYITRAVYNLIRDHLAFAESNYRKKPVQAVNGAVTAMLRGRWGVQKIREDGDLHHCLDAAVIAATTPGLVQRLTAYNKHRETWERPPAGYVDPATGELIELPQEARHDQFPKPWERFRQELEARLDPIDPRHQIDLLKLETYESDEEIQPVFVSRMPNHKVTGAAHAETIRSSKGGDGFTVTKTPLTNLKLNKFGEIEGYYNPESDKLLYDALLARLKAFGGDGAKAFDQPFYKPKKDGTPGPRVDK

SEQ ID NO: 1559 - protein, 1100 aa, unidentified
  REGION 1..1100: note = Description of Unknown: uncultivated organism with predicted taxonomy: Clostridiales bacterium 42_27
  REGION 1..1100: note = MG21-49 effector
MSEFHYALGLDIGIGSVGWAVLRNQPNGEPDRIQDLGVRIFDKAEQPKTGASLAAPRRDARSARRRLRRHRHRLERIRYLMEQRGIMPVADIQAMYAAGGFPKSPYQLRAEALDRPLTKEEAVRVLIHLAQRRGYKSNSTAEAAKDEKETGKVKTAIEENRRCMAEYGYRTVGEMMYRDERFWQKHPDGTHYHQTRNKAEDYRFTVERAAIVDEVRQIFAAQRRLGTVWMDEDMETAYLSILESQRSFDEGPGGDSPFSGGIGERVGACTFEPDEKRAAKATYTFEYFKLLQDLSRMRLTGMGMPPEPLDAAQREALKSAALRSASLSYGQIRKKLNLDDDVFFHGLYYGEKTKEEAEKRKWPQMQSYHKMRTALDKVGKGAIGTLTEEQLNAVATILTECKSDAKRIAALREAGIPPQFDEALLPLSFSKYGSLSVQAMQKLIPLLEEGLRYDEACTRVYGDHRGLHPEQRKNRLSLTDMDEITNPVVRRAVSQTIKVINAVVRTYGPPDVVRIELAREMSRTFDERRKMEKRQDDNRAANERAKDQIAEYKGDHATGLDIVKFKLYQEQDGVCLYSGQNLDIARLFEPGYADVDHIIPYSRCFDDSYQNKVLVLASENRQKGNRLPYEYFGQDEARWHGYEVRVENLIHNYRKRQKLLKRRLTEEESSGFIDRNLKDTQYITRAVYNLIRDHLAFAESNYRKKPVQAVNGAVTAMLRGRWGVQKIREDGDLHHCLDAAVIAATTPGLVQRLTAYNKHRETWERSPAGYVDPATGEMLELPQEARRDPFPKPWERFRQELEARLDPIDPRHQIDLLKLETYESDEEIKPVFVSRMPNHKVTGAAHAETIRSSKGGDGFTVTKTPLTNLKLNKFGEIEGYYNPASDTLLYDALLARLKDFGGDGAKAFAQPFYKPKKDGSPGPRVDKVKICEKATVGLPVRDGIAANGSMVRIDVFYVEGDGYYFVPIYVADTKKESLPNKAAVAMKPYNLWKKMKDENFVFSLYPGDLVRIQSRKGIKLNLAKGGTGEKEIVRQEGMYYYRSAGIAVAQISVETHDRRYLQPSLGIKTLQSIEKYQVDVLGNYYKVDLPEKRMTFSKEG

SEQ ID NO: 1560 - protein, 1100 aa, unidentified; identical to SEQ ID NO: 1538
  REGION 1..1100: note = Description of Unknown: uncultivated organism with predicted taxonomy: Clostridiales bacterium 42_27
  REGION 1..1100: note = MG21-50 effector

SEQ ID NO: 1561 - protein, 983 aa, unidentified
  REGION 1..983: note = Description of Unknown: uncultivated organism with predicted taxonomy: Clostridiales bacterium 42_27
  REGION 1..983: note = MG21-51 effector
MSEFHYALGLDIGIGSVGWAVLRNQPNGEPDRIQDLGVRIFDKAEQPKTGASLAAPRRDARSARRRLRRHRHRLERIRYLMEQRGIMSVSDIQAMYAAGGFQKSPYQLRAEALDRPLSKEEAVRVLIHLAQRRGYKSNSTAEAAKDEKETGKVKTAIEENHRCMAEHGYRTVGEMMYRDERFWQKHPDGTRYHQTRNKAEDYRFTVERAAIVDEVRQIFAAQRRLGTAWMDEDMETAYLSILESQRSFDEGPGGDSPFSGGIGERVGACTFEPDEKRAAKATYTFEYFKLLQDLSRMRLTGMGMPPEPLDDEQREVLKSAALRSASLSYGQIRKKLNLDDDVFFHGLYYGEKTKEEAEKRKWPQMQSYHKLRTALDKVGKGAIGTLTEEQLNAVATILTECKSDAKRIAALREAGIPPQFDEALLPLSFSKYGSLSVRAMQKLIPLLEEGLRYDVACTRVYGDHRGLRPGQRTNRLSLKDMDEITNPVVRRAVSQTIKVINAVVRTYGPPDVVRIELAREMSRTFDERRKMEKRQDDNRAANERAKDQIAEYKGDHATGLDIVKFKLYREQDGVCLYSGQNLDIARLFEPGYADVDHIIPYSRCFDDSYQNKVLVLASENRQKGNRLPYEYFGQDEARWHGYEVRVENLIHNYRKRQKLLKRRLTEEESSGFIDRNLKDTQYITRAVYNLIREHLVFAESAYRKKPVQTVNGAVTSMLRGRWGVQKIREDGDLHHCLDAAVIAATTPGLVQRLTAYNKRRESWERSPAGYVDPATGELIVLPQEARRDPFPKPWERFRQELEARLDPIDPRHQIDLLKLETYESDEEIKPVFVSRMPNHKVTGAAHAETIRSSKGGDGFTVTKTPLTNLKLNKFGEIEGYYNPASDTLLYDALLARLKAFGGDGAKAFAQPFYKPKKDGTPGPRVDKVKICEKATVGLPVRDGIAANGSMVRIDVFYVEDDGYYFVPIYVADTKKESLPNKAA

SEQ ID NO: 1562 - protein, 1026 aa, unidentified
  REGION 1..1026: note = Description of Unknown: uncultivated organism with predicted taxonomy: Clostridiales bacterium 42_27
  REGION 1..1026: note = MG21-52 effector
ERIRYLMEQRGIMPVADIQAMYAAGGFQKSPYQLRAEALDRPLTKEEAVRVLIHLAQRRGYKSNSTAETAKDEKETGKVKTAIEENRRCMAEHSYRTVGEMMYRDERFWQKHPDGTRYHQTRNKAEDYRFTVERAAIVDEARQIFAAQRRLGTVWMDEDMETAYLSILESQRSFDEGPGGDSPFSGGIGERVGACTFEPDEKRAAKATYTFEYFKLLQDLNRMRLTGMGMPPEPLDAAQREVLKSAALRSASLSYGQIRKKLNLDDDVFFHGLYYGEKTKEEAEKRKWPQMQSYHKMRTALDKVGKGAIGTLTEEQLNAVATILTECKSDAKRIAALREAGIPPQFDEALLPLSFSKYGSLSVRAMQKLIPLLEEGLRYDEACTRVYGDHRGLRPEQRTNRLSLNDMEEITNPVVRRAVSQTIKVINAVVRTYGPPDVVRIELAREMSRTFDERRKMEKRQDDNRAANERAKDQIAEYKGDHATGLDIVKFKLYREQDGVCLYSGQNLDIARLFEPGYADVDHIIPYSRCFDDSYQNKVLVLASENRQKGNRLPYEYFGQDEARWHGYEVRVENLIHNYRKRQKLLKRRLTEEESTGFIDRNLKDTQYITRAVYNLIRDHLAFAESNYRKKPVQAVNGAVTAMLRGRWGVQKIREDGDLHHCLDAAVIAATTPGLVQRLTAYNKHRETWERSPAGYVDPATGEMIELPQEARRDPFPKPWERFRQELEARLDPIDPRHQIDLLKLETYESDEEIQPVFVSRMPNHKVTGAAHAETIRSSKGGDGFTVTKTPLTNLKLNKFGEIEGYYNPASDTLLYDALLARLKDFGGDGAKAFAQPFYKPKKDGTPGPRVDKVKICEKATVGLPVRDGIAANGNMVRIDVFYVEDDGYYFVPIYVADTKKESLPNKAAVAMKPYNLWKKMKDENFVFSLYPGDLVRIQSRKGIKLNLAKGGTGEKEIVRQEGMYYYRSAGIAVAQISVETHDRRYLQPSLGIKTLQSIEKYQVDVLGNYYKVDLPEKRMTFSKEG

SEQ ID NO: 1563 - protein, 1097 aa, unidentified
  REGION 1..1097: note = Description of Unknown: uncultivated organism with predicted taxonomy: Clostridiales
  REGION 1..1097: note = MG21-53 effector
LSLRYTLGLDIGIASVGWAVLENNIDGEPIKIERLGVRIFDKAEETDGSPLAKHRREARGQRRTIRRKRHRKDRIKQLIQQNGIMTRVEMSEMFEHSQFETSVYELRVQALERTLTKQEFVRVLIHLAQRRGYKSNSKSEEAKDKENGKVKSAISENKQCMEENGYRTIGEMLLNDDRFWECNPDGTKIFVPHNHLDDYRTTVERSMVEDEIRLIFSQQRALGVSYATAEFEEAYLEIWGSQRNFDEGPGGKSPYGGNMIEKMLGHCTFEKDEPRAAKGSYSAEYFRLLQDVNHLRLVKNNGESSALTAEQKQIYIDLVMKSAAASYAQLRKKLELSNDISFNMLRYGSDEIGKVERKKLGHMKFYHEMRKALNTVQKDAISTVSWEQRDEIARILLCYKSDDKRKAQLEKLDIPREFIPALLTLSTSKTAHLSAKSLRKLIPYLEKGMTYAEACKEVYGEHKSSITKKNKLSLFDIELINNPVVRRAVSQTIRVINAVVREYGAPEVVRVELAREMGKPYDVRTQITKKQEANAKKNEELRQQIKKIKGAEPTGQDIVKFKLFQEQKGVCLYSGQNLDITRLFEAGYVDVDHIVPYSISFDDSYTNKVLVRSPENRQKGNRIPADYFKSDPARWQRFETLVNTRVHNWKKKRNLLTQALSEEQKNGFKQRNLVDTQYIARVIYNLINDHLQFAETGKYDKKRRTQAVNGAITAHVRKRLGIQKIREDGDLHHAVDAAVVACVSPGMIQKVTQYTKHRECIRKTKEGYLDTETGELMTREAYDAKYSPRFPAPWERFRQELEARLSDNPAEEIARLHLATYDSEEEIKPVFVSRKPERKTTGAAHEATIRSAKKPGGSISKKPLTSLSLNKKTGEIEKYYAPESDRLLYEALKKRLEEFDGNAKEAFAKPFYKPKRDGTRGPLVKKVKLYEKKTITVPVNGGNADNGRMIRVDVFYMEDDGYYYVPIYITDVVKDELPNKAVVQKKLPEDWKEMDDRDFLFSMYPNDLIYVERKEVFELTAPKGSSLDPTISKTKGFFYYRSFDSNTGSFKIYTHDSSYSKKSLGGKTLSCLKKYTVDVLGNYSEVSLPEKRKPLRG

SEQ ID NO: 1564 - protein, 1100 aa, unidentified
  REGION 1..1100: note = Description of Unknown: uncultivated organism with predicted taxonomy: Clostridiales
  REGION 1..1100: note = MG21-54 effector
MSEFHYALGLDIGIGSVGWAVLRNQPNGEPDRIQDLGVRIFDKAEQPKTGASLAAPRRDARSARRRLRRHRHRLERIRYLMEQRGMMSVSDIQAMYAAGGFQKSPYQLRAEALDHPLSKEEAVRVLIHLAQRRGYKSNSTAEAAKDEKETGKVKTAIEENRRCMAEHGYRTVGEMMFRDERFWQKHPDGTRYHQTRNKAEDYRFTVERAAIVDEVRQIFAAQRRLGVVWMDEDMEIAYLSVLESQRSFDEGPGGDSPFSGGIGERVGACTFEPDEKRAAKATYTFEYFKLLQDLNRMRLTGMGMPPEPLDDEQREVLKSAALRSASLSYGQIRKKLNLDDDVFFNNLYYGEKTKEEAEKRKWPQMQSYHKLRTALDKVGKGAIGTLTEEQLNAVATILTEYKSDAKRIAALREAGIPPQFDEALLPLSFSKYGSLSVRAMQKLIPLLEEGLRYDGACTRVYGDHRGLRPGQRTNRLSLKDMEEITNPVVRRAVSQTIKVINAVVRTYGPPDVVRIELAREMSRTFDERRKMEKRQDDNRAANERAKDQISEYKGDHATGLDIVKFKLYREQDGVCLYSGQNLDIARLFEPGYADVDHIIPYSRCFDDSYQNKVLVLASENRQKGNRLPYEYFGQDEARWHGYEVRVENLIHNYRKRQKLLKRRLTEEESTGFIDRNLKDTQYITRTVYNLIRDHLAFAESAYRKKPVQAVNGAVTAMLRGRWGVQKIREDGDLHHCLDAAVIAATTPGLVQRLTAYNKHRETWERPPAGYVDPVTGELIELPQEARRDPFPKPWERFRQELEARLDPIDPRHQIDLLKLETYESDEEIKPVFVSRMPNHKVTGAAHAETIRSSKGGDGFTVTKTPLTNLKLNKFGEIEGYYNPASDTLLYDALLARLKDFGGDGAKAFAQPFYKPKKDGSPGPRVDKVKIREKATVGLPVRNGIAANGSMVRIDIFYVEDDGYYFVPIYVADTKKDRLPSKAPVAHKAYSAWKEMRNENFIFSLYPGDLVRIQSRAGIKLSLAKDGTGEKEIVRQNGLYYYRSADIEGGKIDIEAHDRRYSKHGLGLKTLQSIEKYQVDVLGNYYKVDLPEKRMTFSKEG

SEQ ID NO: 1565 - protein, 986 aa, unidentified
  REGION 1..986: note = Description of Unknown: uncultivated organism with predicted taxonomy: Ruminococcaceae bacterium TF06-43
  REGION 1..986: note = MG21-55 effector
LLNAREFSKVLIHLAQRRGYQSNSTAEEAKNEKENGIIKSAILENQQRMEQGGYRTIGEMMYRDAAFWETINGIRYHCTRNKAGDYRFTVDRASILSEVSLLFEAQRRLGSPWASVEMEDAYTAILASQRSFDEGPGNDSHGNESPFRKAMSHNVGNCTLIPTEPRAARADYTAEYFKLLQDLNHMRLVDNSGSHPLTQQQRAILEEMAFRSANLTYGQLRKKLGISDEVRFAGLYYGQDTIEKAEKRKWPQMQSYHKIRTALDKVSKDAIRTLTQDQLDAIGEILAGGVSDAKRINSFCLEGIPEEYHKALLPLSISKRAKLSIAAMRKLIPFLQQGMRYDEACKAAGLDFHGADGKVEKLSDFLNEITNPVVRRAVSQTIKVVNAVVREYGNPDAVRIELAREMHHSIKERNRMKKRQEENREKNEQVKAQILETKPGTRVTGLDIVKFKLYQEQDGICLYSGKPMEIERLYEPGYAEVDHIIPYSRCFDDSYSNKVLVLAKENQQKGNCTPYEYFGADEQRWHEFSARVRASVRDFKKRQKLLNTSFGEEQGKEFIQRNLNDTQHITRVVYNFLRNNLEFADSAYAKAPVQAVNGAVTAMLRGRWGIEKMRGNGDLHHCKDAVVIAATSDSMIEDLTDYYKEEERLFMGKTHFVDPATGEALTRKEFQQRFAPQFPQPWPRFREELEARLDPIDPMEAVMALHLSTYEPDEEIAPVFVSHMPKHTVTGAAHEETIRGKTETGTVVKTALTSLKLDKNGEIDGYYNPQTDPRLYQALVERLKKFGGDGARAFAEPFYKPKKDGTPGPRVDKVKIKSKSSLSVPTGRGVAKNGDMIRMDVFHVPDDGYYFVPIYVADTKKAILPSKAVVAGKSPEAWKQMKPEHFLFSVFKGDLIYVESKTEISLALAKNAVGEKTIQVKSDLFYFCGADISNGSIKIKTHDRRYEQKKLGIKKLEVLEKYQVDVLGNVSKVKLPETRLEFRGRK

SEQ ID NO: 1566 - protein, 1046 aa, unidentified
  REGION 1..1046: note = Description of Unknown: uncultivated organism with predicted taxonomy: Clostridiales bacterium 42_27
  REGION 1..1046: note = MG21-56 effector
PPRRDARSARRRLRRHRHRLERIRYLMEQRGIMPVADIQAMYAAGGFQKSPYQLRAEALDRPLTKEEAVRVLIHLAQRRGYKSNSTAEAAKDEKETGKVKTAIEENRRCMAEHGYRTVGEMMYRDERFWQKHPDGTRYHQTRNKAEDYRFTVERAAIVDEVRQIFAAQRRLGTAWMDEYMETAYLSILESQRSFDEGPGGDSPFSGGIGERVGACTFEPDEKRAAKATYTFEYFKLLQDLSRMRLTGMGMPPEPLDAAQREVLKSAALRSASLSYGQIRKKLNLDDDVFFHGLYYGEKTKEEAEKRKWPQMQSYHKMRTALDKVGKGAIGTLTEEQLNAVATILTECKSDAKRIAALREAGIPPQFDEALLPLSFSKYGSLSVQAMQKLIPLLEEGLRYDEACTRVYGDHRGLHPEQRKNRLSLTDMDEITNPVVRRAVSQTIKVINAVVRTYGPPDVVRIELAREMSRTFDERRKMEKRQDDNRAANERAKDQIAEYKGDHATGLDIVKFKLYREQDGVCLYSGQNLDIARLFEPGYADVDHIIPYSRCFDDSYQNKVLVLASENRQKGNRLPYEYFGQDEARWHGYEVRVENLIHNYRKRQKLLKRRLTEEESSGFIDRNLKDTQYITRAVYNLIRDHLAFAESNYRKKPVQAVNGAVTAMLRGRWGVQKIREDGDLHHCLDAAVIAATTPGLVQRLTAYNKHRETWERSPAGYVDPATGEMIELPQEARRDPFPKPWERFRQELEARLDPIDPRHQIDPLTAETYESDEEIKPVFVSRMPNHKVTGAAHAETIRSSKGGDGFTVTKTPLTNLKLNKFGEIEGYYNPASDTLLYDALLARLKDFGGDGAKAFAQPFYKPKKDGSPGPRVDKVKICEKATVGLPVRDGIAANGSMVRIDVFYVEGDGYYFVPIYVADTKKESLPNKAAVAMKPYNLWKKMKDENFVFSLYPGDLVRIQSRKGIKLNLAKGGTGEKEIVRQEGMYYYRSAGIAVAQISVETHDRRYLQPSLGIKTLQSIEKYQVDVLGNYYKVDLPEKRMTFSKEG

SEQ ID NO: 1567 - protein, 1098 aa, unidentified
  REGION 1..1098: note = Description of Unknown: uncultivated organism
  REGION 1..1098: note = MG21-57 effector
MTSQAIRYTLGLDIGIASVGWAVLKNGSDGEPYKIENLGVRIFDKAEVPKTGASLAAPRREARSSRRVVRRRRHRKERIKYLIEQEGIMTQTEMMQLFQNSSFEKSVYEIRVEALDRLLTREEAVRLLIHFAQRRGYKSNSKAEEAKDNENGVIKQAISQNKQVMKAHGYRTFGEMLLMDDRFYYTQPDGARIFIPHNKASDYKVTAERGMLADELHMIFAAQRSLGSLWFSDTFETAYMEVWSSQRSFDEGPGGNSQYGGNQIEKMLGKCFDGELRAPKASYSAEYFRLLQDINHLRIVSLDGASSPLTQEQRDIVVAASKKSGTLTYTQLRKKLALADDQYFNALYYGDKTTAEIEKKKFGHLQFYHQLRTVLDKVEKGAADTLTWEQRDEIARILTVYKADDRRTDELQKAGIPEKYIDALLPLSPTKAMHLSITAIKKIIPYLEAGMPYSDALSKAYGNQTNASTSSKKHKLSLSDIEEITNPVVRRAVSQSIKVINAIVRQYGAPERVRIELAREMGKNFKDRRMIETRQTDNAAKNERIKAQISEYKSDHITGQDIVKFKLFKEQDGICLYSGKSLNIARLFEPGYVDIDHIIPYSISFDDSYNNKVLVLSSENRQKGNRIPYAYFGQNSDRWEKYETLVNNTVRSYRKRKNLLLKSLSEAQIDGFKQRNLQDTQYLSKVVFRLIEDHLQFAETAPGKKHTQPVNGAITAQVRKRLGIEKIREDGDLHHAMDAAVIACITPGMIQRITKYAQNHERFYATAKGYADIKTGEVLTRAQYEAMDDIRFPEPWAGFRLELEARVSDHPQEAIAQLKLPHYENSEEIRPIFVSRMPNHKVTGAAHLETIRSKKGGAGSTVTKTALTELKLGKDGEIAGYCRKEDDPLLYEALKARLKAFGGDGKKAFAEPFHKPKHNGEPGPIVNKVKIQESATLTVPVNHGVAANGSMVRLDVFYVDGDGYYFVPIYTADIVKPKLPNRAVVAGKKASEWKMIDDNHFVFSLYPKDLLRIRSNKGIKLKAVNKNADLQEYSANDCLCYYVGFDIATGAFTVESHDRRFNRRGLGGKTLLSIEKYQVDVLGNYFPVALPEKRMKFR

SEQ ID NO: 1568 - protein, 1100 aa, unidentified
  REGION 1..1100: note = Description of Unknown: uncultivated organism with predicted taxonomy: Oscillibacter sp. CAG:241_62_21
  REGION 1..1100: note = MG21-58 effector
MLEFHYALGLDIGIGSVGWAVLRNQENGEPDRIQDLGVRIFDKAEQSKTGASLAAPRRDARSARRRLRRHSHRLERIRFLMEQSGILSVADIQEMYSTGGFQKSPYQLRAEALDRLLTKEEAVRVLIHLAQRRGYKSNSTAEAAKDEKETGKVKTAIEENRRCMEEHGYRTVGEMMFRDERFWQKNPDGSRYHQTRNKADNYRFTVERAAIVDEAKRIFAAQRSFGAAWMGEAVEASYLSILESQRSFDEGPGGSSPFRGGIGERVGFCTFEPEERRAPKASYTFEYFKLLQDLNRMRLAGMGLPPQPLNAEQRELLKTAALRSASLNYGQIRKKLNLDDGIYFNELYYGDHSREDAEKRKWPQMQSYHKIRTALDRVGKGTISTLTEEQLNAIAEILTRYKSDAKRIAALREAGIPPQLDGALLPLSFSKYGSLSVKAMQKLIPLLEKGQRYDQACTQIYRDHRGLRTDQRTTRLSLHDMDEITNPVVRRAVSQTIKVVNAVVRTYGPPDVVRIELAREMSQNFDERRKAEKRREENRAANERAKEQILEYKGDRVTGLDIVKFKLFREQDGVCLYSGKNLDISRLFEPGYADVDHIIPYSRCFDDSYQNKVLVLASENRQKGNRLPYEYFGQDAARWHGYEVRVENLIRNYRKRQKLLKHHLTEEESAGFIARNLKDTQYITRTIYNLLREHLLFADSRYSKKPVQAVNGAVTAMLRSRWGVHKIREDGDLHHCMDAAVLAATTPGLVQRLTEYSKHRETLIETPAGFVNRLTGELVEEAGDAQRDRFPEPWDRFRQELEARLDPIDPRHQIDRLKLATYESDEELKPVFVSRMPNHKVTGAAHAETIRSSKAGNGFTVTKTPLASLKLNKQGEIDGYYNPESDKLLYDALLARLKAFGGDGAKAFAEPFYKPKKDGTPGPRVDKVKIREKGTTGLPVRDGIAANGSMIRIDVFREEDDGYYFVPIYVADTKKERLPNKAVVAYRPYEDWKEMQDENFVCSLYPGDLVRIQSRKGIKLNLAKGGTGEREIVRQDGLFYYRGADIAGGKIKIETHDRRYSQPSLGVKTLRSIEKYQVDVLGNYYKVKLPEKRMTFSEEG

SEQ ID NO: 1569 - protein, 1100 aa, unidentified
  REGION 1..1100: note = Description of Unknown: uncultivated organism with predicted taxonomy: Clostridiales
  REGION 1..1100: note = MG21-59 effector
MLEFHYALGLDIGIGSVVWAVLRNQENGEPDRIQDLGVRIFDKAEQPKTGASLAAPRRDARSARRRLRRHSHRLERIRFLMEQSGILSVADIQEMYSTGGFQKSPYQLRAEALDRLLTKEEAVRVLIHLAQRRGYKSNSTAEAAKDEKETGKVKTAIEENRRCMEEHGYRTVGEMMFRDERFWQKNPDGSRYHQTRNKADDYRFTVERAAIVDEAKRIFAAQSSFGAAWMGEAVEASYLSILESQRSFDEGPGGSSPFRGGIGERVGFCTFEPEERRAPKASYTFEYFKLLQDLNRMRLAGMGLPPQPLNAEQRELLKTAALRSASLNYGQIRKKLNLDDGIYFNELYYGDHSREDAEKRKWPQMQSYHKIRTALDRVGKGTISTLTEEQLNAIAEILTRYKSDAKRIAALREAGIPPQLDGALLPLSFSKYGSLSVKAMQKLIPLLEKGQRYDQACTQIYRDHRGLRTDQRTTRLSLHDMDEITNPVVRRAVSQTIKVVNAVVRTYGPPDVVRIELAREMSQNFDERRKAEKRREENRAANERAKEQILEYKGDRVTGLDIVKFKLFREQDGVCLYSGKNLDISRLFEPGYADVDHIIPYSRCFDDSYQNKVLVLASENRQKGNRLPYEYFGQDAARWHGYEVRVENLIRNYRKRQKLLKHHLTEEESAGFIARNLKDTQYITRTIYNLLREHLLFADSRYSKKPVQAVNGAVTAMLRSRWGVHKIREDGDLHHCMDAAVLAATTPGLVQRLTEYSKHRETLIETPAGFVNRLTGELVEEAGDAQRDRFPEPWDRFRQELEARLDPIDPRHQIDRLKLATYESDEELKPVFVSRMPNHKVTGAAHAETIRSSKAGNGFTVTKTPLASLKLNKQGEIDGYYNPESDKLLYDALLARLKAFGGDGAKAFAEPFYKPKKDGTPGPRVDKVKIREKGTTGLPVRDGIAANGSMIRIDVFREEDDGYYFVPIYVADTKKERLPNKAVVAYRPYEDWKEMQDENFVCSLYPGDLVRIQSRKGIKLNLAKGGTGEREIVRQDGLFYYRGADIAGGKIKIETHDRRYSQPSLGVKTLRSIEKYQVDVLGNYYKVKLPENRMTFSKEG

SEQ ID NO: 1570 - protein, 1100 aa, unidentified; identical to SEQ ID NO: 1538
  REGION 1..1100: note = Description of Unknown: uncultivated organism with predicted taxonomy: Firmicutes
  REGION 1..1100: note = MG21-60 effector

SEQ ID NO: 1571 - protein, 1100 aa, unidentified; identical to SEQ ID NO: 1544
  REGION 1..1100: note = Description of Unknown: uncultivated organism with predicted taxonomy: Clostridiales
  REGION 1..1100: note = MG21-61 effector

SEQ ID NO: 1572 - protein, 1100 aa, unidentified
  REGION 1..1100: note = Description of Unknown: uncultivated organism with predicted taxonomy: Firmicutes bacterium CAG:129
  REGION 1..1100: note = MG21-62 effector
MSEFHYALGLDIGIGSVGWAVLRNQPNGEPDRIQDLGVRIFDKAEQPKTGASLAAPRRDARSARRRLRRHRHRLERIRYLMEQRGIMPVADIQAMYAAGGFQKSPYQLRAEALDRPLIKEEAVRVLIHLAQRRGYKSNSTAEAAKDEKETGKVKTAIEENRRCMAEYGYRTVGEMMYRDERFWQKHPDGTRYHQTRNKAEDYRFTVERAAIVDEVRQIFAAQRRLGVVWMDEDMETAYLSVLESQRSFDEGPGGDSPFSGGIGERVGACTFEPDEKRAAKATYTFEYFKLLQDLNRMRLTGMGMPPEPLDDEQREVLKSAALRSASLSYGQIRKKLNLDDDVFFNDLYYGEKTKEEAEKRKWPQMQSYHKLRMALDKVGKGAIGTLTEEQLNAIATILTECKSDAKRIAALMEAGIPPQFDEALLPLSFSKYGSLSVRAMQKLIPLLEEGLRYDEACTRVYGDHRGLRSEQRTNRLSLNDMEEITNPVVRRAVSQTIKVINAVVRTYGPPDVVRIELAREMSRTFDERRKMEKRQDDNRAANEQAKDQIAEYKGDHATGLDIVKFKLYREQDGVCLYSGQNLDIARLFEPGYADVDHIIPYSRCFDDSYQNKVLVLASENRQKGNRLPYEYFGQDEARWHGYEVRVENLIHNYRKRQKLLKRRLTEEESTGFIDRNLKDTQYITRAVYNLIRDHLAFAESNYRKKPVQAVNGAVTAMLRGRWGVQKIREDGDLHHCLDAAVIAATTPGLVQRLTAYNKHRETWERPPAGYVDPATGELIELPQEARHDQFPKPWERFRQELEARLDPIDPRHQIDLLKLETYESDEEIQPVFVSRMPNHKVTGAAHAETIRSSKGGDGFTVTKTPLTNLKLNKFGEIEGYYNPESDKLLYDALLARLKAFGGDGAKAFDQPFYKPKKDGTPGPRVDKVKICEKATVGLPVRDGIAANGSMVRIDVFYVEDDGYYFVPIYVADTKKESLPNKAVVAYKAYSEWKEMKDENFIFSLYPGDLVRIQSRKGIKLNLAKGGTGEKEIVRQEGMYYYRAAGITVGAIQIETHDRRYLQPSLGIKTLQSIEKYQVDVLGNYYKVDLPEKRMTFSKEG

SEQ ID NO: 1573 - protein, 1100 aa, unidentified
  REGION 1..1100: note = Description of Unknown: uncultivated organism with predicted taxonomy: Clostridiales
  REGION 1..1100: note = MG21-63 effector
MSEFHYALGLDIGIGSVGWAVLRNQPNGEPDRIQDLGVRIFDKAEQPKTGASLAAPRRDARSARRRLRRHRHRLERIRYLMEQRGMMSVSDIQAMYAAGGFQKSPYQLRAEALDRPLSKEEAVRVLIHLAQRRGYKSNSTAEAAKDEKETGKVKTAIEENRRCMAEHGYRTVGEMMYRDERFWQSNPDGTRYQQTRNKTDDYRFTVERSAIVDEAKQIFAAQRKLGADWSSEDLEAAYLSILEGQRSFDEGPGGESPFRGGIGDKVGFCTFEPDQQRAAKATYTFEYFKLLQDLNRMRLTGMGMPPEPLDDEQREVLKSAALRSASLSYGQIRKKLNLDDDVFFNDLYYGEKTKEEAEKRKWPQMQSYHKMRTALDKVGKDTIGTLTEEQLNAIATILTECKSDAKRIAALRMAGIPVQFDEALLPLSFSKYGSLSVQAMQKLIPLLEQGMRYDEACTQIYGDHRGLHSEQRKNRLSLTDMDEITNPVVRRAVSQTIKVINAIVRTYGPPDVVRIELAREMSRNFDERRKAEKRQDENRAANERAKEQIAEYKGDHATGLDIVKFKLYQEQDGVCLYSGKNLDPSRLFEPGYADVDHIVPYSRCFDDSYQNKVLVLASENRQKGNRLPYEYFGYDEVRWHEYEVRVENLIRNYRKRQKLLKRQLSEEESAGFIDRNLKDTQYITRSIYNLIRNNLVFAESNYKKRPVQTVNGAVTSMLRNRWGVQKIREDGDLHHCLDAAVIAATTPGLVQRLTEHSKRRETLEKAPAGYVDPATGELLELPQEARRDLFPKPWERFRQELEARLDPIDPRHQIDLLELETYESDEEIKPVFASRMPNHKVTGAAHAETIRSSKGGDGFTVTKTPLTNLKLNKFGEIEGYYNPASDTLLYNALLSRLKDFGGDGAKAFAQPFYKPKKDGTPGPRVDKVKICEKATIGLPVRNGIAANGSMIRIDVFYVEDDGYYFVPIYVADTKREKLPNKAAVAMKPYNLWKEMKDENFVFSLYPGDLVRIQSRKGIKLNLAKGGTGEKEIVRQDGMYYYRSAGIAVAQIFVETHDRRYLQPSLGIKTLQSIEKYQVDVLGNYQKVDLPEKRMTFSKEG

SEQ ID NO: 1574 - protein, 1100 aa, unidentified
  REGION 1..1100: note = Description of Unknown: uncultivated organism with predicted taxonomy: Clostridiales
  REGION 1..1100: note = MG21-64 effector
MSEFHYALGLDIGIGSVGWAVLRNQPNGEPDRIQDLGVRIFDKAEQPKTGASLAAPRRDARSARRRLRRHRHRLERIRYLMEQRGMMSVSDIQAMYAAGGFQKSPYQLRAEALDRPLSKEEAVRVLIHLAQRRGYKSNSTAEAAKDEKETGKVKTAIEENRRCMAEHGYRTVGEMMYRDERFWQSNPDGTRYQQTRNKTDDYRFTVERSAIVDEAKQIFAAQRKLGADWSSEDLEAAYLSILEGQRSFDEGPGGESPFRGGIGDKVGFCTFEPDQQRAAKATYTFEYFKLLQDLNRMRLTGMGMPPEPLDDEQREVLKSAALRSASLSYGQIRKKLNLDDDVFFNDLYYGEKTKEEAEKRKWPQMQSYHKMRTALDKVGKDTIGTLTEEQLNAIATILTECKSDAKRIAALRMAGIPVQFDEALLPLSFSKYGSLSVQAMQKLIPLLEQGMRYDEACTQIYGDHRGLHSEQRKNRLSLTDMDEITNPVVRRAVSQTIKVINAIVRTYGPPDVVRIELAREMSRNFDERRKAEKRQDENRAANERAKEQIAEYKGDHATGLDIVKFKLYQEQDGVCLYSGKNLDPSRLFEPGYADVDHIVPYSRCFDDSYQNKVLVLASENRQKGNRLPYEYFGYDEVRWHEYEVRVENLIRNYRKRQKLLKRQLSEEESAGFIDRNLKDTQYITRSIYNLIRNNLVFAESNYKKRPVQTVNGAVTSMLRNRWGVQKIREDGDLHHCLDAAVIAATTPGLVQRLTEHSKRRETLEKAPAGYVDPATGELLELPQEARRDLFPKPWERFRQELEARLDPIDPRHQIDLLKLETYESDEEIKPVFASRMPNHKVTGAAHAETIRSSKGGDGFTVTKTPLTNLKLNKFGEIEGYYNPASDTLLYNALLSRLKDFGGDGAKAFAQPFYKPKKDGTPGPRVDKVKICEKATIGLPVRNGIAANGSMIRIDVFYVEDDGYYFVPIYVADTKREKLPNKAAVAMKPYNLWKEMKDENFVFSLYPGDLVRIQSRKGIKLNLAKGGTGEKEIVRQDGMYYYRSAGIAVAQIFVETHDRRYLQPSLGIKTLQSIEKYQVDVLGNYQKVDLPEKRMTFSKEG

SEQ ID NO: 1575 - protein, 833 aa, unidentified
  REGION 1..833: note = Description of Unknown: uncultivated organism with predicted taxonomy: Clostridiales bacterium 42_27
  REGION 1..833: note = MG21-65 effector
LSLRYTLGLDIGIASVGWAVLENNIDGEPIKIERLGVRIFDKAEETDGSPLAKHRREARGQRRTIRRKRHRKDRIKQLIQQNGIMTRVEMSEMFEHSQFETSVYELRVQALERALTKQEFVRVLIHLAQRRGYKSNSKSEEAKDKENGKVKSAISENKQCMEENGYRTIGEMLLNDDRFWECNPDGTKIFVPHNHLDDYRTTVERSMVEDEIRLIFSQQRALGVSYVTAEFEEAYLEIWGSQRNFDEGPGGKSPYGGNMIEKMLGHCTFEKDEPRAAKGSYSAEYFRLLQDVNHLRLVKNNGESSALTAEQKQIYIDLVMKSATASYAQLRKKLELSNDISFNMLRYGSDEIGKVERKKLGHMKFYHEMRKALNTVQKDAISTVSWEQRDEIARILLCYKSDDKRKAQLEKLDIPHEFIPALLTLSTSKTAHLSAKALRKLIPYLEKDMTYAEACKEVYGEHKSSITKKNKLSLFDIELINNPVVRRAVSQTIRVINAVVREYGAPEVVRVELAREMGKPYDVRTQITKKQEANAKKNEELRQQIKKIKGAEPTGQDIVKFKLFQDQNGVCLYSGQNLDITRLFEAGYVDVDHIIPYSISFDDSYTNKVLVRSPENRQKGNRIPADYFKSDPARWQRFETLVNTRVHNWKKKRNLLTQALSEEQKNGFKQRNLVDTQYIARVIYNLINDHLQFAETGKYDKKRRTQAVNGAITAHVRKRLGIQKIREDGDLHHAVDAAVVACVSPGMIQKVTQYTKHRECIRKTKEGYLDTETGELMTREAYDAKYSPRFPAPWERFRQELEARLSDNPAEEIARLHLATYDSEEEIKPVFVS

SEQ ID NO: 1576 - protein, 1100 aa, unidentified; identical to SEQ ID NO: 1574
  REGION 1..1100: note = Description of Unknown: uncultivated organism with predicted taxonomy: Clostridiales
  REGION 1..1100: note = MG21-66 effector

SEQ ID NO: 1577 - protein, 1100 aa, unidentified; identical to SEQ ID NO: 1539
  REGION 1..1100: note = Description of Unknown: uncultivated organism with predicted taxonomy: Clostridia
  REGION 1..1100: note = MG21-67 effector

SEQ ID NO: 1578 - protein, 1100 aa, unidentified
  REGION 1..1100: note = Description of Unknown: uncultivated organism with predicted taxonomy: Clostridiales
  REGION 1..1100: note = MG21-68 effector
MSEFHYALGLDIGIGSVGWAVLRNQPNGEPDRIQDLGVRIFDKAEQPKTGASLAAPRRDARSARRRLRRHRHRLERIRYLMEQRGIMPVADIQAMYAAGGFPKSPYQLRAEALDRPLTKEEAVRVLIHLAQRRGYKSNSTAEAAKDEKETGKVKTAIEENRRCMAEYGYRTVGEMMYRDERFWQKHPDGTHYHQTRNKAEDYRFTVERAAIVDEVRQIFAAQRRLGTVWMDEDMETAYLSILESQRSFDEGPGGDSPFSGGIGERVGACTFEPDEKRAAKATYTFEYFKLLQDLSRMRLTGMGMPPEPLDAAQREALKSAALRSASLSYGQIRKKLNLDDDVFFHGLYYGEKTKEEAEKRKWPQMQSYHKMRTALDKVGKGAIGTLTEEQLNAVATILTECKSDAKRIAALREAGIPPQFDEALLPLSFSKYGSLSVQAMQKLIPLLEEGLRYDEACTRVYGDHRGLHPEQRKNRLSLTDMDEITNPVVRRAVSQTIKVINAVVRTYGPPDVVRIELAREMSRTFDERRKMEKRQDDNRAANERAKDQIAEYKGDHATGLDIVKFKLYQEQDGVCLYSGQNLDIARLFEPGYADVDHIIPYSRCFDDSYQNKVLVLASENRQKGNRLPYEYFGQDEARWHGYEVRVENLIHNYRKRQKLLKRRLTEEESSGFIDRNLKDTQYITRAVYNLIRDHLAFAESNYRKKPVQAVNGAVTAMLRGRWGVQKIREDGDLHHCLDAAVIAATTPGLVQRLTAYNKHRETWERSPAGYVDPATGEMLELPQEARRDPFPKPWERFRQELEARLDPIDPRHQIDLLKLETYESDEEIKPVFVSRMPNHKVTGAAHAETIRSSKGGYGFTVTKTPLTNLKLNKFGEIEGYYNPASDTLLYDALLARLKDFGGDGAKAFAQPFYKPKKDGSPGPRVDKVKICEKATVGLPVRDGIAANGSMVRIDVFYVEGDGYYFVPIYVADTKKESLPNKAAVAMKPYNLWKKMKDENFVFSLYPGDLVRIQSRKGIKLNLAKGGTGEKEIVRQEGMYYYRSAGIAVAQISVETHDRRYLQPSLGIKTLQSIEKYQVDVLGNYYKVDLPEKRMTFSKEG

SEQ ID NO: 1579 - protein, 1109 aa, unidentified
  REGION 1..1109: note = Description of Unknown: uncultivated organism with predicted taxonomy: Firmicutes
  REGION 1..1109: note = MG21-69 effector
MKKGQKHCHYTLGLDIGIASIGWAVLGNDEDGTPNRIIDLGVRIFESAEVQKTGESLAAPRRDARSARRRLRRHRHRLERIRYLLVQQGVLTQEEMTHLYDKSDMVSPYQLRTEGLDRLLNAQEFSKVLIHLAQRRGYQSNSTAEEAKNEKENGIIKTAILENQQRMERGGYRTIGEMMYRDAAFWETINGIRYHCTRNKAGDYRFTVDRASILAEVSILFEAQRRLGSPWASVEMEDAYTAILSGQRSFDEGPGNDSHGNESPFRKAMSHNVGNCTLIPTELRAARADYTAEYFKLLQDLNHMRLMDNSGSHPLTQQQRAILEEMAFRSANLTYGQLRKKLGLSDEVRFAGLYYGEDTIEKAEKRKWAQMQSYHKIRTALDKVSKNAIQTLTQDQLDAIGEILAGGVSDAKRINSFCLEGIPEEYHKALLPLSISKRAKLSIAAMRKLIPFLQQGMRYDEACKAAGLDFHGADGKVEKLSDFLNEITNPVVRRAVSQTIKVVKAVVDNYSNRKEMKLDAVRIELAREMHHSIKERNRMKKRQEENREKNEQVKAQILETKPGTRVTGLDIVKFKLHQEQKGFCPYSGVEIKKERLYEPGYAEVDHIIPYSRCFDDSYSNKVLVLAEENRQKGNRTPYEYFGADEQRWHEFSARVRASVQDFKKRQKLLNTSFGEEQKNEFTQRNLNDTQHITRVVYNYLRNNLEFADSAYAKAPVRAVNGAVTAMLRGRWGIEKMRGNGDLHHCKDAVVIAATSRSMVQRLTNYYKEEERLFMGKTNFVDPATGEVLTRKEFQQRFAPKFPQPWDRFREELEARLDPIDPMEAVTALYLSTYEPEEEIAPVFVSHMPKHTVTGAAHEETIRSRTETGTVVKTALTSLKLDKNGEIDGYYNPQTDPRLYQALVERLRQFDGEGKKAFAEPFYKPKKDGTPGPRVDKVKIERKSSLSVSTGRGVADNGRMVRIDVFRVPDDGYYFVPIYVADTKKGILPSKAVVAGKSPEAWKQMKPEHFLFSLFKGDLIYVESRKGISLALAEKATGEKTIQVKSGLFYFCGADISTGSIGMEIHDRRYTKRGLGIKTLTLIEKCQVDVLGNVSKVRLPETRLEFRGRK

SEQ ID NO: 1580 - protein, 1117 aa, unidentified
  REGION 1..1117: note = Description of Unknown: uncultivated organism with predicted taxonomy: Firmicutes
  REGION 1..1117: note = MG21-70 effector
MKKRKKKKKDKKDCHYTLGLDIGIASIGWAVLGNDEDGKPNRIIDLGVRIFDKAEVENTGESLAAPRRDARSARRRLRRHRHRLERIRYLLVQQGVLTQEEMTHLYDKNDMVSPYQLRTEGLDRLLNAREFSKVLIHLAQRRGYQSNSTAEEAKNEKENGIIKSAILENQQRMERGGYRTIGEMMYRDAAFWETINGIRYHCTRNKAGDYRFTVDRASILSEVSILFEAQRRLGSPWASVEMEDAYTAILSSQRSFDEGPGNDSHGNESPFRKAMSHNVGNCTLIPTELRAARADYTAEYFKLLQDLNHMRLVDNSGSHPLTQQQRAILEEMAFRSANLTYGQLRKKLGLSDEVRFAGLYYGQDTIEKAEKRKWAQMQSYHKIRTALDKVSKDAIQTLTQDQLDAIGEILAGGVSDAKRINSFCLEGIPEEYHKALLPLSISKRAKLSIAAMRKLIPFLQQGMRYDEACKAAGLDFHGADGKVEKLSDFLNEITNPVVRRAVSQTIKVVNAVVRIYGKPDAVRIELAREMSHSFDERNKMKKRQEDGWRKNEQVKAQILETKTGNRVTGLDIVKFKLYQEQKGFCPYSGVEIKKERLYEPGYAEVDHIIPYSRCFDDSYSNKVLVLAEENRQKGNRTPYEYFGADEQRWHEFSARVRASVRDFKKRQKLLNTSFGEEQGKDFIQRNLNDTQHITRVVYNYLRNNLEFADSAYAKAPVRAVNGAVTAMLRGRWGIEKMRGDGDLHHCKDAVVIAATSDSMIKDLTKYYQEEEQLFMGKTNFVDPATGEVLTRKEFQQRFAPKFPQPWPRFREELEARLDPTNPKEALMALNLSTYEFDPEEEIPPVFVSHMPKHTVTGAAHKETIRGKTETGTVVKTALTSLKLDKNGEIDGYYSPQTDPRIYQALVERLRQFNGKGEKAFAEPFYKPKKDGTPGPRVDKVKIERKSSLSVSTGRGVADNGRMVRMDVFRVPNERKPDDSYYFVPIYVADTKKGILPSKAVVAHKSPENWKQMKPEHFLFSLFKGDLIYVENSKGISLALAKEAVGEKTIQVKSGLFYFCGADISDGSIKIETHDRCYYKKSLGLKELDTVEKRQVEVLGEVRKVKLPEKRLEFRGRK

SEQ ID NO: 1581 - protein, 1107 aa, unidentified; identical to SEQ ID NO: 1534
  REGION 1..1107: note = Description of Unknown: uncultivated organism with predicted taxonomy: Clostridiales
  REGION 1..1107: note = MG21-71 effector

SEQ ID NO: 1582 - protein, 977 aa, unidentified
  REGION 1..977: note = Description of Unknown: uncultivated organism
  REGION 1..977: note = MG21-72 effector
VLIHLAQRRGYQSNSTAEEAKNEKENGIIKSAILENQQRMERGGYRTIGEMMYRDAAFWETINGIRYHCTRNKAGDYRFTVDRASILSEVSILFEAQRRLGSPWASVEMEDAYTAILSGQRSFDEGPGNDSHGNESPFRKAMSHNVGNCTLIPTELRAARADYTAEYFKLLQDLNHMRLVDNSGSHPLTQQQRAILEEMAFRSANLTYGQLRKKLGLSDEVRFAGLYYGEDTIEKAEKRKWPQMQSYHKIRTALDKVSKNAIRTLTQDQLDAIGEILAGGVSDAKRINSFCLEGIPEEYHKALLPLSISKRAKLSIAAMRKLIPFLQQGMRYDEACKAAGLDFHGADGKVEKLSDFLNEITNPVVRRAVSQTIKVVKAVVDTYSKREEMKLDAVRIELAREMHHSIKERNRMKKRQEENREKNEQVKAQILETKPGTRVTGLDIVKFKLYQEQKGFCPYSGVEIKKERLYEPGYAEVDHIIPYSRCFDDSYSNKVLVLAEENRQKGNRTPYEYFGADEQRWHEFSARVRASVRDFKKRQKLLNTSFGEEQGKDFIQRNLNDTQHITRVVYNYLRNNLEFADSAYAKAPVQAVNGAVTAMLRGRWGIEKMRGDGDLHHCKDAVVIAATSDSMIKDLTKYYQEEEQLFMGKTNFVDPATGEVLTRKEFQQRFAPKFPQPWPRFREELEARLDPTNPKEALMALNLSTYEFDPEEEIPPVFVSHMPKHTVTGAAHKETIRGKTETGTVVKTALTSLKLDKNGEIDGYYNPQTDPRLYQALVERLRQFDGEGKKAFAEPFYKPKKDGTPGPRVDKVKIAEKASLSVSTGRGVADNGEMIRMDVFRVPNERKPDDSYYFVPIYVADTKKGILPWKQMKPEHFLFSIFKGDLIYVESKKEISLALAKEAVGEKTIQVKSGLFYFCGANISNGSIEIETHDRRYGKEGLGIKKLKVFEKRQVEVLGEVKKVKLPEKRLEFRGRK

SEQ ID NO: 1583 - protein, 1100 aa, unidentified
  REGION 1..1100: note = Description of Unknown: uncultivated organism with predicted taxonomy: Clostridiales
  REGION 1..1100: note = MG21-73 effector
MSEFHYALGLDIGIGSVGWAVLRNQPNGEPDRIQDLGVRIFDKAEQPKTGASLAAPRRDARSARRRLRRHRHRLERIRYLMEQRGMMSVSDIQAMYAAGGFQKSPYQLRAEALDRPLSKEEAVRVLIHLAQRRGYKSNSTAEAAKDEKETGKVKTAIEENRRCMAEHGYRTVGEMMYRDERFWQSNPDGTRYQQTRNKTDDYRFTVERSAIVDEAKQIFAAQRKLGADWSSEDLEAAYLSILEGQRSFDEGPGGESPFRGGIGDKVGFCTFEPDQQRAAKATYTFEYFKLLQDLNRMRLTGMGMPPEPLDDEQREVLKSAALRSASLSYGQIRKKLNLDDDVFFNDLYYGEKTKEEAEKRKWPQMQSYHKMRTALDKVGKDTIGTLTEEQLNAIATILTECKSDAKRIASLRMAGIPVQFDEALLPLSFSKYGSLSVQAMQKLIPLLEQGMRYDEACTQIYGDHRGLHSEQRKNRLSLTDMDEITNPVVRRAVSQTIKVINAIVRTYGPPDVVRIELAREMSRNFDERRKAEKRQDENRAANERAKEQIAEYKGDHATGLDIVKFKLYQEQDGVCLYSGKNLDPSRLFEPGYADVDHIVPYSRCFDDSYQNKVLVLASENRQKGNLLPYEYFGYDEVRWHEYEVRVENLIRNYRKRQKLLKRQLSEEESAGFIDRNLKDTQYITRSIYNLIRNNLVFAESNYKKRPVQTVNGAVTSMLRNRWGVQKIREDGDLHHCLDAAVIAATTPGLVQRLTEHSKRRETLEKAPAGYVDPATGELLELPQEARRDLFPKPWERFRQELEARLDPIDPRHQIDLLKLETYESDEEIKPVFASRMPNHKVTGAAHAETIRSSKGGDGFTVTKTPLTNLKLNKFGEIEGYYNPASDTLLYNALLSRLKDFGGDGAKAFAQPFYKPKKDGTPGPRVDKVKICEKATIGLPVRNGIAANGSMIRIDVFYVEDDGYYFVPIYVADTKREKLPNKAAVAMKPYNLWKEMKDENFVFSLYPGDLVRIQSRKGIKLNLAKGGTGEKEIVRQDGMYYYRSAGIAVAQIFVETHDRRYLQPSLGIKTLQSIEKYQVDVLGNYQKVDLPEKRMTFSKEG

SEQ ID NO: 1584 - protein, 1097 aa, unidentified
  REGION 1..1097: note = Description of Unknown: uncultivated organism with predicted taxonomy: Firmicutes
  REGION 1..1097: note = MG21-74 effector
MNMESKHYTLGLDIGIASIGWAVLNNNVDGTPDRIIDLGVRLFESAEVQNTGESLAAPRRNARSARRRLRRHRHRLERIRYLLVQQGVLTQEEMTHLYDKCSMLSPYQLRTEGLDRILNAQEFSRVLIHLGQRRGYLSNSTAEEAKNEKENGVIKSAILENQQRMEHGGYRTIGEMMYRDAAFWETINGIRYHCTRNKAGNYHFTVDRASILSEVHILFEAQRRLGSPWASQETEDTYAAILSSQRSFDEGPGGDSPFRKGISERVGNCTLIPTELRAAKADETFEYFKLLQDLNHMRLVDSNGSHPLTQQQRALLEAAAFRTANLTYGQLRKKLGISDEVRFAGLYYGQDSIEKAEKRKWAQMQSYHKIRTALDKVSKDAISMLTQDQLDAIGEIVTAYKADAARIEHLQAAGIPKEYHNALLSLSFSKYGKLSCCAMRKLIPFLQQGMRYDEACKAAGMNFHGANGNVEKLSDFLDEITNPVVRRAVSQTIKVVNAVVRTYGNPDAVRIELAREMSHSFDERNKIKKRQEDGRRKNEQIKAQILETKAGHRVTGLDIVKFKLFQEQDGVCPYSGKALDVQRLYEPGYADVDHIIPYSRCFDDSYSNKVLVLASENRQKGNCTPYEYFGADERRWHEFSVRVGASVRDFKKRQKLLNTSFGEEQGKEFIQRNLNDTQHITRVVYNYLRNNLSFADSTYANAPVQAVSGTVTATLRGRWGIEKMREDGDLHHCKDAVVIAATSPSMIQRLSNYYKEEERLFMGKTHFVDPETGEVLTRKAFQQRFAPKFPQPWDRFREELEARLDPVNPMDAVMALHLSTYEPDEDITPVFVSHMPKHTVTGAAHEETIRGKTETGTVAKTALTALKLDKHGEIEGYYNPQTDPRLYQALVERLKQFGGDGAKAFVEPFYKPKKDGTPGPRVDKVKIAKKASLSVSTGRGVADNGNMVRIDVFHVPDDGYYFVPIYVADTKKAALPSKAVVAHKLPEAWKQMKPEHFLFSLFKGDLIQLENRKGISLLLTKEAIGEKTIQVKSGLFYFCGADISNGSIEIETHDRRYGKKSLGLKTLTAIEKYQVDVLGNVNKVKLPEKRLEFRGRK

SEQ ID NO: 1585 - protein, 1127 aa, unidentified
  REGION 1..1127: note = Description of Unknown: uncultivated organism with predicted taxonomy: Clostridiales
  REGION 1..1127: note = MG21-75 effector
MNYRIGLDLGIASVGWAVLEDDYTGKPKRIVKLGARIFDSAENPKDGSSLALNRRETRETRRRLRRRNHRIKRTKNLLEKYNIMTTKEIENMYATYKFQFNPYELRVKGLDEKLTNSELSRILISFVKRRGYKSNSKSEETNDKEMGKLLTATKENELLMKEKGYRTVGEMYLKDEKFKMQMPDGRVLLKVRNTTDDYKNTPLRKLLLDETKQILNKQKELNVNITSDFIDEYINIFTSQRNFDDGPGQPSIYAGNQIEKMLGKCTFEKEENRAAKATYTFEYFKLLQDINHIKIEKHIINETGKKEVLKRPLTEDERNIIINLAKAKVTLTYASLRTALNLEGNERFNMIHYKATNVFSDEINKKAEKERKFKEFESYHKMRVAMDKAEKNYILKLSTDELDVIGTVLTLYKNDNKRIEKLAQLNLPENIINEILKLSFSKVGNLSIKAMKKIIPYLEKGYTYDKAVNEVYEDFRGVVNTEKKKKIALRDLEQELSNPVVKRSVSQAIKVLNAITRTYGEPDVINVELARELSKNFADRQNIKKNQENNMQSNEKAKEDILKLGKSNPTGQDIVKYKLWKEQDGICVYSGKRISIEDLFTEAVDVDHIIPYSMCFDDTYKNKVLVLSSENRQKGNRIPYQYMQEKGRDLDEYEIRVNNIIKNYSKKQRLLKQKFTREDANEWKDRNICDTQYISRLMYNLIKNHVQFSNNENFERKVFTVNGQITSHIRKRLGINKIRENGDEHHAIDAAIIATVSQGMIQRITKYYQYIDGRYEKNSGEYIDIETGEIITKEQYEAENGSNFPEPWPKFRKELDIRTTCKTKARMEECLLTEKIFYDDYDDVKPIFISRMPRRKITGQAHLDTIRGLRKSDEGLKTLTKTELTKLKLDKNGEIERYPESQKQDDKLLYNALVEQLRKFGGNGTEAFKKPFYKPKSDGTPGPLVKKVKLEDKTTLAVELNNGKAIAANGDMIRIDVFKVEGEGYYFVPIYVSDTIKNKLPNKASVASKTYAEWKEMQDKDFIFSLYPRDLFYVKSKNKIKLTSINKQDKESLDTNELFAYYVNADISTAAIACINHNGEYERRGLGIKRLQEFKKYEVDVLGNYHEVKLPEKRQDFSNLKKGGSLK

SEQ ID NO: 1586 - protein, 1100 aa, unidentified
  REGION 1..1100: note = Description of Unknown: uncultivated organism with predicted taxonomy: Clostridiales bacterium 42_27
  REGION 1..1100: note = MG21-76 effector
MSEFHYALGLDIGIGSVGWAVLRNQPNGEPDRIQDLGVRIFDKAEQPKTGASLAAPRRDARSARRRLRRHRHRLERIRYLMEQRGIMPVADIQAMYAAGGFPKSPYQLRAEALDRPLTKEEAVRVLIHLAQRRGYKSNSTAEAAKDEKETGKVKTAIEENRRCMAEYGYRTVGEMMYRDERFWQKHPDGTHYHQTRNKAEEYRFTVERAAIVDEVRQIFAAQRRLGTVWMDEDMETAYLSILESQRSFDEGPGGDSPFSGGIGERVGACTFEPDEKRAAKATYTFEYFKLLQDLSRMRLTGMGMPPEPLDAAQREALKSAALRSASLSYGQIRKKLNLDDDVFFHGLYYGEKTKEEAEKRKWPQMQSYHKMRTALDKVGKGAIGTLTEEQLNAVATILTECKSDAKRIAALREAGIPPQFDEALLPLSFSKYGSLSVQAMQKLIPLLEEGLRYDEACTRVYGDHRGLHPEQRKNRLSLTDMDEITNPVVRRAVSQTIKVINAVVRTYGPPDVVRIELAREMSRTFDERRKMEKRQDDNRAANERAKDQIAEYKGDHATGLDIVKFKLYQEQDGVCLYSGQNLDIARLFEPGYADVDHIIPYSRCFDDSYQNKVLVLASENRQKGNRLPYEYFGQDEARWHGYEVRVENLIHNYRKRQKLLKRRLTEEESSGFIDRNLKDTQYITRAVYNLIRDHLAFAESNYRKKPVQAVNGAVTAMLRGRWGVQKIREDGDLHHCLDAAVIAATTPGLVQRLTAYNKHRETWERSPAGYVDPATGEMLELPQEARRDPFPKPWERFRQELEARLDPIDPRHQIDLLKLETYESDEEIKPVFVSRMPNHKVTGAAHAETIRSSKGGYGFTVTKTPLTNLKLNKFGEIEGYYNPASDTLLYDALLARLKDFGGDGAKAFAQPFYKPKKDGSPGPRVDKVKICEKATVGLPVRDGIAANGSMVRIDVFYVEGDGYYFVPIYVADTKKESLPNKAAVAMKPYNLWKKMKDENFVFSLYPGDLVRIQSRKGIKLNLAKGGTGEKEIVRQEGMYYYRSAGIAVAQISVETHDRRYLQPSLGIKTLQSIEKYQVDVLGNYYKVDLPEKRMTFSKEG

SEQ ID NO: 1587 - protein, 1098 aa, unidentified
  REGION 1..1098: note = Description of Unknown: uncultivated organism with predicted taxonomy: Clostridiales
  REGION 1..1098: note = MG21-77 effector
LSLRYTLGLDIGIASVGWAVLEDNIDGEPIKIERLGVRIFDKAEQPKTGASLAEPRREARGQRRTIRRRRHRKDRIKQLIQQNGIMTRVEMAEMFEHSQFETSVYELRVQALERALTKQEFVRVLIHLAQRRGYKSNSKSEEAKDKENGKVKIAISENKQCMEENGYRTIGEMLLKDDRFWECNPDGTKIFVPHNHPDDYRTTVERSMVEDEIRLIFSRQHALGVSYATSEFEEAYLEIWGSQRNFDEGPGAKSPYGGNMIEKMLGHCTFEKDEPRAAKGSYSAEYFRLLQDVNHLRLVKNNGESNALTAEQKQIYIDLVMKSATASYAQLRKKLELSNDVSFNMLRYGSDEIGKVERKKLGHMKFYHEMRKALNTVQKDAISTVSWEQRDEIARILLCYKSDDKRKAQLEKLDIPHEFIPALLTLSTSKTAHLSAKALRKLIPYLEKDMTYAEACKEVYGEHKSSITKKNKLSLFDIEPINNPVVRRAVSQTIRVINAVVREYGAPEVVRVELAREMGKPYDVRTQITKKQEANAKKNEEVKQKIREIKGLEPTGQDIVKFKLFQDQNGVCLYSGQSLDITRLFEAGYVDVDHIIPYSISFDDSYTNKVLVRSPENRQKGNRIPADYFKSDPARWQRFETLVNTRVHNWKKKRNLLTQALSEEQKNGFKQRNLVDTQYIARVIYNLINDHLQFAETGKYDKKRRTQAVNGAITAHVRKRLGIQKIREDGDLHHAVDAAVVACVSPGMIQKITQYTKHRECIRKTKEGYLDTETGELMTREAYDAKYSPRFPAPWERFRQELEARLSDNPAEEIARLHLATYDSEEEIKQVFVSRKQTHKISGAAHEATIRSAKKPGGSISKKPLTSLSLNKKTGEIEKYYAPESDRLLYEALKKRLKEFDGNAEKAFAEPFYKPKRDGTRGPLVKKVKIYEKKTITVPVGGGNADNGSMIRVDVFYIEGDGYYYVPIYITDVVKDELPNRAVVTQKSHGEWKVMDDKDFLFSMYPHDLIYVERKEAFTLDAPKNSSLDPTISKTKGFFYYRSFDSGTGSFKIYTHDRSYSKKSLGGKTLSCLKKYTVDVLGNYSEVSLPEKRKPLRG

SEQ ID NO: 1588 - protein, 1100 aa, unidentified
  REGION 1..1100: note = Description of Unknown: uncultivated organism with predicted taxonomy: Clostridiales bacterium 42_27
  REGION 1..1100: note = MG21-78 effector
MSEFHYALGLDIGIGSVGWAVLRNQPNGEPDRIQDLGVRIFDKAEQPKTGASLAAPRRDARSARRRLRRHRHRLERIRYLMEQRGIMPVADIQAMYAAGGFQKSPYQLRAEALDRPLTKEEAVRVLIHLAQRRGYKSNSTAEAAKDEKETGKVKTAIEENRRCMAEYGYRTVGEMMYRDERFWQKHPDGTHYHQTRNKAEEYRFTVERAAIVDEVRQIFAAQRRLGTVWMDEDMETAYLSILESQRSFDEGPGGDSPFSGGIGERVGACTFEPDEKRAAKATYTFEYFKLLQDLSRMRLTGMGMPPEPLDAAQREVLKSAALRSASLSYGQIRKKLNLDDDVFFHGLYYGEKTKEEAEKRKWPQMQSYHKMRTALDKVGKGAIGTLTEEQLNAVATILTECKSDAKRIAALREAGIPPQFDEALLPLSFSKYGSLSVQAMQKLIPLLEEGLRYDEACTRVYGDHRGLHPEQRKNRLSLTDMDEITNPVVRRAVSQTIKVINAVVRTYGPPDVVRIELAREMSRTFDERRKMEKRQDDNRAANERAKDQIAEYKGDHATGLDIVKFKLYQEQDGVCLYSGQNLDIARLFEPGYADVDHIIPYSRCFDDSYQNKVLVLASENRQKGNRLPYEYFGQDEARWHGYEVRVENLIHNYRKRQKLLKRRLTEEESSGFIDRNLKDTQYITRAVYNLIRDHLAFAESNYRKKPVQAVNGAVTAMLRGRWGVQKIREDGDLHHCLDAAVIAATTPGLVQRLTAYNKHRETWERSPAGYVDPATGEMLELPQEARRDPFPKPWERFRQELEARLDPIDPRHQIDLLKLETYESDEEIKPVFVSRMPNHKVTGAAHAETIRSSKGGYGFTVTKTPLTNLKLNKFGEIEGYYNPASDTLLYDALLARLKDFGGDGAKAFAQPFYKPKKDGSPGPRVDKVKICEKATVGLPVRDGIAANGSMVRIDVFYVEGDGYYFVPIYVADTKKESLPNKAAVAMKPYNLWKKMKDENFVFSLYPGDLVRIQSRKGIKLNLAKGGTGEKEIVRQEGMYYYRSAGIAVAQISVETHDRRYLQPSLGIKTLQSIEKYQVDVLGNYYKVDLPEKRMTFSKEG

SEQ ID NO: 1589 - protein, 1100 aa, unidentified
  REGION 1..1100: note = Description of Unknown: uncultivated organism with predicted taxonomy: Clostridiales
  REGION 1..1100: note = MG21-79 effector
MSEFHYALGLDIGIGSVGWAVLRNQPNGEPDRIQDLGVRIFDKAEQPKTGASLAAPRRDARSARRRLRRHRHRLERIRYLMEQRGMMSVSDIQAMYAAGGFQKSPYQLRAEALDRPLSKEEAVRVLIHLAQRRGYKSNSTAEAAKDEKETGKVKTAIEENRRCMAEHGYRTVGEMMFRDERFWQKHPDGTRYHQTRNKAEDYRFTVERAAIVDEVRQIFAAQRRLGVVWMDEDMETAYLSVLESQRSFDEGPGGDSPFSGGIGERVGACTFEPDEKRAAKATYTFEYFKLLQDLNRMRLTGMGMPPEPLDDEQREVLKSAALRSASLSYGQIRKKLNLDDDVFFNNLYYGEKTKEEAEKRKWPQMQSYHKLRTALDKVGKGAIGTLTEEQLNAVATILTECKSDAKRIAALREAGIPPQFDEALLPLSFSKYGSLSVRAMQKLIPLLEEGLRYDEACTRVYGDHRGLRSGQRTNRLSLKDMEEITNPVVRRAVSQTIKVINAVVRTYGPPDVVRIELAREMSRTFDERRKMEKRQDDNRAANERAKDQISEYKGDHATGLDIVKFKLYREQDGVCLYSGQNLDIARLFEPGYADVDHIIPYSRCFDDSYQNKVLVLASENRQKGNRLPYEYFGQDEARWHGYEVRVENLIHNYRKRQKLLKRRLTEEESTGFIDRNLKDTQYITRTVYNLIRNHLAFAESAYRKKPVQAVNGAVTAMLRGRWGVQKIREDSDLHHCLDAAVIAATTPGLVQRLTAYNKHRETWERPPAGYVDPATGELIELPQEARRDPFPKPWERFRQELEARLDPIDPRHQIDLLKLETYESDEEIKPVFVSRMPNHKVTGAAHAETIRSSKGGDGFTVTKTPLTNLKLNKFGEIEGYYNPASDTLLYDALLARLKDFGGDGAKAFAQPFYKPKKDGSPGPRVDKVKIREKATVGLPVRDGIAANGSMVRIDVFYVEDDGYYFVPIYVADTKKESLPNKAVVAYKAYSEWKEMKDENFIFSLYPRDLVCIQSRKGIKLNLAKGGTGEKEIVRQEGMYYYRAAGITVGAIQIETHDRRYLQPSLGIKTLQSIEKYQVDVLGNYYKVDLPEKRMTFSKEG

SEQ ID NO: 1590 - protein, 1100 aa, unidentified
  REGION 1..1100: note = Description of Unknown: uncultivated organism with predicted taxonomy: Clostridiales
  REGION 1..1100: note = MG21-80 effector
MTLQSIRYTLGLDIGIASVGWAVLRNGLDGEPYKIENLGVRIFDKAEVPKTGASLAAPRREARSSRRVVRRRRHRKERIKYLIEQEGIMTQTEMMQLFQNSSFEKSVYEIRVEALDRLLTREEAVRLLIHFAQRRGYKSNSKAEEAKDNENGVIKQAISQNQQSMKEHGYRTFGEMLLMDDRFYYTQPDGARIFIPHNKASDYKVTAERGMLADELHMIFAAQRSLGSLWFSDPFEIAYMDIWSSQRSFDKGPGGDSPYSGNQVEKNWGKCTFEKDKLRAPKASYSAEYFRLLQDVNHLRIVSLDGASFPLNQEQRDTVVVAARKSSSLTYAQLRKKLKLSDDQYFNALYYGDKTTAEVEKKKFGHLQFYRQLRTALDKVEKGAADTLTWEQRDEIARILTVYKADDRRTDELQKAGIPEKYIDALLPLSPTKAMHLSVTAIKKIIPYLEAGMPYSDALSKAYGNQTNASTSSKKHKLSLNDIEEITNPVVRRAVSQSIKVINAIVRQYGAPERVRIELAREMGKNFKDRRMIETRQTDNAAKNERIKAQISEYKSDHITGQDIVKFKLFKEQDGICLYSGKSLDIARLFEPGYVDIDHIIPYSISFDDSYNNKVLVQSSENRQKGNRIPYAYFGQNSDRWEKYETLVNNTVRSYRKRKNLLLKSLSEAQIDGFKQRNLQDTQYLSKVVFRLIEDHLQFAKTAPGKKHTQPVNGAITAQVRKRLGIEKIREDGDLHHAMDAAVIACITPGMIQRITKYAQNHERFYATAKGYVDIKTGEVLTRAQYEAMDDIRFPEPWAGFRLELEARVSDHPQEAIAQLKLPHYENSEEIRPIFVSRMPNHKVTGAAHLETIRSKKGGAGSTVTKTALTELKLGKDGEIAGYCRKEDDPLLYEALKARLKAFGGDGKKAFAEPFHKPKHNGEPGPIVNKVKIQESATLTVPVNHGVAANGSMVRLDVFYVDGDGYYFVPIYTADIVKPKLPNRAVVAGKKASEWKMIDDNHFVFSLYPKDLLRIRSNKGIKLKAVNKNADLQEYSANDCLCYYVGFDIATGAFTVESHDRRLNRRGLGGKTLLSIEKYQVDVLGNYFPVALPEKRMKFR

SEQ ID NO: 1591 - protein, 1100 aa, unidentified
  REGION 1..1100: note = Description of Unknown: uncultivated organism with predicted taxonomy: Clostridiales
  REGION 1..1100: note = MG21-81 effector
MSDFHYALGLDIGIGSVGWAVLRNQPNGEPDRIQDLGVRIFDKAEQPKTGASLAAPRRDARSARRRLRRHRHRLERIRYLMEQHDIMPVSDIQAMYAAGGFEKSPYQLRAEALDRPLSKEELVRVLIHLAQRRGYRSNSTAEAAKNEKETGKVKSAIEENRACMEQHGYRTVGEMMFRDERFWQKHPDGTRCHQTRNKAEDYRFTVERTAIVDEAKQIFTAQRRFGAGWMDDGLEAAYLAVLESQRSFDEGPGGDSPFHGGIGERVGFCTFEPDEQRAAKATYTFEYFKLLQDLNHMRLAGNGTAPQPLNAQQREILKAAALQSASLSYGQIRKKLALDENVFFHHLYYGDKPKEEAEKRKWPQMQSYHKMRTALDKVGKGTINTLTETQLNAIATILTQYKSDARRIEALREAGIPAQFDDALLPLSFSKYGNLSVTAMQKLIPLLEQGMRYDEACTQIYGDHRGLHPEQRKNRLSLRDMREITNPVVRRAVSQTIKVVNAVVRTYGPPDVVRIELAREMSQNFEERRKTEKRQDENRTANEKAKEQIAEYKGDRATGLDIVKFKLYREQDGVCLYSGRNLDLSRLFEPGYVDVDHIIPYSRCFDDSYQNKVLVLASENRQKGNRLPYEYFGQDETRWHEYEVRVENLIRNYRKRQKLLKKRLTEEESAGFIDRNLKDTQYITRSIYNLLRDNLAFAESDYRKKPVQTVNGAVTSMLRGRWGVQKIREDGDLHHCMDAAVIAAASPGLVQRLTEYSKRREAFEEVSRGYVDPATGELVELPEQLRRDPFPKPWERFRQELEARLDPIDPRHQIDLLKLATYESDEKIRPVFVSRMPNHKVTGAAHAETIRSSKMGDGYTVTKTPLANLKLNKFGEIEGYYNPASDTLLYDALLARLKDFGGDGAKAFAEPFYKPKKDGTPGPRVDKVKICEKATTGLPVRDGIAANGSMVRIDVFYVEDDGYYFVPIYVADTKKAELPNKAVVAYKAYSDWKEMIDENFLFSLYPGDLVRIQSRKGIKLNIAKGGTGEKEIVRQDGMYYYQGANIATGAIALATHDRRYLQSGLGLKTLQSIEKYQVDVLGNYYKVDLPEKRMKFSEEG

SEQ ID NO: 1592 - protein, 1100 aa, unidentified
  REGION 1..1100: note = Description of Unknown: uncultivated organism with predicted taxonomy: Clostridiales bacterium 42_27
  REGION 1..1100: note = MG21-82 effector
MSEFHYALGLDIGIGSVGWAVLRNQPNGEPDRIQDLGVRIFDKAEQPKTGASLAAPRRDARSARRRLRRHRHRLERIRYLMEQHGIMPVADIQAMYAASGFQKSPYQLRAEALDRPLTKEEAVRVLIHLAQRRGYKSNSTAEAAKDEKETGKVKTAIEENRRCMAEHSYRTVGEMMYRDERFWQKHPDGTRYHQTRNKAEDYRFTVERAAIVDEVRQIFAAQRRLGTVWMDEDMETAYLSILESQRSFDEGPGGDSPFSGGIGERVGACTFEPDEKRAAKATYTFEYFKLLQDLNRMRLTGMGMPPEPLDDEQREVLKSAALRSASLSYGQIRKKLNLDDDVFFHGLYYGEKTKEEAEKRKWPQMQSYHKMRTALDKVGKGAIGTLTEEQLNAVATILTECKSDAKRIAALREAGIPPQFDEALLPLSFSKYGSLSVQAMQKLIPLLEEGLRYDEACTRVYGDHRGLHPEQRKNRLSLTDMDEITNPVVRRAVSQTIKVINAVVRTYGPPDVVRIELAREMSRTFDERRKMEKRQDDNRAANERAKDQIAEYKGDHATGLDIVKFKLYQEQDGVCLYSGQNLDIARLFEPGYADVDHIIPYSRCFDDSYQNKVLVLASENRQKGNRLPYEYFGQDEARWHGYEVRVENLIHNYRKRQKLLKRRLTEEESSGFIDRNLKDTQYITRAVYNLIRDHLAFAESNYRKKPVQAVNGAVTAMLRGRWGVQKIREDGDLHHCLDAAVIAATTPGLVQRLTAYNKHRETWERSPAGYVDPATGEMLELPQEARRDPFPKPWERFRQELEARLDPIDPRHQIDLLKLETYESDEEIKPVFVSRMPNHKVTGAAHAETIRSSKGGYGFTVTKTPLTNLKLNKFGEIEGYYNPASDTLLYDALLARLKDFGGDGAKAFAQPFYKPKKDGSPGPRVDKVKICEKATVGLPVRDGIAANGSMVRIDVFYVEGDGYYFVPIYVADTKKESLPNKAAVAMKPYNLWKKMKDENFVFSLYPGDLVRIQSRKGIKLNLAKGGTGEKEIVRQEGMYYYRSAGIAVAQISVETHDRRYLQPSLGIKTLQSIEKYQVDVLGNYYKVDLPEKRMTFSKEG

SEQ ID NO: 1593 - protein, 878 aa, unidentified
  REGION 1..878: note = Description of Unknown: uncultivated organism with predicted taxonomy: Clostridiales bacterium 42_27
  REGION 1..878: note = MG21-83 effector
MSEFHYALGLDIGIGSVGWAVLRNQPNGEPDRIQDLGVRIFDKAEQPKTGASLAAPRRDARSARRRLRRHRHRLERIRYLMEQRGIMPVADIQAMYAAGGFPKSPYQLRAEALDRPLTKEEAVRVLIHLAQRRGYKSNSTAEAAKDEKETGKVKTAIEENRRCMAEYGYRTVGEMMYRDERFWQKHPDGTHYHQTRNKAEDYQFTVERAAIVDEVRQIFAAQRRLGTVWMDEDMETAYLSILESQRSFDEGPGGDSPFSGGIGERVGACTFEPDEKRAAKATYTFEYFKLLQDLSRMRLTGMGMPPEPLDAAQREALKSAALRSASLSYGQIRKKLNLDDDVFFHGLYYGEKTKEEAEKRKWPQMQSYHKMRTALDKVGKGAIGTLTEEQLNAVATILTECKSDAKRIAALREAGIPPQFDEALLPLSFSKYGSLSVQAMQKLIPLLEEGLRYDEACTRVYGDHRGLHPEQRKNRLSLTDMDEITNPVVRRAVSQTIKVINAVVRTYGPPDVVRIELAREMSRTFDERRKMEKRQDDNRAANERAKDQIAEYKGDHATGLDIVKFKLYQEQDGVCLYSGQNLDIARLFEPGYADVDHIIPYSRCFDDSYQNKVLVLASENRQKGNRLPYEYFGQDEARWHGYEVRVENLIHNYRKRQKLLKRRLTEEESSGFIDRNLKDTQYITRAVYNLIRDHLAFAESNYRKKPVQAVNGAVTAMLRGRWGVQKIREDGDLHHCLDAAVIAATTPGLVQRLTAYNKHRETWERSPAGYVDPATGEMLELPQEARRDPFPKPWERFRQELEARLDPIDPRHQIDLLKLETYESDEEIKPVFVSRMPNHKVTGAAHAETIRSSKGGYGFTVTKTPLTNLKLNKFGEIE

SEQ ID NO: 1594 - protein, 1100 aa, unidentified
  REGION 1..1100: note = Description of Unknown: uncultivated organism with predicted taxonomy: Clostridiales
  REGION 1..1100: note = MG21-84 effector
MSEFHYALGLDIGIGSVGWAVLRNQPNGEPDRIQDLGVRIFDKAEQPKTGASLAAPRRDARSARRRLRRHRHRLERIRYMMEQRGMMSVSDIQAMYAAGGFQKSPYQLRAEALDRPLSKEEAVRVLIHLAQRRGYKSNSTAEAAKDEKETGKVKTAIEENRRCMAEHGYRTVGEMMYRDERFWQSNPDGTRYQQTRNKTDDYRFTVERSAIVDEAKQIFAAQRKLGADWSSEDLEAAYLSILEGQRSFDEGPGGESPFRGGIGDKVGFCTFEPDQQRAAKATYTFEYFKLLQDLNRMRLTGMGMPPEPLDDEQREVLKSAALRSASLSYGQIRKKLNLDDDVFFNDLYYGEKTKEEAEKRKWPQMQSYHKMRTALDKVGKDTIGTLSEEQLNAIATILTECKSDAKRIAALRMAGIPVQFDEALLPLSFSKYGSLSVQAMQKLIPLLEQGMRYDEACTQIYGDHRGLHSEQRKNRLSLTDMDEITNPVVRRAVSQTIKVINAIVRTYGPPDVVRIELAREMSRNFDERRKAEKRQDENRAANERAKEQIAEYKGDHATGLDIVKFKLYQEQDGVCLYSGKNLDPSRLFEPGYADVDHIVPYSRCFDDSYQNKVLVLASENRQKGNRLPYEYFGYDEVRWHEYEVRVENLIRNYRKRQKLLKRQLSEEESAGFIDRNLKDTQYITRSIYNLIRNNLVFAESNYKKRPVQTVNGAVTSMLRNRWGVQKIREDGDLHHCLDAAVIAATTPGLVQRLTEHSKRRETLEKAPAGYVDPATGELLELPQEARRDLFPKPWERFRQELEARLDPIDPRHQIDLLKLSTYESDEEIKPVFASRMPNHKVTGAAHAETIRSSKGGDGFTVTKTPLTNLKLNKFGEIEGYYNPASDTLLYNALLSRLKDFGGDGAKAFAQPFYKPKKDGTPGPRVDKVKICEKATIGLPVRNGIAANGSMIRIDVFYVEDDGYYFVPIYVADTKREKLPNKAAVAMKPYNLWKEMKDENFVFSLYPGDLVRIQSRKGIKLNLAKGGTGEKEIVRQDGMYYYRSAGIAVAQIFVETHDRRYLQPSLGIKTLQSIEKYQVDVLGNYQKVDLPEKRMTFSKEG

SEQ ID NO: 1595 - protein, 1138 aa, unidentified
  REGION 1..1138: note = Description of Unknown: uncultivated organism with predicted taxonomy: Clostridiales
  REGION 1..1138: note = MG21-85 effector
LSLRYTLGLDIGIASVGWAVLKNDINGVPIKIEDLGAVAFSAAEPTGKVQKKKSGSKTPAPTLASNLRKIRCPRRTIRRKRHRKDRIKQLIQQNGIMTRVEMAEMFEHSQFETSVYELRVQALERALTKQEFVRVLIHLAQRRGYKSNSESEEAKDKENGKVKIAISENKQCMEKNGYRTIGEMLLNDDRFWEDNHDGTKIFVPHNHPDDYRTTVERSMVEDEIRLIFSRQRALGVPYATSEFEEAYLKIWGGQRNFDDGPGYEIPPKDDGTGGKYSRYGGNMIEKMLGHCTFEKDEPRAAKGSYSAEYFRLLQDVNHLRLVKNNGESSALTAEQKQIYIDLVMESEAASYEEAASYEELREKLGLSNDILFNMLRYGSDEIGKVERKKLGHMKFYHEMRKALNMVQKDAISTVSWEQRDEIARILLCYKSDDKRKAQLEKLDIPQEFILKLLTLSTSKTAHLSVKALRKLIPYLEEGMTYAEACKEVYGEQKISVTKKNKLSLFDIEPINNPVVRRAVAKTIRVINAVVRKYGPPEVVRVELAREMGKSKADRDKIDAEQKANAKRNEELRQQIKKIKGAEPTGQDIVKFKLFQDQNGVCLYSGQNLDITRLFEAGYVEIDHIIPYSISLDNSYANKVLVLKEENQNKGRRTPYEYFGADSKRWQRFETLVNTQVHNWKKKRNLLTQALSEEQKNGFKQRNLVDTQYIARVIYNLINDHLQFAETGKYDKKRRTQAVNGAITAHVRKRLGIQKIREDGDLHHAADAAVVACVSPSMIQKITQYTKHRECIRETPKGYLDTETGELMTREAYDAKYPPRFPAPWERFRQELEARLSDNPAEEIARLHLATYDSEEEIKPVFVSRKPERKTTGAAHKDTIYRKADGGYIDKVPLTKLTLDKKTGEIEKYYAPESDRLLYEALKKRLKEFDGNAKEAFAEPFYKPKRDGTSGPLVKKVKLYEKYNNTVEVKRGDARASNKHIGCARNDSNSMIRVDVFYIEGDGYYYVPIYITDVVKDELPNRAVVTQKSHGEWKVMDDKDFLFSMYPHDLIYVERKEAFTLDALKNSSLDPTISKTKGFFYYRSFDSGTGSFKIYTHDSSYSKKSLGGKTLSCLKKYTVDILGNYSEVSLPEKRKPLRG

SEQ ID NO: 1596 - protein, 1100 aa, unidentified
  REGION 1..1100: note = Description of Unknown: uncultivated organism with predicted taxonomy: Firmicutes
  REGION 1..1100: note = MG21-86 effector
MSDFHYALGLDIGIGSVGWAVLRNRPDGEPDRIQDLGVRIFDKAEQPKTGASLAAPRRDARSARRRLRRHRHRLERIRYLMEQHGIMPVSDIQAMYAAGGFEKSPYQLRAEALDRPLSREELVRVLIHLAQRRGYRSNSTAEAAKNEKETGKVKSAIEENRACMEQHGYRTVGEMMLRDERFWQKHPDGTRCHQTRNKAEDYRFTVERTAIVDEAKQIFTAQRRFGADWMDDGLEAAYLAVLESQRSFDEGPGGDSPFHGGIGERVGFCTFEPDEQRAAKATYTFEYFKLLQDLNHMRLAGNGTAPQPLNAQQREILKAAALQSASLSYGQIRKKLALDENVFFNHLYYGDKPKEEAEKRKWPQMQSYHKMRTALDKVGKGTINTLTETQLNAIATILTQYKSDARRIEALREAGIPAQFDDALLPLSFSKYGNLSVTAMQKLIPLLEQGMRYDEACTQIYGDHRGLHPEQRKNRLSLRDMREITNPVVRRAVSQTIKVVNAVVRTYGPPDVVRIELAREMSQNFEERRKTEKRQDENRTANEKAKEQIAEYKGDRATGLDIVKFKLYREQDGVCLYSGRNLDLSRLFEPGYVDVDHIIPYSRCFDDSYQNKVLVLASENRQKGNRLPYEYFGQDETRWHEYEVRVENLIRNYRKRQKLLKKRLTEEESAGFIDRNLKDTQYITRSIYNLLRDNLAFAESDYRKKPVQTVNGAVTSMLRGRWGVQKIREDGDLHHCMDAAVIAAASPGLVQRLTEYSKRREAFEEVSRGYVDPATGELVELPEQLRRDPFPKPWERFRQELEARLDPIDPRHQIDLLKLATYESDEKIRPVFVSRMPNHKVTGAAHAETIRSSKMGDGYTVTKTPLANLKLNKFGEIEGYYNPASDTLLYDALLARLKDFGGDGAKAFAQPFYKPKKDGTPGPRVDKVKICEKATVGLPVRDGIAANGSMVRIDVFYVEDDGYYFVPIYVADTKKAELPNKAVVAYKAYSDWKEMIDENFLFSLYPGDLVRIQSRKGIKLNIAKGGTGEKEIVRQDGMYYYQGANIATGAIALATHDRRYLQSGLGLKTLQSIEKYQVDVLGNYYKVDLPEKRMKFSEEG

SEQ ID NO: 1597 - protein, 980 aa, unidentified
  REGION 1..980: note = Description of Unknown: uncultivated organism with predicted taxonomy: Clostridiales
  REGION 1..980: note = MG21-87 effector
EAVRVLIHLAQRRGYKSNSTAEAAKDEKETGKVKTAIEENRRCMAEHDYRTVGEMMYRDERFWQSNPDGTRYQQTRNKTDDYRFTVERSAIVDEAKQIFAAQRKLGADWSSEDLEAAYLSILEGQRSFDEGPGGESPFRGGIGDKVGFCTFEPDQQRAAKATYTFEYFKLLQDLNHMRLAGRGMSPQPLNAQQREILKETALRSASLSYGQLRKKLALADDTFFSGLYYGDKSREEAEKRKWPQMQSYHKIRTALDKVGKGTISSLTEEQLNAIASILTQYKSDAKRIEALRMAGIPVQFDEALLPLSFSKYGSLSVQAMQKLIPLLEQGMRYDEACTQIYGDHRGLHSEQRKNRLSLTDMDEITNPVVRRAVSQTIKVINAIVRTYGPPDVVRIELAREMSRNFDERRKAEKRQDENRAANERAKEQIAEYKGDHATGLDIVKFKLYQEQDGVCLYSGKNLDPSRLFEPGYADVDHIVPYSRCFDDSYQNKVLVLASENRQKGNRLPYEYFGYDEVRWHEYEVRVENLIRNYRKRQKLLKRQLSEEESAEFIDRNLKDTQYITRTVYNLIRDHLAFAESAYRKKPVQAVNGAVTSMLRNRWGVQKIREDGDLHHCLDAAVIAATTPGLVQRLTAYSKHRETWERPPAGYVDPATGELIELPQEARRDPFPKPWERFRQELEARLDPIDPRHQIDLLKLETYESDEEIKPVFVSRMPNHKVTGAAHAETIRSSKGGDGFTVTKTPLTNLKLNKFGEIEGYYNPASDTLLYDALLARLKDFGGDGAKAFVQPFYKPKKDGTPGPRVDKVKICEKATVGLPVRDGIAANGSMVRIDVFYVEDDGYYFVPIYVADTKKESLPNKAVVAYKAYSEWKEMKDENFIFSLYPGDLVRIQSRKGIKLNLAKGGTGEKEIVRQEGMYYYRASGITVGAIQIETHDRRYLQPSLGIKTLQSIEKYQVDVLGNYYKVDLPEKRMTFSKEG

SEQ ID NO: 1598 - protein, 1098 aa, unidentified
  REGION 1..1098: note = Description of Unknown: uncultivated organism with predicted taxonomy: Clostridiales
  REGION 1..1098: note = MG21-88 effector
LSLRYTLGLDIGIASVGWAVLENNIDGEPIKIERLGVRIFDKAEQPKTGASLAEPRREARGQRRTIRRRRHRKDRIKQLIQQNGIMTRVEMAEMFEHSQFETSVYELRVQALERALTKQEFVRVLIHLAQRRGYKSNSKSEEAKDKENGKVKIAISENKQCMEENGYRTIGEMLLKDDRFWECNPDGTKIFVPHNHPDDYRTTVERSMVEDEIRLIFSRQHALGVSYATSEFEEAYLEIWGSQRNFDEGPGGKSPYGGNMIEKMLGHCTFEKDEPRAAKGSYSAEYFRLLQDVNHLRLVKNNGESCALTREQKQIYIDLVMKSAAASYAQLRKKLELSNDISFNMLRYGSDEIGKVERKKLGHMKFYHEMRKALNTVQKDAISTVSWEQRDEIARILLCYKSDDKRKAQLEKLDIPHEFIPALLTLSTSKTAHLSAKALRKLIPHLEKGMTYAEACKEVYGEQKSSITKKNKLSLFDIEPINNPVVRRAVSQTIRVINAVVREYGAPEVVRVELAREMGKPYDVRTQMTKKQEANAKRNEELRQQIKKIKGAEPTGQDIVKFKLFQDQNGVCLYSGQNLDITRLFEAGYVDVDHIIPYSISFDDSYTNKVLVRSPENRQKGNRIPADYFKSDPARWQRFETLVNTQVHNWKKKRNLLTQALSEEQKNGFKQRNLVDTQYIARVIYNLINDHLQFAETGKYDKKRRTQAVNGAITAHVRKRLGIQKIREDGDLHHAVDAAVVACVSPGMIQKITQYTKHRECIRKTKEGYLDTETGELMTREAYDAKYSPRFPAPWERFRQELEARLSDNPAEEIARLHLATYDSEEEIKPVFVSRKQTHKISGAAHEATIRSAKKPGGSISKKPLTSLSLNKKTGEIEGYYAPESDRLLYEALKKRLEEFDGNAEKAFAEPFYKPKRDGTRGPLVKKVKIYEKKTITVPVGGGNADNGSMIRVDVFYVEDDGYYYVPIYTADVIKGALPNRAVVAHKSHGEWKVMDDKDFLFSMYPNELLYIESRKGIKLKTKKGSSRQEEIIRKAGLYYFKWLNIAANALFIITHDNGYEQPSLGGKTLSCLKKYTVDALGNYSEVSLPEKRKPLRG

SEQ ID NO: 1599 - protein, 1100 aa, unidentified; identical to SEQ ID NO: 1544
  REGION 1..1100: note = Description of Unknown: uncultivated organism with predicted taxonomy: Clostridiales
  REGION 1..1100: note = MG21-89 effector

SEQ ID NO: 1600 - protein, 1100 aa, unidentified; identical to SEQ ID NO: 1578
  REGION 1..1100: note = Description of Unknown: uncultivated organism with predicted taxonomy: Clostridiales bacterium 42_27
  REGION 1..1100: note = MG21-90 effector

SEQ ID NO: 1601 - protein, 1100 aa, unidentified; identical to SEQ ID NO: 1578
  REGION 1..1100: note = Description of Unknown: uncultivated organism with predicted taxonomy: Clostridiales bacterium 42_27
  REGION 1..1100: note = MG21-91 effector

SEQ ID NO: 1602 - protein, 919 aa, unidentified
  REGION 1..919: note = Description of Unknown: uncultivated organism with predicted taxonomy: Ruminococcaceae bacterium TF06-43
  REGION 1..919: note = MG21-92 effector
MSEFHYALGLDIGIGSVGWAVLRNQPNGEPDRIQDLGVRIFDKAEQPKTGASLAAPRRDARSARRRLRRHRHRLERIRYLMEQRGMMSVSDIQAMYAAGGFQKSPYQLRAEALDRPLSKEEAVRVLIHLAQRRGYKSNSTAEAAKDEKETGKVKTAIEENRRCMAEHGYRTVGEMMYRDERFWQSNPDGTRYQQTRNKTDDYRFTVERSAIVDEAKQIFAAQRKLGADWSSEDLEAAYLSILEGQRSFDEGPGGESPFRGGIGDKVGFCTFEPDQQRAAKATYTFEYFKLLQDLNHMRLAGRGMSPQPLNAQQREILKETALRSASLSYGQLRKKLALADDTFFSGLYYGDKSREEAEKRKWPQMQSYHKIRTALDKVGKGTISSLTEEQLNAIASILTQYKSDAKRIEALRMAGIPVQFDEALLPLSFSKYGSLSVQAMQKLIPLLEQGMRYDEACTQIYGDHRGLHSEQRKNRLSLTDMDEITNPVVRRAVSQTIKVINAIVRTYGPPDVVRIELAREMSRNFDERRKAEKRQDENRAANERAKEQIAEYKGDHATGLDIVKFKLYQEQDGVCLYSGKNLDPSRLFEPGYADVDHIVPYSRCFDDSYQNKVLVLASENRQKGNRLPYEYFGYDEVRWHEYEVRVENLIRNYRKRQKLLKRQLSEEESAEFIDRNLKDTQYITRTVYNLIRDHLAFAESAYRKKPVQAVNGAVTSMLRNRWGVQKIREDGDLHHCLDAAVIAATTPGLVQRLTAYSKHRETWERPPAGYVDPATGELIELPQEARRDPFPKPWERFRQELEARLNPIDPRHQIDLLKLETYESDEEIKPVFASRMPNHKVTGAAHAETIRSSKGGDGFTVTKTPLTNLKLNKFGEIEGYYNPASDTLLYNALLSRLKDFGGDGAKAFAQPFYKPKKDG

SEQ ID NO: 1603 - protein, 1100 aa, unidentified; identical to SEQ ID NO: 1544
  REGION 1..1100: note = Description of Unknown: uncultivated organism with predicted taxonomy: Ruminococcaceae bacterium TF06-43
  REGION 1..1100: note = MG21-93 effector

SEQ ID NO: 1604 - protein, 1100 aa, unidentified
  REGION 1..1100: note = Description of Unknown: uncultivated organism with predicted taxonomy: Clostridiales
  REGION 1..1100: note = MG21-94 effector
MSEFHYALGLDIGIGSVGWAVLRNQPNGEPDRIQDLGVRIFDKAEQPKTGASLAAPRRDARSARRRLRRHRHRLERIRYLMEQRGMMSVSDIQAMYAAGGFQKSPYQLRAEALDRPLSKEEAVRVLIHLAQRRGYKSNSTAEAAKDEKETGKVKTAIEENRRCMAEHGYRTVGEMMYRDERFWQSNPDGTRYQQTRNKTDDYRFTVERSAIVDEAKQIFAAQRKLGADWSSEDLEAAYLSILEGQRSFDEGPGGESPFRGGIGDKVGFCTFEPDQQRAAKATYTFEYFKLLQDLNRMRLTGMGMPPEPLDDEQREVLKSAALRSASLSYGQIRKKLNLDDDVFFNDLYYGEKTKEEAEKRKWPQMQSYHKMRTALDKVGKDTIGTLTEEQLNAIATILTECKSDAKRIAALRMAGIPVQFDEALLPLSFSKYGSLSVQAMQKLIPLLEQGMRYDEACTQIYGDHRGLHSEQRKNRLSLTDMDEITNPVVRRAVSQTIKVINAIVRTYGPPDVVRIELAREMSRNFDERRKAEKRQDENRAANERAKEQIAEYKGDHATGLDIVKFKLYQEQDGVCLYSGKNLDPSRLFEPGYADVDHIVPYSRCFDDSYQNKVLVLASENRQKGNRLPYEYFGYDEVRWHEYEVRVENLIRNYRKRQKLLKRQLSEEESAGFIDRNLKDTQYITRSIYNLIRNNLVFAESNYKKRPVQTVNGAVTSMLRNRWGVQKIREDGDLHHCLDAAVIAATTPGLVQRLTEHSKRRETLEKAPAGYVDPATGELLELPQEARRDLFPKPWERFRQELEARLDPIDPRHQIDLLKLSTYESDEEIKPVFASRMPNHKVTGAAHAETIRSSKGGDGFTVTKTPLTNLKLNKFGEIEGYYNPASDTLLYNALLSRLKDFGGDGAKAFAQPFYKPKKDGTPGPRVDKVKICEKATIGLPVRNGIAANGSMIRIDVFYVEDDGYYFVPIYVADTKREKLPNKAAVAMKPYNLWKEMKDENFVFSLYPGDLVRIQSRKGIKLNLAKGGTGEKEIVRQDGMYYYRSAGIAVAQIFVETHDRRYLQPSLGIKTLQSIEKYQVDVLGNYQKVDLPEKRMTFSKEG

SEQ ID NO: 1605 - protein, 1036 aa, unidentified
  REGION 1..1036: note = Description of Unknown: uncultivated organism with predicted taxonomy: Clostridiales bacterium 42_27
  REGION 1..1036: note = MG21-95 effector
RRLRRHRHRLERIRYLMEQRGIMPVADIQAMYAAGGFQKSPYQLRAEALDRPLTKEEAVRVLIHLAQRRGYKSNSTAEAAKDEKETGKVKTAIEENRRCMAEHGYRTVGEMMYRDERFWQKHPDGTHYHQTRNKAEDYRFTVERAAIVDEVRQIFAAQRRLGTAWMDEYMETAYLSILESQRSFDEGPGGDSPFSGGIGERVGACTFEPDEKRAAKATYTFEYFKLLQDLSRMRLTGMGMPPEPLDAAQREVLKSAALRSASLSYGQIRKKLNLDDDVFFHGLYYGEKTKEEAEKRKWPQMQSYHKMRTALDKVGKGAIGTLTEEQLNAVATILTECKSDAKRIAALREAGIPPQFDEALLPLSFSKYGSLSVQAMQKLIPLLEEGLRYDEACTRVYGDHRGLHPEQRKNRLSLTDMDEITNPVVRRAVSQTIKVINAVVRTYGPPDVVRIELAREMSRTFDERRKMEKRQDDNRAANERAKDQIAEYKGDHATGLDIVKFKLYQEQDGVCLYSGQNLDIARLFEPGYADVDHIIPYSRCFDDSYQNKVLVLASENRQKGNRLPYEYFGQDEARWHGYEVRVENLIHNYRKRQKLLKRRLTEEESSGFIDRNLKDTQYITRAVYNLIRDHLAFAESNYRKKPVQAVNGAVTAMLRGRWGVQKIREDGDLHHCLDAAVIAATTPGLVQRLTAYNKHRETWERSPAGYVDPATGEMIELPQEARRDPFPKPWERFRQELEARLDPIDPRHQIDLLKLETYESDEEIKPVFVSRMPNHKVTGAAHAETIRSSKGGDGFTVTKTPLTNLKLNKFGEIEGYYNPASDTLLYDALLARLKDFGGDGAKAFAQPFYKPKKDGSPGPRVDKVKICEKATVGLPVRDGIAANGSMVRIDVFYVEGDGYYFVPIYVADTKKESLPNKAAVAMKPYNLWKKMKDENFVFSLYPGDLVRIQSRKGIKLNLAKGGTGEKEIVRQEGMYYYRSAGIAVAQISVETHDRRYLQPSLGIKTLQSIEKYQVDVLGNYYKVDLPEKRMTFSKEG

SEQ ID NO: 1606 - protein, 1100 aa, unidentified; identical to SEQ ID NO: 1578
  REGION 1..1100: note = Description of Unknown: uncultivated organism with predicted taxonomy: Clostridiales bacterium 42_27
  REGION 1..1100: note = MG21-96 effector

SEQ ID NO: 1607 - protein, 1128 aa, unidentified
  REGION 1..1128: note = Description of Unknown: uncultivated organism with predicted taxonomy: Clostridium
  REGION 1..1128: note = MG21-97 effector
MNYRIGLDLGIASVGWAILEDDNKGNPKRIVKLGSRIFDAAENPKDGSSLALNRREARNTRRRLRRRNHRIKRTKNLLEKYNIITIKEIENMYATYKFQFNPYELRVKGLDEKLTNSELARVLISFVKRRGYKSNSKAEETSNKEMGKLLVATKENEILMKEKNYRTIGEMYLKDEKFKIQMPDGRVLFKVRNTTDEYKNTPLRKLLLDEIKQILEKQKELNSNITDSFIDEYINIFTSQRNFDDGPSQPSIYAGNQIEKMLGKCTFEKEENRSAKATYTFEYFKLLQDINHIKIEEYHLKENGTREVIKRTLTEEERNIIINLAKTKVTLTYDSLRTALKLTTNERFNMINYKRTDIFNDEENKKVEKDRRIKEFESYHKIRVAMDRIEKNYINKLNSDDLDTIGTVLTLYKNDNKRIEKLKEINLPEDIVNELLKLSFSKVGNLSIKAMKKIIPYLEQGYTYDKAVNEVYEDFRGIINTKKKKKIALRDLEQELSNPVVKRAVSQAIKVLNAITTTYGKPDIINIELARQLSKKFADRQNIKKKQEQNMQNNDKAREEILKLGKNNPTGQDIVKYKLWQEQDGICVYSGKHISIEDLFTEAVDVDHIIPYSMCFDDTYKNKVLVLASENRQKGNRIPYQYLKEKGRNLEEYEVRVNNIIKNYYKKKRLLRQNFTREDATEWKDRNIQDTQYISRLMYNLIKNHVQFSDNENFDRKVFTVNGQITSHVRKRLGINKIRENGDEHHAVDAAVIAIISQGMIQKITKYYQYIDGRYEKNSGEYIDLETGEILTKEQYEKENGINFPEPWPKFRTELDIRTTCQTKERMEECLVAVKIYYENYDDVKPVFISRMPRRKVTGQAHLDTIRGIRKNEEGIKTLTKTELTKLKLDKNGEIEKYPDSQKQDDKLLYKALVDQLRKFGGNGEEAFKRPFYKPKSDGTPGPLVKKVKLEDKTTLAVELNNGKAIAANGDMIRIDVFKVDGEGYYFVPIYVSDTIKSKLPNKACVAAKQYSEWKDMKDENFIFSLYPRDLIYIKSKNKIKLTSINKENKETKEISEMFAYYIKSGISTAAISIINHNGEYEQNSLGIKTLKEFKKFEVDVLGNYHEVKLPEKRQSFKNLKKKGGSLK

SEQ ID NO: 1608 - protein, 1134 aa, unidentified
  REGION 1..1134: note = Description of Unknown: uncultivated organism with predicted taxonomy: Clostridiales
  REGION 1..1134: note = MG21-98 effector
LSLRYTLGLDIGIASVGWAVLKNDINGVPIKIEDLGAVAFSAAEPTGKVQKKKSNSKTPAPTLASNLRKIRCPRRTIRRKRHRKDRIKQLIQQNGIMTRVEMAEMFEHSQFETSVYELRVQALERALTKQELVRVLIHLAQRRGYKSNSKSEEAKDKENGKVKIAISENKQCMEENGYRTIGEMLLNDDRFWEDNHDGTKNFVPHNHPDDYRTTVERSMVEDEIRLIFSRQRALGVPYATSEFEEAYLKIWGGQRNFDDGPGYEIPPKDDGTEGKYSRYGGNMIEKMLGHCTFEKDEPRAAKGSYSAEYFRLLQDVNHLRLVKNNGESSALTAEQKQIYIDLVMKSATASYAKLRKKLDLSNDISFNMLRYGSDEIGKVERKKLGHMKFYHEMRKALNTVQKDAISTVSWEQRDEIARILLCYKSDDKRKAQLEKLDIPREFIPALLTLSTSKTAHLSVKALRKLIPHLEKGMTYAEACKEVYGEQKISVTKKNKLSLFDIEPINNPVVRRAVAKTIRVINAVVRKYGPPEVVRVELAREMGKSKADRDKIDAEQKANAKRNEELRQQIKKIKGAEPTGQDIVKFKLFQEQKGVCLYSGKNIEIDRLFKPEAGYVEIDHIIPYSISLDNSYANKVLVLKEENQNKGRRTPYEYFGADSKRWQRFETLVNTQVHNWKKKRNLLTQALSEEQKNGFKQRNLVDTQYIARVIYNLINDHLQFAETGKYDKKRRTQAVNGAITAHVRKRLGIQKIREDGDLHHAADAAVVACVSPSMIQKITQYTKHRECIRETPKGYLDTETGELMTREAYDAKYSPRFPAPWERFRQELEARLSDNPAEEIARLHLATYDSEEEIKPVFVSRKPKRKTTGAAHKDTIYRKTDGGYIDKVPLTKLTLDKKTGEIEKYYAPESDRLLYEALKKRLEEFDGNAKEAFAEPFYKPKRDGTRGPLVKKVKLYETYNNTVEVKRGDARASNKHIGCARNDSNSMIRVDVFYIEDDGYYYVPIYITDVVKDELPNKAVVQKKLPKDWKEMDDRDFLFSMYPNELLYIESRKGIKLKTKKGSSRQEEIIRKAGLYYFKRLDIASGNLFIITHDHSYEQPSLGGKTLSCLKKYTIDVLGNYSEVSLPEKRKPLRG

SEQ ID NO: 1609 - protein, 1100 aa, unidentified; identical to SEQ ID NO: 1538
  REGION 1..1100: note = Description of Unknown: uncultivated organism with predicted taxonomy: Clostridiales bacterium 42_27
  REGION 1..1100: note = MG21-99 effector

SEQ ID NO: 1610 - protein, 1100 aa, unidentified
  REGION 1..1100: note = Description of Unknown: uncultivated organism with predicted taxonomy: Clostridiales
  REGION 1..1100: note = MG21-100 effector
MSEFHYALGLDIGIGSVGWAVLRNQPNGEPDRIQDLGVRIFDKAEQPKTGASLAAPRRDARSARRRLRRHRHRLERIRYLMEQRGMMSVSDIQAMYAAGGFQKSPYQLRAEALDRPLSKEEAVRVLIHLAQRRGYKSNSTAEAAKDEKETGKVKTAIEENRRCMAEHDYRTVGEMMYRDERFWQSNPDGTRYQQTRNKTDDYRFTVERSAIVDEAKQIFAAQRKLGADWSSEDLEAAYLSILEGQRSFDEGPGGESPFRGGIGDKVGFCTFEPDQQRAAKATYTFEYFKLLQDLNHMRLAGRGMSPQPLNAQQREILKETALRSASLSYGQLRKKLALADDTFFSGLYYGDKSREEAEKRKWPQMQSYHKIRTALDKVGKGTISSLTEEQLNAIASILTQYKSDAKRIEALRMAGIPVQFDEALLPLSFSKYGSLSVQAMQKLIPLLEQGMRYDEACTQIYGDHRGLHSEQRKNRLSLTDMDEITNPVVRRAVSQTIKVINAIVRTYGPPDVVRIELAREMSRNFDERRKAEKRQDENRAANERAKEQIAEYKGDHATGLDIVKFKLYQEQDGVYLYSGKNLDPSRLFEPGYADVDHIVPYSRCFDDSYQNKVLVLASENRQKGNRLPYEYFGYDEVRWHEYEVRVENLIRNYRKRQKLLKRQLSEEESAEFIDRNLKDTQYITRTVYNLIRDHLAFAESAYRKKPVQAVNGAVTSMLRNRWGVQKIREDGDLHHCLDAAVIAATTPGLVQRLTAYSKHRETWERPPAGYVDPATGELIELPQEARRDPFPKPWERFRQELEARLDPIDPRHQIDLLKLETYESDEEIKPVFVSRMPNHKVTGAAHAETIRSSKGGDGFTVTKTPLTNLKLNKFGEIEGYYNPASDTLLYDALLARLKDFGGDGAKAFAQPFYKPKKDGTPGPRVDKVKICEKATVGLPVRDGIAANGSMVRIDVFYVEDDGYYFVPIYVADTKKESLPNKAVVAYKAYSEWKEMKDENFIFSLYPGDLVCIQSRKGIKLNLAKGGTGEKEIVRQEGMYYYRAAGITVGAIQIETHDRRYLQPSLGIKTLQSIEKYQVDVLGNYQKVDLPEKRMTFSKEG

SEQ ID NO: 1611 - protein, 1127 aa, unidentified
  REGION 1..1127: note = Description of Unknown: uncultivated organism with predicted taxonomy: Clostridiales
  REGION 1..1127: note = MG21-101 effector
MNYRIGLDLGIASVGWAVLEDDYMGKPKRIVKLGARIFDSAENPKDGSSLALNRREARETRRRLRRRNHRIKRTKNLLEKYNIMTTKEIEDMYATYKFQFNPYELRVKGLDEKLTNSELSRILISFVKRRGYKSNSKSEETNDKEMGKLLTATKENELLMKEKGYRTVGEMYLKDEKFKMQMPDGRILLKVRNTTDDYKNTPLRKLLLDEIKQILNKQKELNVNITSDFIDEYINIFTSQRNFDDGPGQPSIYAGNQIEKMLGKCTFEKEENRAAKATYTFEYFKLLQDINHIKIEKHIINETGKKEVLKRPLTEDERNIIINLAKTKVTLTYASLRIALNLAGNERFNMIHYKATNVFSDEINKEAEKERKFKEFESYHKMRVSMDKAEKNYILKLSTDELDVIGTVLTLYKNDNKRIEKLAQLNLPENIINEMLKLSFSKVGNLSIKAMKKIIPYLEKGYTYDKAVNEVYEDFRGVVNTEKKKKIALRDLEQELSNPVVKRSVSQAIKVLNAITRTYGEPDVINVELARELSKNFADRQNIKKNQENNMQSNEKAKEDILKLGKSNPTGQDIVKYKLWKEQDGTCVYSGKHISIEDLFTEAVDVDHIIPYSMCFDDTYKNKVLVLSSENRQKGNRIPYQYMQEKGRDLDEYEIRVNNIIKNYSKKQRLLKQKFTREDANEWKDRNIQDTQYISRLMYNLIKNHVQFSNNENFERKVFTVNGQITSHIGKRLGINKIRENGDEHHATDAVIIATVSQGMIQRITKYYQYIDGRYEKNSGEYIDMETGEIITKEQYEAKNGSNFPEPWPKFRKELDIRTTCKTKARMEECLLTEKIFYDDYDDVKPIFISRMPKRKITGQAHLDTIRGLRKSDEGLKTLTKTELTKLKLDKNGEIERYPESQKQDDKLLYNALVEQLRKFGGNGTEAFKKPFYKPKSDGTPGPLVKKVKLEDKTTLAVELNNGKAIAANGDMIRIDVFKVEGEGYYFVPIYVSDTIKNKLPNKASVASKLYAEWKEMQDKDFIFSLYPRDLFYVKSKNKIKLTSINKQDKESLETNELFAYYVKAGISTAAIACINHNGEYEQNSLGIKRLQEFKKYEVDVLGNYHEVKLPEKRQDFSNLKKGGSLK

SEQ ID NO: 1612 - protein, 1128 aa, unidentified; identical to SEQ ID NO: 1554
  REGION 1..1128: note = Description of Unknown: uncultivated organism with predicted taxonomy: Clostridium
  REGION 1..1128: note = MG21-102 effector

SEQ ID NO: 1613 - protein, 1100 aa, unidentified
  REGION 1..1100: note = Description of Unknown: uncultivated organism with predicted taxonomy: Clostridiales
  REGION 1..1100: note = MG21-103 effector
MSEFHYALGLDIGIGSVGWAVLRNQPNGEPDRIQDLGVRIFDKAEQPKTGASLAAPRRDARSARRRLRRHRHRLERIRYLVEQRGMMSVSDIQAMYAAGGFQKSPYQLRAEALDRPLSKEEAVRVLIHLAQRRGYKSNSTAEAAKDEKETGKVKTAIEENRRCMAEHGYRTVGEMMYRDERFWQSNPDGTRYQQTRNKTDDYRFTVERSAIVDEAKQIFAAQRKLGADWSSEDLEAAYLSILEGQRSFDEGPGGESPFRGGIGDKVSFCTFEPDQQRAAKATYTFEYFKLLQDLNHMRLAGRGMSPQPLNAQQREILKETALRSASLSYGQLRKKLALADDTFFSGLYYGDKSREEAEKRKCPQMQSYHKIRTALDKVGKGTISSLTEEQLNAIASILTQYKSDAKRIEALRLAGIPMQFDEALLPLSFSKYGSLSVQAMQKLIPLLEQGMRYDEACTQIYGDHRGLHSEQRKNRLSLTDMDEITNPVVRRAVSQTIKVINAIVRTYGPPDVVRIELAREMSRNFDERRKAEKRQDENRAANERAKEQIAEYKGDHATGLDIVKFKLYQEQDGVCLYSGKNLDPSRLFEPGYADVDHIVPYSRCFDDSYQNKVLVLASENRQKGNRLPYEYFGQDEARWHGYEVRVENLIRNYRKRQKLLKRQLSEEESAGFIDRNLKDTQYITRSIYNLIRNNLVFAESNYKKRPVQTVNGAVTSMLRNRWGVQKIREDGDLHHCLDAAVIAATTPGLVQRLTEHSKRRETLEKAPAGYVDPATGELLELPQEARRDLFPKPWERFRQELEARLDPIDPRHQIDLLKLSTYESDEEIKPVFVSRMPNHKVTGAAHAETIRSSKGGDGFTVTKTPLTNLKLNKFGEIEGYYNPASDTLLYDSLLARLKDFGGDGAKAFAQPFYKPKKDGTPGPRVDKVKICEKATIGLPVRNGIAANGSMIRIDVFYVEDDGYYFVPIYVADTKKERLPNKAVVAYKAYSEWKEMKDENFVFSLYPGDLVCIQSRKGIKLNLAKGGTGEKEIVRQKGMYYYRAAGITVGAIQIETHDRRYLQPSLGIKTLQSIEKYQVDVLGNYHKVDLPEKRMTFSKEG

SEQ ID NO: 1614 - protein, 1100 aa, unidentified
  REGION 1..1100: note = Description of Unknown: uncultivated organism with predicted taxonomy: Clostridiales bacterium 42_27
  REGION 1..1100: note = MG21-104 effector
MSEFHYALGLDIGIGSVGWAVLRNQPNGEPDRIQDLGVRIFDKAEQPKTGASLAAPRRDARSARRRLRRHRHRLERIRYLMEQRGIMPVADIQAMYAAGGFPKSPYQLRAEALDRPLTKEEAVRVLIHLAQRRGYKSNSTAEAAKDEKETGKVKTAIEENRRCMAEYGYRTVGEMMYRDERFWQKHPDGTHYHQTRNKAEDYRFTVERAAIVDEVRQIFAAQRRLGTVWMDEDMETAYLSILESQRSFDEGPGGDSPFSGGIGERVGACTFEPDEKRAAKATYTFEYFKLLQDLSRMRLTGMGMPPEPLDAAQREALKSAALRSASLSYGQIRKKLNLDDDVFFHGLYYGEKTKEETEKRKWPQMQSYHKMRTALDKVGKGAIGTLTEEQLNAVATILTECKSDAKRIAALREAGIPPQFDEALLPLSFSKYGSLSVQAMQKLIPLLEEGLRYDEACTRVYGDHRGLHPEQRKNRLSLTDMDEITNPVVRRAVSQTIKVINAVVRTYGPPDVVRIELAREMSRTFDERRKMEKRQDDNRAANERAKDQIAEYKGDHATGLDIVKFKLYQEQDGVCLYSGQNLDIARLFEPGYADVDHIIPYSRCFDDSYQNKVLVLASENRQKGNRLPYEYFGQDEARWHGYEVRVENLIHNYRKRQKLLKRRLTEEESSGFIDRNLKDTQYITRAVYNLIRDHLAFAESNYRKKPVQAVNGAVTAMLRGRWGVQKIREDGDLHHCLDAAVIAATTPGLVQRLTAYNKHRETWERSPAGYVDPATGEMLELPQEARRDPFPKPWERFRQELEARLDPIDPRHQIDLLKLETYESDEEIKPVFVSRMPNHKVTGAAHAETIRSSKGGYGFTVTKTPLTNLKLNKFGEIEGYYNPASDTLLYDALLARLKDFGGDGAKAFAQPFYKPKKDGSPGPRVDKVKICEKATVGLPVRDGIAANGSMVRIDVFYVEGDGYYFVPIYVADTKKESLPNKAAVAMKPYNLWKKMKDENFVFSLYPGDLVRIQSRKGIKLNLAKGGTGEKEIVRQEGMYYYRSAGIAVAQISVETHDRRYLQPSLGIKTLQSIEKYQVDVLGNYYKVDLPEKRMTFSKEG

SEQ ID NO: 1615 - protein, 1100 aa, unidentified
  REGION 1..1100: note = Description of Unknown: uncultivated organism with predicted taxonomy: Clostridiales bacterium 42_27
  REGION 1..1100: note = MG21-105 effector
MSEFHYALGLDIGIGSVGWAVLRNQPTGEPDRIQDLGVRIFDKAEQPKTGASLAAPRRDARSARRRLRRHRHRLERIRYLMEQRGIMPVADIQAMYAAGGFPKSPYQLRAEALDRPLTKEEAVRVLIHLAQRRGYKSNSTAEAAKDEKETGKVKTAIEENRRCMAEYGYRTVGEMMYRDERFWQKHPDGTHYHQTRNKAEDYRFTVERAAIVDEVRQIFAAQRRLGTVWMDEDMETAYLSILESQRSFDEGPGGDSPFSGGIGERVGACTFEPDEKRAAKATYTFEYFKLLQDLNRMRLTGMGMPPEPLDDEQREVLKSAALRSASLSYGQIRKKLNLDDDVFFHGLYYGEKTKEEAEKRKWPQMQSYHKMRTALDKVGKGAIGTLTEEQLNAVATILTECKSDAKRIAALREAGIPPQFDEALLPLSFSKYGSLSVRAMQKLIPLLEEGLRYDEACTRVYGDHRGLRPEQRTNRLSLNDMEEITNPVVRRAVSQTIKVINAVVRTYGPPDVVRIELAREMSRTFDERRKMEKRQDDNRAANERAKDQIAEYKGDHATGLDIVKFKLYREQDGVCLYSGQNLDIARLFEPGYADVDHIIPYSRCFDDSYQNKVLVLASENRQKGNRLPYEYFGQDEARWHGYEVRVENLIHNYRKRQKLLKRRLTEEESTGFIDRNLKDTQYITRAVYNLIRDHLAFAESNYRKKPVQAVNGAVTAMLRGRWGVQKIREDGDLHHCLDAAVIAATTPGLVQRLTAYNKHRETWERSPAGYVDPATGELIELPQEARRDPFPKPWERFRQELEARLDPIDPRHQIDLLKLETYESDEEIKPVFVSRMPNHKVTGAAHAETIRSSKGGDGFTVTKTPLANLKLNKFGEIEGYYNPASDTLLYDALLARLKAFGGDGAKAFAQPFYKPKKDGTPGPRVDKVKICEKATVGLPVRDGIAANGSMVRIDVFYVEDDGYYFVPIYVADTKKESLPNKAAVAMKPYNLWKEMNDENFAFSLYPGDLVRIQSRKGIKLNLAKGGTGEKEIVRQEGMYYYRSAGIAVAQISVETHDRRYLQPSLGIKTLQSIEKYQVDVLGNYYKVDLPEKRMTFSKEG

SEQ ID NO: 1616 - protein, 786 aa, unidentified
  REGION 1..786: note = Description of Unknown: uncultivated organism with predicted taxonomy: Oscillibacter sp. CAG:241_62_21
  REGION 1..786: note = MG21-106 effector
MLEFHYALGLDIGIGSVGWAVLRNQENGEPDRIQDLGVRIFDKAEQPKTGASLAAPRRDARSARRRLRRHSHRLERIRFLMEQSGILSVADIQEMYSTGGFQKSPYQLRAEALDRLLTKEEAVRVLIHLAQRRGYKSNSTAEAAKDEKETGKVKTAIEENRRCMEEHGYRTVGEMMFRDERFWQKNPDGSRYHQTRNKADNYRFTVERAAIVDEAKRIFAAQRSFGAAWMGEAVEASYLSILESQRSFDEGPGGSSPFRGGIGERVGFCTFEPEERRAPKASYTFEYFKLLQDLNRMRLAGMGLPPQPLNAEQRELLKTAALRSASLNYGQIRKKLNLDDGIYFNELYYGDHSREDAEKRKWPQMQSYHKIRTALDRVGKGTISTLTEEQLNAIAEILTRYKSDAKRIAALREAGIPPQLDGALLPLSFSKYGSLSVKAMQKLIPLLEKGQRYDQACTQIYRDHRGLRTDQRTTRLSLHDMDEITNPVVRRAVSQTIKVVNAVVRTYGPPDVVRIELAREMSQNFDERRKAEKRREENRAANERAKEQILEYKGDRVTGLDIVKFKLFREQDGVCLYSGKNLDISRLFEPGYADVDHIIPYSRCFDDSYQNKVLVLASENRQKGNRLPYEYFGQDAARWHGYEVRVENLIRNYRKRQKLLKHHLTEEESAGFIARNLKDTQYITRTIYNLLREHLLFADSRYSKKPVQAVNGAVTAMLRSRWGVHKIREDGDLHHCMDAAVLAATTPGLVQRLTEYSKHRETLIETPAGFVNRLTGELVEEAGDAQ

SEQ ID NO: 1617 - protein, 1128 aa, unidentified
  REGION 1..1128: note = Description of Unknown: uncultivated organism with predicted taxonomy: Clostridium
  REGION 1..1128: note = MG21-107 effector
MNYRIGLDLGIASVGWAILEDDNKGNPKRIVKLGSRIFDAAENPKDGSSLALNRREARNTRRRLRRRNHRIKRTKNLLEKYNIITIKEIENMYATYKFQFNPYELRVKGLDEKLTNSELARVLISFVKRRGYKSNSKAEETSNKEMGKLLVATKENEILMKEKNYRTIGEMYLKDEKFKIQMPDGRVLFKVRNTTDEYKNTPLRKLLLDEIKQILEKQKELNSNITDSFIDEYINIFTSQRNFDDGPSQPSIYAGNQIEKMLGKCTFEKEENRSAKATYTFEYFKLLQDINHIKIEEYHLKENGTREVIKRTLTEEERNIIINLAKTKVTLTYDSLRTALKLTTNERFNMINYKRTDIFNDEENKKVEKDRRIKEFESYHKIRVAMDRIEKNYINKLNSDDLDTIGTVLTLYKNDNKRIEKLKEINLPEDIVNELLKLSFSKVGNLSIKAMKKIIPYLEQGYTYDKAVNEVYEDFRGIINTKKKKKIALRDLEQELSNPVVKRAVSQAIKVLNAITTTYGKPDIINIELARQLSKKFADRQNIKKKQEQNMQNNDKAREEILKLGKNNPTGQDIVKYKLWQEQDGICVYSGKHISIEDLFTEAVDVDHIIPYSMCFDDTYKNKVLVLASENRQKGNRIPYQYLKEKGRNLEEYEVRVNNIIKNYYKKKRLLRQNFTREDATEWKDRNIQDTQYISRLMYNLIKNHVQFSDNENFDRKVFTVNGQITSHVRKRLGINKIRENGDEHHAVDAAVIAIISQGMIQKITKYYQYIDGRYEKNSGEYIDLETGEILTKEQYEKENGINFPEPWPKFRTELDIRTTCQTKERMEECLVAEKIYYENYDDVKPVFISRMPRRKVTGQAHLDTIRGIRKNEEGIKTLTKTELTKLKLDKNGEIEKYPDSQKQDDKLLYKALVDQLRKFGGNGEEAFKRPFYKPKSDGTPGPLVKKVKLEDKTTLAVELNNGKAIVANGDMIRIDVFKVDGEGYYFVPIYVSDTIKSKLPNKACVAAKQYSEWKDMKDENFIFSLYPRDLIYIKSKNKIKLTSINKENKENKEISEMFAYYIKSGISTATISIINHNGEYEQNSLGIKTLKEFKKFEVDVLGNYHEVKLPEKRQSFKNLKKKGGSLK

SEQ ID NO: 1618 - protein, 1100 aa, unidentified; identical to SEQ ID NO: 1544
  REGION 1..1100: note = Description of Unknown: uncultivated organism with predicted taxonomy: Clostridiales
  REGION 1..1100: note = MG21-108 effector

SEQ ID NO: 1619 - protein, 1045 aa, unidentified
  REGION 1..1045: note = Description of Unknown: uncultivated organism with predicted taxonomy: Clostridiales bacterium 42_27
  REGION 1..1045: note = MG21-109 effector
MSEFHYALGLDIGIGSVGWAVLRNQPNGEPDRIQDLGVRIFDKAEQPKTGASLAAPRRDARSARRRLRRHRHRLERIRYLMEQRGIMPVADIQAMYAAGGFQKSPYQLRAEALDRPLTKEEAVRVLIHLAQRRGYKSNSTAEAAKDEKETGKVKTAIEENRRCMAEHGYRTVGEMMYRDERFWQKHPDGTRYHQTRNKAEDYRFTVERAAIVDEVRQIFAAQRRLGTAWMDEYMETAYLSILESQRSFDEGPGGDSPFSGGIGERVGACTFEPDEKRAAKATYTFEYFKLLQDLSRMRLTGMGMPPEPLDAAQREVLKSAALRSASLSYGQIRKKLNLDDDVFFHGLYYGEKTKEEAEKRKWPQMQSYHKMRTALDKVGKGAIGTLTEEQLNAVATILTECKSDAKRIAALREAGIPPQFDEALLPLSFSKYGSLSVQAMQKLIPLLEEGLRYDEACTRVYGDHRGLHPEQRKNRLSLTDMDEITNPVVRRAVSQTIKVINAVVRTYGPPDVVRIELAREMSRTFDERRKMEKRQDDNRAANERAKDQIAEYKGDHATGLDIVKFKLYREQDGVCLYSGQNLDIARLFEPGYADVDHIIPYSRCFDDSYQNKVLVLASENRQKGNRLPYEYFGQDEARWHGYEVRVENLIHNYRKRQKLLKRRLTEEESTGFIDRNLKDTQYITRAVYNLIRDHLAFAESNYRKKPVQAVNGAVTAMLRGRWGVQKIREDGDLHHCLDAAVIAATTPGLVQRLTAYNKHRETWERSPAGYVDPATGEMIELPQEARRDPFPKPWERFRQELEARLDPIDPRHQIDLLKLETYESDEEIKPVFVSRMPNHKVTGAAHAETIRSSKGGDGFTVTKTPLTNLKLNKFGEIEGYYNPASDTLLYDALLARLKDFGGDGAKAFAQPFYKPKKDGSPGPRVDKVKICEKATVGLPVRDGIAANGSMVRIDVFYVEGDGYYFVPIYVADTKKESLPNKAAVAMKPYNLWKKMKDENFVFSLYPGDLVRIQSRKGIKLNLAKGGTGEKEIVRQEGMYYYRSAG

SEQ ID NO: 1620 - protein, 1100 aa, unidentified
  REGION 1..1100: note = Description of Unknown: uncultivated organism with predicted taxonomy: Oscillibacter sp. CAG:241_62_21
  REGION 1..1100: note = MG21-110 effector
MLEFHYALGLDIGIGSVGWAVLRNQENGEPDRIQDLGVRIFDKAEQSKTGASLAAPRRDARSARRRLRRHSHRLERIRFLMEQSGILSVADIQEMYSTGGFQKSPYQLRAEALDRLLTKEEAVRVLIHLAQRRGYKSNSTAEAAKDEKETGKVKTAIEENRRCMEEHGYRTVGEMMFRDERFWQKNPDGSRYHQTRNKADNYRFTVERAAIVDEAKRIFAAQRSFGAAWMGEAVEASYLSILESQRSFDEGPGGSSPFRGGIGERVGFCTFEPEERRAPKASYTFEYFKLLQDLNRMRLAGMGLPPQPLNAEQRELLKTAALRSASLNYGQIRKKLNLDDGIYFNELCYGDHSREDAEKRKWPQMQSYHKIRTALDKVGKGTISTLTEEQLNAIAEILTRYKSDAKRIAALREAGIPPQLDGALLPLSFSKYGSLSVKAMQKLIPLLEKGQRYDQACTQIYGDHRGLRTDQRTTRLSLHDMDEITNPVVRRAVSQTIKVVNAVVRTYGPPDVVRIELAREMSQNFDERRKAEKRREENRAANERAKEQILEYKGDRVTGLDIVKFKLFREQDGVCLYSGKNLDISRLFEPGYADVDHIIPYSRCFDDSYQNKVLVLASENRQKGNRLPYEYFGQDAARWHGYEVRVENLIRNYRKRQKLLKHHLTEEESAGFIARNLKDTQYITRTIYNLLREHLLFADSRYSKKPVQAVNGAVTAMLRSRWGVHKIREDGDLHHCMDAAVLAATTPGLVQRLTEYSKHRETLIETPAGFVNRLTGELVEEAGDAQRDRFPEPWDRFRQELEARLDPIDPRHQIDRLKLATYESDEELKPVFVSRMPNHKVTGAAHAETIRSSKAGNGFTVTKTPLASLKLNKQGEIDGYYNPESDKLLYDALLARLKAFGGDGAKAFAEPFYKPKKDGTPGPRVDKVKIREKGTTGLPVRDGIAANGSMIRIDVFREEDDGYYFVPIYVADTKKERLPNKAVVAYRPYEDWKEMQDENFVCSLYPGDLVRIQSRKGIKLNLAKGGTGEREIVRQDGLFYYRGADIAGGKIKIETHDRRYSQPSLGVKTLRSIEKYQVDVLGNYYKVKLPENRMTFSKEG

SEQ ID NO: 1621 - protein, 1100 aa, unidentified
  REGION 1..1100: note = Description of Unknown: uncultivated organism with predicted taxonomy: Clostridiales
  REGION 1..1100: note = MG21-111 effector
MSEFHYALGLDIGIGSVGWAVLRNQPNGEPDRIQDLGVRIFDKAEQPKTGASLAAPRRDARSARRRLRRHRHRLERIRYLVEQRGMMSVSDIQAMYAAGGFQKSPYQLRAEALDRPLSKEEAVRVLIHLAQRRGYKSNSTAEAAKDEKETGKVKTAIEENRRCMAEHGYRTVGEMMYRDERFWQSNPDGTRYQQTRNKTDDYRFTVERSAIVDEAKQIFAAQRKLGADWSSEDLEAAYLSILEGQRSFDEGPGGESPFRGGIGDKVSFCTFEPDQQRAAKATYTFEYFKLLQDLNHMRLAGRGMSPQPLNAQQREILKETALRSASLSYGQLRKKLALADDTFFSGLYYGDKSREEAEKRKWPQMQSYHKIRTALDKVGKGTISSLTEEQLNAIASILTQYKSDAKRIEALRLAGIPMQFDEALLPLSFSKYGSLSVQAMQKLIPLLEQGMRYDEACTQIYGDHRGLHSEQRKNRLSLTDMDEITNPVVRRAVSQTIKVINAIVRTYGPPDVVRIELAREMSRNFDERRKAEKRQDENRAANERAKEQIAEYKGDHATGLDIVKFKLYQEQDGVCLYSGKNLDPSRLFEPGYADVDHIVPYSRCFDDSYQNKVLVLASENRQKGNRLPYEYFGQDEARWHGYEVRVENLIRNYRKRQKLLKRQLSEEESAGFIDRNLKDTQYITRSIYNLIRNNLVFAESNYKKRPVQTVNGAVTSMLRNRWGVQKIREDGDLHHCLDAAVIAATTPGLVQRLTEHSKRRETLEKAPAGYVDPATGELLELPQEARRDLFPKPWERFRQELEARLDPIDPRHQIDLLKLSTYESDEEIKPVFVSRMPNHKVTGAAHAETIRRSKGGDGFTVTKTPLTNLKLNKFGEIEGYYNPASDTLLYDSLLARLKDFGGDGAKAFAQPFYKPKKDGTPGPRVDKVKICEKATIGLPVRNGIAANGSMIRIDVFYVEDDGYYFVPIYVADTKKERLPNKAVVAYKAYSEWKEMKDENFVFSLYPGDLVCIQSRKGIKLNLAKGGTGEKEIVRQKGMYYYRAAGITVGAIQIETHDRRYLQPSLGIKTLQSIEKYQVDVLGNYHKVDLPEKRMTFSKEG

SEQ ID NO: 1622 - protein, 1100 aa, unidentified; identical to SEQ ID NO: 1538
  REGION 1..1100: note = Description of Unknown: uncultivated organism with predicted taxonomy: Clostridiales bacterium 42_27
  REGION 1..1100: note = MG21-112 effector

SEQ ID NO: 1623 - protein, 1100 aa, unidentified; identical to SEQ ID NO: 1614
  REGION 1..1100: note = Description of Unknown: uncultivated organism with predicted taxonomy: Clostridiales bacterium 42_27
  REGION 1..1100: note = MG21-113 effector

SEQ ID NO: 1624 - protein, 1028 aa, unidentified
  REGION 1..1028: note = Description of Unknown: uncultivated organism with predicted taxonomy: Clostridiales bacterium 42_27
  REGION 1..1028: note = MG21-114 effector
MSEFHYALGLDIGIGSVGWAVLRNQPNGEPDRIQDLGVRIFDKAEQPKTGASLAAPRRDARSARRRLRRHRHRLERIRYLMEQRGIMPVADIQAMYAAGGFQKSPYQLRAEALDRPLTKEEAVRVLIHLAQRRGYKSNSTAEAAKDEKETGKVKIAIEENRRCMAEHGYRTVGEMMYRDERFWQKHPDGTRYHQTRNKAEDYRFTVERAAIVDEVRQIFAAQRRLGTAWMDEDMETAYLSILESQRSFDEGPGGDSPFSGGIGERVGACTFEPDEKRAAKATYTFEYFKLLQDLSRMRLTGMGMPPEPLDAAQREVLKSAALRSASLSYGQIRKKLNLDDDVFFHGLYYGEKTKEEAEKRKWPQMQSYHKMRTALDKVSKGAIGTLTEEQLNAVATILTECKSDAKRIAALREAGIPPQFDEALLPLSFSKYGSLSVRAMQKLIPLLEEGLRYDEACTRVYGDHRGLRPEQRTNRLSLNDMEEITNPVVRRAVSQTIKVINAVVRTYGPPDVVRIELAREMSRTFDERRKMEKRQDDNRAANERAKDQIAEYKGDHATGLDIVKFKLYREQDGVCLYSGQNLDIARLFEPGYADVDHIIPYSRCFDDSYQNKVLVLASENRQKGNRLPYEYFGQDEARWHGYEVRVENLIHNYRKRQKLLKRRLTEEESTGFIDRNLKDTQYITRAVYNLIRDHLTFAESNYRKKPVQAVNGAVTAMLRGRWGVQKIREDGDLHHCLDAAVIAATTPGLVQRLTAYNKHRETWERPPAGYVDPATGELIELPQEARRDPFPKPWERFRQELEARLDPIDPRHQIDLLKLETYESDEEIKPVFVSRMPNHKVTGAAHAETIRSSKGGDGFTVTKTPLTNLKLNKFGEIEGYYNPASDTLLYDALLARLKDFGGDGAKAFAQPFYKPKKDGSPGPRVDKVKICEKATVGLPVRDGIAANGSMVRIDVFYVEGDGYYFVPIYVADTKKESLPNKAAVAMKPYNLWKKMKDENFVFSLYPGDLVRIQSRKGIKLNLAKGGTG

SEQ ID NO: 1625 - protein, 1107 aa, unidentified
  REGION 1..1107: note = Description of Unknown: uncultivated organism with predicted taxonomy: Clostridiales
  REGION 1..1107: note = MG21-115 effector
LSLRYTLGLDIGIASVGWAVLENNIDGEPIKIERLGVRIFDKAEQPKTGASLAEPRREARGQRRTIRRRRHRKDRIKQLIQQNGIMTRVEMTEMFEHSQFETSVYELRVQALERALTKQEFVRVLIHLAQRRGYKSNSKSEEAKDKENGKVKSAISENKKCMEENGYRTIGEMLLNDDRFWEYNPDGTKIFVPHNHPDDYRTTVERSMVEDEIRLIFSRQHALGVPYATSEFEEAYLEIWGRQRNFDEGPGGKSPYGGNMIEKMLGHCTFEKDEPRAAKGSYSAEYFRLLQDVNHLRLVKNNGESCALTREQKQIYIDLVMKSAAASYAQLRKKLELSNDISFNMLRYGSDEIGKVERKKLGHMKFYHEMRKALNTVQKDAIATVSWEQRDEIARILLCYKSDDKRKAQLEKLDIPREFIPALLTLSTSKTAHLSAKALRKLIPHLEKGMTYAEACKEVYGEQKSSITKKNKLSLFDIEPINNPVVRRAVSQTIRVINAVVREYGAPEVVRVELAREMGKPYDVRTQMTKKQETNAKRNEELRQQIKKIKGAEPTGQDIVKFKLFQDQNGVCLYSGQNLDITRLFEAGYVDVDHIIPYSISFDDSYTNKVLVRSPENRQKGNRIPADYFKSDPARWQRFETLVNTQVHNWKKKRNLLTQVLSEEQKNGFKQRNLVDTQYIARVIYNLINDHLQFAETGKYDKKRRTQAVNGAITAHVRKRLGIQKIREDGDLHHAVDAAVVACVSPGMIQKITQYTKHRECIRKTKEGYLDTETGELMTREAYDAKYSPRFPAPWERFRQELEARLSDNPAEEIARLHLATYDSEEEIKQVFVSRKQTHKISGAAHKDTIYRKADGGYIDKVPLTRLTLDKQTGEIKNYYAPESDRLLYEALKKRLEEFDGNAEKAFAEPFYKPRRDGTRGPLVKKVKLYETYNNTVEVKRGDARASNKHIGCAKNDSMIRVDVFYMEDDGYYYVPIYTADVIKGVLPNKAVVRNKLPEDWKEMDDRDFLFSMYPNDLLYIESRRGIKLKTKKGSSRQEEIVRKTGLYYFKGLNIATNALFIITHDNGYEQPSLGGKTLSCLKKYTVDALGNYSEVSLPEKRKPLRG

SEQ ID NO: 1626 - protein, 1100 aa, unidentified; identical to SEQ ID NO: 1544
  REGION 1..1100: note = Description of Unknown: uncultivated organism with predicted taxonomy: Clostridiales
  REGION 1..1100: note = MG21-116 effector

SEQ ID NO: 1627 - protein, 1100 aa, unidentified; identical to SEQ ID NO: 1548
  REGION 1..1100: note = Description of Unknown: uncultivated organism with predicted taxonomy: Clostridiales bacterium 42_27
  REGION 1..1100: note = MG21-117 effector

SEQ ID NO: 1628 - protein, 897 aa, unidentified
  REGION 1..897: note = Description of Unknown: uncultivated organism with predicted taxonomy: Clostridiales bacterium 42_27
  REGION 1..897: note = MG21-118 effector
FTVERAAIVDEVRQIFAAQRRLGVVWMDEDMETAYLSVLESQRSFDEGPGGDSPFSGGIGKRVGACTFEPDEKRAAKATYTFEYFKLLQDLNRMRLTGMGMPPEPLDDEQREVLKSAALRSASLSYGQIRKKLNLDDDVFFNDLYYGEKTKEEAEKRKWPQMQSYHKLRMALDKVGKGAIGTLTEEQLNAIATILTECKSDAKRIAALREAGIPPQFDEALLPLSFSKYGSLSVRAMQKLIPLLEEGLRYDEACTRVYGDHRGLRSEQRTNRLSLNDMEEITNPVVRRAVSQTIKVINAVARTYGPPDVVRIELAREMSRTFDERRKMEKRQDDNRAANEQAKDQIAEYKGDHATGLDIVKFKLYREQDGVCLYSGQNLDIARLFEPGYADVDHIIPYSRCFDDSYQNKVLVLASENRQKGNRLPYEYFGQDEARWHGYEVRVENLIHNYRKRQKLLKRRLTEEESSGFIDRNLKDTQYITRAVYNLIRDHLAFAESNYRKKPVQAVNGAVTSMLRGRWGVQKIREDGDLHHCLDAAVIAATTPGLVQRLTAYNKHRETWERPPAGYVDPATGELIELPQEARRDPFPKPWERFRQELEARLDPIDPRHQIDLLKLETYESDEEIKPVFVSRMPNHKVTGAAHAETIRSSKGGDGFTVTKTPLTNLKLNKFGEIEGYYNPASDTLLYDALLARLKDFGGDGAKAFAQPFYKPKKDGSPGPRVDKVKICEKATVGLPVRDGIAANGSMIRIDVFYVEDDGYYFVPIYVADTKKESLPNKAVVAYKAYSEWKEMKDENFIFSLYPGDLVRIQSRKGIKLNLAKGGTGEKEIVRQEGMYYYRAAGITVGAIQIETHDRRYLQPSLGIKTLQSIEKYQVDVLGNYYKVDLPEKRMTFSKEG

SEQ ID NO: 1629 - protein, 1100 aa, unidentified; identical to SEQ ID NO: 1578
  REGION 1..1100: note = Description of Unknown: uncultivated organism with predicted taxonomy: Clostridiales bacterium 42_27
  REGION 1..1100: note = MG21-119 effector

SEQ ID NO: 1630 - protein, 1100 aa, unidentified
  REGION 1..1100: note = Description of Unknown: uncultivated organism with predicted taxonomy: Ruminococcaceae bacterium TF06-43
  REGION 1..1100: note = MG21-120 effector
MSEFHYALGLDIGIGSVGWAVLRNQPNGEPDRIQDLGVRIFDKAEQPKTGASLAAPRRDARSARRRLRRHRHRLERIRYLMEQRGMMSVSDIQAMYAAGGFQKSPYQLRAEALDRPLSKEEAVRVLIHLAQRRGYKSNSTAEAAKDEKETGKVKTAIEENRRCMAEHDYRTVGEMMYRDERFWQSNPDGTRYQQTRNKTDDYRFTVERSAIVDEAKQIFAAQRKLGADWSSEDLEAAYLSILEGQRSFDEGPGGESPFRGGIGDKVGFCTFEPDQQRAAKATYTFEYFKLLQDLNHMRLAGRGMSPQPLNAQQREILKETALRSASLSYGQLRKKLALADDTFFSGLYYGDKSREEAEKRKWPQMQSYHKIRTALDKVGKGTISSLTEEQLNAIASILTQYKSDAKRIEALRMAGIPVQFDEALLPLSFSKYGSLSVQAMQKLIPLLEQGMRYDEACTQIYGDHRGLHSEQRKNRLSLTDMDEITNPVVRRAVSQTIKVINAIVRTYGPPDVVRIELAREMSRNFDERRKAEKRQDENRAANERAKEQIAEYKGDHATGLDIVKFKLYQEQDGVCLYSGKNLDPSRLFEPGYADVDHIVPYSRCFDDSYQNKVLVLASENRQKGNRLPYEYFGYDEVRWHEYEVRVENLIRNYRKRQKLLKRQLSEEESAEFIDRNLKDTQYITRTVYNLIRDHLAFAESAYRKKPVQAVNGAVTSMLRNRWGVQKIREDGDLHHCLDAAVIAATTPGLVQRLTAYSKHRETWERPPAGYVDPATGELIELPQEARRDPFPKPWERFRQELEARLDPIDPRHQIDLLKLETYESDEEIKPVFVSRMPNHKVTGAAHAETIRSSKGGDGFTVTKTPLMNLKLNKFGEIEGYYNPASDTLLYDALLARLKDFGGDGAKAFAQPFYKPKKDGTPGPRVDKVKICEKATVGLPVRDGIAANGSMVRIDVFYVEDDGYYFVPIYVADTKKESLPNKAVVAYKAYSEWKEMKDENFIFSLYPGDLVCIQSRKGIKLNLAKGGTGEKEIVRQEGMYYYRAAGITVGAIQIETHDRRYLQPSLGIKTLQSIEKYQVDVLGNYQKVDLPEKRMTFSKEG

SEQ ID NO: 1631 - protein, 1100 aa, unidentified
  REGION 1..1100: note = Description of Unknown: uncultivated organism with predicted taxonomy: Clostridiales
  REGION 1..1100: note = MG21-121 effector
MSEFHYALGLDIGIGSVGWAVLRNQPNGEPDRIQDLGVRIFDKAEQPKTGASLAAPRRDARSARRRLRRHRHRLERIRYLVEQRGMMSVSDIQAMYAAGGFQKSPYQLRAEALDRPLSKEEAVRVLIHLAQRRGYKSNSTAEAAKDEKETGKVKTAIEENRRCMAEHGYRTVGEMMYRDERFWQSNPDGTRYQQTRNKTDDYRFTVERSAIVDEAKQIFAAQRKLGADWSSEDLEAAYLSILEGQRSFDEGPGGESPFRGGIGDKVSFCTFEPDQQRAAKATYTFEYFKLLQDLNHMRLAGRGMSPQPLNAQQREILKETALRSASLSYGQLRKKLALADDTFFSGLYYGDKSREEAEKRKWPQMQSYHKIRTALDKVGKGTISSLTEEQLNAIASILTQYKSDAKRIEALRLAGIPMQFDEALLPLSFSKYGSLSVQAMQKLIPLLEQGMRYDEACTQIYGDHRGLHSEQRKNRLSLTDMDEITNPVVRRAVSQTIKVINAIVRTYGPPDVVRIELAREMSRNFDERRKAEKRQDENRAANERAKEQIAEYKGDHATGLDIVKFKLYQEQDGVCLYSGKNLDPSRLFEPGYADVDHIVPYSRCFDDSYQNKVLVLASENRQKGNRLPYEYFGQDEARWHGYEVRVENLIRNYRKRQKLLKRQLSEEESAGFIDRNLKDTQYITRSIYNLIRNNLVFAESNYKKRPVQTVNGAVTSMLRNRWGVQKIREDGDLHHCLDAAVIAATTPGLVQRLTEHSKRRETLEKAPAGYVDPATGELLELPQEARRDLFPKPWERFRQELEARLDPIDPRHQIDLLKLSTYESDEEIKPVFVSRMPNHKVTGAAHAETIRSSKGGDGFTVTKTPLTNLKLNKFGEIEGYYNPASDTLLYDALLARLKDFGGDGAKAFAQPFYKPKKDGTPGPRVDKVKICEKATIGLPVRNGIAANGSMIRIDVFYVEDDGYYFVPIYVVDTKKENLPNKAVVAYKAYSDWKEMRDEDFVFSLYPGDLVCIQSRKGIKLNLAKGGTGEKEIVRQKGMYYYRAAGITVGAIQIETHDRRYLQPSLGIKTLQSIEKYQVDVLGNYHKVDLPEKRMTFSKEG

SEQ ID NO: 1632 - protein, 1109 aa, unidentified; identical to SEQ ID NO: 1579
  REGION 1..1109: note = Description of Unknown: uncultivated organism
  REGION 1..1109: note = MG21-122 effector

SEQ ID NO: 1633 - protein, 1100 aa, unidentified; identical to SEQ ID NO: 1538
  REGION 1..1100: note = Description of Unknown: uncultivated organism with predicted taxonomy: Clostridiales
  REGION 1..1100: note = MG21-123 effector

SEQ ID NO: 1634 - protein, 943 aa, unidentified
  REGION 1..943: note = Description of Unknown: uncultivated organism with predicted taxonomy: Clostridiales bacterium 42_27
  REGION 1..943: note = MG21-124 effector
EENRRCMAEHGYRTVGEMMYRDERFWQKHPAGPRYRQTRNKAEDYRFTVERAAIVDEVRQIFAAQRRLGTAWMDEYMETAYLSILESQRSFDEGPGGDSPFSGGIGERVGACTFEPDEKRAAKATYTFEYFKLLQDLSRMRLTGMGMPPEPLDAAQREVLKSAALRSASLSYGQIRKKLNLDDDVFFHGLYYGEKTKEEAEKRKWPQMQSYHKMRTALDKVGKGAIGTLTEEQLNAVATILTECKSDAKRIAALREAGIPPQFDEALLPLSFSKYGSLSVQAMQKLIPLLEEGLRYDEACTRVYGDHRGLHPEQRKNRLSLTDMDEITNPVVRRAVSQTIKVINAVVRTYGPPDVVRIELAREMSRTFDERRKMEKRQDDNRAANERAKDQIAEYKGDHATGLDIVKFKLYREQDGVCLYSGQNLDIARLFEPGYADVDHIIPYSRCFDDSYQNKVLVLASENRQKGNRLPYEYFGQDEARWHGYEVRVENLIHNYRKRQKLLKRRLTEEESSGFIDRNLKDTQYITRAVYNLIRDHLAFAESNYRKKPVQAVNGAVTAMLRGRWGVQKIREDGDLHHCLDAAVIAATTPGLVQRLTAYNKHRETWERSPAGYVDPATGEMIELPQEARRDPFPKPWERFRQELEARLDPIDPRHQIDLLKLETYESDEEIKPVFVSRMPNHKVTGAAHAETIRSSKGGDGFTVTKTPLTNLKLNKFGEIEGYYNPASDTLLYDALLARLKDFGGDGAKAFAQPFYKPKKDGSPGPRVDKVKICEKATVGLPVRDGIAANGSMVRIDVFYVEGDGYYFVPIYVADTKKESLPNKAAVAMKPYNLWKKMKDENFVFSLYPGDLVRIQSRKGIKLNLAKGGTGEKEIVRQEGMYYYRSAGIAVAQISVETHDRRYLQPSLGIKTLQSIEKYQVDVLGNYYKVDLPEKRMTFSKEG

SEQ ID NO: 1635 - protein, 1100 aa, unidentified; identical to SEQ ID NO: 1538
  REGION 1..1100: note = Description of Unknown: uncultivated organism with predicted taxonomy: Clostridiales bacterium 42_27
  REGION 1..1100: note = MG21-125 effector

SEQ ID NO: 1636 - protein, 772 aa, unidentified
  REGION 1..772: note = Description of Unknown: uncultivated organism with predicted taxonomy: Clostridiales bacterium 42_27
  REGION 1..772: note = MG21-126 effector
MSEFHYALGLDIGIGSVGWAVLRNQPNGEPDRIQDLGVRIFDKAEQPKTGASLAAPRRDARSARRRLRRHRHRLERIRYLMEQRGIMPVADIQAMYAAGGFPKSPYQLRAEALDRPLTKEEAVRVLIHLAQRRGYKSNSTAEAAKDEKETGKVKTAIEENRRCMAEYGYRTVGEMMYRDERFWQKHPDGTHYHQTRNKAEDYRFTVERAAIVDEVRQIFAAQRRLGTVWMDEDMETAYLSILESQRSFDEGPGGDSPFSGGIGERVGACTFEPDEKRAAKATYTFEYFKLLQDLSRMRLTGMGMPPEPLDAAQREALKSAALRSASLSYGQIRKKLNLDDDVFFHGLYYGEKTKEETEKRKWPQMQSYHKMRTALDKVGKGAIGTLTEEQLNAVATILTECKSDAKRIAALREAGIPPQFDEALLPLSFSKYGSLSVQAMQKLIPLLEEGLRYDEACTRVYGDHRGLHPEQRKNRLSLTDMDEITNPVVRRAVSQTIKVINAVVRTYGPPDVVRIELAREMSRTFDERRKMEKRQDDNRAANERAKDQIAEYKGDHATGLDIVKFKLYQEQDGVCLYSGQNLDIARLFEPGYADVDHIIPYSRCFDDSYQNKVLVLASENRQKGNRLPYEYFGQDEARWHGYEVRVENLIHNYRKRQKLLKRRLTEEESSGFIDRNLKDTQYITRAVYNLIRDHLAFAESNYRKKPVQAVNGAVAAMLRGRWGVQKIREDGDLHHCLDAAVIAATTPGLVQRLTAYNKHRETWERSPAGYVD

SEQ ID NO: 1637 - protein, 970 aa, unidentified
  REGION 1..970: note = Description of Unknown: uncultivated organism with predicted taxonomy: Clostridiales bacterium 42_27
  REGION 1..970: note = MG21-127 effector
QRRGYKSNSTAEAAKDEKETGKVKTAIEENRRCMAEHGYRTVGEMMYRDERFWQIHPDGTRYHQTRNKAEDYRFTVERAAIVDEVRQIFAAQRRLGTAWMDEYMETAYLSILESQRSFDEGPGGDSPFSGGIGERVGACTFEPDEKRAAKATYTFEYFKLLQDLSRMRLTGMGMPPEPLDAAQREVLKSAALRSASLSYGQIRKKLNLDDDVFFHGLYYGEKTKEEAEKRKWPQMQSYHKMRTALDKVGKGAIGTLTEEQLNAVATILTECKSDAKRIAALREAGIPPQFDEALLPLSFSKYGSLSVRAMQKLIPLLEEGLRYDEACTRVYGDHRGLRPEQRTNRLSLNDMEEITNPVVRRAVSQTIKVINAVVRTYGPPDVVRIELAREMSRTFDERRKMEKRQDDNRAANERAKDQIAEYKGDHATGLDIVKFKLYREQDGVCLYSGQNLDIARLFEPGYADVDHIIPYSRCFDDSYQNKVLVLASENRQKGNRLPYEYFGQDEARWHGYEVRVENLIHNYRKRQKLLKRRLNEEESTGFIDRNLKDTQYITRAVYNLIRDHLAFAESNYRKKPVQAVNGAVTAMLRGRWGVQKIREDGDLHHCLDAAVIAATTPGLVQRLTAYNKHRETWERSPAGYVDPATGELIELPQEARRDPFPKPWERFRQELEARLNPIDPRHQIDLLKLETYESDEEIKPVFVSRMPNHKVTGAAHAETIRSSKGGDGFTVTKTPLANLKLNKFGEIEGYYNPASDTLLYDALLARLKAFGGDGAKAFAQPFYKPKKDGTPGPRVDKVKICEKATVGLPVRDGIAANGSMVRIDVFYVEDDGYYFVPIYVADTKKESLPNKAAVAMKPYNLWKEMNDENFAFSLYPGDLVRIQSRKGIKLNLAKGGTGEKEIVRQEGMYYYRSAGIAVAQISVETHDRRYLQPSLGIKTLQSIEKYQVDVLGNYYKVDLPEKRMTFSKEG

SEQ ID NO: 1638 - protein, 964 aa, unidentified
  REGION 1..964: note = Description of Unknown: uncultivated organism with predicted taxonomy: Clostridiales bacterium 42_27
  REGION 1..964: note = MG21-128 effector
MSEFHYALGLDIGIGSVGWAVLRNQPNGEPDRIQDLGVRIFDKAEQPKTGASLAAPRRDARSARRRLRRHRHRLERIRYLMEQRGIMPVADIQAMYAAGGFPKSPYQLRAEALDRPLTKEEAVRVLIHLAQRRGYKSNSTAEAAKDEKETGKVKTAIEENRRCMAEYGYRTVGEMMYRDERFWQKHPDGTHYHQTRNKAEDYRFTVERAAIVDEVRQIFAAQRRLGTVWMDEDMETAYLSILESQRSFDEGPGGDSPFSGGIGERVGACTFEPDEKRAAKATYTFEYFKLLQDLSRMRLTGMGMPPEPLDAAQREALKSAALRSASLSYGQIRKKLNLDDDVFFHGLYYGEKTKEETEKRKWPQMQSYHKMRTALDKVGKGAIGTLTEEQLNAVATILTECKSDAKRIAALREAGIPPQFDEALLPLSFSKYGSLSVQAMQKLIPLLEEGLRYDEACTRVYGDHRGLHPEQRKNRLSLTDMDEITNPVVRRAVSQTIKVINAVVRTYGPPDVVRIELAREMSRTFDERRKMEKRQDDNRAANERAKDQIAEYKGDHATGLDIVKFKLYQEQDGVCLYSGQNLDIARLFEPGYADVDHIIPYSRCFDDSYQNKVLVLASENRQKGNRLPYEYFGQDEARWHGYEVRVENLIHNYRKRQKLLKRRLTEEESSGFIDRNLKDTQYITRAVYNLIRDHLAFAESNYRKKPVQAVNGAVTAMLRGRWGVQKIREDGDLHHCLDAAVIAATTPGLVQRLTAYNKHRETWERSPAGYVDPATGEMLELPQEARRDPFPKPWERFRQELEARLDPIDPRHQIDLLKLETYESDEEIKPVFVSRMPNHKVTGAAHAETIRSSKGGYGFTVTKTPLTNLKLNKFGEIEGYYNPASDTLLYDALLARLKDFGGDGAKAFAQPFYKPKKDGSPGPRVDKVKICEKATVGLPVRDGIAANGSMVRIDVFYVEGDGYY

SEQ ID NO: 1639 - protein, 820 aa, unidentified
  REGION 1..820: note = Description of Unknown: uncultivated organism with predicted taxonomy: Clostridiales bacterium 42_27
  REGION 1..820: note = MG21-129 effector
MYRDERFWQKHPDGTRYHQTRNKAEDYRFTVERAAIVDEVRQIFAAQRRLGTVWMDEDMETAYLSILESQRSFDEGPGGDSPFFGGIGERVGACTFEPDEKRAAKATYTFEYFKLLQDLNRMRLTGMGMPPEPLDAAQREVLKSAALRSASLSYGQIRKKLNLDDDVFFHGLYYGEKTKEEAEKRKWPQMQSYHKMRTALDKVGKGAIGTLTEEQLNAVATILTECKSDAKRIAALREAGIPPQFDEALLPLSFSKYGSLSVQAMQKLIPLLEEGLRYDEACTRVYGDHRGLRPEQRTNRLSLNDMDEITNPVVRRAVSQTIKVINAVVRTYGPPDVVRIELAREMSRTFDERRKMEKRQDDNRAANERAKDQIAEYKGDHATGLDIVKFKLYREQDGVCLYSGQNLDIARLFEPGYADVDHIIPYSRCFDDSYQNKVLVLASENRQKGNRLPYEYFGQDEARWHGYEVRVENLIHNYRKRQKLLKRRLTEEESSGFIARNLKDTQYITRAVYNLIRDHLAFAESNYRKKPVQAVNGAVTAMLRGRWGVQKIREDGDLHHCLDAAVIAATTPGLVQRLTAYNKHRETWERSPAGYVDPATGELIELPQEARRDPFPKPWERFRQELEARLDPIDPRHQIDLLKLETYESDEEIKPVFVSRMPNHKVTGAAHAETIRSSKGGDGFTVTKTPLTNLKLNKFGEIEGYYNPASDTLLYDALLARLKDFGGDGAKAFAQPFYKPKKDGTPGPRVDKVKICEKATVGLPVRDGIAANGSMVRIDVFYVEGDGYYFVPIYVADTKKESLPNKAVVAYKAYSEWKEM

SEQ ID NO: 1640 - protein, 889 aa, unidentified
  REGION 1..889: note = Description of Unknown: uncultivated organism with predicted taxonomy: Clostridiales bacterium 42_27
  REGION 1..889: note = MG21-130 effector
VDEVRQIFAAQRRLGTVWMDEDMETAYLSILESQRSFDEGPGGDSPFSGGIGERVGACTFEPDEKRAAKATYTFEYFKLLQDLSRMRLTGMGMPPEPLDAAQREALKSAALRSASLSYGQIRKKLNLDDDVFFHGLYYGEKTKEETEKRKWPQMQSYHKMRTALDKVGKGAIGTLTEEQLNAVATILTECKSDAKRIAALREAGIPPQFDEALLPLSFSKYGSLSVQAMQKLIPLLEEGLRYDEACTRVYGDHRGLHPEQRKNRLSLTDMDEITNPVVRRAVSQTIKVINAVVRTYGPPDVVRIELAREMSRTFDERRKMEKRQDDNRAANERAKDQIAEYKGAHATGLDIVKFKLYQEQDGVCLYSGQNLDIARLFEPGYADVDHIIPYSRCFDDSYQNKVLVLASENRQKGNRLPYEYFGQDEARWHGYEVRVENLIHNYRKRQKLLKRRLTEEESSGFIDRNLKDTQYITRAVYNLIRDHLAFAESNYRKKPVQAVNGAVTAMLRGRWGVQKIREDGDLHHCLDAAVIAATTPGLVQRLTAYNKHRETWERSPAGYVDPATGEMLELPQEARRDPFPKPWERFRQELEARLDPIDPRHQIDLLKLETYESDEEIKPVFVSRMPNHKVTGAAHAETIRSSKGGYGFTVTKTPLTNLKLNKFGEIEGYYNPASDTLLYDALLARLKDFGGDGAKAFAQPFYKPKKDGSPGPRVDKVKICEKATVGLPVRDGIAANGSMVRIDVFYVEGDGYYFVPIYVADTKKESLPNKAAVAMKPYNLWKKMKDENFVFSLYPGDLVRIQSRKGIKLNLAKGGTGEKEIVRQEGMYYYRSAGIAVAQISVETHDRRYLQPSLGIKTLQSIEKYQVDVLGNYYKVDLPEKRMTFSKEG

SEQ ID NO: 1641 - protein, 1100 aa, unidentified; identical to SEQ ID NO: 1614
  REGION 1..1100: note = Description of Unknown: uncultivated organism with predicted taxonomy: Clostridiales bacterium 42_27
  REGION 1..1100: note = MG21-131 effector

SEQ ID NO: 1642 - protein, 1100 aa, unidentified
  REGION 1..1100: note = Description of Unknown: uncultivated organism with predicted taxonomy: Clostridiales bacterium 42_27
  REGION 1..1100: note = MG21-132 effector
MSEFHYALGLDIGIGSVGWAVLRNQPNGEPDRIQDLGVRIFDKAEQPKTGASLAAPRRDARSARRRLRRHRHRLERIRYLMEQRGIMPVADIQAMYAAGGFPKSPYQLRAEALDRPLTKEEAVRVLIHLAQRRGYKSNSTAEAAKDEKETGKVKTAIEENRRCMAEYGYRTVGEMMYRDERFWQKHPDGTHYHQTRNKAEDYRFTVERAAIVDEVRQIFAAQRRLGTVWMDEDMETAYLSILESQRSFDEGPGGDSPFSGGIGERVGACTFEPDEKRAAKATYTFEYFKLLQDLSRMRLTGMGMPPEPLDAAQREALKSAALRSASLSYGQIRKKLNLDDDVFFHGLYYGEKTKEETEKRKWPQMQSYHKMRTALDKVGKGAIGTLTEEQLNAVATILTECKSDAKRIAALREAGIPPQFDEALLPLSFSKYGSLSVQAMQKLIPLLEEGLRYDEACTRVYGDHRGLHPEQRKNRLSLTDMDEITNPVVRRAVSQTIKVINAVVRTYGPPDVVRIELAREMSRTFDERRKMEKRQDDNRAANERAKDQIAEYKGDHATGLDIVKFKLYREQDGVCLYSGQNLDIARLFEPGYADVDHIIPYSRCFDDSYQNKVLVLASENRQKGNRLPYEYFGQDEARWHGYEVRVENLIHNYRKRQKLLKRRLTEEESSGFIDRNLKDTQYITRAVYNLIRDHLAFAESNYRKKPVQAVNGAVTAMLRGRWGVQKIREDGDLHHCLDAAVIAATTPGLVQRLTAYNKHRETWERSPAGYVDPATGEMLELPQEARRDPFPKPWERFRQELEARLDPIDPRHQIDLLKLETYESDEEIKPVFVSRMPNHKVTGAAHAETIRSSKGGYGFTVTKTPLTNLKLNKFGEIEGYYNPASDTLLYDALLARLKDFGGDGAKAFAQPFYKPKKDGSPGPRVDKVKICEKATVGLPVRDGIAANGSMVRIDVFYVEGDGYYFVPIYVADTKKESLPNKAAVAMKPYNLWKKMKDENFVFSLYPGDLVRIQSRKGIKLNLAKGGTGEKEIVRQEGMYYYRSAGIAVAQISVETHDRRYLQPSLGIKTLQSIEKYQVDVLGNYYKVDLPEKRMTFSKEG

SEQ ID NO: 1643 - protein, 1100 aa, unidentified
  REGION 1..1100: note = Description of Unknown: uncultivated organism with predicted taxonomy: Clostridiales
  REGION 1..1100: note = MG21-133 effector
MLEFHYALGLDIGIGSVVWAVLRNQENGEPDRIQDLGVRIFDKAEQPKTGASLAAPRRDARSARRRLRRHSHRLERIRFLMEQSGILSVADIQEMYSTGGFQKSPYQLRAEALDRLLTKEEAVRVLIHLAQRRGYKSNSTAEAAKDEKETGKVKTAIEENRRCMEEHGYRTVGEMMFRDERFWQKNPDGSRYHQTRNKADDYRFTVERAAIVDEAKRIFAAQRSFGAAWMGEAVEASYLSILESQRSFDEGPGGSSPFRGGIGERVGFCTFEPEERRAPKASYTFEYFKLLQDLNRMRLAGMGLPPQPLNAEQRELLKTAALRSASLNYGQIRKKLNLDDGIYFNELYYGDHSREDAEKRKWPQMQSYHKIRTALDRVGKGTISTLTEEQLNAIAEILTRYKSDAKRIAALREAGIPPQLDGALLPLSFSKYGSLSVKAMQKLIPLLEKGQRYDQACTQIYRDHRGLRTDQRTTRLSLHDMDEITNPVVRRAVSQTIKVVNAVVRTYGPPDVVRIELAREMSQNFDERRKAEKRREENRAANERAKEQILEYKGDRVTGLDIVKFKLFREQDGVCLYSGKNLDISRLFEPGYADVDHIIPYSRCFDDSYQNKVLVLASENRQKGNRLPYEYFGQDAARWHGYEVRVENLIRNYRKRQKLLKHHLTEEESAGFIARNLKDTQYITRTIYNLLREHLLFADSRYSKKPVQAVNGAVTAMLRSRWGVHKIREDGDLHHCMDAAVLAATTPGLVQRLTEYSKHRETLIETPAGFVNRLTGELVEEAGDAQRDRFPEPWDRFRQELEARLDPIDPRHQIDRLKLATYESDEELKPVFVSRMPNHKVTGAAHAETIRSSKAGNGFTVTKTPLASLKLNKQGEIDGYYNPESDKLLYDALLARLKAFGGDGAKAFAEPFYKPKKDGTPGPRVDKVKIREKGTTGLPVRDGIAANGSMIRIDVFREEDDGYYFVPIYVADTKKERLPNKAVVAYRPYEDWKEMQDENFVCSLYPGDLVRIQSRKGIKLNLAKGGTGEREIVRQDGLFYYRGADIAGGKIKIETHDRRYSQPSLGVKTLRSIEKYQVDVLGNYYKVKLPENRMTFSKEG

SEQ ID NO: 1644 - protein, 1100 aa, unidentified; identical to SEQ ID NO: 1614
  REGION 1..1100: note = Description of Unknown: uncultivated organism with predicted taxonomy: Clostridiales bacterium 42_27
  REGION 1..1100: note = MG21-134 effector

SEQ ID NO: 1645 - protein, 1100 aa, unidentified; identical to SEQ ID NO: 1538
  REGION 1..1100: note = Description of Unknown: uncultivated organism with predicted taxonomy: Clostridiales
  REGION 1..1100: note = MG21-135 effector

SEQ ID NO: 1646 - protein, 1018 aa, unidentified
  REGION 1..1018: note = Description of Unknown: uncultivated organism with predicted taxonomy: Clostridiales
  REGION 1..1018: note = MG21-136 effector
LYDKSDMVSPYQLRTEGLDRLLNAREFSKVLIHLAQRRGYQSNSTAEEAKNEKENGIIKTAILENQQRMGRGGYRTIGEMMYRDAAFWETINGIRYHCTRNKAGDYRFTVDRASILAEVSILFEAQRRLGAPWASVEMEDAYTAILSGQRSFDEGPGNDSHGNESPFRKAMSHNVGNCTLIPTELRAARADYTAEYFKLLQDLNHMRLVDNSGSHPLTQQQRAILEEMAFRSANLTYGQLRKKLGISDEVRFAGLYYGEDTIEKAEKRKWPQMQSYHKIRTALDKVSKDAIQTLTQDQLDAIGEILAGGVSDAKRINSFCLAGIPEEYHKALLPLSISKRAKLSIAAMRKLIPFLQQGMRYDEACKAAGLDFHGADGKVEKLSDFLNEITNPVVRRAVSQTIKVVKAVVDTYSNRKEMKLDAVRIELAREMHHSIKERNRMKKRQEENREKNEQVKAQILETKPGTRVTGLDIVKFKLYQEQDGICPYSGKPLLIERLYEPGYAEVDHIIPYSRCFDDSYSNKVLVLAEENQQKGNRTPYEYFGANEQRWHEFSARVRASVRDFKKRQKLLNTSFGEEQGKDFIQRNLNDTQHITRVVYNYLRNNLKFADSAYAKAPVRAVNGAVTAMLRGRWGIEKMRGNGDLHHCKDAVVIAATSDSMIKDLTKYYQEEEQLFMGKTHFVDPATGEVLTRKEFQQRFAPKFPQPWDRFREELEVRLDPTNPKEALMALNLSTYEFDPEEEIPPVFVSHMPKHTVTGAAHKETIRGKTETGTAVKTALTSLKLDKNGEIDGYYNPQTDPRLYQALVERLKKFGGDGAKAFAEPFYKPKRDGTPGPRVDKVKIAEKASLSVPTGRGEADNGEMIRIDVFRVPNERKPDDNYYFVPIYVADTKKAILPSKAVVGKKPPEAWKQMKPEHFLFSIFKGDLIYVESKKGISLALAKEAVGEKTIQVKSGLFYFCGADISDGSIKIETHDRRYYKKSLGIKELKAFEKRQVEVLGEVRKVKLPEKRLEFRGRK

SEQ ID NO: 1647 - protein, 1127 aa, unidentified
  REGION 1..1127: note = Description of Unknown: uncultivated organism with predicted taxonomy: Clostridiales
  REGION 1..1127: note = MG21-137 effector
MNYRIGLDLGIASVGWAVLEDDYTGKPKRIVKLGARIFDSAENPKDGSSLALNRREARETRRRLRRRNHRIKRTKNLLEKYNIMTTKEIENMYATYKFQFNPYELRVKGLDEKLTNSELSRILISFVKRRGYKSNSKSEETNDKEMGKLLTATKENELLMKEKGYRTVGEMYLKDEKFKMQMPDGRILLKVRNTTDDYKNTPLRKLLLDEIKQILNKQKELNVNITSDFIDEYINIFTSQRNFDDGPGQPSIYAGNQIEKMLGKCTFEKEENRAAKATYTFEYFKLLQDINHIKIEKHIINETGKKEVLKRPLTEDERNIIINLAKAKVTLTYASLRTALNLESNERFNMIHYKATNVFSDDINKEAEKERKFKEFESYHKMRVAMDKTEKNYILKLSTDELDVIGTVLTLYKNDNKRIEKLAQLNLPENIINEMLKLSFSKVGNLSIKAMKKIILYLEKGYTYDKAVNEVYEDFRGVVNTEKKKKIALRDLEQELSNPVVKRSVSQAIKVLNAITRTYGEPDVINVELARELSKNFADRQNIKKNQENNMQSNEKAKEDILKLGKSNPTGQDIVKYKLWKEQDGTCVYSGKHISIEDLFTEAVDVDHIIPYSMCFDDTYKNKVLVLSSENRQKGNRIPYQYMQEKGRDLDEYEIRVNNIIKNYSKKQRLLKQKFTREDANEWKDRNIQDTQYISRLMYNLIKDHVQFSNNENFERKVFTVNGQITSHIRKRLGINKIRENGDEHHAIDAAIIATVSQGMIQRITKYYQYIDGRYEKNSGEYIDIETGEIITKEQYEAENGSNFPEPWPKFRKELDIRTTCKTKARMEECLLTEKIFYDDYDDVKPIFISRMPRRKITGQAHLDTIRGLRKSDEGLKTLTKTELTKLKLDKNGEIERYPESQKQDDKLLYNALVEQLRKFGGNGTEAFKKPFYKPKSDGTPGPLVKKVKLEDKTTLAVELNNGKAIAANGDMIRIDVFKVEGEGYYFVPIYVSDTIKNKLPNKASVASKTYAEWKKMQDKDFIFSLYPRDLFYVKSKNKIKLTSINKQDKESLDTNELFAYYVNADISTAAIACINHNGEYERRGLGIKRLQEFKKYEVDVLGNYHEVKLPEKRQDFSNLKKGGSLK

SEQ ID NO: 1648 - protein, 1100 aa, unidentified
  REGION 1..1100: note = Description of Unknown: uncultivated organism with predicted taxonomy: Clostridiales bacterium 42_27
  REGION 1..1100: note = MG21-138 effector
MSEFHYALGLDIGIGSVGWAVLRNQPNGEPDRIQDLGVRIFDKAEQPKTGASLAAPRGDARSARRRLRRHRHRLERIRYLMEQRGIMPVADIQAMYAAGGFQKSPYQLRAEALDRPLTKEEAVRVLIHLAQRRGYKSNSTAEAAKDEKETGKVKTAIEENRRCMAEHGYRTVGEMMYRDERFWQKHPDGTRYHQTRNKAEDYRFTVERAAIVDEVRQIFAAQRRLGTAWMDEYMETAYLSILESQRSFDEGPGGDSPFSGGIGERVGACTFEPDEKRAAKATYTFEYFKLLQDLSRMRLTGMGMPPEPLDAAQREVLKSAALRSASLSYGQIRKKLNLDDDVFFHGLYYGEKTKEEAEKRKWPQMQSYHKMRTALDKVGKGAIGTLTEEQLNAVATILTECKSDAKRIAALREAGIPPQFDEALLPLSFSKYGSLSVQAMQKLIPLLEEGLRYDEACTRVYGDHRGLHPEQRKNRLSLTDMDEITNPVVRRAVSQTIKVINAVVRTYGPPDVVRIELAREMSRTFDERRKMEKRQDDNRAANERAKDQIAEYKGDHATGLDIVKFKLYREQDGVCLYSGQNLDIARLFEPGYADVDHIIPYSRCFDDSYQNKVLVLASENRQKGNRLPYEYFGQDEARWHGYEVRVENLIHNYRKRQKLLKRRLTEEESSGFIDRNLKDTQYITRAVYNLIRDHLAFAESNYRKKPVQAVNGAVTAMLRGRWGVQKIREDGDLHHCLDAAVIAATTPGLVQRLTAYNKHRETWERSPAGYVDPATGEMIELPQEARRDPFPKPWERFRQELEARLDPIDPRHQIDLLKLETYESDEEIKPVFVSRMPNHKVTGAAHAETIRSSKGGDGFTVTKTPLTNLKLNKFGEIEGYYNPASDTLLYDALLARLKDFGGDGAKAFAQPFYKPKKDGSPGPRVDKVKICEKATVGLPVRDGIAANGSMVRIDVFYVEGDGYYFVPIYVADTKKESLPNKAAVAMKPYNLWKKMKDENFVFSLYPGDLVRIQSRKGIKLNLAKGGTGEKEIVRQEGMYYYRSAGIAVAQISVETHDRRYLQPSLGIKTLQSIEKYQVDVLGNYYKVDLPEKRMTFSKEG

SEQ ID NO: 1649 - protein, 934 aa, unidentified
  REGION 1..934: note = Description of Unknown: uncultivated organism with predicted taxonomy: Clostridiales
  REGION 1..934: note = MG21-139 effector
MSEFHYALGLDIGIGSVGWAVLRNQPNGEPDRIQDLGVRIFDKAEQPKTGASLAAPRRDARSARRRLRRHRHRLERIRYLMEQRGIMPVADIQAMYAAGGFQKSPYQLRAEALDRPLTKEEAVRVLIHLAQRRGYKSNSTAEAAKDEKETGKVKTAIEENRRCMAEHGYRTVGEMMYRDERFWQKHPDGTRYHQTRNKAEDYRFTVERAAIVDEVRQIFAAQRRLGTAWMDEYMETAYLSILESQRSFDEGPGGDSPFSGGIGERVGACTFEPDEKRAAKATYTFEYFKLLQDLSRMRLTGMGMPPEPLDAAQREVLKSAALRSASLSYGQIRKKLNLDDDVFFHGLYYGEKTKEEAEKRKWPQMQSYHKMRTALDKVGKGAIGTLTEEQLNAVATILTECKSDAKRIAALREAGIPPQFDEALLPLSFSKYGSLSVQAMQKLIPLLEEGLRYDEACTRVYGDHRGLHPEQRKNRLSLTDMDEITNPVVRRAVSQTIKVINAVVRTYGPPDVVRIELAREMSRTFDERRKMEKRQDDNRAANERAKDQIAEYKGDHATGLDIVKFKLYREQDGVCLYSGQNLDIARLFEPGYADVDHIIPYSRCFDDSYQNKVLVLASENRQKGNRLPYEYFGQDEARWHGYEVRVENLIHNYRKRQKLLKRRLTEEESSGFIDRNLKDTQYITRAVYNLIRDHLAFAESNYRKKPVQAVNGAVTAMLRGRWGVQKIREDGDLHHCLDAAVIAATTPGLVQRLTAYNKHRETWERSPAGYVDPATGEMIELPQEARRDPFPKPWERFRQELEARLDPIDPRHQIDLLKLETYESDEEIKPVFVSRMPNHKVTGAAHAETIRSSKGGDGFTVTKTPLTNLKLNKFGEIEGYYNPASDTLLYDALLARLKDFGGDGAKAFAQPFYKPKKDGSPGPRVDKVKICEKA

SEQ ID NO: 1650 - protein, 1100 aa, unidentified
  REGION 1..1100: note = Description of Unknown: uncultivated organism with predicted taxonomy: Clostridiales bacterium 42_27
  REGION 1..1100: note = MG21-140 effector
MSEFHYALGLDIGIGSVGWAVLRNQPNGEPDRIQDLGVRIFDKAEQPKTGASLAAPRRDARSARRRLRRHRHRLERIRYLMEQRGIMPVADIQAMYAAGGFQKSPYQLRAEALDRPLTKEEAVRVLIHLAQRRGYKSNSTAEAAKDEKETGKVKTAIEENRRCMAEHGYRTVGEMMYRDERFWQKHPDGTRYHQTRNKAEDYRFTVERAAIVDEVRQIFAAQRRLGTAWMDEYMETAYLSILESQRSFDEGPGGDSPFSGGIGERVGACTFEPDEKRAAKATYTFEYFKFLQDLSRMRLTGMGMPPEPLDAAQREVLKSAALRSASLSYGQIRKKLNLDDDVFFHGLYYGEKTKEEAEKRKWPQMQSYHKMRTALDKVGKGAIGTLTEEQLNAVATILTECKSDAKRIAALREAGIPPQFDEALLPLSFSKYGSLSVQAMQKLIPLLEEGLRYDEACTRVYGDHRGLHPEQRKNRLSLTDMDEITNPVVRRAVSQTIKVINAVVRTYGPPDVVRIELAREMSRTFDERRKMEKRQDDNRAANERAKDQIAEYKGDHATGLDIVKFKLYQEQDGVCLYSGQNLDIARLFEPGYADVDHIIPYSRCFDDSYQNKVLVLASENRQKGNRLPYEYFGQDEARWHGYEVRVENLIHNYRKRQKLLKRRLTEEESSGFIDRNLKDTQYITRAVYNLIRDHLAFAESNYRKKPVQAVNGAVTAMLRGRWGVQKIREDGDLHHCLDAAVIAATTPGLVQRLTAYNKHRETWERSPAGYVDPATGEMLELPQEARRDPFPKPWERFRQELEARLDPIDPRHQIDLLKLETYESDEEIKPVFVSRMPNHKVTGAAHAETIRSSKGGYGFTVTKTPLTNLKLNKFGEIEGYYNPASDTLLYDALLARLKDFGGDGAKAFAQPFYKPKKDGSPGPRVDKVKICEKATVGLPVRDGIAANGSMVRIDVFYVEGDGYYFVPIYVADTKKESLPNKAAVAMKPYNLWKKMKDENFVFSLYPGDLVRIQSRKGIKLNLAKGGTGEKEIVRQEGMYYYRSAGIAVAQISVETHDRRYLQPSLGIKTLQSIEKYQVDVLGNYYKVDLPEKRMTFSKEG

SEQ ID NO: 1651 - protein, 1113 aa, unidentified
  REGION 1..1113: note = Description of Unknown: uncultivated organism with predicted taxonomy: Firmicutes
  REGION 1..1113: note = MG21-141 effector
MKKRKKKKKDKKDCHYTLGLDIGIASIGWAVLGNDEEGKPNRIIDLGVRIFDKAEVENTGESLAAPRRDARSARRRLRRHRHRLERIRYLLVQQGVLTQEEMTHLYDKSDMVSPYQLRTEGLDRLLNAQEFSKVLIHLAQRRGYQSNSTAEEAKNEKENGVIKSAILENQQRMERGGYRTIGEMMYRDAAFWETINGIRYHCTRNKAGDYRFTVDRASILLEVSLLFEAQRRLGSPWASQEMEDAYTAILSSQRSFDEGPGGDSPFRKGIADRVGNCTLEPTEQRAAKADVTFERFKLLQDLNHMRLVDNNGSHPLTQQQRDDLEAAAFHTANLTYGQLRKKLGLSEEVRFAGLYYGTDPIEKAEKRKWAQMQSYHKIRMALDKVSKDAILTLTQDQRDAIGEILTAYKADAARIEHLQSAGIPKEYHNALLSLSFSKYGKLSCCAMRKLIPLLQQGMRYDEACREVYQDHRTKEASEKKQRLSLNDIDEITNPVVRRAVSQTIKVVNAVVRIYGNPDAVRIELAREMSHSFDERNKMKKRQEDGRQENEQVKAQILETKAGDRVTGLDIVKFKLYREQDGVCLYSGKGLDLQRLYEPGYADVDHIIPYSRCFDDSYSNKVLVLASENRQKGNCTPYEYFGENEQRWHEFSVRVGASVRDFKKRQKLLNTSFGEEQGKNFIQRNLNDTQHITRVVYNYLRNNLEFADSAYAKAPVQAVNGAVTAMLRGRWGIEKMRGDGDLHHCKDAVVIAATSPSMIQRLSNYYKEEERLFMGKTHFVDPGTGEVLTRKEFQQRFAPQFPQPWPRFREELEARLDPVNPTEALMALHLSTYEPEEEIKPVFVSHMPKRTVTGAAHEETIRSRTETGTVTKTALTALKLDKNGEIDGYYSPQTDPRLYRALVERLKQFGGEGTKAFAEPFYKPKKDGTPGPRVDKVKIERKSSLSVPTARGVAKNGDMIRMDVFRVPNERKSDDSYYFVPIYVADTKKATLPSKAVVKGKAPEAWKQMKPEHFLFSVFKGDLIYVESKKGISLALAKEAVGEKIIQVKSGLFYFCGADISDGSIKIETHDGRYYKKSLGIKELKAFEKRQVDVLGNVSKVRLPETRLEFRGRK

SEQ ID NO: 1652 - protein, 1061 aa, unidentified
  REGION 1..1061: note = Description of Unknown: uncultivated organism with predicted taxonomy: Clostridiales bacterium 42_27
  REGION 1..1061: note = MG21-142 effector
NYALLYQLDLNEWVWRKERDARSARRRLRRHRHRLERIRYLMEQRGIMPVADIQAMYAAGGFQKSPYQLRAEALDRPLTKEEAVRVLIHLAQRRGYKSNSTAEAAKDEKETGKVKTAIEENRRCMAEHGYRTVGEMMYRDERFWQKHPDGTRYHQTRNKAEDYRFTVERAAIVDEVRQIFAAQRRLGTAWMDEYMETAYLSILESQRSFDEGPGGDSPFSGGIGERVGACTFEPDEKRAAKATYTFEYFKLLQDLSRMRLTGMGMPPEPLDAAQREVLKSAALRSASLSYGQIRKKLNLDDDVFFHGLYYGEKTKEEAEKRKWPQMQSYHKMRTALDKVGKGAIGTLTEEQLNAVATILTECKSDAKRIAALREAGIPPQFDEALLPLSFSKYGSLSVQAMQKLIPLLEEGLRYDEACTRVYGDHRGLHPEQRKNRLSLTDMDEITNPVVRRAVSQTIKVINAVVRTYGPPDVVRIELAREMSRTFDERRKMEKRQDDNRAANERAKDQIAEYKGDHATGLDIVKFKLYREQDGVCLYSGQNLDIARLFEPGYADVDHIIPYSRCFDDSYQNKVLVLASENRQKGNRLPYEYFGQDEARWHGYEVRVENLIHNYRKRQKLLKRRLTEEESSGFIDRNLKDTQYITRAVYNLIRDHLAFAESNYRKKPVQAVNGAVTAMLRGRWGVQKIREDGDLHHCLDAAVIAATTPGLVQRLTAYNKHRETWERSPAGYVDPATGEMIELPQEARRDPFPKPWERFRQELEARLDPIDPRHQIDLLKLETYESDEEIKPVFVSRMPNHKVTGAAHAETIRSSKGGDGFTVTKTPLTNLKLNKFGEIEGYYNPASDTLLYDALLARLKDFGGDGAKAFAQPFYKPKKDGSPGPRVDKVKICEKATVGLPVRDGIAANGSMVRIDVFYVEGDGYYFVPIYVADTKKESLPNKAAVAMKPYNLWKKMKDENFVFSLYPGDLVRIQSRKGIKLNLAKGGTGEKEIVRQEGMYYYRSAGIAVAQISVETHDRRYLQPSLGIKTLQSIEKYQVDVLGNYYKVDLPEKRMTFSKEG

SEQ ID NO: 1653 - protein, 1040 aa, unidentified
  REGION 1..1040: note = Description of Unknown: uncultivated organism with predicted taxonomy: Clostridiales bacterium 42_27
  REGION 1..1040: note = MG21-143 effector
RSARRRLRRHRHRLERIRYLMEQRGIMPVADIQAMYAAGGFQKSPYQLRAEALDRPLTKEEAVRVLIHLAQRRGYKSNSTAEAAKDEKETGKVKTAIEENRRCMAEHGYRTVGEMMYWDERFWQKHPDGTRYHQTRNKAEDYRFTVERAAIVDEVRQIFAAQRRLGTVWMDEDMETDYLSILESQRSFDEGPGGDSPFSGGIGERVGACTFEPDEKRAAKATYTFEYFKLLQDLSRMRLTGMGMPPEPLDAAQREVLKSAALRSASLSYGQIRKKLNLDDDVFFHGLYYGEKTKEEAEKRKWPQMQSYHKLRTALDKVGKGAIGTLTEEQLNAVATILTECKSDAKRIAALREAGIPPQFDEALLPLSFSKYGSLSVRAMQKLIPLLEEGLRYDEACTRVYGDHRGLRPEQRKNRLSLTDMEEITNPVVRRAVSQTIKVINAVVRTYGPPDVVRIELAREMSRTFDERRKMEKRQDDNRAANERAKDQIAEYKGDHATGLDIVKFKLYREQDGVCLYSGQNLDIARLFEPGYADVDHIIPYSRCFDDSYQNKVLVLASENRQKGNRLPYEYFGQDEARWHGYEVRVENLIHNYRKRQKLLKRRLTEEESTGFIDRNLKDTQYITRAVYNLIRDHLAFAESNYRKKPVQAVNGAVTAMLRGRWGVQKIREDGDLHHCLDAAVIAATTPGLVQRLTAYNKHRETWERSPAGYVDPATGELIELPQEARRDPFPKPWERFRQELEARLDPIDPRHQIDLLKLETYESDEEIKPVFVSRMPNHKVTGAAHAETIRSSKGGDGFTVTKTPLTNLKLNKFGEIEGYYNPASDTLLYDALLARLKDFGGDGAKAFVQPFYKPKKDGSPGPRVDKVKICEKATVGLPVRDGIAANGSMVRIDVFYVEDDGYYFVPIYVADTKKESLPNKAVVAYKAYSEWKEMKDENFIFSLYPGDLVRIQSRKGIKLNLAKGGTGEKEIVRQEGMYYYRASGITVGAIQIETHDRRYLQPSLGIKTLQSIEKYQVDVLGNYYKVDLPEKRMTFSKEG

SEQ ID NO: 1654 - protein, 1098 aa, unidentified
  REGION 1..1098: note = Description of Unknown: uncultivated organism with predicted taxonomy: Clostridiales
  REGION 1..1098: note = MG21-144 effector
LSLRYTLGLDIGIASVGWAVLENNIDGEPIKIERLGVRIFDKAEQPKTGASLAEPRREARGQRRTIRRRRHRKDRIKQLIQQNGIMTRVEMAEMFEHLQFETSVYELRVQALERALTKQEFVRVLIHLAQRRGYKSNSKSEEAKDKENGKVKSAISENKKCMEENGYRTIGEMLLNDDRFWECNPDGIKIFVPHNHPDDYRTTVERSMVEDEIQLIFSRQRALGVPYATSEFEEAYLEIWGSQRNFDEGPGGKSPYGGNMIEKMLGHCTFEKDEPRAAKGSYSAEYFRLLQDVNHLRLVKNNGESCALTREQKQIYIDLVMKSAAASYAQLRKKLELSNDISFNMLRYGSDEIGKVERKKLGHMKFYHEMRKALNTVQKDAISTVSWEQRDEIARILLCYKSDDKRKAQLEKLDIPREFIPALLTLSTSKTAHLSVKALRKLIPYLEKGMTYAEACKEVYGEQKSSITKKNKLSLFDIEPINNPVVRRAVSQTIRVINAVVREYGAPEVVRVELAREMGKPYDVRTQMTKKQEANAKRNEELRQQIKKIKGAEPTGQDIVKFKLFQDQNGVCLYSGQNLDITRLFEAGYVDVDHIIPYSISFDDSYTNKVLVRSPENRQKGNRIPADYFKSDPARWKRFETLVNTQVHNWKKKRNLLTQVLSEEQKNGFKQRNLVDTQYIARVIYNLINDHLQFAETGKYDKKRRTQAVNGAITAHVRKRLGIQKIREDGDLHHAVDAAVVACVSPGMIQKITQYTKHRECIRKTKEGYLDTETGELMTREAYDAKYSPRFPAPWERFRQELEARLSDNPAEEIARLHLATYDSEEEIKQVFVSRKQTHKISGAAHEATIRSAKKPGGSISKKPLTSLSLNKKTGEIKDYYAPESDRLLYEALKKRLEEFDGNAEKAFAEPFYKPKHDGTRGPLVKKVKIYEKKTITVPVGGGNADNGSMIRVDVFYMEDDGYYYVPIYTADVIKDELPNKAVVQKKLPEDWKEMDDKDFLFSMYPNELLYIEHRKGIKLKTKKGSSRQEQIVRKAGFYYFKGLNIAANALFIITHDNGYEQPSLGGKTLSCLKKYTVDALGNYSEVSLPEKRKPLRG

SEQ ID NO: 1655 - protein, 1096 aa, unidentified
  REGION 1..1096: note = Description of Unknown: uncultivated organism with predicted taxonomy: Clostridiales
  REGION 1..1096: note = MG21-145 effector
MEGFRYSLGLDIGIASVGFAVIQNDRNGEPIKIERLGVRVFDRAEQPKTGASLALPRRQARGSRRVIRRRRHRKERIKWLIEDSGLMSRPEQDALLGSGAFDKSVYELRVDALDRRLADDEAVRLLIHFAQRRGYKSNSKAEEAKEAAESGKVKSAISANRQRMEENGYRTVGEMLWRDPLFKRTEPDGRQILVVHNQPGEYKVTVERSMLLEELALIFVRQRELGAPWASEQFEVAYTDIWSSQRNFDDGPGGDSPYGGSQISRMLGKCIFEKELDRAPRASFSAEYFRLLQTANNLKIVGRGQPSEFLDEEQRKLFVELAFSSAAATYTQLRKKLDLPDDLYFNHLYYGEKSKEEIEKKKLGMLPFYHRLRTALNKVEKGAIDQLTAAQRDDIAMILLLYKSDDNRTLRLRDAGIPEEYIPAILELSTAKAAHLSLKAMRKLLPYLEQGYTYDKACKEVYGSHDGKKETERTGRLRLDMTDEITNPVVRRAVSQSIKVINAVVRVYGPPETVRIELARELGKTFDERSKQEKRINENAARNEQAREQIREYKSGDSTGLDIVKFKLFQEQNGVCLYSGKNLDISRLFEAGYVDVDHIIPYSISFDDSYSNKVLVLAGENRQKGNRIPYQYFGNDRERWNRFETLVGTQIRSFKKRKNLLIRSLGEAQIEGFRQRNLVDTQYLSRVIFRLIDENMAFAETGNYKRKTQTVSGAITAQVRKRLGIDKIRENGDLHHAADAAVIACISPGMVHKVTNYAKRCELYRDGQGYIDYETGEVMTKEAFDEKYAPRFPEPWPMFRKELEARLSADPRAEIEHLNLPAYDSSDELRPVFVSRMPRHKVTGAAHMETVRSGKLEGKTVTKTALTDLKLVKGEIKGYYRPEDDPLLYDALKARLQAFGGDAKKAFAEPFHKPKHDGAPGPLVKKVKIMDASSLNVPVNGGIAANGSMVRVDVFRVEDDGYYFVPVYVSDTIRTRLPDRAVVANKPYSEWKVMRDEDFVFSLFPGDLIRIKNSRRIKLNAAKGSTGEPVKYVKDALFYFSGLNISTGALGIQLHDRSYGQTGLGGKTLSLIEKYQVDVLGNYAPVHLPEKRMGFR

SEQ ID NO: 1656 - protein, 1521 aa, unidentified
  REGION 1..1521: note = Description of Unknown: uncultivated organism with predicted taxonomy: Bacteroidales
  REGION 1..1521: note = MG22-1 effector
MTKNTRNIIGLDLGTNSIGWSWIQQLISPTPTQPSEYLFDGTPIIRMSGSRIIPMPGDVTGSFERGETISKTKDRTAKRMARRMNERFQLRRERLNRVLNIMGFLPEHYARALDRYGKLNEESNTTIAWRSKEDGKNEFIFYPSFLEMASIFKEHHPDIQRIPLDWTLYYLRSKALHQAITKEELSWVLHSFNQKRGYYQSREDITEEDKTKKVEYIKGVVNSVEDTGEKAKGKKIYKVTFADGTEFTSTKSEAPLWIGRTREIIVTTSLDTSGKPKLDKEGKIIQSAKTPDEKDWTLIKIRTEATIDDSKLTVGEYIFHALLKNPETKIKGAHVSTIDRRFYINEINAILKEQEKYHEELRDKSLYEQCTQALYAQNEVRRNIIAPWSMSDLLIKDILFYHRPLKSKKSQISECSLEFHTYTDKDGATHRQGIKCIPTSHPLFQEYRIWQFIANLRIYERERFDNGKHFINEDRTSDFLTTKKKEELYEWLAEKDSVSQKTLLGHLGLKVERYHWNFPEEKTYPCGETRHLIQSRMKKANLQKAFHSLISDEQKDCFERGLWHILYSVSDYNELCKALKTFARKTGFTLEEQSLFVEAFSSCPPFKKDYGAYSKRAITKLLPLMRIGKFWHEESIDSTTKTRIEHLISGEECSGIDVRVREKVTKAGLCESIEQYQGLPQWLANYVVYNRHSEASEITKWESPDELDNYIRSFKQYSLRNPIVEQVSLETLRVVRDLWTELQKEGQTIDEIHLEMGRDLKNTAEERSRIFRRNSENEDTIFRIKLLLEEFYANEKDIKDVRPYSPSQQELLRIYEEGVWQQEKDIPQDIKDIKKRISNDKDIKDITPNDIQRYRIWMDQKYCSPYTGKTIPLSRLFTTDYEIEHVIPRSRYFDDSYNNKVICEAAVNKDKNNRLGMEYIMAAGGKTIELGNGKNVQILKEEEYVELVDKIFGSNTRKRNIMLADEITEEFSHRQLNDTRYIARFMKGILSNIVREKNAEGTLEPEETSKNLIVCSGRITDRVKQDWGLNDIWNHIITPRFERLNKKTSSNDFGEYVCKEGKRYFQTRVPLNLQKGFNKKRIDHRHHAMDAIAIACINRSIVNYLNNAAANQTEREDLRRAVCIPERNGQTKRQLRSPWHCFARDAENALRQIVVSFKQNLRVATKATNSYECFDTASGKKIRKHQSNREHYAIRKPLHKDSVYGEVILTSIASVNLKKALLKAERILDKRLKEKIFELRKLYNYSNKQIEEHLTKVCINCPEWKNYDFKKIAVRILSNDADATHIVAIRKPLDESFDEVKINTITDTGIQKILLNHLSRYADDPKKAFSPEGIEDMNANIASLNGGKQHLPIYKVRVSEKDNGGYFPIGQKGNRPKKYVTTAKDTNLFFAVYADSKGKRSYKTIDLRTAIECRKQGLSVAPSINEKGDKLLFTLSPNDLVYMPSEGEEANGFAIDNNLNKDQIYKMVSANNKQCFFIPHTVADFISRGEEYNSHNKIELTEDRRSIKEHCVPLKVNRLGK

SEQ ID NO: 1657 - protein, 1542 aa, unidentified
  REGION 1..1542: note = Description of Unknown: uncultivated organism with predicted taxonomy: Bacteroidales
  REGION 1..1542: note = MG22-3 effector
MKNILGLDLGTNSIGWAWIQSKVPQQTDDCPSSSEYLMPDCATIRMAGSRVLPMDGKMLSGFESGLAVSKTKERTTYRMARRVNERFQLRRERLNRVLRILGFLPAHYEACLDRYGKIDEEKNVTIPWVPTADGKRKFLFYASFLEMKERFHEHHPNLEKIPLDWTLYYLRTKALQQAITKEELAWVLHSFNQKRGYNQSRDEVKDEDASQKEEYVKVKVVSVVDSGEKKKGKTSYIVTTESNLQFTTENAAAPSWLDKEREFIVTTKLNPTGLPKMNQEGRIDCTVRIPKEEDWELKKKRTEALIADSHMTVGEYIFHSLLDNPDAKIKGAKVGTIDRHFYKEELIAILKKQAAFHPELKDAERYAECVSALYASNEMHRNILSAWDMPRLIVNDIIFYQRPLKSKKSDIAECPFESRYFMDKEKKLQKQGIKCIPTSHPHFQEYRIWQFLSNLRVLRREVRENGRYMTDVDVSAHYLTDKVKVELYEWLAGKANVKQKELLSKLRMSEKEFRWNYVEDNIYPCGETRSLLSTRLKKAKLPLSLLDSPSSDGSHTFEFELWHILYSVSDLAELRKALRRFARKHDFTAEQQEAFVETFVKCPPFKKDYGAYSDKALVKLLSLMRIGKYWNADRIDTNTRRRIACLLDGEACDSISLRTREKVAERGLQQSIEQFQGLPQSLACYVVYDRHAEASEVVRWESPADLQQFTRQFKQYSLRNPIVEQVVLETLRVVHDLWEEIQKDGGTIDEIHLEMGRDLKNTAEQRARIMRRNRENEMTNFRIKLLLQELHDCQPDIEGIRPYSPSQQELLRLYEETVWESESGKLGGKEASKDIPDDIKKIRDLLSKPSDKPIPQSAIQRYRLWLDQKYLSPYTGRPIPLARLFTADYEIEHIIPRSIFFDDSYANKVICESAVNKLKNNRLGMQFIREMDGRVETVKLGEGRETSILSVDGYVDLVNDLFRNNPRKRNNLLAEEITEDFCHRQLSDTRYIARYIKGILSNIVRQRAADGTLEQEATSKNLIVCTGQITDRVKQDWGLNDVWNHIITPRFERLNRMTGSNDYGEWCCKEGKRYFQTRVPLHLQIGFNKKRIDHRHHAMDAIAIACVNRNVVNYLNNAAAHATDRMDLRMRICRPSGNGQTKKEIRSPWKNFAHDAECALQAITVSFKQNVRIITKATNTYEGYDASGKKVRRCQTSSDHYSIRKPLHKDTVYGEVVLPVVNQVPLKKALLRVNRIVNGKLRKKIQEMQSSGLTDKQIVDFFMKTCADSPEWNSINFKKIEVRAYSNEEGQTRMAAIRTAIDESFSEKVIGSITDVSIQRILLNHLRECNGDSEEAFSPEGIETMNRNIVRLNGGKPHLPIYKVRLGEAMGKKFAVGQRGNKGKKFVITAKNTNLFFAVYANDEGKRSFETIDLHCALEMQKQGSSVAPPINENGDKLLFVLSPNDLVYVPSESELQHDIDSEDLKLDHVFKVVSFSENRCCFVPHSMSSPIAAGFEFNSPNKIEVVSRLGLFEQDKETVSIKNICLPIKMDRLGHLHLVKI

SEQ ID NO: 1658 - protein, 1542 aa, unidentified; identical to SEQ ID NO: 1657
  REGION 1..1542: note = Description of Unknown: uncultivated organism with predicted taxonomy: Bacteroidales
  REGION 1..1542: note = MG22-4 effector

SEQ ID NO: 1659 - protein, 1521 aa, unidentified
  REGION 1..1521: note = Description of Unknown: uncultivated organism with predicted taxonomy: Bacteroidales
  REGION 1..1521: note = MG22-5 effector
MTKSTRNIIGLDLGTNSIGWSWIQQLISPTPTQPSEYIFDGTPIIRMSGSRIIPMPGDVTGSFERGETISKTKDRTANRMARRMNERFQLRRERLNRVLNIMGFLPEHYARALDRYGKLNEESNTTIAWRSKEDGKNEFIFYPSFLEMASIFKEHHPDIQRIPLDWTLYYLRSKALHQAITKEELSWVLHSFNQKRGYYQSREDITEEDKTKKVEYIKGVVNSVEDTGEKAKGKKIYKVTFADGTEFTSTKSEAPLWIGRTREIIVTTSLDTSGKPKLDKEGKIIQSAKTPDEKDWTLIKIRTEATIDDSKLTVGEYIFHALLKNPETKIKGAHVSTIDRRFYINEINAILKEQEKYHEELRDKSLYEQCIKALYAQNEVRRNIIAPWSMKDLLTKDILFYHRPLKSKKSQISECPLEFHCYTDKDGETHRQGIKCIPVSHPLFQEYRIWQFISNLRIYEREHFDNGKHFTNVDKTSEFLTNEKKEELYEWLAEKDSVSQKTLLGHLGLKVERYHWNFPEEKTYPCGETRHLIQSRLKKANLQKAFHSLISDEQKDCFERGLWHILYSVSDYNELCKALKTFARKIGFTLEEQLLFVEAFSSCPPFKKDYGAYSKRAITKLLPLMRIGKFWHEESIDSTTKNRIEHLISGEECSGIDVRVREKVAKAGLCESIEQYQGLQQWLANYVVYNRHSEASEITKWESPDELDNYIRSFKQYSLRNPIVEQVSLETLRVVRDLWAELQKEGQTIDEIHLEMGRDLKNTAEERSRIFRRNSENEDTNFRIKLLLEEFYANEKDIIDVRPYSPSQQELLRIYEEGVWQQEKDIPQDIKDIKKRISNDKDIKDITPNDIQRYRIWMDQKYCSPYTGKTIPLSRLFTTDYEIEHVIPRSRYFDDSYNNKVICEAAVNKDKNNRLGMEYIMAAGGKTIELGNGKNVQILKEEEYVELVDKIFGNNTRKRNIMLADEITEEFSHRQLNDTRYIARFMKGILSNIVREKNADGTLEPEETSKNLIVCSGRITDRVKQDWGLNDIWNHIITPRFERLNTKTSSNDFGEYVCKDGKRYFQTRVPLNLQKGFNKKRIDHRHHAMDAIAIACVNRSIVNYLNNAAANQTEREDLRRAVCIPERNGQTKRQLRSPWHCFARDAENALRQIVVSFKQNLRVATKATNSYECFDTASGKKIRKHQSNREHYAIRKPLHKDSVYGEVILPSIASVNLKKALLKADRILDKRLKDKIFELRKLYNYSNKQIEEHLTKVCINRPEWKNYDFKKIAVRILSNDADATHIVAIRKPLDETFDEEKIKAITDTGIQKILLNHLRQNDNDPKKAFTPEGIENMNANIVLLNGGKQHLPIYKVRISEKNNGGYFPIGQKGNRSQKYVTTAKDTNLFFAVYADSKGKRSFNMIDLRTAIECRKQGLSVAPSINEKGEKLLFTLSPNDLVYMPSEEEEANGFSIKGNLIKEHIYKMVSATNRQCFFIPHTVADFISRGQEYNVLNKIELAEDGRSIKEHCVPIKVNRLGK

SEQ ID NO: 1660 - protein, 1467 aa, unidentified
  REGION 1..1467: note = Description of Unknown: uncultivated organism with predicted taxonomy: Bacteroidales
  REGION 1..1467: note = MG22-6 effector
MTKNTRNIIGLDLGTNSIGWSWIQQLISPTPTQPSEYIFDGTPIIRMSGSRIIPMPGDVTGSFERGETISKTKDRTAKRMARRMNERFQLRRERLNRVLNIMGFLPEHYARALDRYGKLNEESDTTIAWRSKEDGKNEFIFYPSFLEMASIFKEHHPDIQRIPLDWTLYYLRSKALHQAITKEELSWVLHSFNQKRGYYQSREDITEEEIIVTTSLDTSGKPKLDKEGKIIQSAKTPDEKDRTLIKIRTEATIDDSKLTVGEYIFHALLKNPETKIKGAHVSTIDRRFYINEINAILKEQEKYHKELRDKSLYEQCIKALYAQNEVRRNIIAPWSMSDLLIKDILFYHRPLKSKKSQISECPLEFHTYTDKNGATHRQGIKCIPTSHPLFQEYRIWQFIANLRIYERERFDNGKHLINEDKTSDFLTTKKKEELYEWLAERDSVSQKTLLGKIGLKVEDYHWNFPEEKTYPCGETRHLIQSRLKKANLQKAFHSLISDEQKDCFERGLWHILYSVSDYNELCKALKTFARKTGFTLEEQLLFVEAFSSCPPFKKDYGAYSKRAITKLLPLMRIGKFWHEESIDSTTKNRIEHLISGEECSDIDVRVREKVAKAELCESIGQYQGLQQWLANYVVYNRHSEASEITKWESPDELDNYIRSFKQYSLRNPIVEQVSLETLRVVRDLWTELQKEGQTIDEIHLEMGRDLKNTAEERSRIFRRNSENEDTNFRIKLLLEEFYANEKDIKDVRPYSPSQQELLRIYEEGVWLQEKDIPQDIKDIKKRISNDKDIKDITPNDIQRYRIWMDQKYCSPYTGKTIPLSRLFTTDYEIEHVIPRSRYFDDSYNNKVICEAAVNKDKNNRLGMEYIMAAGGKTIELGNGKNVQILKEEEYVELVDKIFGNNTRKRNIMLTDEITEDFSHRQLNDTRYIARFMKGILSNIVRKKNADGTLEPEETSKNLIVCSGRITDRVKQDWGLNDIWNHIITPRFERLNKKTSSNDFGEYVCKDGKRYFQTRVPLNLQKGFNKKRIDHRHHAMDAIAIACVNRSIVNYLNNAAANQTEREDLRRAVCIPERNGQTKRQLRSPWHCFARDAENALRQIVVSFKQNLRVATKATNSYECFDTASGKKIRKHQSNREHYAIRKPLHKDSVYGEVILTSIASVNLKKALLKADRILDKRLKEKIFELRKLYNYSNKQIEEHLTKVCINCPEWKNYDFKKIAVRILSNDADATHIVAIRKPLDESFDEVKINTITDTGIQKILLNHLSRYADDPKKAFSPEGIEDMNANIASLNGGKQHLPVYKVRVSEKDNGGYFPIGQKGNRPKKYVTTAKDTNLFFAVYADSKGKRSYKTIDLRTAIECRKQGLSVAPSINEKGDKLLFTLSPNDLVYMPSEGEEANGFAIDNNLNKDQIYKMVSANNKQCFFIPHTVADFISRGEEYNSHNKIELTEDRRSIKEHCVPLKVNRLGK

SEQ ID NO: 1661 - protein, 1521 aa, unidentified; identical to SEQ ID NO: 1659
  REGION 1..1521: note = Description of Unknown: uncultivated organism with predicted taxonomy: Prevotella
  REGION 1..1521: note = MG22-7 effector

SEQ ID NO: 1662 - protein, 1521 aa, unidentified
  REGION 1..1521: note = Description of Unknown: uncultivated organism with predicted taxonomy: Bacteroidales
  REGION 1..1521: note = MG22-8 effector
MTKNTRNIIGLDLGTNSIGWSWIQQLISPTPTQPSEYIFDGTPIIRMSGSRIIPMPGDVTGSFERGETISKTKDRTAKRMARRMNERFQLRRERLNRVLNIMGFLPEHYARALDRYGKLNEESDTTIAWRSKEDGKNEFIFYPSFLEMASIFKEHHPDIQRIPLDWTLYYLRSKALHQAITKEELSWVLHSFNQKRGYYQSREDITEEDKTKKVEYIKGVVNSVEDTGEKAKGKKIYKVTFANGTEFTSTKSEAPLWIGRTREIIVTTSLDTSGKPKLDKEGKIIQSAKTPDEKDWTLIKIRTEATIDDSKLTVGEYIFHALLKNPETKIKGAHVSTIDRRFYINEINAILKEQEKYHKELRDKSLYEQCIKALYAQNEVRRNIIAPWSMSDLLIKDILFYHRPLKSKKSQISECPLEFHTYTDKNGATHRQGIKCIPTSHPLFQEYRIWQFIANLRIYERERFDNGKHLINEDKTSDFLTTKKKEELYEWLAERDSVSQKTLLGKIGLKVEDYHWNFPEEKTYPCGETRHLIQSRLKKANLQKAFHSLISDEQKDCFERGLWHILYSVSDYNELCKALKTFARKTGFTLEEQLLFVEAFSSCPPFKKDYGAYSKRAITKLLPLMRIGKFWHEESIDSTTKNRIEHLISGEECSDIDVRVREKVAKAELCESIGQYQGLQQWLANYVVYNRHSEASEITKWESPDELDNYIRSFKQYSLRNPIVEQVSLETLRVVRDLWTELQKEGQTIDEIHLEMGRDLKNTAEERSRIFRRNSENEDTNFRIKLLLEEFYANEKDIKDVRPYSPSQQELLRIYEEGVWLQEKDIPQDIKDIKKRISNDKDIKDITPNDIQRYRIWMDQKYCSPYTGKTIPLSRLFTTDYEIEHVIPRSRYFDDSYNNKVICEAAVNKDKNNRLGMEYIMAAGGKTIELGNGKNVQILKEEEYVELVDKIFGNNTRKRNIMLTDEITEDFSHRQLNDTRYIARFMKGILSNIVRKKNADGTLEPEETSKNLIVCSGRITDRVKQDWGLNDIWNHIITPRFERLNKKTSSNDFGEYVCKDGKRYFQTRVPLNLQKGFNKKRIDHRHHAMDAIAIACVNRSIVNYLNNAAANQTEREDLRRAVCIPERNGQTKRQLRSPWHCFARDAENALRQIVVSFKQNLRVATKATNSYECFDTASGKKIRKHQSNREHYAIRKPLHKDSVYGEVILTSIASVNLKKALLKADRILDKRLKEKIFELRKLYNYSNKQIEEHLTKVCINCPEWKNYDFKKIAVRILSNDADATHIVAIRKPLDESFDEVKINTITDTGIQKILLNHLSRYADDPKKAFSPEGIEDMNANIASLNGGKQHLPVYKVRVSEKDNGGYFPIGQKGNRPKKYVTTAKDTNLFFAVYADSKGKRSYKTIDLRTAIECRKQGLSVAPSINEKGDKLLFTLSPNDLVYMPSEGEEANGFAIDNNLNKDQIYKMVSANNKQCFFIPHTVADFISRGEEYNSHNKIELTEDRRSIKEHCVPLKVNRLGK

SEQ ID NO: 1663 - protein, 1524 aa, unidentified
  REGION 1..1524: note = Description of Unknown: uncultivated organism with predicted taxonomy: Bacteroidales
  REGION 1..1524: note = MG22-9 effector
MTKNTRNIIGLDLGTNSIGWSWIQQLISPIPTQPSEYLFDGTPIIRMSGSRIIPMPGDVTGSFERGETISKTKDRTAKRMARRMNERFQLRRERLNRVLNIMGFLPEHYARALDRYGKLNEESNTTIAWRSKEDGKNEFIFYPSFLEMASIFKERHPDIQRIPLDWTLYYLRSKALHQAITKEELSWVLHSFNQKRGYYQPRKDITEKEKTKKIEYIKDIVRSVEDTGEKTKGKKAYKVTFDNGFKFISTEAEAPLWVGRTREVIVTTSLDATGAPKRDKEGNIIQSVKAPEEKDWTLKKIRTENHIDKSKLTVGEYILQTLLEKPNTKIKGAHVSTIDRRFYIHEINAILKVQEKYHKELRDKSLYEQCTQALYTQNEVRRNIIAPWSMSDLLIKDILFYHRPLKSKKSQISECPFEFHNYTDKNGASHRQGIKCIPTSHPLFQEYRIWQFIANLRIYERERFDNGKHLINENKTSEFLTSEKKEELFEWLAEKDSVSQKTLLGHIGLKVEHYHWNFPEEKTYPCGETRHLIQSRLKKANLLKSFCSLVPENQKKEFELKLWHILYSVSDYNELRKALETFARKTGFTREEQDLFVEFFSSCPPFKKVYGAYSKRAIARLLPLMRLGKYWHEEHIDSATMNRIEHLISGEECNGIDVRVRENIAKFGLNESIEQYQGLPQWLACYVVYNRHSEASEVTKWESPEELDNYIKAFKQYSLRNPIVEQISLETLRVVHDLWAEIQKEGQTIDEIHLEMGRDLKNTAEERSRIFRRNSENEDTNFRIKLLLEEFYTNEEDMEGIRPYSPSQQELLRIYEEGVWQQEKEIPQDIKDIKKKLSSDKDINEITHSDVQRYRIWMDQKYCSPYTGNPIPLSRLFTPDYEIEHVIPRSRYFDDSYNNKVICEAAVNKDKNNRLGMEYIMEAGGKTIELGNGKNVQVLKEREYVELVNEVFKNNTRKRNILLADEIPEDFSHRQLNDTRYIARFMKGFLSNIVREKNADGTLELEETSKNLIVCSGRITDRIKQDWGLNDVWNHIITPRFERLNQKTSSDNFGEYVCKEGKRYFQTRVPLNLQKGFNKKRIDHRHHAMDAIAIACVNRSIVNYLNNAAANQTEREDLRRAVCIPERNGQTKRQLRSPWRNFAKDAENALRQIVVSFKQNLRILTKATNSYECFDTTSGKKIRRHQVNEEHYTVRKPLHEDFVYGEVILSSIASVNFKKALQKANRILDKRLKDKIFELRKLYSYSNKQIEEHLTKVCINTPEWKDYDFKKINIRILSNDEGATHIVAIRKPLDESFDKVKINTITDTGIQKILLNHLSRYAEDPKKAFSLEGIEDMNANITSLNGGKQHLPIYKVRVSEKDNGGYYPIGQKGNRSKKYVTTAKDTNLFFAVYADSNGKRSFKTIDLRTAIECKKQGLSVAPSVNEKGEQLLFTLSPNDLVYMPSEEEEANGFAIDNNLNKEHIYKMVSTDSNRCFFIPHTVADFISRGEEYNRHNKIELTEDRRSIKEHCVPLKVNRLGKKTL

SEQ ID NO: 1664 - protein, 1521 aa, unidentified
  REGION 1..1521: note = Description of Unknown: uncultivated organism with predicted taxonomy: Bacteroidales
  REGION 1..1521: note = MG22-10 effector
MTKNTRNIIGLDLGTNSIGWSWIQQLISPTPTQPSEYLFNGTPIIRMSGSRIIPMPGDVTGSFERGETISKTKDRTAKRMARRMNERFQLRRERLNRVLNIMGFLPEHYARALDRYGKLNEESNTTIAWRSKEDGKNEFIFYPSFLEMASIFKERHPDIQRIPLDWTLYYLRSKALHQAITKEELSWVLHSFNQKRGYYQSREDITEEDKTKKVEYIKGVVNSVEDTGEKAKGKKIYKVTFADGTEFTSTKSEAPLWIGRTREIIVTTSLDTSGKPKLDKEGKIIQSAKTPDEKDWTLIKIRTEATIDDSKLTVGEYIFHALLKNPETKIKGAHVSTIDRRFYINEINAILKEQEKYHEELRDKSLYEQCIKALYAQNEVRRNIIAPWSMKDLLTKDILFYHRPLKSKKSQISECPLEFHCYTDKAGETHRQGIKCIPVSHPLFQEYRIWQFISNLRIYEREHFDNGKHFSNVDKTSEFLTSEKKEELYEWLAEKDSVSQKTLLGKIGLKVEDYHWNFPEEKTYPCGETRHLIQSRLKKANLQKAFHSLISDEQKDCFERGLWHILYSVSDYNELCKALKTFARKTGFTLEEQLLFVEAFSSCPPFKKDYGAYSKRAITKLLPLMRIGKFWHEESIDSTTKNRIEHLISGEECSGIDVRVREKVAKAGLCESIEQYQGLQQWLANYVVYNRHSEASEITKWESPDELDNYIRAFKQYSLRNPIVEQVSLETLRVVRDLWAELQKECQTIDEIHLEMGRDLKNTAEERSRIFRRNSENEDTNFRIKLLLEEFYANEKDIKDVRPYSPSQQELLRIYEEGVWQQEKDIPQDIKDIKKRISNDKDIKDITPNDIQRYRIWMDQKYCSPYTGKTIPLSRLFTTDYEIEHVIPRSRYFDDSYNNKVICEAAVNKDKNNRLGMEYIMAAGGKTIELGNGKNVQILKEEEYVELVDKIFGNNTRKRNIMLADEITEEFSHRQLNDTRYIARFMKGILSNIVREKNADGTLEPEETSKNLIVCSGRITDRVKQDWGLNDIWNHIITPRFERLNTKTSSNDFGEYVCKEGKRYFQTRVPLNLQKGFNKKRIDHRHHAMDAIAIACVNRSIVNYLNNAAANQTEREDLRRAVCIPERNGQTKRQLRSPWHCFARDAENALRQIVVSFKQNLRIATKATNSYECFDTASGKKIRKHQSNREHYAIRKPLHKDSVYGEVILPSIASVNLKKALLKADRILDKRLKDIIFELRKLYNYSNKQIEEHLTKVCINRPEWKNYDFKKIAVRILSNDADATHIVAIRKPLDESFDEVKINTITDTGIQKILLNHLSRYADDPKKAFSPEGIEDMNANIASLNGGKQHLPIYKVRVSEKDNGGYFPIGQKGNRPKKYVTTAKDTNLFFAVYADSKGKRSYKTIDLRTAIECRKQGLSVAPSINEKGDKLLFTLSPNDLVYMPSEGEEANGFAIDNDLNKEQIYKMVSATNNRCFFIPHTVADFISRGQEYNSVNKIELTEDGRSIKEHCVPLKVNRLGK

SEQ ID NO: 1665 - protein, 933 aa, unidentified
  REGION 1..933: note = Description of Unknown: uncultivated organism with predicted taxonomy: Prevotella
  REGION 1..933: note = MG22-11 effector
MKKKNILGLDLGTNSIGWAWLQQDDTEQTIQTEYLLQNNPTIRMSGSRIIPTSGDVINDFEAGKAVSKTKDRTTFRMTRRMNERFKLRRERLNRVLRILGMLPAHYAQHVDRYGKPDEEKQPKIAWEVAPDGKSNFLFHQSFLEMVKLFGVHQPQLQRIPLDWTLYYLRHKALTQPISKAELAWILHSFNQKRGYNQTRDELTEVNEKEKLEYTNSKVVSVELIEQKKSPLYLVTFENGVAVETSKVDAPQWVGQMRYAIITTKLNDLGQPLHKKDGSIDQKVSLPNDDDWALNKLRTETQIDQSHTTVGNYIFQTLLKNPETKIKGAHVCTIDRRFYEDELNAILLKQAEFHPELTNRNLYEACLMALYANNEAHRYNLATQNTCNLITKDIIFYQRPLKSKKSLIAECPFEKRIFCDAEGNVQMQGIKCIPVSHPHFQEYRLWQFLNNLRIFQREVVEDGKFTMNVDVTDKYINENSLTLLFEWLQDKITIKQKELLAKLRLKESDFRWNYVEDKAYPCGETRHVLASKLKKLKGITNDFLAQPSLNGKTTVECELWHILYSVTNLAELRKALYTFARRHNFSVVDAEAFVKVFIACPPFKKDYGAYSDKAICKLLSVMRVGKYWSAENIDSTTLLRIEHLITGEEDEHINERTRKHITEKGLQQSVNQYQGLQQWLACYVVYGRHAEVAEIVRWESPTELEQYINNFKQYSLRNPIVEQVSLETLRVVRDLWQTVAKEGGRIDEIHLEMGRDLKNSAAERAKISNRNKQNEGTNFRIKLLLQEFSQYEKDIEGIRPYSPSQQELLRIYEEGVCEQTEMPKDIAKIRRELSSSSEKDVKRSDIQRYRLWLDQKYCSPYTGQPIPLARLFTTDYEIEHVIPRSKYFDDSYNNKVICEAAVNKAKSNRLGMAFIQESGGQIIPLGNGRNVQVL

SEQ ID NO: 1666 - protein, 1102 aa, unidentified
  REGION 1..1102: note = Description of Unknown: uncultivated organism with predicted taxonomy: Prevotella sp. MGM2
  REGION 1..1102: note = MG22-12 effector
LYSSHHVAANSTYPFKTGHNRTPLNPFTTHKTQPYNIMTKNTRNIIGLDLGTNSIGWSWIQQLISPIPTQPSEYLFDGTPIIRMSGSRIIPMPGDVTGSFERGETISKTKDRTAKRMARRMNERFQLRRERLNRVLNIMGFLPEHYARALDRYGKLNEESNTTIAWRSKEDGKNEFIFYPSFLEMASIFKEHHPDIQRIPLDWTLYYLRSKALHQAITKEELSWVLHSFNQKRGYYQSREDITEEDKTKKVEYIKGVVNSVEDTGEKAKGKKIYKVTFADGTEFTSTKSEAPLWIGRTREIIVTTSLDTSGKPKLDKEGKIIQSAKTPDEKDWTLIKIRTEATIDDSKLTVGEYIFHALLKNPETKIKGAHVSTIDRRFYINEINAILKEQEKYHEELRDKSLYEQCIKALYAQNEVRRNIIAPWSMKDLLTKDILFYHRPLKSKKSQISECPLEFHCYTDKDGETHRQGIKCIPVSHPLFQEYRIWQFISNLRIYEREHFDNGKHFTNVDKTSEFLTNEKKEELYEWLAEKDSVSQKTLLGHLGLKVERYHWNFPEEKTYPCGETRHLIQSRLKKANLQKAFHSLISDEQKDCFERGLWHILYSVSDYNELCKALKTFARKTGFTLEEQLLFVEAFSSCPPFKKDYGAYSKRAITKLLPLMRIGKFWHEESIDSTTKNRIEHLISGEECSGIDVRVREKVAKAGLCESIEQYQGLQQWLANYVVYNRHSEASEITKWESPDELNNYIRSFKQYSLRNPIVEQVSLETLRVVRDLWAELQKEGQTIDEIHLEMGRDLKNTAEERSRIFRRNSENEDTNFRIKLLLEEFYANEKDIKDVRPYSPSQQELLRIYEEGVWQQEKDIPQDIKDIKKRISNDKDIKDITPNDIQRYRIWMDQKYCSPYTGKTIPLSRLFTTDYEIEHVIPRSRYFDDSYNNKVICEAAVNKDKNNRLGMEYIMAAGGKTIELGNGKNVQILKEEEYVELVDKIFGNNTRKRNIMLADEITEEFSHRQLNDTRYIARFMKGILSNIVREKNADGTLEPEETSKNLIVCSGRITDRVKQDWGLNDIWNHIITPRFERLNTKTSSDKFGEYVCKEGKRYF

SEQ ID NO: 1667 - protein, 1558 aa, unidentified
  REGION 1..1558: note = Description of Unknown: uncultivated organism with predicted taxonomy: Prevotella
  REGION 1..1558: note = MG22-13 effector
LYSSHHVAANSTYPFKTGQNRTPLNPFTTHKTQPYNIMTKNTRNIIGLDLGTNSIGWSWIQQLISPIPTQPSEYLFDGTPIIRMSGSRIIPMPGDVTGSFERGETISKTKDRTAKRMARRMNERFQLRRERLNRVLNIMGFLPEHYARALDRYGKLNEESNTTIAWRSKEDGKNEFIFYPSFLEMASIFKERHPDIQRIPLDWTLYYLRSKALHQAITKEELSWVLHSFNQKRGYYQSREDITEEDKTKKVEYIKGVVNSVEDTGEKAKGKKIYKVTFADGTEFTSTKSEAPLWIGRTREIIVTTSLDTSGKPKLDKEGKIIQSAKTPDEKDWTLIKIRTEATIDDSKLTVGEYIFHALLKNPETKIKGAYVSTIDRRFYINEINAILKEQEKYHEELRDKSLYEQCIKALYAQNEVRRNIIAPWSMSDLLIKDILFYHRPLKSKKSQISECPLEFHCYTDKDGETHRQGIKCIPVSHPLFQEYRIWQFISNLRIYEREHFDNGKHFTNVDKTSDFLTSEKKEELYEWLAEKDSVSQKTLLGHLGLKVERYHWNFPEEKTYPCGETRHLIQSRLKKANLQKAFHSLISDEQKECFERGLWHILYSVSDYNELCKALKTFARKTGFTLEEQLLFVEAFSSCPPFKKDYGAYSKRAITKLLPLMRIGKFWHEESIDSTTKNRIEHLISGEECSGIDVRVREKVAKAGLCESIEQYQGLPQWLANYVVYNRHSEASEIIKWESPDELDNYIRSFKQYSLRNPIVEQVSLETLRVVRDLWAELQKEGQTIDEIHLEMGRDLENTAEERSRIFRRNSENEDTNFRIKLLLEEFYANEKDIKDVRPYSPSQQELLRIYEEGVWQQEKDIPQDIKDIKKRISNDKDIKDITPNDIQRYRIWMDQKYCSPYTGKTIPLSRLFTTDYEIEHVIPRSRYFDDSYNNKVICEAAVNKDKNNRLGMEYIMAAGGKTIELGNGKNVQILKKEEYVELVDKIFGNNTRKRNIMLADEITEDFSHRQLNDTRYIARFMKGILSNIVREKNADGTLEPEETSKNLIVCSGRITDRVKQDWGLNDIWNHIITPRFERLNKKTSSNDFGEYVCKEGKRYFQTRVPLSLQKGFNKKRIDHRHHAMDAIAIACVNRSIVNYLNNAAANQTEREDLRRAVCIPERNGQTKRQLRSPWLCFARDTENALRQIVVSFKQNLRVATKATNSYECFDTTSGKKIRKHQSNREHYAIRKPLHKDSVYGEVILTSIASVNLKKALLKAERILDKRLKEKIFELRKLYNYSNKQIEEHLTKVCINRPEWKNYDFKKIAVRILSNDADATHIVAIRKPLDESFDKVKINTITDTGIQKILLNHLSRYADDPKKAFSPEGIEDMNANIASLNGGKQHLPIYKVRVSEKDNGGYFPIGQKGNRSKKYVTTAKDTNLFFAVYANSNGKRCFKTIDLRTAIECKKQGLSVAPSVNEKGDKLLFTLSPNDLVYMPSEEEEANGFSIKGNLIKEHIYKMVSANDNRCFFIPHTVVDFISNGEEYNRHNKIELTEDRRSIKEHCVPLKVNRLGK

SEQ ID NO: 1668 - protein, 781 aa, unidentified
  REGION 1..781: note = Description of Unknown: uncultivated organism with predicted taxonomy: Bacteroides ndongoniae
  REGION 1..781: note = MG22-14 effector
MTKNTRNIIGLDLGTNSIGWSWIQQLISPTPTQPSEYLFDGTPIIRMSGSRIIPMPGDVTGSFERGETISKTKDRTAKRMARRMNERFQLRRERLNRVLNIMGFLPEHYARALDRYGKLNEESNTTIAWRSKEDGKNEFIFYPSFLEMASIFKERHPDIQRIPLDWTLYYLRSKALHQAITKEELSWVLHSFNQKRGYYQSREDITEEDKTKKVEYIKGVVNSVEDTGEKAKGKKIYKVTFADGTEFTSTKSEAPLWIGRTREIIVTTSLDTSGKPKLNKEGKIIQSAKTPDEKDWTLIKIRTEATIDDSKLTVGEYIFHALLKNPETKIKGAHVSTIDRRFYINEINAILKEQEKYHKELRDKSLYEQCIKALYAQNEVRRNIIAPWSMKDLLTKDILFYHRPLKSKKSQISECPLEFHCYTDKDGETHRQGIKCIPVSHPLFQEYRIWQFISNLRIYEREHFDNGKHFTNVDKTSEFLTNEKKEELYEWLAERDSVSQKTLLGKIGLKVERYHWNFPEEKTYPCGETRHLIQSRLKKANLQKAFHSLISDEQKDCFERGLWHILYSVSDYNELCKALKTFARKTGFTLEEQLLFVEAFSSCPPFKKDYGAYSKRAITKLLPLMRIGKFWHEESIDSTTKNRIEHLISGEECSGIDVRVREKVAKAGLCESIEQYQGLQQWLANYVVYNRHSEASEITKWESPDELDNYIRSFKQYSLRNPIVEQVSLETLRVVRDLWAELQKEGQTIDEIHLEMGRDLKNTAEERSRIFRRNSENEDTN

SEQ ID NO: 1669 - protein, 822 aa, unidentified
  REGION 1..822: note = Description of Unknown: uncultivated organism with predicted taxonomy: Prevotella sp. MGM2
  REGION 1..822: note = MG22-15 effector
KWESPDELDNYIRSFKQYSLRNPIVEQVSLETLRVVRDLWAELQKEGQTIDEIHLEMGRDLKNTAEERSRIFRRNSENEDTNFRIKLLLEEFYANEKDIKDVRPYSPSQQELLRIYEEGVWQQEKDIPQDIKDIKKRISNDKDIKDITPNDIQRYRIWMDQKYCSPYTGKTIPLSRLFTTDYEIEHVIPRSRYFDDSYNNKVICEAAVNKDKNNRLGMEYIIAAGGKTIELGNGKNVQILKEEEYVELVDKIFGNNTRKRNIMLADEITEEFSHRQLNDTRYIARFMKGILSNIVREKNADGTLEPEETSKNLIVCSGRITDRVKQDWGLNDIWNHIITPRFERLNTKTSSNDFGEYVCKDGKRYFQTRVPLNLQKGFNKKRIDHRHHAMDAIAIACVNRSIVNYLNNAAANQTEREDLRRAVCIPERNGQTKRQLRSPWHCFARDAENALRQIVVSFKQNLRVATKATNSYECFDTASGKKIRKHQSNREHYAIRKPLHKDSVYGEVILTSIASVNLKKALLKAERILDKRLKEKIFELRKLYNYSNKQIEEHLTKVCINCPEWKNYDFKKIAVRILSNDADATHIVAIRKPLDESFDEVKINTITDTGIQKILLNHLSRYADDPKKAFSPEGIEDMNANIASLNGGKQHLPVYKVRVSEKDNGGYFPIGQKGNRQKKYVTTAKDTNLFFAVYADSKGKRSYKTIDLRTAIECRKQGLSVAPSVNEKGDKLLFTLSPNDLVYMPSEGEEANGFAIDNNLNKEQIYKMVSATNNRCFFIPHTVADFISRGQEYNSVNKIELTEDGRSIKEHCVPLKVNRLGK

SEQ ID NO: 1670 - protein, 1521 aa, unidentified
  REGION 1..1521: note = Description of Unknown: uncultivated organism with predicted taxonomy: Prevotella sp. MGM2
  REGION 1..1521: note = MG22-16 effector
MTKNTRNIIGLDLGTNSIGWSWIQQLISPTPTQPSEYLFDGTPIIRMSGSRIIPMPGDVTGSFERGETISKTKDRTAKRMARRMNERFQLRRERLNRVLNIMGFLPEHYARALDRYGKLNEESNTTIAWRSKEDGKNEFIFYPSFLEMASIFKEHHPDIQRIPLDWTLYYLRSKALHQAITKEELSWVLHSFNQKRGYYQSREDITEEDKTKKVEYIKGVVNSVEDTGEKAKGKKIYKVTFADGTEFTSTKSEAPLWIGRTREIIVTTSLDTSGKPKLDKEGKIIQSAKTPDEKDWTLIKIRTEATIDDSKLTVGEYIFHALLKNPETKIKGAHVSTIDRRFYINEINAILKEQEKYHEELRDKSLYEQCIKALYAQNEVRRNIIAPWSMKDLLTKDILFYHRPLKSKKSQISECPLEFHCYTDKDGETHRQGIKCIPVSHPLFQEYRIWQFISNLRIYEREHFDNGKHFTNVDKTSEFLTSEKKEELYEWLAERDSVSQKTLLGKIGLKVEDYHWNFPEEKTYPCGETRHLIQSRLKKANLQKAFHSLISDEQKECFERGLWHILYSVSDYNELCKALKTFARKTGFTLEEQLLFVEAFSSCPPFKKDYGAYCKRAITKLLPLMRIGKFWHEESIDTTTKTRIEHLISGEECSGIDVRVREKVAKAGLCESIEQYQGLQQWLANYVVYNRHSEASEIIKWESPDELDNYIRSFKQYSLRNPIVEQVSLETLRVVRDLWAELQKEGQTIDEIHLEMGRDLKNTAEERSKIFRRNSENEDTNFRIKLLLEEFYANEKDIKDVRPYSPSQQELLRIYEEGVWQQEKDIPQDIKDIKKRISNDKDIKDITPNDIQRYRIWMDQKYCSPYTGKTIPLSRLFTTDYEIEHVIPRSRYFDDSYNNKVICEAAVNKDKNNRLGMEYIIAAGGKTIELGNGKNVQILKEEEYVELVDKIFGNNTRKRNIMLADEITEEFSHRQLNDTRYIARFMKGILSNIVREKNADGTLEPEETSKNLIVCSGRITDRVKQDWGLNDIWSHIVTPRFERLNTKTSSNDFGEYVCKDGKRYFQTRVPLNLQKGFNKKRIDHRHHAMDAIAIACVNRSIVNYLNNAAANQTEREDLRRAVCIPERNGQTKRQLRSPWHCFAREAENALRQIVVSFKQNLRVATKATNSYECFDTASGKKIRKHQSNREHYAIRKPLHKDSVYGEVILTSIASVNLKKALLKAERILDKRLKEKIFELRKLYNYSNKQIEEHLTKVCINCPEWKNYDFKKIAVRILSNDADATHIVAIRKPLDESFDEVKINTITDTGIQKILKNHLSRYADDPKKAFSPEGIEDMNANIASLNGGKQHLPIYKVRVSEKNNGGYFPIGQKGNRHKKYVTTAQDTNLFFAIYADSKGKRSYKTIDLRTAIECRKQGLSVAPSINEKGDKLLFTLSPNDLVYMPSEGEETNGFAIDNNLNKEQIYKMVSATNNRCFFIPHTVADFISRGQEYNSVNKIELTEDGRSIKEHCVPLKVNRLGK

SEQ ID NO: 1671 - protein, 1187 aa, unidentified
  REGION 1..1187: note = Description of Unknown: uncultivated organism with predicted taxonomy: Prevotella
  REGION 1..1187: note = MG22-17 effector
VSTIDRRFYINEINAILKEQEKYHEELRDKSLYEQCIKALYAQNEVRRNIIAPWSMSDMLIKDILFYHRPLKSKKSHISECSLEFHTYTDKDGATHRQGIKCIPTSHPLFQEYRIWQFIANLRIYERERFDNGKHFINEDKTSDFLTTKKKEELYEWLAEKDSVSQKTLLGHLGLKVERYHWNFPEEKTYPCGETKHLIQSRLKKANLQKAFHSLISDEQKDCFERGLWHILYSVSDYNELCKALKTFARKTEFTLEEQFLFVEAFSSCPPFKKDYGAYSKRAITKLLPLMRIGKFWHEESIDSTTKNRIEHLISGEECSGIDVRVREKVAKAGLCESIEQYQGLQQWLANYVVYNRHSEASEITKWESPDELDNYIRSFKQYSLRNPIVEQVSLETLRVVRDLWAELQKEGQTIDEIHLEMGRDLKNTAEERSRIFRRNSENEDTNFRIKLLLEEFYANEKDIKDVRPYSPSQQELLRIYEEGVWQQEKDIPQDIKDIKKRISNDKDIKDITPNDIQRYRIWMDQKYCSPYTGKTIPLSRLFTTDYEIEHVIPRSRYFDDSYNNKVICEAAVNKDKNNRLGMEYIIAAGGKTIELGNGKNVQILKEEEYVELVDKIFGNNTRKRNIMLADEITEEFSHRQLNDTRYIARFMKGILSNIVREKNTDGILEPEETSKNLIVCSGRITDRVKQDWGLNDIWNHIVTPRFERLNTKTSSNDFGEYVCKDGKRYFQTRVPLNLQKGFNKKRIDHRHHAMDAIAIACVNRSIVNYLNNAAANQTEREDLRRAVCIPERNGQTKRQLRSPWHCFARDAENALRQIVVSFKQNLRVATKATNSYECFDTTSGKKIRKHQSNREHYAIRKPLHKDSVYGEVILTSIASVNLKKALLKAERILDKRLKEKIFELRKLYNYSNKQIEEHLTKVCINCPEWKNYDFKKIAVRILSNDADATHIVAIRKPLDESFDEEKIKTITDTGIQKILLNHLSRYADDPKKAFSPEGIEDMNANIASLNGGKQHLPIYKVRVSEKDNGGYFPIGQKGNRPKKYVTTAKDTNLFFAVYADSKGKRSYKTIDLRTAIECKKQGLSVAPSVNEKGDKLLFTLSPNDLVYMPSEEEEANGFSIKGNLIKEHIYKMVSANNRQCFFIPHSVADFISKGEEYNAHNKIELAEDGRSIKVHCVPLKVNRLGK

SEQ ID NO: 1672 - protein, 1283 aa, unidentified
  REGION 1..1283: note = Description of Unknown: uncultivated organism with predicted taxonomy: Bacteroidales
  REGION 1..1283: note = MG22-18 effector
VTFADGTEFTSTKSEAPLWIGRTREIIVTTSLDTSGKPKLDKEGKIIQSAKTPDEKDWTLIKIRTEATIDDSKLTVGEYIFHALLKNPETKIKGAHVSTIDRRFYINEINAILKEQEKYHEELRDKSLYEQCIKALYAQNEVRRNIIAPWSMKDLLTKDILFYHRPLKSKKSQISECPLEFHCYTDKDGETHRQGIKCIPVSHPLFQEYRIWQFISNLRIYEREHFDNGKHFTNVDKTSEFLTSEKKEELYEWLAERDSVSQKTLLGKIGLKVEDYHWNFPEEKTYPCGETRHLIQSRLKKANLQKAFHSLISDEQKECFERGLWHILYSVSDYNELCKALKTFARKTGFTLEEQLLFVEAFSSCPPFKKDYGAYCKRAITKLLPLMRIGKFWHEESIDTTTKTRIEHLISGEECSGIDVRVREKVAKAGLCESIEQYQGLQQWLANYVVYNRHSEASEIIKWESPDELDNYIRSFKQYSLRNPIVEQVSLETLRVVRDLWAELQKEGQTIDEIHLEMGRDLKNTAEERSKIFRRNSENEDTNFRIKLLLEEFYANEKDIKDVRPYSPSQQELLRIYEEGVWQQEKDIPQDIKDIKKRISNDKDIKDITPNDIQRYRIWMDQKYCSPYTGKTIPLSRLFTTDYEIEHVIPRSRYFDDSYNNKVICEAAVNKDKNNRLGMEYIIAAGGKTIELGNGKNVQILKEEEYVELVDKIFGNNTRKRNIMLADEITEEFSHRQLNDTRYIARFMKGILSNIVREKNADGTLEPEETSKNLIVCSGRITDRVKQDWGLNDIWSHIVTPRFERLNTKTSSNDFGEYVCKDGKRYFQTRVPLNLQKGFNKKRIDHRHHAMDAIAIACVNRSIVNYLNNAAANQTEREDLRRAVCIPERNGQTKRQLRSPWHCFAREAENALRQIVVSFKQNLRVATKATNSYECFDTASGKKIRKHQSNREHYAIRKPLHKDSVYGEVILTSIASVNLKKALLKAERILDKRLKEKIFELRKLYNYSNKQIEEHLTKVCINCPEWKNYDFKKIAVRILSNDADATHIVAIRKPLDESFDEVKINTITDTGIQKILKNHLSRYADDPKKAFSPEGIEDMNANIASLNGGKQHLPIYKVRVSEKNNGGYFPIGQKGNRHKKYVTTAQDTNLFFAIYADSKGKRSYKTIDLRTAIECRKQGLSVAPSINEKGDKLLFTLSPNDLVYMPSEGEETNGFAIDNNLNKEQIYKMVSATNNRCFFIPHTVADFISRGQEYNSVNKIELTEDGRSIKEHCVPLKVNRLGK

SEQ ID NO: 1673 - protein, 1521 aa, unidentified
  REGION 1..1521: note = Description of Unknown: uncultivated organism with predicted taxonomy: Prevotella
  REGION 1..1521: note = MG22-19 effector
MTKNTRNIIGLDLGTNSIGWSWIQQLISPTSTQPSEYLFDGTPIIRMSGSRIIPMPGDVTGSFERGETISKTKDRTAKRMARRMNERFQLRRERLNRVLNIMGFLPEHYARALDRYGKLNEESNTTIAWRSKEDGKNEFIFYPSFLEMASIFKERHPDIQRIPLDWTLYYLRSKALHQAITKEELSWVLHSFNQKRGYYQSREDITEEDKTKKVEYIKGVVNSVEDTGEKAKGKKIYKVTFADGTEFTSTKSEAPLWIGRTREIIVTTSLDTSGKPKLDKEGKIIQSAKTPDEKDWTLIKIRTEATIDDSKLTVGKYIFHALLKNPETKIKGAHVSTIDRRFYINEINAILKEQEKYHKELRDKSLYEQCTQALYAQNEVRRNIIAPWSMSDLLIKDILFYHRPLKSKKSQISECPLEFHTYTDKDGATHRQGIKCIPTSHPLFQEYRIWQFIANLRIYERERFDNGKHFINEDKTSDFLTTKKKEKLYEWLAEKDSVSQKTLLGRLGLKVERYHWNFPEEKTYPCGETRHLIQSRLKKANLQKAFHSLISDEQKDCFERGLWHILYSVSDYNELCKALKTFARKTGFTLEEQSLFVEAFSSCPPFKKDYGAYSKRAITKLLPLMRIGKFWHEESIDSTTKTRIEHLISGEECSGIDVRVREKVAKAGLCESIEQYQGLPQWLANYVVYNRHSEASEITKWESPDELDNYIRSFKQYSLRNPIVEQVSLETLRVVRDLWTELQKEGQTIDEIHLEMGRDLKNTAEERSRIFRRNSENEDTNFRIKLLLEEFYANEKDIKDVRPYSPSQQELLRIYEEGVWQQEKDIPQDIKDIKKRISNDKDIKDITPNDIQRYRIWMDQKYCSPYTGKTIPLSRLFTTDYEIEHVIPRSRYFDDSYNNKVICEAAVNKDKNNRLGMEYIMAAGGKTIELGNGKNVQILKEEEYVELVDKIFGNNTRKRNIMLADEITEEFSHRQLNDTRYIARFMKGILSNIVREKNADGTLEPEETSKNLIVCSGRITDRVKQDWGLNDIWNHIITPRFERLNKKTSSNDFGEYVCKEGKRYFQTRVPLNLQKGFNKKRIDHRHHAMDAIAIACVNRSIVNYLNNAAANQTEREDLRRAVCIPERNGQTKRQLRSPWPCFARDAENALRQIVVSFKQNLRVATKATNSYECFDTASGKKIRRHQSNREHYAIRKPLHKDSVYGEVILTSIASVNLKKTLLKAERILDKRLKDKIFELRKLYNYSNKQIEEHLTKVCINRPEWKNYDFKKIAVRILSNDADATHIVAIRKPLDETFDKEKIKTITDTGIQKILKNHLSRYANDPKKAFSPEGIEDMNANIASLNGGKQHLPIYKVRVSEKDNGGYFPIGQKGNRQKKYVTTAKDTNLFFAVYADSKGKRSYKTIDLRTAIECRKQGLSVAPSINEKGDKLLFTLSPNDLVYMPSEGEEANGFAIDNNLNKEQIYKMVSATNNRCFFIPHTVADFISRGQEYNSVNKIELTEDGRSIKEHCVPLKVNRLGK

SEQ ID NO: 1674 - protein, 921 aa, unidentified
  REGION 1..921: note = Description of Unknown: uncultivated organism with predicted taxonomy: Prevotella sp. MGM2
  REGION 1..921: note = MG22-20 effector
MTKNTRNIIGLDLGTNSIGWSWIQQLISPTPTQPSEYLFNGTPIIRMSGSRIIPMPGDVTGSFERGETISKTKDRTAKRMARRMNERFQLRRERLNRVLNIMGFLPEHYARALDRYGKLNEESNTTIAWRSKEDGKNEFIFYPSFLEMASIFKERHPDIQRIPLDWTLYYLRSKALHQAITKEELSWVLHSFNQKRGYYQSREDITEEDKTKKVEYIKGVVNSVEDTGEKAKGKKIYKVTFADGTEFTSTKSEAPLWIGRTREIIVTTSLDTSGKPKLDKEGKIIQSAKTPDEKDWTLIKIRTEATIDDSKLRVGEYIFHALLKNPETKIKGAHVSTIDRRFYINEINAILKEQEKYHEELRDKSIYEQCTQALYAQNEVRRNIIAPWSMKDLLTKDILFYHRPLKSKKSQISECPLEFHTYTDKDGATHRQGIKCIPTSHPLFQEYRIWQFIANLRIYERERFDNGKHLINEDKTSDFLTTKKKEELFEWLAEKDSVSQKTLLGHLGLKVERYHWNFPEEKTYPCGETRHLIQSRLKKANLQKAFHSLIPDEQKDCFERGLWHILYSVSDYNELCKALKTFARKTGFTLEEQLLFVEAFSSCPPFKKDYGAYSKRAITKLLPLMRIGKFWHEESIDSTTKNRIEHLISGEECSGIDVRVREKVAKAGLCESIEQYQGLQQWLANYVVYNRHSEASEITKWESPDELDNYIRSFKQYSLRNPIVEQVSLETLRVVRDLWAELQKEGQTIDEIHLEMGRDLKNTAEERSRIFRRNSENEDTNFRIKLLLEEFYANEKDIKDVRPYSPSQQELLRIYEEGVWQQEKDIPQDIKDIKKRISNDKDIKDITPNDIQRYRIWMDQKYCSPYTGKTIPLSRLFTTDYEIEHVIPRSRYFDDSYNNKVICEAAVNKDKNNRLGMEYIM

SEQ ID NO: 1675 - protein, 1521 aa, unidentified
  REGION 1..1521: note = Description of Unknown: uncultivated organism with predicted taxonomy: Bacteroidales
  REGION 1..1521: note = MG22-21 effector
MTKNTRNIIGLDLGTNSIGWSWIQQLISPTPTQPSEYLFDGTPIIRMSGSRIIPMPGDVTGSFERGETISKTKDRTAKRMARRMNERFQLRRERLNRVLNIMGFLPEHYARALDRYGKLNEESNTTIAWRSKEDGKNEFIFYPSFLEMASIFKERHPDIQRIPLDWTLYYLRSKALHQAITKEELSWVLHSFNQKRGYYQSREDITEEDKTKKVEYIKGVVNSVEDTGEKAKGKKIYKVTFADGTEFTSTKSEAPLWIGRTREIIVTTSLDSSGKPKLDKEGKIIQSAKTPDEKDWTLIKIRTEATIDDSKLTVGEYIFHALLKNPETKIKGAHVSTIDRRFYINEINAILKEQEKYHEELRDKTIYEQCIKALYAQNEVRRNIIAPWSMKDLLTKDILFYHRPLKSKKSQISECPLEFHCYTDKAGETHRQGIKCIPVSHPLFQEYRIWQFISNLRIYEREHFDNGKHFSNVDKTSEFLTSEKKEELYEWLAEKDSVSQKTLLGKIGLKVEDYHWNFPEEKTYPCGETRHLIQSRLKKANLQKAFHSLISDEQKDCFERGLWHILYSVSDYNELCKALKTFARKTGFTLEEQLLFVEAFSSCPPFKKDYGAYSKRAITKLLPLMRIGKFWHEESIDSTTKNRIEHLISGEECSGIDVRVREKVAKAELCESIEQYQGLPQWLANYVVYNRHSEASEITKWESPDELDKYIRSFKQYSLRNPIVEQVSLETLRVVRDLWAELQKEGQTIDEIHLEMGRDLKNTAEERSRIFRRNSENEDTNFRIKLLLEEFYANEKDIKDVRPYSPSQQELLRIYEEGVWQQEKDIPQDIKDIKKRISNDKDIKDITPNDIQRYRIWMDQKYCSPYTGKTIPLSRLFTTDYEIEHVIPRSRYFDDSYNNKVICEAAVNKDKNNRLGMEYIMAAGGKTIELGNGKNVQILKEEEYVELVDKIFGNNTRKRNIMLADEITEEFSHRQLNDTRYIARFMKGILSNIVREKNADGTLEPEETSKNLIVCSGRITDRVKQDWGLNDIWNHIITPRFERLNKKTSSNDFGEYVCKDGKRYFQTRVPLNLQKGFNKKRIDHRHHAMDAIAIACVNRSIVNYLNNAAANQTEREDLRRAVCIPERNGQTKRQLRSPWHCFARDAENALRQIVVSFKQNLRVATKATNSYECFDTASGKKIRKHQSNREHYAIRKPLHKDSVYGEVILTGIASVNLKKALLKADRILDKRLKEKIFELRKLYNYSNKQIEEHLTKVCINCPEWKNYDFKKIAVRILSNDADATHIVAIRKPLDESFDEVKINTITDTGIQKILKNHLSRYAKNPKKAFSPEGIEDMNANIASLNGGKQHLPIYKVRVSEKDNGGYFPIGQKGNRSKKYVTTAKETNLFFAVYADSNGKRSFKTIDLRTAIECKKQGLSVAPSVNEKGDKLLFTLSPNDLVYMPSEEEEANGFSIDNNLNKEQIYKMVSATYKQCFFIPHTVADFIYKNKEFNVLNKIELTEDRRSIKEHCVPLKVNRLGK

SEQ ID NO: 1676 - protein, 1420 aa, unidentified
  REGION 1..1420: note = Description of Unknown: uncultivated organism with predicted taxonomy: Bacteroidales
  REGION 1..1420: note = MG22-22 effector
MGFLPEHYARALDRYGKLNEESNTTIAWRSKEDGKNEFIFYPSFLEMASIFKEHHPDIQRIPLDWTLYYLRSKALHQAITKEELSWVLHSFNQKRGYYQSREDITEEDKTKKVEYIKGVVNSVEDTGEKAKGKKIYKVTFADGTEFTSTKSEAPLWIGRTREIIVTTSLDTSGKPKLDKEGKIIQSAKTPDEKDWTLIKIRTEATIDDSKLTVGEYIFHALLKNPETKIKGAHVSTIDRRFYINEITAILKEQEKYHEELRNKSLYEQCTQALYAQNEVRRNIIAPWSMKDLLTKDILFYHRPLKSKKSQISECPLEFHCYTDKDGETHRQGIKCIPVSHPLFQEYRIWQFISNLRIYEREHFDNGKHFTNVDKTSEFLTSEKKEELYEWLAEKDSVSQKTLLGHLGLKVERYHWNFPEEKTYPCGETRHLIQSRLKKANLQKAFHSLISDEQKECFERGLWHILYSISDYNELCKALKTFARKTGFTLEEQLLFVEAFSSCPPFKKDYGAYSKRAITKLLPLMRIGKFWHEESIDSTTKNRIEHLISGEECSGIDVRVREKVAKAGLCESIEQYQGLQQWLANYVVYNRHSEASEIIKWESPDELDNYIRSFKQYSLRNPIVEQVSLETLRVVRDLWAELQKEGQTIDEIHLEMGRDLENTAEERSRIFRRNSENEDTNFRIKLLLEEFYANEKDIKDVRPYSPSQQELLRIYEEGVWQQEKDIPQDIKDIKKRISNDKDIKDITPNDIQRYRIWMDQKYCSPYTGKTIPLSRLFTTDYEIEHVIPRSRYFDDSYNNKVICEAAVNKDKNNRLGMEYIMAAGGKTIELGNGKNVQILKKEEYVELVDKIFGNNTRKRNIMLADEITEDFSHRQLNDTRYIARFMKGILSNIVREKNADGTLEPEETSKNLIVCSGRITDRVKQDWGLNDIWNHIITPRFERLNKKTSSNDFGEYVCKDGKRYFQTRVPLNLQKGFNKKRIDHRHHAMDAIAIACVNRSIVNYLNNAAANQTEREDLRRAVCIPERNGQTKRQLRSPWPCFARDAENALQQIVVSFKQNLRVATKATNSYECFDTASGKRIRKHQSNREHYAIRKPLHKDSVYGEVILTSIASVNLKKALLKAERILDKRLKEKIFELRKLYNYSNKQIEEHLTKVCINCPEWKNYDFKKIAVRILSNDADATHIVAIRKPLDETFDKEKIKTITDTGIQKILKNHLSQNDNDPKKAFTPEGIENMNANIVLLNGGKQHLPIYKVRISEKNNGGYFPIGQKGNRHKKYVTTAQDTNLFFAVYVDSKGKRSFNMIDLRTAIECWKQGVSVAPSINEKGDKLLFTLSPNDLVYMPSEEEEANGFSIKGNLIKEHIYKMVSATNRQCFFIPHTVADFISRGQEYNVLNKIELAEDGRSIKEHCVPLKVNRLGK

SEQ ID NO: 1677 - protein, 1533 aa, unidentified
  REGION 1..1533: note = Description of Unknown: uncultivated organism with predicted taxonomy: Bacteroidales
  REGION 1..1533: note = MG22-23 effector
MKKKNILGLDLGTNSIGWAWLQQDDTEQTIQTEYLLQNNPTIRMSGSRIIPTSGDVINDFEAGKAVSKTKDRTTFRMTRRMNERFKLRRERLNRVLRILGMLPAHYAQHVDRYGKPDEEKQPKIAWEVAPDGKSNFLFHQSFLEMVKLFGVHQPQLQRIPLDWTLYYLRHKALTQPISKAELAWILHSFNQKRGYNQTRDELTEVNEKEKLEYTNSKVVSVELIEQKKSPLYLVTFENGVAVETSKVDAPQWVGQMRYAIITTKLNDLGQPLHKKDGSIDQKVSLPNDDDWALNKLRTETQIDQSHTTVGNYIFQTLLKNPETKIKGAHVCTIDRRFYENELNAILLKQAEFHPELTNRNLYEACLMALYANNEAHRYNLATQNTCNLITKDIIFYQRPLKSKKSLIAECPFEKRIFCDTEGNVQMQGIKCIPVSHPHFQEYRLWQFLNNLRIFQREVVEDGKFTMNVDVTDKYINENSLTLLFEWLQDKITIKQKELLAKLRLKESDFRWNYVEDKAYPCSETRHVLASRLKKLKGITNDFLAQPSLNGKTTVECELWHILYSVTNLAELRKALYTFARKHNFSVVDAEAFVKVFIACPPFKKDYGAYSDKAICKLLSVMRVGKYWSAENIDSTTLLRIEHLITGEEDEHINERTRKHITEKGLQQSVNQYQGLQQWLACYVVYGRHAEVAEVVRWESPTELEQYINNFKQYSLRNPIVEQVSLETLRVVRDLWQTVAKEGGRIDEIHLEMGRDLKNSAAERAKISNRNKQNEGTNFRIKLLLQEFSQYEKDIEGIRPYSPSQQELLRIYEKGVCEQTEMPKDIAKIRRELSSSSSEKDVKRSDIQRYRLWLDQKYCSPYTGQPIPLARLFTTDYEIEHVIPRSKYFDDSYNNKVICEAAVNKAKSNRLGMAFIQESGGQIIPLGNGRNVQVLNESAYVEFINKTFKHNARKRSLMLADEITEEFCHRQLTDTRYIARFMMGVLSNIVRQNDNGVLESEAISKNLIVCNGKITDRVKQDWGLNDVWNHIVTPRFKRLNQITNSSDFGEWCNKEGKRYFQTRIPLELQKGANKKRIDHRHHAMDAIAIACTTRSLVNYLNNQSAHTKAREDYRQRLCRTDGHGQTKRLLRAPWKDFAKDAESALQQIVVSFKQNTRILTHATNSYECFDAKAGKKIIKRQISQNHYAIRKPLHKDTVYGEVVLPSIKLISLNKALSNPRRIIDKQLRSKILELQQRDKLTKKQVCDFFKKTCANSTEWRNYDFAKVAVRVWSNDEEGSRMVSVRKAIDESFDMKQIEKVYDPIVRNILTRHLKACNGDSKIAFSPQGVEEMNQHLAELNNGNAHLPIYKVKLGESKGEKFAIGQKGCKATKFVVTAKDTNLFFAVYANEEGKRSYQSVDLRTAIELKKQGCPVAPETNEKGDKLLFILSPNSLVYMPTEEEMERGNIDVQNLNLNQIFKMVSSTGNECYFVPNTLSQVIFPNKEYESMNKVGTVKEWDGYSISESKNNKKFLSIKACCIPICIDRLGRIQLKK

SEQ ID NO: 1678 - protein, 1521 aa, unidentified
  REGION 1..1521: note = Description of Unknown: uncultivated organism with predicted taxonomy: Bacteroidales
  REGION 1..1521: note = MG22-24 effector
MTKNTRNIIGLDLGTNSIGWSWIQQLISPTPTQPSEYLFNGTPIIRMSGSRIIPMPGDVTGSFERGETISKTKDRTAKRMARRMNERFQLRRERLNRVLNIMGFLPEHYARALDRYGKLNEESNTTIAWRSKEDGKNEFIFYPSFLEMASIFKERHPDIQRIPLDWTLYYLRSKALHQAITKEELSWVLHSFNQKRGYYQSREDITEEDKTKKVEYIKGVVNSVEDTGEKAKGKKIYKVTFADGTEFTSTKSEAPLWIGRTREIIVTTSLDTSGKPKLDKEGKIIQSAKTPDEKDWTLIKIRTEATIDDSKLTVGEYIFHALLKNPETKIKGAHVSTIDRRFYINEINAILKEQEKYHKELRDKSLYEQCIKALYAQNEVRRNIIAPWSMSDLLIKDILFYHRPLKSKKSQISECPLEFHTYTDKNGATHRQGIKCIPTSHPLFQEYRIWQFIANLRIYERERFDNGKHFINEDKTSDFLTTKKKEELYEWLAEKDSVSQKTLLGRLGLKVERYHWNFPEEKTYPCGETRHLIQSRLKKANLQKAFHSLISDEQKDCFERGLWHILYSVSDYNELCKALKTFARKTGFTLEEQLLFVEAFSSCPPFKKDYGAYSKRAITKLLPLMRIGKFWHEESIDSTTKNRIEHLISGEECSGIDVRVREKIAKAGLCESIEQYQGLQQWLANYVVYNRHSEASEITKWESPDELDNYIRSFKQYSLRNPIVEQVSLETLRVVRDLWAELQKEGQTIDEIHLEMGRDLKNTAEERSRIFRRNSENEDTNFRIKLLLEEFNANEKDIKDVRPYSPSQQELLRIYEEGVWQQEKDIPQDIKDIKKRISNDKDIKDITPNDIQRYRIWMDQKYCSPYTGKTIPLSRLFTTDYEIEHVIPRSRYFDDSYNNKVICEAAVNKDKNNRLGMEYIMAAGGKTIELGNGKNVQILKEEEYVELVDKIFGNNTRKRNIMLANEITEEFSHRQLNDTRYIARFMKGILSNIVREKNADGTLEPEETSKNLIVCSGRITDRVKQDWGLNDIWNHIITSRFERLNTKTSSNDFGEYVCKEGKRYFQTRVPLNLQKGFNKKRIDHRHHAMDAIAIACVNRSIVNYLNNAAANQTEREDLRRAVCIPERNGQTKRQLRSPWHCFARDAENALRQIVVSFKQNLRVATKATNSYECFDTASGKKIRKHQSNREHYAIRKPLHKDSVYGEVILTSIASVNLKKALLKADRILDKRLKDKIFELRKLYNYSNKQIEEHLTKVCINCLEWKNYDFKKIAVRILSNDADATHIVAIRKPLDESFDEVKINTITDTGIQKILKNHLSRYADDPKKAFSPEGIEDMNANIASLNGGKQHLPIYKVRVSEKDNGGYFPIGQKGNRPKKYVTTAKDTNLFFAVYADSKGKRSFNMIDLRTAIECWKQGVSVAPSINEKGDKLLFTLSPNDLVYMPSEEEEANGFSIKGNLIKEHIYKMVSATNRQCFFIPHTVADFISRGQEYNVLNKIELAEDGRSIKEHCVPLKVNRLGK

SEQ ID NO: 1679 - protein, 821 aa, unidentified
  REGION 1..821: note = Description of Unknown: uncultivated organism with predicted taxonomy: Prevotella sp. MGM2
  REGION 1..821: note = MG22-25 effector
AGLCESIEQYQGLPQWLANYVVYNRHSEASEIIKWESPDELDNYIRSFKQYSLRNPIVEQVSLETLRVVRDLWTELQKEGQTIDEIHLEMGRDLKNTAEERSRIFRRNSENEDTNFRIKLLLEEFYANEKDIKDVRPYSPSQQELLRIYEEGVWQQEKDIPQDIKDIKKRISNDKDIKDITPNDIQRYRIWMDQKYCSPYTGKTIPLSRLFTTDYEIEHVIPRSRYFDDSYNNKVICEAAVNKDKNNRLGMEYIMAAGGKTIELGNGKNVQILKEEEYVELVDKIFGNNTRKRNIMLADEITEEFSHRQLNDTRYIARFMKGILSNIVREKNADGTLEPEETSKNLIVCSGRITDRVKQDWGLNDIWNHIITPRFERLNTKTSSNDFGEYVCKDGKRYFQTRVPLNLQKGFNKKRIDHRHHAMDAIAIACVNRSIVNYLNNAAANPTEREDLRRAVCIPERNGQTKRQLRSPWHCFARDAENALRQIVVSFKQNLRVATKATNSYECFDTASGKKIRKHQSNREHYAIRKPLHKDSVYGEVILTSIASVNLKKALLKAERILDKRLKEKIFELRKLYNYSNKQIEEHLTKVCINCPEWKNYDFKKIAVRILSNDADATHIVAIRKPLDETFDKEKIKTITDTGIQKILKNHLSRYADDPKKAFSPEGIEDMNANIASLNGGKQHLPIYKVRVSEKDNGGYFPIGQKGNRPKKYVTTAKDTNLFFAVYADSKGKRSYKTIDLRTAIECRKQGLSVAPSINEKGDKLLFTLSPNDLVYMPSEGEEANGFAIDNNLNKEQIYKMVSATNNRCFFIPHTVADFIS

SEQ ID NO: 1680 - protein, 1521 aa, unidentified
  REGION 1..1521: note = Description of Unknown: uncultivated organism with predicted taxonomy: Bacteroidales
  REGION 1..1521: note = MG22-26 effector
MTKNTRNIIGLDLGTNSIGWSWIQQLISPTPTQPSEYLFNGTPIIRMSGSRIIPMPGDVTGSFERGETISKTKDRTAKRMARRMNERFQLRRERLNRVLNIMGFLPEHYARALDRYGKLNEESNTTIAWRSKEDGKNEFIFYPSFLEMASIFKERHPDIQRIPLDWTLYYLRSKALHQAITKEELSWVLHSFNQKRGYYQSREDITEEDKTKKVEYIKGVVNSVEDTGEKAKGKKIYKVTFADGTEFTSTKSEAPLWIGRTREIIVTTSLDSSGKPKLDKEGKIIQSAKTPDEKDWTLIKIRTEATIDDSKLTVGEYIFHALLKNPETKIKGAHVSTIDRRFYINEINAILKEQEKYHEELRDKSLYEQCIKALYAQNEVRRNIIAPWSMKDLLTKDILFYHRPLKSKKSQISECPLEFHCYTDKDGETHRQGIKCIPVSHPLFQEYRIWQFISNLRIYEREHFDNGKHFTNVDKTSEFLTSEKKEELYEWLAEKDSVSQKTLLGKIGLKVEHYHWNYPEEKTYPCGETRHLIQSRLKKANLQKAFHSLISDEQKDCFERGLWHILYSVSDYNELCKALKTFARKTGFTLEEQLLFVEVFSSCPPFKKDYGAYSKRAITKLLPLMRIGKFWHEESIDSTTKNRIEHLISGEECSGIDVRVREKVAKAGLCKSIEQYQGLQQWLANYVVYNRHSEASEITKWESPDELDNYIRSFKQYSLRNPIVEQVSLETLRVVRDLWAELQKEDQTIDEIHLEMGRDLKNTAEERSRIFRRNNENEDTNFRIKLLLEEFYANEKDIKDVRPYSPSQQELLRIYEEGVWQQEKDIPQDIKDIKKRISNDKDIKDITPNDIQRYRIWMDQKYCSPYTGKTIPLSRLFTTDYEIEHVIPRSRYFDDSYNNKVICEAAVNKDKNNRLGMEYIMAAGGKTIELGNGKNVQILKEEEYVELVDKIFGNNTRKRNIMLADEITEEFSHRQLNDTRYIARFMKGILSNIVREKNADGTLEPEETSKNLIVCSGRITDRVKQDWGLNDIWNHIITPRFERLNKKTSSNDFGEYVCKEGKRYFQTRVPLNLQKGFNKKRIDHRHHAMDAIAIACINRSIVNYLNNAAANQTEREDLRRAVCIPERNGQTKRQLRSPWHCFARDAENALRQIVVSFKQNLRVATKATNSYECFDTASGKKIRKHQSNREHYAIRKPLHKDSVYGEVILTSIASVNLKKALLKADRILDKRLKEKIFELRKLYNYSNKQIEEHLTKVCINCPEWKNYDFKKIAVRILSNDADATHIVAIRKPLDESFDKIKINTITDTGIQKILLNHLSRYADDPKKAFSPEGIEDMNANIASLNGGKQHLPIYKVRVSEKDNGGYFPIGQKGNRSKKYVTTAKDTNLFFAVYADSKGKRSYKTIDLRTAIECRKQGLSVAPSINEKGDKLLFTLSPNDLVYMPSEWEEANGFAIDNNLNKEQIYKMVSATNNRCFFIPHTVADFISRGEEYNSHNKIELTEDGRSIKEHCVPLKVNRLGK

SEQ ID NO: 1681 - protein, 1200 aa, unidentified
  REGION 1..1200: note = Description of Unknown: uncultivated organism with predicted taxonomy: Prevotella sp. MGM2
  REGION 1..1200: note = MG22-27 effector
LLKNPKTKIKGAHVSTIDRRFYINEINAILKEQEKYHEELRDKSLYEQCIKALYAQNEVRRNIIAPWSMKDLLTKDILFYHRPLKSKKSQISECPLEFHCYTDKDGETHRQGIKCIPVSHPLFQEYRIWQFISNLRIYEREHFDNGKHFTNVDKTSEFLTNEKKEELYEWLAEKDSVSQKTLLGHLGLKVERYHWNFPEEKTYPCGETRHLIQSRLKKANLQKAFHSLISDEQKDCFERGLWHILYSVSDYNELCKALKTFARKTGFTLEEQLLFVEAFSSCPPFKKDYGAYSKRAITKLLPLMRIGKFWHEESIDSTTKNRIEHLISGEECSGIDVRVREKVAKAGLCESIEQYQGLPQWLANYVVYNRHSEASEIIKWESPDELDNYIRSFKQYSLRNPIVEQVSLETLRVVRDLWAELQKEGQTIDEIHLEMGRDLKNTAEERSRIFRRNSENEDTNFRIKLLLEEFYANEKDIKDVRPYSPSQQELLRIYEEGVWQQEKDIPQDIKDIKKRISNDKDIKDITPNDIQRYRIWMDQKYCSPYTGKTIPLSRLFTTDYEIEHVIPRSRYFDDSYNNKVICEAAVNKDKNNRLGMEYIMAAGGKTIELGNGKNVQILKEEEYVELVDKIFGNNTRKRNIMLADEITEEFSHRQLNDTRYIARFMKGILSNIVREKNADGTLEPEETSKNLIVCSGRITDRVKQDWGLNDIWNHIITPRFERLNTKTSSDKFGEYVCKEGKRYFQTRVPLSLQKGFNKKRIDHRHHAMDAIAIACVNRSIVNYLNNAAANQTEREDLRRAVCIPGRNGQTKRQLRSPWHCFARDAENALRQIVVSFKQNLRVATKATNSYECFDTASGKKIRKRQSNREHYAIRKPLHKDSVYGEVILTSIASVNLKKALLKAERILDKRLKEKIFELRKLYNYSNKQIEEHLTKVCINCPEWKNYDFKKIAVRILSNDADATHIVAIRKPLDESFDKIKINTITDTGIQKILLNHLSRYADDPKKAFSPEGIEDMNANIASLNGGKQHLPVYKVRVSEKDNGGYFPIGQKGNRSKKYVTTAKDTNLFFAVYANSNGKRSYKTIDLRTAIECKKQGLSVAPSVNEKGDKLLFTLSPNDLVYMPSEEEGANGFSIKGNLIKEHIYKMVSANDNRCFFIPHTVADFISNGEEYNRHNKIELTEDRRSIKEHCVPLKVNRLGK

SEQ ID NO: 1682 - protein, 822 aa, unidentified; identical to SEQ ID NO: 1669
  REGION 1..822: note = Description of Unknown: uncultivated organism with predicted taxonomy: Bacteroidales
  REGION 1..822: note = MG22-28 effector

SEQ ID NO: 1683 - protein, 1521 aa, unidentified
  REGION 1..1521: note = Description of Unknown: uncultivated organism with predicted taxonomy: Bacteroidales
  REGION 1..1521: note = MG22-29 effector
MTKNTRNIIGLDLGTNSIGWSWIQQLISPTPTQPSEYLFNGTPIIRMSGSRIIPMPGDVTGSFERGETISKTKDRTAKRMARRMNERFQLRRERLNRVLNIMGFLPEHYARALDRYGKLNEESNTTIAWRSKEDGKNEFIFYPSFLEMASIFKELHPDIQRIPLDWTLYYLRSKALHQAITKEELSWVLHSFNQKRGYYQSREDITEEDKTKKVEYIKGVVNSVEDTGEKAKGKKIYKVTFADGTEFTSTKSEAPLWIGRTREIIVTTSLDSSGKPKLDKEGKIIQSAKTPDEKDWTLIKIRTEATIDDSKLTVGEYIFHALLKNPETKIKGAHVSTIDRRFYINEINAILKEQEKYHKELRDKSLYEQCIKALYAQNEVRRNIIAPWSMSDLLIKDILFYHSPLKSKKSQISECPLEFHTYTDKNGATHRQGIKCIPTSHPLFQEYRIWQFIANLRIYERERFDNGKHLINEDKTSDFLTTKKKEELYEWLAEKDSVSQKTLLGHLGLKVERYHWNFPEEKTYPCGETRHLIQSRLKKANLQKAFHSLISDEQKDCFERGLWHILYSVSDYNELCKALKTFARKTGFTLEEQLLFVEAFSSCPPFKKDYGAYSKRAITKLLPLMRIGKFWHKESIDSTTKNRIEHLISGEECSGIDVRVREKVAKAGLCESIEQYQGLPQWLANYVVYNRHSEASEITKWESPDELDNYIRSFKQYSLRNPIVEQVSLETLRVVRDLWAELQKEGQTIDEIHLEMGRDLKNTAEERSRIFRRNSENEDTNFRIKLLLEEFYANEKDIKDVRPYSPSQQELLRIYEEGVWQQEKDIPQDIKDIKKRISNDKDIKDITPNDIQRYRIWMDQKYCSPYTGKTIPLSRLFTTDYEIEHVIPRSRYFDDSYNNKVICEAAVNKDKNNRLGMEYIMAAGGKTIELGNGKNVQILKEEEYVELVDKIFGNNTRKRNIMLADEITEEFSHRQLNDTRYIARFMKGILSNIVREKNADGTLEPEETSKNLIVCSGRITDRVKQDWGLNDIWNHIITPRFERLNTKTSSDKFGEYVCKEGKRYFQTRVPLSLQKGFNKKRIDHRHHAMDAIAIACVNRSIVNYLNNAAANQTEREDLRRAVCIPERNGQTKRQLRSPWHCFARDAENALRQIVVSFKQNLRVATKATNSYECFDTASGKKIRRHQSNREHYAIRKPLHKDSVYGEVILPSIASVNLKKALLKAERIIDKRLKDKIFELRKLYNYSNKQIEEHLTKVCINCPEWKNYDFKKIAVRILSNDADATHIVAIRKPLDESFDEVKINTITDTGIQKILKNHLSRYADDPKKAFSPEGIEDMNANIASLNGGKQHLPIYKVRVSEKDNGGYFPIGQKGNRSKKYVTTAKETNLFFAVYADSNGKRSFKTIDLRTAIECKKQGLSVAPSVNEKGDKLLFTLSPNDLVYMPSEEEEANGFSIDNNLNKEQIYKMVSATYKQCFFIPHTVADFIYKNKEFNVLNKIELTEDRRSIKEHCVPLKVNRLGK

SEQ ID NO: 1684 - protein, 751 aa, unidentified
  REGION 1..751: note = Description of Unknown: uncultivated organism with predicted taxonomy: Prevotella sp. MGM2
  REGION 1..751: note = MG22-30 effector
FRRNSENEDTNFRIKLLLEEFYANEKDIKDVRPYSPSQQELLRIYEEGVWQQEKDIPQDIKDIKKRISNDKDIKDITPNDIQRYRIWMDQKYCSPYTGKTIPLSRLFTTDYEIEHVIPRSRYFDDSYNNKVICEAAVNKDKNNRLGMEYIMAAGGKTIELGNGKNVQILKEEEYVELVDKIFGNNTRKRNIMLTDEITEEFSHRQLNDTRYIARFMKGILSNIVREKNADGTLEPEETSKNLIVCSGRITDRVKQDWGLNDIWNHIITPRFERLNKKTSSNDFGEYVCKEGKRYFQTRVPLNLQKGFNKKRIDHRHHAMDAIAIACVNRSIVNYLNNAAANQTEREDLRRAVCIPERNGQTKRQLRSPWHCFARDAENALRQIIVSFKQNLRVATKATNSYECFDIASGKKIRKHQSNREHYAIRKPLHKDSVYGEVILPSIASVNLKKALLKADRILDKRLKEKIFELRKLYNYSNKQIEEHLTKVCINRPEWKNYDFKKIAVRILSNDADATHIVAIRKPLDETFDEDKIKTITDTGIQKILLNHLRQNDNDPKKAFTPEGIENMNANIVLLNGGKQHLPIYKVRISEKNNGGYFPIGQKGNRSQKYVTTAKDTNLFFAVYADQKGKRSFKTIDLRTAIECRKQGVSVAPSINEKGDKLLFTLSPNDLVYMPSEEEEANGFSIKGNLIKEHIYKMVNASNNRCFFIPHSVADFISKGEEYNALNKIELTEDGRSIKVHCVPLKVNRLGK

SEQ ID NO: 1685 - protein, 1521 aa, unidentified
  REGION 1..1521: note = Description of Unknown: uncultivated organism with predicted taxonomy: Bacteroidales
  REGION 1..1521: note = MG22-31 effector
MTKNTRNIIGLDLGTNSIGWSWIQQLISPTPTQASEYIFDGTPIIRMSGSRIIPMPGDVTGSFERGETISKTKDRTAKRMARRMNERFQLRRERLNRVLNIMGFLPEHYARALDRYGKLNEESNTTIAWRSKEDGKNEFIFYPSFLEMASIFKEHHPDIQRIPLDWTLYYLRSKALHQAITKEELSWVLHSFNQKRGYYQSREDITEEDKTKKVEYIKGVVNSVEDTREKAKGKKIYKVTFADGTEFTSTKSEAPLWIGRTREIIVTTSLDTSGKPKLDKEGKIIQSAKTPDEKDWTLIKIRTEATIDDSKLTVGEYIFHALLKNPETKIKGAHVSTIDRRFYINEINAILKEQEKYHKELRDKSLYEQCIKALYAQNEVRRNIIAPWSMSDLLIKDILFYHSPLKSKKSQISECPLEFHTYTDKDGATHRQGIKCIPTSHPLFQEYRIWQFIANLRIYERERFDNGKHLINEDKTSDFLTTKKKEELYEWLAEKDSVSQKTLLGRLGLKVERYHWNFPEEKTYPCGETRHLIQSRLKKANLQKAFHSLISDEQKDCFERGLWHILYSVSDYNELCKALKTFARKTGFTLEEQSLFVEAFSSCPPFKKDYGAYSKRAITKLLPLMRIGKFWHEESIDSTTKTRIEHLISGEECSGIDVRVREKVAKAGLCESIEQYQGLPQWLANYVVYNRHSEASEITKWESPDELDNYIRSFKQYSLRNPIVEQVSLETLRVVRDLWTELQKEGQTIDEIHLEMGRDLKNTAEERSRIFRRNSENEDTNFRIKLLLEEFYANEKDIKDVRPYSPSQQELLRIYEEGVWQQEKDIPQDIKDIKKRISNDKDIKDITPNDIQRYRIWMDQKYCSPYTGKTIPLSRLFTTDYEIEHVIPRSRYFDDSYNNKVICEAAVNKDKNNRLGMEYIMAAGGKTIELGNGKNVQILKEEEYVELVDKIFGNNTRKRNIMLADEITEEFSHRQLNDTRYIARFMKGILSNIVREKNADGTLEPEETSKNLIVCSGRITDRVKQDWGLNDIWNHIITPRFERLNTKTSSNDFGEYVCKDGKRYFQTRVPLNLQKGFNKKRIDHRHHAMDAIAIACVNRSIVNYLNNAAANQTEREDLRRAVCIPERNGQTKRQLRSPWHCFARDAENALRQIVVSFKQNLRVATKATNSYECFDTASGKKIRKHQSNREHYAIRKPLHKDSVYGEVILPSIASVNLKKALLKADRILDKRLKEKIFELRKLYNYSNKQIEEHLTKVCINCLEWKNYDFKKIAVRILSNDADATHIVAIRKPLDETFDKEKIKTITDTGIQKILLNHLSRYADDPKKAFSPEGIEDMNANIASLNGGKQHLPIYKVRVSEKDNGGYFPIGQKGNRPKKYVTTAKDTNLFFAVYADSKGKRSFDMIDLRTAIECWKQGVSVAPSMNEKGDKLLFTLSPKDLVYMPSEEEEANGFSIKGNLIKEHIYKMVSATNRQCFFIPHTVADFISRGQEYNVLNKIELAEDGRSIKEHCVPLKVNRLGK

SEQ ID NO: 1686 - protein, 808 aa, unidentified
  REGION 1..808: note = Description of Unknown: uncultivated organism with predicted taxonomy: Bacteroidales
  REGION 1..808: note = MG22-32 effector
MKKKNILGLDLGTNSIGWAWLQQDDTEQTIQTEYLLQNNPTIRMSGSRIIPTSGDVINDFEAGKAVSKTKDRTTFRMTRRMNERFKLRRERLNRVLRILGMLPAHYAQHVDRYGKPDEEKQPKIAWEVAPDGKSNFLFHQSFLEMVKLFGVHQPQLQRIPLDWTLYYLRHKALTQPISKAELAWILHSFNQKRGYNQTRDELTEVNEKEKLEYTNSKVVSVELIDCKKSPLYLVTFENGVAVETSKVDAPQWVGQMRYAIITTKLNDLGQPLHKKDGSIDQKVSLPNDDDWALNKLRTETQIDQSHTTVGNYIFQTLLKNPETKIKGAHVCTIDRRFYEDELNAILLKQAEFHPELTNRNLYEACLMALYANNEAHRYNLATQNTCNLITKDIIFYQRPLKSKKSLIAECPFEKRIFCDAEGNVQMQGIKCIPVSHPHFQEYRLWQFLNNLRIFQREVVEDGKFTMNVDVTDKYINENSLTLLFEWLQDKITIKQKELLAKLRLKESDFRWNYVEDKAYPCGETRHVLASRLKKLKGITNDFLAQPSLNGKTTVECELWHILYSVTNLAELRKALYTFARRHNFSVVDAEAFVKVFIACPPFKKDYGAYSDKAICKLLSVMRVGKYWSAENIDSTTLLRIEHLITGEEDEHINERTRKHITEKGLQQSVNQYQGLQQWLACYVVYGRHAEVAEIVRWESPTELEQYINNFKQYSLRNPIVEQVSLETLRVVRDLWQTVAKEGGRIDEIHLEMGRDLKNSAAERAKISNRNKQNEGTNFRIKLLLQEFSQYEKDIEGIRRALKNLSNSK

SEQ ID NO: 1687 - protein, 1521 aa, unidentified; identical to SEQ ID NO: 1685
  REGION 1..1521: note = Description of Unknown: uncultivated organism with predicted taxonomy: Bacteroidales
  REGION 1..1521: note = MG22-33 effector

SEQ ID NO: 1688 - protein, 797 aa, unidentified
  REGION 1..797: note = Description of Unknown: uncultivated organism with predicted taxonomy: Bacteroidales
  REGION 1..797: note = MG22-34 effector
QTVAKEGGRIDEIHLEMGRDLKNSAAERAKISNRNKQNEGTNFRIKLLLQEFSQYEKDIEGIRPYSPSQQELLRIYEEGVCEQTEMPKDIAKIRRELSSSSEKDVKRSDIQRYRLWLDQKYCSPYTGQPIPLARLFTTDYEIEHVIPRSKYFDDSYNNKVICEAAVNKAKSNRLGMAFIQESGGQIIPLGNGRNVQVLNESAYVEFINKTFKHNARKRSLMLADEITEEFCHRQLTDTRYIARFMMGVLSNIVRQNDNGVLESEAISKNLIVCNGKITDRVKQDWGLNDVWNHIVTPRFKRLNQITNSSDFGEWCNKEGKRYFQTRIPLELQKGVNKKRIDHRHHAMDAIAIACTTRSLVNYLNNQSAHTKAREDYRQRLCRTDGHGQTKRLLRAPWKDFAKDAESALQQIVVSFKQNTRILTHATNSYECFDAKAGKKIIKRQISQNHYAIRKPLHKDTVYGEVVLPSIKLISLNKALSNPRRIIDKQLRSKILELQQRDKLTKKQVCDFFKKTCANSTEWRNYDFAKVAVRVWSNDEEGSRMVSVRKAIDESFDMKQIEKVYDPIVRNIFTRHLKACNGDSKIAFSPQGVEEMNQHIAELNNGNAHLPIYKVKLGESKGEKFAIGQKGSKATKFVVTAKDTNLFFAVYANEEGKRSYQSVDLRTAIELKKQGCPVAPETNEKGDKLLFILSPNSLVYMPTEEEMERGNIDVQNLNLNQIFKMVSSTGNNCFFVPNTLSQVIFPGKEYESMDKVGTVKEWDGYSISESKNNKKFLSIKACCIPICIDRLGRIQLKK

SEQ ID NO: 1689 - protein, 833 aa, unidentified
  REGION 1..833: note = Description of Unknown: uncultivated organism with predicted taxonomy: Parabacteroides sp. An277
  REGION 1..833: note = MG22-35 effector
MPLRETNFQMQGIKCIPVSNPHFQEYRLWQFLNNLRIFQREVVEDGKFTMNVDVTDKYINENSLTLLFEWLQDKITIKQKELLAKLRLKESDFRWNYVEDKAYPCGETRHVLASRLKKLKGITNDFLAQPSLNGKTTVECELWHILYSVTNLAELRKALYTFARKHNFSVVDAEAFVKVFIACPPFKKDYGAYSDKAICKLLSVMRVGKYWSAENIDSTTLLRIEHLITGEEDEHSNERTRKHITEKGLQQSVNQYQGLQQWLACYVVYGRHAEVAEIVRWESPTELEQYINNFKQYSLRNPIVEQVSLETLRVVRDLWQTVAKEGGRIDEIHLEMGRDLKNSAAERAKISNRNKQNEGTNFRIKLLLQEFSQYEKDIEGIRPYSPSQQELLRIYEEGVCEQTEMPKDIAKIRRELSSSSEKDVKRSDIQRYRLWLDQKYCSPYTGQPIPLARLFTTDYEIEHVIPRSKYFDDSYNNKVICEAAVNKAKSNRLGMAFIQESGGQIIPLGNGRNVQVLNESAYVEFINKTFKHNARKRSLMLADEITEEFCHRQLTDTRYIARFMMGVLSNIVRQNDNGVLESEAISKNLIVCNGKITDRVKQDWGLNDVWNHIVTPRFKRLNQITNSSDFGEWCNKEGKRYFQTRIPLELQKGVNKKRIDHRHHAMDAIAIACTTRSLVNYLNNQSAHTKAREDYRQRLCRTDGHGQTKRLLRAPWKDFAKDAESALQQIVVSFKQNTRILTHATNSYECFDAKAGKKIIKRQISQNHYAIRKPLHKDTVYGEVVLPSIKLISLNKALSNPRRIIDKQLRSKILELQQRDKLTKKQVCDFFKK

SEQ ID NO: 1690 - protein, 1533 aa, unidentified
  REGION 1..1533: note = Description of Unknown: uncultivated organism with predicted taxonomy: Bacteroidales
  REGION 1..1533: note = MG22-36 effector
MKKKNILGLDLGTNSIGWAWLQQDDTEQTIQTEYLLQNNPTIRMSGSRIIPTSGDVINDFEAGKAVSKTKDRTTFRMTRRMNERFKLRRERLNRVLRILGMLPAHYAQHVDRYGKPDEEKQPKIAWEVAPDGKSNFLFHQSFLEMVKLFGVHQPQLQRIPLDWTLYYLRHKALTQPISKAELAWILHSFNQKRGYNQTRDELTEVNEKEKLEYTNSKVVSVELIEQKKSPLYLVTFENGVAVETSKVDAPQWVGQMRYAIITTKLNDLGQPLHKKDGSIDQKVSLPNDDDWALNKLRTETQIDQSHTTVGNYIFQTLLKNPETKIKGAHVCTIDRRFYENELNAILLKQAEFHPELTNRNLYEACLMALYANNEAHRYNLATQNTCNLITKDIIFYQRPLKSKKSLIAECPFEKRIFCDTEGNVQMQGIKCIPVSHPHFQEYRLWQFLNNLRIFQREVVEDGKFTMNVDVTDKYINENSLTLLFEWLQDKITIKQKELLAKLRLKESDFRWNYVEDKAYPCSETRHVLASRLKKLKGITNDFLAQPSLNGKTTVECELWHILYSVTNLAELRKALYTFARKHNFSVVDAEAFVKVFIACPPFKKDYGAYSDKAICKLLSVMRVGKYWSAENIDSTTLLRIEHLITGEEDEHINERTRKHITEKGLQQSVNQYQGLQQWLACYVVYGRHAEVAEVVRWESPTELEQYINNFKQYSLRNPIVEQVSLETLRVVRDLWQTVAKEGGRIDEIHLEMGRDLKNSAAERAKISNRNKQNEGTNFRIKLLLQEFSQYEKDIEGIRPYSPSQQELLRIYEKGVCEQTEMPKDIAKIRRELSSSSSEKDVKRSDIQRYRLWLDQKYCSPYTGQPIPLARLFTTDYEIEHVIPRSKYFDDSYNNKVICEAAVNKAKSNRLGMTFIQESGGQIIPLGNGRNVQVLNESAYVEFINKTFKHNARKRSLMLADEITEEFCHRQLTDTRYIARFMMGVLSNIVRQNDNGVLESEAISKNLIVCNGKITDRVKQDWGLNDVWNHIVTPRFKRLNQITNSSDFGEWCNKEGKRYFQTRIPLELQKGANKKRIDHRHHAMDAIAIACTTRSLVNYLNNQSAHTKAREDYRQRLCRTDGHGQTKRLLRAPWKDFAKDAESALQQIVVSFKQNTRILTHATNSYECFDAKAGKKIIKRQISQNHYAIRKPLHKDTVYGEVVLPSIKLISLNKALSNPRRIIDKQLRSKILELQQRDKLTKKQVCDFFKKTCANSTEWRNYDFAKVAVRVWSNDEEGSRMVSVRKAIDESFDMKQIEKVYDPIVRNILTRHLKACNGDSKIAFSPQGVEEMNQHLAELNNGNAHLPIYKVKLGESKGEKFAIGQKGCKATKFVVTAKDTNLFFAVYANEEGKRSYQSVDLRTAIELKKQGCPVAPETNEKGDKLLFILSPNSLVYMPTEEEMERGNIDVQNLNLNQIFKMVSSTGNECYFVPNTLSQVIFPNKEYESMNKVGTVKEWDGYSISESKNNKKFLSIKACCIPICIDRLGRIQLKK

SEQ ID NO: 1691 - protein, 1502 aa, unidentified
  REGION 1..1502: note = Description of Unknown: uncultivated organism with predicted taxonomy: Bacteroidales
  REGION 1..1502: note = MG22-37 effector
MTKNTRNIIGLDLGTNSIGWSWIQQLISPTPTQPSEYLFDGTPIIRMSGSRIIPMPGDVTGSFERGETISKTKDRTAKRMARRMNERFQLRRERLNRVLNIMGFLPEHYARALDRYGKLNEESDTTIAWRSKEDGKNEFIFYPSFLEMASIFKEHHPDIQRIPLDWTLYYLRSKALHQAITKEDLSWVLHSFNQKRGYYQSREDITEEDKTKKVEYIKGVVNSVEDTGEKAKGKKIYKVTFANGTEFTSTKSEAPLWIGRTREIIVTTSLDTSGKPKLDKEGKIIQSAKTPDEKDWTLIKIRTEATIDDSKLTVGEYIFHALLKNPETKIKGAYVSTIDRRFYINEINAILKEQEKYHKELRDKSLYEQCIKALYAQNEVRRNIIAPWSMSDLLIKDILFYHRPLKSKKSQISECPLEFHTYTDKNGATHRQGIKCIPTSHPLFQEYRIWQFIANLRIYERERFDNGKHLINEDKTSDFLTTKKKEELYEWLAEKDSVSQKTLLGHLGLKVERYHWNFPEEKTYPCGETRHLIQSRLKKANLQKAVHSLISDEQKECFERGLWHILYSVSDYNELCKALKTFARKTGFTLEEQSLFVEAFSSCPPFKKDYGAYSKRAITKLLPLMRIGKFWHEESIDSTTKTRIEHLISGEECSGIDVRVREKVAKAGLCESIEQYQGLPQWLANYVVYNRHSEASEITKWESPDELDNYIRSFKQYSLRNPIVEQVSLETLRVVRDLWTELQKEGQTIDEIHLEMGRDLKNTAEERSRIFRRNSENEDTNFRIKLLLEEFYANEKDIKDVRPYSPSQQELLRIYEEGVWQQEKDIPQDIKDIKKRISNDKDIKDITPNDIQRYRIWMDQKYCSPYTGKTIPLSRLFTTDYEIEHVIPRSRYFDDTYNNKVICESAVNKDKNNRLGMEYIMAAGGKTIELGNGKNVQILKEEEYVELVDKIFGNNTRKRNIMLADEITEDFSHRQLNDTRYIARFMKGILSNIVREKNADGTLEPEETSKNLIVCSGRITDRVKQDWGLNDIWNHIITPRFERLNTKTSSNDFGEYVCKDGKRYFQTRVPLNLQKGFNKKRIDHRHHAMDAIAIACVNRSIVNYLNNAAANQTEREDLRRAVCIPERNGQTKRQLRSPWHCFARDAENVLRQIVVSFKQNLRVATKATNSYECFDTTSGKKIRKHQSNREHYAIRKPLHKDSVYGEVILTSIASVNLKKALLNAERILDKRLKEKIFELRKLYNYSNKQIEEHLTKVCINCPEWKNYDFKKIAVRILSNDADATHIVAIRKPLDETFDEDKIKTITDTGIQKILLNHLRQNDNDPKKAFTTEGIENMNANIASLNGGKQHLPVYKVRVSEKDNGGYFPIGQKGNRSKKYVTTAKDTNLFFAVYANSNGKRSYKTIDLRTAIECKKQGLSVAPSVNEKGDKLLFTLSPNDLVYMPSEEEEANGFSIKGNLIKEHIYKMVSANDNRCFFIPHTVAEYCIFLYVFLRLCGQIKEH

SEQ ID NO: 1692 - protein, 1521 aa, unidentified
  REGION 1..1521: note = Description of Unknown: uncultivated organism with predicted taxonomy: Prevotella
  REGION 1..1521: note = MG22-38 effector
MTKNTRNIIGLDLGTNSIGWSWIQQLISPTPTQPSEYLFDGTPIIRMSGSRIIPMPGDVTGSFERGETISKTKDRTAKRMARRMNERFQLRRERLNRVLNIMGFLPEHYARALDRYGKLNEESNTTIAWRSKEDGKNEFIFYPSFLEMASIFKEHHPDIQRIPLDWTLYYLRSKALHQAITKEELSWVLHSFNQKRGYYQSREDITEEDKTKKVEYIKGVVNSVEDTGEKAKGKKIYKVTFADGTEFTSTKSEAPLWIGRTREIIVTTSLDTSGKPKLDKEGKIIQSAKTPDEKDWTLIKIRTEATIDDSKLTVGEYIFHALLKNPETKIKGAHVSTIDRRFYINEINAILKEQEKYHEELRDKSLYEQCTQALYAQNEVRRNIIAPWSMSDLLIKDILFYHRPLKSKKSQISECSLEFHTYTDKDGATHRQGIKCIPTSHPLFQEYRIWQFIANLRIYERERFDNGKHFINEDKTSDFLTTKKKEELYEWLAEKDSVSQKTLLGHLGLKVERYHWNFPEEKTYPCGETRHLIQSRMKKANLQKAFHSLISDEQKDCFERGLWHILYSVSDYNELCKALKTFARKTGFTLEEQLLFVEAFSSCPPFKKDYGAYSKRAITKLLPLMRIGKFWHEESIDSTTKNRIEHLISGEECSGIDVRVREKVAKAGLCESIEQYQGLPQWLANYVVYNRHSEASEITKWESPDELDNYIRSFKQYSLRNPIVEQVSLETLRVVRDLWAELQKEGQTIDEIHLEMGRDLKNTAEERSRIFRRNSENEDTNFRIKLLLEEFYANEKDIKDVRPYSPSQQELLRIYEEGVWQQEKDIPQDIKDIKKRISNDKDIKDITPNDIQRYRIWMDQKYCSPYTGKTIPLSRLFTTDYEIEHVIPRSRYFDDSYNNKVICEAAVNKDKNNRLGMEYIMAAGGKTIELGNGKNVQILKEEEYVELVDKIFGNNTRKRNIMLADEITEEFSHRQLNDTRYIARFMKGILSNIVREKNADGTLEPEETSKNLIVCSGRITDRVKQDWGLNDIWNHIVTPRFERLNTKTSSNDFGEYVCKEGKRYFQTRMPLSLQKGFNKKRIDHRHHAMDAIAIACVNRSIVNYLNNAAANQTEREDLRRAVCIPERNGQTKRQLRSPWHCFARDAENALRQIVVSFKQNLRIATKATNSYECFDTASGKKIRKHQSNREHYAIRKPLHKDSVYGEVILTSIASVNLKKALLKADRILDKRLKEKIFELRKLYNYSNKQIEEHLTKVCINCPEWKNYDFKKIAVRILSNDADATHIVAIRKPLDESFDKIKINTITDTGIQKILLNHLSRYADDPKKAFSPEGIEDMNANIASLNGGKQHLPIYKVRVSEKDNGGYFPIGQKGNRPKKYVTTAKDTNLFFAVYVDSKGKRSYKTIDLRTAIECKKQGLSVAPSVNEKGDKLLFTLSPNDLVYMPSEEEEANGFSIKGNLIKEHIYKMVSANDNRCFFIPHTVADFISNGEEYNRHNKIELTEDRRSIKEHCVPLKVDRLGK

SEQ ID NO: 1693 - protein, 1558 aa, unidentified
  REGION 1..1558: note = Description of Unknown: uncultivated organism with predicted taxonomy: Prevotella sp. MGM2
  REGION 1..1558: note = MG22-39 effector
LYSSHHVAANSTYPFKTGHNRTPLNRFTTHKTQPYNIMTKNTRNIIGLDLGTNSIGWSWIQQLISPTPTQPSEYLFDGTPIIRMSGSRIIPMPGDVTGSFERGETISKTKDRTAKRMARRMNERFQLRRERLNRVLNIMGFLPEHYARALDRYGKLNEESNTTIAWRSKEDGKNEFIFYPSFLEMASIFKERHPDIQRIPLDWTLYYLRSKALHQAITKEELSWVLHSFNQKRGYYQSREDITEEDKTKKVEYIKGVVNSVEDTGEKAKGKIIYKVTFADGTEFTSTKSEAPLWIGRTREIIVTTSLDTSGKPKLDKEGKIIQSAKTPDEKDWTLIKIRTEATIDDSKLTVGEYIFHALLKNPETKIKGAHVSTIDRRFYINEINAILKEQEKYHKELRDKSLYEQCIKALYAQNEVRRNIIAPWSMSDLLIKDILFYHRPLKSKKSQISECPLEFHTYTDKNGATHRQGIKCIPTSHPLFQEYRIWQFIANLRIYERERFDNGKHFINEDKTSDFLTTKKKEELYEWLAERDSVSQKTLLGKIGLKVEHYHWNYPEEKTYPCGETRHLIQSRLKKANLQKAFHSLISDEQKDCFERGLWHILYSVSDYNELCKALKTFARKTGFTLEEQLLFVEAFSSCPPFKKDYGAYSKRAITKLLPLMRIGKFWHEESIDSTTKTRIEHLISGEECSGIDVRVREKVAKAGLCESIEQYQGLPQWLANYVVYNRHSEASEIIKWESPDELDNYIRSFKQYSLRNPIVEQVSLETLRVVRDLWTELRKEGQTIDEIHLEMGRDLKNTAEERSRIFKRNSENEDTNFRIKLLLEEFYANEKDIKDVRPYSPSQQELLRIYEEGVWQQEKDIPQDIKDIKKRISNDKDIKDITPNDIQRYRIWMDQKYCSPYTGKTIPLSRLFTTDYEIEHVIPRSRYFDDSYNNKVICEAAVNKDKNNRLGMEYIMAAGGKTIELGNGKNVQILKEEEYVELVDKIFGNNTRKRNIMLADEITEEFSHRQLNDTRYIARFMKGILSNIVREKNADGTLEPEETSKNLIVCSGRITDRVKQDWGLNDIWNHIITPRFERLNTKTSSNDFGEYVCKDGKRYFQTRVPLNLQKGFNKKRIDHRHHAMDAIAIACVNRSIVNYLNNAAANQTEREDLRRAVCIPERNGQTKRQLRSPWHCFARDAENALRQIVVSFKQNLRVATKATNSYECFDTASGKKIRKHQSNREHYAIRKPLHKDSVYGEVILTSIASVNLKKALLKAERILDKRLKEKIFELRKLYNYSNKQIEEHLTKVCINCPEWKNYDFKKIAVRILSNDADATHIVAIRKPLDETFDEDKIKTITDTGIQKILLNHLSRYADDPKKAFSPEGIEDMNANIASLNSGKQHLPIYKVRVSEKDNGGYFPIGQKGNRPKKYVTTAKDTNLFFAVYADSKGKRSYKTIDLRTAIECRKQGLSVAPSINEKGDKLLFTLSPNDLVYMPSEGEEANGFAIDNNLNKEQIYKMVSANNKQCFFIPHTVADFISRGEEYNSHNKIELTEDRRSIKEHCVPLKVNRLGK

SEQ ID NO: 1694 - protein, 1532 aa, unidentified
  REGION 1..1532: note = Description of Unknown: uncultivated organism with predicted taxonomy: Bacteroidales
  REGION 1..1532: note = MG22-40 effector
MKKKNILGLDLGTNSIGWAWLQQDDTEQTIQTEYLLQNNPTIRMSGSRIIPTSGDVINDFEAGKAVSKTKDRTTFRMTRRMNERFKLRRERLNRVLRILGMLPAHYAQHVDRYGKPDEEKQPKIAWEVAPDGKSNFLFHQSFLEMVKLFGVHQPQLQRIPLDWTLYYLRHKALTQPISKAELAWILHSFNQKRGYNQTRDELTEVNEKEKLEYTNSKVVSVELIEQKKSPLYLVTFENGVAVETSKVDAPQWVGQMRYAIITTKLNDLGQPLHKKDGSIDQKVSLPNDDDWALNKLRTETQIDQSHTTVGNYIFQTLLKNPETKIKGAHVCTIDRRFYEDELNAILLKQAEFHPELTNRNLYEACLMALYANNEAHRYNLATQNTCNLITKDIIFYQRPLKSKKSLIAECPFEKRIFCDAEGNVQMQGIKCIPVSHPHFQEYRLWQFLNNLRIFQREVVEDGKFTMNVDVTDKYINENSLTLLFEWLQDKITIKQKELLAKLRLKESDFRWNYVEDKAYPCGETRHVLASKLKKLKGITNDFLAQPSLNGKTTVECELWHILYSVTNLAELRKALYTFARRHNFSVVDAEAFVKVFIACPPFKKDYGAYSDKAICKLLSVMRVGKYWSAENIDSTTLLRIEHLITGEEDEHINERTRKHITEKGLQQSVNQYQGLQQWLACYVVYGRHAEVAEIVRWESPTELEQYINNFKQYSLRNPIVEQVSLETLRVVRDLWQTVAKEGGRIDEIHLEMGRDLKNSAAERAKISNRNKQNEGTNFRIKLLLQEFSQYEKDIEGIRPYSPSQQELLRIYEEGVCEQTEMPKDIAKIRRELSSSSEKDVKRSDIQRYRLWLDQKYCSPYTGQPIPLARLFTTDYEIEHVIPRSKYFDDSYNNKVICEAAVNKAKSNRLGMAFIQESGGQIIPLGNGRNVQVLSESAYVEFINKTFKHNARKRSLMLADEITEEFCHRQLTDTRYIARFMMGVLSNIVRQNDNGVLESEAISKNLIVCNGKITDRVKQDWGLNDVWNHIVTPRFKRLNQITNSSDFGEWCNKEGKRYFQTRIPLELQKGVNKKRIDHRHHAMDAIAIACTTRSLVNYLNNQSAHTKAREDYRQRLCRTDGHGQTKRLLRAPWKDFAKDAESALQQIVVSFKQNTRILTHATNSYECFDAKAGKKIIKRQISQNHYAIRKPLHKDTVYGEVVLPSIKLISLNKALSNPRRIIDKQLRSKILELQQRDKLTKKQVCDFFKKTCANSTEWRNYDFAKVAVRVWSNDEEGSRMVSVRKAIDESFDMKQIEKVYDPIVRNILTRHLKACNGDSKIAFSPQGVEEMNQHIAELNNGNAHLPIYKVKLGESKGEKFAIGQKGCKATKFVVTAKDTNLFFAVYANEEGKRSYQSVDLRTAIELKKQGCPVAPETNEKGDKLLFILSPNSLVYMPTEEEMERGNIDVQNLNLNQIFKMVSSTGNECYFVPNTLSQVIFPNKEYESMNKVGTVKEWDGYSISESKNNKKFLSIKACCIPICIDRLGRIQLKK

SEQ ID NO: 1695 - protein, 1521 aa, unidentified
  REGION 1..1521: note = Description of Unknown: uncultivated organism with predicted taxonomy: Bacteroidales
  REGION 1..1521: note = MG22-41 effector
MTKNTRNIIGLDLGTNSIGWSWIQQLISPTPTQPSEYLFDGTPIIRMSGSRIIPMPGDVTGSFERGETISKTKDRTAKRMARRMNERFQLRRERLNRVLNIMGFLPEHYARALDRYGKLNEESNTTIAWRSKEDGKNEFIFYPSFLEMASIFKEHHPDIQRIPLDWTLYYLRSKALHQAITKEELSWVLHSFNQKRGYYQSREDITEEDKTKKVEYIKGVVNSVEDTGEKAKGKKIYKVTFADGTEFTSTKSEAPLWIGRTREIIVTTSLDTSGKPKLDKEGKIIQSAKTPDEKAWTLIKIRTEATIDDSKLTVGEYIFHALLKNPETKIKGAHVSTIDRRFYINEINAILKEQEKYHEELRDKSLYEQCTQALYAQNEVRRNIIAPWSMSDLLIKDILFYHRPLKSKKSQISECSLEFHTYTDKDGATHRQGIKCIPTSHPLFQEYRIWQFIANLRIYERERFDNGKHLINEDKTSDFLTTKKKEELYEWLAEKDSVSQKTLLGHLGLKVERYHWNFPEEKTYPCGETKHLIQSRLKKANLQKAFHSLISDEQKDCFERGLWHILYSVSDYNELCKALKTFARKTGFTLEEQLLFVEAFSSCPPFKKDYGAYSKRAITKLLPLMRIGKFWHEESIDSTTKNRIEHLISGEECSGIDIRVREKVAKAGLCESIEQYQGLQQWLANYVVYNRHSEASEITKWESPDELDNYIRSFKQYSLRNPIVEQVSLETLRVVRDLWAELQKEGQTIDEIHLEMGRDLKNTAEERSRIFRRNSENEDTNFRIKLLLEEFYANEKDIKDVRPYSPSQQELLRIYEEGVWQQEKDIPQDIKDIKKRISNDKDIKDITPNDIQRYRIWMDQKYCSPYTGKTIPLSRLFTTDYEIEHVIPRSRYFDDSYNNKVICEAAVNKDKNNRLGMEYIMAAGGKTIELGNGKNVQILKEEEYVELVDKIFGNNTRKRNIMLADEITEDFSHRQLNDTRYIARFMKGILSNIVREKNADGTLEPEETSKNLIVCSGRITDRVKQDWGLNDIWNHIITPRFERLNKKTSSNDFGEYVCKEGKRYFQTRVPLNLQKGFNKKRIDHRHHAMDAIAIACVNRSIVNYLNNAAANQTEREDLRRAVCIPERNGQTKRQLRSPWHCFARDAENALQQIVVSFKQNLRVATKATNSYECFDTASGKKIRKHQSNREHYAIRKALHKDSVYGEVILTSIASVYLKKALLKAERILDKRLKEKIFELRKLYNYSNKQIEEHLTKVCINCPEWKNYDFKKIAVRILSNDADATHIVAIRKPLDETFDKEKIKAITDTGIQKILLNHLSRYADDPKKAFSPEGIEDMNANIASLNGGKQHLPIYKVRVSEKDNGGYFPIGQKGNRSKKYVTTAKETNLFFAVYADSNGKRSFKTIDLRTAIECKKQGLSVAPSVNEKGDKLLFTLSPNDLVYMPSEEEEANGFSIDNNLNKEQIYKMVSATYKQCFFIPHTVADFIYKNKEFNVLNKIELTEDRRSIKEHCVPLKVNRLGK

SEQ ID NO: 1696 - protein, 1521 aa, unidentified; identical to SEQ ID NO: 1678
  REGION 1..1521: note = Description of Unknown: uncultivated organism with predicted taxonomy: Prevotella
  REGION 1..1521: note = MG22-42 effector

SEQ ID NO: 1697 - protein, 1423 aa, unidentified
  REGION 1..1423: note = Description of Unknown: uncultivated organism with predicted taxonomy: Bacteroidales
  REGION 1..1423: note = MG22-43 effector
MGFLPEHYARALDRYGKLNEESNTTIAWRSKEDGKNEFIFYPSFLEMASIFKEHHPDIQRIPLDWTLYYLRSKALHQAITKEELSWVLHSFNQKRGYYQPRKDITEKEKTKKIEYIKDIVRSVEDTGEKTKGKKAYKVTFDNGFKFISTEAEAPLWVGRTREVIVTTSLDATGAPKRDKEGDIIQSVKAPEEKDWTLKKIRTENHIDKSKLTVGEYILQTLLEKPDTKIKGAHVSTIDRRFYIHEINAILKVQEKYHKELRDKSLYEQCTQALYTQNEVRRNIIAPWSMSDLLIKDILFYHRPLKSKKSQISECPFEFHNYTDKNGASHRQGIKCIPTSHPLFQEYRIWQFIANLRIYERERFDNGKHLINENKTSEFLTSEKKEELFEWLAEKDSVSQKTLLGHIGLKVEHYHWNFPEEKTYPCGETRHLIQSRLKKANLLKSFCSLVPEKQKKEFELKLWHILYSVSDYNELRKALETFARKTGFTREEQDLFVEFFSSCPPFKKVYGAYSKRAIARLLPLMRLGKYWHEEHIDSATMNRIEHLISGEECNGIDVRVRENIAKFGLNESIEQYQGLPQWLACYVVYNRHSEASEVTKWESPEELDNYIKAFKQYSLRNPIVEQISLETLRVVRDLWTELQKEGQTIDEIHLEMGRDLKNTAEERSRIFRRNSENEDTNFRIKLLLEEFNANEKDIKDVRPYSPSQQELLRIYEEGVWQQEKDIPQDIKDIKKRISNDKDIKDITPNDIQRYRIWMDQKYCSPYTGKTIPLSRLFTTDYEIEHVIPRSRYFDDSYNNKVICEAAVNKDKNNRLGMEYIMAAGGKTIELGNGKDVQILKEEEYVELVDKIFGNNTRKRNIMLADEITEEFSHRQLNDTRYIARFMKGILSNIVREKNADGTLESEETSKNLIVCSGRITDRVKQDWGLNDIWNHIITPRFERLNTKTSSDKFGEYVCKEGKRYFQTRVPLNLQKGFNKKRIDHRHHAMDAIAIACVNRSIVNYLNNAAANQTEREDLRRAVCIPERNGQTKRQLRSPWRNFAKDAENALRQIVVSFKQNLRILTKATNSYECFDTTSGKKIRRHQVNEEHYAVRKPLHEDFVYGEVILSSIASVNFKKALQKANRILDKRLKDKIFELRKLYSYSNKQIEEHLTKVCINTPEWKDYDFKKINIRILSNDEGATHIVAIRKPLDESFDKVKINTITDTGIQKILLNHLSRYAEDPKKAFSLEGIEDMNANITSLNGGKQHLPIYKVRVSEKDNGGYYPIGQKGNRSKKYVTTAKDTNLFFAVYADSNGKRSFKTIDLRTAIECKKQGLSVAPSVNEKGEQLLFTLSPNDLVYMPSEEEEANGFAIDNNLNKEHIYKMVSTDSNRCFFIPHTVANFISRGEEYNRHNKIELTEDRRSIKEHCVPLKVNRLGKKTL

SEQ ID NO: 1698 - protein, 1521 aa, unidentified
  REGION 1..1521: note = Description of Unknown: uncultivated organism with predicted taxonomy: Bacteroidales
  REGION 1..1521: note = MG22-44 effector
MTKNTRNIIGLDLGTNSIGWSWIQQLISPTPTQPSEYLFDGTPIIRMSGSRIIPMHGDVTGSFERGETISKTKDRTAKRMARRMNERFQLRRERLNRVLNIMGFLPEHYARALDRYGKLNEESNTTIAWRSKEDGKNEFIFYPSFLEMASIFKEHHPDIQRIPLDWTLYYLRSKALHQAITKEELSWVLHSFNQKRGYYQSREDITEEDKTKKVEYIKGVVNSVEDTGEKAKGKKIYKVTFADGTEFTSTKSEAPLWIGRTREIIVTTSLDTSGKPKLDKEGKIIQSAKTPDEKDWTLIKIRTEATIDDSKLTVGEYIFHALLKNPETKIKGAHVSTIDRRFYINEINAILKEQEKYHEELRDKSLYEQCTQALYAQNEVRRNIIAPWSMSDLLIKDILFYHRPLKSKKSQISECSLEFHTYTDKDGATHRQGIKCIPTSHPLFQEYRIWQFIANLRIYERERFDNGKHFINEDKTSDFLTTKKKEELYEWLAEKDSVSQKTLLGHLGLKVERYHWNFPEEKTYPCGETRHLIQSRMKKANLQKAFHSLISDEQKDCFERGLWHILYSVSDYNELCKALKTFARKTGFTLEEQLLFVEAFSSCPPFKKDYGAYSKRAITKLLPLMRIGKFWHEESIDSTTKNRIEHLISGEECSGIDVRVREKVAKAGLCESIEQYQGLQQWLANYVVYNRHSEASEITKWESPDELDNYIRSFKQYSLRNPIVEQVSLETLRVVRDLWAELQKEGQTIDEIHLEMGRDLKNTAEERSRIFRRNSENEDTNFRIKLLLEEFYANEKDIKDVRPYSPSQQELLRIYEEGVWQQEKDIPQDIKDIKKRISNDKDIKDITPNDIQRYRIWMDQKYCSPYTGKTIPLSRLFTTDYEIEHVIPRSRYFDDSYNNKVICEAAVNKDKNNRLGMEYIMAAGGKTIELGNGKNVQILKEEEYVELVDKIFGNNTRKRNIMLADEITEEFSHRQLNDTRYIARFMKGILSNIVREKNADGTLEPEETSKNLIVCSGRITDRVKQDWGLNDIWNHIVTPRFERLNTKTSSNDFGEYVCKDGKRYFQTRVPLNLQKGFNKKRIDHRHHAMDAIAIACVNRSIVNYLNNAAANQTEREDLRRAVCIPERNGQTKRQLRSPWPCFARDTENALRQIVVSFKQNLRVATKATNSYECFDTASGKKIRKHQSNREHYAIRKPLHKDSVYGEVILTSIASVNLKKALLKAERILDKRLKEKIFELRKLYNYSNKQIEEHLTKVCINRPEWKNYDFKKIAVRILSNDADATHIVAIRKPLDESFDKIKINTITDTGIQKILLNHLSRYADDPKKAFSPEGIEDMNANIASLNGGKQHLPIYKVRVSEKNNGGYFPIGQKGNRPKKFVTTAQDTNLFFAVYADSKGKRSFKTIDLRTAIECKKQGLSVAPSVNEKGDKLLFTLSPNDLVYMPSEEEEANGFAIKGNLIKEHIYKMVNASNNRCFFIPHSVADFISKGEEYNALNKIELTEDGRSIKVHCVPLKVNRLGK

SEQ ID NO: 1699 - protein, 1521 aa, unidentified
  REGION 1..1521: note = Description of Unknown: uncultivated organism with predicted taxonomy: Bacteroidales
  REGION 1..1521: note = MG22-45 effector
MTKNTRNIIGLDLGTNSIGWSWIQQLISPTPTQPSEFLFNGTPIIRMSGSRIIPMPGDVTGSFERGETISKTKDRTAKRMARRMNERFQLRRERLNRVLNIMGFLPEHYARALDRYGKLNEESNTTIAWRSKEDGKNEFIFYPSFLEMASIFKERHPDIQRIPLDWTLYYLRSKALHQAITKEELSWVLHSFNQKRGYYQSREDITEEDKTKKVEYIKGVVNSVEDTGEKAKGKKIYKVTFADGTEFTSTKSEAPLWIGRTREIIVTTSLDTSGKPKLDKEGKIIQSAKTPDEKDWTLIKIRTEATIDDSKQTVGEYIFHALLKNPETKMKGAHVSTIDRRFYINEINAILKEQEKYHKELRDKSLYEQCIKALYAQNEVRRNIIAPWSMSDLLIKDILFYHRPLKSKKSQISECPLEFHTYTDKNGATHRQGIKCIPTSHPLFQEYRIWQFIANLRIYERERFDNGKHLINEDKTSDFLTTKKKEELYEWLAEKDSVSQKTLLGHLGLKVERYHWNFPEEKTYPCGETRHLIQSRLKKANLQKAFHSLISDEQKDCFERSLWHILYSVSDYNELCKALKTFARKTGFTLEEQSLFGEAFSSCPPFKKDYGAYSKRAITKLLPLMRIGKFWHEESIDSTTKTRIEHLISGEECSGIDVRVREKVAKAGLCESIEQYQGLPQWLANYVVYNRHSEASEITKWESPDELDNYIRSFKQYSLRNPIVEQVSLETLRVVRDLWTELQKEGQTIDEIHLEMGRDLKNTAEERSRIFRRNSENEDTNFRIKLLLEEFNANEKDIKDVRPYSPSQQELLHIYEEGVWQQEKDIPQDIKDIKKRISNDKDIKGITPNDIQRYRIWMDQKYCSPYTGKTIPLSRLFTTDYEIEHVIPRSRYFDDSYNNKVICEAAVNKDKNNRLGMEYIMAAGGKTIKLGNGKNVQILKEEEYVELVDKIFGNNTRKRNIMLADEITEEFSHRQLNDTRYIARFMKGILSNIVREKNADGTLEPEETSKNLIVCSGRITDRVKQDWGLNDIWNHIVTPRFERLNTKTSSNDFGEYVCKDGKRYFQTRVPLNLQKGFNKKRIDHRHHAMDAIAIACVNRSIVNYLNNAAANQTEREDLRRAVCIPERNGQTKRQLRSPWPCFARDTENALRQIVVSFKQNLRVATKATNSYECFDTTSGKKIRKHQSNREHYAIRKPLHKDSVYGEVILTSIASVNLKKALLKAERILDKRLKEKIFELRKLYNYSNKQIEEHLTKVCINCPEWKNYDFKKIAVRILSNDADATHIVAIRKPLDESFDEEKIKTITDTGIQKILLNHLSRYADDPKKAFSPEGIEDMNANIASLNGGKQHLPIYKVRVSEKDNGGYFPIGQKGNRPKKYVTTAQDTNLFFAVYADSKGKRSYKTIDLRTAIECRKQGLSVAPSINEKGDKLLFTLSPNDLVYMPSEGEEANGFAIDNNLNKEQIYKMVSANNKQCFFIPHTVADFISNGEEYNRHNKIELTEDRRSIKEHCVPLKVNRLGK

SEQ ID NO: 1700 - protein, 1532 aa, unidentified
  REGION 1..1532: note = Description of Unknown: uncultivated organism with predicted taxonomy: Bacteroidales
  REGION 1..1532: note = MG22-46 effector
MKKKNILGLDLGTNSIGWAWLQQDDTEQTIQTEYLLQNNPTIRMSGSRIIPTSGDVINDFEAGKAVSKTKDRTTFRMTRRMNERFKLRRERLNRVLRILGMLPAHYAQHVDRYGKPDEEKQPKIAWEVAPDGKSNFLFHQSFLEMVKLFGVHQPQLQRIPLDWTLYYLRHKALTQPISKAELAWILHSFNQKRGYNQTRDELTEVNEKEKLEYTNSKVVSVELIEQKKSPLYLVTFENGVAVETSKVDAPQWVGQMRYAIITTKLNDLGQPLHKKDGSIDQKVSLPNDDDWALNKLRTETQIDQSHTTVGNYIFQTLLKNPETKIKGAHVCTIDRRFYEDELNAILLKQAEFHPELTNRNLYEACLMALYANNEAHRYNLATQNTCNLITKDIIFYQRPLKSKKSLIAECPFEKRIFCDTEGNVQMQGIKCIPVSHPHFQEYRLWQFLNNLRIFQREVVEDGKFTMNVDVTDKYINENSLTLLFEWLQDKITIKQKELLAKLRLKESDFRWNYVEDKAYPCGETRHVLASRLKKLKGITNDFLAQPSLNGKTTVECELWHILYSVTNLAELRKALYTFARKHNFSVVDAEAFVKVFIACPPFKKDYGAYSDKAICKLLSVMRVGKYWSAENIDSTTLLRIEHLITGEEDEHINERTRKHITEKGLQQSVNQYQGLQQWLACYVVYGRHAEVAEIVRWESPTELEQYINNFKQYSLRNPIVEQVSLETLRVVRDLWQTVAKEGGRIDEIHLEMGRDLKNSAAERAKISNRNKQNEGTNFRIKLLLQEFSQYEKDIEGIRPYSPSQQELLRIYEEGVCEQTEMPKDIAKIRRELSSSSEKDVKRSDIQRYRLWLDQKYCSPYTGQPIPLARLFTTDYEIEHVIPRSKYFDDSYNNKVICEAAVNKAKSNRLGMAFIQESGGQIIPLGNGRNVQVLNESAYVEFINKTFKHNARKRSLMLADEITEEFCHRQLTDTRYIARFMMGVLSNIVRQNDNGVLESEAISKNLIVCNGKITDRVKQDWGLNDVWNHIVTPRFKRLNQITNSSDFGEWCNKEGKRYFQTRIPLELQKGVNKKRIDHRHHAMDAIAIACTTRSLVNYLNNQSAHTKAREDYRQRLCRTDGHGQTKRLLRAPWKDFAKDAESALQQIVVSFKQNTRILTHATNSYECFDAKAGKKIIKRQISQNHYAIRKPLHKDTVYGEVVLPSIKLISLNKALSNPRRIIDKQLRSKILELQQRDKLTKKQVCDFFKKTCANSTEWRNYDFTKVAVRVWSNDEEGSRMVSVRKAIDESFDMKQIEKVYDPIVRNILTRHLKACNGDSKIAFSPQGVEEMNQHIAELNNGNAHLPIYKVKLGESKGEKFAIGQKGCKATKFVVTAKDTNLFFAVYANEEGKRSYQSVDLRTAIELKKQGCPVAPETNEKGDKLLFILSPNSLVYMPTEEEMERGNIDVQNLNLNQIFKMVSSTGNECYFVPNTLSQVIFPNKEYESMNKVGTVKEWDGYSISESKNNKKFLSIKACCIPICIDRLGRIQLKK

SEQ ID NO: 1701 - protein, 1521 aa, unidentified
  REGION 1..1521: note = Description of Unknown: uncultivated organism with predicted taxonomy: Bacteroidales
  REGION 1..1521: note = MG22-47 effector
MTKNTRNIIGLDLGTNSIGWSWIQQLISPTPTQPSEYLFDGTPIIRMSGSRIIPMPGDVTGSFERGETISKTKDRTAKRMARRMNERFQLRRERLNRVLNIMGFLPEHYARALDRYGKLNEESNTTIAWRSKEDGKNEFIFYPSFLEMASIFKERHPDIQRIPLDWTLYYLRSKALHQAITKEELSWVLHSFNQKRGYYQSREDITEEDKTKKVEYIKGVVNSVEDTGEKAKGKKIYKVTFADGTEFTSTKSEAPLWIGRTREIIVTTSLDTSGKPKLDKEGKIIQSAKTPDEKDWTLIKIRTEATIDDSKLTVGEYIFHALLKNPETKIKGAHVSTIDRRFYINEINAILKEQEKYHKELRDKSLYEQCIKALYAQNEVRRNIIAPWSMSDLLIKDILFYHRPLKSKKSQISDCPLEFHTYTDKDGATHRQGIKCIPTSHPLFQEYRIWQFIANLRIYERERFDNGKHFINEDKTSDFLTTKKKEELYEWLAEKDSVSQKTLLGHLGLKVERYHWNFPEEKTYPCGETRHLIQSRLKKANLQKAFHSLISDEQKDCFERGLWHILYSVSDYNELCKALKTFARKTGFTLEEQLLFVEAFSSCPPFKKDYGAYSKRAITKLLPLMRIGKFWHEESIDSTTKNRIEHLISGEECSGIDVRVREKVAKAGLCESIEQYQGLQQWLANYVVYNRHSEASEITKWESPDELDNYIRAFKQYSLRNPIVEQVSLETLRVVRDLWAELQKEGQTIDEIHLEMGRDLKNTAEERSRIFRRNSENEDTNFRIKLLLEEFYANEKDIKDVRPYSPSQQELLRIYEEGVWQQEKDIPQDIKDIKKRISNDKDIKDITPNDIQRYRIWMDQKYCSPYTGKTIPLSRLFTTDYEIEHVIPRSRYFDDSYNNKVICEATVNKDKNNRLGMEYIMAAGGKTIELGNGKNVQILKEEEYVELVDKIFGNNTRKRNIMLADEITEEFSHRQLNDTRYIARFMKGILSNIVREKNADGTLEPEETSKNLIVCSGRITDRVKQDWGLNDIWNHIITPRFERLNTKTSSNDFGEYVCKDGKRYFQTRVPLNLQKGFNKKRIDHRHHAMDAIAIACVNRSIVNYLNNAAANQTEREDLRRAVCIPERNGQTKRQLRSPWHCFARDAENALRQIVVSFKQNLRVATKATNSYECFDTASGKKIRKHQSNREHYAIRKPLHKDSVYGEVILTSIASVNLKKALLKAERILDKRLKEKIFELRKLYNYSNKQIEEHLTKVCINCPEWKNYDFKKIAVRILSNDADATHIVAIRKPLDESFDEVKINTITDTGIQKILLNHLSRYADDPKKAFSPEGIEDMNANIASLNGGKQHLPVYKVRVSEKDNGGYFPIGQKGNRPKKYVTTAKDTNLFFAVYADSKGKRSYKTIDLRTAIECRKQGLSVAPSINEKGDKLLFTLSPNDLVYMPSEGEEANGFAIDNNLNKDQIYKMVSANNKQCFFIPHTVADFISRGEEYNSHNKIELTEDRRSIKEHCVPLKVNRLGK

SEQ ID NO: 1702 - protein, 1532 aa, unidentified; identical to SEQ ID NO: 1700
  REGION 1..1532: note = Description of Unknown: uncultivated organism with predicted taxonomy: Bacteroidales
  REGION 1..1532: note = MG22-48 effector

SEQ ID NO: 1703 - protein, 1521 aa, unidentified
  REGION 1..1521: note = Description of Unknown: uncultivated organism with predicted taxonomy: Bacteroidales
  REGION 1..1521: note = MG22-49 effector
MTKNTRNIIGLDLGTNSIGWSWIQQLISPTPTQPSEYLFDGTPIIRMSGSRIIPMPGDVTGSFERGETISKTKDRTAKRMARRMNERFQLRRERLNRVLNIMGFLPEHYARALDRYGKLNEESNTTIAWRSKEDGKNEFIFYPSFLEMASIFKERHPDIQRIPLDWTLYYLRSKALHQAITKEELSWVLHSFNQKRGYYQSREDITEEDKTKKVEYIKGVVNSVEDTGEKAKGKKIYKVTFADGTEFTSTKSEAPLWIGRTREIIVTTSLDTSGKPKLDKEGKIIQSAKTPDEKDWTLIKIRTEATIDDSKLTVGEYIFHALLKNPETKIKGAHVSTIDRRFYINEINAILKEQEKYHEELRDKSIYEQCTQALYAQNEVRRNIIAPWSMSDLLIKDILFYHRPLKSKKSQISECPLEFHTYTDKNGATHRQGIKCIPTSHPLFQEYRIWQFIANLRIYERERFDNGKHLINEDKTSDFLTTKKKEELYEWLAEKDSVSQKTLLGHLGLKVERYHWNFPEEKTYPCGETRHLIQSRLKKANLQKAFHSLISDEQKECFERGLWHILYSISDYNELCKALKTFARKTGFTLEEQLLFVEAFSSCPPFKKDYGAYSKRAITKLLPLMRIGKFWHEESIDSTTKNRIEHLISGEECSGIDVRVREKVAKAGLCKSIEQYQGLQQWLANYVVYNRHSEASEITKWESPDELDNYIRSFKQYSLRNPIVEQVSLETLRVVRDLWAELQKEGQTIDEIHLEMGRDLKNTAEERSRIFRRNSENEDTNFRIKLLLEEFYANEKDIKDVRPYSPSQQELLRIYEEGVWQQEKDIPQDIKDIKKRISNDKDIKDITPNDIQRYRIWMDQKYCSPYTGKTIPLSRLFTTDYEIEHVIPRSRYFDDSYNNKVICEAAVNKDKNNRLGMEYIMAAGGKTIELGNGKNVQILKEEEYVELVDKIFGNNTRKRNIMLADEITEEFSHRQLNDTRYIARFMKGILSNIVREKNADGTLEPEETSKNLIVCSGRITDRVKQDWGLNDIWNHIITPRFERLNTKTSSDKFGEYVCKEGKRYFQTRVPLSLQKGFNKKRIDHRHHAMDAIAIACVNRSIVNYLNNAAANQTEREDLRRAVCIPGRNGQTKRQLRSPWHCFAKDAENALRQIVVSFKQNLRVATKATNSYECFDTASGKKIRKHQSNREHYAIRKPLHKDSVYGEVILPSIASVNLKKALLKAERILDKRLKEKIFELRKLYNYSNKQIEEHLTKVCINRPEWKNYDFKKIAVRILSNDADATHIVAIRKPLDESFDEVKINTITDTGIQKILLNHLSRYADDPKKAFSPEGIEDMNANIASLNGGKQHLPVYKVRVSEKDNGGYFPIGQKGNRSKKYVTTAKDTNLFFAVYANSNGKRSYKTIDLRTAIECKKQGLSVAPSVNEKGDKLLFTLSPNDLVYMPSEEEEANGFSIKGNLIKEHIYKMVSANDNRCFFIPHTVADFISNGEEYNRHNKIELTEDRRSIKEHCVPLKVNRLGK

SEQ ID NO: 1704 - protein, 1521 aa, unidentified
  REGION 1..1521: note = Description of Unknown: uncultivated organism with predicted taxonomy: Bacteroidales
  REGION 1..1521: note = MG22-50 effector
MTKNTRNIIGLDLGTNSIGWSWIQQLISPPPTQPSEYLFDGTPIIRMSGSRIIPMPGDVTGSFERGETISKTKDRTAKRMARRMNERFQLRRERLNRVLNIMGFLPGHYARALDRYGKLNEESNTTIAWRSKEDGNNEFIFYPSFLEMASIFKEHHPDIQRIPLDWTLYYLRSKALHQAITKEELSWVLHSFNQKRGYYQSREDITEEDKTKKVEYIKGVVNSVEDTGEKAKGKKIYKVTFADGTEFTSTKSEAPLWIGRTREIIVTTSLDTSGKPKLDKEGKIIQSAKTPDEKDWTLIKIRTEATIDDSKLTVGEYIFHALLKNPKTKIKGAHVSTIDRRFYINEINAILKEQEKYHEELRDKSLYEQCIKALYAQNEVRRNIIAPWSMKDLLTKDILFYHRPLKSKKSQISECPLEFHCYTDKDGETHRQGIKCIPVSHPLFQEYRIWQFISNLRIYEREHFDNGKHFTNVDKTSEFLTNEKKEELYEWLAEKDSVSQKTLLGHLGLKVERYHWNFPEEKTYPCGETRHLIQSRLKKANLQKAFHSLISDEQKDCFERGLWHILYSVSDYNELCKALKTFARKTGFTLEEQLLFVEAFSSCPPFKKDYGAYSKRAITKLLPLMRIGKFWHEESIDSTTKNRIEHLISGEECSGIDVRVREKVAKAGLCESIEQYQGLPQWLANYVVYNRHSEASEIIKWESPDELDNYIRSFKQYSLRNPIVEQVSLETLRVVRDLWAELQKEGQTIDEIHLEMGRDLKNTAEERSRIFRRNSENEDTNFRIKLLLEEFYANEKDIKDVRPYSPSQQELLRIYEEGVWQKEKDIPQDIKDIKKRISNDKDIKDITPNDIQRYRIWMDQKYCSPYTGKTIPLSRLFTTDYEIEHVIPRSRYFDDSYNNKVICEAAVNKDKNNRLGMEYIMAAGGKTIELGNGKNVQILKEEEYVELVDKIFGNNTRKRNIMLADEITEEFSHRQLNDTRYIARFMKGILSNIVREKNADGTLEPEETSKNLIVCSGRITDRVKQDWGLNDIWNHIITPRFERLNTKTSSDKFGEYVCKEGKRYFQTRVPLSLQKGFNKKRIDHRHHAMDAIAIACVNRSIVNYLNNAAANQTEREDLRRAVCIPGRNGQTKRQLRSPWHCFARDAENALRQIVVSFKQNLRVATKATNSYECFDTASGKKIRKRQSNREHYAIRKPLHKDSVYGEVILTSIASVNLKKALLKAERILDKRLKEKIFELRKLYNYSNKQIEEHLTKVCINCPEWKNYDFKKIAVRILSNDADATHIVAIRKPLDESFDKIKINTITDTGIQKILLNHLSRYADDPKKAFSPEGIEDMNANIASLNGGKQHLPVYKVRVSEKDNGGYFPIGQKGNRSKKYVTTAKDTNLFFAVYANSNGKRSYKTIDLRTAIECKKQGLSVAPSVNEKGDKLLFTLSPNDLVYMPSEEEGANGFSIKGNLIKEHIYKMVSANDNRCFFIPHTVADFISNGEEYNRHNKIELTEDRRSIKEHCVPLKVNRLGK

SEQ ID NO: 1705 - protein, 1301 aa, unidentified
  REGION 1..1301: note = Description of Unknown: uncultivated organism with predicted taxonomy: Prevotellaceae
  REGION 1..1301: note = MG22-51 effector
LVTFENGVAVETSKVDAPQWVGQMRYAIITTKLNDLGQPLHKKDGSIDQKVSLPNDDDWALNKLRTETQIDQSHTTVGNYIFQTLLKNPETKIKGAHVCTIDRRFYEDELNAILLKQAEFHPELTNRNLYEACLMALYANNEAHRYNLATQNTCNLITKDIIFYQRPLKSKKSLIAECPFEKRIFCDAEGNVQMQGIKCIPVSHPHFQEYRLWQFLNNLRIFQREVVEDGKFTMNVDVTDKYINENSLTLLFEWLQDKITIKQKELLAKLRLKESDFRWNYVEDKAYPCGETRHVLASRLKKLKGITNDFLAQPSLNGKTTVECELWHILYSVTNLAELRKALYTFARRHNFSVVDAEAFVKVFIACPPFKKDYGAYSDKAICKLLSVMRVGKYWSAENIDSTTLLRIEHLITGEEDEHINERTRKHITEKGLQQSVNQYQGLQQWLACYVVYGRHAEVAEIVRWESPTELEQYINNFKQYSLRNPIVEQVSLETLRVVRDLWQTVAKEGGRIDEIHLEMGRDLKNSAAERAKISNRNKQNEGTNFRIKLLLQEFSQYEKDIEGIRPYSPSQQELLRIYEEGVCEQTEMPKDIAKIRRELSSSSSEKDVKRSDIQRYRLWLDQKYCSPYTGQPIPLARLFTTDYEIEHVIPRSKYFDDSYNNKVICEAAVNKAKSNRLGMAFIQESGGQIIPLGNGRNVQVLNESAYVEFINKTFKHNARKRSLMLADEITEEFCNRQLTDTRYIARFMMGVLSNIVRQNDNGVLESEAISKNLIVCNGKITDRVKQDWGLNDVWNHIVTPRFERLNQITNSSDFGEWCNKEGKRYFQTRIPLELQKRVNKKRIDHRHHAMDAIAIACTTRSLVNYLNNQSAHTKAREDYRQRLCRTDGHGQTKRLLRAPWKDFAKDAESALQQIVVSFKQNTRILTHATNSYECFDAKAGKKIIKRQISQNHYAIRKPLHKDTVYGEVVLPSIKLISLNKALSNPRRIIDKQLRSKILELQQRDKLTKKQVCDFFKKTCANSTEWRNYDFAKVAVRVWSNDEEGSRMVSVRKAVDESFDMKQIEKVYDPIVRNILTRHLKACNGDSKTAFSPQGVEEMNQHIAELNNENAHLPIYKVKLGESKGEKFAIGQKGSKATKFVVTAKDTNLFFAVYANEEGKRSYQSVDLRTAIELKKQGCPVAPETNEKGDKLLFILSPNSLVYMPTEEEMERGNIDVQNLNLNQIFKMVSSTGNNCFFVPNTLSQVIFPGKEYESMDKVGTVKEWDGYSISESKNNKKFLSIKACCIPICIDRLGRIQLKK

SEQ ID NO: 1706 - protein, 941 aa, unidentified
  REGION 1..941: note = Description of Unknown: uncultivated organism with predicted taxonomy: Prevotella sp. MGM2
  REGION 1..941: note = MG22-52 effector
MTKNTRNIIGLDLGTNSIGWSWIQQLISPPPTQPSEYLFDGTPIIRMSGSRIIPMPGDVTGSFERGETISKTKDRTAKRMARRMNERFQLRRERLNRVLNIMGFLPGHYARALDRYGKLNEESNTTIAWRSKEDGKNEFIFYPSFLEMASIFKEHHPDIQRIPLDWTLYYLRSKALHQAITKEELSWVLHSFNQKRGYYQSREDITEEDKTKKVEYIKGVVNSVEDTGEKAKGKKIYKVTFADGTEFTSTKSEAPLWIGRTREIIVTTSLDTSGKPKLDKEGKIIQSAKTPDEKDWTLIKIRTEATIDDSKLTVGEYIFHALLKNPKTKIKGAHVSTIDRRFYINEINAILKEQEKYHEELRDKSLYEQCIKALYAQNEVRRNIIAPWSMKDLLTKDILFYHRPLKSKKSQISECPLEFHCYTDKDGETHRQGIKCIPVSHPLFQEYRIWQFISNLRIYEREHFDNGKHFTNVDKTSEFLTNEKKEELYEWLAEKDSVSQKTLLGHLGLKVERYHWNFPEEKTYPCGETRHLIQSRLKKANLQKAFHSLISDEQKDCFERGLWHILYSVSDYNELCKALKTFARKTGFTLEEQLLFVEAFSSCPPFKKDYGAYSKRAITKLLPLMRIGKFWHEESIDSTTKNRIEHLISGEECSGIDVRVREKVAKAGLCESIEQYQGLPQWLANYVVYNRHSEASEIIKWESPDELDNYIRSFKQYSLRNPIVEQVSLETLRVVRDLWAELQKEGQTIDEIHLEMGRDLKNTAEERSRIFRRNSENEDTNFRIKLLLEEFYANEKDIKDVRPYSPSQQELLRIYEEGVWQQEKDIPQDIKDIKKRISNDKDIKDITPNDIQRYRIWMDQKYCSPYTGKTIPLSRLFTTDYEIEHVIPRSRYFDDSYNNKVICEAAVNKDKNNRLYNPQNEAFRLSITNRIISYSSFGFRL

SEQ ID NO: 1707 - protein, 1521 aa, unidentified
  REGION 1..1521: note = Description of Unknown: uncultivated organism with predicted taxonomy: Bacteroidales
  REGION 1..1521: note = MG22-53 effector
MTKNTRNIIGLDLGTNSIGWSWIQQLISPTPTQPSEYLFDGTPIIRMSGSRIIPMPGDVTGSFERGETISKTKDRTAKRMARRMNERFQLRRERLNRVLNIMGFLPEHYARALDRYGKLNEESNTTIAWRSKEDGKNEFIFYPSFLEMASIFKERHPDIQRIPLDWTLYYLRSKALHQAITKEELSWVLHSFNQKRGYYQSREDITEEDKTKKVEYIKGVVNSVEDTGEKAKGKKIYKVTFADGTEFTSTKSEAPLWIGRTREIIVTTSLDTSGKPKLDKEGKIIQSAKTPDEKDWTLIKIRTEATIDDSKLTVGEYIFHALLKNPETKIKGAHVSTIDRRFYINEINAILKEQEKYHEELRDKSIYEQCTQALYAQNEVRRNIIAPWSMSDLLIKDILFYHRPLKSKKSQISECPLEFHTYTDKDGATHRQGIKCIPTSHPLFQEYRIWQFIANLRIYERERFDNGKHLINEDKTSDFLTTKKKEELFEWLAEKDSVSQKTLLGHLGLKVERYHWNFPEEKTYPCGETRHLIQSRLKKANLQKAFHSLISDEQKECFERGLWHILYSISDYNELCKALKTFARKTGFKLEEQLLFVEAFSSCPPFKKDYGAYSKRAITKLLPLMRIEKFWHEESIDSTTKNRIEHLISGEECSGIDVRVREKVAEAGLCESIEQYQGLPQWLANYVVYNRHSEASEITKWESPDELDNYIRSFKQYSLRNPIVEQVSLETLRVVRDLWAELQKEGQTIDEIHLEMGRDLKNTAEERSRIFRRNSENEDTNFRIKLLLEEFYANEKDIKDVRPYSPSQQELLRIYEEGVWQQEKDIPQDIKDIKKRISNDKDIKDITPNDIQRYRIWMDQKYCSPYTGKTIPLSRLFTTDYEIEHVIPRSRYFDDSYNNKVICEATVNKDKNNRLGMEYIMAAGGKTIELGNGKNVQILKEEEYVELVDKIFGNNTRKRNIMLTDEITEEFSHRQLNDTRYIARFMKGILSNIVRGKNADGKLEPEETSKNLIVCSGRITDRVKQDWGLNDIWNHIITPRFERLNKKTSSNDFGEYVCKDGKRYFQTRVPLNLQKGFNKKRIDHRHHAMDAIAIACVNRSIVNYLNNAAANQTEREDLRRAVCIPERNGQTKRQLRSPWHCFARDAENALRQIVVSFKQNLRVATKATNSYECFDTASGKKIRRHQSNREHYAIRKPLHKDSVYGEVILPSIASVNLKKALLKADRILDKRLKDKIFELRKLYNYSNKQIEEHLTKVCINCLEWKNYDFKKIAVRILSNDADATHIVAIRKPLDESFDKVKINTITDTGIQKILLNHLSRYADDPKKAFSPEGIEDMNANIASLNGGKQHLPIYKVRVSEKDNGGYFPIGQKGNRSKKYVTTAKETNLFFAVYADSNGKRSFKTIDLRTAIECKKQGLSVSPSVNEKGDKLLFTLSPNDLVYMPSEEEEANGFSIDNNLNKEQIYKMVSATYKQCFFIPHTVADFIYKNKEFNVLNKIELTEDRRSIKEHCVPLKVNRLGK

SEQ ID NO: 1708 - protein, 1569 aa, unidentified
  REGION 1..1569: note = Description of Unknown: uncultivated organism with predicted taxonomy: Bacteroidales
  REGION 1..1569: note = MG22-54 effector
YGLLTHKQLCVLYSSHHVAANSTYPFKTGHNRTPLNRFTTHKTQPYNIMTKNTMNIIGLDLGTNSIGWSWIQQLISPTPTQPSEYLFNGTPIIRMSGSRIIPMPGDVTGSFERGETISKTKDRTAKRMARRMNERFQLRRERLNRVLNIMGFLPEHYARALDRYGKLNEESNTTIAWRSKEDGKNEFIFYPSFLEMASIFKERHPDIQRIPLDWTLYYLRSKALHQAITKEELSWVLHSFNQKRGYYQSREDITEEDKTKKVEYIKGVVNSVEDTGEKAKGKKIYKVTFADGTEFTSTKSEAPLWIGRTREIIVTTSLDTSGKPKLDKEGKIIQSAKTPDEKDWTLIKIRTEATIDDSKLTVGEYIFHALLKNPETKIKGAHVSTIDRRFYINEINAILKEQEKYHEELRDKSLYEQCTQALYAQNEVRRNIIAPWSMSDLLIKDILFYHRPLKSKKSQISECPLEFHTYTDKNGVTHRQGIKCIPTSHPLFQEYRIWQFIANLRIYERERFDNGKHLINEDKTSDFLTTKKKEELYEWLAEKDSVSQKTLLGHLGLKVERYHWNYPEEKTYPCGETRHLIQSRLKKANLQKAFHSLISEEQKDCFERGLWHILYSVSDYNELCKALKTFARKTGFTLEEQSLFVEAFSSCPPFKKDYGAYSKRAITKLLPLMRIGKFWHEESIDSTTKTRIEHLISGEECSGIDVRIREKVAKAGLCESIEQYQGLPLWLANYVVYNRHSEASEITKWESPDELDNYIRSFKQYSLRNPIVEQVSLETLRVVRDLWTELQKEGQTIDEIHLEMGRDLKNTAEERSRIFRRNSENEDTNFRIKLLLEEFNANEKDIKDVRPYSPSQQELLRIYEEGVWQQEKDIPQDIKDIKKRISNDKDIKGITPNDIQRYRIWMDQKYCSPYTGKTIPLSRLFTTDYEIEHVIPRSRYFDDSYNNKVICEAAVNKDKNNRLGMEYIMAAGGKTIKLGNGKNVQILKEEEYVELVDKIFGNNTRKRNIMLADEITEEFSHRQLNDTRYIARFMKGILSNIVREKNADGTLEPEETSKNLIVCSGRITDRVKQDWGLNDIWNHIVTPRFERLNTKTSSNDFGEYVCKDGKRYFQTRVPLNLQKGFNKKRIDHRHHAMDAIAIACVNRSIVNYLNNAAANQTKREDLRRAVCIPERNGQTKRQLRSPWPCFARDTENALRQIVVSFKQNLRVATKATNSYECFDTASGKKIRKHQSNREHYAIRKPLHKDSVYGEVILPSIASVNLKKALLKAERILDKRLKEKIFELRKLYNYSNKQIEEHLTKVCINCPEWKNYDFKKIAVRILSNDADATHIVAIRKPLDESFDEVKINTITDTGIQKILLNHLSRYADDPKKAFSPEGIEDMNANIASLNGGKQHLPIYKVRVSEKDNGGYFPIGQKGNRPKKYVTTAKDTNLFFAVYADSKGKRSFNMIDLRTAIECWKQGVSVAPSINEKGDKLLFTLSPNDLVYMPSEEEEANGFSIKGNLIKEHIYKMVSATNRQCFFIPHTVADFISRGQEYNVLNKIELAEDGRSIKEHCVPLKVNRLGK

SEQ ID NO: 1709 - protein, 1614 aa, unidentified
  REGION 1..1614: note = Description of Unknown: uncultivated organism with predicted taxonomy: Bacteroidales
  REGION 1..1614: note = MG22-55 effector
TNIFQKAKPFHNKFTTFVNVSIQRAVLEYQVGLYNNSFFKKATRCYGLLTHKQLCVLYSSHHVAANSTYPFKTGHNRTPLNRFTTHKTQPYNIMTKNTMNIIGLDLGTNSIGWSWIQQLISPTPTQPSEYLFNGTPIIRMSGSRIIPMPGDVTGSFERGETISKTKDRTAKRMARRMNERFQLRRERLNRVLNIMGFLPEHYARALDRYGKLNEESNTTIAWRSKEDGKNEFIFYPSFLEMASIFKERHPDIQRIPLDWTLYYLRSKALHQAITKEELSWVLHSFNQKRGYYQSREDITEEDKTKKVEYIKGVVNSVEDTGEKAKGKKIYKVTFADGTEFTSTKSEAPLWIGRTREIIVTTSLDTSGKPKLDKEGKIIQSAKTPDEKDWTLIKIRTEATIDDSKLTVGEYIFHALLKNPETKIKGAHVSTIDRRFYINEINAILKEQEKYHEELRDKSLYEQCTQALYAQNEVRRNIIAPWSMSDLLIKDILFYHRPLKSKKSQISECPLEFHTYTDKNGVTHRQGIKCIPTSHPLFQEYRIWQFIANLRIYERERFDNGKHLINEDKTSDFLTTKKKEELYEWLAEKDSVSQKTLLGHLGLKVERYHWNYPEEKTYPCGETRHLIQSRLKKANLQKAFHSLISEEQKDCFERGLWHILYSVSDYNELCKALKTFARKTGFTLEEQSLFVEAFSSCPPFKKDYGAYSKRAITKLLPLMRIGKFWHEESIDSTTKTRIEHLISGEECSGIDVRIREKVAKAGLCESIEQYQGLPLWLANYVVYNRHSEASEITKWESPDELDNYIRSFKQYSLRNPIVEQVSLETLRVVRDLWTELQKEGQTIDEIHLEMGRDLKNTAEERSRIFRRNSENEDTNFRIKLLLEEFNANEKDIKDVRPYSPSQQELLRIYEEGVWQQEKDIPQDIKDIKKRISNDKDIKGITPNDIQRYRIWMDQKYCSPYTGKTIPLSRLFTTDYEIEHVIPRSRYFDDSYNNKVICEAAVNKDKNNRLGMEYIMAAGGKTIKLGNGKNVQILKEEEYVELVDKIFGNNTRKRNIMLADEITEEFSHRQLNDTRYIARFMKGILSNIVREKNADGTLEPEETSKNLIVCSGRITDRVKQDWGLNDIWNHIVTPRFERLNTKTSSNDFGEYVCKDGKRYFQTRVPLNLQKGFNKKRIDHRHHAMDAIAIACVNRSIVNYLNNAAANQTKREDLRRAVCIPERNGQTKRQLRSPWPCFARDTENALRQIVVSFKQNLRVATKATNSYECFDTASGKKIRKHQSNREHYAIRKPLHKDSVYGEVILPSIASVNLKKALLKAERILDKRLKEKIFELRKLYNYSNKQIEEHLTKVCINCPEWKNYDFKKIAVRILSNDADATHIVAIRKPLDESFDEVKINTITDTGIQKILLNHLSRYADDPKKAFSPEGIEDMNANIASLNGGKQHLPIYKVRVSEKDNGGYFPIGQKGNRPKKYVTTAKDTNLFFAVYADSKGKRSFNMIDLRTAIECWKQGVSVAPSINEKGDKLLFTLSPNDLVYMPSEEEEANGFSIKGNLIKEHIYKMVSATNRQCFFIPHTVADFISRGQEYNVLNKIELAEDGRSIKEHCVPLKVNRLGK

SEQ ID NO: 1710 - protein, 1347 aa, unidentified
  REGION 1..1347: note = Description of Unknown: uncultivated organism with predicted taxonomy: Bacteroidales
  REGION 1..1347: note = MG22-56 effector
MTKNTRNIIGLDLGTNSIGWSWIQQLISPTPTQPSEYLFDGTPIIRMSGSRIIPMPGDVTGSFERGETISKTKDRTAKRMARRMNERFQLRRERLNRVLNIMGFLPEHYARALDRYGKLNEESNTTIAWRSKEDGKNEFIFYPSFLEMAAIFKEHHPDIQRIPLDWTLYYLRSKALHQAITKEELSWVLHSFNQKRGYYQSREDITEEDKTKKVEYIKGVVNSVEDTGEKAKGKKIYKVTFADGTEFTSTKSEAPLWIGRTREIIVTTSLDTSGKPKLDKEGKIIQSAKTPDEKDWTLIKIRTEATIDDSKLTVGEYIFHALLKNPETKIKGAHVSTIDRRFYINEINAILKEQEKYHEELRDKSIYEQCTQALYAQNEVRRNIIAPWSMSDLLIKDILFYHRPLKSKKSQISECPLEFHTYTDKDGATHRQGIKCIPTSHPLFQEYRIWQFIANLRIYERERFDNGKHFINEDKTSDFLTTKKKEELYEWLAERDSVSQKTLLGKIGLKVEDYHWNFPEEKTYPCGETRHLIQSRLKKANLQKTFHSLISDEQKECFERGLWHILYSVSDYNELCKALKTFARKTGFTLEEQLLFVEAFSSCPPFKKDYGAYSKRAITKLLPLMRIGKFWHEESIDSTTKNRIEHLISGEECSGIDVRVREKVAKAGLCESIEQYQGLPQWLANYVVYNRHSEASEIIKWESPDELDNYIRAFKQYSLRNPIVEQVSLETLRVVLDLWAELQKEGQTIDEIHLEMGRDLKNTAEERSRIFKRNSENEDTNFRIKLLLEEFYANEKDIKDVRPYSPSQQELLRIYEEGVWQQEKDIPQDIKDIKKRISNDKDIKDITPNDIQRYRIWMDQKYCSPYTGKTIPLSRLFTTDYEIEHVIPRSRYFDDSYNNKVICEAAVNKDKNNRLGMEYIMAAGGKTIELGNGKNVQILKKEEYVELVDKIFGNNTRKRNIMLADEITEDFSHRQLNDTRYIARFMKGILSNIVREKNADGTLEQEETSKNLIVCSGRITDRVKQDWGLNDIWNHIITPRFERLNTKTSSDKFGEYVCKEGKRYFQTRVPLSLQKGFNKKRIDHRHHAMDAIAIACVNRSIVNYLNNAAANQTEREDLRRAVCIPERNGQTKRQLRSPWPCFARDTENALRQIVVSFKQNLRVATKATNSYECFDTTSGKKIRKHQSNREHYAIRKPLHKDSVYGEVILTSIASVNLKKALLKAERILDKRLKEKIFELRKLYNYSNKQIEEHLTKVCINRPEWKNYDFKKIAVRILSNDADATHIVAIRKPLDESFDKVKINTITDTGIQKILLNHLSRYADDPKKAFSPEGIEDMNANIASLNGE

SEQ ID NO: 1711 - protein, 1558 aa, unidentified
  REGION 1..1558: note = Description of Unknown: uncultivated organism with predicted taxonomy: Bacteroidales
  REGION 1..1558: note = MG22-57 effector
LYSSHHVAANSTYPFKTGHNRTPLNRFTTHKTQPYNIMTKNTRNIIGLDLGTNSIGWSWIQQLISPTPTQPSEYIFDGTPIIRMSGSRIIPMPGDVTGSFERGETISKTKDRTAKRMARRMNERFQLRRERLNRVLNIMGFLPEHYARALDRYGKLNEESNTTIAWRSKEDGKNEFIFYPSFLEMASIFKERHPDIQRIPLDWTLYYLRSKALHQAITKEELSWVLHSFNQKRGYYQSREDITEEDKTKKVEYIKGVVNSVEDTGEKAKGKKIYKVTFADGTEFTSTKSEAPLWIGRTREIIVTTSLDSSGKPKLDKEGKIIQSAKTPDEKDWTLIKIRTEATIDDSKLTVGEYIFHALLENPETKIKGAHVSTIDRRFYINEINAILKEQEKYHEELRDKSIYEQCIKALYAQNEVRRNIIAPWSMKDLLTKDILFYHRPFKSKKSQISECPLEFHCYTDKDGETHRQGIKCIPVSHPLFQEYRIWQFISNLRIYEREHFDNGKHFTNVDKTSEFLTSEKKEELYEWLAERDSVSQKTLLGKIGLKVEDYHWNYPEEKTYPCGETRHLIQSRLKKANLQKAFHSLISDEQKDCFERGLWHILYSVSDYNELCKALKTFARKTGFTLEEQLLFVEAFSSCPPFKKDYGAYSKRAITKLLPLMRIGKFWHEESIDSTTKNRIEHLISGEECSGIDVRVREKVAKAGLCESIEQYQGLPQWLANYVVYNRHSEASEIIKWESPDELDNYIRSFKQYSLRNPIVEQVSLETLRVVRDLWAELQKEGQTIDEIHLEMGRDLKNTAEERSRIFRRNSENEDTNFRIKLLLEEFNANEKDIKDVRPYSPSRQELLRIYEEGVWQQEKDIPQDIKDIKKRISNDKDIKDITPNDIQRYRIWMDQKYCSPYTGKTIPLSRLFTTDYEIEHVIPRSRYFDDSYNNKVICEAAVNKDKNNRLGMEYIMAAGGKTIELGNGKNVQILKEEEYVELVDKIFGNNTRKRNIMLADEITEEFSHRQLNDTRYIARFMKGILSNIVREKNADGTLEPEETSKNLIVCSGRITDRVKQDWGLNDIWSHIVTPRFERLNTKTSSNDFGEYVCKDGKRYFQTRVPLNLQKGFNKKRIDHRHHAMDAIAIACVNRSIVNYLNNAAANQTEREDLRRAVYIPERNGQTKRQLRSPWHCFARDAENALRQIVVSFKQNLRVATKATNSYECFDTASGKKIRKHQSNREHYAIRKPLHKDSVYGEVILPSIASVNLKKALMKADRILDKRLKEKIFELRKLYNYSNKQIEEHLTKVCINCPEWKNYDFKKIAVRILSNDADATHIVAIRKPLDETFDEDKIKTITDTGIQKILLNHLSRYADDPKKAFSPEGIEDMNANIASLNSGKQHLPIYKVRVSEKDNGGYFPIGQKGNRPKKYVTTAKDTNLFFAVYADSKGKRSYKTIDLRTAIECRKQGLSVAPSVNQKGDKLLFTLSPNDLVYMPSEEEEVNGFAIDNNLNKDQIYKMVSANNKQCFFIPHTVADFISRGEEYNSHNKIELTEDRRSIKEHCVPLKVNRLGK

SEQ ID NO: 1712 - protein, 1558 aa, unidentified
  REGION 1..1558: note = Description of Unknown: uncultivated organism with predicted taxonomy: Bacteroidales
  REGION 1..1558: note = MG22-58 effector
LYSSHHVAANSTYPFKTGYNRAPLNPFTTHKTQPYNIMTKNTMNIIGLDLGTNSIGWSWIQQLISPTPTQPSEYLFNGTPIIRMSGSRIIPMPGDVTGSFERGETISKTKDRTAKRMDRRMNERFQLRRERLNRVLNIMGFLPEHYARALDRYGKLNEESNTTIAWRSKEDGKNEFIFYPSFLEMASIFKERHPDIQRIPLDWTLYYLRSKALHQAITKEELSWVLHSFNQKRGYYQSREDITEEDKTKKVEYIKGVVNSVEDTGEKAKGKKIYKVTFADGTEFTSTKSEAPLWIGRTREIIVTTSLDTSGKPKLDKEGKIIQSAKTPDEKDWTLIKIRTEATIDDSKLTVGEYIFHALLKNPETKIKGAYVSTIDRRFYINEINAILKEQEKYHKELRDKSLYEQCIKALYAQNEVRRNIIAPWSMSDLLIKDILFYHRPLKSKKSQISECPLEFHTYTDKDGETHRQGIKCIPVSHPLFQEYRIWQFISNLRIYEREHFDNGKHFTNVDKTSEFLTSEKKEELYEWLAEKDSVSQKTLLGRLGLKVERYHWNFPEEKTYPCGETRHLIQSRLKKANLQKAFHSLISDEQKDCFERGLWHILYSVSDYNELCKALKTFARKTGFTLEEQSLFVEAFSSCPPFKKDYGAYSKRAITKLLPLMRIGKFWHEESIDSTTKTRIEHLISGEECSGIDVRVREKVAKAGLCESIEQYQGLPQWLANYVVYNRHSEASEITKWESPDELDNYIRSFKQYSLRNPIVEQVSLETLRVVRDLWTELQKEGQTIDEIHLEMGRDLKNTAEERSRIFRRNSENEDTNFRIKLLLEEFYANEKDIKDVRPYSPSQQELLRIYEEGVWQQEKDIPQDIKDIKKRISNDKDIKDITPNDIQRYRIWMDQKYCSPYTGKTIPLSRLFTTDYEIEHVIPRSRYFDDSYNNKVICEAAVNKDKNNRLGMEYIMAAGGKTIELGNGKNVQILKEEEYVELVDKIFGNNTRKRNIMLADEITEEFSHRQLNDTRYIARFMKGILSNIVREKNADGTLEPEETSKNLIVCSGRITDRVKQDWGLNDIWNHIITPRFERLNTKTSSNDFGEYVCKDGKRYFQTRVPLNLQKGFNKKRIDHRHHAMDAIAIACVNRSIVNYLNNAAANPTEREDLRRAVCIPERNGQTKRQLRSPWHCFARDAENALRQIVVSFKQNLRVATKATNSYECFDTASGKKIRKHQSNREHYAIRKPLHKDSVYGEVILTSIASVNLKKALLKAERILDKRLKEKIFELRKLYNYSNKQIEEHLTKVCINCPEWKNYDFKKIAVRILSNDADATHIVAIRKPLDESFDKIKINTITDTGIQKILKNHLSRYADDPKKAFSPEGIEDMNANIASLNGGKQHLPIYKVRVSEKDNGGYFPIGQKGNRPKKYVTTAKDTNLFFAVYADSKGKRSYNTIDLRTAIECRKQGLSVAPSINEKGDKLLFTLSPNDLVYMPSEGEEANGFAIDNNLNKDQIYKMVSANNKQCFFIPHTVADFISRGEEYNSHNKIELTEDRRSIKEHCVPLKVNRLGK

SEQ ID NO: 1713 - protein, 1521 aa, unidentified
  REGION 1..1521: note = Description of Unknown: uncultivated organism with predicted taxonomy: Bacteroidales
  REGION 1..1521: note = MG22-59 effector
MTKNTRNIIGLDLGTNSIGWSWIQQLISPTPTQPSEYLFDGTPIIRMSGSRIIPMPGDVTGSFERGETISKTKDRTAKRMARRMNERFQLRRERLNRVLNIMGFLPEHYARALDRYGKLNEESNTTIAWRSKEDGKNEFIFYPSFLEMASIFKERHPDIQRIPLDWTLYYLRSKALHQAITKEELSWVLHSFNQKRGYYQSREDITEEDKTKKVEYIKGVVNSVEDTGEKAKGKKIYKVTFADGTEFTSTKSEAPLWIGRTREIIVTTSLDTSGKPKLDKEGKIIQSAKTPDEKDWTLIKIRTEATIDDSKLTVGEYIFHALLKNPETKIKGAHVSTIDRRFYINEINAILKEQEKYHKELRDKSLYEQCIKALYAQNEVRRNIIAPWSMSDLLIKDILFYHRPIKSKKSQISECSLEFHTYTDKDGATHRQGIKCIPTSHPLFQEYRIWQFIANLRIYERERFDNGKHFINEDKTSDFLTTKKKEELYEWLAEKDSVSQKTLLGHLGLKVERYHWNFPEEKTYPCGETRHLIQSRLKKANLQKAFHSLISDEQKDCFERGLWHILYSVSDYNELCKALKTFARKTGFTLEEQLLFVEAFSSCPPFKKDYGAYSKRAITKLLPLMRIGKFWHEESIDSTTKNRIEHLISGEECSGIDVRVREKVAKAGLCESIEQYQGLPQWLANYVVYNRHSEASEIIKWESPDELDNYIRSFKQYSLRNPIVEQVSLETLRVVRDLWAELQKEGQTIDEIHLEMGRDLENTAEERSRIFRRNSENEDTNFRIKLLLEEFYANEKDIKDVRPYSPSQQELLRIYEEGVWQQEKDIPQDIKDIKKRISNDKDIKDITPNDIQRYRIWMDQKYCSPYTGKTIPLSRLFTTDYEIEHVIPRSRYFDDSYNNKVICEAAVNKDKNNRLGMEYIMAAGGKTIELGNGKNVQILKKEEYVELVDKIFGNNTRKRNIMLADEITEDFSHRQLNDTRYIARFMKGILSNIVREKNADGTLEPEETSKNLIVCSGRITDRVKQDWGLNDIWNHIITPRFERLNKKTSSNDFGEYVCKDGKRYFQTRVPLNLQKGFNKKRIDHRHHAMDAIAIACVNRSIVNYLNNAAANQTEREDLRRAVCIPERNGQTKRQLRSPWPCFARDAENALQQIVVSFKQNLRVATKATNSYECFDTASGKRIRKHQSNREHYAIRKPLHKDSVYGEVILTSIASVNLKKALLKAERILDKRLKEKIFELRKLYNYSNKQIEEHLTKVCINCPEWKNYDFKKIAVRILSNDADATHIVAIRKPLDETFDKEKIKTITDTGIQKILKNHLSQNDNDPKKAFTPEGIENMNANIVLLNGGKQHLPIYKVRISEKNNGGYFPIGQKGNRHKKYVTTAQDTNLFFAVYVDSKGKRSFNMIDLRTAIECWKQGVSVAPSINEKGDKLLFTLSPNDLVYMPSEEEEANGFSIKGNLIKEHIYKMVSATNRQCFFIPHTVADFISRGQEYNVLNKIELAEDGRSIKEHCVPLKVNRLGK

SEQ ID NO: 1714 - protein, 1521 aa, unidentified
  REGION 1..1521: note = Description of Unknown: uncultivated organism with predicted taxonomy: Bacteroidales
  REGION 1..1521: note = MG22-60 effector
MTKNTRNIIGLDLGTNSIGWSWIQQLISPPPTQPSEYLFDGTPIIRMSGSRIIPMPGDVTGSFERGETISKTKDRTAKRMARRMNERFQLRRERLNRVLNIMGFLPGHYVRALDRYGKLNEESNTTIAWRSKEDGKNEFIFYPSFLEMASIFKEHHPDIQRIPLDWTLYYLRSKALHQAITKEELSWVLHSFNQKRGYYQSREDITEEDKTKKVEYIKGVVNSVEDTGEKAKGKKIYKVTFADGTEFTSTKSEAPLWIGRTREIIVTTSLDTSGKPKLDKEGKIIQSAKTPDEKDWTLIKIRTEATIDDSKLTVGEYIFHALLKNPKTKIKGAHVSTIDRRFYINEINAILKEQEKYHEELRDKSLYEQCIKALYAQNEVRRNIIAPWSMKDLLTKDILFYHRPLKSKKSQISECPLEFHCYTDKDGETHRQGIKCIPVSHPLFQEYRIWQFISNLRIYEREHFDNGKHFTNVDKTSEFLTNEKKEELYEWLAEKDSVSQKTLLGHLGLKVERYHWNFPEEKTYPCGETRHLIQSRLKKANLQKAFHSLISDEQKDCFERGLWHILYSVSDYNELCKALKTFARKTGFTLEEQLLFVEAFSSCPPFKKDYGAYSKRAITKLLPLMRIGKFWHEESIDSTTKNRIEHLISGEECSGIDVRVREKVAKAGLCESIEQYQGLPQWLANYVVYNRHSEASEIIKWESPDELDNYIRSFKQYSLRNPIVEQVSLETLRVVRDLWAELQKEGQTIDEIHLEMGRDLKNTAEERSRIFRRNSENEDTNFRIKLLLEEFYANEKDIKDVRPYSPSQQELLRIYEEGVWQQEKDIPQDIKDIKKRISNDKDIKDITPNDIQRYRIWMDQKYCSPYTGKTIPLSRLFTTDYEIEHVIPRSRYFDDSYNNKVICEAAVNKDKNNRLGMEYIMAAGGKTIELGNGKNVQILKEEEYVELVDKIFGNNTRKRNIMLADEITEEFSHRQLNDTRYIARFMKGILSNIVREKNADGTLEPEETSKNLIVCSGRITDRVKQDWGLNDIWNHIITPRFERLNTKTSSDKFGEYVCKEGKRYFQTRVPLSLQKGFNKKRIDHRHHAMDAIAIACVNRSIVNYLNNAAANQTEREDLRRAVCIPGRNGQTKRQLRSPWHCFARDAENALRQIVVSFKQNLRVATKATNSYECFDTASGKKIRKRQSNREHYAIRKPLHKDSVYGEVILTSIASVNLKKALLKAERILDKRLKEKIFELRKLYNYSNKQIEEHLTKVCINCPEWKNYDFKKIAVRILSNDADATHIVAIRKPLDESFDKIKINTITDTGIQKILLNHLSRYADDPKKAFSPEGIEDMNANIASLNGGKQHLPVYKVRVSEKDNGGYFPIGQKGNRSKKYVTTAKDTNLFFAVYANSNGKRSYKTIDLRTAIECKKQGLSVAPSVNEKGDKLLFTLSPNDLVYMPSEEEGANGFSIKGNLIKEHIYKMVSANDNRCFFIPHTVADFISNGEEYNRHNKIELTEDRRSIKEHCVPLKVNRLGK

SEQ ID NO: 1715 - protein, 1521 aa, unidentified
  REGION 1..1521: note = Description of Unknown: uncultivated organism with predicted taxonomy: Bacteroidales
  REGION 1..1521: note = MG22-61 effector
MTKNTRNIIGLDLGTNSIGWSWIQQLISPIPTQPSEYLFDGTPIIRMSGSRIIPMPGDVTGSFERGETISKTKDRTAKRMARRMNERFQLRRERLNRVLNIMGFLPEHYARALDRYGKLNEESNTTIAWRSKEDGKNEFIFYPSFLEMASIFKEHHPDIQRIPLDWTLYYLRSKALHQAITKEELSWVLHSFNQKRGYYQSREDITEEDKTKKVEYIKGVVNSVEDTGEKAKGKKIYKVTFANGTEFTSTKSEAPLWIGRTREIIVTTSLDTSGKPKLDKEGKIIQSAKTPDEKDWTLIKIRTEATIDDSKLTVGEYIFHALLKNPETKIKGAHVSTIDRRFYINEINAILKEQEKYHEELRDKSIYEQCTQALYAQNEVRRNIIAPWSMSDLLIKDILFYHRPLKSKKSQISECPLEFHTYTDKDGATHRQGIKCIPTSHPLFQEYRIWQFIANLRIYERERFDNGKHFINEDKTSDFLTTKKKEELYEWLAEKDSVSQKTLLGRLGLKVERYHWNFPEEKTYPCGETRHLIQSRLKKANLQKAFHSLISDEQKDCFERGLWHILYSVSDYNELCKALKTFARKTGFTLEEQLLFVEAFSSCPPFKKDYGAHSKRAITKLLPLMRIGKFWHEESIDSTTKTRIEHLISGEECSGIDVRVREKVAKAGLCESIEQYQGLPQWLANYVVYNRHSEASEITKWESPDELDNYIRSFKQYSLRNPIVEQVSLETLRVVRDLWAELQKEGQTIDEIHLEMGRDLKNTAEERSRIFRRNSENEDTNFRIKLLLEEFNANEKDIKDVRPYSPSQQELLRIYEEGVWQQEKDIPQDIKDIKKRISNDKDIKDITPNDIQRYRIWMDQKYCSPYTGKTIPLSRLFTTDYEIEHVIPRSRYFDDSYNNKVICEAAVNKDKNNRLGMEYIMAAGGKTIELGNGKNVQILMEEEYVELVDKIFGNNTRKRNIMLADEITEEFSHRQLNDTRYIARFMKGILSNIVREKNADGTLEPEETSKNLIVCSGRITDRVKQDWGLNDIWNHIVTPRFERLNTKTSSNDFGEYVCKEGKRYFQTRVPLNLQKGFNKKRIDHRHHAMDAIAIACVNRSIVNYLNNAAANQIEREDLRRAVCIPERNGQTKRQLRSPWHCFARDAENALRQIVVSFKQNLRIATKATNSYECFDTASGKKNRKHQSNREHYAIRKPLHKDSVYGEVILTSIASVNLKKALLKADRILDKRLKEKIFELRKLYNYSNKQIEEHLTKVCINCPEWKNYDFKKIAVRILSNDADATHIVAIRKPLDETFDEDKIKTITDTGIQKILLNHLSRYADDPKKAFSPEGIEDMNANIASLNGGKQHLPIYKVRVSEKDNGGYFPIGQKGNRPKKYVTTAKDTNLFFAVYVDSKGKRSYKTIDLRTAIECKKQGLSVAPSVNEKGDKLLFTLSPNDLVYMPSEEEEANGFSIKGNLIKEHIYKMVSANDNRCFFIPHTVADFISNGEEYNRHNKIELTEDRRSIKEHCVPLKVDRLGK

SEQ ID NO: 1716 - protein, 1558 aa, unidentified
  REGION 1..1558: note = Description of Unknown: uncultivated organism with predicted taxonomy: Bacteroidales
  REGION 1..1558: note = MG22-62 effector
LYSSHHVAANSTYPFKTGYNRAPLNPFTTHKTQPYNIMTKNTMNIIGLDLGTNSIGWSWIQQLISPTPTQPSEYLFNGTPIIRMSGSRIIPMPGDVTGSFERGETISKTKDRTAKRMARRMNERFQLRRERLNRVLNIMGFLPEHYARALDRYGKLNEESNTTIAWRSKEDGKNEFIFYPSFLEMASIFKERHPDIQRIPLDWTLYYLRSKALHQAITKEELSWVLHSFNQKRGYYQSREDITEEDKTKKVEYIKGVVNSVEDTGEKAKGKKIYKVTFADGTEFTSTKSEAPLWIGRTREIIVTTSLDTSGKPKLDKEGKIIQSAKTPDEKDWTLIKIRTEATIDDSKLTVGEYIFHALLKNPETKIKGAYVSTIDRRFYINEINAILKEQEKYHKELRDKSLYEQCIKALYAQNEVRRNIIAPWSMSDLLIKDILFYHRPLKSKKSQISECPLEFHTYTDKDGATHRQGIKCIPTSHPLFQEYRIWQFIANLRIYERERFDNGKHLINEDKTSDFLTTKKKEELYEWLAEKDSVSQKTLLGRLGLKVERYHWNFPEEKTYPCGETRHLIQSRLKKANLQKAFHSLISDEQKDCFERGLWHILYSVSDYNELCKALKTFARKTGFTLEEQSLFVEAFSSCPPFKKDYGAYSKRAITKLLPLMRIGKFWHEESIDSTTKTRIEHLISGEECSGIDVRVREKVAKAGLCESIEQYQGLPQWLANYVVYNRHSEASEITKWESPDELDNYIRSFKQYSLRNPIVEQVSLETLRVVRDLWTELQKEGQTIDEIHLEMGRDLKNTAEERSRIFRRNSENEDTNFRIKLLLEEFYANEKDIKDVRPYSPSQQELLRIYEEGVWQQEKDIPQDIKDIKKRISNDKDIKDITPNDIQRYRIWMDQKYCSPYTGKTIPLSRLFTTDYEIEHVIPRSRYFDDSYNNKVICEAAVNKDKNNRLGMEYIMAAGGKTIELGNGKNVQILKEEEYVELVDKIFGNNTRKRNIMLADEITEEFSHRQLNDTRYIARFMKGILSNIVREKNADGTLEPEETSKNLIVCSGRITDRVKQDWGLNDIWNHIITPRFERLNTKTSSNDFGEYVCKDGKRYFQTRVPLNLQKGFNKKRIDHRHHAMDAIAIACVNRSIVNYLNNAAANPTEREDLRRAVCIPERNGQTKRQLRSPWHCFARDAENALRQIVVSFKQNLRVATKATNSYECFDTASGKKIRKHQSNREHYAIRKPLHKDSVYGEVILTSIASVNLKKALLKAERILDKRLKEKIFELRKLYNYSNKQIEEHLTKVCINCPEWKNYDFKKIAVRILSNDADATHIVAIRKPLDESFDKIKINTITDTGIQKILKNHLSRYADDPKKAFSPEGIEDMNANIASLNGGKQHLPIYKVRVSEKDNGGYFPIGQKGNRSKKYVTTAKDTNLFFAVYADSKGKRSYKTIDLRTAIECRKQGLSVAPSTNEKGDKLLFTLSPNDLVYMPSEGEEANGFSIDNYLNKEQIYKMVSATYKQCFFIPHTVADFIYKNKEFNVLNKIELTEDRRSIKEHCVPLKVNRLGK

SEQ ID NO: 1717 - protein, 913 aa, unidentified
  REGION 1..913: note = Description of Unknown: uncultivated organism with predicted taxonomy: Parabacteroides
  REGION 1..913: note = MG22-63 effector
MTKNTRNIIGLDLGTNSIGWSWIQQLISPTPTQPSEYLFDGTPIIRMSGSRIIPMPGDVTGSFERGETISKTKDRTAKRMARRMNERFQLRRERLNRVLNIMGFLPEHYARALDRYGKLNEESNTTIAWRSKEDGKNEFIFYPSFLEMASIFKERHPDIQRIPLDWTLYYLRSKALHQAITKEELSWVLHSFNQKRGYYQSREDITEEDKTKKVEYIKGVVNSVEDTGEKAKGKKIYKVTFADGTEFTSTKSEAPLWIGRTREIIVTTSLDTSGKPKLDKEGKIIQSAKTPDEKDWTLIKIRTEATIDDSKLTVGEYIFHALLKNPETKIKGAHVSTIDRRFYINEINAILKEQEKYHEELRDKSLYEQCIKALYAQNEVRRNIIAPWSMSDLLIKDILFYHRPLKSKKSQISECPLEFHTYTDKNGATHRQGIKCIPTSHPLFQEYRIWQFIANLRIYERERFDNGKHLINEDKTSDFLTTKKKEELYEWLAEKDSVSQKTLLGHLGLKVERYHWNFPEEKTYPCGETRHLIQSRLKKANLQKAFHSLISDEQKECFERGLWHILYSISDYNELCKALKTFARKTGFTLEEQLLFVEAFSSCPPFKKDYGAYSKRAITKLLPLMRIGKFWYEESIDSTTKNRIEHLISGEECSSIDVRVREKVAKAGLCESIEQYQGLPQWLANYVVYNRHSEASEITKWESPDELDNYIRSFKQYSLRNPIVEQVSLETLRVVRDLWTELQKEGQTIDEIHLEMGRDLKNTAEERSRIFRRNSENEDTNFRIKLLLEEFYANEKDIKDVRPYSPSQQELLRIYEEGVWQQEKDIPQDIKDIKKRISNDKDIKDITPNDIQRYRIWMDQKYCSPYTGKTIPLSRLFTTDYEIEHVIPRSRYFDDSYNNKVICEAAVNKDKNN

SEQ ID NO: 1718 - protein, 1450 aa, unidentified
  REGION 1..1450: note = Description of Unknown: uncultivated organism with predicted taxonomy: Prevotella sp. MGM2
  REGION 1..1450: note = MG22-64 effector
MTKNIRNIIGLDLGTNSIGWSWIQQLISPTPTQPSEYLFNGTPIIRMSGSRIIPMPGDVTGSFERGETISKTKDRTAKRMARRMNERFQLRRERLNRVLNIMGFLPEHYARALDRYGKLNEESNTTIAWRSKEDGKNEFIFYPSFLEMASIFKEHHPDIQRIPLDWTLYYLRSKALHQAITKEELSWVLHSFNQKRGYYQSREDITEEDKTKKVEYIKGVVNSVEDTGEKAKGKKIYKVTFADGTEFTSTKSEAPLWIGRTREIIVTTSLDTSGKPKLDKEGKIIQSAKTPDEKDWTLIKIRTEATIDDSKQTVGEYIFHALLKNPETKIKGAHVSTIDRRFYINEINAILKEQEKYHKELRDKSLYEQCIKALYAQNEVRRNIIAPWSMSDLLIKDILFYHRPLKSKKSQISECPLEFHTYTDKNGATHRQGIKCIPTSHPLFQEYRIWQFIANLRIYERERFDNGKHLINEDKTSDFLTTKKKEELYEWLAEKDSVSQKTLLGHLGLKVERYHWNFPEEKTYPCGETRHLIQSRLKKANLQKAFHSLISDEQKDCFERGLWHILYSVSDYNELCKALKTFARKTGFTLEEQSLFVEAFSSCPPFKKDYGAYSKRAITKLLPLMRIGKFWHEESIDSTTKNRIEHLISGEECSGIDVRVREKVAKAGLCESIEQYQGLQQWLANYVVYNRHSEASEITKWESPDELDNYIRSFKQYSLRNPIVEQVSLETLRVVRDLWAELQKEGQTIDEIHLEMGRDLKNTAEERSRIFRRNSENEDTNFRIKLLLEEFNANEKDIKDVRPYSPSQQELLRIYEEGVWQQEKDIPQDIKDIKKRISNDKDIKDITPNDIQRYRIWMDQKYCSPYTGKTIPLSRLFTTDYEIEHVIPRSRYFDDSYNNKVICEAAVNKDKNNRLGMEYIMAAGGKTIELGNGKNVQILKEEEYVELVDKIFGNNTRKRNIMLADEITEEFSHRQLNDTRYIARFMKGILSNIVREKNADGTLEPEETSKNLIVCSGRITDRVKQDWGLNDIWNHIVTPRFERLNTKTSSNDFGEYVCKEGKRYFQTRVPLNLQKGFNKKRIDHRHHAMDAIAIACVNRSIVNYLNNAAANQTEREDLRRAVCIPERNGQTKRQLRSPWHCFARDAENALRQIVVSFKQNLRVATKATNSYECFDTASGKKIRKRQSNREHYAIRKPLHKDSVYGEVILTSIASVNLKKALLKAERILDKRLKEKIFELRKLYNYSNKQIEEHLTKVCINCPEWKNYDFKKIAVRILSNDADATHIVAIRKPLDESFDKIKINTITDTGIQKILLNHLSRYADDPKKAFSPEGIEDMNANIASLNGGKQHLPIYKVRVSEKDNGGYFPIGQKGNRSKKYVTTAKDTNLFFAVYANSNGKRSYKTIDLRTAIECKKQGLSVAPSVNEKGDKLLFTLSRRTRQTLWSRPCRC

SEQ ID NO: 1719 - protein, 1521 aa, unidentified
  REGION 1..1521: note = Description of Unknown: uncultivated organism with predicted taxonomy: Prevotella
  REGION 1..1521: note = MG22-65 effector
MTKNTRNIIGLDLGTNSIGWSWIQQLISPTPTQPSEYIFDGTPIIRMSGSRIIPMPGDVTGSFERGETISKTKDRTAKRMARRMNERFQLRRERLNRVLNIMGFLPEHYARALDRYGKLNEESNTTIAWRSKEDGKNEFIFYPSFLEMASIFKEHHPDIQRIPLDWTLYYLRSKALHQAITKEELSWVLHSFNQKRGYYQSREDITEEDKTKKVEYIKGVVNSVEDTGEKAKGKKIYKVTFADGTEFTSTKSEAPLWIGRTREIIVTTSLDTSGKPKLDKEGKIIQSAKTPDEKDWTLIKIRTEATIDDSKLTVGEYIFHALLENPETKIKGAYVSTIDRRFYINEINAILKEQEKYHEELRDKSIYEQCIKALYAQNEVRRNIITPWSMKDLLTKDILFYHRPLKSKKSQISECPLEFHCYTDKDGETHRQGIKCIPVSHPLFQEYRIWQFISNLRIYEREHFDNGKHFTNVDKTSDFLTTKKKEELFEWLAEKDSVSQKTLLGHLGLKVERYHWNFPEEKTYPCGETRHLIQSRLKKANLQKAFHSLISDEQKDCFERGLWHILYSVSDYNELCKALKTFARKTGFTLEEQSLFVEAFSSCPPFKKDYGAYSKRAITKLLPLMRIGKFWHEESIDSTTKTRIEHLISGEECSGIDVRIREKVAKAGLCESIEQYQGLQQWLANYVVYNRHSEASEIIKWESPDELDNYIRSFKQYSLRNPIVEQVSLETLRVVRDLWTELQKEGQTIDEIHLEMGRDLKNTAEERSRIFRRNSENEDTNFRIKLLLEEFNANEKDIKDVRPYSPSQQELLRIYEEGVWQQEKDIPQDIKDIKKRISNDKDIKDITPNDIQRYRIWMDQKYCSPYTGKTIPLSRLFTTDYEIEHVIPRSRYFDDSYNNKVICEAAVNKDKNNRLGMEYIMAAGGKTIELGNGKNVQILKEEEYVELVDKIFGNNTRKRNIMLADEITEEFSHRQLNDTRYIARFMKGILSNIVREKNADGTLEPEETSKNLIVCSGRITDRVKQDWGLNDIWNHIVTPRFERLNTKTSSNDFGEYVCKDGKRYFQTRVPLNLQKGFNKKRIDHRHHAMDAIAIACVNRSIVNYLNNAAANQTEREDLRRAVCIPERNGQTKRQLRSPWHCFARDAENALRQIIVSFKQNLRVATKATNSYECFDTASGKKIRKHQSNREHYAIRKPLHKDSVYGEVILTSIASVYLRKALLKAERILDKRLKEKIFELRKLYNYSNKQIEEHLTKVCINCPEWKNYDFKKIAIRILSNDADATHIVAIRKPLDESFDEVKINTITDTGIQKILLNHLSRYADDPKKAFSPEGIEDMNANIASLNGGKQHLPIYKVRVSEKDNGGYFPIGQKGNRPKKYVTTAKDTNLFFAVYADSKGKRSFNMIDLRTAIECRKQGLSVAPSINEKGEKLLFTLSPNDLVYMPSEEEEANGFSIKDNLIKEHIYKMVSATNRQCFFIPHTVADFISRGQEYNVLNKIELAEDGRSIKEHCVPIKVNRLGK

SEQ ID NO: 1720 - protein, 1053 aa, unidentified
  REGION 1..1053: note = Description of Unknown: uncultivated organism with predicted taxonomy: Prevotella sp. MGM2
  REGION 1..1053: note = MG22-66 effector
LYSSHHVAANSTYPFKTGYNRAPLNPFTTHKTQPYNIMTKNTMNIIGLDLGTNSIGWSWIQQLISPTPTQPSEYLFNGTPIIRMSGSRIIPMPGDVTGSFERGETISKTKDRTAKRMARRMNERFQLRRERLNRVLNIMGFLPEHYARALDRYGKLNEESNTTIAWRSKEDGKNEFIFYPSFLEMASIFKERHPDIQRIPLDWTLYYLRSKALHQAITKEELSWVLHSFNQKRGYYQSREDITEEDKTKKVEYIKGVVNSVEDTGEKAKGKKIYKVTFADGTEFTSTKSEAPLWIGRTREIIVTTSLDTSGKPKLDKEGKIIQSAKTPDEKDWTLIKIRTEATIDDSKLTVGEYIFHALLKNPETKIKGAYVSTIDRRFYINEINAILKEQEKYHKELRDKSLYEQCIKALYAQNEVRRNIIAPWSMSDLLIKDILFYHRPLKSKKSQISECPLEFHTYTDKDGATHRQGIKCIPTSHPLFQEYRIWQFIANLRIYERERFDNGKHLINEDKTSDFLTTKKKEELYEWLAEKDSVSQKTLLGRLGLKVERYHWNFPEEKTYPCGETRHLIQSRLKKANLQKAFHSLISDEQKDCFERGLWHILYSVSDYNELCKALKTFARKTGFTLEEQSLFVEAFSSCPPFKKDYGAYSKRAITKLLPLMRIGKFWHEESIDSTTKTRIEHLISGEECSGIDVRVREKVAKAGLCESIEQYQGLPQWLANYVVYNRHSEASEITKWESPDELDNYIRSFKQYSLRNPIVEQVSLEMLRVVRNLWTELQKEGQTIDEIHLEMGRDLKNTAEERSRIFRRNSENEDTNFRIKLLLEEFYANEKDIKDVRPYSPSQQELLRIYEEGVWQQEKDIPQDIKDIKKRISNDKDIKDITPNDIQRYRIWMDQKYCSPYTGKTIPLSRLFTTDYEIEHVIPRSRYFDDSYNNKVICEAAVNKDKNNRLGMEYIMAAGGKTIELGNGKNVQILKEEEYVELVDKIFGNNTRKRNIMLADEITEEFSHRQLNDTRYIARFMKGILSNIVREKNADGTLEPEETSKNLIVCS

SEQ ID NO: 1721 - protein, 938 aa, unidentified
  REGION 1..938: note = Description of Unknown: uncultivated organism with predicted taxonomy: Bacteroidales
  REGION 1..938: note = MG22-67 effector
MTKNTRNIIGLDLGTNSIGWSWIQQLISPTPTQASEYIFDGTPIIRMSGSRIIPMPGDVTGSFERGETISKTKDRTAKRMARRMNERFQLRRERLNRVLNIMGFLPEHYARALDRYGKLNEESNTTIAWRSKEDGKNEFIFYPSFLEMASIFKERHPDIQRIPLDWTLYYLRSKALHQAITKEELSWVLHSFNQKRGYYQSREDITEEDKTKKVEYIKGVVNSVEDTGEKAKGKKIYKVTFADGTEFTSTKSEAPLWIGRTREIIVTTSLDTSGKPKLDKEGKIIQSAKTPDEKDWTLIKIRTEATIDDSKLTVGEYIFHALLKNPETKIKGAHVSTIDRRFYINEINAILKEQEKYHEELRDKSLYEQCIKALYAQNEVRRNIIAPWSMKDLLTKDILFYHRPLKSKKSQISECPLEFHCYTDKDGETLRQGIKCIPVSHPLFQEYRIWQFISNLRIYEREHFDNGKHFTNVDKTSEFLTSEKKEELYEWLAERDSVSQKTLLGKIGLKVEDYHWNYPEEKTYPCGETRHLIQSRLKKANLQKAFHSLISDEQKDCFERGLWHILYSVSDYNELCKALKTFARKTGFTLEEQLLFVEAFSSCPPFKKDYGAYSKRAITKLLPLMRIGKFWHEESIDSTTKNRIEHLISGEECSGIDVRVREKVAKAGLCESIEQYQGLPQWLANYVVYNRHSEASEITKWESPDELDNYIRSFKQYSLRNPIVEQVSLETLRVVRDLWAELQKEGQTIDEIHLEMGRDLKNTAEERSRIFRRNSENEDTNFRIKLLLEEFNANEKDIKDVRPYSPSQQELLRIYEEGVWQQEKDIPQDIKDIKKRISNDKDIKDITPNDIQRYRIWMDQKYCSPYTAKRYHCPVFSPPTTKSNTSFRVHGILTTPIIIRSSAKLPSTKTKTTDWAWNTSWLLEEKRLNSATGKTFKF

SEQ ID NO: 1722 - protein, 1521 aa, unidentified; identical to SEQ ID NO: 1714
  REGION 1..1521: note = Description of Unknown: uncultivated organism with predicted taxonomy: Bacteroidales
  REGION 1..1521: note = MG22-68 effector

SEQ ID NO: 1723 - protein, 1521 aa, unidentified
  REGION 1..1521: note = Description of Unknown: uncultivated organism with predicted taxonomy: Bacteroidales
  REGION 1..1521: note = MG22-69 effector
MTKNTRNIIGLDLGTNSIGWSWIQQLISPTPTQPSEYLFDGTPIIRMSGSRIIPMPGDVTGSFERGETISKTKDRTAKRMARRMNERFQLRRERLNRVLNIMGFLPEHYARALDRYGKLNEESNTTIAWRSKEDGKNEFIFYPSFLEMASIFKERHPDIQRIPLDWTLYYLRSKALHQAITKEELSWVLHSFNQKRGYYQSREDITEEDKTKKVEYIKGVVNSVEDTGEKAKGKKIYKVTFADGTEFTSTKSEAPLWIGRTREIIVTTSLDTSGKPKLDKEGKIIQSAKTPDEKDWTLIKIRTEATIDDSKLTVGEYIFHALLKNPETKIKGAHVSTIDRRFYINEITAILKEQEKYHEELRDKSLYEQCIKALYAQNEVRRNIIAPWSMKDLLTKDILFYHRPLKSKKSQISECPLEFHCYTDKDGETHRQGIKCIPVSHPLFQEYRIWQFISNLRIYEREHFDNGKHFTNVDKTSEFLTSEKKEELYEWLAEKDSVSQKTLLGHLGLKVERYHWNFPEEKTYPCGETRHLIQSRLKKANLQKAFHSLISDEQKECFERGLWHILYSISDYNELCKALKTFARKTGFTLEEQLLFVEAFSSCPPFKKDYGAYSKRAITKLLPLMRIGKFWHEESIDSTTKNRIEHLISGEECSGIDVRVREKVAKAGLCESIEQYQGLPQWLANYVVYNRHSEASEITKWESPDELDNYIRSFKQYSLRNPIVEQVSLETLRVVRDLWAELQKEGQTIDEIHLEMGRDLKNTAEERSRIFRRNSENEDTNFRIKLLLEEFNANEKDIKDVRPYSPSQQELLRIYEEGVWQQEKDIPQDIKDIKKRISNDKDIKDITPNDIQRYRIWMDQKYCSPYTGKTIPLSRLFTTDYEIEHVIPRSRYFDDSYNNKVICEAAVNKDKNNRLGMEYIMAAGGKTIELGNGKNVQILKEEEYVELVDKIFGNNTRKRNIMLADEITEEFSHRQLNDTRYIARFMKGILSNIVREKNADGTLEPEETSKNLIVCSGRITDRVKQDWGLNDIWNHIVTPRFERLNTKTSSNDFGEYVCKEGKRYFQTRVPLNLQKGFNKKRIDHRHHAMDAITIACVNRSIVNYLNNAAANQTEREDLRRAVCIPERNGQTKRQLRSPWHCFARDAENALRQIVVSFKQNLRVATKATNSYECFDTASGKKIRKRQSNREHYAIRKPLHKDSVYGEVILTSIASVNLKKALLKAERILDKRLKEKIFELRKLYNYSNKQIEEHLTKVCINCPEWKNYDFKKIAVRILSNDADATHIVAIRKPLDESFDKIKINTITDTGIQKILLNHLSRYADDPKKAFSPEGIEDMNANIASLNGGKQHLPIYKVRVSEKDNGGYFPIGQKGNRSKKYVTTAKDTNLFFAVYANSNGKRSYKTIDLRTAIECKKQGLSVAPSVNEKGDKLLFTLSPNDLVYMPSEEEGANGFSIKGNLIKEHIYKMVSANDNRCFFIPHTVADFISNGEEYNRHNKIELTEDRRSIKEHCVPLKVNRLGK

SEQ ID NO: 1724 - protein, 1520 aa, unidentified
  REGION 1..1520: note = Description of Unknown: uncultivated organism with predicted taxonomy: Bacteroidales
  REGION 1..1520: note = MG22-70 effector
MTKNTRNIIGLDLGTNSIGWSWIQQLISPTPTQPSEYLFNGTPIIRMSGSRIIPMPGDVTGSFERGETISKTKDRTAKRMARRMNERFQLRRERLNRVLNIMGFLPEHYARALDRYGKLNEESNTTIAWRSKEDGKNEFIFYPSFLEMASIFKEHHPDIQRIPLDWTLYYLRSKALHQAITKEELSWVLHSFNQKRGYYQSREDITEEDKTKKVEYIKGVVNSVEDTGEKAKGKKIYKVTFADGTEFTSTKSEAPLWIGRTREIIVTTSLDTSGKPKLDKEGKIIQSAKTPDEKDWTLIKIRTEATIDDSKLTVGEYIFHALLKNPETKIKGAHVTIDRRFYINEINAILKEQEKYHEELRDKSIYEQCTQALYAQNEVRRNIIAPWSMSDLLIKDILFYHRPLKSKKSQISECPLEFHTYTDKNGATHRQGIKCIPTSHPLFQEYRIWQFIANLRIYERERFDNGKHLINEDKTSDFLTTKKKEELFEWLAEKDSVSQKTLLGRLGLKVERYHWNFPEEKTYPCGETRHLIQSRLKKANLQKAFHSLISDEQKDCFERGLWHILYSVSDYNELCKALKTFARKTGFTLEEQLLFVEAFSSCPPFKKDYGAYSKRAITKLLPLMRIGKFWHEESIDSTTKNRIEHLISGEECSGIDVRVREKVAKAGLCESIEQYQGLQQWLANYVVYNRHSEASEITKWESPDELDNYIRSFKQYSLRNPIVEQVSLETLRVVRDLWAELQKEGQTIDEIHLEMGRDLKNTAEERSRIFRRNSENEDTNFRIKLLLEEFYANEKDIKDVRPYSPSQQELLRIYEEGVWQQEKDIPQDIKDIKKRISNDKDIKDITPNDIQRYRIWMDQKYCSPYTGKTIPLSRLFTTDYEIEHVIPRSRYFDDSYNNKVICEAAVNKDKNNRLGMEYIMAAGGKTIELGNGKNVQILKEEEYVELVDKIFGNNTRKRNIMLADEITEEFSHRQLNDTRYIARFMKGILSNIVREKNADGTLEPEETSKNLIVCSGRITDRVKQDWGLNDIWNHIITPRFERLNTKTSSNDFGEYVCKDGKRYFQTRVPLNLQKGFNKKRIDHRHHAMDAIAIACVNRSIVNYLNNAAANQTEREDLRRAVCIPERNGQTKRQLRSPWPCFARDAENALRQIVVSFKQNLRVATKATNSYECFDTASGKKIRKHQSNREHYAIRKPLHKDSVYGEVILPSIASVNLKKALLKAERILDKRLKEKIFELRKLYNYSNKQIEEHLTKVCINCPEWKNYDFKKIAVRILSNDADTTHIVAIRKPLDETFDEEKIKAITDTGIQKILLNHLRQNDNDPKKAFTPEGIENMNANIVLLNGGKQHLPIYKVRISEKNNGGYFPIGQKGNRSQKYVTTAKDTNLFFAVYADQKGKRSFKTIDLRTAIECRKQGVSVAPSINEKGDKLLFTLSPNDLVYMPSEGEEANGFAIDNNLNKEQIYKMVSATNNRCFFIPHTVADFISRGQEYNSVNKIELTEDGRSIKEHCVPLKVNRLGK

SEQ ID NO: 1725 - protein, 1225 aa, unidentified
  REGION 1..1225: note = Description of Unknown: uncultivated organism with predicted taxonomy: Bacteroidales
  REGION 1..1225: note = MG22-71 effector
VGNYIFQTLLKNPETKIKGAHVCTIDRRFYENELNAILLKQAEFHPELTNRNLYEACLMALYANNEAHRYNLATQNTCNLITKDIIFYQRPLKSKKSLIAECPFEKRIFCDTEGNVQMQCIKCIPVSHPHFQEYRLWQFLNNLRIFQREVVEDGKFTMNVDVTDKYINENSLTLLFEWLQDKITIKQKELLAKLRLKESDFRWNYVEDKAYPCGETRHVLASRLKKLKGITNDFLAQPSLNGKTTVECELWHILYSVTNLAELRKALYTFARKHNFSVVDAEAFVKVFIACPPFKKDYGAYSDKAICKLLSVMRVGKYWSAENIDSTTLLRIEHLITGEEDEHINERTRKHITEKGLQQSVNQYQGLQQWLACYVVYGRHAEVAEIVRWESPTELEQYINNFKQYSLRNPIVEQVSLETLRVVRDLWQTVAKEGGRIDEIHLEMGRDLKNSAAERAKISNRNKQNEGTNFRIKLLLQEFSQYEKDIEGIRPYSPSQQELLRIYEEGVCEQTEMPKDIAKIRRELSSSSSEKDVKRSDIQRYRLWLDQKYCSPYTGQPIPLARLFTTDYEIEHVIPRSKYFDDSYNNKVICEAAVNKAKSNRLGMAFIQESGGQIIPLGNGRNVQVLNESAYVEFINKTFKHNARKRSLMLADEITEEFCNRQLTDTRYIARFMMGVLSNIVRQNDNGVLESEAISKNLIVCNGKITDRVKQDWGLNDVWNHIVTPRFERLNQITNSSDFGEWCNKEGKRYFQTRIPLELQKRVNKKRIDHRHHAMDAIAIACTTRSLVNYLNNQSAHTKAREDYRQRLCRTDGHGQTKRLLRAPWKDFAKDAESALQQIVVSFKQNTRILTHATNSYECFDAKAGKKIIKRQISQNHYAIRKPLHKDTVYGEVVLPSIKLISLNKALSNPRRIIDKQLRSKILELQQRDKLTKKQVCDFFKKTCANSTEWRNYDFAKVAVRVWSNDEEGSRMVSVRKAVDESFDMKQIEKVYDPIVRNILTRHLKACNGDSKTAFSPQGVEEMNQHIAELNNENAHLPIYKVKLGESKGEKFAIGQKGSKATKFVVTAKDTNLFFAVYANEEGKRSYQSVDLRTAIELKKQGCPVAPETNEKGDKLLFILSPNSLVYMPTEEEMERGNIDVQNLNLNQIFKMVSSTGNNCFFVPNTLSQVIFPGKEYESMDKVGTVKEWDGYSISESKNNKKFLSIKACCIPICIDRLGRIQLKK

SEQ ID NO: 1726 - protein, 1521 aa, unidentified
  REGION 1..1521: note = Description of Unknown: uncultivated organism with predicted taxonomy: Bacteroidales
  REGION 1..1521: note = MG22-72 effector
MTKNTRNIIGLDLGTNSIGWSWIQQLISPTPTQPSEYLFDGTPIIRMSGSRIIPMPGDVTGSFERGETISKTKDRTAKRMARRMNERFQLRRERLNRVLNIMGFLPEHYARALDRYGKLNEESNTTIAWRSKEDGKNEFIFYPSFLEMASIFKEHHPDIQRIPLDWTLYYLRSKALHQAITKEELSWVLHSFNQKRGYYQSREDITEEDKTKKVDYIKGVVNSVEDTGEKAKGKKIYKVTFADGTEFTSTKSEAPLWIGRTREIIVTTSLDTSGKPKLDKEGKIIQSAKTPDEKDWTLIKIRTEATIDDSKLTVGEYIFHALLKNPETKIKGAHVSTIDRRFYINEINAILKEQEKYHEELRDKTIYEQCIKALYAQNEVRRNIIAPWSMKDLLTKDILFYHRPLKSKKSQISECPLEFHCYTDKAGETHRQGIKCIPVSHPLFQEYRIWQFISNLRIYEREHFDNGKHFSNVDKTSEFLTSEKKEELYEWLAEKDSVSQKTLLGKIGLKVERYHWNFPEEKTYPCGETRHLIQSRLKKANLQKAFHSLISDEQKDCFERGLWHILYSVSDYNELCKALKTFARKTGFTLEEQLLFVEAFSSCPPFKKDYGAYSKRAITKLLPLMRIGKFWHEESIDSTTKNRIEHLISGEECSGIDVRVREKVAKAGLCESIEQYQGLPQWLANYVVYNRHSEASEIIKWESPDELDNYIRSFKQYSLRNPIVEQVSLETLRVVRDLWAELRKEGQTIDEIHLEMGRDLKNTAEERSRIFRRNSENEDTNFRIKLLLEKFNANEKDIKDVRPYSPSQQELLRIYEEGVWQQEKDIPQDIKDIKKRISNDKDIKDITPNDIQRYRIWMDQKYCSPYTGKTIPLSRLFTTDYEIEHVIPRSRYFDDSYNNKVICEAAVNKDKNNRLGMEYIMAAGGKTIELGNGKNVQILKEEEYVELVDKIFGNNTRKRNIMLADEITEEFSHRQLNDTRYIARFMKGILSNIVREKNADGTLEPEETSKNLIVCSGRITDRVKQDWGLNDIWNHIVTPRFERLNTKTSSNDFGEYVCKDGKRYFQTRVPLNLQKGFNKKRIDHRHHAMDAIAIACVNRSIVNYLNNAAANQTEREDLRRAVCIPERNGQTKRQLRSPWHCFARDAENALRQIVVSFKQNLRVATKATNSYECFDTASGKKIRKHQSNREHYAIRKPLHKDSVYGEVILTSIASVNLKKALLKAERILDKRLKEKIFELRKLYNYSNKQIEEHLTKVCINCPEWKNYDFKKIAVRILSNDADATHIVAIRKPLDETFDKEKIKTITDTGIQKILLNHLSRYADDPKKAFSPEGIEDMNANIASLNGGKQHLPIYKVRVSEKDNGGYFPIGQKGNRSKKYVTTAKDTNLFFAVYADSKGKRSYKTIDLRTAIECRKQGLSVAPSTNEKGDKLLFTLSPNDLVYMPSEGEEANGFSIDNYLNKEQIYKMVSATYKQCFFIPHTVADFIYKNKEFNVLNKIELTEDRRSIKEHCVPLKVNRLGK

SEQ ID NO: 1727 - protein, 1345 aa, unidentified
  REGION 1..1345: note = Description of Unknown: uncultivated organism with predicted taxonomy: Prevotella sp. MGM2
  REGION 1..1345: note = MG22-73 effector
MTKNTRNIIGLDLGTNSIGWSWIQQLISPTPTQPSEYLFDGTPIIRMSGSRIIPMPGDVTGSFERGETISKTKDRTAKRMARRMNERFQLRRERLNRVLNIMGFLPEHYARALDRYGKLNEESNTTIAWRSKEDGKNEFIFYPSFLEMASIFKEHHPDIQRIPLDWTLYYLRSKALHQAITKEELSWVLHSFNQKRGYYQSREDITEEDKTKKVEYIKGVVNSVEDTGEKAKGKKIYKVTFADGTEFTSTKSEAPLWIGRTREIIVTTSLDTSGKPKLDKEGKIIQSAKTPDEKDWTLIKIRTEATIDDSKLTVGEYIFHALLKNPETKIKGAHVSTIDRRFYINEINAILKEQEKYHEELRDKSLYEQCIKALYAQNEVRRNIIAPWSMKDLLTKDILFYHRPLKSKKSQISECPLEFHCYTDKDGETHRQGIKCIPVSHPLFQEYRIWQFISNLRIYEREHFDNGKHFTNVDKTSEFLTSEKKEELYEWLAERDSVSQKTLLGKIGLKVEDYHWNFPEEKTYPCGETRHLIQSRLKKANLQKAFHSLISDEQKECFERGLWHILYSVSDYNELCKALKTFARKTGFTLEEQLLFVEAFSSCPPFKKDYGAYCKRAITKLLPLMRIGKFWHEESIDTTTKTRIEHLISGEECSGIDVRVREKVAKAGLCESIEQYQGLQQWLANYVVYNRHSEASEIIKWESPDELDNYIRSFKQYSLRNPIVEQVSLETLRVVRDLWAELQKEGQTIDEIHLEMGRDLKNTAEERSKIFRRNSENEDTNFRIKLLLEEFYANEKDIKDVRPYSPSQQELLRIYEEGVWQQEKDIPQDIKDIKKRISNDKDIKDITPNDIQRYRIWMDQKYCSPYTGKTIPLSRLFTTDYEIEHVIPRSRYFDDSYNNKVICEAAVNKDKNNRLGMEYIIAAGGKTIELGNGKNVQILKEEEYVELVDKIFGNNTRKRNIMLADEITEEFSHRQLNDTRYIARFMKGILSNIVREKNADGTLEPEETSKNLIVCSGRITDRVKQDWGLNDIWSHIVTPRFERLNTKTSSNDFGEYVCKDGKRYFQTRVPLNLQKGFNKKRIDHRHHAMDAIAIACVNRSIVNYLNNAAANQTEREDLRRAVCIPERNGQTKRQLRSPWHCFAREAENALRQIVVSFKQNLRVATKATNSYECFDTASGKKIRKHQSNREHYAIRKPLHKDSVYGEVILTSIASVNLKKALLKAERILDKRLKEKIFELRKLYNYSNKQIEEHLTKVCINCPEWKNYDFKKIAVRILSNDADATHIVAIRKPLDESFDEVKINTITDTGIQKILKNHLSRYADDPKKAFSPEGIEDMNANIASLN

SEQ ID NO: 1728 - protein, 1283 aa, unidentified; identical to SEQ ID NO: 1672
  REGION 1..1283: note = Description of Unknown: uncultivated organism with predicted taxonomy: Bacteroidales
  REGION 1..1283: note = MG22-74 effector

SEQ ID NO: 1729 - protein, 1524 aa, unidentified
  REGION 1..1524: note = Description of Unknown: uncultivated organism with predicted taxonomy: Bacteroidales
  REGION 1..1524: note = MG22-75 effector
MTKNTRNIIGLDLGTNSIGWSWIQQLISPTPTQPSEYLFDETPIIRMSGSRIIPMPGDVTGSFERGETISKTKDRTAKRMARRMNERFQLRRERLNRVLNIMGFLPEHYARALDRYGKLNEESNTTIAWRSKEDGKNEFIFYPSFLEMASIFKERHPDIQRIPLDWTLYYLRSKALHQAITKEELSWVLHSFNQKRGYYQPRKDITEKEKTKKIEYIKDIVRSVEDTGEKTKGKKAYKVTFDNGFKFISTEAEAPLWVGHTREVIVTTSLDATGAPKRDKEGDIIQSVKAPEEKDWTLKKIRTENHIDKSKLTVGEYILQTLLEKPDTKIKGAHVSTIDRRFYIHEINAILKVQEKYHKELRDKSLYEQCTQALYTQNEVRRNIIAPWSMSDLLIKDILFYHRPLKSKKSQISECPFEFHNYTDKNGASHRQGIKCIPTSHPLFQEYRIWQFIANLRIYERERFDNGKHFINEDKTSDFLTTKKKEELFEWLTEKDSVSQKTLLGHIGLKVEHYHWNFPEEKTYSCGETRHLIQSRLKKANLLKSFCSLVPENQKKEFELKLWHILYSVSDYNELRKALETFARKTGFTREEQDLFVEFFSSCPPFKKIYGAYSKRAIARLLPLMRLGKYWHEEHIDSATMNRIEHLISGEECNGIDVRVRENIAKFGLNQSIEQYQGLPQWLACYVVYNRHSEASEVTKWESPEELDNYIKAFKQYSLRNPIVEQISLETLRVVHDLWAEIQKEGQTIDEIHLEMGRDLKNTAEERARISKRNSENEDTNFRIKLLLKEFYTNEEDMEGIRPYSPSQQELLRIYEEGVWQQEKEIPQDIKDIKKKLSSDKDINEITHSDVQRYRIWMDQEYCSPYTGNPIPLSRLFTPDYEIEHVIPRSRYFDDSYNNKVICEAAVNKDKNNRLGMEYIMEAGGKTIELGNGKNVQVLKEREYVELVNEVFKNNTRKRNILLADEIPEDFSHRQLNDTRYIARFMKGILSNIVREKNADGTLELEETSKNLIVCSGRITDRIKQDWGLNDVWNHIITPRFERLNQKTSSDNFGEYVCKEGKRYFQTRVPLNLQKGFNKKRIDHRHHAIDAIAIACVNRSIVNYLNNAAANQTEREDLRRAVCIPERNGQTKRQLRSPWRNFAKDAENALRQIVVSFKQNLRILTKATNSYECFDTTSGKKIRRHQVNEEHYAVRKPLHEDFVYGEVILSSIASVNFKKALQKANRILDKRLKDKIFELRKLYSYSNKQIEEHLTKVCINTPEWKDYDFKKINIRILSNDEGATHIVAIRKPLDESFDKVKINTITDTGIQKILLNHLSRYAEDPKKAFSLEGIEDMNANITSLNGGKQHLPIYKVRVSEKDNGGYYPIGQKGNRSKKYVTTAKDTNLFFAVYADSNGKRSFKTIDLRTAIECKKQGLSVAPSVNEKGEQLLFTLSPNDLVYMPSEEEEANGFAIDNNLNKEHIYKMVSTDSNRCFFIPHTVADFISRGEEYNRHNKIELTEDRRSIKEHCVPLKVNRLGKKTL

SEQ ID NO: 1730 - protein, 1132 aa, unidentified
  REGION 1..1132: note = Description of Unknown: uncultivated organism with predicted taxonomy: Bacteroidales
  REGION 1..1132: note = MG22-76 effector
MSDLLIKDILFYHRPLKSKKSQISECSLEFHTYTDKDGATHRQGIKCIPTSHPLFQEYRIWQFIANLRIYERERFDNGKHFINEDKTSDFLTTKKKEELYEWLAEKDSVSQKTLLGRLGLKVERYHWNFPEEKTYPCGETRHLIQSRLKKANLQKAFHSLISDEQKECFERGLWHILYSISDYNELCKALKTFARKTGFTLEEQSLFVEAFSSCPPFKKDYGAYSKRAITKLLPLMRIGKFWHEESIDSTTKNRIEHLISGEECSGIDVRVREKVAKAGLCESIEQYQGLPQWLANYVVYNRHSEASEITKWESPDELDNYIRSFKQYSLRNPIVEQVSLETLRVVRDLWTELQKEGQTIDEIHLEMGRDLKNTAEERSRIFRRNSENEDTNFRIKLLLEEFYANEKDIKDVRPYSPSQQELLRIYEEGVWQQEKDIPQDIKDIKKRISNDKDIKDITPNDIQRYRIWMDQKYCSPYTGKTIPLSRLFTTDYEIEHVIPRSRYFDDSYNNKVICEAAVNKDKNNRLGMEYIMAAGGKTIELGNGKNVQILKEEEYVELVDKIFGSNTRKRNIMLADEITEDFSHRQLNDTRYIARFMKGILSNIVREKNAEGTLEPEETSKNLIVCSGRITDRVKQDWGLNDIWNHIITPRFERLNKKTSSNDFGEYVCKEGKRYFQTRVPLNLQKGFNKKRIDHRHHAMDAIAIACINRSIVNYLNNAAANQTEREDLRRAVCIPERNGQTKRQLRSPWHCFARDAENALRQIVVSFKQNLRVATKATNSYECFDTASGKKIRKHQSNHEHYAIRKPLHKDSVYGEIILPSIASVNLKKALLKAERILDKRLKEKIFELRKLYNYSNKQIEEHLTKVCINCPEWKNYDFKKIAVRILSNDADATHIVAIRKPLDETFDKEKIKTITDTGIQKILLNHLSRYADDPKKAFSPEGIEDMNANIASLNGGKQHLPIYKVRVSEKDNGGYFPIGQKGNRSKKYVTTAKDTNLFFAVYADSKGKRSYKTIDLRTAIECRKQGLSVAPSTNEKGDKLLFTLSPNDLVYMPSEGEEANGFSIDNYLNKEQIYKMVSATYKQCFFIPHTVADFIYKNKEFNVLNKIELTEDRRSIKEHCVPLKVNRLGK

SEQ ID NO: 1731 - protein, 1521 aa, unidentified; identical to SEQ ID NO: 1692
  REGION 1..1521: note = Description of Unknown: uncultivated organism with predicted taxonomy: Prevotella
  REGION 1..1521: note = MG22-77 effector

SEQ ID NO: 1732 - protein, 1420 aa, unidentified; identical to SEQ ID NO: 1676
  REGION 1..1420: note = Description of Unknown: uncultivated organism with predicted taxonomy: Bacteroidales
  REGION 1..1420: note = MG22-78 effector

SEQ ID NO: 1733 - protein, 1521 aa, unidentified
  REGION 1..1521: note = Description of Unknown: uncultivated organism with predicted taxonomy: Bacteroidales
  REGION 1..1521: note = MG22-79 effector
MTKNTRNIIGLDLGTNSIGWSWIQQLISPTPTQPSEYLFNGTPIIRMSGSRIIPMPGDVTGSFERGETISKTKDRTAKRMARRMNERFQLRRERLNRVLNIMGFLPEHYARALDRYGKLNEESNTTIAWRSKEDGKNEFIFYPSFLEMASIFKEHHPDIQRIPLDWTLYYLRSKALHQAITKEELSWVLHSFNQKRGYYQSREDITEEDKTKKVEYIKGVVNSVEDTGEKAKGKKIYKVTFADGTEFTSTKSEAPLWIGRTREIIVTTSLDTSGKPKLDKEGKIIQSAKTPDEKDWTLIKIRTEATIDDSKLTVGEYIFHALLKNPETKIKGAHVSTIDRRFYINEINAILKEQEKYHEELRDKSLYEQCIKALYAQNEVRRNIIAPWSMSDMLIKDILFYHRPLKSKKSQISECSLEFHTYTDKDGATHRQGIKCIPTSHPLFQEYRIWQFIANLRIYERERFDNGKHFINEDKTSDFLTTKKKEELYEWLAEKDSVSQKTLLGHLGLKVERYHWNFPEEKTYPCGETKHLIQSRLKKANLQKAFHSLISDEQKDCFERGLWHILYSVSDYNELCKALKTFARKTEFTLEEQLLFVEAFSSCPPFKKDYGAYSKRAITKLLPLMRIGKFWHEESIDSTTKNRIEHLISGEECSGIDVRVREKVAKAGLCESIEQYQGLQQWLANYVVYNRHSEASEITKWESPDELDNYIRSFKQYSLRNPIVEQVSLETLRVVRDLWAELQKEGQTIDEIHLEMGRDLKNTAEERSRIFRRNSENEDTNFRIKLLLEEFYANEKDIKDVRPYSPSQQELLRIYEEGVWQQEKDIPQDIKDIRKRISNDKDIKDITPNDIQRYRIWMDQKYCSPYTGKTIPLSRLFTTDYEIEHVIPRSRYFDDSYNNKVICEAAVNKDKNNRLGMEYIIAAGGKTIELGNGKNVQILKEEEYVELVDKIFGNNTRKRNIMLADEITEEFSHRQLNDTRYIARFMKGILSNIVREKNTDGTLEPEETSKNLIVCSGRITDRVKQDWGLNDIWNHIITPRFERLNTKTSSNDFGEYVCKEGKRYFQTRVPLNLQKGFNKKRIDHRHHAMDAIAIACVNRSIVNYLNNAAANQTEREDLRRAVCIPERNGQTKRQLRSPWHCFARDTENALRQIVVSFKQNLRITTKATNSYECFDTASGKKIRKHQSNREHYAIRKPLHKDSVYGEVILTSIASVNLKKALLKAERILDKRLKEKIFELRKLYNYSNKQIEEHLTKVCINCPEWKNYDFKKIAVRILSNDADATHIVAIRKPLDESFDEVKINTITDTGIQKILLNHLSRYADDPKKAFSPEGIEDMNANIASLNGGKQHLPIYKVRVSEKDNGGYFPIGQKGNRPKKYVTTAQDTNLFFAVYVDSKGKRSYKTIDLRTAIECKKQGLSVAPSVNEKGDKLLFTLSPNDLVYMPSEEEEANGFSIKGNLIKEHIYKMVSANNRQCFFIPHSVADFISKGEEYNAHNKIELAEDGRSIKVHCVPLKVNRLGK

SEQ ID NO: 1734 - protein, 1558 aa, unidentified
  REGION 1..1558: note = Description of Unknown: uncultivated organism with predicted taxonomy: Bacteroidales
  REGION 1..1558: note = MG22-80 effector
LYSSHHVAANSTYPFKTGYNRAPLNPFTTHKTQPYNIMTKNTMNIIGLDLGTNSIGWSWIQQLISPTPTQPSEYLFNGTPIIRMSGSRIIPMPGDVTGSFERGETISKTKDRTAKRMARRMNERFQLRRERLNRVLNIMGFLPEHYARALDRYGKLNEESNTTIAWRSKEDGKNEFIFYPSFLEMASIFKERHPDIQRIPLDWTLYYLRSKALHQAITKEELSWVLHSFNQKRGYYQSREDITEEDKTKKVEYIKGVVNSVEDTGEKAKGKKIYKVTFADGTEFTSTKSEAPLWIGRTREIIVTTSLDTSGKPKLDKEGKIIQSAKTPDEKDWTLIKIRTEATIDDSKLTVGEYIFHALLKKPETKIKGAYVSTIDRRFYINEINAILKEQEKYHKELRDKSLYEQCIKALYAQNEVRRNIIAPWSMSDLLIKDILFYHRPLKSKKSQISECPLEFHTYTDKDGATHRQGIKCIPTSHPLFQEYRIWQFIANLRIYERERFDNGKHLINEDKTSDFLTTKKKEELYEWLAEKDSVSQKTLLGRLGLKVERYHWNFPEEKTYPCGETRHLIQSRLKKANLQKAFHSLISDEQKDCFERGLWHILYSVSDYNELCKALKTFARKTGFTLEEQSLFVEAFSSCPPFKKDYGAYSKRAITKLLPLMRIGKFWHEESIDSTTKTRIEHLISGEECSGIDVRVREKVAKAGLCESIEQYQGLPQWLANYVVYNRHSEASEITKWESPDELDNYIRSFKQYSLRNPIVEQVSLETLRVVRDLWTELQKEGQTIDEIHLEMGRDLKNTAEERSRIFRRNSENEDTNFRIKLLLEEFYANEKDIKDVRPYSPSQQELLRIYEEGVWQQEKDIPQDIKDIKKRISNDKDIKDITPNDIQRYRIWMDQKYCSPYTGKTIPLSRLFTTDYEIEHVIPRSRYFDDSYNNKVICEAAVNKDKNNRLGMEYIMAAGGKTIELGNGKNVQILKEEEYVELVDKIFGNNTRKRNIMLADEITEEFSHRQLNDTRYIARFMKGILSNIVREKNADGTLEPEETSKNLIVCSGRITDSVKQDWGLNDIWNHIITPRFERLNTKTSSNDFGEYVCKDGKRYFQTRVPLNLQKGFNKKRIDHRHHAMDAIAIACVNRSIVNYLNNAAANPTEREDLRRAVCIPERNGQTKRQLRSPWHCFARDAENALRQIVVSFKQNLRVATKATNSYECFDTASGKKIRKHQSNREHYAIRKPLHKDSVYGEVILTSIASVNLKKALLKAERILDKRLKEKIFELRKLYNYSNKQIEEHLTKVCINCPEWKNYDFKKIAVRILSNDADATHIVAIRKPLDESFDKIKINTITDTGIQKILKNHLSRYADDPKKAFSPEGIEDMNANIASLNGGKQHLPIYKVRVSEKDNGGYFPIGQKGNRPKKYVTTAKDTNLFFAVYADSKGKRSYKTIDLRTAIECRKQGLSVAPSINEKGDKLLFTLSPNDLVYMPSEGEEANGFAIDNNLNKEQIYKMVSANDNRCFFIPHTVADFISNGEEYNRHNKIELTEDRRSIKEHCVPLKVNRLGK

SEQ ID NO: 1735 - protein, 1533 aa, unidentified
  REGION 1..1533: note = Description of Unknown: uncultivated organism with predicted taxonomy: Bacteroidales
  REGION 1..1533: note = MG22-81 effector
MKKKNILGLDLGTNSIGWAWLQQDDTEQTIQTEYLLQNNPTIRMSGSRIIPTSGDVINDFEAGKAVSKTKDRTTFRMTRRMNERFKLRRERLNRVLRILGMLPAHYAQHVDRYGKPDEEKQPKIAWEVAPDGKSNFLFHQSFLEMVKLFGVHQPQLQRIPLDWTLYYLRHKALTQPISKAELAWILHSFNQKRGYNQTRDELTEVNEKEKLEYTNSKVVSVELIEQKKSPLYLVTFENGVAVETSKVDAPQWVGQMRYAIITTKLNDLGQPLHKKDGSIDQKVSLPNDDDWALNKLRTETQIDQSHTTVGNYIFQTLLKNPETKIKGAHVCTIDRRFYENELNAILLKQAEFHPELTNRNLYEACLMALYANNEAHRYNLATQNTCNLITKDIIFYQRPLKSKKSLIAECPFEKRIFCDTEGNVQMQGIKCIPVSHPHFQEYRLWQFLNNLRIFQREVVEDGKFTMNVDVTDKYINENSLTLLFEWLQDKITIKQKELLAKLRLKESDFRWNYVEDKAYPCGETRHVLASRLKKLKGITNDFLAQPSLNGKTTVECELWHILYSVTNLAELRKALYTFARKHNFSVVDAEAFVKVFIACPPFKKDYGAYSDKAICKLLSVMRVGKYWSAENIDSTTLLRIEHLITGEEDEHINERTRKHITEKGLQQSVNQYQGLQQWLACYVVYGRHAEVAEIVRWESPTELEQYINNFKQYSLRNPIVEQVSLETLRVVRDLWQTVAKEGGRIDEIHLEMGRDLKNSAAERAKISNRNKQNEGTNFRIKLLLQEFSQYEKDIEGIRPYSPSQQELLRIYEEGVCEQTEMPKDIAKIRRELSSSSSEKDVKRSDIQRYRLWLDQKYCSPYTGQPIPLARLFTTDYEIEHVIPRSKYFDDSYNNKVICEAAVNKAKSNRLGMAFIQESGGQIIPLGNGRNVQVLNESAYVEFINKTFKHNARKRSLMLADEITEEFCNRQLTDTRYIARFMMGVLSNIVRQNDNGVLESEAISKNLIVCNGKITDRVKQDWGLNDVWNHIVTPRFERLNQITNSSDFGEWCNKEGKRYFQTRIPLELQKRVNKKRIDHRHHAMDAIAIACTTRSLVNYLNNQSAHTKAREDYRQRLCRTDGHGQTKRLLRAPWKDFAKDAESALQQIVVSFKQNTRILTHATNSYECFDAKAGKKIIKRQISQNHYAIRKPLHKDTVYGEVVLPSIKLISLNKALSNPRRIIDKQLRSKILELQQRDKLTKKQVCDFFKKTCANSTEWRNYDFAKVAVRVWSNDEEGSRMVSVRKAVDESFDMKQIEKVYDPIVRNILTRHLKACNGDSKTAFSPQGVEEMNQHIAELNNENAHLPIYKVKLGESKGEKFAIGQKGSKATKFVVTAKDTNLFFAVYANEEGKRSYQSVDLRTAIELKKQGCPVAPETNEKGDKLLFILSPNSLVYMPTEEEMERGNIDVQNLNLNQIFKMVSSTGNNCFFVPNTLSQVIFPGKEYESMDKVGTVKEWDGYSISESKNNKKFLSIKACCIPICIDRLGRIQLKK

SEQ ID NO: 1736 - protein, 1521 aa, unidentified; identical to SEQ ID NO: 1719
  REGION 1..1521: note = Description of Unknown: uncultivated organism with predicted taxonomy: Prevotella
  REGION 1..1521: note = MG22-82 effector

SEQ ID NO: 1737 - protein, 1521 aa, unidentified
  REGION 1..1521: note = Description of Unknown: uncultivated organism with predicted taxonomy: Prevotella
  REGION 1..1521: note = MG22-83 effector
MTKNTRNIIGLDLGTNSIGWSWIQQLISPTPTQPSEYLFDGTPIIRMSGSRIIPMPGDVTGSFERGETISKTKDRTAKRMARRMNERFQLRRERLNRVLNIMGFLPEHYARALDRYGKLNEESNTTIAWRSKEDGKNEFIFYPSFLEMASIFKERHPDIQRIPLDWTLYYLRSKALHQAITKEELSWVLHSFNQKRGYYQSREDITEEDKTKKVEYIKGVVNSVEDTGEKAKGKKIYKVTFADGTEFTSTKSEAPLWIGRTREIIVTTSLDTSGKPKLDKEGKIIQSAKTPDEKDWTLIKIRTEATIDDSKLTVGEYIFHALLKNPETKIKGAHVSTIDRRFYINEINAILKEQEKYHEELRDKSLYEQCTQALYAQNEVRRNIIAPWSMSDLLIKDILFYHRPLKSKKSQISECSLEFHTYTDKNGATHRQGIKCIPTSHPLFQEYRIWQFIANLRIYERERFDNGKHLINEDKTSDFLTTKKKEELFEWLAEKDSVSQKTLLGRLGLKVERYHWNFPEEKTYPCGETRHLIQSRLKKANLQKAFHSLISDEQKDCFERGLWHILYSVSDYNELCKALKTFARKTGFTLEEQLLFVEAFSSCPPFKKDYGAYSKRAITKLLPLMRIGKFWHEESIDSTTKNRIEHLISGEECSGIDVRVREKVAKAGLCESIEQYQGLPQWLANYVVYNRHSEASEIIKWESPDELDNYIRAFKQYSLRNPIVEQVSLETLRVVRDLWAELQKEGQTIDEIHLEMGRDLKNTAEERSRIFRRNSENEDTNFRIKLLLEEFNANEKDIKDVRPYSPSQQELLRIYEEGVWQQEKDIPQDIKDIKKRISNDKDIKDITPNDIQRYRIWMDQKYCSPYTGKTIPLSRLFTTDYEIEHVIPRSRYFDDSYNNKVICEAAVNKDKNNRLGMEYIMAAGGKTIELGNGKNVQILKEEEYVELVDKIFGNNTRKRNIMLADEITEEFSHRQLNDTRYIARFMKGILSNIVREKNADGTLEPEETSKNLIVCSGRITDRVKQDWGLNDIWSHIVTPRFERLNTKTSSNDFGEYVCKDGKRYFQTRVPLNLQKGFNKKRIDHRHHAMDAIAIACVNRSIVNYLNNAAANQTEREDLRRAVCIPERNGQTKRQLRSPWHCFARDAENALRQIVVSFKQNLRVATKATNSYECFDTASGKKIRKHQSNREHYAIRKPLHKDSVYGEVILPSIASVNLKKALMKADRILDKRLKEKIFELRKLYNYSNKQIEEHLTKVCINCPEWKNYDFKKIAVRILSNDADATHIVAIRKPLDETFDEDKIKTITDTGIQKILLNHLSRYADDPKKAFSPEGIEDMNANIASLNSGKQHLPIYKVRVSEKDNGGYFPIGQKGNRPKKYVTTAKDTNLFFAVYADSKGKRSYKTIDLRTAIECRKQGLSVAPSVNQKGDKLLFTLSPNDLVYMPSEEEEVNGFAIDNNLNKDQIYKMVSANNKQCFFIPHTVADFISRGEEYNSHNKIELTEDRRSIKEHCVPLKVNRLGK

SEQ ID NO: 1738 - protein, 1558 aa, unidentified
  REGION 1..1558: note = Description of Unknown: uncultivated organism with predicted taxonomy: Bacteroidales
  REGION 1..1558: note = MG22-84 effector
LYSSHHVATNSTYPFKTGHNRTPLNRFTTHKTQPYNIMTKNTRNIIGLDLGTNSIGWSWIQQLISPTSTQPSEYLFDGTPIIRMSGSRIIPMPGDVTGSFERGETISKTKDRTAKRMARRMNERFQLRRERLNRVLNIMGFLPEHYARALDRYGKLNEESNTTIAWRSKEDGKNEFIFYPSFLEMASIFKEHHPDIQRIPLDWTLYYLRSKALHQAITKEELSWVLHSFNQKRGYYQSREDITEEDKTKKVEYIKGVVNSVEDTGEKAKGKKIYKVTFADGTEFTSTKSEAPLWIGRTREIIVTTSLDTSGKPKLDKEGKIIQSAKTPDEKDWTLIKIRTEATIDDSKLTVGEYIFHALLKNPETKIKGAHVSTIDRRFYINEINAILKEQEKYHEELRDKSLYEQCTQALYAQNEVRRNIIAPWSMSDLLIKDILFYHRPLKSKKSQISECSLEFHTYTDKDGATHRQGIKCIPTSHPLFQEYRIWQFIANLRIYERERFDNGKHFINEDKTSDFLTTKKKEKLYEWLAEKDSVSQKTLLGHLGLKVERYHWNFPEEKTYPCGETRHLIQSRMKKANLQKAFHSLISDEQKDCFERGLWHILYSVSDYNELCKALKTFARKTGFTLEEQLLFVEAFSSCPPFKKDYGAYSKRAITKLLPLMRIGKFWHEESIDSTTKNRIEHLISGEECSGIDVRVREKVAKAGLCESIEQYQGLPQWLANYVVYNRHSEASEITKWESPDELDNYIRSFKQYSLRNPIVEQVSLETLRVVRDLWAELQKEGQTIDEIHLEMGRDLKNTAEERSRIFRRNSENEDTNFRIKLLLEEFYANEKDIKDVRPYSPSQQELLRIYEEGVWQQEKDIPQDIKDIKKRISNDKDIKDITPNDIQRYRIWMDQKYCSPYTGKTIPLSRLFTTDYEIEHVIPRSRYFDDSYNNKVICEAAVNKDKNNRLGMEYIMAAGGKTIELGNGKNVQILKEEEYVELVDKIFGNNTRKRNIMLADEITEDFSHRQLNDTRYIARFMKGILSNIVREKNADGTLEQEETSKNLIVCSGRITDRVKQDWGLNDIWNHIITPRFERLNTKTSSDKFGEYVCKEGKRYFQTRVPLSLQKGFNKKRIDHRHHAMDAIAIACVNRSIVNYLNNAAANQTEREDLRRAVCIPERNGQTKRQLRSPWHCFARDTENALRQIVVSFKQNLRVATKATNSYECFDTASGKKIRKHQSNHEHYAIRKPLHKDSVYGEVILPSIASVNLKKALLKAERILDKRLKEKIFELRKLYNYSNKQIEEHLTKVCINCPEWKNYDFKKIAVRILSNDADATHIVAIRKPLDESFDKVKINTITDTGIQKILLNHLSRYADDPKKAFSPEGIEDMNANIASLNGGKQHLPIYKVRVSEKNNGGYFPIGQKGNRHKKYVTTAQDTNLFFAIYADSKGKRSYKTIDLRTAIECRKQGLSVAPSINEKGDKLLFTLSPNDLVYMPSEGEETNGFAIDNNLNKEQIYKMVSATNNRCFFIPHTVADFISRGQEYNSVNKIELTEDGRSIKEHCVPLKVNRLGK

SEQ ID NO: 1739 - protein, 1521 aa, unidentified
  REGION 1..1521: note = Description of Unknown: uncultivated organism with predicted taxonomy: Prevotella
  REGION 1..1521: note = MG22-85 effector
MTKNTRNIIGLDLGTNSIGWSWIQQLISPTPTQPSEYFFDGTPIIRMSGSRIIPMPGDVTGSFERGETISKTKDRTAKRMARRMNERFQLRRERLNRVLNIMGFLPEHYARALDRYGKLNEESNTTIAWRSKEDGKNEFIFYPSFLEMASIFKEHHPDIQRIPLDWTLYYLRSKALHQAITKEELSWVLHSFNQKRGYYQSREDITEEDKTKKVEYIKGVVNSVEDTGEKAKGKKIYKVTFADGTEFTSTKSEAPLWIGRTREIIVTTSLDTSGKPKLDKEGKIIQSAKTPDEKDWTLIKIRTEATIDDSKLTVGEYIFHALLKNPETKIKGAHVSTIDRRFYINEINAILKEQEKYHKELRDKSLYEQCIKALYAQNEVRRNIIAPWSMSDLLIKDILFYHRPLKSKKSQISECPLEFHTYTDKDGATHRQGIKCIPTSHPLFQEYRIWQFIANLRIYERERFDNGKHIINEDKTSDFLTTKKKEELFEWLAEKDSVSQKTLLGHLGLKVERYHWNFPEEKTYPCGETRHLIQSRLKKANLQKAFHSLISDEQKDCFERSLWHILYSVSDYNELCKALKTFARKTGFTLEEQSLFVEAFSSCPPFKKDYGAYSKRAITKLLPLMRIGKFWHEESIDSTTKNRIEHLISGDECSGIDVRVREKVAKAGLCESIEQYQGLPQWLANYVVYNRHSEASEITKWESPDELDNYIRSFKQYSLRNPIVEQVSLETLRVVRDLWAELQKEGQTIDEIHLEMGRDLKNTAEERSRIFRRNSENEDTNFRIKLLLEEFYANEKDIKDVRPYSPSQQELLRIYEEGVWQQEKDIPQDIKDIKKRISNDKDIKDITPNDIQRYRIWMDQKYCSPYTGKTIPLSRLFTTDYEIEHVIPRSRYFDDSYNNKVICEAAVNKDKNNRLGMEYIMAAGGKTIELGNGKNVQILKEEEYVELVDKIFGNNTRKRNIMLADEITEEFSHRQLNDTRYIARFMKGILSNIVREKNADGTLEPEETSKNLIVCSGRITDRVKQDWGLNDIWNHIITQRFERLNKKTSSNDFGEYVCKDGKRYFQTRVPLNLQKGFNKKRIDHRHHAMDAIAIACVNRSIVNYLNNAAANQTEREDLRRAVCIPERNGQTKRQLRSPWHCFARDAENALRQIVVSFKQNLRIATKATNSYECFDTASGKKIRKHQSNREHYAIRKPLHKDSVYGEVILPSIASVNLKKALLKAERILDKRLKDKIFELRKLYNYSNKQIEEHLTKVCINCPEWKNYDFKKIAVRILSNDADATHIVAIRKPLDETFDKEKIKTITDTGIQKILLNHLSRYADDPKKAFSPEGIEDMNANIASLNGGKQHLPIYKVRVSEKDNGGYFPIGQKGNRSKKYVTTAKETNLFFAVYADSNGKRSFKTIDLRTAIECKKQGLSVAPSVNEKGDKLLFTLSPNDLVYMPSEEEEANGFSIDNNLNKEQIYKMVSATYKQCFFIPHTVADFIYKNKEFNVLNKIELTEDRRSIKEHCVPLKVNRLGK

SEQ ID NO: 1740 - protein, 985 aa, unidentified
  REGION 1..985: note = Description of Unknown: uncultivated organism with predicted taxonomy: Bacteroidales
  REGION 1..985: note = MG22-86 effector
MKKANLQKAFHSLISDEQKDCFERGLWHILYSVSDYNELCKALKTFARKTGFTLEEQLLFVEAFSSCPPFKKDYGAYSKRAITKLLPLMRIGKFWHEESIDSTTKNRIEHLISGEECSGIDVRVREKVAKAGLCESIEQYQGLPQWLANYVVYNRHSEASEITKWESPDELDNYIRSFKQYSLRNPIVEQVSLETLRVVRDLWAELQKEGQTIDEIHLEMGRDLKNTAEERSRIFRRNSENEETNFRIKLLLEEFYANEKDIKDVRPYSPSQQELLRIYEEGVWQQEKDIPQDIKDIKKRISNDKDIKDITPNDIQRYRIWMDQKYCSPYTGKTIPLSRLFTTDYEIEHVIPRSRYFDDSYNNKVICEAAINKDKNNRLGMEYIMAAGGKTIELGNGKDVQILKEEEYVELVDKIFGNNTRKRNIMLADEITEEFSHRQLNDTRYIARFMKGILSNIVREKNADGTLEPEETSKNLIVCSGRITDRVKQDWGLNDIWNHIITPRFERLNKKTSSNDFGEYVCKDGKRYFQTRVPLNLQKGFNKKRIDHRHHAMDAIAIACVNRSIVNYLNNAAANQTEREDLRRAVCIPERNGQTKRQLRSPWHCFARDAENALRQIVVSFKQNLRVATKATNSYECFDTASGKKIRKHQSNREHYAIRKPLHKDSVYGEVILTSIASVNLKKALLKADRILDKRLKEKIFELRKLYNYSNKQIEEHLTKVCINCPEWKNYDFKKIAVRILSNDADATHIVAIRKPLDESFDEVKINTITDTGIQKILKNHLSRYADDPKKAFSPEGIEDMNANIASLNGGKQHLPIYKVRVSEKDNGGYFPIGQKGNRSKKYVTTAKDTNLFFAVYANSNGKRCFKTIDLRTAIECRKQGLSVAPSINEKGDKLLFTLSPNDLVYMPSEGEEANGFAIDNNLNKEQIYKMVSATNNRCFFIPHTVADFISRGQEYNSVNKIELTEDGRSIKEHCVPLKVNRLGK

SEQ ID NO: 1741 - protein, 935 aa, unidentified
  REGION 1..935: note = Description of Unknown: uncultivated organism with predicted taxonomy: Prevotella sp. MGM2
  REGION 1..935: note = MG22-87 effector
YQSREDITEEDKTKKVEYIKGVVNSVEDTGEKAKGKKIYKVTFADGTEFTSTKSEAPLWIGRTREIIVTTSLDTSGKPKLDKEGKIIQSAKTPDEKDWTLIKIRTEATIDDSKLTVGEYIFHALLKNPETKIKGAHVSTIDRRFYINEINAILKEQEKYHKELREKSLYEQCIKALYAQNEVRRNIIAPWSMSDLLIKDILFYHRPLKSKKSQISECPLEFHCYTDKAGETHRQGIKCIPVSHPLFQEYRIWQFISNLRIYEREHFDNGKHFSNVDKTSEFLTSEKKEELYEWLAEKDSVSQKTLLGKIGLKVEDYHWNFPEEKTYPCGETRHLIQSRLKKANLQKAFHSLISDEQKDCFERGLWHILYSVSDYNELCKALKTFARKTGFTLEEQLLFVEAFSSCPPFKKDYGAYSKRAITKLLPLMRIGKFWHEESIDSTTKTRIEHLISGEECSGIDVRVREKVAKAGLCESIEQYQGLPQWLANYVVYNRHSEASEITKWESPDELDNYIRSFKQYSLRNPIVEQVSLETLRVVRDLWAELQKEGQTIDEIHLEMGRDLKNTAEERSRIFRRNSENEDTNFRIKLLLEEFYANEKDIKDVRPYSPSQQELLRIYEEGVWQQEKDIPQDIKDIKKRISNDKDIKDITPNDIQRYRIWMDQKYCSPYTGKTIPLSRLFTTDYEIEHVIPRSRYFDDSYNNKVICEAAVNKDKNNRLGMEYIMAAGGKTIELGNGKNVQILKEEEYVELVDKIFGNNTRKRNIMLADEITEEFSQRQLNDTRYIARFMKGILSNIVREKNADGTLEPEETSKNLIVCSGRITDRVKQDWGLNDIWNHIVTPRFERLNTKTSSNDFGEYVCKEGKQYFQTRVPLNLQKGFNKKRIDHRHHAMDAIAIACVNRSIVNYLNNAAANQIEREALRRAVCIPERNGQTKR

SEQ ID NO: 1742 - protein, 1521 aa, unidentified
  REGION 1..1521: note = Description of Unknown: uncultivated organism with predicted taxonomy: Prevotella sp. MGM2
  REGION 1..1521: note = MG22-88 effector
MTKNTRNIIGLDLGTNSIGWSWIQQLISPTPTQPSEYLFDGTPIIRMSGSRIIPMPGDVTGSFERGETISKTKDRTAKRMARRMNERFQLRRERLNRVLNIMGFLPEHYARALDRYGKLNEESNTTIAWRSKEDGKNEFIFYPSFLEMASIFKERHPDIQRIPLDWTLYYLRSKALHQAITKEELSWVLHSFNQKRGYYQSREDITEEDKTKKVEYIKGVVNSVEDTGEKAKGKKIYKVTFADGTEFTSTKSEAPLWIGRTREIIVTTSLDTSGKPKLDKEGKIIQSAKTPDEKDWTLIKIRTEATIDDSKLTVGEYIFHALLKNPETKIKGAHVSTIDRRFYINEINAILKEQEKYHEELRDKSIYEQCTQALYAQNEVRRNIIAPWSMSDLLIKDILFYHRPLKSKKSQISECPLEFHTYTDKDGATHRQGIKCIPTSHPLFQEYRIWQFIANLRIYERERFDNGKHLINEDKTSDFLTTKKKEELFEWLAEKDSVSQKTLLGHLGLKVERYHWNFPEEKTYPCGETRHLIQSRLKKANLQKAFHSLISDEQKECFERGLWHILYSISDYNELCKALKTFARKTGFKLEEQLLFVEAFSSCPPFKKDYGAYSKRAITKLLPLMRIEKFWHEESIDSTTKNRIEHLISGEECSGIDVRVREKVAEAGLCESIEQYQGLPQWLANYVVYNRHSEASEITKWESPDELDNYIRSFKQYSLRNPIVEQVSLETLRVVRDLWAELQKEGQTIDEIHLEMGRDLKNTAEERSRIFRRNSENEDTNFRIKLLLEEFYANEKDIKDVRPYSPSQQELLRIYEEGVWQQEKDIPQDIKDIKKRISNDKDIKDITPNDIQRYRIWMDQKYCSPYTGKTIPLSRLFTTDYEIEHVIPRSRYFDDSYNNKVICEAAVNKDKNNRLGMEYIMAAGGKTIELGNGKNVQILKEEEYVELVDKIFGNNTRKRNIMLTDEITEEFSHRQLNDTRYIARFMKGILSNIVRGKNADGKLEPEETSKNLIVCSGRITDRVKQDWGLNDIWNHIITPRFERLNKKTSSNDFGEYVCKDGKRYFQTRVPLNLQKGFNKKRIDHRHHAMDAIAIACVNRSIVNYLNNAAANQTEREDLRRAVCIPERNGQTKRQLRSPWHCFARDAENALRQIVVSFKQNLRVATKATNSYECFDTASGKKIRRHQSNREHYAIRKPLHKDSVYGEVILPSIASVNLKKALLKADRILDKRLKDKIFELRKLYNYSNKQIEEHLTKVCINCLEWKNYDFKKIAVRILSNDADATHIVAIRKPLDESFDKVKINTITDTGIQKILLNHLSRYADDPKKAFSPEGIEDMNANIASLNGGKQHLPIYKVRVSEKDNGGYFPIGQKGNRSKKYVTTAKETNLFFAVYADSNGKRSFKTIDLRTAIECKKQGLSVSPSVNEKGDKLLFTLSPNDLVYMPSEEEEANGFSIDNNLNKEQIYKMVSATYKQCFFIPHTVADFIYKNKEFNVLNKIELTEDRRSIKEHCVPLKVNRLGK

SEQ ID NO: 1743 - protein, 884 aa, unidentified
  REGION 1..884: note = Description of Unknown: uncultivated organism with predicted taxonomy: Prevotella sp. MGM2
  REGION 1..884: note = MG22-89 effector
LLPLMRIGKFWHEESIDSTTKNRIEHLISGEECSGIDVRVREKVAKAGLCESIEQYQGLPQWLANYVVYNRHSEASEITKWESPDELDNYIRSFKQYSLRNPIVEQVSLETLRVVRDLWAELQKEGQTIDEIHLEMGRDLKNTAEERSRIFRRNSENEDTIFRIKLLLEEFYANEKDIKDVRPYSPSQQELLRIYEEGVWQQEKDIPQDIKDIKKRISNDKDIKDITPNDIQRYRIWMDQKYCSPYTGKTIPLSRLFTTDYEIEHVIPRSRYFDDSYNNKVICEAAVNKDKNNRLGMEYIMAAGGKTIELGNGKNVQILKEEEYVELVDKIFGNNTRKRNIMLADEITEEFSHRQLNDTRYIARFMKGILSNIVREKNADGTLEPEETSKNLIVCSGRITDRVKQDWGLNDIWNHIITPRFERLNKKTSSNDFGEYVCKDGKRYFQTRVPLNLQKGFNKKRIDHRHHAMDAIAIACVNRSIVNYLNNAAANQTEREDLRRAVCIPERNGQTKRQLRSPWHCFARDAENALRQIVVSFKQNLRVATKATNSYECFDTASGKKIRKHQSNREHYAIRKPLHKDSVYGEVILTSIASVNLKKALLKADRILDKRLKEKIFELRKLYNYSNKQIEEHLTKVCINCPEWKNYDFKKIAIRILSNDADATHIVAIRKPLDESFDKVKINTITDTGIQKILLNHLSRYADDPKKAFSPEGIEDMNANIASLNGGKQHLPIYKVRASEKDNGGYFPIGQKGNRPKKYVTTAKDTNLFFAVYADSKGKRSFNMIDLRTAIECWKQGVSVAPSINEKGDKLLFTLSPNDLVYMPSEEEEANGFSIKGNLIKEHIYKMVSATNRQCFFIPHTVADFISRGQEYNVLNVDNSAKIR

SEQ ID NO: 1744 - protein, 1558 aa, unidentified
  REGION 1..1558: note = Description of Unknown: uncultivated organism with predicted taxonomy: Bacteroidales
  REGION 1..1558: note = MG22-90 effector
LYSSHHVAANSTYPFKTGHNRTPLNRFTTHKTQPYNIMTKNTRNIIGLDLGTNSIGWSWIQQLISPTPTQPSEYLFNGTPIIRMSGSRIIPMPGDVTGSFERGETISKTKDRTAKRMARRMNERFQLRRERLNRVLNIMGFLPEHYARALDRYGKLNEESNTTIAWRSKEDGKNEFIFYPSFLEMASIFKEHHPDIQRIPLDWTLYYLRSKALHQAITKEELSWVLHSFNQKRGYYQSREDITEEDKTKKVEYIKGVVNSVEDTGEKAKGKKIYKVTFADGTEFTSTKSEAPLWIGRTREIIVTTSLDTSGKPKLDKEGKIIQSAKTPDEKDWTLIKIRTEATIDDSKLTVGEYIFHALLKNPETKIKGAYVSTIDRRFYINEINAILKEQEKYHKELRDKSLYEQCIKALYAQNEVRRNIIAPWSMSDLLIKDILFYHRPLKSKKSQISECPLEFHTYTDKDGATHRQGIKCIPTSHPLFQEYRIWQFIANLRIYERERFDNGKHLINEDKTSDFLTTKKKEDLYEWLAEKDSVSQKTLLGHLGLKVERYHWNFPEEKTYPCGETRHLIQSRLKKANLQKAFHSLISDEQKDCFERGLWHILYSVSDYNELCKALKTFARKTGFTLEEQLLFVEAFSSCPPFKKDYGAYSKRAITKLLPLMRIGKFWHEESIDSTTKNRIEHLISGEECSGIDVRVREKVAKAGLCESIEQYQGLQQWLANYVVYNRHSEASEITKWESPDELDNYIRSFKQYSLRNPIVEQVSLETLRVVRDLWAELQKEGQTIDEIHLEMGRDLKNTAEERSRIFRRNSENEDTNFRIKLLLEEFYANEKDIKDVRPYSPSQQELLRIYEEGVWQQEKDIPQDIKDIKKRISNDKDIKDITPNDIQRYRIWMDQKYCSPYTGKTIPLSRLFTTDYEIEHVIPRSRYFDDSYNNKVICEAAVNKDKNNRLGMEYIIAAGGKTIELGNGKNVQILKEEEYVELVDKIFGNNTRKRNIMLADEITEEFSHRQLNDTRYIARFMKGILSNIVREKNTDGTLEPEETSKNLIVCSGRITDRVKQDWGLNDIWNHIITPRFERLNTKTSSNDFGEYVCKDGKRYFQTRVPLNLQKGFNKKRIDHRHHAMDAIAIACVNRSIVNYLNNAAANQTEREDLRRAVCIPERNGQTKRQLRSPWPCFARDTENALRQIVVSFKQNLRIATKATNSYECFDTASGKKIRKHQSNHEHYAIRKPLHKDSVYGEVILTSIASVNLKKALLKAERILDKRLKEKIFELRKLYNYSNKQIEEHLTKVCINCPEWKNYDFKKIAVRILSNDADATHIVAIRKPLDESFDEVKINTITDTGIQKILLNHLSRYADDPKKAFSPEGIEDMNANIASLNGGKQHLPIYKVRVSEKNNGGYFPIGQKGNRPKKYVTTAQDTNLFFAVYADQKGKRSFKTIDLRTAIECRKQGLSVAPSINEKGDKLLFTLSPNDLVYMPSEEEEANGFSIKGNLIKEHIYKMVSANNRQCFFIPHSVADFISKGEEYNAHNKIELAEDGRSIKVHCVPLKVNRLGK

SEQ ID NO: 1745 - protein, 1521 aa, unidentified
  REGION 1..1521: note = Description of Unknown: uncultivated organism with predicted taxonomy: Prevotella
  REGION 1..1521: note = MG22-91 effector
MTKNTRNIIGLDLGTNSIGWSWIQQLISPTPTQPSEYLFDGTPIIRMSGSRIIPMPGDVTGSFERGETISKTKDRTAKRMARRMNERFQLRRERLNRVLNIMGFLPEHYARALDRYGKLNEESNTTIAWRSKEDGKNEFIFYPSFLEMAFIFKERHPDIQRIPLDWTLYYLRSKALHQAITKEELSWVLHSFNQKRGYYQSREDITEEDKTKKVEYIKGVVNSVEDTGEKAKGKKIYKVTFADGTEFTSTKSEALLWIGRTREIIVTTSLDTSGKPKLDKEGKIIQSAKTPDEKDWTLIKIRTEATIDDSKLTVGEYIFHALLKNPETKIKGAHVSTIDRRFYINEINAILKEQEKYHEELRDKSIYEQCTQALYAQNEVRRNIIAPWSMSDLLIKDILFYHRPLKSKKSQISECPLEFHTYTDKNGATHRQGIKCIPTSHPLFQEYRIWQFIANLRIYERERFDNGKHLINEDKTSDFLTTKKKEELFEWLAEKDSVSQKTLLGHLGLKVERYHWNFPEEKTYPCGETRHLIQSRLKKANLQKAFHSLISDEQKECFERGLWHILYSISDYNELCKALKTFARKTGFKLEEQLLFVEAFSSCPPFKKDYGAYSKRAITKLLPLMRIGKFWHEESIDSTTKNRIEHLISGEECSGIDVRVREKVAEAGLCESIEQYQGLPQWLANYVVYNRHSEASEITKWESPDELDNYIRSFKQYSLRNPIVEQVSLETLRVVRDLWAELQKEGQTIDEIHLEMGRDLKNTAEERSRIFRRNSENEDTNFRIKLLLEEFYANEKDIKDVRPYSPSQQELLRIYEEGVWQQEKDIPQDIKDIKKRISNDKDIKDITPNDIQRYRIWMDQKYCSPYTGKTIPLSRLFTTDYEIEHVIPRSRYFDDSYNNKVICEAAVNKDKNNRLGMEYIMAAGGKTIELGNGKNVQILKEEEYVELVDKIFGNNTRKRNIMLTDEITEEFSHRQLNDTRYIVRFMKGILSNIVRGKNADGKLEPEETSKNLIVCSGRITDRVKQDWGLNDIWNHIITPRFERLNKKTSSNDFGEYVCKDGKRYFQTRVPLNLQKGFNKKRIDHRHHAMDAIAIACVNRSIVNYLNNAAANQTEREDLRRAVCIPERNGQTKRQLRSPWHCFARDAENALRQIVVSFKQNLRVATKATNSYECFDTASGKKIRRHQSNREHYAIRKPLHKDSVYGEVILPSIASVNLKKALLKADRILDKRLKDKIFELRKLYNYSNKQIEEHLTKVCINCLEWKNYDFKKIAVRILSNDADATHIVAIRKPLDESFDKVKINTITDTGIQKILLNHLSRYADDPKKAFSPEGIEDMNANIASLNGGKQHLPIYKVRVSEKDNGGYFPIGQKGNRSKKYVTTAKETNLFFAVYADSNGKRSFKTIDLRTAIECKKQGLSVAPSVNEKGDKLLFTLSPNDLVYMPSEEEEANGFSIDNNLNKEQIYKMVSATYKQCFFIPHTVADFIYKNKEFNVLNKIELTEDRRSIKEHCVPLKVNRLGK

SEQ ID NO: 1746 - protein, 1558 aa, unidentified; identical to SEQ ID NO: 1667
  REGION 1..1558: note = Description of Unknown: uncultivated organism with predicted taxonomy: Bacteroidales
  REGION 1..1558: note = MG22-92 effector

SEQ ID NO: 1747 - protein, 750 aa, unidentified
  REGION 1..750: note = Description of Unknown: uncultivated organism with predicted taxonomy: Bacteroides
  REGION 1..750: note = MG22-93 effector
LGPNSIGWAVVEREEKSSDNSSLFTGGKILMAGSRIIPMSADILNNYEKGVSVSQTSERTKYRQVRRQYERFHQRRERLNRVLQELGFLPAHYSEQLDRYGKLPKGKEPKIAWRPTADGKYEFIFRSSFLEMMAEIRKSHPECKQIPYDWTLYYLRKKALYEKLTPEELSWVLHSFNQKRGYNAVRGQVEEDTETPDKLQEYRKSCLIGLEDTGEKTRGTNVYKLSFEDGTVFEMPLRKINFAVGDEVEFFITTRLDEDGTPKLNKQGLPVISYKIPNADDAWTLNKLRAEFTIDQSCSTVGQYIYDAILRNPQQKIRGELVRTVDRRFYRDELNRILDKQISLHPILQDDNKLQECLLALYPSNEAHRCTMSGRGFKALFMDDVILYQRPLKSKKSLIDACKYEFHTYINKDGKHEKSVLRCASRSNPLFQEFRLWQFIENLRIYKRKDLSDGHLLTDVDVTGKYLSDEDVRVALFDWMRDRSDVDQKSLLKYFKLSESDFRWNYVEDRKYPASETRAEMLKRLKKAGVPTDFLNLENEMALWEIFYSINEKKELEKALSSFARKHNFEVEKFIQSFRTIKPYPSDYCAYSTKALRRLLPLMRQGKYWKEEEIDDQTRSRIQRLIDGEWDEGIAEKVREKTVSLRCESDFRGLPVWLASYVVYNRHSEASEIKKWESPEEMDADIRKFRQHSLRNPIVEQVCLETLRVVRDIWKEEGISMKSTWRWDVKCGLQQRNAKRVAAYKWKTSR

SEQ ID NO: 1748 - protein, 1496 aa, unidentified
  REGION 1..1496: note = Description of Unknown: uncultivated organism with predicted taxonomy: Prevotella
  REGION 1..1496: note = MG22-94 effector
MKNILGLDLGPNSIGWAVVQTEKEGAEESLFAQGKILMAGSRIIPMDASTLGDFEKGNSTSQTADRTKFRQVRRQYERFHQRRERLNRVLLTLDYLPEHYAKELDRYGKLPKEGEPKLAWRPTPDGAYEFLFRDAFLEMVSEFKKHHPELKQIPYDWTIYYLRKKALRQALTPHELSWVLHSFNQKRGYNAVRGKEDKETESPDKRQEYHKSVLTSISDTGEKLRGNVVYRLAFSDGATFDVAGRHISLSEGEEVEYIKTTKLDEDGMPKLTRQGVPDVSYKIPNADDAWTLNKLRAEFTIEQSGTTVGEYIYDAILRNPGQKIRGELVRTIDRRFYRDELCRILDTQIPLHPVLQDGNKLEECLQTLYPNNEAHRLSMLGRGFKGLFMDDVILYQRPLKSKKSLIDDCKYESRTYVNQDGARVRVGLKCASRSHPLFQEYRLWQFMENLRILKRKEFVDGHLRTNVDVTGHHLPDENSRVALFDWLYGRATVDQKALLKYLHLSEEEYSWNYVEERDYPAAETRAEMQKRLKKAGISADFLTPEREMALWEILYSVGVQGELEKALRRFASKHGVDADKFCQSFRTIKPYPADYCAYSTKALRRLLPLMRQGRYWSLSAIDPQTRQRMQRLIDGEWDEGISDRVREKTSDLRHETDFRGLTSWMATYVVYNRHSEAADIKKWHTPEEMDADIRRFRQHSLRNPIVEQVCLEALRTVRDIWKEIGKIDEIHVEMGRNMRATAKERQKTSQLQLENEQANLRIKALLQEFMNPEFEVEDVRPYSPSQQELLRIYEGTVLEQEAGHIDEPIREIIRKFSQTDAAKRPTTSEVLRYKLWLEQKYRSPYTGEVIPLGKLFTPAYQIEHVIPQSLYYDNSFNNKVICEAEVNLLKGNQLGMPFIMRHANEKVVCSMGKQVKIFTPEAYRLFVEEHYRGRKMTILLSEEIPTAFNDRQKNDTRYISRYIIGELSKLVREEKPDGTLEQEPTSKNVVVLNGSVTDKLKKDWGLVDVWNEIITPRFRRLNEMEGSQRFGQDAEKGGKRYFQITMPLELQRGFQRKRIDHRHHAMDAITIACATRQVINYLNNDHSHAGQGREDLHRAVCRKRGSEWFIRKPWDTFTQDAHARLNQIVISFKQNLRVINKTGNHYWRYNPKTGKKEIFHQQKGDSWAIRQALHKESVFGRVNLRTTKFVSFKEAFASLERIVDKRLKRAILAGMARYSGHCTDKQMLIYLQEQQEWKSFDFKKVAVYTFSEDDDKSRMCAIRKRLDDSFDKKKILSVTDTGIQRILLRHLEQSGGNPKDAFSPEGIVRMNETIQELNGGKPHQPILSVRITETMGNKFAVGMRGNRGKKFVEAAKGTNLFFATYLQEDGKRLFRSLPLNEVVERQKQGLPVAPERDEQGNSLLFVLSPGDLVYLPTSDEQEGRVEPAALDLSRIYKMVSCTRSQCLFVPHRVASVIKDKYEYSSMNKMERAITGEMIKESCLPLEVDRLGRYRIK

SEQ ID NO: 1749 - protein, 1381 aa, unidentified
  REGION 1..1381: note = Description of Unknown: uncultivated organism with predicted taxonomy: Bacteroidales
  REGION 1..1381: note = MG22-95 effector
EADADEEKKKKEVKTLEKATVVSIEQSDAAKGGRYWWNYHLSNGMIYKRTSERPMEWLGTERYFIVTTKLDADGNPKKRKDGTTDKSISAPSADDWGLMKLKTESEIGESGKQLGEFIYDKILADPTAKIIGGEVTVVDRRFYRDELRAILDKQREYIAALRDRELYAECIEALYPSNAAYRNIIAGKDFSYLLTDDVILYQRPLKSKKYLISDCPYETVTFTDKSGQEVTKRLKCVPRSHPLFQEFRVWQFIANLRIYQKERVEGGRKLIDADVTDLLLKNDADRVALFEWLNARADVVQDDLLKFLVAEARKRPISEQSADFGELLVMAHGAKAKKDKAYTAFKWNYVEDKKYPCNKTHSVILSKLSSEEEREALTPEIEEMIWHALYSITDKREFDKAFSPNARHPERGLYATLSRHFSPESIGGIKSIILKESDYGSYSRRALSRLLPLMRCGALWSAEAIDTATRARIDKIIDGEWDEGIDTRTRNLMAGMSTVEQFRGMATWQACYVVYGRHSEASEVMRWNSPDDLRAFITSFPHNSLRNPTVERIILETLRIVEEIWRHYGHIDEIHVELARSVKQNKEQRERAMTQMAENERRNLRLRAMLEAFLNDRDPIGFDPDANINPGSPNQQLKLRLFEDTAFSYAQANGDDQVEEMLNIRNSITGGSDEKSATPAQIRRYALWLEQNFRSPYTGATISLARLFTDDYQVDHIIPQALYWDDSFNNKVLCEGGVNNTKSNALAFDFIAAHQGETIALPNGRKVTILSMEQYQELVLATYKNNRAKCEKLLMKEIPAEFTQRQLNDTRYISKVVKSLLSNVVRERDEEGNLEAEAISKNVIVPVGAMTDRLKQDWGLKDVWNQLMLPRFRALNDKMAPYRFTKITRRGHEIPAMPLELVKGFSKKRIDHRHHAMDAIAIACTTRRHIQYINGDAGEAEADKSKYIDKQRVIDARRTIRNKIAHRLDGDGKPIFDKPWTTFTEDVKRALENLIVSFKQTNKVISHTSNKSQRYVDGQKRFVRQTKGEQIAIRKPLHKETVSALVNLREVKEVTLKEAVATVPTIVDKELRAKIVELIAKGYDEKRMKAYFEEHNDEWTDVNPARKKVKVYRFSEESGSNHYYATRVALDTTFDAKKIRTITDTGIQKILLRYLEAKGSAAVAFTPEGIDELNANIARYNGGRQHQPIVKVRTYVNGDRYAIGTVGNKSKKYVVAQSGTLLYYFAFAHTEYDKKRKEEVTLRVFSAIPLRDVIAAMKADRDNWEDCVTASLKERGIIPADARFLFKLSPGDMIYLPDAHETIAPSAIDRAKVYKVVSFFGDNGGYLFVVPYSVAKPIIDKIEYGTQNKVNLAGELKQRIIPLAVDRLGNITWVYDPAGEK

SEQ ID NO: 1750 - protein, 890 aa, unidentified
  REGION 1..890: note = Description of Unknown: uncultivated organism with predicted taxonomy: Bacteroidales
  REGION 1..890: note = MG22-96 effector
MRVGKYWTADNIDPTTLHRIQLLISGEDDGELNLRTRDKLENLRNIEDFQGLPVWMACYVVYGRHSESGNIQKWSNPHDIDIFLNNFKQHSLHNPIVEQVVLETMRVVRDVWAKFGNLDEIHLELGRNLNQTAEQRKRDTERNLGNERANLRAKILLTEFLNPEMNVENVRPYSPSQLELLRIFEEGILDDSAGNMPDDIQEIIKKLDSTDIKRRPTESEVLRYRNWLEQGYRSPYTNEIIPLSKLFTTAYQIEHIIPQSLYFNNSYNNKVICEAEVNQLKSNQLGMEFVKNHGGEIVECAFGRKVRILTPEEYTAFVEQHYKHNVHKKNNLLSTELPSEFSSRQLNDSRYISKLMIGLLSNIVREETDGHLEEEAISKNLIVCTGKVTERLKQDWGLKDVWNEIIRPRFERLNQMEQTERFGHWENKQGKNVFQITIPIELSSSVDRKRIDHRHHAMDAITIACATRNMVNYLSNQASGKTRFDLQHALCIKQKMDAQGNYKWLIRKPWQTFTEDAKTALNEIVVSFKQNLRVINKTSNHYETIGSDGKKILRRQSKGDSWAIRKSMHKDTVFGNVNLRSIKQVTLKQALQQVDRICSKELKKYILSLQKLHFSGKGIEAQLKEKGRRLFPDIDLKKIDIYYFSNDSENTRMVASRKPLDNSFNQKAIEAITDSGIRKILLNHLEQCNGDSEAAFSPMGIEQMNEHITSLNNGIPHKPIYKVRKSEIQGSKFPVGTKGCRSKKFFEADKGTNLFFAIYVDSEGKRSFDSIPLNIVIERQKQGLPSCPEKDSNGNTLLFCISPSDTVYVPTPDEMETGNIDLNYIDKGRLYKMVSCSGRQCFFLPIEIACMIWDKVEFSATNKMERSITGEMIKDICIPIKCNRLGELLP

SEQ ID NO: 1751 - protein, 1490 aa, unidentified
  REGION 1..1490: note = Description of Unknown: uncultivated organism with predicted taxonomy: Bacteroidetes
  REGION 1..1490: note = MG22-97 effector
MKRVLGLDLGTNSIGWAVVEKDSLNETDGKIIMSGSRIIPMDAAMMSDFDKGNAQSQTAERTRLRSIRKLNERHKIRRQRLNRVLSILKYLPEHYANNIDRYGNIDENKEPKIAWKINSNGRKEFLFMDSFEEMVAEIHQKHPDAKTIPYDWTLYYLRSKALHKPISKFELAWVLHSFLQKRGYYQLRGEEEDSTAKKEEYASLKVISVEDSGDRKGNNTWWNVNLENGLTYKVCLQDRPPLEGKTRDFIITTKLDKEGKPALDKDGKPRYSIRAPKDDDWGLMKIRTESQIAKAGMTVGQYIYNTILNTLDKKIRGQIVRTIERKYYREELLRILECQIMFHLELQDKELYTECIEALYPSNDSYRASIATRNFKYLIADDVIFYQRPLKSKKSEISDCPYETRTFVDKSTGEIKKTSLKCISRQNPLFQEFRLWQFISNLRIYKRYDAEDGRIVINKDITKDLLPDANVVASLYEWLSTKAGVSQEQLLKYLKLSSADYRWNYVEEKKYPAGETRAMLMSGFKKAGIDTNLLTEEIEMALWHILYSVNDRQELIKALSSFAVQHQWPAEVFSNVFCKTKPFEDYGAYSEKAIKKLLPLMRVGKYWTADDIDPATRHRIQLLITGEDDSELNLRTRDKLEDLKSIDDFQGLPVWMACYVVYGRHSESGNILKWSNPHDIDIFLNNFKQHSLHNPIVEQVVLETMRVVRDVWAKFGNLDEIHLELGRNLNQTAEQRKRDTERNLGNERANLRAKILLTEFLNPEMNVENVRPYSPSQQELLRIFEEGIIDDSTGNMPDDIQEIIKKLDSSDIKRRPTESEILRYRNWLEQGYRSPYTNEIIPLSKLFTPAYQIEHIIPQSLYFNNSYNNKVICETEVNQLKSNQLGMEFVKNHGGEIVECAFGRKVRILTPEEYTAFVEQHYKHNIHKKNNLLSTELPSEFSSRQLNDSRYISKLMIGLLSNIVREDADGQLEEEAISKNLIVCTGKVTERLKQDWGLKDVWNEIIRPRFERLNHMEQSERFGHWENKQGKNVFQITIPLELSSSVDRKRIDHRHHAMDAITIACATRNMVNYLSNQASGKARYDLQHVLCVKQKMDAQGNYKWLIRKPWQTFTEDAKAAIKEIVVSFKQNLRVINKTSNHYEAIGSDGKKILRRQTKGDSWAIRKSMHKDTVFGNVNLRSVKQVTLKQALQQVDRICSKELKKYILSLQKLHFSDKGIEAQLKEKGRQLFPNIDLKKIDIYYFSNDSENTRMVATRKPLDASFNQKAIEAITDSGIRKILLNHLEQYNGDSEAAFSPMGIEQMNEHITSLNNGIPHKPIYKVRKSEIQGSKFPVGTKGCRSKKFFEADKGTNLFFAIYVDSEGKRSFDSIPLNIVIERQKQGLPSCPEKDSNGNTLLFCISPGDTVYVPTPDEMETGNIDLNYIDKGRLYKMVSCTGKESHFLPLSSATTIKDKYEYSSLNKLGRALSGEMIKDICIPIKCNRLGELLP

SEQ ID NO: 1752 - protein, 979 aa, unidentified
  REGION 1..979: note = Description of Unknown: uncultivated organism with predicted taxonomy: Bacteroidales
  REGION 1..979: note = MG22-98 effector
MTRKILGLDLGPNSIGWAVIARETSSDEENSGRIIDAGSRIIPMIDDSKFEKGETISATKDRRQKRSMRRMLERKKQRRQRLLRALNVMGFLPEHFAAYIDKHGNMRHDCDTPLMAWEQNADGHRQFIFTDAFEEMVADFRQHAICSCADGKLIPYDWTPYYLRKKALTTAISREELAFVLTQFNKKRGYHQLRGDELDEAEQKSKNQEIRTLTVKEIIDYKKISQKHKYTFLLSNGMAFERESTSKLDDWVGKERDFIITTEYDEEGNIKKNRFGEDKISIRAPEETDWTLRKKKAENDISDKKEVGEYIYDELLRTPDMKIIGGKVMTIDRKFYRRELRKILATQEPYHPELKDESVKRKVAKALYPNNTDHRRAIMRKSLSDIIVDDIIFYQRSLKSKKSTIADCPYEKRYYKDSEGMLKKTGVKCISKSHPLFQEFRTWQFINDLCITRQGEPVDFSNEEAADLFDYLHCKEKTNETDILKNFLKLNKQEQELHKWNYGKDAEKPCCPTHCQFVERFKKIGLEPSILTAETEQVLWEIAYSVKDVAEYNKAIEKFADRIGADREEFTKAFRNLPDYKSEYGSYSHKAICKLLPLMRRGSAWQWEAIDKDTREKIGHIINGEHDERLTEDTRQNFSKKTKEDDFQGLQPWEACQLVYGGQTDDEEIQKWDSPEDVDKYIASFRQHSMRNPVVEQVVLETLRTARDIMRRYGKVDEIHLEMARSMKQTSQQRKADNERMQSNYKRNQEVRDKIAEELQQNATNGERPKIGAKKIASYKIWEDQKGRSPYTGKAISDAALLNADGRYDIDHVIPQSRYYDDSLNNKVICEKEVNLKKGNMLGLEFIQKHGGETIQLSSGGEVTILREEEDKKLVNETFKGRKQKIMLMTETPNDFTNRQKTDTQYIASTMMRLLSNIVREQDPDGSLEREVRSKNPIVCTGGITDKLKKDWGVNDAWNRIILPRFKRMDELTMAERTG

SEQ ID NO: 1753 - protein, 1537 aa, unidentified
  REGION 1..1537: note = Description of Unknown: uncultivated organism with predicted taxonomy: Flavobacteriales
  REGION 1..1537: note = MG22-99 effector
MAKYILGLDLGPNSIGWAVVEGVEQEEHVGLVPQRIVMSGSRIIPIDKTTLSNFETGNTVSQTADRTQKRGMRRNLERKKLRRQRLFRVLKTMGMLPRHFAEHVDGLGNLDEDGRRLSMAWAPQEGERPLFLFQDAFAEMVGEFAARQPQLMLGGKLVPKDWTLYYLRKKGLTDRLEKEELAWVLASFLQKRGYRYMRGQDADNTKENEKKELRTLEIVDLISDGDGSKKGKGVDLVLEDELRFTVKNANEADFKRGQTLDFIVTTTYDERGKVKMDANNKPMRKLSMPKEGDWELLKTRTEQRIRVQEGSTVGSYIYESILENPDVKIIGERVHVVGREFYEEETKRILEAQTQFHPELSDPEMRDKVAHALYPNNEAHRNAILNRSLADIIVADVVFYQRPLRSKKSSISDCPFEKRNYVGSDGEERKVGVKCISKSHPLFQEFRTWQFVGNVKLVSKDDSGDDKNLSLLGRKKCFNGGTCEEGAELFEWLHNRKSVKQGDFLKGFVGLTKGEIDRYYRWNYEADKEIPCCETRAEFLGYFKKAGLPADALTEEAERRLWEVAYSVSDREEFRKALRSYARWIGADEERFVEACGKMKPFPSDYGSYSEKAIKKLLPLMRTGKYWSFDAIAPETQSKIRHLITGEEDERLTDEVREHFKYRVDEANYQGLQLWEACELVYGSSFSKDDIAHWKSPDDLDRWLEGFRQHSLRNPIVEQVVLEAVRTVRDIWRKIGHIDEIHLEMARDMRKTAQERKRDSERNSQNFKARQRIKMLLDEFEKMRIDDVHPYSPMHQEKLRIVEDGVFDRVSAKGDEKSKEMLKDMRAFQTNVEKNNVTPGDISRYMLYLEQNYRSPYTNETISMKRLFSSDYEIEHVIPRSRFFDDSMSNKVICEAKVNKEKGNMTGMEFIMKRGGEKIELGEGREVTIVNEKDYRQYVDEVYKNNSRKRKNLLSEDIPGGFSNSQMNNTRYISRLVMTILSNIVRDDREDGKSDEGIRANRLITCQGGVTDKLKKDWHVNDVWNRIILPRYERMQNEVMKGVTFVTNNSRGHEIPTMPDKLKTEEYNPKRIDHRHHAMDAIVIACATRSIVNFLNNESARDEASEGSEKAKARQTYAELRSLLCVKDADNDEKVIRKPWENFEVDVLKALEDIVVSTKHKQRVLTRTSNHYEKFVDGKKQKVSQKGKSYAVRLSLHKDTVWGQVNLRRQEGVSLLTALKDPQRVVDKALRKKIVELQAQGKKPKDIKKYFAENADVWPETQGKVAVWHFTDDEPTKTYATRFISSLTELFDKISTREKAEEKIQSITDTGIQKILLAHLAECNYDVAEAFSPIGIERMNANIVALNGGKQHKPIKKVRRTESGSKFAVGASSGSRHKFVENAKGGNLFFAVYLAVSEDKNGNEVRKRQYETLPLRTVLDRLKQGLSPVPEVDEGGNRLLFSLCPYDLVYVPKEGENVGELTAERLDKERIYMFVSSSDSDAMFRPHRVAAPIVEKKEFTLHNKMSKAVTGEMIKEVCIPLEVDRLGDITKKRIGDD

SEQ ID NO: 1754 - protein, 1489 aa, unidentified
  REGION 1..1489: note = Description of Unknown: uncultivated organism with predicted taxonomy: Bacteroidales
  REGION 1..1489: note = MG22-100 effector
LGPNSIGWAVVQTELDDEKKDTLYSSGKILMSGSRIIPMSADIMNNFQKGVSVSQTAERTRYRLVRRQYERFHLRRERLNRVLMTMGYLPEHYAEQLDRYGKLPKGKEPKLAWRMAKDGKPEFIFREAFLEMVDEMRAVHPDLQQIPYDWTIYYLRKKALSRALRPEELAWVLHSFNQKRGFFAVRGQVDTDAEAPDKLQEYHKARLASVVDTGEKNRGNAVYRLCFDDGVEFEVALRRMTLQVGDDVEYIKTTKLDDDGMPKQTKQGKPDISYKIPGANDAWTLNKLRAEYTIDQSQSTVGEYIYKALLTNPQQKIRGELVRTIDRHFYRDELRRILQAQKPHHPLLQDQEMLDECLQMLYPHNESHSNSMRGRDLCALLTDDIIMYQRPLKSKKSLIAGCKYETHRYVDKDGKMKTEGVKCASKSHPLFQEFRLWQFIENLRIIQRKDTSNGRVRYDVDVTEQFIHDYEGRAALFEWLQTRSKIKQDALLKHFGMKEEGFRWNYVEDREYPAGETRAEMLKRLKKAGVDADFLTAERELALWEILYSVNGQEELGKALRTFARKHQLDEEKFAQNFCTIKPYPSDYCAFSVKALKRLLPLMRCGKYWTAEQIDASTAQRIQKLIDGEYDEQITEQVRNATATLRSVGDYQGLSTWLASYVVYGRHSEASDTKKWETPEDMEADIKAFRQHSLRNPIVEQVCLETLRTVHDIWKEVGHIDEIHVEMGREMRATAKEREERSARQLRNEQTNLRIKALLQEFMNPALEIEDVRPYSPSQQELLHIYEETVLEQEAGNIDDDIREIIRKFTQTEASKRPTEGEVRRYKLWLEQRYRSPYTGKNIPLGKLFTPAYQIEHVIPQSVYYDNSYNNKVICEAEVNLLKGNMLGMAFIKEHAGEIVPLSLGGEVEILKPDTYREFVEEHYKGRKRQIMLSEEIPTEFTSRQMNDTRYIARFIMGELSKLVRQQNADGTYEEEATSKNVIVLNGAITDKLKKDWGLVDVWNGIIAERFKRLNQMEGGTRFGHEENKDGKRYFQIEMPLELQRGFNRKRIDHRHHAMDAIVIACATRAVVNYLNNDHAHDGAGREDVKRAVSRKRDQTWLINKPWPTFTEEAKEELKQMVVSFKQNLRVINKTSNHYEKYNTATGKKEKFRQHHGDNWAIRKALHKESVFAQVNLRSIQTVNFKTAYEQVLRIVDKRLKRAIRDAKNRYAMRCTDKQILKYLQGMPEWKDYDFKRIAIYAFSNDQEKTQMCAIRKRLDDSFDKKKIASVTDTGIQQILLHHLEENGNNPKEAFSPEGIERMNANIAALNNGKAHQPIYVVRISEPMGQKFAVGHIGNRSKKFVEAAKGTNLFFAIYDLGGDRRGYTSLPFREVVERQKLGYPTAPETDEEGHRLLFVLRPGDLVYVPTEEQLQSRIDARAIDKSRIYKMVSCTGNECHFIPANTASFIRDKYEYGSLNKLARAITGEMIKEICIPLEIDRLGRYRIK

SEQ ID NO: 1755 - protein, 1215 aa, unidentified
  REGION 1..1215: note = Description of Unknown: uncultivated organism with predicted taxonomy: Bacteroidales
  REGION 1..1215: note = MG22-101 effector
RIPNADDAWTLNKLRAEFTIDQSHSTVGQYIFNAILRNPQQKIRGELVRTVDRRFYRDELRRILEVQIPLHPALQDREKLEECLLALYPNNEAHRRSMQGRDFKALLMDDIILYQRPLKSKKSLIGECKYETHTYINKEGKRETIGLKCASRSNPLFQEYRLWQFLENLRILKRKTLDGNHYRTDVDVTTLFLRTDESYTSLFDYLRSRAEIDQKTLLKFFKLKEEDYRWNYVEERKYPTSETRAEMLKRLKKAGVPTEFLTHELEMALWEILYSVSGQSELEKALRKFAEKNNLDQETFYQCFRTIKPYSADYCAFSTKALRRLLPLMRRGHYWNYNAIDPLTQQRIARLINGEEDTTISNRVREKAETLRTETDYQGLPTWLASYVVYGRHSEASEIKKWASPEEMDRDIRCFRQHSLRNPIVEQVCLEALRTVRDIWKEIGSINEIHVELGREMRATAKERESRHNRQLENEQTNLRIKALLQEFMNPEFGIEDVRPYSPNQQELLRIYEDTVLSQEAGRVDEPIREIIRKFSQTDAAKRPTTAEVLRYKLWLEQKYRSPYTGEPISLSKIFTSAYQIEHVIPQSVYYDNSYSNKVICEAEVNLLKGNMLGMPFIMQHAGEKVQCSVGNIVTISTPEAYRAFVEEHYKGKKQKILLSEEIPTNFTARQMNDTRYISRFIIGELSKLVREHNPDGTLEQEAVSKNILILNGAVTDKLKKDWGLVDVWNGIIAPRFRRLNAMEGSQRFGHEAMKDGKRYFQIEMPLELQRGFQRKRIDHRHHAMDAIAIACATRNVVNYLNNDHSHEGAGREDIKRAVSSKRSGQWLVNKPWSTFTQEARKQLQQIVVSFKQNLRVINKTSNRYVRYNPQTRKKETIVQQKGDNWAIRKPLHKESVFGRVNLRTQKAVNFKTAYANIERIVDKRFKHAVLAAIKRYGGKCTDKQVLKYMQGMPEWKDFDFKKVQIYVFSNDDVKTQTSAIRKRLDDSFDKKKILTITDTGIQRILLRHLEQNGNNPKEAFSPEGIVRLNESMLELNGGKPHLPIFAVRISEPLGNKFSVGMRGNRSKKFVEAAKGTNLFFAIYQQEDGRRLYRSVPLNEVIERQKQGLSSAPEHDENGNALLFVLSPGDLVYLPTKEERNSRIDVQAIDKTRIYKMVSCSGNQCQFIPINVASAIVDKYEFSSANKMERAITGEMIKELCLPIEVDRLGRYRLK

SEQ ID NO: 1756 - protein, 1377 aa, unidentified
  REGION 1..1377: note = Description of Unknown: uncultivated organism with predicted taxonomy: Clostridia
  REGION 1..1377: note = MG23-1 effector
MGKKMYVGLDMGTSSVGLAVTDENYKLYRVKGKDYWCSRTFDEADTAVERRTNRISRRRRQREVARLGILRELFADEIAKVDPGFYARLDESKYHLEDRDNKQPYAIFADKGYTDKEYYARYPTIFHLRSELIDSDKPHDVRLVYLALANMFKHRGHFLNDSLSSDKPLADTTEAYSNFYYTASELSISFPAEAQPDSIDAASLEALLGDKGVSRTDKAKNICQYLAIDKKTSKPLYTLINLICGLNIKLIDIYGAELIDEENKKLSIGFRDSSYEQQDADGRKLLGENYAIIDAAKELHDIGLLSSIMKGYKYLSQARVALYEEHAADLKKLKSVLKRYDKDSYRKVFRSMDEGSYSAYIGSVNSGTKIRRGVKDGSADTFCKSMKKVLEKLPKDDMDVQYLLAKATDSSLLPKQLTFENGVIPNQLHAAEMKAILRQAEKYLPFLLEKDEYDLTVSQRIIQLFTFRIPYYVGPIGKNHAGEKGYNIWATRRAGEEDGRVYPWNFEQKIDTKAAAEKFIERMVRHCTYINGERTLPKCSLLYEKYMVLNELNNLRINGEKPAVSVKQDIYTKLFCRGKRVTMKMLKDYLYNSSLIPSKEDVVISGIDNGFNTSLTSVGKFRGILGDAVFADSNQKMIEDIIFWGTVYGNDKKFLKERIEEVYGDRLNHDEIKRILGFNFNDWGNLSREFLELEGECECGRCSIIQAQWNTNHNLMELLSDQFTFKNELEKKTGSAEKALADWSIDDLEGKYLSAPVKRMIWQTIKMLREVCEVTGRTPDKVFVEMAREDGEKGARTVSRKKKLLDLYDAIKHEERELAKVFSDEIDSKTEADFRSKKLYLYYLQQGRCMYSGDIIHLSDLMNDNLYDIDHIYPRHFIKDDSLENNLVLVKKQINNRKQDTFPIERSIQEDMRPFWKSLADSGFISAEKYKRLTRRDAFTDEEKAAFISRQLVETRQGTKAIADILKQALPDTEIVYVKAGLVSDFRQKFELYKVRALNDTHHAKDAYLNIVVGNTYSTKFTNNPLNFIKAGAKRPQDNQFKYNMDKIFDYNVISRGERAWIAGSDGSICTVKKFMSRNTVLITRKAKEVHGALSNKATIWGKNVAKPGAYLPVKSTDLKAQDVTKYGGITSIANSGYTLAEYKVNGKTTRSLEALPVYLGRAEQLTEKTVVDYLSSSLQESSKKKIEDIQVRKLFIPQGSKVKIDGFCYYLGGKTGDSIYLNNAVPLYLSSTSEEYLRKLLKAVENNNYNERDKNGQIILTAPKNVQLLSSIFDKLRSKPFSNNKWNIYFSIVNGKETKVEQLFSKLSIDKQAEVISQIVIWINSSRQNVNLSLIGGSAHSGTQALSKTVSRLNECMLISQSITGIYEHSVDLLTI

SEQ ID NO: 1757 - protein, 1375 aa, unidentified
  REGION 1..1375: note = Description of Unknown: uncultivated organism with predicted taxonomy: Firmicutes
  REGION 1..1375: note = MG23-3 effector
MSEKIPYYIGLDMGTNSVGWAVTDENYKILRGKGKDMWGVRLFDEAQTAAERRTNRVSRRRRQREVARIGLVKEYFADALNAVDPGFMVRLEESKYWLEDRSEENQQKFALFNDKDFTDKEYYTVYPTIFHLRKELIESTEQHDVRLVYLAILNLFKRRGHFLNKSLESDGETMSMAEAYAALVDEAAALEITLPMPIDAKKLEEVLSQKGVSRKFVEQDTNEFFGFSKKASEARELVKLMCGLTGKMRNIYGEELIDDDNKKLALSFRSNDYEEKMNEVAELVGDENMRLLEAVKEVHDIALLANILSGEQYLSVARVKQYNKHKEDLQQLKRVLRTYDKAAYKKMFRVMGKDNYSAYVGSVNYKEHKERRNAGAGKDGESFRKAVEKVIDALPEEAQLDQDVIEIREKIKNEAFLPKQLTSANGIIPNQVHLRELKRILENASGYLPFLNEIDESGLTVKERIAQLYEFQIPYYVGPLSKQNSKNAWANRRPGEEKGRILPWNFEQKIDVNQAAEDFIKRMVRHCSYLDAEFTLPKQSLMYEKYMVLNELNNLRINGEKPTVLQKQQIYNELFGKGKRITQKALINYLKDEGIVEKDSEPIISGIDGDFKASLSTFGKLRTVLKEEARKDSSQEMMDQIVFWATVYGDDKRFIRARIEEHYSEILDDHAIKQLLGMKFNGWGNLSKAFLEMEGASKEDGVYRSVIQALWETNDNLMELLGQRYTYKEELEKRVQTKEKPLAEWTIDDLDGMYLSPSVKRMVWQTLKIIREITEVRGSAPSKIFVEMARDDAQTKAKNKGKRTKSRKDFLLECYKDDKAWKDELTSVDDGELRAKKLYLYYLQMGRCMYSGEAIDLASLMSGNTMYDIDHIHPRHFVKDDSLENNLVLVKKDKNAHKSDNYPLESEIRNKQFGFWKSLLDKGLITKTKFTRLIRSEDFSPEELAGFINRQLVETRQGTKAITKILQQAFPDDDMEVVFTKAGVAAKLRHDFDLVKVRCVNDTHHAHDAYLNIVAGNVYNAKFTSNPLRFIKNEVKKGNASYHMDKIFFRDVKRGNKLVWQAPNNEEKTPGTIAIVREQLARRTVLQTRRSYMAHGILSDATIYSKDTAKTESYRPVKSSDERLSDVKKYGGMTSIKNTAYALVEYTVKGKTIRSLEGVPIYLGNCSKDDKKLLQYLQEILQRENKNKQVENVSVRMYPIRQRSYLKVDGYYYYLGGATGSSVYLLDAMSVYLSKEDMGYVKKVEKAVAQQRYDECTKEGEFVLTREKNMDLYNKLVDKFSHGVFIKRKASILKTLEEGIDVFSELNIEKQCGIIMQIFAWITTSQQNVNLTDIGGVAHAGTLLISKKLSTSREALLIEQSLTGLWSKTTDLLTV

SEQ ID NO: 1758 - protein, 1371 aa, unidentified
  REGION 1..1371: note = Description of Unknown: uncultivated organism with predicted taxonomy: Clostridiales
  REGION 1..1371: note = MG23-4 effector
MEERKMYWGLDLGTNSVGWAVTDQNYQLMRAKGKDLWGARLFDRADTSAERRGYRVSRRRRQREVARCGVLKEYFYEEISKMDAGFFVRLEESKFWKEDRSEGNQQKYALFADANFTDKDYFEKYPTIFHLRKELLETSEAHDVRLVYLALLNMFKHRGHFLNTALSAEETETDMNAAYQELVDTAGYFDIAFDPQLDAREIENILGEKGISRSRILEKLSTYMGISKSDKAAYELLKLVCGNAGKLVNIYGSEILGEENKTLSISFRDSNYEEKETQVKELVGDDYFELLLAAKAVHDIGLLANILKGHAYLTYARVESYEEHKKDLQLLKCVLKKYNPEGYDKMFRVMEPGNYSAYIGSVNSKESGKVRRNEGKGRSREDLYKTIRKLLGQCPQDDQDVALILSKIESETFLPKQLTADNGVIPNQVYAKEMRKILKNAATYLPFLKEKDESQLTVAERIIQLFSFRIPYYIGPLGQEHLDEKGYNEWARRIAPGKVYPWNLEEKFDTKEAAEKFIERMVRHCSYLTQEKTLPKNSLLYEKFMVLNELNNLKIHGEKITVEQKQDLYNSLFIKGKRVSIAQIVRHCQLSGWVEKDDTDFLSGIDLTGFKASLSSVGKFRGVFGEGFFNDKQTAMAEQIIFWATVYGNDKSYLRERIEEEYLELLDEKQIKRILGFKFEGWGNLSREFLYLRGTSRQDSERSVIMALWETNDNLMELLSERYTYKEALQEQIKEKEKTLEEWTIEDLGGMYLSAPVKRMLWQTMKILLELKQTLGQTPDRVYVEMSREDGEKGERKDSRKKKLLDLYSALKGEEKAWRKEIEDRPEADFRIKKLYLYYRQMGKCMYTGETIELADLFNDNLYDIDHIYPRHFVKDDSIENNLILVKKQKNARKGDSYPIEREIQRARYQLWKMLADKNFISREKHQRLIRTTPFSEEEKAGFISRQLVETRQGTKAIIQILRQIFPDTMVVFSKAGEVSAFRHKFNLEKVRCLNDFHHAQDAYLNIVVGNAYYVKFTANPINFIREAEKNPQKDLYKYHMDKFFEYTVQRGDETAWIGTKDEKNSTIHIVKKVMARNTPLITKRCYTVHGGITRKDTIYNKETAKGQGYIAVKGSDPRLCDVTKYGGRTSINNMFYTLASYWVKGKSVLSLEAIPGYLGNAEHISDETLLRYLQDSLEKENPGKVISDLQIKYRCIRYKSLLKIDGFYYYIVGKTGKRIYLESAVPLILNNEDAIYLKKIEKAVSGQYFEEKREGQLIITEERNQKLYDILLEKLTDGIYRNKKASLQTILQEGREKFIRLSIPNQCQILMNLVEWFQLSCVTADMKEIGGSANSGKCLMGKKISDCSEMILITQSATGLQERRIDLLKL

SEQ ID NO: 1759 - protein, 1385 aa, unidentified
  REGION 1..1385: note = Description of Unknown: uncultivated organism with predicted taxonomy: Firmicutes
  REGION 1..1385: note = MG23-5 effector
MDKVKQAPYYIGLDMGTSSVGWAVTDEDYKILRGKGKDMWGVRLFDEAKTAAERRTFRVARRRRQREVARIGLLREYFADAIHEVDPGFFHRLEESKYYLEDRDDDNQQKFALFNDKNFTDKEYYAQYPTIFHLRKELIESSDPHDVRFVFLAILNLFKRRGHFLNKGLSADGGESSMAEAYETLVEEARNQEIILPEALDTQALEACLGEKGLSRSTIKENVMELLAVSKKDKAATELISMMCGLMGTLQKIYGSDLIDDEHKGMKISFRAMNYEEEAAEIVALIGEDNFALLEAVKEVHDIGLLAHILEGEQYLSMARVKQYDAHHEDLLQLKRVLKKYDKDEYDKMFRMMGQDNYSAYVGSVNYNENKVRRNGGKGKDVEAFYKNVKKVMDKLPEIAQNDPDVKDIRTKIEGEAFLQKQLTASNGIIPNQVHTRELKAILENASGYLPFLNEKDDSGLTVKERILELYSFQIPYYVGPLGQQHEGEKGYNVWAKRRPGEAKGRILPWNFEQKIDVNQAAEDFIKRMVRHCTYLKGENTLPKQSLLYEKFMVLNELNNLRIRGEKPSVEVKQEIYETLFMTGKRVTRKQLLKYLVANGLLNEDDGDMVSGIDQDFKASLSSLNKFKGVLGDAAVYDSNRAMIEQIIFWATIYGDDKHFLKNRIKEHYGDSLDNQQIKRICGMKFNGWGNLSKTFLELQGASKEDGVYRSIIQSLWETNDNLMQLLSERYTYSEELEKMIGDAEKPLSEWKIEDLDDMYLSPSVKRMVWQTLKILNEIVEVRGYAPDKIFVEMARDSAQTRARNKGKRTQSRKEFLLNVYKEDKEWRKEIQSCEEIKFRKKKIYLYYLQHGKSLYSGKTIDFDTLLSDNDAYDIDHIYPRHFVKDDSLENNLVLCLKSENAKKGDQYPLRKTFDSAVLSSQEGVWKSLLKQKVITKEKYDRLVRTADFTIDELAGFINRQLVETRQGTKAITQILKRVFKNEAVEIIFTKAELISDFRRIFDLPKVRCVNSTHHAHDAYLNIVVGNVYNAKFTKHPRHFIEECQRKGSYDYNMYRMFDYDVKCGSKIVWCGSKITTCGKGTISTVKKQLQKRSVLLTKKSFMKHGKLFAANNTGKESIKSDAYYSDKTTDIRLLDVQKYGGKSDISNTAFALVEFYSKGKPVRILERIPLYLNITNNNDENLNNYISKKIKKDLKNVEISEMSIRMYPIRQYVKLKINGYFYYLSGSDDDTRVSLRDAVTFYLSDEEMAYVKYIEKAVETQNFYRQKNKKAVLSEAGNIKLYEVLIEKLQQGIFLKKKISIVPVLLEGKEKFKALPLEKQCYIIMQIFAWITSNQQGVNLKDIGGASNAGKLKMSKNISDLSEAILIEQSATGLYERRIDLLTV

SEQ ID NO: 1760 - protein, 1382 aa, unidentified
  REGION 1..1382: note = Description of Unknown: uncultivated organism with predicted taxonomy: Clostridiales
  REGION 1..1382: note = MG23-6 effector
MDKVKQAPYYIGLDMGTSSVGWAVTDEDYKILRGKGKDMWGVRLFDEAKTAAERRTFRVARRRRQREVARIGLLREYFADAIHEVDPGFFHRLEESKYYLEDRDDDNQQKFALFNDKNFTDKEYYAQYPTIFHLRKELIESSDPHDVRFVFLAILNLFKRRGHFLNKGLSADGGESSMAEAYETLVEEARNQEIILPEALDTQALEACLGEKGLSRSTIKENVMELLVVSKKDKAATELISMMCGLKGTLQKIYGSDLIDDEHKGMKISFRDMNYEEEAAEIVALIGEDNFALLEAVKEVHDIGLLAHILEGEQYLSMARVKQYDAHHEDLLQLKRVLKKYDKDEYDKMFRMMGQDNYSAYVGSVNYNENKVRRNGGKGKDVEAFYKNVKKVMDKLPEIAQNDPDVKDIRTKIEGEAFLQKQLTASNGIIPNQVHTRELKAILEKASGYLPFLNEKDDSGLTVKERILELYSFQIPYYVGPLGQQHAGEKGYNVWAKRRPGEAKGRILPWNFEQKIDVNQAAEDFIKRMVRHCTYLKGENTLPKQSLLYEKFMVLNELNNLRIRGEKPSVEVKQDIYETLFMTGKRVTRKQLLKYLAANGLLNEDDGDMVSGIDQDFKASLSSLNKFKGVLGDAAVYDSNRAMIEQIIFWATIYGDDKHFLKNRIKEHYGDSLDDQQIKRICGMKFNGWGNLSKTFLELQGASKEDGVYRSIIQSLWETNDNLMQLMSERYTYTEKLEKMVGDAEKPLSEWKIEDLDDLYLSPSVKRMVWQTLKILNEIVEVRGYAPDKIFVEMARDSAQTRARNKGKRTQSRKDFLINAYKEDKEWRKEIESRDEAEFRIKKLYLYYVQMGRCMYSGEAIDLHALMAGNEQYDIDHIYPRHFVKDDSLENNLVLVKKTINAHKSDTFPLEAELRKKQYAFWRSLLDRGLITQNKFNRLTRATGFSNEELAGFINRQLVETRQGTKAITQILKEAFKNDDTRIVFTKAEVTADFRHKYDLPKARSVNNLHHAHDAYLNIVAGNVYDAKFTSHPINFIKECRNKGVFNYNMAKVFDYNVKRGNRYVWIAQNDGMDMPLTIERVKNQLARNTILMTRRSYMAHGGISNKATIYGKDTAKPGSYLPVKSSDSRLSDVTKYGGITSVLNTAYALVEYKVKGKMVRSLESVPLYVDATGKDDEKLLNYLRESLQFENKKNLVENVSVRLYPVRQRSLLKLDGYYYHLGGGAGSMFYLIDAVPMYLPQKVVMYIKKIEKAMETQRYDEINSKNEVIITKENNAETYDLLLHKLTKGIYSHRKASIINILVNGEEKFDSLNLEAQCSVILKIFAWINSSQQTVDLKDIGGSANSGFLKTSRKLSNSTEAILIEQSATGLYERRIDLLTV

SEQ ID NO: 1761 - protein, 1371 aa, unidentified; identical to SEQ ID NO: 1758
  REGION 1..1371: note = Description of Unknown: uncultivated organism with predicted taxonomy: Clostridiales
  REGION 1..1371: note = MG23-7 effector

SEQ ID NO: 1762 - protein, 1371 aa, unidentified
  REGION 1..1371: note = Description of Unknown: uncultivated organism with predicted taxonomy: Clostridiales
  REGION 1..1371: note = MG23-8 effector
MEERKMYWGLDLGTNSVGWAVTDQNYQLMRAKGKDLWGARLFDRADTSAERRGYRVSRRRRQREVARCGVLKEYFYEEISKMDAGFFVRLEESKFWKEDRSEGNQQKYALFADANFTDKDYFEKYPTIFHLRKELLETSEAHDVRLVYLALLNMFKHRGHFLNTALSAEETETDMNAAYQELVDTAGYFDIAFDPQLDAREIENILGEKGISRSRILEKLSTYMGISKSDKAAYELLKLVCGNAGKLVNIYGSEILGEENKTLSISFRDSNYEEKETQVKELVGDDYFELLLAAKAVHDIGLLANILKGHAYLTYARVESYEEHKKDLQLLKCVLKKYNQEGYDKMFRVMEPGNYSAYIGSVNSKESGKVRRNEGKGRSREDLYKTIRKLLGQCPQDDQDVALILSKIESETFLPKQLTADNGVIPNQVYVKEMRKILKNAATYLPFLKEKDESQLTVAERIIQLFSFRIPYYIGPLGQEHLDEKGYNEWARRIAPGKVYPWNLEEKFDTKEAAEKFIERMVRHCSYLTQEKTLPKNSLLYEKFMVLNELNNLKIHGEKITVEQKQDLYNSLFIKGKRVSIAQIVRHCQLSGWVEKDDTDFLSGIDLTGFKASLSSVGKFRGVFGEGFFNDKQTAMAEQIIFWATVYGNDKSYLRERIEEEYSELLDEKQIKRILGFKFEGWGNLSREFLYLRGTSRQDSERSVIMALWETNDNLMELLSERYTYKEALQEQIKEKEKTLEEWTIEDLGGMYLSAPVKRMLWQTMKILLELKQTLGQTPDRVYVEMPREDGEKGERKDSRKKKLLDLYSALKGEEKAWRKEIEDRPEADFRIKKLYLYYRQMGKCMYTGETIELADLFNDNLYDIDHIYPRHFVKDDSIENNLILVKKQKNARKGDSYPIEREIQRARYQLWKMLADKNFISREKHQRLIRTTPFSEEEKAGFISRQLVETRQGTKAITQILRQIFPDTMVVFSKAGEVSAFRHKFNLEKVRCLNDFHHAQDAYLNIVVGNAYYVKFTANPINFIREAEKNPQKDLYKYHMDKFFEYTVQRGDETAWIGTKDEKNSTIHIVKKVMARNTPLITKRCYTVHGGITRKDTIYNKETAKGQGYIAVKGSDPRLCDVTKYGGRTSINNMFYTLASYRVKGKSVLSLEAIPGYLGNAENISDETLLRYLQDSLEKENPGKVISDLQIKYRCIRYKSLLKIDGFYYYIVGKTGKQIYLESAVPLILNNEDAIYLKKIEKAVSGQYFEEKREGQLIITEECNQKLYDILLEKLTDGIYRNKKASLQTILQEGREKFIRLSIPNQCQILMNLVGWFQLSCVTADMKEIGGSVNSGKCLMGKKISDCSEMILITQSATGLQERRIDLLKL

SEQ ID NO: 1763 - protein, 1371 aa, unidentified
  REGION 1..1371: note = Description of Unknown: uncultivated organism with predicted taxonomy: Clostridiales
  REGION 1..1371: note = MG23-9 effector
MEERKMYWGLDLGTNSVGWAVTDQNYQLMRAKGKDLWGARLFDRADTSAERRGYRVSRRRRQREVARCGVLKEYFYEEISKMDAGFFVRLEESKFWKEDRSEGNQQKYALFADANFTDKDYFEKYPTIFHLRKELLETSEAHDVRLVYLALLNMFKHRGHFLNTALSAEETETDMNAAYQELVDTAGYFDIAFDPQLDAREIENILGEKGISRSRILEKLSTYMGISKSDKAAYELLKLVCGNAGKLVNIYGSEILGEENKTLSISFRDSNYEEKETQVKELVGDDYFELLLAAKAVHDIGLLANILKGHAYLTYARVESYEEHKKDLQLLKCVLKKYNPEGYDKMFRVMEPGNYSAYIGSVNSKESGKVRRNEGKGRSREDLYKTIRKLLGQCPQDDQDVALILSKIESETFLPKQLTADNGVIPNQVYAKEMRKILKNAATYLPFLKEKDEFQLTVAERIIQLFSFRIPYYIGPLGQEHLDEKGYNEWARRIAPGKVYPWNLEEKFDTKEAAEKFIERMVRHCSYLTQEKTLPKNSLLYEKFMVLNELNNLKIHGEKITVEQKQDLYNSLFIKGKRVSIAQIVRHCQLSGWVEKDDTDFLSGIDLTGFKASLSSVGKFRGVFGEGFFNDKQTAMAEQIIFWATVYGNDKSYLRERIEEEYSELLDEKQIKRILGFKFEGWGNLSREFLYLRGTSRQDSERSVIMALWETNDNLMELLSERYTYKEALQEQIKEKEKTLEEWTIEDLGGMYLSAPVKRMLWQTMKILLELKQTLGQTPDRVYVEMSREDGEKGERKDSRKKKLLDLYSALKGEEKAWRKEIEDRPEADFRIKKLYLYYRQMGKCMYTGETIELADLFNDNLYDIDHIYPRHFVKDDSIENNLILVKKQKNARKGDSYPIEREIQRARYQLWKMLADKNFISREKHQRLIRTTPFSEEEKAGFISRQLVETRQGTKAITQILRQIFPDTMVVFSKAGEVSAFRHKFNLEKVRCLNDFHHAQDAYLNIVVGNAYYVKFTANPINFIREAEKNPQKDLYKYHMDKFFEYTVQRGDETAWIGTKDEKNSTIHIVKKVMARNTPLITKRCYTVHGGITRKDTIYNKETAKGQGYIAVKGSDPRLCDVTKYGGRTSINNMFYTLASYRVKGKSVLSLEAIPGYLGNAENISDETLLRYLQDSLEKENPGKVISDLQIKYRCIRYKSLLKIDGFYYYIVGKTGKRICLESAVPLILNNEDAIYLKKIEKAVSGQYFEEKREGQLIITEECNQKLYDILLEKLTDGIYRNKKASLQTILQEGREKFIRLSIPNQCQILMNLVGWFQLSCVTADMKEIGGSVNSGKCLMGKKISDCSEMILITQSATGLQERCIDLLKL

SEQ ID NO: 1764 - protein, 1389 aa, unidentified
  REGION 1..1389: note = Description of Unknown: uncultivated organism with predicted taxonomy: Clostridiales
  REGION 1..1389: note = MG23-10 effector
MEINLENNAEEIIMGKKMYIGIDMGTSSVGMAVTDENYTLYRVKGKDFWTSRLFKEANTAAERRTNRVARRRRQRETARMGILRELFSEEINKVDEGFFARLDESKYHIEDRVVKQKYALFADKGYTDKEYYKEYPTIFHLRNELLHPQKNSYDVRLVYLAIANMFKHRGNFLNETLDIDKITANAVDVYSQLVEELDLYCIQMPVSIDIGKLMNIIGENGISRSKRLENASKYLGITKKDKQSYEILKLICGLKGILYNIYGENVIDEENKKFSLSFTGSIYEDSEAQAKDILGDEYFELIEIIKELHDICVLSGIIKGHKFLSEARVELYEEHKKDLDMLQQVLKKYDKNAYDEMFRVMKEGNYSAYVGSVNARGKNKKIRRNVGEGKKGKNGRSQETFYKYVKTTLKNFPDDDENIKNILFKIENETFMPKQLTASNGIIPNQLHAAEMKAILTNAEKYLPFLLDKDESGLTVSQRILELFKFHIPYYVGPLGAAGKNVWAKRRKGEEKGRIYPWNFEKKIDTQEAAEEFIKRMVRHCSYIKGEHTLPKQSLLYEKFMVLNELNNLKINGTKPDVFVKRDIYENLFKTGKRVTLDKLKSYLYNNSFIDSKEVMITGIDGGFNSSLTSVGKFIGILGEDLFTDSNQAMVEQIIFWGTIYGSDKKFLKNRIEKEYKDRLTPKQIKRILGFKFNGWGKLSKLFLELKGSCECGECSIIQALWQTNHNLMELMSDQYDFKTNLMELSEETIKPLSEWTIDNLEDYYMSAPVKRMVWQTVKMLNETCELTGRLPDKIFVEMPREHESGNERKASRKKKMLDLYKAIKSEQKQWAEHMIAEIDKSDEADFRIKKLYLYYIQQGKCMYSGDTIDLDLLLKNNNIYDIDHIYPRHFIKDDSIDNNLVLVKKEINNHKSDKYPLESDIREDMSGFWKYLCEKKFITKEKYNRLMRTEKFSAEEKAAFVNRQLVETGQGTKVITQILKQAFPDTQVVFVKARMVSDFRHEFGINKVRELNDTHHAKDAYLNIVVGNTYYTKFTNNPINFMKNAEKNPEDVQYKYNMDKIFRYNVIRNGETAWIADNGVTKQHVIKTINRNTVTITRKTEEVHGALSNKVTVWSSKLAKKNPDAYMPVKTTDEKACDVTKYGGITAIANSGYTLVEYNINGKMIRSIEALPVYLGRKNMLTEDKIKEYLHEKIRKEYKNKTVTDLKVCILFIPQKSKVCVDGFNYYLGGVTGNSIYLSNAEPLYLSKEDEEYLRKIIKAVGKGYYEETDENGQIIITGERNMKFFNTLGSKLNARPYNNNRWNIYKIMENKEEIFAGLSIEKQCYVINQIISWINSKTQNVDLSDIKGSSHSGTMPLNKKISECSQFELIYQSVTGMYEKRTDLLKL

SEQ ID NO: 1765 - protein, 1368 aa, unidentified
  REGION 1..1368: note = Description of Unknown: uncultivated organism with predicted taxonomy: Butyrivibrio sp. CAG:318
  REGION 1..1368: note = MG23-11 effector
MDKKMYVGIDMGTNSVGMAVTDEEYNLYRVKGKDLWCSRLFTEADTAAERRTNRISRRRRQREVARQGVLRKLFADEINKVDEGFFARLDESKYHLEDRDSEQKYTLFTDTGYTDKDYFKDYPTIFHLRNELLHPVKDSYDVRLVYLAIANMFKHRGNFLNESLDADKITSSADEAYRSLVETAMMYSIEFPENINVKKFIDIIGENGVSRSKHLENVCEYLEITKKDKQAYEILKLICGMSGVLINIYGEDVIDEENKKFSICFRDSNYEEKEGEALELLGDEYFELLETIKEIHDIGMLAGIIKGHKYLSEARVDLYEQHKKDLDMLQHVLKKYDMKAYDEMFRVMKAGNYSAYVGSVNAHSKKIRRNGGDGRTREEFYKNVKAVLKKFPEDDEEIKTILSEIDSETFMPKQLTASNGVIPNQLHVSELKAILTNAEKYLPFLLDKDESGLTVSERIVELFRFHIPYYVGPIGAQGENVWAKRRPGEENGKVYPWNFEQKIDTQSAAKEFINRMVRHCTYLSGERTLPKQSFLYEKFMVLNELNNLRIDGKKPSVQVKQGIYEELFKTGKRVTLNQLIKYLYNKSIIASKEDVVIEGIDGGFNASLTSVGKFRGVLGDELFTDANQAMAEEIIFWGTVYGNDKKFLKDEIESKYGTVLSKDQIKRILGFKFNGWGNLSKTFLELQGSCECGDCSLIQALWETNHNLMELLSEQYGFKKELDALASNVEKPLTEWTIDDLDNKYLSAPVKRMVWQTIKMLREACELTNKEPDRVFVEMPREHGKENDRKASRKKKLLDLYSTLKREDKTWAELKIREIEGRTEADFRIKKLYLYYMQQGKCMYSGEKIELNDLFNNNLYDIDHIYPRHFIKDDSLENNLVLVKKEINNHKSDNYPLESDIRKNMNKFWKSLRDKNFISKEKYSRLIRTEEFTDEEKAAFISRQLVETRQGTKAITQVLKQAFPNTQIVFVKAGIVSDFRKKFDINKVRALNDTHHAKDAYLNIVVGNTYYTKFTNNPMNFIKDARKNPKNDFYRYNMDKIFDYNVIRNGEEAWIADNGKTKQHVLRIMKKNSVTITVKTEEYHGALSNKVTVWSKEKAKGNPDAYMPVKTSDTKAQDVTKYGGITSIANSGYTLVEYKVKGKKVRSLEALPAYLGRSNALTNEDIMQYISAALQKEYAGKEISDLSVRVPFVPQKSKVRVDGFEYYLGGKTGKSVYLSNAMPLYLSGNDEEYLRKIMKAIEIDNYEEIDKDSNAIITEEKNVALFDVLCVKLNSEPYINNRWNICKTLEGKEEIFKNLDIKKQCYVIGQIISWINSAMQNVNLKDVCGSEHAGTQTLNKKISESKECILIHQSVTGMYERKIDLLSI

SEQ ID NO: 1766 - protein, 1109 aa, unidentified
  REGION 1..1109: note = Description of Unknown: uncultivated organism with predicted taxonomy: Butyrivibrio sp. CAG:318
  REGION 1..1109: note = MG23-12 effector
LCLERSERNDKNYEEKEGEALELLGDEYFELLETIKEIHDIGMLAGIIKGHKYLSEARVDLYKQHKKDLDMLQHVLKKYDMKAYDEMFRVMKAGNYSAYVGSVNAHSKKIRRNGGDGRTREDFYKNVKAVLKKFPEDDEEIKTILSEIDSETFMPKQLTASNGVIPNQLHVSELKAILTNAEKYLPFLLDKDESGLTVSERIVELFRFHIPYYVGPIGAQGENVWAKRRPGEENGKVYPWNFEQKIDTQSAAKEFINRMVRHCTYLSGERTLPKQSFLYEKFMVLNELNNLRIDGKKPSVQVKQGIYEELFKTGKRVTLNQLIKYLYNKSIIASKEDVVIEGIDGGFNASLTSVGKFRGVLGDELFTDANQAMAEEIIFWGTVYGNDKKFLKDEIESKYGTVLSKDQIKRILGFKFNGWGNLSKTFLELQGSCECGDCSLIQALWETNHNLMELLSEQYGFKKELDALASNVEKPLTEWTIDDLDNKYLSAPVKRMVWQTIKMLREACELTNKEPDRVFVEMPREHGKENDRKASRKKKLLDLYSALKRENKTWAELKIREIEGKTEADFRIKKLYLYYMQQGKCMYSGEKIELNDLFNNNLYDIDHIYPRHFIKDDSLENNLVLVKKQINNHKSDNYPLENNIRKNMNEFWKTLREKNFISKEKYSRLIRTEEFTDEEKAAFISRQLVETRQGTKAITQVLKQAFPNTQIVFVKAGIVSDFRKKFDINKVRALNDTHHAKDAYLNIVVGNTYYTKFTNNPMNFIKDARKNPKNDFYRYNMDKIFDYNVIRNGEEAWIADNGKTKQHVLRIMKKNSVIITVKTEEANGKLSDINIVGKRYIKNADAYMPIKTSIAKMEDVTKYGGYGSISSAGYALVEYKVKGKKVRSLEALPVYLGRSNALTNEDIMQYISAAFQKEYAGKEISDLSVRVPFIPMESKVEIDGFEYYLGGKSTNQFYLKNAMPLYLPDNDEEYFRKIMKAIEIDDYKEVGKNGKAVITKENNMILFDTLSAKLKSEPYIHNRCNIYKILEGKEKIFKDLDIQKQCYVIVKIIDWIKSKTQGVDLTDIQGKKQSGTMKINKRISECRECILIHQSVTGMYERRIDLLSI

SEQ ID NO: 1767 - protein, 1389 aa, unidentified
  REGION 1..1389: note = Description of Unknown: uncultivated organism with predicted taxonomy: Clostridium sp. AF36-4
  REGION 1..1389: note = MG23-13 effector
MEINLENNAEEIIMGKKMYIGIDMGTSSVGMAVTDENYNLYRVKGKDFWTSRLFKEANTAVERRTNRVSRRRRQRETARMGILRELFSEEINKVDEGFFARLDESKYHIEDRDVKQKYALFADKGYTDKEYYKEYPTIFHLRNELLHPQKDSYDVRLVYLAIANMFKHRGNFLNETLDIDKITASADDVYSQLIEELDLYCIQMPVNINIGELINIIGENGISRSKRLENASKYLGITKKDKQSYEILKLICGLKGILYNIYGENVIDEENKKFSISFTDSNYEDEETQAKDILGDEYFELIEIIKELHDIGVLSGIIKGHKFLSEARVELYEEHKKDLDMLQQVLKKYDKNAYDEMFRVMKEGNYSAYVGSVNARGKNKKIRRNVGEGKKGKNGRSQEAFYKYVKTTLKNFPDDDENIKNILFKIENETFMPKQLTASNGIIPNQLHAAEMKAILTNAEKYLPFLLDKDESGLTVSQRILELFKFHIPYYVGPLGAAGKNVWAKRRKGEEKGRIYPWNFEKKIDTQEAAEEFIKRMVRHCSYIKGEHTLPKQSLLYEKFMVLNELNNLKINGTKPDVFVKQDIYENLFKTGKRVTLDKLKSYLYNNSFIDSKEVMITGIDGGFNSSLTSVGKFIGILGEDLFTDSNQAMVEQIIFWGTIYGSDKKFLKNRIEKEYKDRLTPKQIKRILGFKFNGWGKLSKRFLELKGSCECGECSIIQALWQTNHNLMELMSDQYDFKTNLMELSEETIKPLSEWTIDNLEDYYMSAPVKRMVWQTVKMLNETCELTGRVPDKIFVEMPREHESGNERKASRKKKMLDLYKAIKSEQKQWAEQMIAEIDKRDEADFRIKKLYLYYIQQGKCMYSGDTIDLDLLLKNNNIYDIDHIYPRHFIKDDSIDNNLVLVKKEINNHKSDKYPLESDIREDMSGFWKYLCEKKFITKEKYNRLMRTEKFSAEEKAAFVNRQLVETGQGTKVITQILKQAFPDTQVVFVKARMVSDFRHEFGINKVRELNDTHHAKDAYLNIVVGNTYNTKFTNNPINFMKNAEKNPEDVQYKYNMDKIFRYNVIRNGETAWIADNGVTKQHVLKTINRNTVTITRKTEEVHGALSNKVTVWSSKSAKKNPDAYMPVKTTDEKACDVTKYGGITAIANSGYTLVEYNINGKMIRSIEALPVYLGRKNMLTEDKIKEYLHEKIRKEYKNKTVTDLKVCILFIPQKSKVCVDGFNYYLGGVTGNSIYLSNAEPLYLSKEDEEYLRKIIKAVGKGYYEETDKNGQIIITGERNMEFFNTLGSKLNARPYNNNRWNIYKIMENKEEIFAGLSIEKQCYVINQIISWINSKTQNVDLSDIKGSSHSGTMTLNKKISECSQFELIYQSVTGMYEKRTDLLKL

SEQ ID NO: 1768 - protein, 1368 aa, unidentified
  REGION 1..1368: note = Description of Unknown: uncultivated organism with predicted taxonomy: Butyrivibrio sp. CAG:318
  REGION 1..1368: note = MG23-14 effector
MDKKMYVGIDMGTNSVGMAVTDEEYNLYRVKGKDLWCSRLFTEADTAAERRTNRISRRRRQREVARMGVLRELFAEEINKVDEGFFARLDESKYHLEDRDSEQKYTLFTDTGYTDKDYFKDYPTIFHLRNELLHPVKDSYDVRLVYLAIANMFKHRGNFLNESLDADKITSSADETYQQLIEMAMMYSIEFPKNINVEKFIDIIGENGVSRSKHLENVCEYLGITKKDKPAYEILNLVCGLRGVLINIYGNEVIDEENKKFSICFRDSNYEEKEGEALELLGDEYFELLETIKEIHDIGMLAGIIKGHKYISEARVDLYEQHKKDLDMLQHVLKKYDMKAYDEMFRVMKAGNYSAYVGSVNAHSKKIRRNGGDGRTREEFYKNVKAVLKKFPEDDEEIKTILSEIDSETFMPKQLTASNGVIPNQLHASELKAILTNAEKYLPFLLGKDESGLTVSERIVELFRFHIPYYVGPIGAQGENVWAKRRPGEENGKVYPWNFEQKIDTQSAAKEFINRMVRHCTYLSGERTLPKQSFLYEKFMVLNELNNLKIDGKKPSVQVKQGIYEELFKTGKRVTLKQLKKYLYNNSIIASEENVVIEGIDGGFNSSLTSVGKFRGVLGDELFTDANQAMAEEIIFWGTVYGNDKKFLKDEIESKYGTVLSKDQIKRILGFKFNGWGNLSKTCLELQGSCECGDCSLIQALWETNHNLMELLSEQYGFKKELDALACNVEKPLTEWTIDDLDNKYLSAPVKRMVWQTIKMLREVCELTNKEPDRVFVEMPREHGKENDRKTSRKKKILDLYSALKREKKEWAELKIREIEGRTEADFRIKKLYLYYLQQGRCMYSGEKIELNDLFNNNLYDIDHIYPRHFIKDDSLENNLVLVKKEINNHKSDNYPLESDIRKNMNEFWKSLREKNFISKEKYSRLIRTEEFTDEEKAAFISRQLVETRQGTKAITQVLKQAFPNTQIVFVKAGIVSDFRKKFDINKVRALNDTHHAKDAYLNIVVGNTYYTKFTNNPMNFIKDARKNPKNDFYRYNMDKIFDYNVIRNGEEAWIADNGKTKQHVLRIMKKNSVTITVKTEEYHGALSNKVTVWSKEKAKGNPDAYMPVKTSDTKAQDVTKYGGITSIANSGYTLIEYKVKGKKVRSLEALPVYLGRSNTLTDEDIMQYISNVLQKEYAGKEISDLSVRVPFVPQKSKVRVDGFEYYLGGKTGNYICLNNAMPLYLSGNDEEYLRKIMKAIEIDNYEEIDKDSNAIITEEKNAALFNTLSVKLNSEPYINNQWNIYKILEGKEEIFKDLDIQKQCYVIVKIIDWIKSKTQGVDLTDIQGKNQSGTMKVNKRISECKECILIHQSVTGMYERRIDLLSI

SEQ ID NO: 1769 - protein, 1366 aa, unidentified
  REGION 1..1366: note = Description of Unknown: uncultivated organism with predicted taxonomy: Butyrivibrio sp. CAG:318
  REGION 1..1366: note = MG23-15 effector
MDKKMYVGIDMGTNSVGMAVTDEEYNLYRVKGKDLWCSRLFTEADTAAERRTNRISRRRRQREVARQGVLRKLFADEINKVDEGFFARLDESKYHLEDRDSEQKYTLFTDTGYTDKDYFKDYPTIFHLRNELLHPVKESYDVRLVYLAIANMFKHRGNFLNESLDADKITSSADEAYRSLVETAMMYSIEFPENINVKKFIDIIGENGVSRSKHLENVCEYLEITKKDKQAYEILKLICGMSGVLINIYGNEVIDEENKKFSICFRDSNYEEKEGEALELLGDEYFELLEAIKEIHDIGMLAGIIKGHKYLSEARVDLYEQHKKDLDMLQHVLKKYDMKAYDEMFRVMKAGNYSAYVGSVNAHSKKIRRNGGDGRTQEEFYKNVKAVLKKIPEDDEEIKTILSEIDSETFMPKQLTASNGVIPNQLHVSELKAILTNAEKYLPFLLDKDESGLTVSERIVELFRFHIPYYVGPIGAQGENVWAKRRPGEENGKVYPWNFEQKIDTQSAAKEFINRMVRHCTYLSGERTLPKQSLLYEKFMVLNELNNLKIAGKKPSVQVKQDIYEKLFKPGKKVTLKQLQEYLCNNSIIASKEDIEGIDGGFNASLTSVGKFRGVLGDELFTDANQAMAEEIIFWGTVYGNDKKFLKDEIESKYGTVLSKDQIKRILGFKFNGWGNLSKTFLELQGSCECGNCSLIQALWETNHNLMELLSEQYGFKKELDALACNVEKPLTEWTIDDLDNKYLSAPVKRMVWQTIKMLREVCELTNKEPDRVFVEMPREHGKENDRKASRKKKLLDLYSALKRENKTWAELKIREIEGKTEADFRIKKLYLYYMQQGKCMYSGEKIELNDLFNNNLYDIDHIYPRHFIKDDSLENNLVLVKKEINNHKSDNYPLESDIRKNMNKFWKSLREQNFISEEKYSRLIRTEEFTDEEKAAFISRQLVETRQGTKAITQVLKQAFPNTQIVFVKAGIVSDFRKKFDINKVRALNDTHHAKDAYLNIVVGNTYYTKFTNNPMNFIKDARKNPKNDFYRYNMDKIFDYNVIRNGEEAWIADNGKTKQHVLRIMKKNSVTITVKTEEYHGALSNKVTVWSKEKAKGNPDVYMPVKTSDTKAQDVTKYGGITSIANSGYTLVEYKVKGKKVRSLEALPVYLGRSNALTNEDIMQYISAALQKEYAGKEISDLSVRVPFVPQKSKVRVDGFEYYLGGKTEKNIYLNNTMPLYLSWNDEEYLRKIMKAIDIDSYEEIDKDGNAIITEEKNVALFGALSVKLNSEPYINNRWNIYKILDGKEEIFKNLDIKKQCYVISQIIAWINSSTPNVNLKDVCGSEHSGMQRLNKKISECKECILIHQSVTGMYERRIDLLSI

SEQ ID NO: 1770 - protein, 1389 aa, unidentified; identical to SEQ ID NO: 1767
  REGION 1..1389: note = Description of Unknown: uncultivated organism with predicted taxonomy: Clostridium sp. AF36-4
  REGION 1..1389: note = MG23-16 effector

SEQ ID NO: 1771 - protein, 1366 aa, unidentified
  REGION 1..1366: note = Description of Unknown: uncultivated organism with predicted taxonomy: Butyrivibrio sp. CAG:318
  REGION 1..1366: note = MG23-17 effector
MDKKMYVGIDMGTNSVGMAVTDEEYNLYRVKGKDFWCSRLFKKANTAAERRTNRISRHRRQREVARQGVLRELFADEINKVDEGFFARLDESKYHLEDRDSEQKYTLFTDTGYTDKDYFKDYPTIFHLRNELLHPVKDSYDVRLVYLAIANMFKHRGNFLNESLDADKITSSADEAYRRLVETAMMYSIEFPENINVKKFIDIIGENGVSRSKHLGNVCEYLGITKKDKPAYEILNLVCGLRGVLINIYGNEVIDEENKKFSICFRDSNYEEKEGEALELLGDEYFELLETIKEIHDIGMLAGIIKGHKYLSEARVDLYKQHKKDLDMLQHVLKKYDMKAYDEMFRVMKAGNYSAYVGSVNAHSKKIRRNGGDGRTREDFYKNVKAVLKKFPEDDEEIKTILSEIDSETFMPKQLTASNGVIPNQLHVSELKAILTNAEKYLPFLLDKDESGLTVSERIVELFRFHIPYYVGPIGAQGENVWAKRRPGEENGKVYPWNFEQKIDTQSAAKEFINRMVRHCTYLSGERTLPKQSFLYEKFMVLNELNNLRIDGKKPSVQVKQGIYEELFKTGKRVTLNQLIKYLYNKSIIASKEDVVIEGIDGGFNASLTSVGKFRGVLGDELFTDANQAMAEEIIFWGTVYGNDKKFLKDEIESKYGTVLSRDQIKRILGFKFNGWGNLSKTFLELQGSCECGDCSLIQALWETNHNLMELLSEQYGFKKELDALASNVEKPLTEWTIDDLDNKYLSAPVKRMVWQTIKMLREACELTNKEPDRVFVEMPREHGKENDRKASRKKKLLDLYSALKRENKTWAELKIREIEGKTEADFRIKKLYLYYMQQGKCMYSGEKIELNDLFNNNLYDIDHIYPRHFIKDDSLENNLVLVKKQINNHKSDNYPLESNIRKNMNEFWKTLREKNFISKEKYSRLIRTEEFTDEEKAAFISRQLVETRQGTKAITQVLKQAFPNTQIVFVKAGIVSDFRKKFDINKVRALNDTHHAKDAYLNIVVGNTYYTKFTNNPMNFIKDARKNPKNDFYRYNMDKIFDYNVIRNGEEAWIADNGKTKQHVLRIMKKNSVIITVKTEEANGKLSDINIVGKRYIKNADAYMPIKTSIAKMEDVTKYGGYGSISSAGYALVEYKVKGKKVRSLEALPVYLGRSNALTNEDIMQYISAAFQKEYAGKEISDLSVRVPFIPMESKVEIDGFEYYLGGKSTNQFYLKNAMPLYLPDNDEEYFRKIMKAIEIDDYKEVGKNGKAVITKENNMILFDTLSAKLKSEPYIHNRCNIYKILEGKEKIFKDLDIQKQCYVIVKIIDWIKSKTQGVDLTDIQGKKQSGTMKINKRISECRECILIHQSVTGMYERRIDLLSI

SEQ ID NO: 1772 - protein, 1389 aa, unidentified
  REGION 1..1389: note = Description of Unknown: uncultivated organism with predicted taxonomy: Clostridiales
  REGION 1..1389: note = MG23-18 effector
MEINLENNAEEIIMGKKMYIGIDMGTSSVGMAVTDENYNLYRVKGKDFWTSRLFKEANTAAERRTNRVSRRRRQRETARMGILRELFSEEINKVDEGFFARLDESKYHIEDRDVKQKYALFADKGYTDKEYYQDYPTIFHLRNELLHPQKDSYDVRLVYLAIANMFKHRGNFLNETLDIDKITASADDVYSQLIEELDLYCIQMPVNINIGELINIIGENGISRSKRLENASKYLGISKKDKQSYEILKLICGLKGILYNIYGENVIDEENKKFSISFTDSNYEDEETQAKDILGDEYFELIEIIKELHDIGVLSGIIKGHKFLSEARVELYEEHKKDLDMLQQVLKKYDKNAYDEMFRVMKEGNYSAYVGSVNARGKNKKIRRNVGEGKKGKNGRSQEAFYKYVKTTLKNFPDDDENIKNILFKIENETFMPKQLTASNGIIPNQLHAAEMKAILTNAEKYLPFLLDKDVSGLTVSQRILELFKFHIPYYVGPLGAAGKNVWAKRRKGEEKGRIYPWNFEKKIDTQEAAEEFIKRMVRHCSYIKGEHTLPKQSLLYEKFMVLNELNNLKINGTKPDVFVKQDIYENLFKTGKRVTLDKLKSYLYNNSFIDSKEVMITGIDGGFNSSLTSVGKFIGILGEDLFTDSNQAMVEQIIFWGTIYGSDKKFLKNRIEKEYKDRLTPKQIKRILGFKFNGWGKLSKRFLELKGSCECGECSIIQALWQTNHNLMELMSDQYDFKTNLMELSEETIKPLSEWTIDNLEDYYMSAPVKRMVWQTVKMLNEICELTGRIPDKIFVEMPREHESGNERKASRKKKLLDLYKAVKSEQKQWAEHKITEIDKRDEADFRIKKLYLYYIQHGKCMYSGDTIDLDLLLKNNNIYDIDHIYPRHFIKDDSIDNNLVLVKKEINNHKSDKYPLESDIREDMSGFWKYLCEKKFITKEKYNRLMRTEKFSAEEKAAFVNRQLVETGQGTKVITQILKQAFPDTQVVFVKARMVSDFRHEFGINKVRELNDTHHAKDAYLNIVVGNTYNTKFTNNPINFMKNAEKNPEDVQYKYNMDKIFRYNVIRNGETAWIADNGTTKQHVIKTINRNTVTITRKTEEVHGALSNKVTVWSSKSAEKNPDAYMPVKTTDEKAGDVTKYGGITAIANSGYTLVEYNINGKMIRSIEALPVYLGRKNMLTEDKIKEYLHEKIRKEYKNKTVTDLKVCILFIPQKSKVCVDGFNYYLGGVTGNSIYLSNAEPLYLSKEDEEYLRKIIKAVGKGYYEETDKNGQIIITGERNMKIFNTLSSKLNNRPYNNNRWNIYKIMENKEEIFAGLSIEKQCYVINQIISWINSKTQNVDLSDIKGSSHSGTMTLNKKISECSQFELIYQSVTGMYEKRTDLLKL

SEQ ID NO: 1773 - protein, 1368 aa, unidentified; identical to SEQ ID NO: 1768
  REGION 1..1368: note = Description of Unknown: uncultivated organism with predicted taxonomy: Butyrivibrio sp. CAG:318
  REGION 1..1368: note = MG23-19 effector

SEQ ID NO: 1774 - protein, 1368 aa, unidentified; identical to SEQ ID NO: 1765
  REGION 1..1368: note = Description of Unknown: uncultivated organism with predicted taxonomy: Butyrivibrio sp. CAG:318
  REGION 1..1368: note = MG23-20 effector

SEQ ID NO: 1775 - protein, 993 aa, unidentified
  REGION 1..993: note = Description of Unknown: uncultivated organism with predicted taxonomy: Butyrivibrio sp. CAG:318
  REGION 1..993: note = MG23-21 effector
MDKKMYVGIDMGTNSVGMAVTDEEYNLYRVKGKDLWCSRLFTEADTAAERRTNRISRRRRQREVARQGVLRELFAEEINKVDEGFFARLDESKYHLEDRDSEQKYTLFTDTGYTDKDYFKDYPTIFHLRNELLHPVKDSYDVRLVYLAIANMFKHRGNFLNESLDADKITSSADESYRSLVETAMMYSIEFPENINVKKFIDIIGENGVSRSKHLENVCEYLEITKKDKQAYEILKLICGMSGVLINIYGNEVIDEENKKFSICFRDSNYEEKEGEALELLGDEYFELLEAIKEIHDIGMLAGIIKGHKYLSEARVDLYEQHKKDLDMLQHVLKKYDMKAYDEMFRVMRAGNYSAYVGSVNAHSKKIRRNGGDGRTQEEFYKNVKAVLKKFPEDDEEIKTILSEIDSETFMPKQLTASNGVIPNQLHVSELKAILTNAEKYLPFLLDKDESGLTVSERIVELFRFHIPYYVGPIGAQGENVWAKRRPGEENGKVYPWNFEQKIDTQSAAKEFINRMVRHCTYLSGERTLPKQSFLYEKFMVLNELNNLRIDGKKPSVQVKQGIYEELFKTGKRVTLNQLIKYLYNKSIIASKEDVVIEGIDGGFNASLTSVGKFRGVLGDELFTDANQAMAEEIIFWGTVYGNDKKFLKDEIESKYGTVLSKDQIKRILGFKFNGWGNLSKTFLELQGSCECGDCSLIQALWETNHNLMELLSEQYGFKKELDALACNVEKPLTEWTIDDLDNKYLSAPVKRMVWQTIKMLREACELTNKEPDRVFVEMPREHGKENDRKASRKKKLLDLYSALKREDKTWAELKIREIEGRTEADFRIKKLYLYYMQQGRCMYSGEKIELNDLFNNNLYDIDHIYPRHFIKDDSLENNLVLVKKQINNHKSDNYPLESDIRKNMNEFWKSLREKNFISKEKYSRLIRTEEFTDEEKAAFISRQLVETRQGTKAITQVLKQAFPNTQIVFVKAGIVSDFRKKFDINKVRALND

SEQ ID NO: 1776 - protein, 1368 aa, unidentified; identical to SEQ ID NO: 1765
  REGION 1..1368: note = Description of Unknown: uncultivated organism with predicted taxonomy: Butyrivibrio sp. CAG:318
  REGION 1..1368: note = MG23-22 effector

SEQ ID NO: 1777 - protein, 1366 aa, unidentified
  REGION 1..1366: note = Description of Unknown: uncultivated organism with predicted taxonomy: Butyrivibrio sp. CAG:318
  REGION 1..1366: note = MG23-23 effector
MDKKMYVGIDMGTNSVGMAVTDEEYNLYRVKGKDFWCSRLFKKANTAAERRTNRISRHRRQREVARQGVLRELFADEINKVDEGFFARLDESKYHLEDRDSEQKYTLFTDTGYTDKDYFKDYPTIFHLRNELLHPVKDSYDVRLVYLAIANMFKHRGNFLNESLDADKITSSADEAYRRLVETAMMYSIEFPENINVKKFIDIIGENGVSRSKHLGNVCEYLGITKKDKPAYEILNLVCGLRGVLINIYGNEVIDEENKKFSICFRDSNYEEKEGEALELLGDEYFELLETIKEIHDIGMLAGIIKGHKYLSEARVDLYKQHKKDLDMLQHVLKKYDMKAYDEMFRVMKAGNYSAYVGSVNAHSKKIRRNGGDGRTREDFYKNVKAVLKKFPEDDEEIKTILSEIDSETFMPKQLTASNGVIPNQLHVSELKAILTNAEKYLPFLLDKDESGLTVSERIVELFRFHIPYYVGPIGAQGENVWAKRRPGEENGKVYPWNFEQKIDTQSAAKEFINRMVRHCTYLSGERTLPKQSFLYEKFMVLNELNNLRIDGKKPSVQVKQGIYEELFKTGKRVTLNQLIKYLYNKSIIASKEDVVIEGIDGGFNASLTSVGKFRGVLGDELFTDANQAMAEEIIFWGTVYGNDKKFLKDEIESKYGTVLSKDQIKRILGFKFNGWGNLSKTFLELQGSCECGDCSLIQALWETNHNLMELLSEQYGFKKELDALASNVEKPLTEWTIDDLDNKYLSAPVKRMVWQTIKMLREACELTNKEPDRVFVEMPREHGKENDRKASRKKKLLDLYSALKRENKTWAELKIREIEGKTEADFRIKKLYLYYMQQGKCMYSGEKIELNDLFNNNLYDIDHIYPRHFIKDDSLENNLVLVKKQINNHKSDNYPLESNIRKNMNEFWKTLREKNFISKEKYSRLIRTEEFTDEEKAAFISRQLVETRQGTKAITQVLKQAFPNTQIVFVKAGIVSDFRKKFDINKVRALNDTHHAKDAYLNIVVGNTYYTKFTNNPMNFIKDARKNPKNDFYRYNMDKIFDYNVIRNGEEAWIADNGKTKQHVLRIMKKNSVIITVKTEEANGKLSDINIVGKRYIKNADAYMPIKTSIAKMEDVTKYGGYGSISSAGYALVEYKVKGKKVRSLEALPVYLGRSNALTNEDIMQYISAAFQKEYAGKEISDLSVRVPFIPMESKVEIDGFEYYLGGKSTNQFYLKNAMPLYLPDNDEEYFRKIMKAIEIDDYKEVGKNGKAVITKENNMILFDTLSAKLKSEPYIHNRCNIYKILEGKEKIFKDLDIQKQCYVIVKIIDWIKSKTQGVDLTDIQGKKQSGTMKINKRISECRECILIHQSVTGMYERRIDLLSI

SEQ ID NO: 1778 - protein, 1383 aa, unidentified
  REGION 1..1383: note = Description of Unknown: uncultivated organism with predicted taxonomy: Clostridiales
  REGION 1..1383: note = MG23-24 effector
MEINLENNAEEIIMGKKMYIGIDMGTSSVGMAVTDENYTLYRVKGKDFWTSRLFKEANTAAERRTNRVSRRRRQRETARMGILRELFSEEINKVDEGFFARLDESKYHIEDRDVKQKYALFADKGYTDKEYYQDYPTIFHLRNELLHPQKDSYDVRLVYLAIANMFKHRGNFLNETLDIDKITASADDVYSQLIEELDLYCIQMPVNINIGELINIIGENGISRSKRLENASKYLGISKKDKQSYEILKLICGLKGILYNIYGENVIDEENKKFSISFTDSNYEDEETQAKDILGDEYFELIEIIKELHDICVLSGIIKGHKFLSEARVELYEEHKNDLDMLQQVLKKYDKNAYDEMFRVMKEGNYSAYVGSVNACGKNKKIRRNGGKGRSQEDFYKYVKTTLKNYPDDDENIKNILFKIENETFMPKQLTASNGIIPNQLHAAEMKAILTNAEKYLPFLLDKDVSGLTVSQRILELFKFHIPYYVGPLGAAGKNVWAKRRKGEEKGRIYPWNFEKKIDTQEAAEEFIKRMVRHCSYIKGEHTLPKQSLLYEKFMVLNELNNLKINGTKPDVFVKQDIYENLFKTGKRVTLDKLKSYLYNNSFIDSKEVMITGIDGGFNSSLTSVGKFIGILGEDLFTDSNQAMVEQIIFWGTIYGNDKKFLKNRIEKEYKDRLTPKQIKRILGFKFNGWGKLSKLFLELKGSCECGECSIIQALWQTNHNLMELMSDQYDFKTNLMELSEETIKPLSEWTIDNLEDYYMSAPVKRMVWQTVKMLNEICELTGRIPDKIFVEMPREHESSNERKASRKKKLLDLYKAVKSEQKQWAEHKITEIDKRDEADFRIKKLYLYYIQQGKCMYSGDTIDLDLLLKNNNIYDIDHIYPRHFIKDDSIDNNLVLVKKEINNHKSDKYPLESDIREDMSGFWKYLCEKKFITKEKYNRLMRTEKFSAEEKAAFVNRQLVETGQGTKVITQILKQAFPDTQVVFVKARMVSDFRHEFGINKVRELNDTHHAKDAYLNIVVGNTYYTKFTNNPINFMKNAEKNPEDVQYKYNMDKIFRYNVIRNGETAWIADNGVTKQHVLKTINRNTVTITRKTEEVHGALSNKVTVWSSKLAKKNPDAYMPVKTTDEKACDVTKYGGITAIANSGYTLVEYNINGKMIRSIEALPVYLGRKNMLTEDKIKEYLHEKIRKEYKNKTVTDLKVCILFIPQKSKVCVDGFNYYLGGVTGNSIYLSNAEPLYLSKEDEEYLRKIIKAVGKGYYEETDKNGQIIITGERNMEFFNTLGSKLNARPYNNNRWNIYKIMENKEEIFAGLSIEKQCYVINQIISWINSKTQNVDLSDIKGSSHSGTMTLNKKISECSQFELIYQSVTGMYEKRTDLLKL

SEQ ID NO: 1779 - protein, 1368 aa, unidentified
  REGION 1..1368: note = Description of Unknown: uncultivated organism with predicted taxonomy: Butyrivibrio sp. CAG:318
  REGION 1..1368: note = MG23-25 effector
MDKKMYVGIDMGTNSVGMAVTDEEYNLYRVKGKDLWCSRLFTEADTAAERRTNRISRRRRQREVARQGVLRKLFADEINKVDEGFFARLDESKYHLEDRDSEQKYTLFTDTGYTDKDYFKDYPTIFHLRNELLHPVKESYDVRLVYLAIANMFKHRGNFLNESLDADKITSSADEAYRSLVETAMMYSIEVPENINVKKFIDIIGENGVSRSKHLENVCEYLEITKKDKQAYEILKLICGMSGVLINIYGEDVIDEENKKFSICFRDSNYEEKEGEALELLGDEYFELLEAIKEIHDIGMLAGIIKGHKYLSEARVDLYEQHKKDLDMLQHVLKKYDMKAYDEMFRVMKAGNYSAYVGSVNAHSKKIRRNGGDGRTREEFYKNVKAVLKKFQEDDEEIKTILSEIDSETFMPKQLTASNGVIPNQLHVSELKAILTNAEEYLPFLLGKDESGLTVSERIVELFRFHIPYYVGPIGAQGENVWAKRRPGEENGKVYPWNFEQKIDIQSAAKEFINRMVRHCTYLSGERTLPKQSFLYEKFMVLNELNNLKIDGKKPSVQVKQGIYEELFKTGKRVTLNRLKDYLYNNSIIASKEDVVIEGIDGGFNASLTSVGKFRGVLGDELFTDANQAMAEEIIFWGTVYGNDKKFLKDEIESKYGTVLSKDQIKRILGFKFNGWGNLSKTFLELQGSCECGDCSLIQALWETNHNLMELLSEQYGFKKELDALACNVEKPLTEWTIDDLDNKYLSAPVKRMVWQTIKMLREACELTNKEPDRVFVEMPREHGKENDRKASRKKKLLDLYSALKRENKTWAELKIREIEGKTEADFRIKKLYLYYMQQGRCMYSGEKIELNDLFNNNLYDIDHIYPRHFIKDDSLENNLVLVKKQINNHKSDNYPLESNIRKNMNEFWKTLRDKNFISKEKYSRLIRTEEFTDEEKAAFISRQLVETRQGTKAITQVLKQAFPNTQIVFVKAGIVSDFRKKFDINKVRALNDTHHAKDAYLNIVVGNTYYTKFTNNPMNFIKDARKNPKNDFYRYNMDKIFDYNVIRNGEEAWIADNGKTKQHVLQIMKKNSVTITVKTEEYHGALSNKVTVWSKEKAKGNPDAYMPVKTSDTKAQDVTKYGGITAIANSGYTLVEYKVKGKKVRSLEALPVYLGRSNALTNEDIMQYISAALQKEYAGKEISDLSVRVPFVPQKSKVRVDGFEYYLGGKTGKNIYLNNAMPLYLSWNDEEYLRKIMKAIEIDNYEEIDKYSNAIITEEKNVALFDVLSVKLNSEPYINNRWNICKTLEGKEEIFKNLDIKKQCYVIGQIISWINSAMQNVNLKDVCGSEHSGMQQLNKKISECKECILIHQSVTGMYERRIDLLSI

SEQ ID NO: 1780 - protein, 1368 aa, unidentified; identical to SEQ ID NO: 1765
  REGION 1..1368: note = Description of Unknown: uncultivated organism with predicted taxonomy: Butyrivibrio sp. CAG:318
  REGION 1..1368: note = MG23-26 effector

SEQ ID NO: 1781 - protein, 829 aa, unidentified
  REGION 1..829: note = Description of Unknown: uncultivated organism with predicted taxonomy: Butyrivibrio sp. CAG:318
  REGION 1..829: note = MG23-27 effector
MVLNELNNLRIDGKKPSVQVKQGIYEELFKTGKRVTLNQLIKYLYNKSIIASKEDVVIEGIDGGFNASLTSVGKFRGVLGDELFTDANQAMAEEIIFWGTVYGNDKKFLKDEIESKYGTVLSKDQIKRILGFKFNGWGNLSKTFLELQGSCECGDCSLIQALWETNHNLMELLSEQYGFKKELDALASNVEKPLTEWTIDDLDNKYLSAPVKRMVWQTIKMLREACELTNKEPDRVFVEMPREHGKENDRKASRKKKLLDLYSTLKREDKTWAELKIREIEGRTEADFRIKKLYLYYMQQGKCMYSGEKIELNDLFNNNLYDIDHIYPRHFIKDDSLENNLVLVKKEINNHKSDNYPLESDIRKNMNKFWKSLRDKNFISKEKYSRLIRTEEFTDEEKAAFISRQLVETRQGTKAITQVLKQAFPNTQIVFVKAGIVSDFRKKFDINKVRALNDTHHAKDAYLNIVVGNTYYTKFTNNPMNFIKDARKNPKNDFYRYNMDKIFDYNVIRNGEEAWIADNGKTKQHVLRIMKKNSVTITVKTEEYHGALSNKVTVWSKEKAKGNPDAYMPVKTSDTKAQDVTKYGGITSIANSGYTLVEYKVKGKKVRSLEALPAYLGRSNALTNEDIMQYISAALQKEYAGKEISDLSVRVPFVPQKSKVRVDGFEYYLGGKTGKSVYLSNAMPLYLSGNDEEYLRKIMKAIEIDNYEEIDKDSNAIITEEKNVALFDVLCVKLNSEPYINNRWNICKTLEGKEEIFKNLDIKKQCYVIGQIISWINSAMQNVNLKDVCGSEHAGTQTLNKKISESKECILIHQSVTGMYERKIDLLSI

SEQ ID NO: 1782 - protein, 1366 aa, unidentified; identical to SEQ ID NO: 1777
  REGION 1..1366: note = Description of Unknown: uncultivated organism with predicted taxonomy: Butyrivibrio sp. CAG:318
  REGION 1..1366: note = MG23-28 effector

SEQ ID NO: 1783 - protein, 1368 aa, unidentified; identical to SEQ ID NO: 1765
  REGION 1..1368: note = Description of Unknown: uncultivated organism with predicted taxonomy: Butyrivibrio sp. CAG:318
  REGION 1..1368: note = MG23-29 effector

SEQ ID NO: 1784 - protein, 1366 aa, unidentified
  REGION 1..1366: note = Description of Unknown: uncultivated organism with predicted taxonomy: Butyrivibrio sp. CAG:318
  REGION 1..1366: note = MG23-30 effector
MDKKMYVGIDMGTNSVGMAVTDEEYNLYRVKGKDLWCSRLFTEADTAAERRTNRISRRRRQREVARQGVLRKLFADEINKVDEGFFARLDESKYHLEDRDSEQKYTLFTDTGYTDKDYFKDYPTIFHLRNELLHPVKDSYDVRLVYLAIANMFKHRGNFLNESLDADKITSSADEAYRSLVETAMMYSIEFPENINVKKFIDIIGENGVSRSKHLENVCEYLGITKKDKQAYEILKLICGMSGVLINIYGEDVIDEENKKFSICFRDSNYEEKEGEALELLGDEYFELLEAIKEIHDIGMLAGIIKGHKYLSEARVDLYEQHKKDLDMLQHVLKKYDMKAYDEMFRVMKAGNYSAYVGSVNAHSKKIRRNGGDGRTQEEFYKNVKAVLKKFPEDDEEIKTILSEIDSETFMPKQLTASNGVIPNQLHVSELKAILTNAEKYLPFLLGKDESGLTVSERIVELFRFHIPYYVGPIGAQGENVWAKRRSGEENGKVYPWNFEQKIDTQSAAKEFINRMVRHCTYLSGERTLPKQSLLYEKFMVLNELNNLKIAGKKPSVQVKQDIYEKLFKLGKKVTLKQLEEYLCNNSIIASKEDIEGIDGGFNSSLTSVGKFRGVLGDELFTDANQAMAEEIIFWGTVYGNDKKFLKDEIESKYGTVLSKDQIKRILGFKFNGWGNLSKTFLELQGSCECGNCSLIQALWETNHNLMELLSEQYGFKKELDALACNVEKPLTEWTIDDLDNKYLSAPVKRMVWQTIKMLREVCELTNKEPDRVFVEMPREHGKENDRKASRKKKLLDLYSALKRENKTWAELKIREIEGKTEADFRIKKLYLYYMQQGKCMYSGEKIELNDLFNNNLYDIDHIYPRHFIKDDSLENNLVLVKKEINNHKSDNYPLESDIRKNMNKFWKSLREQNFISEEKYSRLIRTEEFTDEEKAAFISRQLVETRQGTKAITQVLKQAFPNTQIVFVKAGIVSDFRKKFDINKVRALNDTHHAKDAYLNIVVGNTYYTKFTNNPMNFIKDARKNPKNDFYRYNMDKIFDYNVIRNGEEAWIADNGKTKQHVLRIMKKNSVTITVKTEEYHGALSNKVTVWSKEKAKGNPDVYMPVKTSDTKAQDVTKYGGITSIANSGYTLVEYKVKGKKVRSLEALPVYLGRSNALTNEDIMQYISAALQKEYAGKEISDLSVRVPFVPQKSKVRVDGFEYYLGGKTEKNIYLNNTMPLYLSWNDEEYLRKIMKAIDIDSYEEIDKDGNAIITEEKNVALFGALSVKLNSEPYINNRWNIYKILDGKEEIFKNLDIKKQCYVISQIIAWINSSTPNVNLKDVCGSEHSGMQRLNKKISECKECILIHQSVTGMYERRIDLLSI

SEQ ID NO: 1785 - protein, 1368 aa, unidentified; identical to SEQ ID NO: 1765
  REGION 1..1368: note = Description of Unknown: uncultivated organism with predicted taxonomy: Butyrivibrio sp. CAG:318
  REGION 1..1368: note = MG23-31 effector

SEQ ID NO: 1786 - protein, 1366 aa, unidentified
  REGION 1..1366: note = Description of Unknown: uncultivated organism with predicted taxonomy: Butyrivibrio sp. CAG:318
  REGION 1..1366: note = MG23-32 effector
MDKKMYVGIDMGTNSVGMAVTDEEYNLYRVKGKDLWCSRLFTEADTAAERRTNRISRRRRQREVARQGVLRKLFADEINKVDEGFFARLDESKYHLEDRDSEQKYTLFTDTGYTDKDYFKDYPTIFHLRNELLHPVKDSYDVRLVYLAIANMFKHRGNFLNESLDADKITSSADEAYRSLVETAMMYSIEFPENINVKKFIDIIGENGVSRSKHLENVCEYLGITKKDKQAYEILKLICGMSGVLINIYGEDVIDEENKKFSICFRDSNYEEKEGEALELLGDEYFELLEAIKEIHDIGMLAGIIKGHKYLSEARVDLYEQHKKDLDMLQHVLKKYDMKAYDEMFRVMKAGNYSAYVGSVNAHSKKIRRNGGDGRTQEEFYKNVKAVLKKFPEDDEEIKTILSEIDSETFMPKQLTASNGVIPNQLHVSELKAILTNAEKYLPFLLGKDESGLTVSERIVELFRFHIPYYVGPIGAQGENVWAKRRSGEENGKVYPWNFEQKIDTQSAAKEFINRMVRHCTYLSGERTLPKQSLLYEKFMVLNELNNLKIAGKKPSVQVKQDIYEKLFKLGKKVTLKQLEEYLCNNSIIASKEDIEGIDGGFNSSLTSVGKFRGVLGDELFTDANQAMAEEIIFWGTVYGNDKKFLKDEIESKYGTVLSKDQIKRILGFKFNGWGNLSKTFLELQGSCECGDCSLIQALWETNHNLMELLSEQYGFKKELDALASNVEKPLTEWTIDDLDNKYLSAPVKRMVWQTIKMLREACELTNKEPDRVFVEMPREHGKENDRKASRKKKLLDLYSALKREDKTWAELKIREIEGKTEADFRIKKLYLYYMQQGRCMYSGEKIELNDLFNNNLYDIDHIYPRHFIKDDSLENNLVLVKKQINNHKSDNYPLESNIRKNMNEFWKTLRDKNFISKEKYSRLIRTEEFTDEEKAAFISRQLVETRQGTKAITQVLKQAFPNTQIVFVKAGIVSDFRKKFDINKVRALNDTHHAKDAYLNIVVGNTYYTKFTNNPMNFIKDARKNPKNDFYRYNMDKIFDYNVIRNGEEAWIADNGKTKQHVLQIMKKNSVTITVKTEEYHGALSNKVTVWSKEKAKGNPDAYMPVKTSDTKAQDVTKYGGITAIANSGYTLVEYKVKGKKVRSLEALPVYLGRSNALTNEDIMQYISAALQKEYAGKEISDLSVRVPFVPQKSKVRVDGFEYYLGGKTGKSVYLSNAMPLYLSGNDEEYLRKIMKAIEIDNYEEIDKDSNAIITEEKNVALFDVLCVKLNSEPYINNRWNICKTLEGKEEIFKNLDIKKQCYVIGQIISWINSAMQNVNLKDVCGSEHAGTQTLNKKISESKECILIHQSVTGMYERKIDLLSI

SEQ ID NO: 1787 - protein, 1389 aa, unidentified
  REGION 1..1389: note = Description of Unknown: uncultivated organism with predicted taxonomy: Clostridiales
  REGION 1..1389: note = MG23-33 effector
MEINLENNAEEIIMGKKMYIGIDMGTSSVGMAVTDENYTLYRVKGKDFWTSRLFKEANTAAERRTNRVSRRRRQRETARMGILRELFSEEINKVDEGFFARLDESKYHIEDRDVKQKYALFADKGYTDKEYYQDYPTIFHLRNELLHPQKDSYDVRLVYLAIANMFKHRGNFLNETLDIDKITASADDVYSQLIEELDLYCIQMPVNINIGELINIIGENGISRSKRLENASKYLGITKKDKQSYEILKLICGLKGILYNIYGENVIDEENKKFSISFTDSNYEDEETQAKDILGDEYFELIEIIKELHDIGVLSGIIKGHKFLSEARVELYEEHKKDLDMLQQVLKKYDKNAYDEMFRVMKEGNYSAYVGSVNARGKNKKIRRNVGEGKKGKNGRSQEAFYKYVKTTLKNFPDDDENIKNILFKIENETFMPKQLTASNGIIPNQLHAAEMKAILTNAEKYLPFLLDKDESGLTVSQRILELFKFHIPYYVGPLGAAGKNVWAKRRKGEEKGRIYPWNFEKKIDTQEAAEEFIKRMVRHCSYIKGEHTLPKQSLLYEKFMVLNELNNLKINGTKPDVFVKQDIYENLFKTGKRVTLDKLKSYLYNNSLIDSKEVMITGIDGGFKSSLTSVGKFIGILGEDLFTDSNQAMVEQIIFWGTIYGSDKKFLKNRIEKEYKDRLTPKQIKRILGFKFNGWGKLSKRFLELKGSCECGECSIIQALWQTNHNLMELMSDQYDFKTNLMELSEETIKPLSEWTIDNLEDYYMSAPVKRMVWQTVKMLNETCELTGRVPDKIFVEMPREHESGNERKASRKKKLLDLYKAVKSEQKQWAEHKITEIDKRDEADFRIKKLYLYYIQHGKCMYSGDTIDLDLLLKNNNIYDIDHIYPRHFIKDDSIDNNLVLVKKEINNHKSDKYPLESDIREDMSGFWKYLCEKKFITKEKYNRLMRTEKFSAEEKAAFVNRQLVETGQGTKVITQILKQAFPDTQVVFVKARMVSDFRHEFGINKVRELNDTHHAKDAYLNIVVGNTYYTKFTNNPINFMKNAEKNPEDVQYKYNMDKIFRYNVIRNGETAWIADNGVTKQHVLKTINRNTVTITRKTEEVHGALSNKVTVWSSKSAEKNPDAYMPVKTTDEKAGDVTKYGGITAIANSGYTLVEYNINGKMIRSIEALPVYLGRKNMLTEDKIKEYLHEKIRKEYKNKTVTDLKVCILFIPQKSKVCVDGFNYYLGGVTGNSIYLSNAEPLYLSKEDEEYLRKIIKAVGKGYYEETDENGQIIITSERNMKFFNTLSSKLNARPYNNNRWNIYKIMENKEEIFAGLSIEKQCYVINQIISWINSKTQNVDLSDIKGSSHSGTMTLNKKISECSQFELIYQSVTGMYEKRTDLLKL

SEQ ID NO: 1788 - protein, 1368 aa, unidentified
  REGION 1..1368: note = Description of Unknown: uncultivated organism with predicted taxonomy: Butyrivibrio sp. CAG:318
  REGION 1..1368: note = MG23-34 effector
MDKKMYVGIDMGTNSVGMAVTDEEYNLYRVKGKDLWCSRLFTEADTAAERRTNRISRRRRQREVARQGVLRKLFADEINKVDEGFFARLDESKYHLEDRDSEQKYTLFTDTGYTDKDYFKDYPTIFHLRNELLHPVKDSYDVRLVYLAIANMFKHRGNFLNESLDADKITSSADEAYRSLVETAMMYSIEFPENINVKKFIDIIGENGVSRSKHLENVCEYLEITKKDKQAYEILKLVCGMSGVLINIYGDEVIDEENKKFSICFRDSNYEEKEGEALELLGDEYFELLEAIKEIHDIGMLAGIIKGHKYLSEARVDLYEQHKKDLDMLQHVLKKYDMKAYDEMFRVMKAGNYSAYVGSVNAHSKKIRRNGGDGRTREEFYKNVKAVLKKFPEDDEEIKTILSEIDSETFMPKQLTASNGVIPNQLHVSELKAILTNAEKYLPFLLGKDESGLTVSERIVELFRFHIPYYVGPIGAQGENVWAQRRPGEEKGRVYPWNFEQKIDTQSAAKEFINRMVRHCTYLSGERTLPKQSFLYEKFMVLNELNNLRIDGKKPSVQVKQGIYEELFKTGKRVTLNKLKDYLYNKSIIASKEDVVIEGIDGGFNASLTSVGKFRGVLGDELFTDANQAMAEEIIFWGTVYGNDKKFLKDEIESKYGTVLSKDQIKRILGFKFNGWGNLSKTFLELQGLCECGDCSLIQALWETNHNLMELLSEQYGFKKELDALACNVEKPLTEWTIDDLDNKYLSAPVKRMVWQTIKMLREACELTNKEPDRVFVEMPREHGKENDRKASRKKKLLDLYSALKRENKTWAELKIREIEGKTEADFRIKKLYLYYMQQGKCMYSGEKIELNDLFNNNLYDIDHIYPRHFIKDDSLENNLVLVKKQINNHKSDNYPLESNIRKNMNEFWKTLREKNFISKEKYSRLIRTEEFTDEEKAAFISRQLVETRQGTKAISQVLKQAFPNTQIVFVKAGIVSDFRKKFDINKVRALNDTHHAKDAYLNIVVGNTYYTKFTNNPMNFIKDARKNPKNDFYRYNMDKIFDYNVIRNGEEAWIADNGKTKQHVLRIMKKNSVTITVKTEEYHGALSNKVTVWSKEKAKGNPDAYMPVKTSDTKAQDVTKYGGITSIANSGYTLVEYKVKGKKVRSLEALPVYLGRSNALTNEDIMQYISAALQKEYAGKEISDLSVRVPFVPQKSKVRVDGFEYYLGGKTGNRICLNNAMSLYLSENDEEYLRKIMKAIEIDNYEEIDKDSNAIITEEKNVDLFDVLSVKLNSEPYINNRWNIYKTLDGKKEIFENLDIKKQCYVISQIIFWINSSTQSVNLKDVCGSEHSGMQPLNKKISECKECILIHQSVTGMYERRIDLLSI

SEQ ID NO: 1789 - protein, 1180 aa, unidentified
  REGION 1..1180: note = Description of Unknown: uncultivated organism with predicted taxonomy: Butyrivibrio sp. CAG:318
  REGION 1..1180: note = MG23-35 effector
MDKKMYVGIDMGTNSVGMAVTDEEYNLYRVKGKDLWCSRLFTEADTAAERRTNRISRRRRQREVARQGVLRKLFADEINKVDEGFFARLDESKYHLEDRDSEQKYTLFTDTGYTDKDYFKDYPTIFHLRNELLHPVKDSYDVRLVYLAIANMFKHRGNFLNESLDADKITSSADEAYRSLVETAMMYSIEFPENINVKKFIDIIGENGVSRSKHLENVCEYLEITKKDKQAYEILKLICGMSGVLINIYGEDVIDEENKKFSICFRDSNYEEKEGEALELLGDEYFELLEAIKEIHDIGMLAGIIKGHKYLSEARVDLYEQHKKDLDMLQHVLKKYDMKAYDEMFRVMKAGNYSAYVGSVNAHSKKIRRNGGDGRTQEEFYKNVKAVLKKFPEDDEEIKTILSEIDSETFMPKQLTASNGVIPNQLHVSELKAILTNAEEYLPFLLGKDESGLTVSERIVELFRFHIPYYVGPIGAQGENVWAQRRPGEEKGRVYPWNFEQKIDTQSAAKEFINRMVRHCTYLSGERTLPKQSLLYEKFMVLNELNNLKIAGKKPSVQVKQDIYEKLFKLGKKVTLKQLEEYLCNNSIIASKEDIEGIDGGFNSSLTSVGKFRGVLGDELFTDANQAMAEEIIFWGTVYGNDKKFLKDEIESKYGTVLSKDQIKRILGFKFNGWGNLSKTFLELQGSCECGDCSLIQALWETNHNLMELLSEQYGFKKELDALASNVEKPLTEWTIDDLDNKYLSAPVKRMVWQTIKMLREACELTNKEPDRVFVEMPREHGKENDRKASRKKKLLDLYSALKREDKTWAELKIREIEGRTEADFRIKKLYLYYMQQGRCMYSGEKIELNDLFNNNLYDIDHIYPRHFIKDDSLENNLVLVKKQINNHKSDNYPLESNIRKNMNEFWKTLRDKNFISKEKYSRLIRTEEFTDEEKAAFISRQLVETRQGTKAITQILKQAFPNTQIVFVKAGIVSDFRKKFDINKVRALNDTHHAKDAYLNIVVGNTYYTKFTNNPMNFIKDASKNPKNDFYRYNMDKIFDYNVIRNGEEAWIADNGKTKQHVLRIMKKNSVTITVKTEEYHGALSNKVTVWSKEKAKGNPDAYMPVKTSDTKAQDVTKYGGITAIANSGYTLVEYKVKGKKVRSLEALPVYLGRSNALTNEDIMQYISAALQKEYMSHV

SEQ ID NO: 1790 - protein, 1389 aa, unidentified
  REGION 1..1389: note = Description of Unknown: uncultivated organism with predicted taxonomy: Clostridiales
  REGION 1..1389: note = MG23-36 effector
MEINLENNAEEIIMGKKMYIGIDMGTSSVGMAVTDENYNLYRVKGKDFWTSRLFKEASTAANRRTNRVARRRRQRELARMGILRELFSEEINKVDEGFFARLDESKYHIEDRDVKQKYALFADKGYTDKEYYKEYPTIFHLRNELLHPQKDSYDVRLVYLAIANMFKHRGNFLNETLDIDKITANAVDVYSQLIEQLDLYCIQMPVSIDIGKLINIIGENGISRSKRLENASKYLGITKKDKQSYEILKLICGLKGILYNIYGENVIDEENKKFSISFTDSNYEDEETQAKDILGDEYFELIEIIKELHDIGVLSGIIKGHKFLSEARVELYEEHKKDLDMLQQVLKKYDKNAYDEMFRVMKEGNYSAYVGSVNARGKNKKIRRNVGEGKKGKNGRSQEAFYKYVKTTLKNFPDDDENIKNILFKIENETFMPKQLTASNGIIPNQLHAAEMKAILTNAEKYLPFLLDKDESGLTVSQRILELFKFHIPYYVGPLGAAGKNVWAKRRKGEEKGRIYPWNFEKKIDTQEAAEEFIKRMVIHCSYIKGEHTLPKQSLLYEKFTVLNELNNLKINGTKPDVFVKQDIYENLFKTGKRVTLDKLKSYLYNNSFIDSKEVMITGIDGGFNSSLTSVGKFIGILGEDLFTDSNQAMVEQIIFWGTIYGSDKKFLKNRIEKEYKDRLTPKQIKRILGFKFNGWSKLSKRFLELKGSCECGECSIIQALWQTNHNLMELMSDQYDFKTNLMELSEETIKPLSEWTIDNLEDYYMSAPVKRMVWQTVKMLNETCELTGRVPDKIFVEMPREHESGNERKASRKKKLLDLYKAVKSEQKQWAEHKITEIDKRDEADFRIKKLYLYYIQQGKCMYSGDTIDLDLLLKNNNIYDIDHIYPRHFIKDDSIDNNLVLVKKEINNHKSDKYPLESDIREDMSGFWKYLCEKKFITKEKYNRLMRTEKFSAEEKAAFVNRQLVETGQGTKVITQILKQAFPDTQVVFVKARMVSDFRHEFGINKVRELNDTHHAKDAYLNIVVGNTYYTKFTNNPINFMKNAEKNPEDVQYKYNMDKIFRYNVIRNGETAWIADNGVTKQHVLKTINRNTVTITRKTEEVHGALSNKVTVWSSKLAKKNPDAYMPVKTTDEKACDVTKYGGITAIANSGYTLVEYNINGKMIRSIEALPVYLGRKNMLTEDKIKEYLHEKIRKEYKNKTVTDLKVCILFIPQKSKVCVDGFNYYLGGVTGNSIYLSNAEPLYLSKEDEEYLRKIIKAVGKGYYEETDKNGQIIITGERNMEFFNTLGSKLNARPYNNNRWNIYKIMDNKEEIFAGLSIEKQCYVINQIISWINSKTQNVDLSDIKGSSHSGTMTLNKKISDCSQFELIYQSVTGMYEKRTDLLKL

SEQ ID NO: 1791 - protein, 1389 aa, unidentified
  REGION 1..1389: note = Description of Unknown: uncultivated organism with predicted taxonomy: Clostridiales
  REGION 1..1389: note = MG23-37 effector
MEINLENNAEEIIMGKKMYIGIDMGTSSVGMAVTDENYTLYRVKGKDFWTSRLFKEANTAAERRTNRVSRRRRQRETARMGILRELFSEEINKVDEGFFARLDESKYHIEDRDVKQKYALFADKGYTDKEYYQDYPTIFHLRNELLHPQKDSYDVRLVYLAIANMFKHRGNFLNETLDIDKITASADDVYSQLIDELDLYCIQMPVSIDIGKLINIIGENGISRSKRLENASKYLGITKKDKQSYEILKLICGLKGILYNIYGENVIDEENKKFSISFTDSNYEDEETQAKDILGDEYFELIEIIKELHDIGVLSGIIKGHKFLSEARVELYEEHKKDLDMLQQVLKKYDKNAYDEMFRVMKEGNYSAYVGSVNARGKNKKIRRNVGEGKKGKNGRSQEAFYKYVKTTLKNFPDDDENIKNILFKIENETFMPKQLTASNGIIPNQLHAAEMKAILTNAEKYLPFLLDKDESGLTVSQRILELFKFHIPYYVGPLGAAGKNVWAKRRKGEEKGRIYPWNFEKKIDTQEAAEEFIKRMVRHCSYIKGEHTLPKQSLLYEKFMVLNELNNLKINGTKPDVFVKQDIYENLFKTGKRVTLDKLKSYLYNNSFIDSKEVMITGIDGGFNSSLTSVGKFIGILVEDLFTDSNQAMVEQIIFWGTIYGNDKKFLKNRIEKEYKDRLTPKQIKRILGFKFNGWGKLSKLFLELKGSCECGECSIIQALWQTNHNLMELMSDQYDFKTNLMELSEETIKPLSEWTIDNLEDYYMSAPVKRMVWQTVKMLNEICELTGRIPDKIFVEMPREHESSNERKASRKKKLLDLYKAVKSEQKQWAEHKITEIDKRDEADFRIKKLYLYYIQQGKCMYSGDTIDLDLLLKNNNIYDIDHIYPRHFIKDDSIDNNLVLVKKEINNHKSDKYPLESDIREDMSGFWKYLCEKKFITKEKYNRLMRTEKFSAEEKAAFVNRQLVETGQGTKVITQILKQAFPDTQVVFVKARMVSDFRHEFGINKVRELNDTHHAKDAYLNIVVGNTYYTKFTNNPINFMKNAEKNPEDVQYKYNMDKIFRYNVIRNGETAWIADNGVTKQHVLKTINRNTVTITRKTEEVHGALSNKGTVWSSKLAKKNPDAYMPVKTTDEKACDVKKYGGITAIANSGYTLVEYNINGKMIRSIEALPVYLGRKNMLTDDKIREYLHEKIRKEYKNKTVTDLKVCILFIPQKSKVCVDGFNYYLGGVTGNSIYLSNAEPLYLSKEDEEYLRKIIKAVDKGYYEETDKNGQIIITGERNMKIFNTLSSKLNNRPYNNNRWNIYKIMENKEEIFAGLSIEKQCYVINQIISWINSKTQNVDLSDIKGSSHSGTMTLNKKISECSQFELIYQSVTGMYEKRTDLLKL

SEQ ID NO: 1792 - protein, 1368 aa, unidentified; identical to SEQ ID NO: 1765
  REGION 1..1368: note = Description of Unknown: uncultivated organism with predicted taxonomy: Butyrivibrio sp. CAG:318
  REGION 1..1368: note = MG23-38 effector

SEQ ID NO: 1793 - protein, 1366 aa, unidentified; identical to SEQ ID NO: 1784
  REGION 1..1366: note = Description of Unknown: uncultivated organism with predicted taxonomy: Butyrivibrio sp. CAG:318
  REGION 1..1366: note = MG23-39 effector

SEQ ID NO: 1794 - protein, 1366 aa, unidentified
  REGION 1..1366: note = Description of Unknown: uncultivated organism with predicted taxonomy: Butyrivibrio sp. CAG:318
  REGION 1..1366: note = MG23-40 effector
MDKKMYVGIDMGTNSVGMAVTDEEYNLYRVKGKDLWCSRLFTEADTAAERRTNRISRRRRQREVARQGVLRKLFADEINKVDEGFFARLDESKYHLEDRDSEQKYTLFTDTGYTDKDYFKDYPTIFHLRNELLHPVKDSYDVRLVYLAIANMFKHRGNFLNESLDADKITSSADEAYRSLVETAMMYSIEFPENINVKKFIDIIGENGVSRSKHLENVCEYLGITKKDKQAYEILKLICGMSGVLINIYGEDVIDEENKKFSICFRDSNYEEKEGEALELLGDEYFELLEDIKEIHDIGMLAGIIKGHKYLSEARVDLYEQHKKDLDMLQHVLKKYDMKAYDEMFRVMKAGNYSAYVGSVNAHSKKIRRNGGDGRTQEEFYKNVKAVLKKFPEDDEEIKTILSEIDSETFMPKQLTASNGVIPNQLHVSELKAILTNAEKYLPFLLGKDESGLTVSERIVELFRFHIPYYVGPIGAQGENVWAKRRSGEENGKVYPWNFEQKIDTQSAAKEFINRMVRHCTYLSGERTLPKQSLLYEKFMVLNELNNLKIAGKKPSVQVKQDIYEKLFKLGKKVTLKQLEEYLCNNSIIASKEDIEGIDGGFNSSLTSVGKFRGVLGDELFTDANQAMAEEIIFWGTVYGNDKKFLKDEIESKYGTVLSKDQIKRILGFKFNGWGNLSKTFLELQGSCECGDCSLIQALWETNHNLMELLSEQYGFKKELDALASNVEKPLTEWTIDDLDNKYLSAPVKRMVWQTIKMLREACELTNKEPDRVFVEMPREHGKENDRKASRKKKLLDLYSALKRENKTWAELKIREIEGKTEADFRIKKLYLYYMQQGKCMYSGEKIELNDLFNNNLYDIDHIYPRHFIKDDSLENNLVLVKKQINNHKSDNYPLESDIRKNMNKFWKSLREKNFISEEKYSRLIRTEEFTDEEKAAFISRQLVETRQGTKAITQVLKQAFPNTQIVFVKAGIVSDFRKKFDINKVRALNDTHHAKDAYLNIVVGNTYYTKFTNNPMNFIKDARKNPKNDFYRYNMDKIFDYNVIRNGEEAWIADNGKTKQHVLQIMKKNSVTITVKTEEYHGALSNKVTVWSKEKAKGNPDAYMPVKTSDTKAQDVTKYGGITAIANSGYTLVEYKVKGKKVRSLEALPVYLGRSNALTNEDIMQYISAALQKEYAGKEISDLSVRVPFVPQKSKVRVDGFEYYLGGKTGKSVYLSNAMPLYLSGNDEEYLRKIMKAIEIDNYEEIDKDSNAIITEEKNVALFDVLCVKINSEPYINNQWNIYKILEGKEEIFKNLDIKKQCYIIGQIISWINSSTQNVNLKDVCGSEHSGMQRLNKKISECKECILIHQSVTGMYERRIDLLSI

SEQ ID NO: 1795 - protein, 958 aa, unidentified
  REGION 1..958: note = Description of Unknown: uncultivated organism with predicted taxonomy: Clostridiales
  REGION 1..958: note = MG23-41 effector
MPKQLTASNGIIPNQLHAAEMKAILTNAEKYLPFLLDKDESGLTVSQRILELFKFHIPYYVGPLGAAGKNVWAKRRKGEEKGRIYPWNFEKKIDTQEAAEEFIKRMVRHCSYIKGEHTLPKQSLLYEKFMVLNELNNLKINGTKPDVFVKQDIYENLFKTGKRVTLDKLKSYLYNNSFIDSKEVMITGIDGGFNSSLTSVGKFIGILGEDLFTDSNQAMVEQIIFWGTIYGSDKKFLKNRIEKEYKDRLTPKQIKRILGFKFNGWGKLSKRFLELKGSCECGECSIIQALWQTNHNLMELMSDQYDFKTNLMEVSEKTIKPLSEWTIDNLDDYYMSAPVKRMVWQTVKMLNETCELTGRVPDKIFVEMPREHESGNERKASRKKKLLDLYKAVKSEQKQWAEHKITEIDKRDEADFRIKKLYLYYIQHGKCMYSGDTIDLDLLLKNNNIYDIDHIYPRHFIKDDSIDNNLVLVKKEINNHKSDKYPLESDIREDMSGFWKYLCEKKFITKEKYNRLMRTEKFSAEEKAAFVNRQLVETGQGTKVITQILKQAFPDTQVVFVKARMVSDFRHEFGINKVRELNDTHHAKDAYLNIVVGNTYYTKFTNNPINFMKNAEKNPEDVQYKYNMDKIFRYNVIRNGETAWIADNGVTKQHVLKTINRNTVTITRKTEEVHGALSNKVTVWSSKSAEKNPDAYMPVKTTDEKAGDVTKYGGITAIANSGYTLVEYNINGKMIRSIEALPVYLGRKNMLTEDKIKEYLYEKIRKEYKNKTVTDLKVCILFIPQKSKVCVDGFNYYLGGVTGNSIYLSNAEPLYLSKEDEEYLRKIIKAVGKGYYEETDKNGQIIITGERNMKFFNTLGSKLNARPYNNNRRNIYKIMENKEEIFAGLSIEKQCYVINQIISWINSKTQNVDLSDIKGSSHSGTMTLNKKISECSQFELIYQSVTGMYEKRTDLLKL

SEQ ID NO: 1796 - protein, 1366 aa, unidentified
  REGION 1..1366: note = Description of Unknown: uncultivated organism with predicted taxonomy: Butyrivibrio sp. CAG:318
  REGION 1..1366: note = MG23-42 effector
MDKKMYVGIDMGTNSVGMAVTDEEYNLYRVKGKDLWCSRLFTEADTAAERRTNRISRRRRQREVARQGVLRKLFADEINKVDEGFFARLDESKYHLEDRDSEQKYTLFTDTGYTDKDYFKDYPTIFHLRNELLHPVKDSYDVRLVYLAIANMFKHRGNFLNESLDADKITSSADEAYRSLVETAMMYSIEFPENINVKKFIDIIGENGVSRSKHLENVCEYLGITKKDKQAYEILKLICGMSGVLINIYGEDVIDEENKKFSICFRDSNYEEKEGEALELLGDEYFELLEAIKEIHDIGMLAGIIKGHKYLSEARVDLYEQHKKDLDMLQHVLKKYDMKAYDEMFRVMKAGNYSAYVGSVNAHSKKIRRNGGDGRTQEEFYKNVKAVLKKFPEDDEEIKTILSEIDSETFMPKQLTASNGVIPNQLHVSELKAILTNAEKYLPFLLGKDESGLTVSERIVELFRFHIPYYVGPIGAQGENVWAKRRSGEENGKVYPWNFEQKIDTQSAAKEFINRMVRHCTYLSGERTLPKQSLLYEKFMVLNELNNLKIAGKKPSVQVKQDIYEKLFKLGKKVTLKQLEEYLCNNSIIASKEDIEGIDGGFNSSLTSVGKFRGVLGDELFTDANQAMAEEIIFWGTVYGNDKKFLKDEIESKYGTVLSKDQIKRILGFKFNGWGNLSKTFLELQGSCECGDCSLIQALWETNHNLMELLSEQYGFKKELDALASNVEKPLTEWTIDDLDNKYLSAPVKRMVWQTIKMLREACELTNKEPDRVFVEMPREHGKENDRKASRKKKLLDLYSALKREDKTWAELKIREIEGKTEADFRIKKLYLYYMQQGRCMYSGEKIELNDLFNNNLYDIDHIYPRHFIKDDSLENNLVLVKKQINNHKSDNYPLESNIRKNMNEFWKTLRDKNFISKEKYSRLIRTEEFTDEEKAAFISRQLVETRQGTKAITQVLKQAFPNTQIVFVKAGIVSDFRKKFDINKVRALNDTHHAKDAYLNIVVGNTYYTKFTNNPMNFIKDARKNPKNDFYRYNMDKIFDYNVIRNGEEAWIADNGKTKQHVLQIMKKNSVTITVKTEEYHGALSNKVTVWSKEKAKGNPDAYMPVKTSDTKAQDVTKYGGITAIANSGYTLVEYKVKGKKVRSLEALPVYLGRSNALTNEDIMQYISAALQKEYAGKEISDLSVRVPFVPQKSKVRVDGFEYYLGGKTGKNIYLNNAMPLYLSWNDEEYLRKIMKAIEIDNYEEIDKYSNAIITEEKNVALFDVLSVKLNSEPYINNRWNICKTLEGKEEIFKNLDIKKQCYVIGQIISWINSAMQNVNLKDVCGSEHSGMQQLNKKISECKECILIHQSVTGMYERRIDLLSI

SEQ ID NO: 1797 - protein, 1368 aa, unidentified
  REGION 1..1368: note = Description of Unknown: uncultivated organism with predicted taxonomy: Butyrivibrio sp. CAG:318
  REGION 1..1368: note = MG23-43 effector
MDKKMYVGIDMGTNSVGMAVTDEEYNLYRVKGKDLWCSRLFTEADTATERRTNRISRRRRQREVARQGVLRKLFADEINKVDEGFFARLDESKYHLEDRDSEQKYTLFTDTGYTDKDYFKDYPTIFHLRNELLHPVKDSYDVRLVYLAIANMFKHRGNFLNESLDADKITSSADEAYRSLVETAMMYSIEFPENINVKKFIDIIGENGVSRSKHLENVCEYLEITKKDKQAYEILKLICGMSGVLINIYGEDVIDEENKKFSICFRDSNYEEKEGEALELLGDEYFELLETIKEIHDIGMLAGIIKGHKYLSEARVDLYEQHKKDLDMLQHVLKKYDMKAYDEMFRVMKAGNYSAYVGSVNAHSKKIRRNGGDGRTREEFYKNVKAVLKKFPEDDEEIKTILSEIDSETFMPKQLTASNGVIPNQLHVSELKAILTNAEKYLPFLLDKDESGLTVSERIVELFRFHIPYYVGPIGAQGENVWAKRRPGEENGKVYPWNFEQKIDTQSAAKEFINRMVRHCTYLSGERTLPKQSFLYEKFMVLNELNNLRIDGKKPSVQVKQGIYEELFKTGKRVTLNQLIKYLYNKSIIASKEDVVIEGIDGGFNASLTSVGKFRGVLGDELFTDANQAMAEEIIFWGTVYGNDKKFLKDEIESKYGTVLSKDQIKRILGFKFNGWGNLSKTFLELQGSCECGDCSLIQALWETNHNLMELLSEQYGFKKELDALASNVEKPLTEWTIDDLDNKYLSAPVKRMVWQTIKMLREACELTNKEPDRVFVEMPREHGKENDRKASRKKKLLDLYSTLKREDKTWAELKIREIEGRTEADFRIKKLYLYYMQQGKCMYSGEKIELNDLFNNNLYDIDHIYPRHFIKDDSLENNLVLVKKEINNHKSDNYPLESDIRKNMNKFWKSLRDKNFISKEKYSRLIRTEEFTDEEKAAFISRQLVETRQGTKAITQVLKQAFPNTQIVFVKAGIVSDFRKKFDINKVRALNDTHHAKDAYLNIVVGNTYYTKFTNNPMNFIKDARKNPKNDFYRYNMDKIFDYNVIRNGEEAWIADNGKTKQHVLRIMKKNSVTITVKTEEYHGALSNKVTVWSKEKAKGNPDAYMPVKTSDTKAQDVTKYGGITSIANSGYTLVEYKVKGKKVRSLEALPAYLGRSNALTNEDIMQYISAALQKEYAGKEISDLSVRVPFVPQKSKVRVDGFEYYLGGKTGKSVYLSNAMPLYLSGNDEEYLRKIMKAIEIDNYEEIDKDSNAIITEEKNVALFDVLCVKLNSEPYINNRWNICKTLEGKEEIFKNLDIKKQCYVIGQIISWINSAMQNVNLKDVCGSEHAGTQTLNKKISESKECILIHQSVTGMYERKIDLLSI

SEQ ID NO: 1798 - protein, 1366 aa, unidentified
  REGION 1..1366: note = Description of Unknown: uncultivated organism with predicted taxonomy: Butyrivibrio sp. CAG:318
  REGION 1..1366: note = MG23-44 effector
MDKKMYVGIDMGTNSVGMAVTDEEYNLYRVKGKDFWCSRLFKKANTAAERRTNRISRHRRQREVARQGVLRELFADEINKVDEGFFARLDESKYHLEDRDSEQKYTLFTDTGYTDKDYFKDYPTIFHLRNELLHPVKDSYDVRLVYLAIANMFKNRGNFLNESLDADKITSSADEAYRRLVETAMMYSIEFPENINVKKFIDIIGENGVSRSKHLGNVCEYLGITKKDKPAYEILNLVCGLRGVLINIYGNEVIDEENKKFSICFRDSNYEEKEGEALELLGDEYFELLETIKEIHDIGMLAGIIKGHKYLSEARVDLYKQHKKDLDMLQHVLKKYDMKAYDEMFRVMKAGNYSAYVGSVNAHSKKIRRNGGDGRTREDFYKNVKAVLKKFPEDDEEIKTILSEIDSETFMPKQLTASNGVIPNQLHVSELKAILTNAEKYLPFLLDKDESGLTVSERIVELFRFHIPYYVGPIGAQGENVWAKRRPGEENGKVYPWNFEQKIDTQSAAKEFINRMVRHCTYLSGERTLPKQSFLYEKFMVLNELNNLRIDGKKPSVQVKQGIYEELFKTGKRVTLNQLIKYLYNKSIIASKEDVVIEGIDGGFNASLTSVGKFRGVLGDELFTDANQAMAEEIIFWGTVYGNDKKFLKDEIESKYGTVLSKDQIKRILGFKFNGWGNLSKTFLELQGSCECGDCSLIQALWETNHNLMELLSEQYGFKKELDALASNVEKPLTEWTIDDLDNKYLSAPVKRMVWQTIKMLREACELTNKEPDRVFVEMPREHGKENDRKASRKKKLLDLYSALKRENKTWAELKIREIEGKTEADFRIKKLYLYYMQQGKCMYSGEKIELNDLFNNNLYDIDHIYPRHFIKDDSLENNLVLVKKQINNHKSDNYPLENNIRKNMNEFWKTLREKNFISKEKYSRLIRTEEFTDEEKAAFISRQLVETRQGTKAITQVLKQAFPNTQIVFVKAGIVSDFRKKFDINKVRALNDTHHAKDAYLNIVVGNTYYTKFTNNPMNFIKDARKNPKNDFYRYNMDKIFDYNVIRNGEEAWIADNGKTKQHVLRIMKKNSVIITVKTEEANGKLSDINIVGKRYIKNADAYMPIKTSIAKMEDVTKYGGYGSISSAGYALVEYKVKGKKVRSLEALPVYLGRSNALTNEDIMQYISAAFQKEYAGKEISDLSVRVPFIPMESKVEIDGFEYYLGGKSTNQFYLKNAMPLYLPDNDEEYFRKIMKAIEIDDYKEVGKNGKAVITKENNMILFDTLSAKLKSEPYIHNRCNIYKILEGKEKIFKDLDIQKQCYVIVKIIDWIKSKTQGVDLTDIQGKKQSGTMKINKRISECRECILIHQSVTGMYERRIDLLSI

SEQ ID NO: 1799 - protein, 1042 aa, unidentified
  REGION 1..1042: note = Description of Unknown: uncultivated organism with predicted taxonomy: Butyrivibrio sp. CAG:318
  REGION 1..1042: note = MG23-45 effector
MDKKMYVGIDMGTNSVGMAVTDEEYNLYRVKGKDLWCSRLFTEADTAAERRTNRISRRRRQREVARQGVLRKLFADEINKVDEGFFARLDESKYHLEDRDSEQKYTLFTDTGYTDKDYFKDYPTIFHLRNELLHPVKDSYDVRLVYLAIANMFKHRGNFLNESLDADKITSSADEAYRSLVETAMMYSIEFPENINVKKFIDIIGENGVSRSKHLENVCEYLEITKKDKQAYEILKLICGMSGVLINIYGEDVIDEENKKFSICFRDSNYEEKEGEALELLGDEYFELLETIKEIHDIGMLAGIIKGHKYLSEARVDLYEQHKKDLDMLQHVLKKYDMKAYDEMFRVMKAGNYSAYVGSVNAHSKKIRRNGGDGRTREEFYKNVKAVLKKFPEDDEEIKTILSEIDSETFMPKQLTASNGVIPNQLHVSELKAILTNAEKYLPFLLDKDESGLTVSERIVELFRFHIPYYVGPIGAQGENVWAKRRPGEENGKVYPWNFEQKIDTQSAAKEFINRMVRHCTYLSGERTLPKQSFLYEKFMVLNELNNLRIDGKKPSVQVKQGIYEELFKTGKRVTLNQLIKYLYNKSIIASKEDVVIEGIDGGFNASLTSVGKFRGVLGDELFTDANQAMAEEIIFWGTVYGNDKKFLKDEIESKYGTVLSKDQIKRILGFKFNGWGNLSKTFLELQGSCECGDCSLIQALWETNHNLMELLSEQYGFKKELDALASNVEKPLTEWTIDDLDNKYLSAPVKRMVWQTIKMLREACELTNKEPDRVFVEMPREHGKENDRKASRKKKLLDLYSTLKREDKTWAELKIREIEGRTEADFRIKKLYLYYMQQGKCMYSGEKIELNDLFNNNLYDIDHIYPRHFIKDDSLENNLVLVKKEINNHKSDNYPLESDIRKNMNKFWKSLRDKNFISKEKYSRLIRTEEFTDEEKAAFISRQLVETRQGTKAITQVLKQAFPNTQIVFVKAGIVSDFRKKFDINKVRALNDTHHAKDAYLNIVVGNTYYTKFTNNPMNFIKDARKNPKNDFYRYNMDKIF

SEQ ID NO: 1800 - protein, 1376 aa, unidentified
  REGION 1..1376: note = Description of Unknown: uncultivated organism with predicted taxonomy: Clostridiales
  REGION 1..1376: note = MG23-46 effector
MGKNMYIGVDMGTSSDGVAVTDENYTLYRVKGKDLWTSRLFKEANTAAERRTNRVSRRRRQRETARMGILRELFSEEINKVDEGFFARLDESKYHIEDRVVKQKYALFVDKGYTDKEYYKEYPTIFHLRNELLHPQKNSYDVRLVYLAVANMFKHRGNFLNETLDIDKITANAVDVYSQLIEELDLYCIQMPVSIDIGKLINIIGENGISRSKRLENASKYLGITKKDKQSYEILKLICGLKGILYNIYGENVIDEENKKFSLSFTDSNYEDEETQAKDILGDEYFELIEIIKELYDIGVLSGIIKGHKFLSEARVELYEEHKKDLDMLQQVLKKYDKNAYDEMFRVMKEGNYSAYVGSVNARGKNKKIRRNVGEGKKGKNGRSQEAFYKYVKTTLKNYPDDDENIKNILFKIENETFMPKQLTASNGIIPNQLHAAELKAILTNAEKYLPFLLDKDESDLTVSQRILELFKFHIPYYVGPLGAAGKNVWAKRRKGEEKGRIYPWNFEKKIDTQEAAEEFIKRMVRHCSYIKGEHTLPKQSLLYEKFMVLNELNNLKINGTKPDVFVKQDIYENLFKTGKRVTLDKLKSYLYNNSFIDSKEVMITGIDGGFNSSLTSVGKFIGILGEDLFTDSNQAMVEQIIFWGTIYGSDKKFLKNRIEKEYKDRLTPKQIKRILGFKFNGWGKLSKRFLELKGSCECGECSIIQALWQTNHNLMELMSDQYDFKTNLMEVSEKTIKPLSEWTIDNLDDYYMSAPVKRMVWQTIKMLNEICELTGRIPDKIFVEMPREHENGNERKASRKKKLLDLYKAIKSEQKQWAEQMIAEIDKRDEADFRIKKLYLYYIQQGKCMYSGDTIDLDLLLKNNNIYDIDHIYPRHFIKDDSIDNNLVLVKKEINNHKSDKYPLESDIKKDMSGFWKYLCEKKFITKEKYNRLMRTDKFSAEEKAAFVNRQLVETGQGTKVITQILKQAFPDTQVVFVKARMVSDFRHEFGINKVRELNDTHHAKDAYLNIVVGNTYYTKFTNNPINFMKNAEKNPEDVQYKYNMDKIFRYNVIRNGETAWIADNGVTKQHVLKTINRNTVTITRKTEEVHGALSNKVTVWSSKLAKKNPDAYMPVKTTDEKACDVTKYGGITAIANSGYTLVEYNINGKMIRSIEALPVYLGRKNMLTEDKIKEYLHEKIRKEYKNKTVTDLKICILFIPQKSKVCVDGFNYYLGGVTGNSIYLSNAEPLYLSKEDEEYLRKIIKAVGKGYYEETDENGQIIITGERNMKFFNTLSSKLNNRPYNNNRWNIYKIMENKEEIFAGLSIEKQCYVINQIISWINSKTQNVDLSDIKGSSHSGTMTLNKKISECSQFELIYQSVTGMYEKRTDLLKL

SEQ ID NO: 1801 - protein, 1366 aa, unidentified
  REGION 1..1366: note = Description of Unknown: uncultivated organism with predicted taxonomy: Butyrivibrio sp. CAG:318
  REGION 1..1366: note = MG23-47 effector
MDKKMYVGIDMGTNSVGMAVTDEEYNLYRVKGKDLWCSRLFTEADTAAERRTNRISRRRRQREVARQGVLRKLFADEINKVDEGFFARLDESKYHLEDRDSEQKYTLFTDTGYTDKDYFKDYPTIFHLRNELLHPVKDSYDVRLVYLAIANMFKHRGNFLNESLDADKITSSADEAYRSLVETAMMYSIEFPENINVKKFIDIIGENGVSRSKHLENVCEYLGITKKDKQAYEILKLICGMSGVLINIYGEDVIDEENKKFSICFRDSNYEEKEGEALELLGDEYFELLEAIKEIHDIGMLAGIIKGHKYLSEARVDLYEQHKKDLDMLQHVLKKYDMKAYDEMFRVMKAGNYSAYVGSVNAHSKKIRRNGGDGRTQEEFYKNVKAVLKKFPEDDEEIKTILSEIDSETFMPKQLTASNGVIPNQLHVSELKAILTNAEKYLPFLLGKDESGLTVSERIVELFRFHIPYYVGPIGAQGENVWAKRRSGEENGKVYPWNFEQKIDTQSAAKEFINRMVRHCTYLSGERTLPKQSLLYEKFMVLNELNNLKIAGKKPSVQVKQDIYEKLFKLGKKVTLKQLEEYLCNNSIIASKEDIEGIDGGFNSSLTSVGKFRGVLGDELFTDANQAMAEEIIFWGTVYGNDKKFLKDEIESKYGTVLSKDQIKRILGFKFNGWGNLSKTFLELQGSCECGDCSLIQALWETNHNLMELLSEQYGFKKELDALASNVEKPLTEWTIDDLDNKYLSAPVKRMVWQTIKMLREACELTNKEPDRVFVEMPREHGKENDRKASRKKKLLDLYSALKRENKTWAELKIREIEGKTEADFRIKKLYLYYMQQGKCMYSGEKIELNDLFNNNLYDIDHIYPRHFIKDDSLENNLVLVKKQINNHKSDNYPLESDIRKNMNKFWKSLREKNFISEEKYSRLIRTEEFTDEEKAAFISRQLVETRQGTKAITQVLKQAFPNTQIVFVKAGIVSDFRKKFDINKVRALNDTHHAKDAYLNIVVGNTYYTKFTNNPMNFIKDARKNPKNDFYRYNMDKIFDYNVIRNGEEAWIADNGKTKQHVLQIMKKNSVTITVKTEEYHGALSNKVTVWSKEKAKGNPDAYMPVKTSDTKAQDVTKYGGITAIANSGYTLVEYKVKGKKVRSLEALPVYLGRSNALTNEDIMQYISAALQKEYAGKEISDLSVRVPFVPQKSKVRVDGFEYYLGGKTGKSVYLSNAMPLYLSGNDEEYLRKIMKAIEIDNYEEIDKDSNAIITEEKNVALFDVLCVKINSEPYINNQWNIYKILEGKEEIFKNLDIKKQCYIIGQIISWINSSTQNVNLKDVCGSEHSGMQRLNKKISECKECILIHQSVTGMYERRIDLLSI

SEQ ID NO: 1802 - protein, 1368 aa, unidentified; identical to SEQ ID NO: 1765
  REGION 1..1368: note = Description of Unknown: uncultivated organism with predicted taxonomy: Butyrivibrio sp. CAG:318
  REGION 1..1368: note = MG23-48 effector

SEQ ID NO: 1803 - protein, 993 aa, unidentified
  REGION 1..993: note = Description of Unknown: uncultivated organism with predicted taxonomy: Clostridiales
  REGION 1..993: note = MG23-49 effector
MEINLENNAEEIIMGKKMYIGIDMGTSSVGMAVTDENYTLYRVKGKDFWTSRLFKEANTAAERRTNRVSRRRRQRETARMGILRELFSEEINKVDEGFFARLDESKYHIEDRDVKQKYALFADKGYTDKEYYQDYPTIFHLRNELLHPQKDSYDVRLVYLAIANMFKHRGNFLNETLDIDKITASADDVYSQLIEELDLYCIQMPVNINIGELINIIGENGISRSKRLENASKYLGISKKDKQSYEILKLICGLKCILYNIYGENVIDEENKKFSISFTDSNYEDEETQAKDILGDEYFELIEIIKELHDICVLSGIIKGHKFLSEARVELYEEHKNDLDMLQQVLKKYDKNAYDEMFRVMKEGNYSAYVGSVNARGKNKKIRRNGGKGRSQEDFYKYVKTTLKNYPDDDENIKNILFKIENETFMPKQLTASNGIIPNQLHAAEMKAILTNAEKYLPFLLDKDVSGLTVSQRILELFKFHIPYYVGPLGAAGKNVWAKRRKGEEKGRIYPWNFEKKIDTQEAAEEFIKRMVRHCSYIKGEHTLPKQSLLYEKFMVLNELNNLKINGTKPDVFVKQDIYENLFKTGKRVTLDKLKSYLYNNSFIDSKEVMITGIDGGFNSSLTSVGKFIGILGEDLFTDSNQAMVEQIIFWGTIYGNDKKFLKNRIEKEYKDRLTPKQIKRILGFKFNGWGKLSKLFLELKGSCECGECSIIQALWQTNHNLMELMSDQYDFKTNLMELSEETIKPLSEWTIDNLEDYYMSAPVKRMVWQTVKMLNEICELTGRIPDKIFVEMPREHESSNERKASRKKKLLDLYKAVKSEQKQWAEHKITEIDKRDEADFRIKKLYLYYIQQGKCMYSGDTIDLDLLLKNNNIYDIDHIYPRHFIKDDSIDNNLVLVKKEINNHKSDKYPLESDIREDMSGFWKYLCEKKFITKEKYNRLMRTEKFSAEEKAAFVNRQLVETGQGTKVITQILKQAFPDTQVVFVKARMVSD

SEQ ID NO: 1804 - protein, 1386 aa, unidentified
  REGION 1..1386: note = Description of Unknown: uncultivated organism with predicted taxonomy: Clostridiales
  REGION 1..1386: note = MG23-50 effector
MDRDDKKMYVGIDMGTNSVGLAVTDEKYNLYRVKGKDFWCSRIFSKAETAEVRRVNRISRRRRQRETARQGILREFFAEEINKVDEGFFARLDESKYHIEDRENQQKYTLFIDNGYTDKEYYAEYPTIFHLRNELLHPQKDSYDVRLVYLAISNMFKHRGNFLNETLDMGKVTSSAGDIYQQLVEEAMLYVIELPVSIDVERLINIIGEKGVSRSKHLENVSSYLGITKKDKSAYEILKLVCGMSGLLFNIYGEEIIDEENKKFSLNFRDTNYEEKEGQALELLGNDNFQLIEIIKELHDIGVLSSIIKGHKFLSESRVELYEEHKKDLDMLQAVLKRYDKKAYNDMFRIMKEGNYSAYVGSVNSIGQNEKRSEKCQKQKIRRNRGKGSSQEVFYKYVKSVLKKLPEDDKDVKKIMEKIENETFMPKQLTASNGVMPNQLHTVELRAILENAEKYLPFLLNKDESGLTVSQRIVELFKFHIPYYVGPIGAGGQNVWAKRRKGEEKGRIYPWNFEQKIDTQAAAEEFIGRMVRHCTYLANERTLPKQSLLYEKYMVLNELNNMKINGIKPDVSVKQGIYNDLFKKGKRVTLNALKSYLYNNSIIESKEDVVITGIDIVHNGGFSASLTSVGKFIGVLGDELFTDENQTMVEQIIFWGTVYGNDKKFLKNRIQETYAGRLTWEQIKRIAGFKFNGWGNLSKAFLELKGNCECGECSIIQALWETNHNLMELLADQYDFKKNLEAMSNNVEKPLQEWTIEDLEGKYLSAPVKRMVWQTVKMLREVCELTGRQPDKVFVEMPREEGIKNERKNSRKKKLLELYTSIKNEQKAWSEVKIREIDGRTETDFRIKKLYLYYLQHGKCMYSGEKIELNDLFNNNLYDIDHIYPRHFIKDDSIENNLVLVKKQINNHKSDTFPIESSIQKNMMTFWKTLVEHNFITKEKYNRLMRTEEFTDEEKAAFISRQLVETRQGTKAVTQILKQAFPDTQIIFVKAGVVSDFRKKFNINKVRALNDTHHAKDAYLNIVVGNIYNTKFTSNPINFIKDARKNVNDISYKYNMDKMFDYNVCRNGENAWIADNGKSKQHVLSVLGKNSVIITRKTEENHGALSNKVTVWSKDTAKKNPGAYMPVKTTDSKAQDVTKYGGITSIASSGYTLIEYKVKGKTIRSIEALPVYLGKSDTLTEERILEYIGVNLKKEYKDKEISDIKVCVKFIPFKSKIRIDGFNYYLGGKTGNYIYLNNDEALYLNNNDEEYLRKITKAIDITNYEEIDENGNVIITQEKNTKLFNVLCEKLNNKPYRYNRWNIYNVLEGKEETFRKLDVEKQCYIINQIILWVNSAVQNINLKYINGKEHEGSLHMNKKISEYDEAVLIQQSVTGMYERKTDLLKV

SEQ ID NO: 1805 - protein, 1389 aa, unidentified
  REGION 1..1389: note = Description of Unknown: uncultivated organism with predicted taxonomy: Clostridiales
  REGION 1..1389: note = MG23-51 effector
MEINLENNAEEIIMGKKMYIGIDMGTSSVGMAVTDENYTLYRVKGKDFWTSRLFKEANTAAERRTNRVARRRRQRETARMGILRELFSEEINKVDEGFFARLDESKYHIEDRDVKQKYALFADKGYTDKEYYQDYPTIFHLRNELLHPQKDSYDVRLVYLAIANMFKHRGNFLNETLDIDKITASADDVYSQLIEELDLYCIQMPVNINIGELINIIGENGISRSKRLENASKYLGISKKDKQSYEILKLICGLKGILYNIYGENVIDEENKKFSISFTDSNYEDEETQAKDILGDEYFELIEIIKELHDIGVLSGIIKGHKFLSEARVELYEEHKKDLDMLQQVLKKYDKNAYDEMFRVMKEGNYSAYVGSVNARGKNKKIRRNVGEGKKGKNGRSQEAFYKYVKTTLKNFPDDDENIKNILFKIENETFMPKQLTASNGIIPNQLHAAEMKAILTNAEKYLPFLLDKDESGLTVSQRILELFKFHIPYYVGPLGAAGKNVWAKRRKGEEKGRIYPWNFEKKIDTQEAAEEFIKRMVRHCSYIKGEHTLPKQSLLYEKFTVLNELNNLKINGTKPDVFVKQDIYENLFKTGKRVTLDKLKSYLYNNSFIDSKEVMITGIDGGFNSSLTSVGKFIGILGEDLFTDSNQAMVEQIIFWGTIYGSDKKFLKNRIEKEYKDRLTPKQIKRILGFKFNGWGKLSKRFLELKGSCECGECSIIQALWQTNHNLMELMSDQYDFKTNLMEVSEKTIKPLSEWTIDNLDDYYMSAPVKRMVWQTIKMLNEICELTGRIPDKIFVEMPREHENGNERKASRKKKLLDLYKAIKSEQKQWAEQMIAEIDKRDEADFRIKKLYLYYIQQGKCMYSGDTIDLDLLLKNNNIYDIDHIYPRHFIKDDSIDNNLVLVKKEINNHKSDKYPLESDIREDMSGFWKYLCEKKFITKEKYNRLMRTEKFSAEEKAAFVNRQLVETGQGTKVITQILKQAFPDTQVVFVKARMVSDFRHEFGINKVRELNDTHHAKDAYLNIVVGNTYYTKFTNNPINFMKNAEKNPEDVQYKYNMDKIFRYNVIRNGETAWIADNGVTKQHVLKTINRNTVTITRKTEEVHGALSNKVTVWSSKSAEKNPDAYMPVKTTDEKAGDVTKYGGITAIANSGYTLIEYNINGKMIRSIEALPVYLGRKNMLTDDKIKEYLHEKIRKEYKNKTVTDLKVCILFIPQKSKVCVDGFNYYLGGVTGNSIYLSNAEPLYLSKEDEEYLRKIIKAVSKGYYEETDKNGQIIITDERNMKFFNTLGSKLNARPYCNNRWNIYKIMENKEEIFAGLSIEKQCYVINQIISWINSKTQNVDLSDIKGGSHSGTMTLNKKISECSQFELIYQSVTGMYEKRTDLLKL

SEQ ID NO: 1806 - protein, 1366 aa, unidentified
  REGION 1..1366: note = Description of Unknown: uncultivated organism with predicted taxonomy: Butyrivibrio sp. CAG:318
  REGION 1..1366: note = MG23-52 effector
MDKKMYVGIDMGTNSVGMAVTDEEYNLYRVKGKDLWCSRLFTEADTAAERRTNRISRRRRQREVARQGVLRKLFADEINKVDEGFFARLDESKYHLEDRDSEQKYTLFTDTGYTDKDYFKDYPTIFHLRNELLHPVKDSYDVRLVYLAIANMFKHRGNFLNESLDADKITSSADEAYRSLVETAMMYSIEFPENINVKKFIDIIGENGVFRSKHLENVCEYLGITKKDKQAYEILKLICGMSGVLINIYGEDVIDEENKKFSICFRDSNYEEKEGEALELLGDEYFELLEAIKEIHDIGMLAGIIKGHKYLSEARVDLYEQHKKDLDMLQHVLKKYDMKAYDEMFRVMKAGNYSAYVGSVNAHSKKIRRNGGDGRTQEEFYKNVKAVLKKFPEDDEEIKTILSEIDSETFMPKQLTASNGVIPNQLHVSELKAILTNAEKYLPFLLGKDESGLTVSERIVELFRFHIPYYVGPIGAQGENVWAKRRSGEENGKVYPWNFEQKIDTQSAAKEFINRMVRHCTYLSGERTLPKQSLLYEKFMVLNELNNLKIAGKKPSVQVKQDIYEKLFKLGKKVTLKQLEEYLCNNSIIASKEDIEGIDGGFNSSLTSVGKFRGVLGDELFTDANQAMAEEIIFWGTVYGNDKKFLKDEIESKYGTVLSKDQIKRILGFKFNGWGNLSKTFLELQGSCECGDCSLIQALWETNHNLMELLSEQYGFKKELDALASNVEKPLTEWTIDDLDNKYLSAPVKRMVWQTIKMLREACELTNKEPDRVFVEMPREHGKENDRKASRKKKLLDLYSALKREDKTWAELKIREIEGKTEADFRIKKLYLYYMQQGRCMYSGEKIELNDLFNNNLYDIDHIYPRHFIKDDSLENNLVLVKKQINNHKSDNYPLESNIRKNMNEFWKTLRDKNFISKEKYSRLIRTEEFTDEEKAAFISRQLVETRQGTKAITQVLKQAFPNTQIVFVKAGIVSDFRKKFDINKVRALNDTHHAKDAYLNIVVGNTYYTKFTNNPMNFIKDARKNPKNDFYRYNMDKIFDYNVIRNGEEAWIADNGKTKQHVLQIMKKNSVTITVKTEEYHGALSNKVTVWSKEKAKGNPDAYMPVKTSDTKAQDVTKYGGITAIANSGYTLVEYKVKGKKVRSLEALPVYLGRSNALTNEDIMQYISAALQKEYAGKEISDLSVRVPFVPQKSKVRVDGFEYYLGGKTGKNIYLNNAMPLYLSWNDEEYLRKIMKAIEIDNYEEIDKYSNAIITEEKNVALFDVLSVKLNSEPYINNRWNICKTLEGKEEIFKNLDIKKQCYVIGQIISWINSAMQNVNLKDVCGSEHSGMQQLNKKISECKECILIHQSVTGMYERRIDLLSI

SEQ ID NO: 1807 - protein, 1368 aa, unidentified; identical to SEQ ID NO: 1765
  REGION 1..1368: note = Description of Unknown: uncultivated organism with predicted taxonomy: Butyrivibrio sp. CAG:318
  REGION 1..1368: note = MG23-53 effector

SEQ ID NO: 1808 - protein, 1366 aa, unidentified; identical to SEQ ID NO: 1777
  REGION 1..1366: note = Description of Unknown: uncultivated organism with predicted taxonomy: Butyrivibrio sp. CAG:318
  REGION 1..1366: note = MG23-54 effector

SEQ ID NO: 1809 - protein, 1368 aa, unidentified; identical to SEQ ID NO: 1765
  REGION 1..1368: note = Description of Unknown: uncultivated organism with predicted taxonomy: Butyrivibrio sp. CAG:318
  REGION 1..1368: note = MG23-55 effector

SEQ ID NO: 1810 - protein, 1114 aa, unidentified
  REGION 1..1114: note = Description of Unknown: uncultivated organism with predicted taxonomy: Butyrivibrio sp. CAG:318
  REGION 1..1114: note = MG23-56 effector
FFITCLCLERSERNDKNYEEKEGEALELLGDEYFELLETIKEIHDIGMLAGIIKGHKYLSEARVDLYKQHKKDLDMLQHVLKKYDMKAYDEMFRVMKAGNYSAYVGSVNAHSKKIRRNGGDGRTREDFYKNVKAVLKKFPEDDEEIKTILSEIDSETFMPKQLTASNGVIPNQLHVSELKAILTNAEKYLPFLLDKDESGLTVSERIVELFRFHIPYYVGPIGAQGENVWAKRRPGEENGKVYPWNFEQKIDTQSAAKEFINRMVRHCTYLSGERTLPKQSFLYEKFMVLNELNNLRIDGKKPSVQVKQGIYEELFKTGKRVTLNQLIKYLYNKSIIASKEDVVIEGIDGGFNASLTSVGKFRGVLGDELFTDANQAMAEEIIFWGTVYGNDKKFLKDEIESKYGTVLSKDQIKRILGFKFNGWGNLSKTFLELQGSCECGDCSLIQALWETNHNLMELLSEQYGFKKELDALASNVEKPLTEWTIDDLDNKYLSAPVKRMVWQTIKMLREACELTNKEPDRVFVEMPREHGKENDRKASRKKKLLDLYSALKRENKTWAELKIREIEGKTEADFRIKKLYLYYMQQGKCMYSGEKIELNDLFNNNLYDIDHIYPRHFIKDDSLENNLVLVKKQINNHKSDNYPLESNIRKNMNEFWKTLREKNFISKEKYSRLIRTEEFTDEEKAAFISRQLVETRQGTKAITQVLKQAFPNTQIVFVKAGIVSDFRKKFDINKVRALNDTHHAKDAYLNIVVGNTYYTKFTNNPMNFIKDARKNPKNDFYRYNMDKIFDYNVIRNGEEAWIADNGKTKQHVLRIMKKNSVIITVKTEEANGKLSDINIVGKRYIKNADAYMPIKTSIAKMEDVTKYGGYGSISSAGYALVEYKVKGKKVRSLEALPVYLGRSNALTNEDIMQYISAAFQKEYAGKEISDLSVRVPFIPMESKVEIDGFEYYLGGKSTNQFYLKNAMPLYLPDNDEEYFRKIMKAIEIDDYKEVGKNGKAVITKENNMILFDTLSAKLKSEPYIHNRCNIYKILEGKEKIFKDLDIQKQCYVIVKIIDWIKSKTQGVDLTDIQGKKQSGTMKINKRISECRECILIHQSVTGMYERRIDLLSI

SEQ ID NO: 1811 - protein, 829 aa, unidentified; identical to SEQ ID NO: 1781
  REGION 1..829: note = Description of Unknown: uncultivated organism with predicted taxonomy: Butyrivibrio sp. CAG:318
  REGION 1..829: note = MG23-57 effector

SEQ ID NO: 1812 - protein, 1366 aa, unidentified
  REGION 1..1366: note = Description of Unknown: uncultivated organism with predicted taxonomy: Butyrivibrio sp. CAG:318
  REGION 1..1366: note = MG23-58 effector
MDKKMYVGIDMGTNSVGMAVTDEEYNLYRVKGKDFWCSRLFKKANTAAERRTNRISRHRRQREVARQGVLRELFADEINKVDEGFFARLDESKYHLEDRDSEQKYTLFTDTGYTDKDYFKDYPTIFHLRNELLHPVKDSYDVRLVYLAIANMFKHRGNFLNESLDADKITSSADEAYRRLVETAMMYSIEFPENINVKKFIDIIGENGVSRSKHLGNVCEYLGITKKDKPAYEILNLVCGLRGVLINIYGNEVIDEENKKFSICFRDSNYEEKEGEALELLGDEYFELLETIKEIHDIGMLAGIIKGHKYLSEARVDLYKQHKKDLDMLQHVLKKYDMKAYDEMFRVMKAGNYSAYVGSVNAHSKKIRRNGGDGRTREDFYKNVKAVLKKFPEDDEEIKTILSEIDSETFMPKQLTASNGVIPNQLHVSELKAILTNAEKYLPFLLDKDESGLTVSERIVELFRFHIPYYVGPIGAQGENVWAKRRPGEENGKVYPWNFEQKIDTQSAAKEFINRMVRHCTYLSGERTLPKQSFLYEKFMVLNELNNLRIDGKKPSVQVKQGIYEELFKTGKRVTLNQLIKYLYNKSIIASKEDVVIEGIDGGFNASLTSVGKFRGVLGDELFTDANQAMAEEIIFWGTVYGNDKKFLKDEIESKYGTVLSRDQIKRILGFKFNGWGNLSKTFLELQGSCECGDCSLIQALWETNHNLMELLSEQYGFKKELDALASNVEKPLTEWTIDDLDNKYLSAPVKRMVWQTIKMLREACELTNKEPDRVFVEMPREHGKENDRKASRKKKLLDLYSALKRENKTWAELKIREIEGKTEADFRIKKLYLYYMQQGKCMYSGEKIELNDLFNNNLYDIDHIYPRHFIKDDSLENNLVLVKKQINNHKSDNYPLESNIRKNMNEFWKTLREKNFISKEKYSRLIRTEEFTDEEKAAFISRQLVETRQGTKAITQVLKQAFPNTQIVFVKAGIVSDFRKKFDINKVRALNDTHHAKDAYLNIVVGNTYYTKFTNNPMNFIKDARKNPKNDFYRYNMDKIFDYNVIRNGEEAWIADNGKTKQHVLRIMKKNSVIITVKTEEANGKLSDINIVGKRYIKNADAYMPIKTSIAKMEDVTKYGGYGSISSAGYALVEYKVKGKKVRSLEALPVYLGRSNALTNEDIMQYISAAFQKEYAGKEISDLSVRVPFIPMESKVEIDGFEYYLGGKSTNQFYLKNAMPLYLPDNDEEYFRKIMKAIEIDDYKEVGKNGNAVITKENNMILFDTLSAKLKSEPYIHNRCNIYKILEGKEKIFKDLDIQKQCYVIVKIIDWIKSKTQGVDLTDIQGKKQSGTMKINKRISECRECILIHQSVTGMYERRIDLLSI

SEQ ID NO: 1813 - protein, 1389 aa, unidentified
  REGION 1..1389: note = Description of Unknown: uncultivated organism with predicted taxonomy: Clostridiales
  REGION 1..1389: note = MG23-59 effector
MEINLENNAEEIIMGKKMYIGIDMGTSSVGMAVTDENYNLYRVKGKDFWTSRLFKEASTAANRRTNRVARRRRQRELARMGILRELFSEEINKVDEGFFARLDESKYHIEDRDVKQKYALFADKGYTDKEYYQDYPTIFHLRNELLHPQKDSYDVRLVYLAIANMFKHRGNFLNETLDIDKITASADDVYSQLIEELDLYCIQMPVNINIGELINIIGENGISRSKRLENASKYLGISKKDKQSYEILKLICGLKGILYNIYGENVIDEENKKFSISFTDSNYEDEETQAKDILGDEYFELIEIIKELHDIGVLSGIIKGHKFLSEARVELYEEHKKDLDMLQQVLKKYDKNAYDEMFRVMKEGNYSAYVGSVNARGKNKKIRRNVGEGKKGKNGRSQEAFYKYVKTTLKNFPDDDENIKNILFKIENETFMPKQLTASNGIIPNQLHAAEMKAILTNAEKYLPFLLDKDVSGLTVSQRILELFKFHIPYYVGPLGAAGKNVWAKRRKGEEKGRIYPWNFEKKIDTQEAAEEFIKRMVRHCSYIKGEHTLPKQSLLYEKFMVLNELNNLKINGTKPDVFVKQDIYENLFKTGKRVTLDKLKSYLYNNSFIDSKEVMITGIDGGFNSSLTSVGKFIGILGEDLFTDSNQAMVEQIIFWGTIYGSDKKFLKNRIEKEYKDRLTPKQIKRILGFKFNGWGKLSKRFLELKGSCECGECSIIQALWQTNHNLMELMSDQYDFKTNLMELSEETIRPLSEWTIDNLEDYYMSAPVKRMVWQTVKMLNETCELTGRIPDKIFVEMPREHESGNERKASRKKKLLDLYKAVKSEQKQWAEHKITEIDKRDEADFRIKKLYLYYIQHGKCMYSGDTIDLDLLLKNNNIYDIDHIYPRHFIKDDSIDNNLVLVKKEINNHKSDKYPLESDIREDMSGFWKYLCEKKFITKEKYNRLMRTEKFSAEEKAAFVNRQLVETGQGTKVITQILKQAFPDTQVVFVKARMVSDFRHEFGINKVRELNDTHHAKDAYLNIVVGNTYNTKFTNNPINFMKNAEKNPEDVQYKYNMDKIFRYNVIRNGETAWIADNGVTKQHVLKTINRNTVTITRKTEEVHGALSNKVTVWSSKSAKKNPDAYMSVKTTDEKACDVTKYGGFTAIANSGYTLVEYNINGKMIRSIEALPVYLGRKNMLTDDKIKEYLHEKIRKEYKNKTVTDLKVCILFIPQKSKVCVDGFNYYLGGVTGNSIYLSNAEPLYLSKEDEEYLRKIIKAVGKGYYEETDKNGQIIITGERNMKFFNTLSSKLNNRPYNNNRWNIYKIMENKEEIFAGLSIEKQCYVINQIISWINSKTQNVDLSDIKGSSHSGTMTLNKKISECSQFELIYQSVTGMYEKRTDLLKL

SEQ ID NO: 1814 - protein, 1389 aa, unidentified
  REGION 1..1389: note = Description of Unknown: uncultivated organism with predicted taxonomy: Clostridiales
  REGION 1..1389: note = MG23-60 effector
MEINLENNAEEIIMGKKMYIGIDMGTSSVGMAVTDENYNLYRVKGKDFWTSRLFKEANTAAERRTNRVSRRRRQRETARMGILRELFSEEINKVDEGFFARLDESKYHIEDRDVKQKYALFADKGYTDKEYYQDYPTIFHLRNELLHPQKDSYDVRLVYLAIANMFKHRGNFLNETLDIDKITASADDVYSQLIEELDLYCIQMPVNINIGELINIIGENGISRSKRLENASKYLGISKKDKQSYEILKLICGLKGILYNIYGENVIDEENKKFSISFTDSNYEDEETQAKDILGDEYFELIEIIKELHDIGVLSGIIKGHKFLSEARVELYEEHKKDLDMLQQVLKKYDKNAYDEMFRVMKEGNYSAYVGSVNARGKNKKIRRNVGEGKKGKNGRSQEAFYKYVKTTLKNFPDDDENIKNILFKIENETFMPKQLTASNGIIPNQLHAAEMKAILTNAEKYLPFLLDKDESGLTVSQRILELFKFHIPYYVGPLGAAGKNVWAKRRKGEEKGRIYPWNFEKKIDTQEAAEEFIKRMVRHCSYIKGEHTLPKQSLLYEKFTVLNELNNLKINGTKPDVFVKQDIYENLFKTGKRVTLDKLKSYLYNNSFIDSKEVMITGIDGGFNSSLTSVGKFIGILGEDLFTDSNQAMVEQIIFWGTIYGSDKKFLKNRIEKEYKDRLTPKQIKRILGFKFNGWGKLSKRFLELKGSCECGECSIIQVLWQTNHNLMELMSDQYDFKTNLMELSEETIKPLSEWTIDNLEDYYMSTPVKRMVWQTVKMLNETCELTGRVPDKIFVEMPREHESGNERKASRKKKLLDLYKAVKSEQKQWAEHKITEIDKRDEADFRIKKLYLYYIQQGKCMYSGDTIDLDLLLKNNNIYDIDHIYPRHFIKDDSIDNNLVLVKKEINNHKSDKYPLESDIREDMSGFWKYLCEKKFITKEKYNRLMRTEKFSAEEKATFVNRQLVETGQGTKVITQILKQAFPDTQVVFVKARMVSDFRHEFGINKVRELNDTHHAKDAYLNIVVGNTYNTKFTNNPINFMKNAEKNPEDVQYKYNMDKIFRYNVIRNGETAWIADNGTTKQHVIKTINRNTVTITRKTEEVHGALSNKVTVWSSKSAEKNPDAYMPVKTTDEKAGDVTKYGGITAIANSGYTLVEYNINGKMIRSIEALPVYLGRKNMLTEDKIKEYLHEKIRKEYKNKTVTDLKVCILFIPQKSKVCVDGFNYYLGGVTGNSIYLSNAEPLYLSKEDEEYLRKIIKAVGKGYYEETDKNGQIIITGERNMKFFNTLGSKLNARPYNNNRWNIYKIMDNKEEIFAGLSIEKQCYVINQIISWINSKTQNVDLSDIKGSSHSGTMTLNKKISDCSQFELIYQSVTGMYEKRTDLLKL

SEQ ID NO: 1815 - protein, 881 aa, unidentified
  REGION 1..881: note = Description of Unknown: uncultivated organism with predicted taxonomy: Clostridiales
  REGION 1..881: note = MG23-61 effector
MGKNMYIGVDMGTSSVGMAVTDENYTLYRVKGKDFWTSRLFKEANTAAERRTNRVARRRRQRETARMGILRELFSEEINKVDEGFFARLDESKYHIEDRDVKQKYALFADKGYTDKEYYQDYPTIFHLRNELLHPQKDSYDVRLVYLAIANMFKHRGNFLNETLDIDKITASADDVYSQLIEELDLYCIQMPVNINIGELINIIGENGISRSKRLENASKYLGISKKDKQSYEILKLICGLKGILYNIYGENVTDEENKKFSISFTDSNYEDEETQAKDILGDEYFELIEIIKELHDIGVLSGIIKGHKFLSEARVELYEEHKKDLDMLEQVLKKYDKNAYDEMFRVMKEGNYSAYVGSVNARGKNKKIKRNVGEGKKGKNGRSQEAFYKYVKTTLKNFPDDDENIKNILFKIENETFMPKQLTASNGIIPNQLHAAEMKAILTNAEKYLPFLLDKDESGLTVSQRILELFKFHIPYYVGPLGAAGKNVWAKRRKGEEKGRIYPWNFEKKIDTQEAAEEFIKRMVRHCSYIKGEHTLPKQSLLYEKFTVLNELNNLKINGTKPDVFVKQDIYENLFKTGKRVTLDKLKSYLYNNSFIDSKEVMITGIDGGFNSSLTSVGKFIGILGEDLFTDSNKAMVEQIIFWGTIYGSDKKFLKNRIEKEYKDRLTPKQIKRILGFKFNGWGKLSKRFLELKGSCECGECSIIQALWQTNHNLMELMSDQYDFKTNLMEVSEKTIKPLSEWTIDNLDDYYMSAPVKRMVWQTIKMLNEICELTGRIPDKIFVEMPREHENGNERKASRKKKLLDLYKAIKSEQKQWAEQMIAEIDKRDEADFRIKKLYLYYIQQGKCMYSGDTIDLDLLLKNNNIYDIDHIYPRHFIKD

SEQ ID NO: 1816 - protein, 1368 aa, unidentified; identical to SEQ ID NO: 1788
  REGION 1..1368: note = Description of Unknown: uncultivated organism with predicted taxonomy: Butyrivibrio sp. CAG:318
  REGION 1..1368: note = MG23-62 effector

SEQ ID NO: 1817 - protein, 1366 aa, unidentified
  REGION 1..1366: note = Description of Unknown: uncultivated organism with predicted taxonomy: Butyrivibrio sp. CAG:318
  REGION 1..1366: note = MG23-63 effector
MDKKMYVGIDMGTNSVGMAVTDEEYNLYRVKGKDLWCSRLFTEADTAAERRTNRISRRRRQREVARQGVLRKLFADEINKVDEGFFARLDESKYHLEDRDSEQKYTLFTDTGYTDKDYFKDYPTIFHLRNELLHPVKDSYDVRLVYLAIANMFKHRGNFLNESLDADKITSSADEAYRSLVETAMMYSIEFPENINVKKFIDIIGENGVSRSKHLENVCEYLEITKKDKQAYEILKLICGMSGVLINIYGEDVIDEENKKFSICFRDSNYEEKEGEALELLGDEYFELLETIKEIHDIGMLAGIIKGHKYLSEARVDLYEQHKKDLDMLQHVLKKYDMKAYDEMFRVMKAGNYSAYVGSVNAHSKKIRRNGGDGRTREEFYKNVKAVLKKFPEDDEEIKTILSEIDSETFMPKQLTASNGVIPNQLHVSELKAILTNAEKYLPFLLDKDESGLTVSERIVELFRFHIPYYVGPIGAQGENVWAKRRPGEENGKVYPWNFEQKIDTQSAAKEFINRMVRHCTYLSGERTLPKQSFLYEKFMVLNELNNLRIDGKKPSVQVKQGIYEELFKTGKRVTLNQLIKYLYNKSIIASKEDVVIEGIDGGFNASLTSVGKFRGVLGDELFTDANQAMAEEIIFWGTVYGNDKKFLKDEIESKYGTVLSKDQIKRILGFKFNGWGNLSKTFLELQGSCECGDCSLIQALWETNHNLMELLSEQYGFKKELDALASNVEKPLTEWTIDDLDNKYLSAPVKRMVWQTIKMLREACELTNKEPDRVFVEMPREHGKENDRKASRKKKLLDLYSTLKREDKTWAELKIREIEGRTEADFRIKKLYLYYMQQGRCMYSGEKIELNDLFNNNLYDIDHIYPRHFIKDDSLENNLVLVKKQINNHKSDNYPLESNIRKNMNEFWKTLREKNFISKEKYSRLIRTEEFTDEEKAAFISRQLVETRQGTKAITQVLKQAFPNTQIVFVKAGIVSDFRKKFDINKVRALNDTHHAKDAYLNIVVGNTYYTKFTNNPMNFIKDARKNPKNDFYRYNMDKIFDYNVIRNGEEAWIADNGKTKQHVLRIMKKNSVIITVKTEEANGKLSDINIVGKRYIKNADAYMPIKTSIAKMEDVTKYGGYGSISSAGYALVEYKVKGKKVRSLEALPVYLGRSNALTNEDIMQYISAAFQKEYAGKEISDLSVRVPFIPMESKVEIDGFEYYLGGKSTNQFYLKNAMPLYLPDNDEEYFRKIMKAIEIDDYKEVGKNGKAVITKENNMILFDTLSAKLKSEPYIHNRCNIYKILEGKEKIFKDLDIQKQCYVIVKIIDWIKSKTQGVDLTDIQGKKQSGTMKINKRISECRECILIHQSVTGMYERRIDLLSI

SEQ ID NO: 1818 - protein, 1376 aa, unidentified; identical to SEQ ID NO: 1800
  REGION 1..1376: note = Description of Unknown: uncultivated organism with predicted taxonomy: Clostridiales
  REGION 1..1376: note = MG23-64 effector

SEQ ID NO: 1819 - protein, 1389 aa, unidentified
  REGION 1..1389: note = Description of Unknown: uncultivated organism with predicted taxonomy: Clostridiales
  REGION 1..1389: note = MG23-65 effector
MEINLENNAEEIIMGKKMYIGIDMGTSSVGMAVTDENYNLYRVKGKDFWTSRLFKEANTAAKRRTNRVSRRRRQRETARMGILRELFSEEINKVDEGFFARLDESKYHIEDRVVKQKYALFADKEYTDKEYYKEYPTIFHLRNELLHPQKNSYDVRLVYLAVANMFKHRGNFLNETLDIDKITASADDVYSQLIEELDLYCIQMPVNINIGELINIIGENGISRSKRLENASKYLGISKKDKQSYEILKLICGLKGILYNIYGENVIDEENKKFSLSFTDSNYEDEETQAKDILGDEYFDLIEIIKELHDIGVLSGIIKGHKFLSEARVELYEEHKKDLDMLQQVLKKYDKNAYDEMFRVMKEGNYSAYVGSVNARGKNKKIRRNVGEGKKGRNGRSQEAFYKYVKTTLKNFPDDDENIKNILFKIENETFMPKQLTASNGIIPNQLHAAEMKAILTNAEKYLPFLLDKDESGLTVSQRILELFKFHIPYYVGPLGAAGKNVWAKRRKGEEKGRIYPWNFEKKIDTQEAAEEFIKRMVRHCSYIKGEHTLPKQSLLYEKFMVLNELNNLKINGTKPDVFVKRDIYENLFKTGKRVTLDKLKSYLYNNSFIDSKEVMITGIDGGFNSSLTSVGKFIGILGEDLFTDSNQAMVEQIIFWGTIYGSDKKFLKNRIEKEYKDRLTPKQIKRILGFKFNGWGKLSKLFLELKGSCECGECSIIQALWQTNHNLMELMSDQYDFKTNLMELSEETIKPLSEWTIDNLEDYYMSAPVKRMVWQTVKMLNETCELTGRLPDKIFVEMPREHESGNERKASRKKKMLDLYKAIKSEQKQWAEHMIAEIDKSDEADFRIKKLYLYYIQQGKCMYSGDTIDLDLLLKNNNIYDIDHIYPRHFIKDDSIDNNLVLVKKEINNHKSDKYPLESDIREDMSGFWKYLCEKKFITKEKYNRLMRTEKFSAEEKAAFVNRQLVETGQGTKVITQILKQAFPDTQVVFVKARMVSDFRHEFGINKVRELNDTHHAKDAYLNIVVGNTYYTKFTNNPINFMKNAEKNPEDVQYKYNMDKIFRYNVIRNGETAWIADNGVTKQHVIKTINRNTVTITRKTEEVHGALSNKVTVWSSKLAKKNPDAYMPVKTTDEKACDVTKYGGITAIANSGYTLVEYNINGKMIRSIEALPVYLGRKNMLTEDKIKEYLHEKIRKEYKNKTVTDLKVCILFIPQKSKVCVDGFNYYLGGVTGNSIYLSNAEPLYLSKEDEEYLRKIIKAVGKGYYEETDENGQIIITGERNMKFFNTLGSKLNARPYNNNRWNIYKIMENKEEIFAGLSIEKQCYVINQIISWINSKTQNVDLSDIKGSSHSGTMPLNKKISECSQFELIYQSVTGMYEKRTDLLKL

SEQ ID NO: 1820 - protein, 1368 aa, unidentified
  REGION 1..1368: note = Description of Unknown: uncultivated organism with predicted taxonomy: Butyrivibrio sp. CAG:318
  REGION 1..1368: note = MG23-66 effector
MDKKMYVGIDMGTNSVGMAVTDEEYNLYRVKGKDLWCSRLFTEADTAAERRTNRISRRRRQREVARQGVLRELFAEEINKVDEGFFARLDESKYHLEDRDSEQKYTLFTDTGYTDKDYFKDYPTIFHLRNELLHPVKDSYDVRLVYLAIANMFKHRGNFLNESLDADKITSSADESYRSLVETAMMYSIEFPENINVKKFIDIIGENGVSRSKHLENVCEYLEITKKDKQAYEILKLICGMSGVLINIYGNEVIDEENKKFSICFRDSNYEEKEGEALELLGDEYFELLEAIKEIHDIGMLAGIIKGHKYLSEARVDLYEQHKKDLDMLQHVLKKYDMKAYDEMFRVMKAGNYSAYVGSVNAHSKKIRRNGGDGRTQEEFYKNVKAVLKKFPEDDEEIKTILSEIDSETFMPKQLTASNGVIPNQLHVSELKAILTNAEKYLPFLLDKDESGLTVSERIVELFRFHIPYYVGPIGAQGENVWAKRRPGEENGKVYPWNFEQKIDTQSAAKEFINRMVRHCTYLSGERTLPKQSFLYEKFMVLNELNNLRIAGKKPSVQVKQGIYEELFKTGKRVTLNKLKDYLYNKSIIASKEDVVIEGIDGGFNASLTSVGKFRGVLGDELFTDANQAMAEEIIFWGTVYGNDKKFLKDEIESKYGTVLSKDQIKRILGFKFNGWGNLSKTFLELQGSCECGDCSLIQALWETNHNLMELLSEQYGFKKELDALASNVEKPLTEWTIDDLDNKYLSAPVKRMVWQTIKMLREACELTNKEPDRVFVEMPREHGKENDRKASRKKKLLDLYSALKREDKTWAELKIREIEGRTEADFRIKKLYLYYMQQGRCMYSGEKIELNDLFNNNLYDIDHIYPRHFIKDDSLENNLVLVKKQINNHKSDNYPLESNIRKNMNEFWKTLRDKNFISKEKYSRLIRTEEFTDEEKAAFISRQLVETRQGTKAITQILKQAFPNTQIVFVKAGIVSDFRKKFDINKVRALNDTHHAKDAYLNIVVGNTYYTKFTNNPMNFIKDARKNPKNDFYRYNMDKIFDYNVIRNGEEAWISDNGKTKQHVLRIMKKNSVTITVKTEEAHGALSNKVTVWSKEKAKGNPDAYMPVKTSDIKAQDVTKYGGITAIANSGYTLVEYKVKGKKVRSLEALPVYLGRSNALTNEDIMQYISAALQNEYAGKEISDLSVRVPFVPQKSKVRIDGFEYYLGGKTGKSVYLSNAMPLYLSGNDEEYLRKIMKAIEIDNYEEIDKDSNAIITEEKNVALFDVLCVKINSEPYINNRWNIYKILEGKEEIFKNLDIEKQCYIIGQIISWINSSTQNVNLKDVCGSEHSGMQQLNKKISECKECILIHQSVTGMYERRIDLLSI

SEQ ID NO: 1821 - protein, 1366 aa, unidentified; identical to SEQ ID NO: 1777
  REGION 1..1366: note = Description of Unknown: uncultivated organism with predicted taxonomy: Butyrivibrio sp. CAG:318
  REGION 1..1366: note = MG23-67 effector

SEQ ID NO: 1822 - protein, 1366 aa, unidentified
  REGION 1..1366: note = Description of Unknown: uncultivated organism with predicted taxonomy: Butyrivibrio sp. CAG:318
  REGION 1..1366: note = MG23-68 effector
MDKKMYVGIDMGTNSVGMAVTDEEYNLYRVKGKDLWCSRLFTEADTAAERRTNRISRRRRQREVARQGVLRKLFADEINKVDEGFFARLDESKYHLEDRDSEQKYTLFTDTGYTDKDYFKDYPTIFHLRNELLHPVKDSYDVRLVYLAIANMFKHRGNFLNESLDADKITSSADEAYRSLVETAMMYSIEFPENINVKKFIDIIGENGVSRSKHLENVCEYLEITKKDKQAYEILKLICGMSGVLINIYGEDVIDEENKKFSICFRDSNYEEKEGEALELLGDEYFELLEAIKEIHDIGMLAGIIKGHKYLSEARVDLYEQHKKDLDMLQHVLKKYDMKAYDEMFRVMKAGNYSAYVGSVNAHSKKIRRNGGDGRTQEEFYKNVKAVLKKFPEDDEEIKTILSEIDSETFMPKQLTASNGVIPNQLHVSELKAILTNAEEYLPFLLGKDESGLTVSERIVELFRFHIPYYVGPIGAQGENVWAQRRPGEEKGRVYPWNFEQKIDTQSAAKEFINRMVRHCTYLSGERTLPKQSLLYEKFMVLNELNNLKIAGKKPSVQVKQDIYEKLFKLGKKVTLKQLEEYLCNNSIIASKEDIEGIDGGFNSSLTSVGKFRGVLGDELFTDANQAMAEEIIFWGTVYGNDKKFLKDEIESKYGTVLSKDQIKRILGFKFNGWGNLSKTFLELQGSCECGDCSLIQALWETNHNLMELLSEQYGFKKELDALASNVEKPLTEWTIDDLDNKYLSAPVKRMVWQTIKMLREACELTNKEPDRVFVEMPREHGKENDRKASRKKKLLDLYSALKREDKTWAELKIREIEGRTEADFRIKKLYLYYMQQGRCMYSGEKIELNDLFNNNLYDIDHIYPRHFIKDDSLENNLVLVKKQINNHKSDNYPLESNIRKNMNEFWKTLRDKNFISKEKYSRLIRTEEFTDEEKAAFISRQLVETRQGTKAITQILKQAFPNTQIVFVKAGIVSDFRKKFDINKVRALNDTHHAKDAYLNIVVGNTYYTKFTNNPMNFIKDARKNPKNDFYRYNMDKIFDYNVIRNGEEAWIADNGKTKQHVLQIMKKNSVTITVKTEEYHGALSNKVTVWSKEKAKGNPDAYMPVKTSDTKAQDVTKYGGITAIANSGYTLVEYKVKGKKVRSLEALPVYLGRSNALTNEDIMQYISAALQKEYAGKEISDLSVRVPFVPQKSKVRVDGFEYYLGGKTGKSVYLSNAMPLYLSGNDEEYLRKIMKAIEIDNYEEIDKDSNAIITEEKNVALFDVLCVKINSEPYINNQWNIYKILEGKEEIFKKLDIKKQCYIIGQIISWINSSTQNVNLKDVCGSEHSGMQRLNKKISECKECILIHQSVTGMYERRIDLLSI

SEQ ID NO: 1823 - protein, 1366 aa, unidentified
  REGION 1..1366: note = Description of Unknown: uncultivated organism with predicted taxonomy: Butyrivibrio sp. CAG:318
  REGION 1..1366: note = MG23-69 effector
MDKKMYVGIDMGTNSVGMAVTDEEYNLYRVKGKDLWCSRLFTEADTAAERRTNRISRRRRQREVARQGVLRKLFADEINKVDEGFFARLDESKYHLEDRDSEQKYTLFTDTGYTDKDYFKDYPTIFHLRNELLHPVKDSYDVRLVYLAIANMFKHRGNFLNESLDADKITSSADEAYRSLVETAMMYSIEFPENINVKKFIDIIGENGVSRSKHLENVCEYLGITKKDKQAYEILKLICGMSGVLINIYGEDVIDEENKKFSICFRDSNYEEKEGEALELLGDEYFELLEAIKEIHDIGMLAGIIKGHKYLSEARVDLYEQHKKDLDMLQHVLKKYDMKAYDEMFRVMKAGNYSAYVGSVNAHSKKIRRNGGDGRTQEEFYKNVKAVLKKFPEDDEEIKTILSEIDSETFMPKQLTASNGVIPNQLHVSELKAILTNAEKYLPFLLGKDESGLTVSERIVELFRFHIPYYVGPIGAQGENVWAKRRSGEENGKVYPWNFEQKIDTQSAAKEFINRMVRHCTYLSGERTLPKQSLLYEKFMVLNELNNLKIAGKKPSVQVKQDIYEKLFKLGKKVTLKQLEEYLCNNSIIASKEDIEGIDGGFNSSLTSVGKFRGVLGDELFTDANQAMAEEIIFWGTVYGNDKKFLKDEIESKYGTVVSKDQIKRILGFKFNGWGNLSKTFLELQGSCECGDCSLIQALWETNHNLMELLSEQYGFKKELDALASNVEKPLTEWTIDDLDNKYLSAPVKRMVWQTIKMLREACELTNKEPDRVFVEMPREHGKENDRKASRKKKLLDLYSALKRENKTWAELKIREIEGKTEADFRIKKLYLYYMQQGKCMYSGEKIELNDLFNNNLYDIDHIYPRHFIKDDSLENNLVLVKKEINNHKSDNYPLESDIRKNMNKFWKSLRDKNFISKEKYSRLIRTEEFTDEEKAAFISRQLVETRQGTKAITQVLKQAFPNTQIVFVKAGIVSDFRKKFDINKVRALNDTHHAKDAYLNIVVGNTYYTKFTNNPMNFIKDARKNPKNDFYRYNMDKIFDYNVIRNGEEAWIADNGKTKQHVLRIMKKNSVTITVKTEEYHGALSNKVTVWSKEKAKGNPDAYMPVKTSDTKAQDVTKYGGITSIANSGYTLVEYKVKGKKVRSLEALPAYLGRSNALTNEDIMQYISAALQKEYAGKEISDLSVRVPFVPQKSKVRVDGFEYYLGGKTGKSVYLSNAMPLYLSGNDEEYLRKIMKAIEIDNYEEIDKDSNAIITEEKNVALFDVLCVKLNSEPYINNRWNICKTLEGKEEIFKNLDIKKQCYVIGQIISWINSAMQNVNLKDVCGSEHAGTQTLNKKISESKECILIHQSVTGMYERKIDLLSI

SEQ ID NO: 1824 - protein, 1368 aa, unidentified
  REGION 1..1368: note = Description of Unknown: uncultivated organism with predicted taxonomy: Butyrivibrio sp. CAG:318
  REGION 1..1368: note = MG23-70 effector
MDKKMYVGIDMGTNSVGMAVTDEEYNLYRVKGKDFWCSRLFKKANTAAERRTNRISRHRRQREVARQGVLRELFADEINKVDEGFFARLDESKYHLEDRDSEQKYTLFTDTGYTDKDYFKDYPTIFHLRNELLHPVKDSYDVRLVYLAIANMFKHRGNFLNESLDADKITSSADEAYRRLVETAMMYSIEFPENINVKKFIDIIGENGVSRSKHLGNVCEYLGITKKDKPAYEILNLVCGLRGVLINIYGNEVIDEENKKFSICFRDSNYEEKEGEALELLGDEYFELLETIKEIHDIGMLTGIIKGHKYLSEARVDLYKQHKKDLDMLQHVLKKYDMKAYDEMFRVMKAGNYSAYVGSVNAHSKKIRRNGGDGRTREDFYKNVKAVLKKFPEDDEEIKTILSEIDSETFMPKQLTASNGVIPNQLHVSELKAILTNAEKYLPFLLDKDESGLTVSERIVELFRFHIPYYVGPIGAQGENVWAKRRPGEENGKVYPWNFEQKIDTQSAAKEFINRMVRHCTYLSGERTLPKQSFLYEKFMVLNELNNLRIDGKKPSVQVKQGIYEELFKTGKRVTLNQLIKYLYNKSIIASKEDVVIEGIDGGFNASLTSVGKFRGVLGDELFTDANQAMAEEIIFWGTVYGNDKKFLKDEIESKYGTVLSKDQIKRILGFKFNGWGNLSKTFLELQGSCECGDCSLIQALWETNHNLMELLSEQYGFKKELDALASNVEKPLTEWTIDDLDNKYLSAPVKRMVWQTIKMLREACELTNKEPDRVFVEMPREHGKENDRKASRKKKLLDLYSALKRENKTWAELKIREIEGKTEADFRIKKLYLYYMQQGKCMYSGEKIELNDLFNNNLYDIDHIYPRHFIKDDSLENNLVLVKKQINNHKSDNYPLESNIRKNMNEFWKTLREKNFISKEKYSRLIRTEEFTDEEKAAFISRQLVETRQGTKAITQVLKQAFPNTQIVFVKAGIVSDFRKKFDINKVRALNDTHHAKDAYLNIVVGNTYYTKFTNNPMNFIKDARKNPKNDFYRYNMDKIFDYNVIRNGEEAWIADNGKTKQHVLQIMKKNSVTITVKTEEYHGALSNKVTVWSKEKAKGNPDAYMPVKTSDTKAQDVTKYGGITAIANSGYTLVEYKVKGKKVRSLEALPVYLGRSNALTNEDIMQYISAALQKEYAGKEISDLSVRVPFVPQKSKVRVDGFEYYLGGKTGKSVYLSNAMPLYLSGNDEEYLRKIMKAIEIDNYEEIDKDSNAIITEEKNVALFDVLCVKINSEPYINNQWNIYKILEGKEEIFKNLDIKKQCYIIGQIISWINSSTQNVNLKDVCGSEHSGMQRLNKKISECKECILIHQSVTGMYERRIDLLSI

SEQ ID NO: 1825 - protein, 774 aa, unidentified
  REGION 1..774: note = Description of Unknown: uncultivated organism with predicted taxonomy: Butyrivibrio sp. YAB3001
  REGION 1..774: note = MG23-71 effector
GNFLNESLSTNSNSVSISDAYQNLVEIANLFDISFPANIDVTKLQDILSDRTTSKRVKLEQLVELMGIVKKASPAEYELLQMCCGMKGKLSNIFGEVISEEDKAFSFSFSDSKYEENAGKALELVGDEYYEIIDAVKEVYDIGLLANIMKGEKYLSDARVADYKAHKKDLALLKQVIREYAEDEYDNFFRKMDEGNYSAYVGSVNSKLEKIRRNGNKGRSQEDLYKTIQTIIKNMREEDKEDSRVKEILSKIEAGSFLPKQLTGSNGVIPNQVHEREMKQILENASTYLPFLREKDESGLSVAERILKMFTFHIPYYIGPLGQEHLDENGYNVWARRIAPGPIYPWNIEEKIDVNEAAEKFITRMLRKCTYIQDEQALPKQSLLYEKFMVLNELNNLRIFGEKISVEVKQNIFNELFMKGKKVTRDNLIKYLVASGVISKNESAEEAISGVDGDFKSYLSSVNKFESIFGKESIYGSKREMIEKIIFWGTVFGKDKRIIKEKLKKEYGSELSDDVIKRIAGFNFSGWGNLSEELLEMPGSCGTDEEEKSIIICLWETNENLMELLGSSHTFKKEIENRIATQNKELMEWTIEDLDGMYLSPSVKRRVWQTLKVLKEIYQVTGGEPEKIFVEMPREEGEKGKRTESRKKKLEFLYKGQKQFLQEIGKRDERDFRQKKLYLYYLQNGKSMYTGNEIDLDELLSNNSKYDIDHIYPRHYIKDDSLDNNLVLVEKEINNDIKGGDYPISKTIQSKMRSFWKELQEKGFITSEKYNRLV

SEQ ID NO: 1826 - protein, 1386 aa, unidentified
  REGION 1..1386: note = Description of Unknown: uncultivated organism with predicted taxonomy: Eubacterium
  REGION 1..1386: note = MG23-72 effector
MDRDDKKMYVGIDMGTNSVGLAVTDENYNLYRVKGKDFWCSRIFSKAETAEVRRVNRISRRRRQRETARQGILREFFAEEINKVDEGFFARLDESKYHIEDRENQQKYTLFIDNGYTDKEYYAEYPTIFHLRNELLHPQKDSYDVRLVYLAISNMFKHRGNFLNETLDMGKVTSSAGDIYQQLVEEAMLYVIELPVSIDVERLINIIGEKGVSRSKHLENVSSYLGITKKDKSAYEILKLVCGMSGLLFNIYGEEIIDEENKKFSLNFRDTNYEEKEGKALELLGNDNFQLIEIIKELHDIGVLSSIIKGHKFLSESRVELYEEHKKDLDMLQVVLKRYDKKAYNDMFRIMKEGNYSAYVGSVNSIGQNEKRSEKCQKQKIRRNRGKGSSQEVFYKYVKSVLKKLPEDDKDVKKIMEKIENETFMPKQLTASNGVIPNQLHTVELRAILENAEKYLSFLLNKDESGLTVSQRIVELFKFHIPYYVGPIGASGQNVWAKRRKGEEKGRIYPWNFEQKIDTQAAAEEFIGRMVRHCTYLANERTLPKQSLLYEKYMVLNELNNMKINGIKPDVSVKQGIYDDLFKKGKRVTLNALKSYLYNNSIIESKEDVVITGIDIVHNGGFSASLTSVGKFIGVLGDELFTDENQTMVEQIIFWGTVYGNDKKFLKNRIQETYAGRLTWEQIKRIAGFKFNGWGNLSKAFLELKGNCECGECSIIQALWETNHNLMELLADQYDFKKNLEAMSNNVEKPLQEWTIEDLEGKYLSAPVKRMVWQTMKMLREVCELTGRQPDKVFVEMPREEGIKNERKNSRKKKLLELYTSIKNEQKAWSEVKIREIDGRTETDFRIKKLYLYYLQQGKCMYSGEKIELNDLFNNNLYDIDHIYPRHFIKDDSIENNLVLVKKQINNHKSDTFPIESSIQKNMMTFWKTLVEHNFITKEKYNRLMRTEEFTDEEKAAFISRQLVETRQGTKAITQILKQAFPDTQIIFVKAGVVSDFRKKFNINKVRALNDTHHAKDAYLNIVVGNIYNTKFTSNPINFIKDARKNVNDVSYKYNMDKMFDYNVCRNGENAWIADNGKSKQHVLSVLGKNSVIITRKTEENHGALSNKVTVWSKETAKKNPGAYMPVKTTDSKAQDVTKYGGITSVASSGYTLIEYKVKGKIIRSIEALPVYLGKSDTLTEEKILEYIGESLEKEYKDKKISDIKVRVKFIPLKSKIRLDGFNYYLGGKTGNYIYLNNNEALYLNNNDEEYLRKITKAIDITNYEEIDENGNVIITHEKNTKLFNVLCEKLNNKPYINNRWNIYNVLEGKEEIFRKLDVEKQCYIINQIILWGNSAVQNINLKYINGKEHEGSLLMNKKISEYDEVVLIQQSVTGMYERKTDLLKV

SEQ ID NO: 1827 - protein, 114 aa, unidentified
  REGION 1..114: note = Description of Unknown: uncultivated organism with predicted taxonomy: Candidatus Melainabacteria
  REGION 1..114: note = MG1-4 RuvC-III domain
AETSHIARVAQQMTAFIFGWGLQIQGESRRIFVNNGSSTCAIRKRYGLNKLLGDNLKKNRSNDKHHALDAICISFSRDFKYDKEIKKDIIKGFNPEIVKNAIDKIMPYPYANDK

SEQ ID NO: 1828 - protein, 142 aa, unidentified
  REGION 1..142: note = Description of Unknown: uncultivated organism with predicted taxonomy: Verrucomicrobia
  REGION 1..142: note = MG1-5 RuvC-III domain
AETAWISKLAQKICCIHFGFQFGGLKGEKKVWTVSGNTTAMIRGRYGLNRLLHNEEISEDLPLLDRIVKEKNFEEKNRDNKKHHALDAMCICFAPTSNAKKALSRKNILPEEIAKNPESDDARNFFAKYLAEVVPTKVAIKK

SEQ ID NO: 1829 - protein, 140 aa, unidentified
  REGION 1..140: note = Description of Unknown: uncultivated organism with predicted taxonomy: unclassified Verrucomicrobia (miscellaneous)
  REGION 1..140: note = MG1-6 RuvC-III domain
AETAHIAKLAQKIVCMHFGFQFGGLSGTKRVFTVPGALTSRIRKFYGLDRILHNAAAESENLSFEEFLKFSEDLEKKNRKNKKHHALDAMCLCFAPTGVDSRRAKLGEILPEKLRSEKAAREFFKSYLDKIMPVDVAPKK

SEQ ID NO: 1830 - protein, 140 aa, unidentified
  REGION 1..140: note = Description of Unknown: uncultivated organism with predicted taxonomy: unclassified Verrucomicrobia (miscellaneous)
  REGION 1..140: note = MG1-7 RuvC-III domain
AETAHISKLAQKIVCLHFGFQFGGLSGTKRVFTVPGALTARIRTFYGLNKILHNEDLAHETLSFEGFLKRGEELDKKNRANKKHHALDAMCLCFAPTGVNSKRARVDMLLPPKIRSEKEAELFFRKYLDKLIPVDVAPKK

SEQ ID NO: 1831 - protein, 137 aa, unidentified
  REGION 1..137: note = Description of Unknown: uncultivated organism
  REGION 1..137: note = MG1-1 RuvC-III domain
AETAWISKLAQAIVNLQFGWTNGYDEKRERRVIVVSGGLTARVRRKYGLDKLLYNDVTDLEVLAKKVKNRDDKRHHALDAMVMTFIPQWARNPDQEGFFRFPREFRDASGREDYQKVRQLFAKHLSEVMPTNIAFER

SEQ ID NO: 1832 - protein, 127 aa, unidentified
  REGION 1..127: note = Description of Unknown: uncultivated organism with predicted taxonomy: Verrucomicrobia
  REGION 1..127: note = MG1-2 RuvC-III domain
AETAWISKLAQTILNLKFGWTNGNTPDGRKAVVVVPGGLTARIRRKYSLNSLLAGDGVDEEEAEKKNRKDHRHHALDAMVISFLPGWVANPDKEHFFRFPEPVRANPRGFFQTAIHNVVPRQLCFEK

SEQ ID NO: 1833 - protein, 137 aa, unidentified
  REGION 1..137: note = Description of Unknown: uncultivated organism
  REGION 1..137: note = MG1-3 RuvC-III domain
QLARQLRAEIMRWMQVDDKPDEAARRIGTPSGWLAAQARKSWLPAEEYEKVRNNVTHHLIDAAILAHIPPREGMNSVRCKGIFYVESVPVRDPVTGDTTYRLETKALPELSPLPRLKHWLPDNGEYDVCPVWKPRRQ

SEQ ID NO: 1834 - protein, 137 aa, unidentified; identical to SEQ ID NO: 1833
  REGION 1..137: note = Description of Unknown: uncultivated organism
  REGION 1..137: note = MG1-13 RuvC-III domain

SEQ ID NO: 1835 - protein, 140 aa, unidentified
  REGION 1..140: note = Description of Unknown: uncultivated organism
  REGION 1..140: note = MG1-8 RuvC-III domain
AETAWISKLAQTIVNLRFGWRNGVDYSGPQPVKRVIVVSGGLTARVRAKYGLDKLLYGENTPPEVLAKKVKNRDDDRHHALDAMVMTFIPHWARDPNKQGFFRFPPAFRDANGREDYQQIQSLFARQLEKIVPRHLAYEP

SEQ ID NO: 1836 - protein, 176 aa, unidentified
  REGION 1..176: note = Description of Unknown: uncultivated organism with predicted taxonomy: Verrucomicrobia
  REGION 1..176: note = MG1-9 RuvC-III domain
AESAWIARLAQTIARLHFGWPLDDEPGEERVITISGGLTARIRRKYLLDSLLGVGNDAETLRREIDSALNELQALRTDTSLSENAPKQKRAELRQRLANLAAEAEKNRDDQRHHALDAMLLTFLPNWARDRTKEDFFRFPTAIGDNDFYSKEDQPEMAAIKSQLAKLYVENKPVFR

SEQ ID NO: 1837 - protein, 138 aa, unidentified
  REGION 1..138: note = Description of Unknown: uncultivated organism
  REGION 1..138: note = MG1-10 RuvC-III domain
QLASQLRKQVAFWLGIHADSDDLSAAVALRERIGNPQGQYTAAMRRSLLPESGKDRSGYVHHREDAALLSCMPPMGLNSIKYKGIFYTKMVPWLDSSGQLQQRRSLFALSCADGLPLPDIASILEDDTECPIIKRRSE

SEQ ID NO: 1838 - protein, 123 aa, unidentified
  REGION 1..123: note = Description of Unknown: uncultivated organism
  REGION 1..123: note = MG1-11 RuvC-III domain
QLARELRRYIAVWMGINRDVDAVRERIGNPCGSYTAAARRGMLPADYRKDRSNNLHHRIDAAVLTCIPPAAGLNNLRCGGIFRNTRINGKRCTTTIPGLPLPDFGALIADDSTCPLVSRRRTG

SEQ ID NO: 1839 - protein, 125 aa, unidentified
  REGION 1..125: note = Description of Unknown: uncultivated organism
  REGION 1..125: note = MG1-12 RuvC-III domain
QLARQLREEAARWLGVFGDDAKVRQKIGTPTGYQTSVCREAWSENVPKKDRTNLRHHLWDAAVISHIPPDRGMQLSHCGGIFFHAGEKKNGNILMRALPGLGPDLNSFENATKDQCLVEKKKTNR

SEQ ID NO: 1840 - protein, 137 aa, unidentified; identical to SEQ ID NO: 1831
  REGION 1..137: note = Description of Unknown: uncultivated organism
  REGION 1..137: note = MG1-14 RuvC-III domain

SEQ ID NO: 1841 - protein, 130 aa, unidentified
  REGION 1..130: note = Description of Unknown: uncultivated organism
  REGION 1..130: note = MG1-20 RuvC-III domain
AVTGWVARMARDIACLWFGWEPGAEGEQRKLHTVSGSLVGKVRRKFGLNKALNPFLSAADAKKDEKNREDKRHHALDAMVMTYLDEYMRNPRNFSKLQKELGEIFGKLGGAQYFEEKLEDVIPHKIARNK

SEQ ID NO: 1842 - protein, 130 aa, unidentified; identical to SEQ ID NO: 1841
  REGION 1..130: note = Description of Unknown: uncultivated organism with predicted taxonomy: Candidatus Peregrinibacteria bacterium CG10_big_fil_rev_8_21_14_0_10_54_7
  REGION 1..130: note = MG1-21 RuvC-III domain

SEQ ID NO: 1843 - protein, 130 aa, unidentified; identical to SEQ ID NO: 1841
  REGION 1..130: note = Description of Unknown: uncultivated organism with predicted taxonomy: Candidatus Peregrinibacteria bacterium CG10_big_fil_rev_8_21_14_0_10_54_7
  REGION 1..130: note = MG1-22 RuvC-III domain

SEQ ID NO: 1844 - protein, 114 aa, unidentified
  REGION 1..114: note = Description of Unknown: uncultivated organism with predicted taxonomy: Candidatus Melainabacteria bacterium
  REGION 1..114: note = MG1-23 RuvC-III domain
AETAQIARIAQQITALVFNWGLQVEGENRHIFVNNGSSTASIRRTYKLNKLLGDDVKKNRDNDKHHALDAICISFSRDYKYNKEKKVDEIEGLNPEIIKEVINNLMPYPYANDK

SEQ ID NO: 1845 - protein, 114 aa, unidentified
  REGION 1..114: note = Description of Unknown: uncultivated organism
  REGION 1..114: note = MG1-24 RuvC-III domain
AETAYIARVAQQITAFCFGWGLQVEGEKRHIFVNNGSSTHAIRRRYGLNSLLGNDIKKNRDNDKHHALDAICISFSRDFKYDEKSKVDVIDGFTKEMVKKVLDEIIPYPYTNKK

SEQ ID NO: 1846 - protein, 120 aa, unidentified
  REGION 1..120: note = Description of Unknown: uncultivated organism
  REGION 1..120: note = MG1-25 RuvC-III domain
AETAQIARVAQDITAFVFGWGLQLEGEKRRIFVNNGATTSAIRKTYRLNKLLGNDVKKNRQNDKHHALDAICISFSRGYKYNATTKRDEIEGLDIHDNEFRDLVKSSIDSLLPYPYSNDK

SEQ ID NO: 1847 - protein, 114 aa, unidentified
  REGION 1..114: note = Description of Unknown: uncultivated organism
  REGION 1..114: note = MG1-26 RuvC-III domain
AETSHIARVAQQMTAFIFGWGLQVQGKNRRIFVNNGSSTCAIRKRYDLNKLLGDDRKKNRENDKHHALDAICISFSRDFKYDKEIKKDIIKGFNPEIVKDAIDKIMPYPYANDK

SEQ ID NO: 1848 - protein, 120 aa, unidentified
  REGION 1..120: note = Description of Unknown: uncultivated organism
  REGION 1..120: note = MG1-27 RuvC-III domain
AETAQIARVAQDITAFIFGWGLQLKDEKRRIFVNNGASTSGIRKTYRLNKLLGNDVKKNRNNDKHHALDAICISFSQNYKYNKHTKRDEIEGLDIHDNEFRELIKQTLDAIIPYPYTNDK

SEQ ID NO: 1849 - protein, 114 aa, unidentified
  REGION 1..114: note = Description of Unknown: uncultivated organism
  REGION 1..114: note = MG1-28 RuvC-III domain
AETAHIAKVAQQIAAVCFSWGLQIEGEKRHIYVNNGSSTHAIRHRYGLNSLLGNDIKKNRDNDKHHALDAICISFSRDFKYDEESKKDIIKGFTREMVKKVIDEIMPVPYTNKK

SEQ ID NO: 1850 - protein, 114 aa, unidentified; identical to SEQ ID NO: 1845
  REGION 1..114: note = Description of Unknown: uncultivated organism
  REGION 1..114: note = MG1-29 RuvC-III domain

SEQ ID NO: 1851 - protein, 114 aa, unidentified; identical to SEQ ID NO: 1849
  REGION 1..114: note = Description of Unknown: uncultivated organism
  REGION 1..114: note = MG1-30 RuvC-III domain

SEQ ID NO: 1852 - protein, 120 aa, unidentified
  REGION 1..120: note = Description of Unknown: uncultivated organism
  REGION 1..120: note = MG1-31 RuvC-III domain
AETAQIARVAQDITAFIFSWGLQLKDEKRRIFVNNGASTSGIRKTYRLNKLLGNDVKKNRSNDKHHALDAICISFSQNYKYNKYTKRDEIEGLDIHDNEFRELIKQTLDAIIPYPYTNDK

SEQ ID NO: 1853 - protein, 120 aa, unidentified
  REGION 1..120: note = Description of Unknown: uncultivated organism
  REGION 1..120: note = MG1-32 RuvC-III domain
AETAQIARVAQDITAFIFGWGLQLKDEKRRIFVNNGASTSGIRKTYRLNKLLGNDVKKNRSNDKHHALDAICISFSQNYKYNKYTKRDEIEGLDIHDNEFRELIKQTLDAIIPYPYTNDK

SEQ ID NO: 1854 - protein, 120 aa, unidentified; identical to SEQ ID NO: 1852
  REGION 1..120: note = Description of Unknown: uncultivated organism
  REGION 1..120: note = MG1-33 RuvC-III domain

SEQ ID NO: 1855 - protein, 114 aa, unidentified; identical to SEQ ID NO: 1847
  REGION 1..114: note = Description of Unknown: uncultivated organism with predicted taxonomy: Candidatus Gastranaerophilales bacterium HUM_9
  REGION 1..114: note = MG1-34 RuvC-III domain

SEQ ID NO: 1856 - protein, 120 aa, unidentified; identical to SEQ ID NO: 1846
  REGION 1..120: note = Description of Unknown: uncultivated organism
  REGION 1..120: note = MG1-35 RuvC-III domain

SEQ ID NO: 1857 - protein, 115 aa, unidentified
  REGION 1..115: note = Description of Unknown: uncultivated organism with predicted taxonomy: Clostridium
  REGION 1..115: note = MG1-36 RuvC-III domain
EDTQYIAKWITNYIRRNIQFVECSKYNNKVLIISSNLTSYINRKLDISNNIIIGNQKHALDALVTATVSKELLNKIIIYSRENTENSQFPIPWENFKQDMNNLPPIFVSRAPKRK

SEQ ID NO: 1858 - protein, 120 aa, unidentified; identical to SEQ ID NO: 1846
  REGION 1..120: note = Description of Unknown: uncultivated organism
  REGION 1..120: note = MG1-37 RuvC-III domain

SEQ ID NO: 1859 - protein, 114 aa, unidentified; identical to SEQ ID NO: 1844
  REGION 1..114: note = Description of Unknown: uncultivated organism with predicted taxonomy: Candidatus Melainabacteria bacterium
  REGION 1..114: note = MG1-38 RuvC-III domain

SEQ ID NO: 1860 - protein, 120 aa, unidentified; identical to SEQ ID NO: 1852
  REGION 1..120: note = Description of Unknown: uncultivated organism
  REGION 1..120: note = MG1-39 RuvC-III domain

SEQ ID NO: 1861 - protein, 120 aa, unidentified; identical to SEQ ID NO: 1853
  REGION 1..120: note = Description of Unknown: uncultivated organism
  REGION 1..120: note = MG1-40 RuvC-III domain

SEQ ID NO: 1862 - protein, 114 aa, unidentified; identical to SEQ ID NO: 1847
  REGION 1..114: note = Description of Unknown: uncultivated organism with predicted taxonomy: Candidatus Gastranaerophilales bacterium HUM_9
  REGION 1..114: note = MG1-41 RuvC-III domain

SEQ ID NO: 1863 - protein, 120 aa, unidentified; identical to SEQ ID NO: 1848
  REGION 1..120: note = Description of Unknown: uncultivated organism
  REGION 1..120: note = MG1-42 RuvC-III domain

SEQ ID NO: 1864 - protein, 120 aa, unidentified; identical to SEQ ID NO: 1852
  REGION 1..120: note = Description of Unknown: uncultivated organism
  REGION 1..120: note = MG1-43 RuvC-III domain

SEQ ID NO: 1865 - protein, 114 aa, unidentified; identical to SEQ ID NO: 1849
  REGION 1..114: note = Description of Unknown: uncultivated organism
  REGION 1..114: note = MG1-44 RuvC-III domain

SEQ ID NO: 1866 - protein, 114 aa, unidentified; identical to SEQ ID NO: 1847
  REGION 1..114: note = Description of Unknown: uncultivated organism with predicted taxonomy: Candidatus Melainabacteria
  REGION 1..114: note = MG1-45 RuvC-III domain

SEQ ID NO: 1867 - protein, 114 aa, unidentified; identical to SEQ ID NO: 1849
  REGION 1..114: note = Description of Unknown: uncultivated organism
  REGION 1..114: note = MG1-46 RuvC-III domain

SEQ ID NO: 1868 - protein, 120 aa, unidentified; identical to SEQ ID NO: 1848
  REGION 1..120: note = Description of Unknown: uncultivated organism
  REGION 1..120: note = MG1-47 RuvC-III domain

SEQ ID NO: 1869 - protein, 114 aa, unidentified
  REGION 1..114: note = Description of Unknown: uncultivated organism
  REGION 1..114: note = MG1-48 RuvC-III domain
AETAQIARVAQQLAAFIFGWGMQTEGDKRHLFINNGSTTAAIRRRYGLNKLLGDDIKKNRENDKHHALDAICISFSKDFKYDHKSKKDIIEGFTYDFVKNEIDKLIPYPYANDK

SEQ ID NO: 1870 - protein, 114 aa, unidentified
  REGION 1..114: note = Description of Unknown: uncultivated organism
  REGION 1..114: note = MG1-49 RuvC-III domain
NETTQIAKIVQSVTASVLEWDLQVKDKNRHIFISDGSSTHKIRQQYKLDRLLDDNAKKNRENGKHRALDAICISYSKDFQYNTEQHKYEIENIDIPHIEDVINHVVPYPYTNDK

SEQ ID NO: 1871 - protein, 114 aa, unidentified; identical to SEQ ID NO: 1870
  REGION 1..114: note = Description of Unknown: uncultivated organism
  REGION 1..114: note = MG1-50 RuvC-III domain

SEQ ID NO: 1872 - protein, 114 aa, unidentified
  REGION 1..114: note = Description of Unknown: uncultivated organism with predicted taxonomy: Candidatus Melainabacteria bacterium
  REGION 1..114: note = MG1-51 RuvC-III domain
ADTAQIAKVAQQLAAFIFGWGMQTDGDKRHLFVNNGSTTAAIRRRYGLNKILGNDIKKNRENDKHHALDAICISFSQDFKYDPKSQKDIINGFTYDFVKNEIDKLIPYPYANNK

SEQ ID NO: 1873 - protein, 114 aa, unidentified
  REGION 1..114: note = Description of Unknown: uncultivated organism
  REGION 1..114: note = MG1-52 RuvC-III domain
AETAQIARVAQQLAAFIFGLGMQTEGDKRHLFVNNGSTTAAIRRRYGLNKLLGDDVKKNRENDKHHALDAICISFSRDFKYDEKSKKDVIEGFTYDFVKKAIDELIPYPYANDK

SEQ ID NO: 1874 - protein, 114 aa, unidentified; identical to SEQ ID NO: 1870
  REGION 1..114: note = Description of Unknown: uncultivated organism
  REGION 1..114: note = MG1-53 RuvC-III domain

SEQ ID NO: 1875 - protein, 114 aa, unidentified; identical to SEQ ID NO: 1870
  REGION 1..114: note = Description of Unknown: uncultivated organism
  REGION 1..114: note = MG1-54 RuvC-III domain

SEQ ID NO: 1876 - protein, 114 aa, unidentified; identical to SEQ ID NO: 1870
  REGION 1..114: note = Description of Unknown: uncultivated organism
  REGION 1..114: note = MG1-55 RuvC-III domain

SEQ ID NO: 1877 - protein, 114 aa, unidentified
  REGION 1..114: note = Description of Unknown: uncultivated organism
  REGION 1..114: note = MG1-56 RuvC-III domain
AETAHIARVAQQITAFIFDWGLQLEGENRHIFVNNGSSTCAIRKRYHLNSLLGDDEKKNRSNDKHHALDAICISYSRDFKYDKNIKKDTIEEFNPEVVKKVIDEIIPYPYANKK

SEQ ID NO: 1878 - protein, 114 aa, unidentified
  REGION 1..114: note = Description of Unknown: uncultivated organism
  REGION 1..114: note = MG1-57 RuvC-III domain
NETAQIAKVAQSITAFILGWGLQVKGENRHIFVNNGSSTHKIRQQFKLNRLLGNDEKKNRENDKHHALDAICISYSKDFRYNTEKHKYEIDNLDIPHIEEVINSIVPYPYTNDK

SEQ ID NO: 1879 - protein, 114 aa, unidentified
  REGION 1..114: note = Description of Unknown: uncultivated organism with predicted taxonomy: Candidatus Termititenax aidoneus
  REGION 1..114: note = MG1-58 RuvC-III domain
AETAQIARVAQEITAFVFGWGMQTSGDDRHIFVNNGSSTSAIRRRYGLNKILGDDVKKNRENDKHHALDAICISFSRDFKYDEHSKKDVIKGFTYDFVKKEIDKLMPYPYANDK

SEQ ID NO: 1880 - protein, 141 aa, unidentified
  REGION 1..141: note = Description of Unknown: uncultivated organism with predicted taxonomy: Verrucomicrobia
  REGION 1..141: note = MG1-59 RuvC-III domain
AETAWISKLAQRICCLHFGFQFGGLTGAKKVWTVSGNTTAMIRGRYGLNRLLHDEESAADSLFDRICMEKKFEEKNRKNKKHHALDAMCLCFAPTSNAKKASAYKNILPEEITRNPESDEARKFFGKYLANVIPNKVAVEK

SEQ ID NO: 1881 - protein, 140 aa, unidentified
  REGION 1..140: note = Description of Unknown: uncultivated organism with predicted taxonomy: unclassified Verrucomicrobia (miscellaneous)
  REGION 1..140: note = MG1-60 RuvC-III domain
AETAHIAKLAQKIVCMHFGFQFGGLSGTKRVFTVPGALTSRIRKFYGLDRILHNSAAESENLSFEEFLKFSEDLEKKNRKNKKHHALDAMCLCFAPTGVDSRRAKLGEILPEKLRSEKAAREFFKSYLDKIMPVDVAPKK

SEQ ID NO: 1882 - protein, 129 aa, unidentified
  REGION 1..129: note = Description of Unknown: uncultivated organism
  REGION 1..129: note = MG1-61 RuvC-III domain
AETAYIAKMSQKIAHLFFGWSQGTLGSKKKVIVANGSLTAKMRGLYGLNRILHSGISEEEYKELVKSGKIDEKNRDNPRHHALDAIVLSMLPEIQMNDRKKDFFPIWFTPDYCRENLEKCFPKHIKYEK

SEQ ID NO: 1883 - protein, 129 aa, unidentified; identical to SEQ ID NO: 1882
  REGION 1..129: note = Description of Unknown: uncultivated organism with predicted taxonomy: Deltaproteobacteria
  REGION 1..129: note = MG1-62 RuvC-III domain

SEQ ID NO: 1884 - protein, 176 aa, unidentified
  REGION 1..176: note = Description of Unknown: uncultivated organism with predicted taxonomy: Verrucomicrobia bacterium 61-8
  REGION 1..176: note = MG1-63 RuvC-III domain
AESAWIARLAQTIARLHFGWPLDDEPGEERVITISGGLTARIRRKYLLDSLLGVGNDAETLRREIDSALDELEALRTDTSLSENARKQKRAELRQRLANLAAEAEKNRDDQRHHALDAMLLTFLPNWARDRTKEDFFRFPTAIGDNDFYSKEDQPEMAAIKSELAKLYVENKPVFR

SEQ ID NO: 1885 - protein, 176 aa, unidentified
  REGION 1..176: note = Description of Unknown: uncultivated organism
  REGION 1..176: note = MG1-64 RuvC-III domain
AESAWIARLAQTIARLHFGWPLDDEPGEERVITISGGLTARIRRKYLLDSLLGVGNDAETLRREIDSALNELQALRTDTSLSENAPKQKRAELRQRLANLAAEAEKNRDDQRHHALDAMLLTFLPNWARDRNKEDFFRFPTAIGDNDFYSKEDQPEMAAIKSELAKLYVENKPVFR

SEQ ID NO: 1886 - protein, 179 aa, unidentified
  REGION 1..179: note = Description of Unknown: uncultivated organism with predicted taxonomy: Verrucomicrobia
  REGION 1..179: note = MG1-65 RuvC-III domain
ATTATIARMALRITDILFDWQNGNDAQGNKRVRVFPGGRTAAIRRRYLLNTLLGADSDQKLKTITDLQSEISQIKAQWPSLQGEEHKPTRKAYYQKRRQLAELIEGTKKDRSDARHHALDAMVLTFLPTWAQHPNKDEFFRFPPPLDNPYPQRPDILKVHQFFRDALNNVIPTPLAFEK

SEQ ID NO: 1887 - protein, 129 aa, unidentified
  REGION 1..129: note = Description of Unknown: uncultivated organism
  REGION 1..129: note = MG1-66 RuvC-III domain
AETSYISRLAQKIVHLYFGWEQLTKGSSRRVFVVSGAFTKRIRDLFKLDAILYPDLTLEEVYKYSAEEREEKNRNNPRHHALDALVVSITQEIKYNPLKGKDEYPEWFTPEFCKQAVERCLPVKVRFEK

SEQ ID NO: 1888 - protein, 176 aa, unidentified
  REGION 1..176: note = Description of Unknown: uncultivated organism
  REGION 1..176: note = MG1-67 RuvC-III domain
AESAWIARLAQTIARLHFGWPLDDEPGEERVITISGGLTARIRRKYLLDSLLGVGNDAETLRREIDSALDELEALRTDTSLSENARKQKRAELRQRLANLAAEAEKNRDDQRHHALDAMLLTFLPNWARDRNKEDFFRFPTAIGDNDLYSKEDQPKIEAIKSKLAKLYEENGAVFR

SEQ ID NO: 1889 - protein, 129 aa, unidentified
  REGION 1..129: note = Description of Unknown: uncultivated organism with predicted taxonomy: Elusimicrobia bacterium HGW-Elusimicrobia-1
  REGION 1..129: note = MG1-68 RuvC-III domain
AETAYIAKLSQKICHLFFGWEQGTEGSKRKVIVANGGLTAKMRNAYDLNRILHTGLSDAEYKELCKSGEIDKKNRDNPRHHALDAMVISMIPEIKMNDRKKDFFPIWFNPDYCREKLEQCFPKNIRYEK

SEQ ID NO: 1890 - protein, 140 aa, unidentified
  REGION 1..140: note = Description of Unknown: uncultivated organism with predicted taxonomy: Pedosphaera sp. Tous-C6FEB
  REGION 1..140: note = MG1-69 RuvC-III domain
AETAWISKLAQTIVNLRFGWRNGVDYSGPQPVKRVIVVSGGLTARVRRKYGLDKLLYGEDTAPEVLAKKVKNRDDDRHHALDAMVMTFIPHWARDPNKQGFFRFPPAFRDANGREDYQRIRSLFASHLQQIVPRHLAYEP

SEQ ID NO: 1891 - protein, 123 aa, unidentified
  REGION 1..123: note = Description of Unknown: uncultivated organism with predicted taxonomy: Endomicrobium
  REGION 1..123: note = MG1-70 RuvC-III domain
AETSYISRLAQRIVHLFFGWEQLTKGSTRHVYVVSGALTKYIRDKFELDVLLYPDLTKEEVFKIPSEEREEKNRNNPRHHALDALVVSIARPENVDKYPEWFTQDFCRMAIEKCLPVKVRFEK

SEQ ID NO: 1892 - protein, 179 aa, unidentified; identical to SEQ ID NO: 1886
  REGION 1..179: note = Description of Unknown: uncultivated organism
  REGION 1..179: note = MG1-71 RuvC-III domain

SEQ ID NO: 1893 - protein, 105 aa, unidentified
  REGION 1..105: note = Description of Unknown: uncultivated organism with predicted taxonomy: Deltaproteobacteria
  REGION 1..105: note = MG1-72 RuvC-III domain
AETAWISKLAQTIVNLRFGWRNGVDYSGPQPVKRVIVVSGGLTARVRAKYGLDKLLYGENTPPEVLAKKVKNRDDDRHHALDAMVMTFIPHWARDPHKEGFFRFP

SEQ ID NO: 1894 - protein, 176 aa, unidentified
  REGION 1..176: note = Description of Unknown: uncultivated organism with predicted taxonomy: Pedosphaera sp. Tous-C6FEB
  REGION 1..176: note = MG1-73 RuvC-III domain
AESAWIARLAQTIARLHFGWPLDDEPGEERVITISGGLTARIRRKYLLDSLLGVGNDAETLRREIDSALNELQALRTDTSLSENAPKQKRAELRQRLANLAAEAEKNRDDQRHHALDAMLLTFLPNWARDRNKEDFFRFPTAIGDNDFYSKEDQPEMAAIKSQLAKLYVENKPVFR

SEQ ID NO: 1895 - protein, 179 aa, unidentified; identical to SEQ ID NO: 1886
  REGION 1..179: note = Description of Unknown: uncultivated organism
  REGION 1..179: note = MG1-74 RuvC-III domain

SEQ ID NO: 1896 - protein, 83 aa, unidentified
  REGION 1..83: note = Description of Unknown: uncultivated organism
  REGION 1..83: note = MG1-75 RuvC-III domain
QLARQLVAECAHWMGIAGDPDEIQRRIGTPSGYMRAQALRSWEDTVPAKNRSDLVHHLVDAAVVAHIPPGAGMNQVSYGGIFY

SEQ ID NO: 1897 - protein, 130 aa, unidentified
  REGION 1..130: note = Description of Unknown: uncultivated organism
  REGION 1..130: note = MG1-76 RuvC-III domain
AETAYISRLAQKICHLFFGWEQLTKGSQRKVFVVSGAFTRKIRTIFELDRILYPDLSDEEYKELLTKGEIQKKNRDNPRHHVLDTIVLSIIPEIKYNPEREKDDYPVWFNKEYCRQYIEKCFPRPIRFVK

SEQ ID NO: 1898 - protein, 123 aa, unidentified
  REGION 1..123: note = Description of Unknown: uncultivated organism with predicted taxonomy: Verrucomicrobia
  REGION 1..123: note = MG1-78 RuvC-III domain
AETAWISKLAQTIISLRFGWPGGIANGERKIIVVSGGLTGRIRRKYKLNSLLNPDAKSEEEAEVKNRNDDRHHALDAMVISFIPNWARDAKKTGFFRFPDGIHRELFAKEIADVIPLNVCFEK

SEQ ID NO: 1899 - protein, 156 aa, unidentified
  REGION 1..156: note = Description of Unknown: uncultivated organism
  REGION 1..156: note = MG1-79 RuvC-III domain
QLARHLRAEVIHWLGLDQIQDQKERNKEIARRIGTPTGFQTSVCRESWTPPHVFPQMYRLLCDKKGVPVRDRNGQERWVKDRTNLRHHLWDAAVLSHIPPGVGLNSADCGGIFVHRRDPQNGEWSVSALADLGPDLVAFEKANADRCLVVRLRQRK

SEQ ID NO: 1900 - protein, 123 aa, unidentified; identical to SEQ ID NO: 1898
  REGION 1..123: note = Description of Unknown: uncultivated organism with predicted taxonomy: Verrucomicrobia
  REGION 1..123: note = MG1-80 RuvC-III domain

SEQ ID NO: 1901 - protein, 169 aa, unidentified
  REGION 1..169: note = Description of Unknown: uncultivated organism
  REGION 1..169: note = MG1-81 RuvC-III domain
QHTAYIARIVRHVALIRLGWTGDDGRDPTIIKGNKPSSSFQVTNGQLTSRLRQAWGLNHILHPLPEGKRWDDLTDAEKEQMQQKNRGDLRHHALDAMVIACTLPWLAHRTVGATDPETGEHGWWQLDERTRRSLALNPVFPTEGQMRRVAEEWMQKVVVRHHVSRSPHQ

SEQ ID NO: 1902 - protein, 19 aa, unidentified
  REGION 1..19: note = Description of Unknown: uncultivated organism
  REGION 1..19: note = MG1-82 RuvC-III domain
AETAWISKLAQTIVNLRFG

SEQ ID NO: 1903 - protein, 156 aa, unidentified
  REGION 1..156: note = Description of Unknown: uncultivated organism
  REGION 1..156: note = MG1-83 RuvC-III domain
QIARYLRVEIIHWLGLDRIKNEMERNKQIAGRIGTPTGFQTSICRESWTPRTVFPQMYRLLHDKKGIPVRDQHGRERWVKDRTNLRHHLWDAAVLSHIPPREGLNSADCGGIFVHRRDQQTGEWRVSALPNLGPDLVAFEKENEGRCLVAHLRQRK

SEQ ID NO: 1904 - protein, 138 aa, unidentified
  REGION 1..138: note = Description of Unknown: uncultivated organism with predicted taxonomy: Coraliomargarita sp. CAG:312
  REGION 1..138: note = MG1-84 RuvC-III domain
AETAWISKLAQRIVCMHFGFQFGGNTGEKRVFTVPGNITAKIRSAFGLNKILHNIDADKKNMSEFDIVKLDYELDKKNRKNKKHHALDAMCLCFAPTGPNAQKLGIGALLPPEIAAKAEEFFRGYIEKVVPNEVAPKK

SEQ ID NO: 1905 - protein, 140 aa, unidentified; identical to SEQ ID NO: 1881
  REGION 1..140: note = Description of Unknown: uncultivated organism with predicted taxonomy: unclassified Verrucomicrobia (miscellaneous)
  REGION 1..140: note = MG1-85 RuvC-III domain

SEQ ID NO: 1906 - protein, 138 aa, unidentified; identical to SEQ ID NO: 1904
  REGION 1..138: note = Description of Unknown: uncultivated organism with predicted taxonomy: Coraliomargarita sp. CAG:312
  REGION 1..138: note = MG1-86 RuvC-III domain

SEQ ID NO: 1907 - protein, 142 aa, unidentified
  REGION 1..142: note = Description of Unknown: uncultivated organism with predicted taxonomy: Verrucomicrobia
  REGION 1..142: note = MG1-87 RuvC-III domain
AETAWISKLAQRICCLHFGFQFGGLAGAKKVWTVSGNTTAMIRGRYGLNRLLHDEESAEDLSLFDRICMEKKFEEKNRKNKKHHALDAMCLCFAPTSNAKKASAYKNILPEEITRNPESDEARKFFGKYLASVIPNKVAVKK

SEQ ID NO: 1908 - protein, 140 aa, unidentified
  REGION 1..140: note = Description of Unknown: uncultivated organism with predicted taxonomy: unclassified Verrucomicrobia (miscellaneous)
  REGION 1..140: note = MG1-88 RuvC-III domain
AETAHIAKLAQKIVCMHFGFQFGGLSGTKRVFTVPGALTSRIRKFYGLDRILHNSASESENLSFEEFLKFSEDLEKKNRKNKKHHALDAMCLCFAPTGVDSRRAKLGEILPEKLRSEKAAREFFKSYLDKIMPVDVAPKK

SEQ ID NO: 1909 - protein, 140 aa, unidentified; identical to SEQ ID NO: 1881
  REGION 1..140: note = Description of Unknown: uncultivated organism with predicted taxonomy: unclassified Verrucomicrobia (miscellaneous)
  REGION 1..140: note = MG1-89 RuvC-III domain

SEQ ID NO: 1910 - protein, 140 aa, unidentified; identical to SEQ ID NO: 1881
  REGION 1..140: note = Description of Unknown: uncultivated organism with predicted taxonomy: unclassified Verrucomicrobia (miscellaneous)
  REGION 1..140: note = MG1-90 RuvC-III domain

SEQ ID NO: 1911 - protein, 142 aa, unidentified
  REGION 1..142: note = Description of Unknown: uncultivated organism
  REGION 1..142: note = MG1-91 RuvC-III domain
AETAWISKLAQRICCIHFGFQFGGLTGEKKVWTVSGNTTAMIRSRYGLNRLLHNEDVPKDISLSERLKLESEFERKNRDNKKHHALDAMCLCYAPTSNTRRAASYKNILPAEITRNPESDEARRFFGGYLANVIPNKVAIEK

SEQ ID NO: 1912 - protein, 140 aa, unidentified
  REGION 1..140: note = Description of Unknown: uncultivated organism with predicted taxonomy: unclassified Verrucomicrobia (miscellaneous)
  REGION 1..140: note = MG1-92 RuvC-III domain
AETAHISKLAQKIVCLHFGFQFGGLSGTKRVFTVPGSLTARIRTFYGLNKILHNEDLAHETLSYEGFLKRGEELDKKNRANKKHHALDAMCLCFAPTGVNSKRARVDMLLPPKIRSEKDAELFFRKYLDKLIPVDVAPKK

SEQ ID NO: 1913 - protein, 140 aa, unidentified; identical to SEQ ID NO: 1881
  REGION 1..140: note = Description of Unknown: uncultivated organism with predicted taxonomy: unclassified Verrucomicrobia (miscellaneous)
  REGION 1..140: note = MG1-93 RuvC-III domain

SEQ ID NO: 1914 - protein, 142 aa, unidentified
  REGION 1..142: note = Description of Unknown: uncultivated organism with predicted taxonomy: unclassified Verrucomicrobia (miscellaneous)
  REGION 1..142: note = MG1-94 RuvC-III domain
AETAWISKLAQKICCIHFGFQFGGLKGEKKVWTVSGNTTAMIRGRYGLNRLLHNEEISEDLPLLDRIVKEKNFEEKNRDNKKHHALDAMCICFAPTSNAKKALSRKNILPEEIAKNPESDDARNFFAKYLEEVVPTKVAIKK

SEQ ID NO: 1915 - protein, 138 aa, unidentified; identical to SEQ ID NO: 1904
  REGION 1..138: note = Description of Unknown: uncultivated organism with predicted taxonomy: Coraliomargarita sp. CAG:312
  REGION 1..138: note = MG1-95 RuvC-III domain

SEQ ID NO: 1916 - protein, 140 aa, unidentified; identical to SEQ ID NO: 1908
  REGION 1..140: note = Description of Unknown: uncultivated organism with predicted taxonomy: unclassified Verrucomicrobia (miscellaneous)
  REGION 1..140: note = MG1-96 RuvC-III domain

SEQ ID NO: 1917 - protein, 140 aa, unidentified; identical to SEQ ID NO: 1881
  REGION 1..140: note = Description of Unknown: uncultivated organism with predicted taxonomy: unclassified Verrucomicrobia (miscellaneous)
  REGION 1..140: note = MG1-97 RuvC-III domain

SEQ ID NO: 1918 - protein, 140 aa, unidentified; identical to SEQ ID NO: 1881
  REGION 1..140: note = Description of Unknown: uncultivated organism with predicted taxonomy: unclassified Verrucomicrobia (miscellaneous)
  REGION 1..140: note = MG1-98 RuvC-III domain

SEQ ID NO: 1919 - protein, 140 aa, unidentified; identical to SEQ ID NO: 1881
  REGION 1..140: note = Description of Unknown: uncultivated organism with predicted taxonomy: unclassified Verrucomicrobia (miscellaneous)
  REGION 1..140: note = MG1-99 RuvC-III domain

SEQ ID NO: 1920 - protein, 138 aa, unidentified; identical to SEQ ID NO: 1904
  REGION 1..138: note = Description of Unknown: uncultivated organism with predicted taxonomy: Coraliomargarita sp. CAG:312
  REGION 1..138: note = MG1-100 RuvC-III domain

SEQ ID NO: 1921 - protein, 138 aa, unidentified
  REGION 1..138: note = Description of Unknown: uncultivated organism with predicted taxonomy: unclassified Verrucomicrobia (miscellaneous)
  REGION 1..138: note = MG1-101 RuvC-III domain
AETAWISKLAQQVVCLHFGFQFGGMEGQRRVFCIPGGVTARIRGMFGLNELLHVKDYDTDSMSETEIVELHKRLEKKNRENKKHHALDAMCLCFAPTGSQIKRFDAKTIMPEGILGREKQYFKSYLDKIVPNEVATQK

SEQ ID NO: 1922 - protein, 140 aa, unidentified; identical to SEQ ID NO: 1881
  REGION 1..140: note = Description of Unknown: uncultivated organism with predicted taxonomy: unclassified Verrucomicrobia (miscellaneous)
  REGION 1..140: note = MG1-102 RuvC-III domain

SEQ ID NO: 1923 - protein, 140 aa, unidentified
  REGION 1..140: note = Description of Unknown: uncultivated organism with predicted taxonomy: Verrucomicrobia
  REGION 1..140: note = MG1-103 RuvC-III domain
AETAHIAKLAQKIVCMHFGFQFGGLSGTKRVFTLPGALTSRIRKFYGLDRILHISAAESENLSFEEFLKFSEDLEKKNRKNKKHHALDAMCLCFAPTGVDSRRAKLGEILPEKLRSEKAAREFFKSYLDKIMPVDVAPKK

SEQ ID NO: 1924 - protein, 138 aa, unidentified; identical to SEQ ID NO: 1904
  REGION 1..138: note = Description of Unknown: uncultivated organism with predicted taxonomy: Verrucomicrobia
  REGION 1..138: note = MG1-104 RuvC-III domain

SEQ ID NO: 1925 - protein, 140 aa, unidentified
  REGION 1..140: note = Description of Unknown: uncultivated organism
  REGION 1..140: note = MG1-105 RuvC-III domain
AETAHIAKLAQKIVCMHFGFQFGGLSGTKRVFTVPGALTSRIRKFYGLDRILHNSAAERENLSFEEFLKFSEDLEKKNRKNKKHHALDAMCLCFAPTGVDSRRVKLGEILPEKLKSEKAAREFFKSYLDKIMPVDVAPKK

SEQ ID NO: 1926 - protein, 142 aa, unidentified
  REGION 1..142: note = Description of Unknown: uncultivated organism with predicted taxonomy: Verrucomicrobia
  REGION 1..142: note = MG1-106 RuvC-III domain
AETAWISKLAQRICCLHFGFQFGGLAGAKKVWTVSGNTTAMIRGRYGLNRLLHDEESAEDLSLFDRICMEKKFEEKNRKNKKHHALDAMCLCFAPTSNAKKASAYKNILPEEITRNPESDEARKFFGKYLATVIPNKVAVEK

SEQ ID NO: 1927 - protein, 142 aa, unidentified; identical to SEQ ID NO: 1907
  REGION 1..142: note = Description of Unknown: uncultivated organism with predicted taxonomy: Verrucomicrobia
  REGION 1..142: note = MG1-107 RuvC-III domain

SEQ ID NO: 1928 - protein, 142 aa, unidentified
  REGION 1..142: note = Description of Unknown: uncultivated organism with predicted taxonomy: Verrucomicrobia
  REGION 1..142: note = MG1-108 RuvC-III domain
AETAWISKLAQRICCLHFGFQFGGLAGAKKVWTVSGNTTAMIRGRYGLNRLLHDEEAAEDLSLFDRICMEKKFEEKNRKNKKHHALDAMCLCFAPTSNAKKASAYKNILPEEITRNPESDEARKFFGRYLATVIPNKVAVEK

SEQ ID NO: 1929 - protein, 140 aa, unidentified; identical to SEQ ID NO: 1881
  REGION 1..140: note = Description of Unknown: uncultivated organism with predicted taxonomy: unclassified Verrucomicrobia (miscellaneous)
  REGION 1..140: note = MG1-109 RuvC-III domain

SEQ ID NO: 1930 - protein, 142 aa, unidentified
  REGION 1..142: note = Description of Unknown: uncultivated organism with predicted taxonomy: Verrucomicrobia
  REGION 1..142: note = MG1-110 RuvC-III domain
AETAWISKLAQRICCLHFGFQFGGLAGAKKVWTVSGNTTAMIRGRYGLNRLLHDEESAEDLSLFDRICMEKKLEEKNRKNKKHHALDAMCLCFAPTSNAKKASAYKNILPEEITRNPESDEARKFFGKYLANVIPNKVAVEK

SEQ ID NO: 1931 - protein, 138 aa, unidentified; identical to SEQ ID NO: 1904
  REGION 1..138: note = Description of Unknown: uncultivated organism with predicted taxonomy: Coraliomargarita sp. CAG:312
  REGION 1..138: note = MG1-111 RuvC-III domain

SEQ ID NO: 1932 - protein, 140 aa, unidentified; identical to SEQ ID NO: 1881
  REGION 1..140: note = Description of Unknown: uncultivated organism with predicted taxonomy: unclassified Verrucomicrobia (miscellaneous)
  REGION 1..140: note = MG1-112 RuvC-III domain

SEQ ID NO: 1933 - protein, 140 aa, unidentified
  REGION 1..140: note = Description of Unknown: uncultivated organism with predicted taxonomy: Verrucomicrobia
  REGION 1..140: note = MG1-113 RuvC-III domain
AETAHISKLAQKIVCLHFGFQFGGLGGTKRVFTVPGALTARIRSFYGLNKILHNEDLAKDALSYEEVLKRGEELDKKNRENEKHHALDAMCLCFAPTGVNSKRARIDMLLPPDIRGEGKAELFFRKYLDRLIPVDVAPKK

SEQ ID NO: 1934 - protein, 140 aa, unidentified; identical to SEQ ID NO: 1912
  REGION 1..140: note = Description of Unknown: uncultivated organism with predicted taxonomy: unclassified Verrucomicrobia (miscellaneous)
  REGION 1..140: note = MG1-114 RuvC-III domain

SEQ ID NO: 1935 - protein, 140 aa, unidentified; identical to SEQ ID NO: 1830
  REGION 1..140: note = Description of Unknown: uncultivated organism with predicted taxonomy: unclassified Verrucomicrobia (miscellaneous)
  REGION 1..140: note = MG1-115 RuvC-III domain

SEQ ID NO: 1936 - protein, 142 aa, unidentified
  REGION 1..142: note = Description of Unknown: uncultivated organism with predicted taxonomy: Verrucomicrobia
  REGION 1..142: note = MG1-116 RuvC-III domain
AETAWISKLAQRICCLHFGFQFGGLAGAKKVWTVSGNTTAMIRGRYGLNRLLHDEESAEDLSLFDRICMEKKFEEKNRKNKKHHALDAMCLCFAPTSNAKKASAYKNILPEEITRNPESDEARKFFGRYLATVIPNKVAVEK

SEQ ID NO: 1937 - protein, 138 aa, unidentified; identical to SEQ ID NO: 1904
  REGION 1..138: note = Description of Unknown: uncultivated organism with predicted taxonomy: Coraliomargarita sp. CAG:312
  REGION 1..138: note = MG1-117 RuvC-III domain

SEQ ID NO: 1938 - protein, 140 aa, unidentified; identical to SEQ ID NO: 1881
  REGION 1..140: note = Description of Unknown: uncultivated organism with predicted taxonomy: unclassified Verrucomicrobia (miscellaneous)
  REGION 1..140: note = MG1-118 RuvC-III domain

SEQ ID NO: 1939 - protein, 140 aa, unidentified; identical to SEQ ID NO: 1881
  REGION 1..140: note = Description of Unknown: uncultivated organism with predicted taxonomy: unclassified Verrucomicrobia (miscellaneous)
  REGION 1..140: note = MG1-119 RuvC-III domain

SEQ ID NO: 1940 - protein, 140 aa, unidentified
  REGION 1..140: note = Description of Unknown: uncultivated organism with predicted taxonomy: unclassified Verrucomicrobia (miscellaneous)
  REGION 1..140: note = MG1-120 RuvC-III domain
AETAHISKLAQKIVCLHFGFQFGGLGGTKRVFTVPGALTARIRSFYGLNKILHNEDLAKDALSYEEVLKRGEELDKKNRKNKKHHALDAMCLCFAPTGVNSKRARIDMLLPPDIRGEREAELFFRKYLDRLIPVDVAPKK

SEQ ID NO: 1941 - protein, 140 aa, unidentified; identical to SEQ ID NO: 1881
  REGION 1..140: note = Description of Unknown: uncultivated organism with predicted taxonomy: unclassified Verrucomicrobia (miscellaneous)
  REGION 1..140: note = MG1-121 RuvC-III domain

SEQ ID NO: 1942 - protein, 140 aa, unidentified; identical to SEQ ID NO: 1908
  REGION 1..140: note = Description of Unknown: uncultivated organism with predicted taxonomy: unclassified Verrucomicrobia (miscellaneous)
  REGION 1..140: note = MG1-122 RuvC-III domain

SEQ ID NO: 1943 - protein, 140 aa, unidentified
  REGION 1..140: note = Description of Unknown: uncultivated organism with predicted taxonomy: unclassified Verrucomicrobia (miscellaneous)
  REGION 1..140: note = MG1-123 RuvC-III domain
AETAHIAKLAQKIVCMHFGFQFGGLSGTKRVFTVPGALTSRIRKFYGLDRILHNSAAERENLSFEEFLKFSEDLEKKNRKNKKHHALDAMCLCFAPTGVDSRRAKLGEILPEKLRSEKAAREFFKSYLDKIMPVDVAPKK

SEQ ID NO: 1944 - protein, 142 aa, unidentified
  REGION 1..142: note = Description of Unknown: uncultivated organism with predicted taxonomy: Verrucomicrobia
  REGION 1..142: note = MG1-124 RuvC-III domain
AETAWISKLAQRICCLHFGFQFGGLAGAKKVWTVSGNTTAMIRGRYGLNRLLHDEESAEDLSLFDRICMEKKFEEKNRKNKKHHALDAMCLCFAPTSNAKKASAYKNILPEEITRNPESDEARKFFGKYLASVIPNKVAVEK

SEQ ID NO: 1945 - protein, 138 aa, unidentified; identical to SEQ ID NO: 1904
  REGION 1..138: note = Description of Unknown: uncultivated organism with predicted taxonomy: Verrucomicrobia
  REGION 1..138: note = MG1-125 RuvC-III domain

SEQ ID NO: 1946 - protein, 140 aa, unidentified; identical to SEQ ID NO: 1881
  REGION 1..140: note = Description of Unknown: uncultivated organism with predicted taxonomy: unclassified Verrucomicrobia (miscellaneous)
  REGION 1..140: note = MG1-126 RuvC-III domain

SEQ ID NO: 1947 - protein, 142 aa, unidentified; identical to SEQ ID NO: 1926
  REGION 1..142: note = Description of Unknown: uncultivated organism with predicted taxonomy: Verrucomicrobia
  REGION 1..142: note = MG1-127 RuvC-III domain

SEQ ID NO: 1948 - protein, 140 aa, unidentified; identical to SEQ ID NO: 1908
  REGION 1..140: note = Description of Unknown: uncultivated organism with predicted taxonomy: unclassified Verrucomicrobia (miscellaneous)
  REGION 1..140: note = MG1-128 RuvC-III domain

SEQ ID NO: 1949 - protein, 142 aa, unidentified
  REGION 1..142: note = Description of Unknown: uncultivated organism with predicted taxonomy: Verrucomicrobia
  REGION 1..142: note = MG1-129 RuvC-III domain
AETAWISKLAQRICCLHFGFQFGGLAGAKKVWTVSGNTTAMIRGRYALNRLLHDEESAEDLSLFDRICMEKKFEEKNRKNKKHHALDAMCLCFAPTSNAKKASAYKNILPEEITRNPESDEARKFFGKYLANVIPNKVAVEK

SEQ ID NO: 1950 - protein, 140 aa, unidentified; identical to SEQ ID NO: 1881
  REGION 1..140: note = Description of Unknown: uncultivated organism with predicted taxonomy: unclassified Verrucomicrobia (miscellaneous)
  REGION 1..140: note = MG1-130 RuvC-III domain

SEQ ID NO: 1951 - protein, 140 aa, unidentified; identical to SEQ ID NO: 1912
  REGION 1..140: note = Description of Unknown: uncultivated organism with predicted taxonomy: unclassified Verrucomicrobia (miscellaneous)
  REGION 1..140: note = MG1-131 RuvC-III domain

SEQ ID NO: 1952 - protein, 140 aa, unidentified; identical to SEQ ID NO: 1881
  REGION 1..140: note = Description of Unknown: uncultivated organism with predicted taxonomy: unclassified Verrucomicrobia (miscellaneous)
  REGION 1..140: note = MG1-132 RuvC-III domain

SEQ ID NO: 1953 - protein, 138 aa, unidentified; identical to SEQ ID NO: 1904
  REGION 1..138: note = Description of Unknown: uncultivated organism with predicted taxonomy: Coraliomargarita sp. CAG:312
  REGION 1..138: note = MG1-133 RuvC-III domain

SEQ ID NO: 1954 - protein, 140 aa, unidentified; identical to SEQ ID NO: 1830
  REGION 1..140: note = Description of Unknown: uncultivated organism with predicted taxonomy: unclassified Verrucomicrobia (miscellaneous)
  REGION 1..140: note = MG1-134 RuvC-III domain

SEQ ID NO: 1955 - protein, 140 aa, unidentified
  REGION 1..140: note = Description of Unknown: uncultivated organism with predicted taxonomy: unclassified Verrucomicrobia (miscellaneous)
  REGION 1..140: note = MG1-135 RuvC-III domain
AETAHIAKLAQKIVCMHFGFQFGGLSGTKRVFTVPGALTSRIRKFYGLDRILHNSAAESENLSFEEFLKFSEDLEKKNRKNKKHHALDAMCLCFAPTGVDSGRAKLGEILPEKLRSEKAAREFFKSYLDKIMPVDVAPKK

SEQ ID NO: 1956 - protein, 142 aa, unidentified; identical to SEQ ID NO: 1907
  REGION 1..142: note = Description of Unknown: uncultivated organism with predicted taxonomy: Verrucomicrobia
  REGION 1..142: note = MG1-136 RuvC-III domain

SEQ ID NO: 1957 - protein, 140 aa, unidentified; identical to SEQ ID NO: 1881
  REGION 1..140: note = Description of Unknown: uncultivated organism with predicted taxonomy: unclassified Verrucomicrobia (miscellaneous)
  REGION 1..140: note = MG1-137 RuvC-III domain

SEQ ID NO: 1958 - protein, 140 aa, unidentified; identical to SEQ ID NO: 1881
  REGION 1..140: note = Description of Unknown: uncultivated organism with predicted taxonomy: unclassified Verrucomicrobia (miscellaneous)
  REGION 1..140: note = MG1-138 RuvC-III domain

SEQ ID NO: 1959 - protein, 140 aa, unidentified; identical to SEQ ID NO: 1881
  REGION 1..140: note = Description of Unknown: uncultivated organism with predicted taxonomy: unclassified Verrucomicrobia (miscellaneous)
  REGION 1..140: note = MG1-139 RuvC-III domain

SEQ ID NO: 1960 - protein, 140 aa, unidentified; identical to SEQ ID NO: 1881
  REGION 1..140: note = Description of Unknown: uncultivated organism with predicted taxonomy: unclassified Verrucomicrobia (miscellaneous)
  REGION 1..140: note = MG1-140 RuvC-III domain

SEQ ID NO: 1961 - protein, 142 aa, unidentified
  REGION 1..142: note = Description of Unknown: uncultivated organism with predicted taxonomy: Verrucomicrobia
  REGION 1..142: note = MG1-141 RuvC-III domain
AETAWISKLAQRICCLHFGFQFGGLAGAKKVWTVSGNTTSMIRGRYGLNRLLHDEESAEDLSLFDRICMEKKFEEKNRKNKKHHALDAMCLCFAPTSNAKKASAYKNILPEEITRNPESDEARKFFGKYLANVIPNKVAVEK

SEQ ID NO: 1962 - protein, 140 aa, unidentified; identical to SEQ ID NO: 1830
  REGION 1..140: note = Description of Unknown: uncultivated organism with predicted taxonomy: unclassified Verrucomicrobia (miscellaneous)
  REGION 1..140: note = MG1-142 RuvC-III domain

SEQ ID NO: 1963 - protein, 140 aa, unidentified
  REGION 1..140: note = Description of Unknown: uncultivated organism with predicted taxonomy: Verrucomicrobia bacterium
  REGION 1..140: note = MG1-143 RuvC-III domain
AETAHISKLAQKIVCLHFGFQFGGLGGTKRVFTVPGALTARIRSFYGLNKILHNEDLAKDALSYEEVLKRGEELDKKNRKNKKHHALDAMCLCFAPTGVNSKRARIDMLLPPDIRGERKAELFFRKYLDRLIPVDVAPKK

SEQ ID NO: 1964 - protein, 140 aa, unidentified
  REGION 1..140: note = Description of Unknown: uncultivated organism with predicted taxonomy: unclassified Verrucomicrobia (miscellaneous)
  REGION 1..140: note = MG1-144 RuvC-III domain
AETAHISKLAQKIVCLHFGFQFGGLSGTKRVFTVPGSLTARIRTFYGLNKILHNEDLAHETLSYEGFLKRVEELDKKNRANKKHHALDAMCLCFAPTGVNSKRARVDMLLPPKIRSEKDAELFFRKYLDKLIPVDVAPKK

SEQ ID NO: 1965 - protein, 142 aa, unidentified; identical to SEQ ID NO: 1926
  REGION 1..142: note = Description of Unknown: uncultivated organism with predicted taxonomy: Verrucomicrobia
  REGION 1..142: note = MG1-145 RuvC-III domain

SEQ ID NO: 1966 - protein, 140 aa, unidentified; identical to SEQ ID NO: 1881
  REGION 1..140: note = Description of Unknown: uncultivated organism with predicted taxonomy: unclassified Verrucomicrobia (miscellaneous)
  REGION 1..140: note = MG1-147 RuvC-III domain

SEQ ID NO: 1967 - protein, 140 aa, unidentified; identical to SEQ ID NO: 1908
  REGION 1..140: note = Description of Unknown: uncultivated organism with predicted taxonomy: unclassified Verrucomicrobia (miscellaneous)
  REGION 1..140: note = MG1-148 RuvC-III domain

SEQ ID NO: 1968 - protein, 140 aa, unidentified; identical to SEQ ID NO: 1881
  REGION 1..140: note = Description of Unknown: uncultivated organism with predicted taxonomy: unclassified Verrucomicrobia (miscellaneous)
  REGION 1..140: note = MG1-149 RuvC-III domain

SEQ ID NO: 1969 - protein, 138 aa, unidentified; identical to SEQ ID NO: 1904
  REGION 1..138: note = Description of Unknown: uncultivated organism with predicted taxonomy: Coraliomargarita sp. CAG:312
  REGION 1..138: note = MG1-150 RuvC-III domain

SEQ ID NO: 1970 - protein, 140 aa, unidentified
  REGION 1..140: note = Description of Unknown: uncultivated organism with predicted taxonomy: Verrucomicrobia
  REGION 1..140: note = MG1-151 RuvC-III domain
AETAHISKLAQKIVCLHFGFQFGGLGGTKRVFTVTGALTARIRSFYGLNKILHNEDLAKDALSYEEVLKRGEELDKKNRKNKKHHALDAMCLCFAPTGVNSKRARIDMLLPPDIRGEREAELFFRKYLDRLIPVDVAPKK

SEQ ID NO: 1971 - protein, 142 aa, unidentified; identical to SEQ ID NO: 1911
  REGION 1..142: note = Description of Unknown: uncultivated organism
  REGION 1..142: note = MG1-152 RuvC-III domain

SEQ ID NO: 1972 - protein, 140 aa, unidentified
  REGION 1..140: note = Description of Unknown: uncultivated organism with predicted taxonomy: unclassified Verrucomicrobia (miscellaneous)
  REGION 1..140: note = MG1-153 RuvC-III domain
AETAHIAKLAQKIVCMHFGFQFGGLSGTKRVFTVPGALTSRIRKFYGLDRILHNSAAESENLSFEEFLKFSEDLEKKNRKNKKHHALDAMCLCFAPTGVDSRRAKLGEILPEKLRSEKAAREFFKSYLDKIMPMDVAPKK

SEQ ID NO: 1973 - protein, 142 aa, unidentified; identical to SEQ ID NO: 1949
  REGION 1..142: note = Description of Unknown: uncultivated organism with predicted taxonomy: Verrucomicrobia
  REGION 1..142: note = MG1-154 RuvC-III domain

SEQ ID NO: 1974 - protein, 142 aa, unidentified
  REGION 1..142: note = Description of Unknown: uncultivated organism with predicted taxonomy: Verrucomicrobia
  REGION 1..142: note = MG1-155 RuvC-III domain
AETAWISKLAQRVCCIHFGFQFGGLTGVKKVWTVSGNTTAMIRSRYGLNRLLHDENVPKDISLSERLKLENDFEKKNRDNKKHHALDAMCLCYAPTSNTRRAASYKNILPAEITRNPESDEARRFFGRYLANVIPNKVAIEK

SEQ ID NO: 1975 - protein, 138 aa, unidentified; identical to SEQ ID NO: 1904
  REGION 1..138: note = Description of Unknown: uncultivated organism with predicted taxonomy: Coraliomargarita sp. CAG:312
  REGION 1..138: note = MG1-156 RuvC-III domain

SEQ ID NO: 1976 - protein, 138 aa, unidentified
  REGION 1..138: note = Description of Unknown: uncultivated organism with predicted taxonomy: Verrucomicrobia
  REGION 1..138: note = MG1-157 RuvC-III domain
AETAWISKLAQQVVCLHFGFQFGGMEGQRRVFCIPGGVTARIRGMFGLNELLHVKDYDTDSMSETEIVELYKRLEKKNRENKKHHALDAMCLCFAPTGSQIKRFDAKTIMPEGILGREKQYFKSYLDKIVPNEVATQK

SEQ ID NO: 1977 - protein, 140 aa, unidentified; identical to SEQ ID NO: 1830
  REGION 1..140: note = Description of Unknown: uncultivated organism with predicted taxonomy: unclassified Verrucomicrobia (miscellaneous)
  REGION 1..140: note = MG1-158 RuvC-III domain

SEQ ID NO: 1978 - protein, 136 aa, unidentified
  REGION 1..136: note = Description of Unknown: uncultivated organism with predicted taxonomy: Coraliomargarita sp. CAG:312
  REGION 1..136: note = MG1-159 RuvC-III domain
AETAWIARLAQRIVCMHFGFPMGALIGKKRVFTVSGSVTSRIRGMYGLNKILHNTEIDKTLSEVDILKLNDSLETKNRANKKHHALDAMCLCFAPTSKEVLNKNREILPVEIAKDAENYFRRYLDNIIPNKVATMK

SEQ ID NO: 1979 - protein, 140 aa, unidentified; identical to SEQ ID NO: 1925
  REGION 1..140: note = Description of Unknown: uncultivated organism with predicted taxonomy: unclassified Verrucomicrobia (miscellaneous)
  REGION 1..140: note = MG1-160 RuvC-III domain

SEQ ID NO: 1980 - protein, 142 aa, unidentified; identical to SEQ ID NO: 1911
  REGION 1..142: note = Description of Unknown: uncultivated organism with predicted taxonomy: Verrucomicrobia
  REGION 1..142: note = MG1-161 RuvC-III domain

SEQ ID NO: 1981 - protein, 138 aa, unidentified; identical to SEQ ID NO: 1904
  REGION 1..138: note = Description of Unknown: uncultivated organism with predicted taxonomy: Coraliomargarita sp. CAG:312
  REGION 1..138: note = MG1-162 RuvC-III domain

SEQ ID NO: 1982 - protein, 140 aa, unidentified
  REGION 1..140: note = Description of Unknown: uncultivated organism with predicted taxonomy: unclassified Verrucomicrobia (miscellaneous)
  REGION 1..140: note = MG1-163 RuvC-III domain
AETAHISKLAQKIVCLHFGFQFGGLSGTKRVFTVPGSLTARIRTFYGLNKILHNEDLAHETLSFEGFLKRGEELDKKNRANKKHHALDAMCLCFAPTGVNSKRARVDMLLPPKIRSEKDAELFFRKYLDKLIPVDVAPKK

SEQ ID NO: 1983 - protein, 142 aa, unidentified
  REGION 1..142: note = Description of Unknown: uncultivated organism with predicted taxonomy: Verrucomicrobia
  REGION 1..142: note = MG1-164 RuvC-III domain
AETAWISKLAQKICCIHFGFQFGGLKGEKKVWTVSGNTTAMIRGRYGLNRLLHNEEISEDLPLLDRIVKEKNFEEKNRDNKKHHALDAMCICFAPTSNAKKALSRKNILPEEIAKNPESDDARKFFAKYLAEVVPTKVAIKK

SEQ ID NO: 1984 - protein, 140 aa, unidentified; identical to SEQ ID NO: 1881
  REGION 1..140: note = Description of Unknown: uncultivated organism with predicted taxonomy: unclassified Verrucomicrobia (miscellaneous)
  REGION 1..140: note = MG1-165 RuvC-III domain

SEQ ID NO: 1985 - protein, 140 aa, unidentified
  REGION 1..140: note = Description of Unknown: uncultivated organism with predicted taxonomy: unclassified Verrucomicrobia (miscellaneous)
  REGION 1..140: note = MG1-166 RuvC-III domain
AETAHIAKLAQKIVCMHFGFQFGGLSGTKRVFTVPGALTSRIRKFYGLDRILHNSASESENLSFEEFLKFSEDLEKKNRKNKKHHALDAMCLCFAPTGVDSRRAKLGEILPEKLRSEKAAREFFKSYLEKIMPVDVAPKK

SEQ ID NO: 1986 - protein, 140 aa, unidentified; identical to SEQ ID NO: 1881
  REGION 1..140: note = Description of Unknown: uncultivated organism with predicted taxonomy: unclassified Verrucomicrobia (miscellaneous)
  REGION 1..140: note = MG1-167 RuvC-III domain

SEQ ID NO: 1987 - protein, 142 aa, unidentified; identical to SEQ ID NO: 1911
  REGION 1..142: note = Description of Unknown: uncultivated organism with predicted taxonomy: Verrucomicrobia
  REGION 1..142: note = MG1-168 RuvC-III domain

SEQ ID NO: 1988 - protein, 140 aa, unidentified; identical to SEQ ID NO: 1881
  REGION 1..140: note = Description of Unknown: uncultivated organism with predicted taxonomy: unclassified Verrucomicrobia (miscellaneous)
  REGION 1..140: note = MG1-169 RuvC-III domain

SEQ ID NO: 1989 - protein, 140 aa, unidentified; identical to SEQ ID NO: 1881
  REGION 1..140: note = Description of Unknown: uncultivated organism with predicted taxonomy: unclassified Verrucomicrobia (miscellaneous)
  REGION 1..140: note = MG1-170 RuvC-III domain

SEQ ID NO: 1990 - protein, 140 aa, unidentified; identical to SEQ ID NO: 1881
  REGION 1..140: note = Description of Unknown: uncultivated organism with predicted taxonomy: unclassified Verrucomicrobia (miscellaneous)
  REGION 1..140: note = MG1-171 RuvC-III domain

SEQ ID NO: 1991 - protein, 142 aa, unidentified; identical to SEQ ID NO: 1907
  REGION 1..142: note = Description of Unknown: uncultivated organism with predicted taxonomy: Verrucomicrobia
  REGION 1..142: note = MG1-172 RuvC-III domain

SEQ ID NO: 1992 - protein, 140 aa, unidentified; identical to SEQ ID NO: 1881
  REGION 1..140: note = Description of Unknown: uncultivated organism with predicted taxonomy: unclassified Verrucomicrobia (miscellaneous)
  REGION 1..140: note = MG1-173 RuvC-III domain

SEQ ID NO: 1993 - protein, 140 aa, unidentified; identical to SEQ ID NO: 1881
  REGION 1..140: note = Description of Unknown: uncultivated organism with predicted taxonomy: unclassified Verrucomicrobia (miscellaneous)
  REGION 1..140: note = MG1-174 RuvC-III domain

SEQ ID NO: 1994 - protein, 142 aa, unidentified; identical to SEQ ID NO: 1944
  REGION 1..142: note = Description of Unknown: uncultivated organism with predicted taxonomy: Coraliomargarita sp. CAG:312
  REGION 1..142: note = MG1-175 RuvC-III domain

SEQ ID NO: 1995 - protein, 140 aa, unidentified; identical to SEQ ID NO: 1881
  REGION 1..140: note = Description of Unknown: uncultivated organism with predicted taxonomy: unclassified Verrucomicrobia (miscellaneous)
  REGION 1..140: note = MG1-176 RuvC-III domain

SEQ ID NO: 1996 - protein, 142 aa, unidentified; identical to SEQ ID NO: 1926
  REGION 1..142: note = Description of Unknown: uncultivated organism with predicted taxonomy: Verrucomicrobia
  REGION 1..142: note = MG1-177 RuvC-III domain

SEQ ID NO: 1997 - protein, 136 aa, unidentified; identical to SEQ ID NO: 1978
  REGION 1..136: note = Description of Unknown: uncultivated organism with predicted taxonomy: Coraliomargarita sp. CAG:312
  REGION 1..136: note = MG1-178 RuvC-III domain

SEQ ID NO: 1998 - protein, 142 aa, unidentified; identical to SEQ ID NO: 1961
  REGION 1..142: note = Description of Unknown: uncultivated organism with predicted taxonomy: Coraliomargarita sp. CAG:312
  REGION 1..142: note = MG1-179 RuvC-III domain

SEQ ID NO: 1999 - protein, 140 aa, unidentified
  REGION 1..140: note = Description of Unknown: uncultivated organism with predicted taxonomy: unclassified Verrucomicrobia (miscellaneous)
  REGION 1..140: note = MG1-180 RuvC-III domain
AETAHIAKLAQKIVCMHFGFQFGGVSGTKRVFTVPGALTSRIRKFYGLDRILHNSAAESENLSFEEFLKFSEDLEKKNRKNKKHHALDAMCLCFAPTGVDSRRAKLGEILPEKLRSEKAAREFFKSYLDKIMPVDVAPKK

SEQ ID NO: 2000 - protein, 140 aa, unidentified; identical to SEQ ID NO: 1912
  REGION 1..140: note = Description of Unknown: uncultivated organism with predicted taxonomy: unclassified Verrucomicrobia (miscellaneous)
  REGION 1..140: note = MG1-181 RuvC-III domain

SEQ ID NO: 2001 - protein, 140 aa, unidentified; identical to SEQ ID NO: 1830
  REGION 1..140: note = Description of Unknown: uncultivated organism with predicted taxonomy: unclassified Verrucomicrobia (miscellaneous)
  REGION 1..140: note = MG1-182 RuvC-III domain

SEQ ID NO: 2002 - protein, 138 aa, unidentified; identical to SEQ ID NO: 1904
  REGION 1..138: note = Description of Unknown: uncultivated organism with predicted taxonomy: Coraliomargarita sp. CAG:312
  REGION 1..138: note = MG1-183 RuvC-III domain

SEQ ID NO: 2003 - protein, 140 aa, unidentified; identical to SEQ ID NO: 1881
  REGION 1..140: note = Description of Unknown: uncultivated organism with predicted taxonomy: unclassified Verrucomicrobia (miscellaneous)
  REGION 1..140: note = MG1-184 RuvC-III domain

SEQ ID NO: 2004 - protein, 138 aa, unidentified; identical to SEQ ID NO: 1904
  REGION 1..138: note = Description of Unknown: uncultivated organism with predicted taxonomy: Coraliomargarita sp. CAG:312
  REGION 1..138: note = MG1-185 RuvC-III domain

SEQ ID NO: 2005 - protein, 140 aa, unidentified; identical to SEQ ID NO: 1881
  REGION 1..140: note = Description of Unknown: uncultivated organism with predicted taxonomy: unclassified Verrucomicrobia (miscellaneous)
  REGION 1..140: note = MG1-186 RuvC-III domain

SEQ ID NO: 2006 - protein, 142 aa, unidentified
  REGION 1..142: note = Description of Unknown: uncultivated organism with predicted taxonomy: Verrucomicrobia
  REGION 1..142: note = MG1-187 RuvC-III domain
AETAWISKLAQRICCLHFGFQFGGLAGAKKVWTVSGNTTAMIRGRYGLNRLLHDEESAEDLSLFDRICMEKKFEEKNRKNKKHHALDAMCLCFAPTSNAKKASAYKNILPEEITRNPESDEARKFFGKYLANVIPNKVAVEK

SEQ ID NO: 2007 - protein, 138 aa, unidentified; identical to SEQ ID NO: 1904
  REGION 1..138: note = Description of Unknown: uncultivated organism with predicted taxonomy: Verrucomicrobia
  REGION 1..138: note = MG1-188 RuvC-III domain

SEQ ID NO: 2008 - protein, 142 aa, unidentified; identical to SEQ ID NO: 1936
  REGION 1..142: note = Description of Unknown: uncultivated organism with predicted taxonomy: Verrucomicrobia
  REGION 1..142: note = MG1-189 RuvC-III domain

SEQ ID NO: 2009 - protein, 140 aa, unidentified; identical to SEQ ID NO: 1881
  REGION 1..140: note = Description of Unknown: uncultivated organism with predicted taxonomy: unclassified Verrucomicrobia (miscellaneous)
  REGION 1..140: note = MG1-190 RuvC-III domain

SEQ ID NO: 2010 - protein, 140 aa, unidentified; identical to SEQ ID NO: 1881
  REGION 1..140: note = Description of Unknown: uncultivated organism with predicted taxonomy: unclassified Verrucomicrobia (miscellaneous)
  REGION 1..140: note = MG1-191 RuvC-III domain

SEQ ID NO: 2011 - protein, 140 aa, unidentified; identical to SEQ ID NO: 1881
  REGION 1..140: note = Description of Unknown: uncultivated organism with predicted taxonomy: unclassified Verrucomicrobia (miscellaneous)
  REGION 1..140: note = MG1-192 RuvC-III domain

SEQ ID NO: 2012 - protein, 142 aa, unidentified; identical to SEQ ID NO: 1949
  REGION 1..142: note = Description of Unknown: uncultivated organism with predicted taxonomy: Verrucomicrobia
  REGION 1..142: note = MG1-193 RuvC-III domain

SEQ ID NO: 2013 - protein, 140 aa, unidentified; identical to SEQ ID NO: 1881
  REGION 1..140: note = Description of Unknown: uncultivated organism with predicted taxonomy: unclassified Verrucomicrobia (miscellaneous)
  REGION 1..140: note = MG1-194 RuvC-III domain

SEQ ID NO: 2014 - protein, 140 aa, unidentified; identical to SEQ ID NO: 1908
  REGION 1..140: note = Description of Unknown: uncultivated organism with predicted taxonomy: unclassified Verrucomicrobia (miscellaneous)
  REGION 1..140: note = MG1-195 RuvC-III domain

SEQ ID NO: 2015 - protein, 140 aa, unidentified; identical to SEQ ID NO: 1940
  REGION 1..140: note = Description of Unknown: uncultivated organism with predicted taxonomy: Verrucomicrobia
  REGION 1..140: note = MG1-196 RuvC-III domain

SEQ ID NO: 2016 - protein, 140 aa, unidentified; identical to SEQ ID NO: 1881
  REGION 1..140: note = Description of Unknown: uncultivated organism with predicted taxonomy: unclassified Verrucomicrobia (miscellaneous)
  REGION 1..140: note = MG1-197 RuvC-III domain

SEQ ID NO: 2017 - protein, 140 aa, unidentified; identical to SEQ ID NO: 1881
  REGION 1..140: note = Description of Unknown: uncultivated organism with predicted taxonomy: unclassified Verrucomicrobia (miscellaneous)
  REGION 1..140: note = MG1-198 RuvC-III domain

SEQ ID NO: 2018 - protein, 140 aa, unidentified; identical to SEQ ID NO: 1881
  REGION 1..140: note = Description of Unknown: uncultivated organism with predicted taxonomy: unclassified Verrucomicrobia (miscellaneous)
  REGION 1..140: note = MG1-199 RuvC-III domain

SEQ ID NO: 2019 - protein, 142 aa, unidentified; identical to SEQ ID NO: 1949
  REGION 1..142: note = Description of Unknown: uncultivated organism
  REGION 1..142: note = MG1-200 RuvC-III domain

SEQ ID NO: 2020 - protein, 142 aa, unidentified; identical to SEQ ID NO: 1944
  REGION 1..142: note = Description of Unknown: uncultivated organism with predicted taxonomy: Verrucomicrobia
  REGION 1..142: note = MG1-201 RuvC-III domain

SEQ ID NO: 2021 - protein, 142 aa, unidentified; identical to SEQ ID NO: 2006
  REGION 1..142: note = Description of Unknown: uncultivated organism with predicted taxonomy: Coraliomargarita sp. CAG:312
  REGION 1..142: note = MG1-202 RuvC-III domain

SEQ ID NO: 2022 - protein, 138 aa, unidentified; identical to SEQ ID NO: 1904
  REGION 1..138: note = Description of Unknown: uncultivated organism with predicted taxonomy: Coraliomargarita sp. CAG:312
  REGION 1..138: note = MG1-203 RuvC-III domain

SEQ ID NO: 2023 - protein, 142 aa, unidentified; identical to SEQ ID NO: 1930
  REGION 1..142: note = Description of Unknown: uncultivated organism with predicted taxonomy: Verrucomicrobia
  REGION 1..142: note = MG1-204 RuvC-III domain

SEQ ID NO: 2024 - protein, 142 aa, unidentified; identical to SEQ ID NO: 1944
  REGION 1..142: note = Description of Unknown: uncultivated organism with predicted taxonomy: Coraliomargarita sp. CAG:312
  REGION 1..142: note = MG1-205 RuvC-III domain

SEQ ID NO: 2025 - protein, 138 aa, unidentified; identical to SEQ ID NO: 1904
  REGION 1..138: note = Description of Unknown: uncultivated organism with predicted taxonomy: Coraliomargarita sp. CAG:312
  REGION 1..138: note = MG1-206 RuvC-III domain

SEQ ID NO: 2026 - protein, 140 aa, unidentified; identical to SEQ ID NO: 1940
  REGION 1..140: note = Description of Unknown: uncultivated organism with predicted taxonomy: unclassified Verrucomicrobia (miscellaneous)
  REGION 1..140: note = MG1-207 RuvC-III domain

SEQ ID NO: 2027 - protein, 140 aa, unidentified; identical to SEQ ID NO: 1881
  REGION 1..140: note = Description of Unknown: uncultivated organism with predicted taxonomy: unclassified Verrucomicrobia (miscellaneous)
  REGION 1..140: note = MG1-208 RuvC-III domain

SEQ ID NO: 2028 - protein, 140 aa, unidentified; identical to SEQ ID NO: 1881
  REGION 1..140: note = Description of Unknown: uncultivated organism with predicted taxonomy: unclassified Verrucomicrobia (miscellaneous)
  REGION 1..140: note = MG1-209 RuvC-III domain

SEQ ID NO: 2029 - protein, 140 aa, unidentified; identical to SEQ ID NO: 1881
  REGION 1..140: note = Description of Unknown: uncultivated organism with predicted taxonomy: unclassified Verrucomicrobia (miscellaneous)
  REGION 1..140: note = MG1-210 RuvC-III domain

SEQ ID NO: 2030 - protein, 138 aa, unidentified; identical to SEQ ID NO: 1904
  REGION 1..138: note = Description of Unknown: uncultivated organism with predicted taxonomy: Coraliomargarita sp. CAG:312
  REGION 1..138: note = MG1-211 RuvC-III domain

SEQ ID NO: 2031 - protein, 140 aa, unidentified; identical to SEQ ID NO: 1908
  REGION 1..140: note = Description of Unknown: uncultivated organism with predicted taxonomy: unclassified Verrucomicrobia (miscellaneous)
  REGION 1..140: note = MG1-212 RuvC-III domain

SEQ ID NO: 2032 - protein, 115 aa, unidentified
  REGION 1..115: note = Description of Unknown: uncultivated organism with predicted taxonomy: unclassified Verrucomicrobia (miscellaneous)
  REGION 1..115: note = MG1-213 RuvC-III domain
AETAHIAKLAQKIVCMHFGFQFGGLSGTKRVFTVPGALTSRIRKFYGLDRILHNSAAESENLSFEEFLKFSEDLEKKNRKNKKHHALDAMCLCFAPTGVDSRRAKLGEILPEKLR

SEQ ID NO: 2033 - protein, 140 aa, unidentified
  REGION 1..140: note = Description of Unknown: uncultivated organism with predicted taxonomy: unclassified Verrucomicrobia (miscellaneous)
  REGION 1..140: note = MG1-214 RuvC-III domain
AETAHIAKLAQKIVCMHFGFQFGGLSGTKRVFTVPGALTSRIRKFYGLDRILHNSAAESENLSFEEFLKFSEDLEKKNRKNKKHHALDAMCLCFAPTGVDSRCAKLGEILPEKLRSEKAAREFFKSYLDKIMPVDVAPKK

SEQ ID NO: 2034 - protein, 140 aa, unidentified; identical to SEQ ID NO: 1881
  REGION 1..140: note = Description of Unknown: uncultivated organism with predicted taxonomy: unclassified Verrucomicrobia (miscellaneous)
  REGION 1..140: note = MG1-215 RuvC-III domain

SEQ ID NO: 2035 - protein, 140 aa, unidentified
  REGION 1..140: note = Description of Unknown: uncultivated organism with predicted taxonomy: unclassified Verrucomicrobia (miscellaneous)
  REGION 1..140: note = MG1-216 RuvC-III domain
AETAHIAKLAQKIVCMHFGFQFGGLSGAKRVFTVPGALTSRIRKFYGLDRILHNSAAESENLSFEEFLKFSEDLEKKNRKNKKHHALDAMCLCFAPTGVDSRRAKLGEILPEKLRSEKAAREFFKSYLDKIMPVDVAPKK

SEQ ID NO: 2036 - protein, 138 aa, unidentified; identical to SEQ ID NO: 1904
  REGION 1..138: note = Description of Unknown: uncultivated organism with predicted taxonomy: Coraliomargarita sp. CAG:312
  REGION 1..138: note = MG1-217 RuvC-III domain

SEQ ID NO: 2037 - protein, 140 aa, unidentified; identical to SEQ ID NO: 1908
  REGION 1..140: note = Description of Unknown: uncultivated organism with predicted taxonomy: unclassified Verrucomicrobia (miscellaneous)
  REGION 1..140: note = MG1-218 RuvC-III domain

SEQ ID NO: 2038 - protein, 140 aa, unidentified; identical to SEQ ID NO: 1925
  REGION 1..140: note = Description of Unknown: uncultivated organism with predicted taxonomy: unclassified Verrucomicrobia (miscellaneous)
  REGION 1..140: note = MG1-219 RuvC-III domain

SEQ ID NO: 2039 - protein, 140 aa, unidentified; identical to SEQ ID NO: 1881
  REGION 1..140: note = Description of Unknown: uncultivated organism with predicted taxonomy: unclassified Verrucomicrobia (miscellaneous)
  REGION 1..140: note = MG1-220 RuvC-III domain

SEQ ID NO: 2040 - protein, 66 aa, unidentified
  REGION 1..66: note = Description of Unknown: uncultivated organism with predicted taxonomy: unclassified Verrucomicrobia (miscellaneous)
  REGION 1..66: note = MG1-221 RuvC-III domain
AETAHIAKLAQKIVCMHFGFQFGGLSGTKRVFAVPGALTSRIRKFYGLDRILHNSEAESENLSFEE

SEQ ID NO: 2041 - protein, 140 aa, unidentified; identical to SEQ ID NO: 1881
  REGION 1..140: note = Description of Unknown: uncultivated organism with predicted taxonomy: unclassified Verrucomicrobia (miscellaneous)
  REGION 1..140: note = MG1-222 RuvC-III domain

SEQ ID NO: 2042 - protein, 140 aa, unidentified
  REGION 1..140: note = Description of Unknown: uncultivated organism with predicted taxonomy: unclassified Verrucomicrobia (miscellaneous)
  REGION 1..140: note = MG1-223 RuvC-III domain
AETAHIAKLAQKIVCMHFGFQFGRLSGTKRVFTVPGALTSRIRKFYGLDRILHNSAAESENLSFEEFLKFSEDLEKKNRKNKKHHALDAMCLCFAPTGVDSRRAKLGEILPEKLRSEKAAREFFKSYLDKIMPVDVAPKK

SEQ ID NO: 2043 - protein, 140 aa, unidentified; identical to SEQ ID NO: 1964
  REGION 1..140: note = Description of Unknown: uncultivated organism with predicted taxonomy: unclassified Verrucomicrobia (miscellaneous)
  REGION 1..140: note = MG1-224 RuvC-III domain

SEQ ID NO: 2044 - protein, 138 aa, unidentified; identical to SEQ ID NO: 1904
  REGION 1..138: note = Description of Unknown: uncultivated organism with predicted taxonomy: Coraliomargarita sp. CAG:312
  REGION 1..138: note = MG1-225 RuvC-III domain

SEQ ID NO: 2045 - protein, 138 aa, unidentified; identical to SEQ ID NO: 1904
  REGION 1..138: note = Description of Unknown: uncultivated organism with predicted taxonomy: Coraliomargarita sp. CAG:312
  REGION 1..138: note = MG1-226 RuvC-III domain

SEQ ID NO: 2046 - protein, 138 aa, unidentified; identical to SEQ ID NO: 1904
  REGION 1..138: note = Description of Unknown: uncultivated organism with predicted taxonomy: Coraliomargarita sp. CAG:312
  REGION 1..138: note = MG1-227 RuvC-III domain

SEQ ID NO: 2047 - protein, 140 aa, unidentified
  REGION 1..140: note = Description of Unknown: uncultivated organism with predicted taxonomy: unclassified Verrucomicrobia (miscellaneous)
  REGION 1..140: note = MG1-228 RuvC-III domain
AETAHIAKLAQKIVCMHFGFQFGGLSGTKRVFTVPGALTSRIRKFYGLDRILHNSEAESENLSFEEFLKFSEDLEKKNRKNKKHHALDAMCLCFAPTGVDSRRAKLGEILPEKLRSEKAAREFFKSYLDKIMPVDVAPKK

SEQ ID NO: 2048 - protein, 140 aa, unidentified; identical to SEQ ID NO: 1881
  REGION 1..140: note = Description of Unknown: uncultivated organism with predicted taxonomy: Verrucomicrobia
  REGION 1..140: note = MG1-229 RuvC-III domain

SEQ ID NO: 2049 - protein, 140 aa, unidentified; identical to SEQ ID NO: 1881
  REGION 1..140: note = Description of Unknown: uncultivated organism with predicted taxonomy: Verrucomicrobia
  REGION 1..140: note = MG1-230 RuvC-III domain

SEQ ID NO: 2050 - protein, 140 aa, unidentified; identical to SEQ ID NO: 1881
  REGION 1..140: note = Description of Unknown: uncultivated organism with predicted taxonomy: unclassified Verrucomicrobia (miscellaneous)
  REGION 1..140: note = MG1-231 RuvC-III domain

SEQ ID NO: 2051 - protein, 142 aa, unidentified; identical to SEQ ID NO: 1949
  REGION 1..142: note = Description of Unknown: uncultivated organism with predicted taxonomy: Verrucomicrobia
  REGION 1..142: note = MG1-232 RuvC-III domain

SEQ ID NO: 2052 - protein, 140 aa, unidentified; identical to SEQ ID NO: 1933
  REGION 1..140: note = Description of Unknown: uncultivated organism
  REGION 1..140: note = MG1-233 RuvC-III domain

SEQ ID NO: 2053 - protein, 140 aa, unidentified; identical to SEQ ID NO: 1955
  REGION 1..140: note = Description of Unknown: uncultivated organism with predicted taxonomy: unclassified Verrucomicrobia (miscellaneous)
  REGION 1..140: note = MG1-234 RuvC-III domain

SEQ ID NO: 2054 - protein, 140 aa, unidentified; identical to SEQ ID NO: 1881
  REGION 1..140: note = Description of Unknown: uncultivated organism with predicted taxonomy: unclassified Verrucomicrobia (miscellaneous)
  REGION 1..140: note = MG1-236 RuvC-III domain

SEQ ID NO: 2055 - protein, 140 aa, unidentified; identical to SEQ ID NO: 1908
  REGION 1..140: note = Description of Unknown: uncultivated organism with predicted taxonomy: Verrucomicrobia
  REGION 1..140: note = MG1-237 RuvC-III domain

SEQ ID NO: 2056 - protein, 138 aa, unidentified; identical to SEQ ID NO: 1904
  REGION 1..138: note = Description of Unknown: uncultivated organism with predicted taxonomy: Coraliomargarita sp. CAG:312
  REGION 1..138: note = MG1-238 RuvC-III domain

SEQ ID NO: 2057 - protein, 140 aa, unidentified; identical to SEQ ID NO: 1830
  REGION 1..140: note = Description of Unknown: uncultivated organism with predicted taxonomy: unclassified Verrucomicrobia (miscellaneous)
  REGION 1..140: note = MG1-239 RuvC-III domain

SEQ ID NO: 2058 - protein, 140 aa, unidentified; identical to SEQ ID NO: 1881
  REGION 1..140: note = Description of Unknown: uncultivated organism with predicted taxonomy: unclassified Verrucomicrobia (miscellaneous)
  REGION 1..140: note = MG1-240 RuvC-III domain

SEQ ID NO: 2059 - protein, 138 aa, unidentified; identical to SEQ ID NO: 1904
  REGION 1..138: note = Description of Unknown: uncultivated organism with predicted taxonomy: Verrucomicrobia
  REGION 1..138: note = MG1-241 RuvC-III domain

SEQ ID NO: 2060 - protein, 138 aa, unidentified; identical to SEQ ID NO: 1904
  REGION 1..138: note = Description of Unknown: uncultivated organism with predicted taxonomy: Coraliomargarita sp. CAG:312
  REGION 1..138: note = MG1-242 RuvC-III domain

SEQ ID NO: 2061 - protein, 142 aa, unidentified; identical to SEQ ID NO: 1974
  REGION 1..142: note = Description of Unknown: uncultivated organism with predicted taxonomy: Verrucomicrobia
  REGION 1..142: note = MG1-243 RuvC-III domain

SEQ ID NO: 2062 - protein, 140 aa, unidentified; identical to SEQ ID NO: 1881
  REGION 1..140: note = Description of Unknown: uncultivated organism with predicted taxonomy: unclassified Verrucomicrobia (miscellaneous)
  REGION 1..140: note = MG1-244 RuvC-III domain

SEQ ID NO: 2063 - protein, 138 aa, unidentified; identical to SEQ ID NO: 1904
  REGION 1..138: note = Description of Unknown: uncultivated organism with predicted taxonomy: Coraliomargarita sp. CAG:312
  REGION 1..138: note = MG1-245 RuvC-III domain

SEQ ID NO: 2064 - protein, 140 aa, unidentified; identical to SEQ ID NO: 1940
  REGION 1..140: note = Description of Unknown: uncultivated organism with predicted taxonomy: unclassified Verrucomicrobia (miscellaneous)
  REGION 1..140: note = MG1-246 RuvC-III domain

SEQ ID NO: 2065 - protein, 138 aa, unidentified; identical to SEQ ID NO: 1904
  REGION 1..138: note = Description of Unknown: uncultivated organism with predicted taxonomy: Coraliomargarita sp. CAG:312
  REGION 1..138: note = MG1-247 RuvC-III domain

SEQ ID NO: 2066 - protein, 140 aa, unidentified; identical to SEQ ID NO: 1970
  REGION 1..140: note = Description of Unknown: uncultivated organism with predicted taxonomy: unclassified Verrucomicrobia (miscellaneous)
  REGION 1..140: note = MG1-248 RuvC-III domain

SEQ ID NO: 2067 - protein, 140 aa, unidentified; identical to SEQ ID NO: 1972
  REGION 1..140: note = Description of Unknown: uncultivated organism with predicted taxonomy: unclassified Verrucomicrobia (miscellaneous)
  REGION 1..140: note = MG1-249 RuvC-III domain

SEQ ID NO: 2068 - protein, 138 aa, unidentified; identical to SEQ ID NO: 1904
  REGION 1..138: note = Description of Unknown: uncultivated organism with predicted taxonomy: Coraliomargarita sp. CAG:312
  REGION 1..138: note = MG1-250 RuvC-III domain

SEQ ID NO: 2069 - protein, 138 aa, unidentified; identical to SEQ ID NO: 1904
  REGION 1..138: note = Description of Unknown: uncultivated organism with predicted taxonomy: Coraliomargarita sp. CAG:312
  REGION 1..138: note = MG1-251 RuvC-III domain

SEQ ID NO: 2070 - protein, 140 aa, unidentified; identical to SEQ ID NO: 1830
  REGION 1..140: note = Description of Unknown: uncultivated organism with predicted taxonomy: unclassified Verrucomicrobia (miscellaneous)
  REGION 1..140: note = MG1-252 RuvC-III domain

SEQ ID NO: 2071 - protein, 140 aa, unidentified; identical to SEQ ID NO: 1881
  REGION 1..140: note = Description of Unknown: uncultivated organism with predicted taxonomy: unclassified Verrucomicrobia (miscellaneous)
  REGION 1..140: note = MG1-253 RuvC-III domain

SEQ ID NO: 2072 - protein, 140 aa, unidentified; identical to SEQ ID NO: 1881
  REGION 1..140: note = Description of Unknown: uncultivated organism with predicted taxonomy: unclassified Verrucomicrobia (miscellaneous)
  REGION 1..140: note = MG1-254 RuvC-III domain

SEQ ID NO: 2073 - protein, 140 aa, unidentified; identical to SEQ ID NO: 1881
  REGION 1..140: note = Description of Unknown: uncultivated organism with predicted taxonomy: unclassified Verrucomicrobia (miscellaneous)
  REGION 1..140: note = MG1-255 RuvC-III domain

SEQ ID NO: 2074 - protein, 140 aa, unidentified; identical to SEQ ID NO: 1908
  REGION 1..140: note = Description of Unknown: uncultivated organism with predicted taxonomy: unclassified Verrucomicrobia (miscellaneous)
  REGION 1..140: note = MG1-256 RuvC-III domain

SEQ ID NO: 2075 - protein, 140 aa, unidentified; identical to SEQ ID NO: 1881
  REGION 1..140: note = Description of Unknown: uncultivated organism with predicted taxonomy: unclassified Verrucomicrobia (miscellaneous)
  REGION 1..140: note = MG1-257 RuvC-III domain

SEQ ID NO: 2076 - protein, 142 aa, unidentified; identical to SEQ ID NO: 1911
  REGION 1..142: note = Description of Unknown: uncultivated organism with predicted taxonomy: Verrucomicrobia
  REGION 1..142: note = MG1-258 RuvC-III domain

SEQ ID NO: 2077 - protein, 140 aa, unidentified; identical to SEQ ID NO: 1881
  REGION 1..140: note = Description of Unknown: uncultivated organism with predicted taxonomy: unclassified Verrucomicrobia (miscellaneous)
  REGION 1..140: note = MG1-259 RuvC-III domain

SEQ ID NO: 2078 - protein, 140 aa, unidentified; identical to SEQ ID NO: 1881
  REGION 1..140: note = Description of Unknown: uncultivated organism with predicted taxonomy: unclassified Verrucomicrobia (miscellaneous)
  REGION 1..140: note = MG1-260 RuvC-III domain

SEQ ID NO: 2079 - protein, 140 aa, unidentified; identical to SEQ ID NO: 1881
  REGION 1..140: note = Description of Unknown: uncultivated organism with predicted taxonomy: unclassified Verrucomicrobia (miscellaneous)
  REGION 1..140: note = MG1-261 RuvC-III domain

SEQ ID NO: 2080 - protein, 140 aa, unidentified; identical to SEQ ID NO: 1830
  REGION 1..140: note = Description of Unknown: uncultivated organism with predicted taxonomy: unclassified Verrucomicrobia (miscellaneous)
  REGION 1..140: note = MG1-262 RuvC-III domain

SEQ ID NO: 2081 - protein, 138 aa, unidentified; identical to SEQ ID NO: 1976
  REGION 1..138: note = Description of Unknown: uncultivated organism with predicted taxonomy: Verrucomicrobia
  REGION 1..138: note = MG1-263 RuvC-III domain

SEQ ID NO: 2082 - protein, 140 aa, unidentified; identical to SEQ ID NO: 1830
  REGION 1..140: note = Description of Unknown: uncultivated organism with predicted taxonomy: unclassified Verrucomicrobia (miscellaneous)
  REGION 1..140: note = MG1-264 RuvC-III domain

SEQ ID NO: 2083 - protein, 140 aa, unidentified; identical to SEQ ID NO: 1982
  REGION 1..140: note = Description of Unknown: uncultivated organism with predicted taxonomy: unclassified Verrucomicrobia (miscellaneous)
  REGION 1..140: note = MG1-265 RuvC-III domain

SEQ ID NO: 2084 - protein, 138 aa, unidentified; identical to SEQ ID NO: 1904
  REGION 1..138: note = Description of Unknown: uncultivated organism with predicted taxonomy: Coraliomargarita sp. CAG:312
  REGION 1..138: note = MG1-266 RuvC-III domain

SEQ ID NO: 2085 - protein, 142 aa, unidentified; identical to SEQ ID NO: 1928
  REGION 1..142: note = Description of Unknown: uncultivated organism with predicted taxonomy: Verrucomicrobia
  REGION 1..142: note = MG1-267 RuvC-III domain

SEQ ID NO: 2086 - protein, 140 aa, unidentified; identical to SEQ ID NO: 1923
  REGION 1..140: note = Description of Unknown: uncultivated organism with predicted taxonomy: Verrucomicrobia
  REGION 1..140: note = MG1-268 RuvC-III domain

SEQ ID NO: 2087 - protein, 140 aa, unidentified; identical to SEQ ID NO: 1881
  REGION 1..140: note = Description of Unknown: uncultivated organism with predicted taxonomy: unclassified Verrucomicrobia (miscellaneous)
  REGION 1..140: note = MG1-269 RuvC-III domain

SEQ ID NO: 2088 - protein, 138 aa, unidentified; identical to SEQ ID NO: 1921
  REGION 1..138: note = Description of Unknown: uncultivated organism with predicted taxonomy: Verrucomicrobia
  REGION 1..138: note = MG1-270 RuvC-III domain

SEQ ID NO: 2089 - protein, 140 aa, unidentified; identical to SEQ ID NO: 1908
  REGION 1..140: note = Description of Unknown: uncultivated organism with predicted taxonomy: unclassified Verrucomicrobia (miscellaneous)
  REGION 1..140: note = MG1-271 RuvC-III domain

SEQ ID NO: 2090 - protein, 203 aa, unidentified
  REGION 1..203: note = Description of Unknown: uncultivated organism
  REGION 1..203: note = MG1-272 RuvC-III domain
QRTAYIARCLRYVCLLKFGWLSPEDRDPGHEKANDATRSYLVTNGGTTRRLRQAWNLDELLRETVSPEKWAGMTDVEKERALAQGARIPTEEWKKLDKAKQDDVLRARRTKNRQDVRHHALDAMVVACTLPWAANLTVWASGWCNLDTDDGSVSSVRCPIFGENDFGEGIYAAIEAKLSELKTALPEATSNAITHYRSHERHK

SEQ ID NO: 2091 - protein, 198 aa, unidentified
  REGION 1..198: note = Description of Unknown: uncultivated organism with predicted taxonomy: Rhizobiales
  REGION 1..198: note = MG1-273 RuvC-III domain
QQTAYIARCLREACLIIFGKEWLDWTDGAGRDPRLLTDNRASKNYLTTNGVITSRLRGAWHLNEVLWPKPERLNDTEWDKLTDDEKIPLKAKYKEERELRALKNRQDHRHHAIDAMVISCAMPWQTCKTRTGSQQSDDGLCEVDSETGAITKIWNPVFNDYGYGIKQAAEAKSALLLKFSSERQVDLLRHHKSNNRNA

SEQ ID NO: 2092 - protein, 198 aa, unidentified
  REGION 1..198: note = Description of Unknown: uncultivated organism
  REGION 1..198: note = MG1-274 RuvC-III domain
QQTAYIARCLREACLIHFGKEWLDWTDGAGRDPRLLPDNRASKSYLTTSGATTARLRGAWHLNEILWPKPQRLNDAEWDKLTDEEKTILKAKYKEERAVRALKNRQDHRHHALDAMVISCAVPWQTFKVRLGNQQPEDGLCELDAETGEITKIWNPVFNDYGYGIMRAVESRMDLLLKFSTDRQTDLLRHHKSSQRNA

SEQ ID NO: 2093 - protein, 125 aa, unidentified; identical to SEQ ID NO: 1839
  REGION 1..125: note = Description of Unknown: uncultivated organism
  REGION 1..125: note = MG1-275 RuvC-III domain

SEQ ID NO: 2094 - protein, 123 aa, unidentified
  REGION 1..123: note = Description of Unknown: uncultivated organism with predicted taxonomy: Verrucomicrobia bacterium IMCC26134
  REGION 1..123: note = MG1-276 RuvC-III domain
AETAWISKLAQTIVGLRFGWPGGIVDGKRKVIVVSGGLTGRIRRKYKLNRLLNPNASSEEEAETKNRDDDRHHALDAMVISFIPNWTRNAKLAGFFRFPEGVHGEFFANEIADVVPKNVALEK

SEQ ID NO: 2095 - protein, 174 aa, unidentified
  REGION 1..174: note = Description of Unknown: uncultivated organism
  REGION 1..174: note = MG1-277 RuvC-III domain
QHTAYIARVIRQTSLIQLGWLGEDGRDPTGLKDPQKTAWKFQVTNGHLTSRLRKAWGLNQILHPFPSKDEWGAMTPDEQENKKSELQEKNRGDLRHHALDAIVIACTMPWLAHRTVRVKDPETGEDGWWDLDERTQRSVARNPICPNEGQMYGLAKEEIEKVVVRHHVAKGNKR

SEQ ID NO: 2096 - protein, 166 aa, unidentified
  REGION 1..166: note = Description of Unknown: uncultivated organism
  REGION 1..166: note = MG1-279 RuvC-III domain
QHTAYIARVIRHISLIQLGWLNDAGRDPTPEKQNPALSFQVTNGQLTSRLRKSWGLNQILHPLPPGKRWDELTDEEQTQFTEKNRGDLRHHSLDAMVIACTLPWLAHRTHGATDQFGHHGWWTQDEKQRSKAANPLFPNEGQMHDVVKKEIEKVIVRHHVSRSNHK

SEQ ID NO: 2097 - protein, 203 aa, unidentified; identical to SEQ ID NO: 2090
  REGION 1..203: note = Description of Unknown: uncultivated organism
  REGION 1..203: note = MG1-280 RuvC-III domain

SEQ ID NO: 2098 - protein, 174 aa, unidentified; identical to SEQ ID NO: 2095
  REGION 1..174: note = Description of Unknown: uncultivated organism with predicted taxonomy: Thermoflexibacter ruber
  REGION 1..174: note = MG1-281 RuvC-III domain

SEQ ID NO: 2099 - protein, 174 aa, unidentified; identical to SEQ ID NO: 2095
  REGION 1..174: note = Description of Unknown: uncultivated organism
  REGION 1..174: note = MG1-282 RuvC-III domain

SEQ ID NO: 2100 - protein, 137 aa, unidentified
  REGION 1..137: note = Description of Unknown: uncultivated organism with predicted taxonomy: Verrucomicrobia bacterium IMCC26134
  REGION 1..137: note = MG1-283 RuvC-III domain
AETAWVSKLAQTIANLRFNWTNGYDQNRKKRVIVISGGVTARVRRKYGLDKLLYNKDTDAEVFAKKLKNRADKRHHALDAMVLTFVPQWARDPGKEGFFRFPAEFRDANGREDYEQIRKLFGDSIAKVMPRYLTYER

SEQ ID NO: 2101 - protein, 172 aa, unidentified
  REGION 1..172: note = Description of Unknown: uncultivated organism
  REGION 1..172: note = MG1-284 RuvC-III domain
QHTAYIARVIRQVSLIQLGWLAEDGRDATGLKDPEMTAWRFQVTNGSLTSRLRKSWGLNQILNPFPSKDAWEAMTPEEQEKKKTEMQEKNRGDLRHHSLDAMVIACTLPWLAHRTHGAKDSFGRPGWWWLDEKKRSQASTPIFPKEGQMHEVVKKEIEKVLVRHHVSRSNHQ

SEQ ID NO: 2102 - protein, 127 aa, unidentified
  REGION 1..127: note = Description of Unknown: uncultivated organism with predicted taxonomy: Verrucomicrobia
  REGION 1..127: note = MG1-285 RuvC-III domain
AETAWIAKLAQAIVGLHFGWRNGVDESGNKRVTVISGGLTGRIRRKYALNQILNPNAKTEEEAEKKNRDDDRHHALDAMVISFIPSWVRDAMKEKFFRFPEPIHQNAKGFFEKEIQSVKPRNIALQK

SEQ ID NO: 2103 - protein, 137 aa, unidentified; identical to SEQ ID NO: 1831
  REGION 1..137: note = Description of Unknown: uncultivated organism with predicted taxonomy: Verrucomicrobia
  REGION 1..137: note = MG1-287 RuvC-III domain

SEQ ID NO: 2104 - protein, 137 aa, unidentified; identical to SEQ ID NO: 1831
  REGION 1..137: note = Description of Unknown: uncultivated organism
  REGION 1..137: note = MG1-288 RuvC-III domain

SEQ ID NO: 2105 - protein, 146 aa, unidentified
  REGION 1..146: note = Description of Unknown: uncultivated organism with predicted taxonomy: Deltaproteobacteria bacterium RIFOXYA12_FULL_61_11
  REGION 1..146: note = MG1-290 RuvC-III domain
TQTAYIARALRGLCLLRQNWLTPEGRDPSDQPGGPGQFFQLTNGYLTAGIRRCWGLDELLPSALDDEGGKNRHDLRHHALDAAVIACTLPWAAHQPLSRGGWREAPPFGSARREQWRTPFDHLRSQIRARVPDIVPTQKVGTSAKQ

SEQ ID NO: 2106 - protein, 126 aa, unidentified
  REGION 1..126: note = Description of Unknown: uncultivated organism with predicted taxonomy: Candidatus Termititenax aidoneus
  REGION 1..126: note = MG1-291 RuvC-III domain
AETAYITKLTQKIAHLFFGWDWQTKGSHRKIIVQSGGYTSKIRKIFKLNALLYPEKTGDEIREIVETGKNRDNKRHHALDALVLSITPEIKYDEKKDADVYPVWFNPEYCKNALDKVNPTYIDFEK

SEQ ID NO: 2107 - protein, 133 aa, unidentified
  REGION 1..133: note = Description of Unknown: uncultivated organism with predicted taxonomy: Candidatus Termititenax aidoneus
  REGION 1..133: note = MG1-292 RuvC-III domain
SQTAYISKLAQKVTALTFGWGMQTKDDNRNIVIATGGQTARIRSRFKLDRLLHSGMTDEEFEKALRNGEIEKKNRSNPRHHALDALVLSAVPEIRVDKNRKGKYDDIYPSWLTRDFCEKEVAHVYPKQIKFSK

SEQ ID NO: 2108 - protein, 133 aa, unidentified; identical to SEQ ID NO: 2107
  REGION 1..133: note = Description of Unknown: uncultivated organism with predicted taxonomy: Elusimicrobia bacterium HGW-Elusimicrobia-1
  REGION 1..133: note = MG1-293 RuvC-III domain

SEQ ID NO: 2109 - protein, 129 aa, unidentified
  REGION 1..129: note = Description of Unknown: uncultivated organism with predicted taxonomy: Endomicrobium proavitum
  REGION 1..129: note = MG1-294 RuvC-III domain
QATSQIEKEAQTIASLLFGWGINTKGDKKKILFFTGGNTADVRKNLNLNRLLHPALSDEEYNELKKKKDFKDKNRKNTKHHALDALVLSVLPEITMDKKSIENKPEFFNIKFCEEQLKKVYPIIIKQTK

SEQ ID NO: 2110 - protein, 124 aa, unidentified
  REGION 1..124: note = Description of Unknown: uncultivated organism with predicted taxonomy: Verrucomicrobia bacterium 12-59-8
  REGION 1..124: note = MG1-295 RuvC-III domain
AETAYIARVARDVAALRCGWQPGEAGEKRHIHIINGANTAKVRGLYHLNSLLASDQGGLEPDKFMKKVRENKKHHALDAMVLSFIREWIRNPKTRQYEFPAGIDREYFRKCLENVVPYNCILPK

SEQ ID NO: 2111 - protein, 129 aa, unidentified
  REGION 1..129: note = Description of Unknown: uncultivated organism
  REGION 1..129: note = MG1-296 RuvC-III domain
QATMYIEKYAQKITALFFGWGEQTKGDERHIFVCNGGLTAKLRKENGLDRLLWSEEEFYKLMASGKLDEKNRENKKHHALDALVISFADDLRTDPKTGRKLFPEFAQNNPAFFSEAMDKVFPKQLRKKA

SEQ ID NO: 2112 - protein, 124 aa, unidentified; identical to SEQ ID NO: 2110
  REGION 1..124: note = Description of Unknown: uncultivated organism with predicted taxonomy: Verrucomicrobia bacterium 12-59-8
  REGION 1..124: note = MG1-297 RuvC-III domain

SEQ ID NO: 2113 - protein, 130 aa, unidentified
  REGION 1..130: note = Description of Unknown: uncultivated organism
  REGION 1..130: note = MG1-298 RuvC-III domain
QATRYIEKLAQKLISLYFGWGEQTTGDKRKMFVCTGGLTAKIRSQYGLNRLLHKDLSGEEFKKIVAEGKLDEKNRNNKRHHALDALVISFTRDIKYDNKGKPVLPDYACNPAFFADAIEKVFPVTIRSKK

SEQ ID NO: 2114 - protein, 127 aa, unidentified
  REGION 1..127: note = Description of Unknown: uncultivated organism
  REGION 1..127: note = MG1-299 RuvC-III domain
AETAWISRLAQKIADLSFGWKNGIDAAGRKRTVVVSGGLTARIRRKYGLNRILNPGASSEEEAEKKNRSDKRHHALDAMTISFIPQWARDPGKTGFFRFPKAIRDNPLPFFQARIDAVVPRQLCYEK

SEQ ID NO: 2115 - protein, 127 aa, unidentified
  REGION 1..127: note = Description of Unknown: uncultivated organism
  REGION 1..127: note = MG1-300 RuvC-III domain
AETAWISRLSQKIIDLTFGWSNGVDASGRKRSIIVSGGLTARIRRKYHLNHILNPDAETDEEAEKKNRKDKRHHALDAMTISFIPQWARDPDKTGFFRLPKEIRDNPLPFFAKRIDTVIPRQLCFEK

SEQ ID NO: 2116 - protein, 127 aa, unidentified
  REGION 1..127: note = Description of Unknown: uncultivated organism
  REGION 1..127: note = MG1-301 RuvC-III domain
AETAWISRLAQKIADLTFGWQNGVDAAGRKRTIIVSGGLTARIRRKYGLNRLLNPDASSEEEAEKKNRSDKRHHALDAMTISFIPQWARDPDKTGFFRFPKEIRDNSLPFFKARIDAVVPRQLCYEK

SEQ ID NO: 2117 - protein, 127 aa, unidentified
  REGION 1..127: note = Description of Unknown: uncultivated organism
  REGION 1..127: note = MG1-302 RuvC-III domain
AETAWISRLAQKIADLAFGWHNGVDAAGRKRTVVVSGGLTARIRRKYGLNRILNPNVATEEEAEKKNRADKRHHALDAMTISFIPQWARDPDKTGFFRLPREIRDNPWPFFQARIDAVVPRQLCYEK

SEQ ID NO: 2118 - protein, 127 aa, unidentified; identical to SEQ ID NO: 2117
  REGION 1..127: note = Description of Unknown: uncultivated organism
  REGION 1..127: note = MG1-303 RuvC-III domain

SEQ ID NO: 2119 - protein, 173 aa, unidentified
  REGION 1..173: note = Description of Unknown: uncultivated organism with predicted taxonomy: Verrucomicrobia
  REGION 1..173: note = MG1-304 RuvC-III domain
AATSWIARITQSIVRLHFGWQLDDEPGKEKVMTISGGLTARIRRKYLLDSLLGTDKESQKVCEQVDQVLAEMEKLKSQPRSEETKVQWRELSQKRSQLARDSEKNRGDQRHHALDAMLLTFLPNWARDRNKEDFLRLEDIGDNAPYTDEGKRNAEKITDEIKKLVEETKPIYK

SEQ ID NO: 2120 - protein, 127 aa, unidentified
  REGION 1..127: note = Description of Unknown: uncultivated organism with predicted taxonomy: Verrucomicrobia bacterium IMCC26134
  REGION 1..127: note = MG1-305 RuvC-III domain
AETAWISRLAQKIADLSFGWQNGVDAAGRKRTIVVSGGLTARIRRKYGLNRLLNPNATSEEEAEKKNRADKRHHALDAMTISFIPQWARDPDKTGFFRFPKEIRDNPHPFFQARIEAVVPRQLCYEK

SEQ ID NO: 2121 - protein, 123 aa, unidentified
  REGION 1..123: note = Description of Unknown: uncultivated organism with predicted taxonomy: Verrucomicrobia
  REGION 1..123: note = MG1-306 RuvC-III domain
AETAWISKLAQTIIGLRFGWPNGIANGERKVIVISGGLTGRIRRKYKLNSLLNPDAKSEEEAEIKNRGDDRHHALDAMVISFLPTWARNSRFTGFFRFPDEVTRELFKREIAEVIPQNVCFER

SEQ ID NO: 2122 - protein, 198 aa, unidentified
  REGION 1..198: note = Description of Unknown: uncultivated organism with predicted taxonomy: Verrucomicrobia bacterium IMCC26134
  REGION 1..198: note = MG1-307 RuvC-III domain
QQTAYIARCLREACLIHFGKEWLDWTDGAGRDPLLLPDNRASKSYLTTSGATTARLRGAWHLNEILWPKPQRLNDAEWDKLTDEEKTILKAKYKEERAVRALKNRQDHRHHALDAMVISCAVPWQTFKVRLGNQQPEDGLCELDAETGEITKIWNPVFNDYGYGIMRAVESRMDLLLKFSTDRQTDLLRHHKSSQRNA

SEQ ID NO: 2123 - protein, 127 aa, unidentified
  REGION 1..127: note = Description of Unknown: uncultivated organism
  REGION 1..127: note = MG1-308 RuvC-III domain
QLARQLRRMICFWMGIQEDSKETRERIGNPSGLHTAAARRGWKITKDRSDLTHHRMDAAVLSFIPPGAGLNSVMYGGIFEEVHSTKEINGNKFKVVQMRGAPELKPDLSALKKDSLTECPVINIRSK

SEQ ID NO: 2124 - protein, 152 aa, unidentified
  REGION 1..152: note = Description of Unknown: uncultivated organism
  REGION 1..152: note = MG1-309 RuvC-III domain
QLARELRRRVVEWLGIERRHAGIADPTQRALAREAEERRRVAAPAGALTAACREAWKDRLPEAYFTPIEIRGQTVLTKNRGNLRHHMWDAGVLAHIPPGDGLNHVRYGGIFETADIGGAPRPVPLPELAPDLAEIEKADPLACRVFHLRPRH

SEQ ID NO: 2125 - protein, 137 aa, unidentified
  REGION 1..137: note = Description of Unknown: uncultivated organism
  REGION 1..137: note = MG1-310 RuvC-III domain
QLARQLRAEIMRWMQVDDKPDEAARRIGTPSGWLAAQARKSWLPAEEYEKVRNNVTHHLIDAAILAHIPPREGMNSVPCKGIFYVESVPVRDPVTGDTTYRLETKALPELSPLPRLKHWLPDNGEYDVCPVWKPRRQ

SEQ ID NO: 2126 - protein, 137 aa, unidentified
  REGION 1..137: note = Description of Unknown: uncultivated organism
  REGION 1..137: note = MG1-311 RuvC-III domain
QLARQLRAEVMRWMQVEDQPDEAARRIGTPSGWLAAQARKSWLAAIDYQKVRNNLTHHLIDAAVLAHIPPREGMNSVICKGIFYVEREPVRDEATGITSHRFVTKALPELSALPRIKQWLPDNGEYAVCPVLKPRRQ

SEQ ID NO: 2127 - protein, 137 aa, unidentified; identical to SEQ ID NO: 2126
  REGION 1..137: note = Description of Unknown: uncultivated organism
  REGION 1..137: note = MG1-312 RuvC-III domain

SEQ ID NO: 2128 - protein, 127 aa, unidentified; identical to SEQ ID NO: 2123
  REGION 1..127: note = Description of Unknown: uncultivated organism
  REGION 1..127: note = MG1-314 RuvC-III domain

SEQ ID NO: 2129 - protein, 137 aa, unidentified
  REGION 1..137: note = Description of Unknown: uncultivated organism with predicted taxonomy: Verrucomicrobia bacterium
  REGION 1..137: note = MG1-315 RuvC-III domain
QLARQLRAEVMRWMHVEDQPDEAARRIGTPSGWLVAQARKSWLAASDYQKVRNNLTHHLIDAAVLAHIPPREGMNSIICKGIFYDVRERVRDEATGITSHRFLTKALPELSPLPRLKQWLPDNGEYAVCPVLKPRHQ

SEQ ID NO: 2130 - protein, 198 aa, unidentified; identical to SEQ ID NO: 2092
  REGION 1..198: note = Description of Unknown: uncultivated organism with predicted taxonomy: Thiorhodospira sibirica
  REGION 1..198: note = MG1-316 RuvC-III domain

SEQ ID NO: 2131 - protein, 137 aa, unidentified
  REGION 1..137: note = Description of Unknown: uncultivated organism
  REGION 1..137: note = MG1-317 RuvC-III domain
QLARQLRAEVMRWMKVEGDPDEAARRIGTPSGWLAAQARKSWLAQGDYEKVRNNLTHHLIDAAVLAHIPPREGMNSVLYKGIFYVVREPVRNEITGTTSQRLLTKALPQLSPLPRLNHWLPDNGEYAVCPVLKPRRQ

SEQ ID NO: 2132 - protein, 137 aa, unidentified; identical to SEQ ID NO: 2126
  REGION 1..137: note = Description of Unknown: uncultivated organism
  REGION 1..137: note = MG1-318 RuvC-III domain

SEQ ID NO: 2133 - protein, 130 aa, unidentified
  REGION 1..130: note = Description of Unknown: uncultivated organism with predicted taxonomy: Verrucomicrobia bacterium IMCC26134
  REGION 1..130: note = AKC83434.1 RuvC-III domain
AETAYIARLAQTVAALHFGWPINSQPGERRITIVNGGLTARVRRNYRLNSLLNPCPTGKDQKEWEEDADVEKNRKDDRHHALDAMVISFIPAWTRDPKKEKFFRLPDGVTPETFQERLEEVLPRQLHYER

SEQ ID NO: 2134 - protein, 130 aa, unidentified; identical to SEQ ID NO: 2133
  REGION 1..130: note = Description of Unknown: uncultivated organism with predicted taxonomy: Verrucomicrobia bacterium IMCC26134
  REGION 1..130: note = AKC83434.1 RuvC-III domain

SEQ ID NO: 2135 - protein, 123 aa, unidentified
  REGION 1..123: note = Description of Unknown: uncultivated organism with predicted taxonomy: Verrucomicrobia bacterium 61-8
  REGION 1..123: note = OJV06180.1 RuvC-III domain
AETAWIAKLSQAILDAFFGWKNGVDDEGRKRVISVNGGLTARIRRKYQLNSILNPSLNEEEAEKKNRSDKRHHALDAMVINFIPSWTRDTAKEHFFRFPSGIHRETFVQQIANVTPRNLCLEK

SEQ ID NO: 2136 - protein, 123 aa, unidentified; identical to SEQ ID NO: 2135
  REGION 1..123: note = Description of Unknown: uncultivated organism with predicted taxonomy: Verrucomicrobia bacterium 61-8
  REGION 1..123: note = OJV06180.1 RuvC-III domain

SEQ ID NO: 2137 - protein, 137 aa, unidentified
  REGION 1..137: note = Description of Unknown: uncultivated organism with predicted taxonomy: Pedosphaera sp. Tous-C6FEB
  REGION 1..137: note = PAW75411.1 RuvC-III domain
AETAWVSKLAQAIVNLTFGWTNANDEEGRKRVIVVSGGLTARVRRKYSLDKLLYTNTTDPEVLTKQVKNRSDKRHHALDAMVLTYIPQWARDPGKEGFFRFPAEFRDATGREDYSAIQRLFKDKLAKTTPRFLAYER

SEQ ID NO: 2138 - protein, 137 aa, unidentified; identical to SEQ ID NO: 2137
  REGION 1..137: note = Description of Unknown: uncultivated organism with predicted taxonomy: Pedosphaera sp. Tous-C6FEB
  REGION 1..137: note = PAW75411.1 RuvC-III domain

SEQ ID NO: 2139 - protein, 130 aa, unidentified; identical to SEQ ID NO: 2133
  REGION 1..130: note = Description of Unknown: uncultivated organism with predicted taxonomy: Verrucomicrobia bacterium IMCC26134
  REGION 1..130: note = WP_082083265.1 RuvC-III domain

SEQ ID NO: 2140 - protein, 130 aa, unidentified; identical to SEQ ID NO: 2133
  REGION 1..130: note = Description of Unknown: uncultivated organism with predicted taxonomy: Verrucomicrobia bacterium IMCC26134
  REGION 1..130: note = WP_082083265.1 RuvC-III domain

SEQ ID NO: 2141 - protein, 156 aa, unidentified; identical to SEQ ID NO: 1899
  REGION 1..156: note = Description of Unknown: uncultivated organism
  REGION 1..156: note = MG2-1 RuvC-III domain

SEQ ID NO: 2142 - protein, 174 aa, unidentified
  REGION 1..174: note = Description of Unknown: uncultivated organism
  REGION 1..174: note = MG2-7 RuvC-III domain
TQTSHLNKMAIRLVKQRIGIDAKHLPGNVTAFIRQKLHIDECLFNAVPRLQTAAKGQPKSSKRKKKAEEAPVEPIQDDMPPRKLTKADIRELTYLHHAMDAVTQGLALLLFAPEDWPLLVKRNLPDSEQRHLKARYPFLDFSADKHISIQDLPEDTLHTISERLAECRVVRHIP

SEQ ID NO: 2143 - protein, 206 aa, unidentified
  REGION 1..206: note = Description of Unknown: uncultivated organism
  REGION 1..206: note = MG2-3 RuvC-III domain
TITSHLNRLAQQVLLRSLPHLAEHQITAIPGSVIGVLRDAPGWRLLGCLDGAATADVIRKVLQLDHEGKPMCASDVAPLMKRIPKPKGEIRELTHLHHAVDACAIAIINHLLPKDGKLWELVAKRELTDADKNAYDDLRQKNQSQWQPRRLARLFSIVPNLDDKGQQPKHDHKWRIRPCRLKDVLPDIGAQVNKCLRERRVVEHTP

SEQ ID NO: 2144 - protein, 161 aa, unidentified
  REGION 1..161: note = Description of Unknown: uncultivated organism with predicted taxonomy: Verrucomicrobia
  REGION 1..161: note = MG2-5 RuvC-III domain
TQTSQLVRLAAQALRRNLPHLGPENVVSLPGSVTGMVRKSWNVTGCLELACPQVMEEVVDQDGKAVRRAKDKGEIRGITHLHHALDACVIGFSSHFIPNNGGLWELMVKRRWTPAEEKELEARRVFSKGMDGRFQMTDLHKRHKEAIRQRLAEKRVVQHIP

SEQ ID NO: 2145 - protein, 153 aa, unidentified
  REGION 1..153: note = Description of Unknown: uncultivated organism with predicted taxonomy: Verrucomicrobia bacterium
  REGION 1..153: note = MG2-6 RuvC-III domain
TQTSQLVRLAAQVIRKKYVDSKEPKIVSMPGSVTAVFRKSWKVMGCLSKAVPAILDENGEVRPKDEIRNITHLHHAIDACVLALASHLFPNNGRLWELLVKNKLNSSEVDELKKIPLVQVGVDNKINISDLPEFIKEQISNRLLERRVVQHIS

SEQ ID NO: 2146 - protein, 154 aa, unidentified
  REGION 1..154: note = Description of Unknown: uncultivated organism with predicted taxonomy: Verrucomicrobia
  REGION 1..154: note = MG2-8 RuvC-III domain
TVTSQLVRLGALTLKREFADVKQPPVIVSLPGAVTGEVRKAWDVLGCLGLACSQVLDVEGKPKTKTEIRDITHLHHALDACVLGLASHFIPNNGRVWELITKRNLTSAEQKELIALNVFATGPQGRVQLRDLRPERKEQIRQRLAEKRVVQHIP

SEQ ID NO: 2147 - protein, 154 aa, unidentified; identical to SEQ ID NO: 2146
  REGION 1..154: note = Description of Unknown: uncultivated organism with predicted taxonomy: Verrucomicrobia
  REGION 1..154: note = MG2-10 RuvC-III domain

SEQ ID NO: 2148 - protein, 156 aa, unidentified
  REGION 1..156: note = Description of Unknown: uncultivated organism
  REGION 1..156: note = MG2-11 RuvC-III domain
TQTSQLVRLGAQILKKGFTGLERQPVITSMPGSVTGVMRKGWNLIGCLSAANPNVLDEIGQPKIKTEIRDITHLHHALDACVLVLASYFIPNKGAVWELIVKRRLDETEQLQLRTATRGIFNFSPGRRFGLADLPNSLKEQIRQRLAERRVVQHVP

SEQ ID NO: 2149 - protein, 28 aa, unidentified
  REGION 1..28: note = Description of Unknown: uncultivated organism with predicted taxonomy: Verrucomicrobia bacterium
  REGION 1..28: note = MG2-12 RuvC-III domain
TKTRFINKLAAQQLQAAFRDLPEQQRPP

SEQ ID NO: 2150 - protein, 156 aa, unidentified
  REGION 1..156: note = Description of Unknown: uncultivated organism with predicted taxonomy: Verrucomicrobia bacterium
  REGION 1..156: note = MG2-13 RuvC-III domain
TQTSQLVRLGAQVLKKGFTGLERQPVITSMPGSVTGVMRKGWNLIGCLSAANPNVLDEIGQPKIKTEIRDITHLHHALDACVLALVSHFIPNNGGVWELIVKRRLDETEQLQLRAATHGIFNFSPGRRFGLADLPDSLKEQIRQRLAERRVVQHVP

SEQ ID NO: 2151 - protein, 156 aa, unidentified
  REGION 1..156: note = Description of Unknown: uncultivated organism with predicted taxonomy: Verrucomicrobia bacterium
  REGION 1..156: note = MG2-14 RuvC-III domain
SQTSYLNKLAVQQANHWFRQQLGLDTKLPLVIQLSGSVTAAIRTGWDLFGQLNEVCPATRNKTKTEVREITHLHHALDAIVIGLSAHYFPRDKRLWSLMSRRAVKNSVDQAYMKQQLGDLVCFNSDGKWKLQELDIGIKKQVAARLSEKRVVRHNP

SEQ ID NO: 2152 - protein, 156 aa, unidentified; identical to SEQ ID NO: 2151
  REGION 1..156: note = Description of Unknown: uncultivated organism with predicted taxonomy: Verrucomicrobia bacterium
  REGION 1..156: note = MG2-15 RuvC-III domain

SEQ ID NO: 2153 - protein, 153 aa, unidentified
  REGION 1..153: note = Description of Unknown: uncultivated organism with predicted taxonomy: Verrucomicrobia bacterium
  REGION 1..153: note = MG2-16 RuvC-III domain
TQTSQLARMAAQMVKRTFQDVEQKPVIVSMPGSVTSTVRKGWDLLGCLSKACPEVLDETGQVKTKSEIRDITHLHHALDACVLGLAAHFIPNNGDIWKLIIKQDLNETEKDLLRPLGIFDIGEKRFRLKDLPNELKNQLRERLAELRVVQHIP

SEQ ID NO: 2154 - protein, 206 aa, unidentified; identical to SEQ ID NO: 2143
  REGION 1..206: note = Description of Unknown: uncultivated organism
  REGION 1..206: note = MG2-17 RuvC-III domain

SEQ ID NO: 2155 - protein, 153 aa, unidentified
  REGION 1..153: note = Description of Unknown: uncultivated organism with predicted taxonomy: Verrucomicrobia
  REGION 1..153: note = MG2-18 RuvC-III domain
TQTSQLVRLGAQMLKRPFLREKHQPVITSMPGSVTGEVRKGWNLLGCLSKACPQVLDENGEVRTKTEIREITHLHHALDACVLGLAAHFIPNNGRIWELIVKRNLTDTEKLQLRALGIFDFSPEGFRLKELPDELKNQIRERLAERRVVQHVP

SEQ ID NO: 2156 - protein, 156 aa, unidentified
  REGION 1..156: note = Description of Unknown: uncultivated organism with predicted taxonomy: Verrucomicrobia
  REGION 1..156: note = MG2-19 RuvC-III domain
TQTSQLVRLAVQVLKKKYIGEKEKPVFVSMPGSITGKFRAAWNLLGCLLKAVPWAADEDNQVKPKDELRNITHLHHAIDACVLALAGHFIPTYKNGKVWELMIKGTVKPSEKSYIEDVPMLQLDSENRLHIKDLPDSIKEQITERLYERRVVQHIP

SEQ ID NO: 2157 - protein, 189 aa, unidentified
  REGION 1..189: note = Description of Unknown: uncultivated organism with predicted taxonomy: Verrucomicrobia bacterium
  REGION 1..189: note = MG2-20 RuvC-III domain
TVTSHLVRLGAQVLQRAFPPEQRPPVISLPGSVTGEVRKAWKVTACLEAANPAVMEVVEEPDPQTGEMRRIRRAKKKEDIRGITHLHHALDACVLGLASLYFPRHGAVWSAAVKAGQHAATEYDNNEHPLWQAMTKRRPTAQEVVLLKATGLYDGPDSNGRMQLRDLPAELKGQIRRRLAEKRVVQHIP

SEQ ID NO: 2158 - protein, 156 aa, unidentified
  REGION 1..156: note = Description of Unknown: uncultivated organism
  REGION 1..156: note = MG2-21 RuvC-III domain
TQTSQLVRLAVQVLMKKYIGEKEKPVFVSMPGSITGKFRAGWNLLGCLLKAVPWAADEDNQVKPKDELRNITHLHHAIDACVLALAAHFIPTYKNGKVWELMFKGTVKPSEKMYIEDVPVLQLDSENRLHIKDLPDSIKEQITERLYERRVVQHIP

SEQ ID NO: 2159 - protein, 206 aa, unidentified; identical to SEQ ID NO: 2143
  REGION 1..206: note = Description of Unknown: uncultivated organism
  REGION 1..206: note = MG2-22 RuvC-III domain

SEQ ID NO: 2160 - protein, 152 aa, unidentified
  REGION 1..152: note = Description of Unknown: uncultivated organism with predicted taxonomy: Verrucomicrobia bacterium
  REGION 1..152: note = MG2-23 RuvC-III domain
TQTSQLVRLGAQMLKRPFLGEKHQPVITSLPGSVTGVVRKGWNLLGCLSKACPQVLDETGEVRTKTDIREITHLHHAVDACVLGLAAHFVPNNGRMELIVKRNLTETEKLQLRALGVFDFSPDGFRLKELPEGLKNQIRDRLAERRVVQHIP

SEQ ID NO: 2161 - protein, 185 aa, unidentified
  REGION 1..185: note = Description of Unknown: uncultivated organism with predicted taxonomy: Verrucomicrobia bacterium
  REGION 1..185: note = MG2-24 RuvC-III domain
TVTSHLVRLGAQVLQRVFPKDQRPPVVSLPGSVTGEVRKAWRLTGCLEAANPAVMEEVQERNPDTGELQTVRRPKKKDEIRGITHLHHALDACVLGLASLCFPRHGAVWSAMVKAGGDREADDDRRLWLAMTKRRPTPQEATLLKATGRYQQDSEGRLHLADLDEQLKQQIRARLAEKRVVQHVP

SEQ ID NO: 2162 - protein, 175 aa, unidentified
  REGION 1..175: note = Description of Unknown: uncultivated organism
  REGION 1..175: note = MG2-25 RuvC-III domain
TLTSQLVRLGAQVIKRFFAGGARVNNPREAPTDSTARGFVNPRSGPRITSLPGAVTGAVRKGWRVLGCLAQAAPQILEPTGEPKSKTDIRDLTHLHHALDACVLALAAHYFPKDGSLWEAMIVRAPNAAQKQLLHATGFYEFIAEDKPNLKDLPIELKQQIANRLAEKRVVQHIP

SEQ ID NO: 2163 - protein, 156 aa, unidentified
  REGION 1..156: note = Description of Unknown: uncultivated organism with predicted taxonomy: Verrucomicrobia bacterium
  REGION 1..156: note = MG2-26 RuvC-III domain
TQTSQLVRLGAQVLQRAYLGLARPPVVTSLPGSVTGTVRKGWDLLGCLATANPGVLDESGEVKNKTEIRDITHLHHALDACVLALAARAIPNNGRVWELLTRRDNGLNEVERQQLLALGIYARDSEGRLVLRDLSPDLNEQVRQRLAERRVVQHIP

SEQ ID NO: 2164 - protein, 161 aa, unidentified
  REGION 1..161: note = Description of Unknown: uncultivated organism
  REGION 1..161: note = MG2-27 RuvC-III domain
TQTSHLVRLAAEELKKEFGGVQCSTRIVSMPGSVTAETRKAWKLEACLAQANPEVAELRERRKTEPAPVSIKQELRDISHLHHALDACVLACAAHYLEKKGNIWKALVQRRKSEAENLELLSTGLFKRGQDGQARLQDLPAQLKNQISRVLAECRVVQHIP

SEQ ID NO: 2165 - protein, 154 aa, unidentified
  REGION 1..154: note = Description of Unknown: uncultivated organism with predicted taxonomy: Verrucomicrobia
  REGION 1..154: note = MG2-28 RuvC-III domain
TQTSQLARLAAQILRTPFNDTSNPPEIVSLPGFVTATVRRSWDVLGCLSQAAPGVLNTDGSTRSKTEIRNITHLHHALDACVIGLASHFIPNRGDVWRLLAQRNLRAWEKQQLADLGVFDFDAHGGLRLRDLPQQLKEQLRQRLTERRVVQHVP

SEQ ID NO: 2166 - protein, 152 aa, unidentified
  REGION 1..152: note = Description of Unknown: uncultivated organism with predicted taxonomy: Verrucomicrobia bacterium
  REGION 1..152: note = MG2-29 RuvC-III domain
TISSYVAKLAVGQIKKEFSELSKKPPVISLPGRLTGEARKSWKLLGLLSAVNENITSETPKNDIRGLTHLHHAMDAAVMGLMAHCADNLSDGTSWQLLLKRNLRPEEKNLLKANMRNIGFDGNRAHLLDVPNEIKEQLRRCLLERRVVQHVP

SEQ ID NO: 2167 - protein, 153 aa, unidentified
  REGION 1..153: note = Description of Unknown: uncultivated organism with predicted taxonomy: Verrucomicrobia bacterium
  REGION 1..153: note = MG2-30 RuvC-III domain
TLTSYVTKLALQQIKNQFDTCRKKPQVIALPGRLTGETRKTWKLMGLLHVVNEKIDGKTLKNDIRSMSHLHHAIDATIMGLLAYYIKDLADGTTWQLLLKRYLTASEIQHLKDNLNHFKIDSKNRAHLCDIPSHVQKQIEQCLKERRVVQHVP

SEQ ID NO: 2168 - protein, 153 aa, unidentified; identical to SEQ ID NO: 2167
  REGION 1..153: note = Description of Unknown: uncultivated organism with predicted taxonomy: Verrucomicrobia bacterium
  REGION 1..153: note = MG2-31 RuvC-III domain

SEQ ID NO: 2169 - protein, 153 aa, unidentified; identical to SEQ ID NO: 2167
  REGION 1..153: note = Description of Unknown: uncultivated organism with predicted taxonomy: Verrucomicrobia bacterium
  REGION 1..153: note = MG2-32 RuvC-III domain

SEQ ID NO: 2170 - protein, 66 aa, unidentified
  REGION 1..66: note = Description of Unknown: uncultivated organism with predicted taxonomy: Verrucomicrobia bacterium
  REGION 1..66: note = MG2-33 RuvC-III domain
TLTSYVTKLALQQIKNQFDTCRKKPQVIALPGRLTGETRKTWKLMGLLHVVNEKIDGKTLKNDIRS

SEQ ID NO: 2171 - protein, 66 aa, unidentified; identical to SEQ ID NO: 2170
  REGION 1..66: note = Description of Unknown: uncultivated organism with predicted taxonomy: Verrucomicrobia bacterium
  REGION 1..66: note = MG2-34 RuvC-III domain

SEQ ID NO: 2172 - protein, 156 aa, unidentified
  REGION 1..156: note = Description of Unknown: uncultivated organism with predicted taxonomy: Thermogutta terrifontis
  REGION 1..156: note = MG2-35 RuvC-III domain
TQTSYLNKLAAQQVQRWFSDQLDEDVKLPPVVQLSGSVTAAVRRSWDLFDQLQQVCPETRGKSKSDIRGMTHLHHALDAVTVGLAAHLFPKDGHLWALMSKRKITRPSDRDYMRSRLGDLVSFNNDGKWRLEALPESLLFEVAGKLAEQRVVRHMP

SEQ ID NO: 2173 - protein, 157 aa, unidentified
  REGION 1..157: note = Description of Unknown: uncultivated organism with predicted taxonomy: Coraliomargarita sp. CAG:312
  REGION 1..157: note = MG2-36 RuvC-III domain
TQTSHLNKLAFKVVKSLYADAEKAPELIHVPGIVTSVVRKNWDLLPCMGDACPEIYETLENGDKVLRLKDEIRSITHLHHAVDAVAMGLAASVFPRTRNFYEAVSKRRLNQADRQELLKTGLVLFSGDKWKLVELEKSYLKEISGRISENRVVKFLP

SEQ ID NO: 2174 - protein, 94 aa, unidentified
  REGION 1..94: note = Description of Unknown: uncultivated organism with predicted taxonomy: Coraliomargarita sp. CAG:312
  REGION 1..94: note = MG2-37 RuvC-III domain
TQTSHLNKLAFKVVDSLYVDSEEKPELVHLPGSVTSVLRTNWDLSACMAKACPEIIVTVKSADSASGERGMGGDGLPQGLNGSVTDTAACCGGE

SEQ ID NO: 2175 - protein, 157 aa, unidentified
  REGION 1..157: note = Description of Unknown: uncultivated organism with predicted taxonomy: Coraliomargarita sp. CAG:312
  REGION 1..157: note = MG2-38 RuvC-III domain
TQTSHLNKLAFKVVKSLYADAEKAPELIHVPGTVTSVVRKNWDLLPCMGDACPEIYETLENGDKVLRLKDEIRSITHLHHAVDAVAMGLAASVFPRTRNFYEAVSKRRLNQADRQELLKTGLVLFSGDKWKLVELEKSYLKEISGRISENRVVKFLP

SEQ ID NO: 2176 - protein, 202 aa, unidentified
  REGION 1..202: note = Description of Unknown: uncultivated organism with predicted taxonomy: Verrucomicrobia bacterium
  REGION 1..202: note = MG2-39 RuvC-III domain
TQTSHLNKLAFKVVDSLYVDSEEKPELVHLPGSVTSVLRTNWDLSACMAKACPEIIVTVKSADSASGERGMGGDGLPQGLNGSVTDTAACCGGEADAPQSGGSSGGEKKVLLMKGKIRSITHLHHAVDAVAIGLAAAVFPHTNRFYELVSKRNLNRSEREELYRTGLFVFSERNWRLKELPAKLINEISDRIAEGRVVKYLP

SEQ ID NO: 2177 - protein, 157 aa, unidentified; identical to SEQ ID NO: 2173
  REGION 1..157: note = Description of Unknown: uncultivated organism with predicted taxonomy: Coraliomargarita sp. CAG:312
  REGION 1..157: note = MG2-40 RuvC-III domain

SEQ ID NO: 2178 - protein, 202 aa, unidentified; identical to SEQ ID NO: 2176
  REGION 1..202: note = Description of Unknown: uncultivated organism with predicted taxonomy: Coraliomargarita sp. CAG:312
  REGION 1..202: note = MG2-41 RuvC-III domain

SEQ ID NO: 2179 - protein, 202 aa, unidentified; identical to SEQ ID NO: 2176
  REGION 1..202: note = Description of Unknown: uncultivated organism with predicted taxonomy: Coraliomargarita sp. CAG:312
  REGION 1..202: note = MG2-42 RuvC-III domain

SEQ ID NO: 2180 - protein, 202 aa, unidentified; identical to SEQ ID NO: 2176
  REGION 1..202: note = Description of Unknown: uncultivated organism with predicted taxonomy: Verrucomicrobia
  REGION 1..202: note = MG2-43 RuvC-III domain

SEQ ID NO: 2181 - protein, 157 aa, unidentified; identical to SEQ ID NO: 2173
  REGION 1..157: note = Description of Unknown: uncultivated organism with predicted taxonomy: Coraliomargarita sp. CAG:312
  REGION 1..157: note = MG2-44 RuvC-III domain

SEQ ID NO: 2182 - protein, 202 aa, unidentified; identical to SEQ ID NO: 2176
  REGION 1..202: note = Description of Unknown: uncultivated organism with predicted taxonomy: Coraliomargarita sp. CAG:312
  REGION 1..202: note = MG2-45 RuvC-III domain

SEQ ID NO: 2183 - protein, 157 aa, unidentified; identical to SEQ ID NO: 2173
  REGION 1..157: note = Description of Unknown: uncultivated organism with predicted taxonomy: Coraliomargarita sp. CAG:312
  REGION 1..157: note = MG2-46 RuvC-III domain

SEQ ID NO: 2184 - protein, 202 aa, unidentified; identical to SEQ ID NO: 2176
  REGION 1..202: note = Description of Unknown: uncultivated organism with predicted taxonomy: Verrucomicrobia bacterium
  REGION 1..202: note = MG2-47 RuvC-III domain

SEQ ID NO: 2185 - protein, 157 aa, unidentified; identical to SEQ ID NO: 2173
  REGION 1..157: note = Description of Unknown: uncultivated organism with predicted taxonomy: Coraliomargarita sp. CAG:312
  REGION 1..157: note = MG2-48 RuvC-III domain

SEQ ID NO: 2186 - protein, 202 aa, unidentified; identical to SEQ ID NO: 2176
  REGION 1..202: note = Description of Unknown: uncultivated organism with predicted taxonomy: Coraliomargarita sp. CAG:312
  REGION 1..202: note = MG2-49 RuvC-III domain

SEQ ID NO: 2187 - protein, 157 aa, unidentified; identical to SEQ ID NO: 2173
  REGION 1..157: note = Description of Unknown: uncultivated organism with predicted taxonomy: Coraliomargarita sp. CAG:312
  REGION 1..157: note = MG2-50 RuvC-III domain

SEQ ID NO: 2188 - protein, 157 aa, unidentified; identical to SEQ ID NO: 2173
  REGION 1..157: note = Description of Unknown: uncultivated organism with predicted taxonomy: Coraliomargarita sp. CAG:312
  REGION 1..157: note = MG2-51 RuvC-III domain

SEQ ID NO: 2189 - protein, 202 aa, unidentified; identical to SEQ ID NO: 2176
  REGION 1..202: note = Description of Unknown: uncultivated organism with predicted taxonomy: Verrucomicrobia bacterium
  REGION 1..202: note = MG2-52 RuvC-III domain

SEQ ID NO: 2190 - protein, 202 aa, unidentified; identical to SEQ ID NO: 2176
  REGION 1..202: note = Description of Unknown: uncultivated organism with predicted taxonomy: Verrucomicrobia bacterium
  REGION 1..202: note = MG2-53 RuvC-III domain

SEQ ID NO: 2191 - protein, 135 aa, unidentified
  REGION 1..135: note = Description of Unknown: uncultivated organism with predicted taxonomy: Coraliomargarita sp. CAG:312
  REGION 1..135: note = MG2-54 RuvC-III domain
TQTSHLNKLAFKLVKSLYVDAGKTPELVHLPGSVTSAVRKNWELLPCMGDVCPEIYETLENGDKVLLLKDKIRSITHLHHAVDAVAMGLAASVFPRTKRFYEAVSKRHLSEADREELLNTGLVLFSDDKWKLVEL

SEQ ID NO: 2192 - protein, 157 aa, unidentified; identical to SEQ ID NO: 2175
  REGION 1..157: note = Description of Unknown: uncultivated organism with predicted taxonomy: Coraliomargarita sp. CAG:312
  REGION 1..157: note = MG2-55 RuvC-III domain

SEQ ID NO: 2193 - protein, 157 aa, unidentified
  REGION 1..157: note = Description of Unknown: uncultivated organism with predicted taxonomy: Coraliomargarita sp. CAG:312
  REGION 1..157: note = MG2-56 RuvC-III domain
TQTSHLNKLAFKVVKSLYADAEKAPELIHVPGIVTSVVRKNWNLLPCMGDACPEIYETLENGDKVLRLKDEIRSITHLHHAVDAVAMGLAASVFPRTRNFYEAVSKRRLNQADRQELLKTGLVLFSGDKWKLVELEKSYLKEISGRISENRVVKFLP

SEQ ID NO: 2194 - protein, 202 aa, unidentified; identical to SEQ ID NO: 2176
  REGION 1..202: note = Description of Unknown: uncultivated organism with predicted taxonomy: Coraliomargarita sp. CAG:312
  REGION 1..202: note = MG2-57 RuvC-III domain

SEQ ID NO: 2195 - protein, 202 aa, unidentified; identical to SEQ ID NO: 2176
  REGION 1..202: note = Description of Unknown: uncultivated organism with predicted taxonomy: Verrucomicrobia bacterium
  REGION 1..202: note = MG2-58 RuvC-III domain

SEQ ID NO: 2196 - protein, 157 aa, unidentified; identical to SEQ ID NO: 2175
  REGION 1..157: note = Description of Unknown: uncultivated organism with predicted taxonomy: Coraliomargarita sp. CAG:312
  REGION 1..157: note = MG2-59 RuvC-III domain

SEQ ID NO: 2197 - protein, 157 aa, unidentified; identical to SEQ ID NO: 2173
  REGION 1..157: note = Description of Unknown: uncultivated organism with predicted taxonomy: Coraliomargarita sp. CAG:312
  REGION 1..157: note = MG2-60 RuvC-III domain

SEQ ID NO: 2198 - protein, 157 aa, unidentified; identical to SEQ ID NO: 2173
  REGION 1..157: note = Description of Unknown: uncultivated organism with predicted taxonomy: Coraliomargarita sp. CAG:312
  REGION 1..157: note = MG2-61 RuvC-III domain

SEQ ID NO: 2199 - protein, 155 aa, unidentified
  REGION 1..155: note = Description of Unknown: uncultivated organism with predicted taxonomy: Verrucomicrobia
  REGION 1..155: note = MG2-62 RuvC-III domain
TQTSHLNKLAIRLVKRELGIDARHLAGAVTGFVRKNLSIDECLVAAVPRMQRAQRVSEHDSRKLLKSQMRELSHLHHAMDAITQGLTGILFRVEDWKLLVKRHLTERERAVLAAKYPTLLRFSANGEIALKPLPDSLLSEITARLKECRVVQHVP

SEQ ID NO: 2200 - protein, 157 aa, unidentified; identical to SEQ ID NO: 2173
  REGION 1..157: note = Description of Unknown: uncultivated organism with predicted taxonomy: Coraliomargarita sp. CAG:312
  REGION 1..157: note = MG2-63 RuvC-III domain

SEQ ID NO: 2201 - protein, 157 aa, unidentified; identical to SEQ ID NO: 2173
  REGION 1..157: note = Description of Unknown: uncultivated organism with predicted taxonomy: Coraliomargarita sp. CAG:312
  REGION 1..157: note = MG2-64 RuvC-III domain

SEQ ID NO: 2202 - protein, 202 aa, unidentified; identical to SEQ ID NO: 2176
  REGION 1..202: note = Description of Unknown: uncultivated organism with predicted taxonomy: Coraliomargarita sp. CAG:312
  REGION 1..202: note = MG2-65 RuvC-III domain

SEQ ID NO: 2203 - protein, 157 aa, unidentified; identical to SEQ ID NO: 2175
  REGION 1..157: note = Description of Unknown: uncultivated organism with predicted taxonomy: Coraliomargarita sp. CAG:312
  REGION 1..157: note = MG2-66 RuvC-III domain

SEQ ID NO: 2204 - protein, 157 aa, unidentified; identical to SEQ ID NO: 2173
  REGION 1..157: note = Description of Unknown: uncultivated organism with predicted taxonomy: Coraliomargarita sp. CAG:312
  REGION 1..157: note = MG2-67 RuvC-III domain

SEQ ID NO: 2205 - protein, 157 aa, unidentified; identical to SEQ ID NO: 2173
  REGION 1..157: note = Description of Unknown: uncultivated organism with predicted taxonomy: Coraliomargarita sp. CAG:312
  REGION 1..157: note = MG2-68 RuvC-III domain

SEQ ID NO: 2206 - protein, 157 aa, unidentified; identical to SEQ ID NO: 2173
  REGION 1..157: note = Description of Unknown: uncultivated organism with predicted taxonomy: Coraliomargarita sp. CAG:312
  REGION 1..157: note = MG2-69 RuvC-III domain

SEQ ID NO: 2207 - protein, 157 aa, unidentified; identical to SEQ ID NO: 2173
  REGION 1..157: note = Description of Unknown: uncultivated organism with predicted taxonomy: Coraliomargarita sp. CAG:312
  REGION 1..157: note = MG2-70 RuvC-III domain

SEQ ID NO: 2208 - protein, 157 aa, unidentified; identical to SEQ ID NO: 2173
  REGION 1..157: note = Description of Unknown: uncultivated organism with predicted taxonomy: Coraliomargarita sp. CAG:312
  REGION 1..157: note = MG2-71 RuvC-III domain

SEQ ID NO: 2209 - protein, 157 aa, unidentified; identical to SEQ ID NO: 2173
  REGION 1..157: note = Description of Unknown: uncultivated organism with predicted taxonomy: Coraliomargarita sp. CAG:312
  REGION 1..157: note = MG2-72 RuvC-III domain

SEQ ID NO: 2210 - protein, 202 aa, unidentified; identical to SEQ ID NO: 2176
  REGION 1..202: note = Description of Unknown: uncultivated organism with predicted taxonomy: Verrucomicrobia bacterium
  REGION 1..202: note = MG2-73 RuvC-III domain

SEQ ID NO: 2211 - protein, 155 aa, unidentified; identical to SEQ ID NO: 2199
  REGION 1..155: note = Description of Unknown: uncultivated organism with predicted taxonomy: Verrucomicrobia
  REGION 1..155: note = MG2-74 RuvC-III domain

SEQ ID NO: 2212 - protein, 157 aa, unidentified; identical to SEQ ID NO: 2173
  REGION 1..157: note = Description of Unknown: uncultivated organism with predicted taxonomy: Coraliomargarita sp. CAG:312
  REGION 1..157: note = MG2-75 RuvC-III domain

SEQ ID NO: 2213 - protein, 136 aa, unidentified
  REGION 1..136: note = Description of Unknown: uncultivated organism with predicted taxonomy: Verrucomicrobia bacterium
  REGION 1..136: note = MG2-76 RuvC-III domain
TVTSQLVRLGAQALKREFIDLEEPPVTVSLPGAVTGEVRKAWDVLGCLSKACPEVLDAEGKVKTKTEIRDITHLHHALDACVIGLAAHFIPNRGRVWELITKRRLTAAEQSELVALKVFTPESHGEVRLNDLKPDR

SEQ ID NO: 2214 - protein, 154 aa, unidentified
  REGION 1..154: note = Description of Unknown: uncultivated organism
  REGION 1..154: note = MG2-77 RuvC-III domain
TVTSQLVRLGAQALKREFIDLEEPPVTVSLPGAVTGEVRKAWDVLGCLSKACPEVLDAEGKVKTKTEIRDITHLHHALDACVIGLAAHFIPNRGRVWELITKRRLTAAEQSELVALKVFTPESHGEVRLNDLKPERKEQIRQRLAERRVVQHIP

SEQ ID NO: 2215 - protein, 154 aa, unidentified; identical to SEQ ID NO: 2214
  REGION 1..154: note = Description of Unknown: uncultivated organism with predicted taxonomy: Verrucomicrobia bacterium
  REGION 1..154: note = MG2-78 RuvC-III domain

SEQ ID NO: 2216 - protein, 154 aa, unidentified
  REGION 1..154: note = Description of Unknown: uncultivated organism with predicted taxonomy: Verrucomicrobia bacterium
  REGION 1..154: note = MG2-79 RuvC-III domain
TQTSQLVRLGGQVLKRAFANSEEKPTLVSLPGSVTGAVRKAWKVLGCLSLANQQVLDENGDVKTKTDIRDITHLHHALDACVLGLTSHFIPNNGRVWELIVKRNPNDLERQQLMALGVFGFNAEKRFEMRDLDNKLKEQIRQRLAEKRVVQHIP

SEQ ID NO: 2217 - protein, 154 aa, unidentified; identical to SEQ ID NO: 2214
  REGION 1..154: note = Description of Unknown: uncultivated organism with predicted taxonomy: Verrucomicrobia bacterium
  REGION 1..154: note = MG2-80 RuvC-III domain

SEQ ID NO: 2218 - protein, 110 aa, unidentified
  REGION 1..110: note = Description of Unknown: uncultivated organism with predicted taxonomy: Verrucomicrobia bacterium
  REGION 1..110: note = MG2-81 RuvC-III domain
TVTSQLVRLGAQIIKKTFAGSEKPPMVVSLPGSVTGTVRKGWNLLGCLELAAPQVKEADGGIKNKTDIRDVTHLHHALDACVLGLASYYLPNNGGLWEVMIKRNPNDGEK

SEQ ID NO: 2219 - protein, 154 aa, unidentified
  REGION 1..154: note = Description of Unknown: uncultivated organism with predicted taxonomy: Verrucomicrobia bacterium
  REGION 1..154: note = MG2-82 RuvC-III domain
TVTSQLVRLGAQALKREFIDLEEPPVTVSLPGAVTGEVRKAWDVLGCLSKACPEVLDAEGKVKTKTEIRDITHLHHALDACVIGLAAHFIPNRGRVWELITKRRLTAAEQSELVALKVFTPESHGEVRLKDLKPERKEQIRQRLAERRVVQHIP

SEQ ID NO: 2220 - protein, 157 aa, unidentified
  REGION 1..157: note = Description of Unknown: uncultivated organism
  REGION 1..157: note = MG2-83 RuvC-III domain
TQTSQLVRLGAQVLKKNLPHLTTGDVTSLPGSVTGTVRKGWKLEACLGLANPQVFDGNGGAKTKTEIRDITHLHHALDACVLGIAANYFQNQKLGASSLWELLIKRKYNEQEKTILRALGIFQFDKEGNSQIKELPKEIREQIRQRLAEKRVVQHIP

SEQ ID NO: 2221 - protein, 154 aa, unidentified; identical to SEQ ID NO: 2146
  REGION 1..154: note = Description of Unknown: uncultivated organism with predicted taxonomy: Verrucomicrobia bacterium
  REGION 1..154: note = MG2-84 RuvC-III domain

SEQ ID NO: 2222 - protein, 154 aa, unidentified; identical to SEQ ID NO: 2214
  REGION 1..154: note = Description of Unknown: uncultivated organism with predicted taxonomy: Verrucomicrobia bacterium
  REGION 1..154: note = MG2-85 RuvC-III domain

SEQ ID NO: 2223 - protein, 154 aa, unidentified; identical to SEQ ID NO: 2146
  REGION 1..154: note = Description of Unknown: uncultivated organism
  REGION 1..154: note = MG2-86 RuvC-III domain

SEQ ID NO: 2224 - protein, 154 aa, unidentified; identical to SEQ ID NO: 2146
  REGION 1..154: note = Description of Unknown: uncultivated organism with predicted taxonomy: Methylococcales bacterium
  REGION 1..154: note = MG2-87 RuvC-III domain

SEQ ID NO: 2225 - protein, 154 aa, unidentified; identical to SEQ ID NO: 2146
  REGION 1..154: note = Description of Unknown: uncultivated organism
  REGION 1..154: note = MG2-88 RuvC-III domain

SEQ ID NO: 2226 - protein, 154 aa, unidentified; identical to SEQ ID NO: 2146
  REGION 1..154: note = Description of Unknown: uncultivated organism with predicted taxonomy: Verrucomicrobia
  REGION 1..154: note = MG2-89 RuvC-III domain

SEQ ID NO: 2227 - protein, 72 aa, unidentified
  REGION 1..72: note = Description of Unknown: uncultivated organism with predicted taxonomy: Verrucomicrobia bacterium
  REGION 1..72: note = MG2-90 RuvC-III domain
TQTSQLVRLGAQVLKKNLPHLTTGDVTSLPGSVTGTVRKGWKLEACLGLANPQVFDGNGGAKTKTEIRDITH

SEQ ID NO: 2228 - protein, 157 aa, unidentified; identical to SEQ ID NO: 2220
  REGION 1..157: note = Description of Unknown: uncultivated organism
  REGION 1..157: note = MG2-91 RuvC-III domain

SEQ ID NO: 2229 - protein, 54 aa, unidentified
  REGION 1..54: note = Description of Unknown: uncultivated organism with predicted taxonomy: Verrucomicrobiae bacterium Tous-C5FEB
  REGION 1..54: note = MG2-92 RuvC-III domain
TVTSQLVRLGAQIIKKTFAENEKLPTVVSLPGSVTGTVRKGWNLLGCLATAAPQ

SEQ ID NO: 2230 - protein, 174 aa, unidentified
  REGION 1..174: note = Description of Unknown: uncultivated organism
  REGION 1..174: note = MG2-94 RuvC-III domain
TQTSHLNKMAISLVKQRIGIDAKHLPGSVTAFIRQKLHIDECLFNAVPRLQKAAKGEGKKLKLKKNTEEPPAEPLLNDLPPRKLTKADIRELTHLHHAMDAVTQGLALLLFAPEDWPLLVKRHLSDSERRLLKSRYPYLVFTENSRMDIQDLPDATLKTISGRLAECRVVRHIP

SEQ ID NO: 2231 - protein, 174 aa, unidentified; identical to SEQ ID NO: 2230
  REGION 1..174: note = Description of Unknown: uncultivated organism
  REGION 1..174: note = MG2-95 RuvC-III domain

SEQ ID NO: 2232 - protein, 174 aa, unidentified; identical to SEQ ID NO: 2142
  REGION 1..174: note = Description of Unknown: uncultivated organism
  REGION 1..174: note = MG2-96 RuvC-III domain

SEQ ID NO: 2233 - protein, 173 aa, unidentified
  REGION 1..173: note = Description of Unknown: uncultivated organism with predicted taxonomy: Acidobacteria bacterium RIFCSPLOWO2_12_FULL_68_19
  REGION 1..173: note = MG2-97 RuvC-III domain
TQTSHLNKMAISLVKQRIGIDAKHLPGSVTAFIRQKLHIDECLFTAVPRLQKTAKGEGKRPKRKNADEVTAEPMQSDMPPRKLTKADIRELTHLHHAMDAVTQGLALLLFAPEDWPLLVKRNLTDSERRLLKSRYPYLVFTENSRMEIQDLPEATLKTISDRLAECRVIRHIP

SEQ ID NO: 2234 - protein, 154 aa, unidentified
  REGION 1..154: note = Description of Unknown: uncultivated organism with predicted taxonomy: Verrucomicrobia bacterium
  REGION 1..154: note = MG2-98 RuvC-III domain
TITSQLVRLGARTLEKAFTDGNHAPKIVSMPGSVTGRVQRAWSLMGCIAKANPSVLDENGKPKPKGDIRDISHLHHAVDACVLGIAGTLFPNDGSLWKAMAARSPARAEAEQLLATGLYERDSEKHLRLRDLPAALKNQIADRLSERRVYQHVS

SEQ ID NO: 2235 - protein, 174 aa, unidentified; identical to SEQ ID NO: 2142
  REGION 1..174: note = Description of Unknown: uncultivated organism
  REGION 1..174: note = MG2-99 RuvC-III domain

SEQ ID NO: 2236 - protein, 174 aa, unidentified; identical to SEQ ID NO: 2230
  REGION 1..174: note = Description of Unknown: uncultivated organism with predicted taxonomy: Proteobacteria
  REGION 1..174: note = MG2-100 RuvC-III domain

SEQ ID NO: 2237 - protein, 174 aa, unidentified
  REGION 1..174: note = Description of Unknown: uncultivated organism with predicted taxonomy: Bradyrhizobium
  REGION 1..174: note = MG2-101 RuvC-III domain
TQTSHLNKMAISLVKQRIGIDAKHLPGSVTAFIRQKLHIDECLFNAVPRLQKAAKGEGKKLKLKKNTEEPPAEPLLNDLPPRKLTKADIRELTHLHHAMDAVTQGLALLLFAPEDWPLLVKRHLSDSEKRLLKARYPFLLFNGDNNISIQDLPEAALQTISDRLAECRVVRHIP

SEQ ID NO: 2238 - protein, 154 aa, unidentified
  REGION 1..154: note = Description of Unknown: uncultivated organism with predicted taxonomy: Methylococcales bacterium
  REGION 1..154: note = MG2-102 RuvC-III domain
TQTSQLVRLGAQVLKRVFANSEKKSPVVSLPGSVTGAVRKAWKVLGCLSLANQQVLDENGDVKTKTDIRDITHLHHALDACVLGLTSHFIPNNGRVWELIVKRNPNELEKRELMALGVFGFNAEKRFEMRDLDNKLKEQIRQRLAEKRVVQHIP

SEQ ID NO: 2239 - protein, 153 aa, unidentified
  REGION 1..153: note = Description of Unknown: uncultivated organism with predicted taxonomy: Verrucomicrobia bacterium
  REGION 1..153: note = MG2-103 RuvC-III domain
TQTSQLVRLGAQVLRNVLPHLKQNDVISLPGSVTGTVRKAWKVLGCLSLANPQVLDENGDVKTKTDIRDITHLHHALDACVLGLVSHFIPNSGQVWELIVKRNPNDTEKKQLTALGVFGFGKDNRFEMRDLDDRLKEQIRQRLAEKRVVQHVP

SEQ ID NO: 2240 - protein, 158 aa, unidentified
  REGION 1..158: note = Description of Unknown: uncultivated organism with predicted taxonomy: Verrucomicrobia bacterium
  REGION 1..158: note = MG2-104 RuvC-III domain
TVTSHLVRLGAQVLKRHFSDLPREHRIQLEPVSLPGSVTGEIRKAWKLIGCLAVANPQVLNPDGTVKPKQDIRGITHLHHALDACVLGLAAFYFPRHGSLWAAMVKRRPSAEEAALLRQTGFYQTDSEGRFRLIDFPEVLAQQIRQRLAEKRVVQHVP

SEQ ID NO: 2241 - protein, 158 aa, unidentified; identical to SEQ ID NO: 2240
  REGION 1..158: note = Description of Unknown: uncultivated organism with predicted taxonomy: Verrucomicrobia bacterium
  REGION 1..158: note = MG2-105 RuvC-III domain

SEQ ID NO: 2242 - protein, 163 aa, unidentified
  REGION 1..163: note = Description of Unknown: uncultivated organism with predicted taxonomy: Rothia
  REGION 1..163: note = MG3-6 RuvC-III domain
ASTSYAAVAVRERLEQHFNEGLALDDKSRVVLDVYAGAVTRESRRAGGIDERILLRGERDKNRFDVRHHAVDAAVMTLLNRSVALTLEQRSQLRRTFYEQGLDKLDRNQLKPEEDWRDFTGLAPASQEKFLEWRKAATILGDLLAEAIEDDSIAVVSPLRLRP

SEQ ID NO: 2243 - protein, 159 aa, unidentified
  REGION 1..159: note = Description of Unknown: uncultivated organism with predicted taxonomy: Rothia
  REGION 1..159: note = MG3-7 RuvC-III domain
ASTSYAATAIRERIEQYFNEKAEKLDLAKVHIDVYSGSLTRESRRAGGIDKMVLLRGQSDKNRFDVRHHAIDAAVLTLLNRSVAVTLEQRRLIKQQREYSLEKSRRERDNVWRDFMGLGPAAQEKFAKWKKTAYVLADIIKEAISNDAIPVVSPLRLRP

SEQ ID NO: 2244 - protein, 163 aa, unidentified
  REGION 1..163: note = Description of Unknown: uncultivated organism with predicted taxonomy: Rothia
  REGION 1..163: note = MG3-8 RuvC-III domain
ASTSYAAVAVRERLEQHFNEGLAPDDKNRVVLDVYAGSVTRESRRAGGIDERILLRGERDKNRFDVRHHAIDAAVMTLLNRSVALTLEQRSQLRRAFYEQGLDKLDRDQLKPEEDWRNFIGLSLASQEKFLEWKKVTTVLGDLLAEAIEDDSIAVVSPLRLRP

SEQ ID NO: 2245 - protein, 145 aa, unidentified
  REGION 1..145: note = Description of Unknown: uncultivated organism with predicted taxonomy: Dermabacter hominis
  REGION 1..145: note = MG3-1 RuvC-III domain
ASTSYAATEITRRILGHFHDEVPVVAFGGSGTREARRAGRVDHIIRLRGSLDKSRLDTRHHAIDAAVLTLQSPAIYRVLLTRVNLKHEHEVTGEAPEWRDYEGADQAEKVLYRRWQKNIATLAELMRQEIENNRVPVTRPIRLRK

SEQ ID NO: 2246 - protein, 148 aa, unidentified
  REGION 1..148: note = Description of Unknown: uncultivated organism with predicted taxonomy: Micrococcales
  REGION 1..148: note = MG3-5 RuvC-III domain
SATAFAAVEIRRKLENHFKDRTKPVRVDVYRGALTRESRRAGRIDAKIRLRGNIDKDRLDIRHHAIDAAVLTLLDPSVAKTLAMRLDLKREQQDSGRDTRWKEFKGLTPASQERFIKWCQASECLADMLRQQIEADRVPVVVPLRISP

SEQ ID NO: 2247 - protein, 156 aa, unidentified
  REGION 1..156: note = Description of Unknown: uncultivated organism with predicted taxonomy: Rothia
  REGION 1..156: note = MG3-6 RuvC-III domain
ASTSYAATSIRERLEQHFNDDLPDGFAPVAVDVYGGSLTRESRRAGGIDKSIMLRGQSDKNRFDVRHHAIDAAVMTLLNPSVAVTLEQRRMLKQENDYSSPRGQHDNGWRDFIGRGEASQSKFLHWKKTAVVLADLISEAIEQDTIPVVNPLRLRP

SEQ ID NO: 2248 - protein, 163 aa, unidentified
  REGION 1..163: note = Description of Unknown: uncultivated organism with predicted taxonomy: Rothia
  REGION 1..163: note = MG3-7 RuvC-III domain
ASTSYAAVAVRERLEQHFNEGLAPDDKSRVVLDVYAGAVTRESRRAGGIDERILLRGERDKNRFDVRHHAIDAAVMTLLNRSVALTLEQRSQLRRAFYELELDKLDRDQLKPGEDWRNFTGLYEASQNKFSEWKKAATVLGDLLAEAIEDDAIAVVSPLRLRP

SEQ ID NO: 2249 - protein, 163 aa, unidentified; identical to SEQ ID NO: 2244
  REGION 1..163: note = Description of Unknown: uncultivated organism with predicted taxonomy: Rothia
  REGION 1..163: note = MG3-8 RuvC-III domain

SEQ ID NO: 2250 - protein, 152 aa, unidentified
  REGION 1..152: note = Description of Unknown: uncultivated organism with predicted taxonomy: Brevibacterium
  REGION 1..152: note = MG3-42 RuvC-III domain
ESTAYAATEIRRRLQYYFEENCGANSPQPEILVLPGAVTREARRAGGFDSRIKLRGKNDKDRFDARHHALDAAIMTVVDRSVARTLQQRSDLKYSNFLTGAEPRWKDFKGDSPESRKKFERWVQTSNRLADLVSDAIVTDSIPVIFPLRLGT

SEQ ID NO: 2251 - protein, 144 aa, unidentified
  REGION 1..144: note = Description of Unknown: uncultivated organism with predicted taxonomy: Brevibacterium mcbrellneri
  REGION 1..144: note = MG3-68 RuvC-III domain
ESTAYAATEIRRRVQYYFEENCGANVPQPEIFVLPGAVTREARRAGGFDSRIKLRGKGDKDRFDARHHALDAAIMTVVDWSVARTLQQRSDLKYSNFLTGAEPRWKEFKGDSPEARKKFERWIQTSNRLADLVSDAIVAAAIPV

SEQ ID NO: 2252 - protein, 152 aa, unidentified; identical to SEQ ID NO: 2250
  REGION 1..152: note = Description of Unknown: uncultivated organism with predicted taxonomy: Brevibacterium mcbrellneri
  REGION 1..152: note = MG3-88 RuvC-III domain

SEQ ID NO: 2253 - protein, 131 aa, unidentified
  REGION 1..131: note = Description of Unknown: uncultivated organism with predicted taxonomy: Planctomycetes
  REGION 1..131: note = MG4-5 RuvC-III domain
NDTRYASRLAADYLALLYGGRVDANGRQRVQVGTGATTGFLRDEWGLNAILGDNDEKERADHRHHAIDAVVIALTGPGTVQALTRAALRAKELGRRLFVPLDPPWADRDSFLRDVRASVEAITVSYRVDRK

SEQ ID NO: 2254 - protein, 121 aa, unidentified
  REGION 1..121: note = Description of Unknown: uncultivated organism
  REGION 1..121: note = MG4-11 RuvC-III domain
TDTSYISKKAVEYVSLLFGGSIDAKGKRRVFATKGGITGRLRREWGLNVLLGGEDEKNRADHRHHAIDALVIALSTPAVIKKIGGEDTRPKEDILPPIDNLADVAREVLEKVNVVYRCSQK

SEQ ID NO: 2255 - protein, 148 aa, unidentified
  REGION 1..148: note = Description of Unknown: uncultivated organism
  REGION 1..148: note = MG4-12 RuvC-III domain
NDSRYMSKLALRYLGVLYGAVNGCVGGQDEDEGGKRVIFASTGKVTAWIRREWRLNEILCDDDEPTGEGADVEKNRNDHRHHAIDALVISLSTPSYVQQLNRAAQLADNDAKARLFKKGNFMPPVTGFKALVAQVVDGIVVSKRVDSK

SEQ ID NO: 2256 - protein, 134 aa, unidentified
  REGION 1..134: note = Description of Unknown: uncultivated organism
  REGION 1..134: note = MG4-13 RuvC-III domain
NDTKYASKLAKKFLGLLYPGQEALSRVQATKGGITANLRDVFNLNSILKDGDSVERDGYEPKKTRADHRHHAIDAICIALTEPSTVKMLSEASSRALKERKRRFGKVQPPWENFWEDVKKAIDNTIVSHRVSKK

SEQ ID NO: 2257 - protein, 130 aa, unidentified
  REGION 1..130: note = Description of Unknown: uncultivated organism
  REGION 1..130: note = MG4-14 RuvC-III domain
NDTAHASRSALRYLGLLYGSNKAGVGPDGRRRVQAGRGQVTAFLRDEWRLNSILGDLQKSRADHRHHAVDALAIALTDSRIIKTLSDAASRALSERRRRFGRVAPPWKSFLEEAKNAIAATIVSHRVSRK

SEQ ID NO: 2258 - protein, 128 aa, unidentified
  REGION 1..128: note = Description of Unknown: uncultivated organism with predicted taxonomy: Thermogutta terrifontis
  REGION 1..128: note = MG4-15 RuvC-III domain
SDTRWISKAAADYLGHLYGGRIDPTGQQRVFTVAGGLTGLFRRAWNLNAILGGSPEKNRYDHRHHAIDAIVVALTDPSMIQRFAHEASRLLKAWPRVAVRLDPPWSTFLSDVQRHVEGIVVSFRVSRR

SEQ ID NO: 2259 - protein, 128 aa, unidentified; identical to SEQ ID NO: 2258
  REGION 1..128: note = Description of Unknown: uncultivated organism with predicted taxonomy: Thermogutta terrifontis
  REGION 1..128: note = MG4-16 RuvC-III domain

SEQ ID NO: 2260 - protein, 128 aa, unidentified
  REGION 1..128: note = Description of Unknown: uncultivated organism with predicted taxonomy: Thermogutta terrifontis
  REGION 1..128: note = MG4-17 RuvC-III domain
NDTRWISKAAADYFGYLYGGRIAPTGQQRVFTVTGGLTALFRRAWNLNAVLGGNPEKNRYDHRHHAIDAIVVALTEPSMIQRFSNEAEKLIKAFPRVAVRLDPPWDTFLSDVQQHVERIVVSFRVNRR

SEQ ID NO: 2261 - protein, 128 aa, unidentified
  REGION 1..128: note = Description of Unknown: uncultivated organism with predicted taxonomy: Thermogutta terrifontis
  REGION 1..128: note = MG4-18 RuvC-III domain
SDTRWISKAAADYLGHLYGGRIDPTGQQRVFTVAGGLTGLFRRAWNLNAILGGSPEKNRYDHRHHAIDAIVVALTEPSMIQRFAHEASRLLKAWPRVAVRLDPPWSTFLSDVQRHVEGIVVSFRVSRR

SEQ ID NO: 2262 - protein, 141 aa, unidentified
  REGION 1..141: note = Description of Unknown: uncultivated organism
  REGION 1..141: note = MG4-19 RuvC-III domain
NDTRYASKLACELVGTLFGGRDIPTESGSRQVVFASSGMVTATLRKGWGLEAILREAAPSANGQNRGKPRTDHRHHAIDAITIALSAPRMIAALSRNNAQDPYWPRNGRTAPKLQSPWNGFVDSIRPHFEQMLVSHRPEHR

SEQ ID NO: 2263 - protein, 141 aa, unidentified; identical to SEQ ID NO: 2262
  REGION 1..141: note = Description of Unknown: uncultivated organism
  REGION 1..141: note = MG4-20 RuvC-III domain

SEQ ID NO: 2264 - protein, 141 aa, unidentified; identical to SEQ ID NO: 2262
  REGION 1..141: note = Description of Unknown: uncultivated organism
  REGION 1..141: note = MG4-21 RuvC-III domain

SEQ ID NO: 2265 - protein, 141 aa, unidentified
  REGION 1..141: note = Description of Unknown: uncultivated organism with predicted taxonomy: Planctomyces sp. SH-PL14
  REGION 1..141: note = MG4-22 RuvC-III domain
NDTRYASKLACELVGTLFGGRDIPTESGSRQVVFASSGMVTATLRKGWGLEAILREAAPSANGQNRGKPRTDHRHHAIDAITIALSAPRMIAALSRNNAQDPYWPRNGRTAPKLQSPWNGIVDSIRPHFEQMLVSHRPEHR

SEQ ID NO: 2266 - protein, 141 aa, unidentified; identical to SEQ ID NO: 2262
  REGION 1..141: note = Description of Unknown: uncultivated organism
  REGION 1..141: note = MG4-23 RuvC-III domain

SEQ ID NO: 2267 - protein, 141 aa, unidentified; identical to SEQ ID NO: 2262
  REGION 1..141: note = Description of Unknown: uncultivated organism
  REGION 1..141: note = MG4-24 RuvC-III domain

SEQ ID NO: 2268 - protein, 141 aa, unidentified; identical to SEQ ID NO: 2262
  REGION 1..141: note = Description of Unknown: uncultivated organism
  REGION 1..141: note = MG4-25 RuvC-III domain

SEQ ID NO: 2269 - protein, 141 aa, unidentified; identical to SEQ ID NO: 2262
  REGION 1..141: note = Description of Unknown: uncultivated organism
  REGION 1..141: note = MG4-26 RuvC-III domain

SEQ ID NO: 2270 - protein, 141 aa, unidentified; identical to SEQ ID NO: 2262
  REGION 1..141: note = Description of Unknown: uncultivated organism
  REGION 1..141: note = MG4-27 RuvC-III domain

SEQ ID NO: 2271 - protein, 141 aa, unidentified; identical to SEQ ID NO: 2262
  REGION 1..141: note = Description of Unknown: uncultivated organism
  REGION 1..141: note = MG4-28 RuvC-III domain

SEQ ID NO: 2272 - protein, 141 aa, unidentified; identical to SEQ ID NO: 2262
  REGION 1..141: note = Description of Unknown: uncultivated organism
  REGION 1..141: note = MG4-29 RuvC-III domain

SEQ ID NO: 2273 - protein, 134 aa, unidentified
  REGION 1..134: note = Description of Unknown: uncultivated organism with predicted taxonomy: Alphaproteobacteria bacterium
  REGION 1..134: note = MG4-30 RuvC-III domain
NDTAYASRLAADYLGILYGGRTDREHRLRVQATAGQATARLRARWNLDSILDDGPTKHGGRASKERTDHRHHAIDAVVIGVTDQGMMERLSDAAKRGQEVGKRFARLDEPWNGFLEQVRKEVGQIVVSHRVSKK

SEQ ID NO: 2274 - protein, 131 aa, unidentified
  REGION 1..131: note = Description of Unknown: uncultivated organism
  REGION 1..131: note = MG4-31 RuvC-III domain
NDTRYLARESANYLGCLFTAEETEGPNPLRVFVVTGGLTNMMRGLWGLNTLAGGPANEKDRIDHRHHAIDALVVALTKQAHTQKLMSAAARAERQHLLRNFQDVAHPWADFAEQAKVAVDKIVVSYRPDRK

SEQ ID NO: 2275 - protein, 133 aa, unidentified
  REGION 1..133: note = Description of Unknown: uncultivated organism
  REGION 1..133: note = MG4-32 RuvC-III domain
QETRYIGRLACDYLGLLYGGQVEAQGTAVSERRILTPTGGLVAWLRRGWGLNSVLSDRDEKERNDHRHHAVDAIVIACADQRAIQRLSESAERMEREGRERPYESVDPPWEGFEQSVQEAIHAVVVSHRQSRK

SEQ ID NO: 2276 - protein, 115 aa, unidentified
  REGION 1..115: note = Description of Unknown: uncultivated organism with predicted taxonomy: Insolitispirillum peregrinum
  REGION 1..115: note = MG4-33 RuvC-III domain
NDTRYLARESANYLGCLFTAEETEGPNPLRVFVVTGGLTNMMRGLWGLNTLAGGPANEKDRIDHRHHAIDALVVALTKQAHTQKLMSAAARAERQHLLRNFQDVAHPWADFAEQA

SEQ ID NO: 2277 - protein, 129 aa, unidentified
  REGION 1..129: note = Description of Unknown: uncultivated organism with predicted taxonomy: Planctomycetes bacterium
  REGION 1..129: note = MG4-34 RuvC-III domain
NDTRYMSRVACEYLGALYGGLSDEYHRRRVQSTTGGLTFELRRGWSLNSILGIGDEKNRADHRHHAVDAIVVALTGPKAIQQASRAAQRAETRGGARLFEEFEDPWPGFRDDVKAIVKSIVVSHRQSRK

SEQ ID NO: 2278 - protein, 133 aa, unidentified; identical to SEQ ID NO: 2275
  REGION 1..133: note = Description of Unknown: uncultivated organism
  REGION 1..133: note = MG4-35 RuvC-III domain

SEQ ID NO: 2279 - protein, 143 aa, unidentified
  REGION 1..143: note = Description of Unknown: uncultivated organism with predicted taxonomy: Proteobacteria
  REGION 1..143: note = MG4-36 RuvC-III domain
NDTRAASVAAARYLALLYGGEIVDGKRKILKITGQVTAYLRDVWGLNGLIPSIHREARGEAADAEAESRTLKSRDDHRHHAVDAVVVALCNQRWIQRLSEANRGALAARRRWFAPVEPPWVGFKEQLKDTLKSMNISFRPDHR

SEQ ID NO: 2280 - protein, 76 aa, unidentified
  REGION 1..76: note = Description of Unknown: uncultivated organism with predicted taxonomy: Solemya velesiana gill symbiont
  REGION 1..76: note = MG4-37 RuvC-III domain
NDTRASAVAAARYLSLLYGGETVDGKRKILKVTGQVTAYLRDVWGLNGLIPSIHREARGEAEDGQAEARPVKSRDD

SEQ ID NO: 2281 - protein, 127 aa, unidentified
  REGION 1..127: note = Description of Unknown: uncultivated organism with predicted taxonomy: Acidobacteria
  REGION 1..127: note = MG4-38 RuvC-III domain
NDTRYAAVVAGRYLSLLYGGEVIDGKRKILKVTGQITAHLRRVWGMNEILGRAGVKSRDDHRQHAIDAALVAVADQRSVQRLSQAAARAELQHRRRLPALEPPFVGFKEGLQCLVQTMNISFRPDHR

SEQ ID NO: 2282 - protein, 89 aa, unidentified
  REGION 1..89: note = Description of Unknown: uncultivated organism with predicted taxonomy: Planctomycetes
  REGION 1..89: note = MG4-39 RuvC-III domain
NDTRYSSRLASEYLSLLYGGRSDAQGNLRVQASTGAVTSLLRDQWGLNAILAELGRQLGVSGLDDDVEKARFDHRHHAVDALVIALTTP

SEQ ID NO: 2283 - protein, 127 aa, unidentified
  REGION 1..127: note = Description of Unknown: uncultivated organism with predicted taxonomy: Thermogutta terrifontis
  REGION 1..127: note = MG4-40 RuvC-III domain
SDTRWISRTAADYLGLLYGGRIDPTGKQRIQTTAGRLTALLRRAWDLDSILGPGTEKNRADHRQHAIDAVVIALTDPAVVHRLSRWASHRPSWVRITPQLDSPWPGFFDQVKHRILSILVSFRQHRR

SEQ ID NO: 2284 - protein, 116 aa, unidentified
  REGION 1..116: note = Description of Unknown: uncultivated organism with predicted taxonomy: Planctomycetes
  REGION 1..116: note = MG4-41 RuvC-III domain
NDTRYSSRLAAEYLSLLYGGRYDAQGNLRVQASTGTVTAQLRGQWGLNAILAELGRQLGVRDLDNDVEKARFDHRHHAVDALVIALTTPAMIKRFSDESQRARQYGRQFRCFFDPP

SEQ ID NO: 2285 - protein, 127 aa, unidentified; identical to SEQ ID NO: 2283
  REGION 1..127: note = Description of Unknown: uncultivated organism with predicted taxonomy: Thermogutta terrifontis
  REGION 1..127: note = MG4-42 RuvC-III domain

SEQ ID NO: 2286 - protein, 127 aa, unidentified; identical to SEQ ID NO: 2283
  REGION 1..127: note = Description of Unknown: uncultivated organism
  REGION 1..127: note = MG4-43 RuvC-III domain

SEQ ID NO: 2287 - protein, 132 aa, unidentified
  REGION 1..132: note = Description of Unknown: uncultivated organism with predicted taxonomy: Proteobacteria
  REGION 1..132: note = MG4-44 RuvC-III domain
NDTRHAAKVAMGYLGLLYPKEERLKRVKAFAGGVTGELRKCWKLNSILGDPDSVEPKKNRADHRHHAIDALVLALATPGMVQYLSKAAAQQLACQRSIRGYQKFMEDPWPHFLEDVRKAVNAIVVSHRVDHR

SEQ ID NO: 2288 - protein, 132 aa, unidentified; identical to SEQ ID NO: 2287
  REGION 1..132: note = Description of Unknown: uncultivated organism
  REGION 1..132: note = MG4-45 RuvC-III domain

SEQ ID NO: 2289 - protein, 127 aa, unidentified; identical to SEQ ID NO: 2283
  REGION 1..127: note = Description of Unknown: uncultivated organism
  REGION 1..127: note = MG4-46 RuvC-III domain

SEQ ID NO: 2290 - protein, 143 aa, unidentified
  REGION 1..143: note = Description of Unknown: uncultivated organism with predicted taxonomy: Proteobacteria
  REGION 1..143: note = MG4-47 RuvC-III domain
NDTRASAVAAARYLSLLYGGETVDGKRKILKVTGQVTAYLRDVWGLNGLIPSIHREARGEAEDRQAEARPVKSRDDHRHHAVDAVVVALCNQGWIQRLSEANRGALAARRRLFAPVEPPWVGFKEQLKDILKSMNISFRPDHR

SEQ ID NO: 2291 - protein, 122 aa, unidentified
  REGION 1..122: note = Description of Unknown: uncultivated organism
  REGION 1..122: note = MG4-48 RuvC-III domain
HATAYAARVAARELARLYPNQERAHRIWVSSGRATACLRDAWQLNQLLGRKDEKNRADHRHHMVDAVVVALTTPKIVQDLTHAAQNAVRARRFQGMEPPSGLHEALRQRLEKVIVSHRVERK

SEQ ID NO: 2292 - protein, 143 aa, unidentified
  REGION 1..143: note = Description of Unknown: uncultivated organism
  REGION 1..143: note = MG4-49 RuvC-III domain
NDTRYSSRLAAEYLSLLYGGRYDAQGNLRVQASTGTVTAQLRGQWGLNAILAELGRQLGVRDLDNDVEKARFDHRHHAVDALVIALTTPAMIKRFSDESQRARQYGRQFRCFFDPPWGTRAQFVADVRNAVLAINVSRRVDRR

SEQ ID NO: 2293 - protein, 92 aa, unidentified
  REGION 1..92: note = Description of Unknown: uncultivated organism with predicted taxonomy: Solemya velesiana gill symbiont
  REGION 1..92: note = MG4-51 RuvC-III domain
NDTRAAAVAAARYLALLFGGETVGGKLKILKITGQVTAHLRDAWDLNGLIPSIHRETRGEAADKEPKTPPLKSRDDHRHHAVDAVVVALCDQ

SEQ ID NO: 2294 - protein, 143 aa, unidentified
  REGION 1..143: note = Description of Unknown: uncultivated organism
  REGION 1..143: note = MG4-52 RuvC-III domain
NDTRASAVAAARYLSLLYGGETVDGKRKILKVTGQVTAYLRDVWGLNGLIPSIHREARGEAEDGQAEARPVKSRDDHRHHAVDAVVVALCNQGWIQRLSEANRGALAARRRLFAPVEPPWVGFKEQLKDILKSMNISFRPDHR

SEQ ID NO: 2295 - protein, 128 aa, unidentified
  REGION 1..128: note = Description of Unknown: uncultivated organism
  REGION 1..128: note = MG4-53 RuvC-III domain
NDTRYAARAAAEYLGRLYGGQSDAGHRRRIQVATGQVTAFLRREWGLNAILGDGDEKSRDDHRHHAVDALCVALTDAGIVQALAAAAARAPAEGRRCFARLAPPWPSFLADARRAVLEITVSHRVRRK

SEQ ID NO: 2296 - protein, 127 aa, unidentified; identical to SEQ ID NO: 2281
  REGION 1..127: note = Description of Unknown: uncultivated organism
  REGION 1..127: note = MG4-54 RuvC-III domain

SEQ ID NO: 2297 - protein, 132 aa, unidentified
  REGION 1..132: note = Description of Unknown: uncultivated organism with predicted taxonomy: Flavobacterium hercynium
  REGION 1..132: note = MG4-55 RuvC-III domain
NDTRHAAKVAMGYLGLLYPKEERLKRVKAFAGGVTGELRKCWKLNSILGDPDSVEPKKNRADHRHHAIDALVLALATPGMVQYLSKAAEQQLACQRSIRGYQKFMEDPWPHFLEDVRKAVNAIVVSHRVDHR

SEQ ID NO: 2298 - protein, 143 aa, unidentified; identical to SEQ ID NO: 2279
  REGION 1..143: note = Description of Unknown: uncultivated organism with predicted taxonomy: Pseudoxanthobacter soli
  REGION 1..143: note = MG4-56 RuvC-III domain

SEQ ID NO: 2299 - protein, 128 aa, unidentified
  REGION 1..128: note = Description of Unknown: uncultivated organism with predicted taxonomy: candidate division Zixibacteria bacterium CG_4_9_14_3_um_filter_46_8
  REGION 1..128: note = MG4-57 RuvC-III domain
NDTRYASVLAAKYLGALYGGAIDAEHTRRIQVSAGMVTAYLRNEYGLNPILGDGGEKSRDDHRHHAIDAICVALTDAATVKMLSDAASRALSERRRQFGHIDPPWPSFLADVRKHIDDLIVSHAVSRK

SEQ ID NO: 2300 - protein, 143 aa, unidentified; identical to SEQ ID NO: 2294
  REGION 1..143: note = Description of Unknown: uncultivated organism
  REGION 1..143: note = MG4-58 RuvC-III domain

SEQ ID NO: 2301 - protein, 143 aa, unidentified; identical to SEQ ID NO: 2294
  REGION 1..143: note = Description of Unknown: uncultivated organism with predicted taxonomy: Proteobacteria
  REGION 1..143: note = MG4-60 RuvC-III domain

SEQ ID NO: 2302 - protein, 127 aa, unidentified; identical to SEQ ID NO: 2283
  REGION 1..127: note = Description of Unknown: uncultivated organism with predicted taxonomy: Thermogutta terrifontis
  REGION 1..127: note = MG4-61 RuvC-III domain

SEQ ID NO: 2303 - protein, 124 aa, unidentified
  REGION 1..124: note = Description of Unknown: uncultivated organism
  REGION 1..124: note = MG4-62 RuvC-III domain
QDTRYITTLARDFVSLLYGKDASAIVTPSGPLTAWLRRGWHLNSVLGFTDEKEREDHRHHAVDAIVIALATRSNIKRLSDAAERVEREGREKAFGTVDPPWDGFEHEVRSIIDGVVVSHRQSQR

SEQ ID NO: 2304 - protein, 132 aa, unidentified
  REGION 1..132: note = Description of Unknown: uncultivated organism with predicted taxonomy: Planctomyces sp. SH-PL14
  REGION 1..132: note = MG4-63 RuvC-III domain
SETRYIARQAADYLGLLYGGRIEQRAGDEVGRRRVLVTPGRATALLRNGWQLASVTGGLKNRQDHRHHAIDALIVGLTQDGFLKQLSEAAARADELQLTRLTTEMDSPWETFLDDVGKGYERIHVSTRPTRK

SEQ ID NO: 2305 - protein, 124 aa, unidentified; identical to SEQ ID NO: 2303
  REGION 1..124: note = Description of Unknown: uncultivated organism
  REGION 1..124: note = MG4-64 RuvC-III domain

SEQ ID NO: 2306 - protein, 128 aa, unidentified
  REGION 1..128: note = Description of Unknown: uncultivated organism
  REGION 1..128: note = MG4-65 RuvC-III domain
QDTRYACRLAADYLGRLYGGRVDAQGKMRIEVRPGGLTAHVRNELMLHAILDDGGAKTRADHRHHAVDALAVGLTSQSMVQQLQTAAGRALQAGRRLFAPVPEPWTGFLEDARRSIGQIIVSRRPDRK

SEQ ID NO: 2307 - protein, 143 aa, unidentified
  REGION 1..143: note = Description of Unknown: uncultivated organism
  REGION 1..143: note = MG4-66 RuvC-III domain
NDTRYSSRLAAEYLALLYGGRSDAQGNLRVRAITGAVTAQLRDQWGLNAVLAELGRQLGVRDLDDNVEKARFDHRHHAVDALVIALTTPGMVKRFSDESQRARQYGRQLRCFFDPPWGTRTEFVADVRNAVLAINVSRRLDRR

SEQ ID NO: 2308 - protein, 128 aa, unidentified
  REGION 1..128: note = Description of Unknown: uncultivated organism with predicted taxonomy: Proteobacteria
  REGION 1..128: note = MG4-67 RuvC-III domain
NDTRYASRLAAEYVGLLYGGRADAEHRQRVYVCTGGTTAFLRNEWKLNTILGDGGPKTRDDHRHHAVDALVIALTGPATVKMLADAADNPWQHRRRLFAPIQEPWVGFLDQAREAILRINVSHRVNRR

SEQ ID NO: 2309 - protein, 127 aa, unidentified
  REGION 1..127: note = Description of Unknown: uncultivated organism with predicted taxonomy: Thermogutta terrifontis
  REGION 1..127: note = MG4-68 RuvC-III domain
SDTRWITTAAADYLGYLYGGRIDSEGRQRVFTVTGPLTALIRRGWNLDGILGGPEKNRFDYRQHAIDAIVIALIDQAIVQQISLLSSRLWGTDRPTAVQLPEPWPSFYHDAKNAILNIVVSHRISRR

SEQ ID NO: 2310 - protein, 143 aa, unidentified
  REGION 1..143: note = Description of Unknown: uncultivated organism with predicted taxonomy: Planctomycetes bacterium
  REGION 1..143: note = MG4-70 RuvC-III domain
NDTRAAAVAAARYLALLFGGETVGGKLKILKITGQVTAHLRDAWDLNGLIPSIHRETRGEAADKEPKTPPLKSRDDHRHHAVDAVVVALCDQGSIHRLSEASKTAVAARRRLLAPMAPPWVGFREQLKDILKSMNISFRPDHR

SEQ ID NO: 2311 - protein, 140 aa, unidentified
  REGION 1..140: note = Description of Unknown: uncultivated organism
  REGION 1..140: note = MG4-71 RuvC-III domain
TDTRYASRLAADYLGLLYGGTVDAAGRRRVQTSSGTATWYLRSEWDMNAVIPGLSGSPTGSASGTFIEKVRTDHRHHAIDAVAIALTSARVVKMLADAARNPEQHRRRRFAPVPPPWPNFKDEVSAAAEKIIVSHRVDRR

SEQ ID NO: 2312 - protein, 135 aa, unidentified
  REGION 1..135: note = Description of Unknown: uncultivated organism with predicted taxonomy: Acidobacteria
  REGION 1..135: note = MG4-72 RuvC-III domain
NDTAYATSLAAKYLGLLYGGVNDADGRKRVQATSGQATAYFRSLWKLNSILNDGPTSDGGAVPKSRDDHRHHAVDAVVIGLTDAAMIKRLSDAAQRAQLEHRRRFASLEAPWPNFVDSVRTEIDRIIVSHRVSKK

SEQ ID NO: 2313 - protein, 85 aa, unidentified
  REGION 1..85: note = Description of Unknown: uncultivated organism
  REGION 1..85: note = MG4-73 RuvC-III domain
TDTRYASRLAADYLGLLYGGTVDAAGRRRVQTSSGTATWYLRSEWDMNAVIPGLSGSPTGSASGTFIEKVRTDHRHHAIDAVAIA

SEQ ID NO: 2314 - protein, 135 aa, unidentified
  REGION 1..135: note = Description of Unknown: uncultivated organism with predicted taxonomy: Acidobacteria
  REGION 1..135: note = MG4-74 RuvC-III domain
NDTAYATSLAAKYLGLLYGGVNDADGRKRVQATSGQATAYFRSLWKLNSILNDGPTSDGGAVPKSRDDHRHHAVDAVVIGLTDAAMIKRLSDAAQRAQLEHRRRFASLEAPCPNFVDSVRTEIDRIIVSHRVSKK

SEQ ID NO: 2315 - protein, 143 aa, unidentified; identical to SEQ ID NO: 2310
  REGION 1..143: note = Description of Unknown: uncultivated organism with predicted taxonomy: Proteobacteria
  REGION 1..143: note = MG4-76 RuvC-III domain

SEQ ID NO: 2316 - protein, 142 aa, unidentified
  REGION 1..142: note = Description of Unknown: uncultivated organism
  REGION 1..142: note = MG4-77 RuvC-III domain
NDTRAAAVAAARYLALLYGGETVDGKRKILKPTGQVTAYLREVWGLNGLIPSIHREAAGAEESDDGRTIRKSRDDHRHHAIDAVAVALCDQGTIQMLSEANRGAAAARRRRFAPVPPPWVGFKDELRQVLRSMNISFRPDHR

SEQ ID NO: 2317 - protein, 122 aa, unidentified
  REGION 1..122: note = Description of Unknown: uncultivated organism
  REGION 1..122: note = MG4-78 RuvC-III domain
QATAHAARLAGRLLGRWYPAEERLSRIQITNGAVTSWLRVAWGLNQLLGVADEKNRSDHRHHLVDATVIALTTAATVKALTEAARRSARPRRFVDMPVPPGLVDSLRQQLETVIVSHRVDRR

SEQ ID NO: 2318 - protein, 122 aa, unidentified; identical to SEQ ID NO: 2317
  REGION 1..122: note = Description of Unknown: uncultivated organism
  REGION 1..122: note = MG4-79 RuvC-III domain

SEQ ID NO: 2319 - protein, 132 aa, unidentified
  REGION 1..132: note = Description of Unknown: uncultivated organism with predicted taxonomy: Planctomycetes
  REGION 1..132: note = MG4-80 RuvC-III domain
NDTRHSTKLAAQYLGLLYGGPYDAQGHRRLVAVSGSITAHLRRAWRLGVHPGPDQAGPGKNRDDHRHHALDAIVVALTSHATIQKLSTFAARSQPGQQRLITGDLQEPWPSFQRDVRQALMAIYVSFRAEHK

SEQ ID NO: 2320 - protein, 127 aa, unidentified
  REGION 1..127: note = Description of Unknown: uncultivated organism with predicted taxonomy: Rhodobacteraceae
  REGION 1..127: note = MG4-81 RuvC-III domain
NDTRAAAVAAARYLALLYGGETVDGKRKILKPTGQVTAYLREVWGLNGLIPSIHREAAGAEESDDGRTIRKSRDDHRHHAIDAVAVALCDQGTIQMLSEANRGAAAARRRRFAPVPPPWVGFKDELR

SEQ ID NO: 2321 - protein, 135 aa, unidentified
  REGION 1..135: note = Description of Unknown: uncultivated organism
  REGION 1..135: note = MG4-82 RuvC-III domain
VDTRYMSRAAAEYVGLLYGGAVDSQGTRRVQVSPGGVTADLRRLWGLNRVLPRDPGDDERPGKKSRSDHRHHALDAAVIALTSPAMVQQLSRCAQDALLIGSRRFVALELPFPSLIDDLKKAIDEIVVSYRVKRK

SEQ ID NO: 2322 - protein, 133 aa, unidentified
  REGION 1..133: note = Description of Unknown: uncultivated organism
  REGION 1..133: note = MG4-83 RuvC-III domain
NDTRYISRLAVQYAGLLYGAGADGVDPSGRRRVQAARGQITAHLRDVYELNSLLGDGGEKYRGDHRHHAVDALCVALTTPRAVKQLSDAAAAGEDRRRAWYDTRLITDPWPGFLDDARNAVNAIVVSHCPSRK

SEQ ID NO: 2323 - protein, 126 aa, unidentified
  REGION 1..126: note = Description of Unknown: uncultivated organism
  REGION 1..126: note = MG4-84 RuvC-III domain
NDTRYAAVEAMDFLKLLYGEEAQRKVIVQAARGGTTRFLREEFGLNQILGDGGEKSRDDHRHHAVDAICVALTDPATVKMLSDAAARALSEGRRRFASVPFPWGRFLDDVRASIQGINVSFRVSRK

SEQ ID NO: 2324 - protein, 122 aa, unidentified; identical to SEQ ID NO: 2317
  REGION 1..122: note = Description of Unknown: uncultivated organism
  REGION 1..122: note = MG4-85 RuvC-III domain

SEQ ID NO: 2325 - protein, 122 aa, unidentified; identical to SEQ ID NO: 2317
  REGION 1..122: note = Description of Unknown: uncultivated organism
  REGION 1..122: note = MG4-86 RuvC-III domain

SEQ ID NO: 2326 - protein, 134 aa, unidentified
  REGION 1..134: note = Description of Unknown: uncultivated organism
  REGION 1..134: note = MG4-87 RuvC-III domain
SDTRYIARAVSEYLGVLYGGRTDADGKQRIVACSGGLTSWLRREWGLDALLSPTGDDAEAEKNRIDHRHHAVDALVVALTTPRTQAMLQAAAARQEQEGRFRLFGRIEPLWSAFPREAKAAVEAIVVSHRQQRA

SEQ ID NO: 2327 - protein, 121 aa, unidentified
  REGION 1..121: note = Description of Unknown: uncultivated organism with predicted taxonomy: Planctomycetes bacterium
  REGION 1..121: note = MG4-88 RuvC-III domain
NDTRHNSKVAAEYLGLLYGGLWDASGKRRIEAITGGITALLRNAWRLRKDRADHRHHALDAIVLALVDPAQVKSLQESAERASEGSARFRLGELDEPWPGFRDAVRSALEEINVSIRADRK

SEQ ID NO: 2328 - protein, 61 aa, unidentified
  REGION 1..61: note = Description of Unknown: uncultivated organism with predicted taxonomy: Planctomicrobium piriforme
  REGION 1..61: note = MG4-89 RuvC-III domain
AETRKIGAASAGFLGLLYGGEIDAAHKRRVFVTTGGLTAHLRREWHLNGILGTEGEKARDD

SEQ ID NO: 2329 - protein, 124 aa, unidentified; identical to SEQ ID NO: 2303
  REGION 1..124: note = Description of Unknown: uncultivated organism
  REGION 1..124: note = MG4-90 RuvC-III domain

SEQ ID NO: 2330 - protein, 130 aa, unidentified
  REGION 1..130: note = Description of Unknown: uncultivated organism with predicted taxonomy: Deltaproteobacteria bacterium
  REGION 1..130: note = MG4-91 RuvC-III domain
RETSYFARLAQEYVGLLYGGIVDAEGTRRVIASSGGATHWLRRELGLDSILSDDEEKNRSDHRHHAVDAITTALLDSRTIQLLARAAQEAEERGSRRLFLSLQEEPWQGCRRDVEEAVARINVSHRQRRR

SEQ ID NO: 2331 - protein, 127 aa, unidentified
  REGION 1..127: note = Description of Unknown: uncultivated organism with predicted taxonomy: Alphaproteobacteria
  REGION 1..127: note = MG4-92 RuvC-III domain
TDTAYAARLARDYLGVLYGAESLRRIQVLPGRLTSLLRGAWQLNRILGDPERNTKSRADHRHHAIDALVAAVTDRSMVQKICTRAKQLEDLKQVRLLPEIDPPWAGLLNDTREALARTIPSSRVDRK

SEQ ID NO: 2332 - protein, 127 aa, unidentified
  REGION 1..127: note = Description of Unknown: uncultivated organism with predicted taxonomy: Proteobacteria
  REGION 1..127: note = MG4-93 RuvC-III domain
TDTAYAARLARDYLGVLYGAESLRRIQVLPGRLTSLLRGAWQLNRILGDPERNTKSRADHRHHAIDALVAAVTDRSMVQKICTRAKQLEELKQARLLPEIDPPWAGLLNDTREALARTIPSSRADRK

SEQ ID NO: 2333 - protein, 130 aa, unidentified
  REGION 1..130: note = Description of Unknown: uncultivated organism with predicted taxonomy: Planctomycetales bacterium 4484_113
  REGION 1..130: note = MG4-94 RuvC-III domain
NDTRYGSKLAKKYLGLLYGGVDNDGIDASRKRRVQATIGAVTAKLRDAMGLNAVLGKGAKSRDDHRHHAVDAVVIALTSPGTIKGISDASQHPALTDVRKIKLAEPWQGFLAEVRQAVDRIVVSHRVDRR

SEQ ID NO: 2334 - protein, 126 aa, unidentified
  REGION 1..126: note = Description of Unknown: uncultivated organism with predicted taxonomy: Planctomycetes bacterium
  REGION 1..126: note = MG4-95 RuvC-III domain
NDTRYASKLAKKYLGLLYGKDAAKHVQAGRGGVTKFIRDELCLNAILGDGGDEKKRTDHRHHAVDAIAIALTSPGVVKMLSDAARYNEEKGLRRRFGNIKSPWPGFFEDVRKAVENIVASHRVSRR

SEQ ID NO: 2335 - protein, 130 aa, unidentified; identical to SEQ ID NO: 2333
  REGION 1..130: note = Description of Unknown: uncultivated organism with predicted taxonomy: Planctomycetales bacterium 4484_113
  REGION 1..130: note = MG4-96 RuvC-III domain

SEQ ID NO: 2336 - protein, 122 aa, unidentified
  REGION 1..122: note = Description of Unknown: uncultivated organism with predicted taxonomy: Planctomycetes bacterium
  REGION 1..122: note = MG4-97 RuvC-III domain
NATAYAARYAARHLALLYPQEERRKRVQVSAGRTTAYLRRAWNLNRLIGLADEKNRADYRHHAVDAVVIALTTPKLTGELSKAAARSVRPGTFQGLTPPPGLTRQLEEILDQMVVSHRVDRR

SEQ ID NO: 2337 - protein, 132 aa, unidentified
  REGION 1..132: note = Description of Unknown: uncultivated organism
  REGION 1..132: note = MG4-98 RuvC-III domain
NDTAWASKWAKKYLGLLYGDIKSKGIDSAGKLRVQAVSGRLTSELRRIWGLNNILGDGNTKSRDDHRHHAIDAIVIALSNPAVVKQLAEASKRAVNIGDKLLKDFPQPWEGFHNDVKRVIDGIIASHRVSKR

SEQ ID NO: 2338 - protein, 126 aa, unidentified; identical to SEQ ID NO: 2334
  REGION 1..126: note = Description of Unknown: uncultivated organism with predicted taxonomy: Planctomycetes bacterium
  REGION 1..126: note = MG4-99 RuvC-III domain

SEQ ID NO: 2339 - protein, 126 aa, unidentified; identical to SEQ ID NO: 2334
  REGION 1..126: note = Description of Unknown: uncultivated organism with predicted taxonomy: Planctomycetes bacterium
  REGION 1..126: note = MG4-100 RuvC-III domain

SEQ ID NO: 2340 - protein, 132 aa, unidentified; identical to SEQ ID NO: 2337
  REGION 1..132: note = Description of Unknown: uncultivated organism
  REGION 1..132: note = MG4-101 RuvC-III domain

SEQ ID NO: 2341 - protein, 134 aa, unidentified
  REGION 1..134: note = Description of Unknown: uncultivated organism
  REGION 1..134: note = MG4-102 RuvC-III domain
NDTRYAAKEAAAYLGMLYGGSVTSIDGRKRVQVLSGGLTYKVRSAYNLNGILNDGDVKTRNDHRHHAVDAIAIGMTSPGMVKKLTEIAKELENRRDYIRFGTGKGILPDKWNTFDEDVRRVIGKIKVSHKIPRK

SEQ ID NO: 2342 - protein, 134 aa, unidentified; identical to SEQ ID NO: 2341
  REGION 1..134: note = Description of Unknown: uncultivated organism
  REGION 1..134: note = MG4-103 RuvC-III domain

SEQ ID NO: 2343 - protein, 125 aa, unidentified
  REGION 1..125: note = Description of Unknown: uncultivated organism with predicted taxonomy: Planctomycetes bacterium
  REGION 1..125: note = MG4-104 RuvC-III domain
NDTRYASKLATEYLALLYGGRWDRNGVLRLQCSAGGCTAVVRRAWGGNYLLGEGEKERGDFRHHAIDALTVAVVSPAIVKAVAEMPKETVRKAIEEKQPLIVNSLYTQARAKLDAAGISHHTINR

SEQ ID NO: 2344 - protein, 125 aa, unidentified; identical to SEQ ID NO: 2343
  REGION 1..125: note = Description of Unknown: uncultivated organism
  REGION 1..125: note = MG4-105 RuvC-III domain

SEQ ID NO: 2345 - protein, 125 aa, unidentified
  REGION 1..125: note = Description of Unknown: uncultivated organism
  REGION 1..125: note = MG4-106 RuvC-III domain
NDTRYASKLATEYLALLYGGMNDRNRVQRIQCSAGGCTAVVRRAWGGNYLLGEGEKVRGDHRHHAIDALTIAVTSPAIVKLIAGLKGEDRRRAIEEKRPLVVTDLYTQAKAKLDSAGISHHTVNK

SEQ ID NO: 2346 - protein, 125 aa, unidentified; identical to SEQ ID NO: 2345
  REGION 1..125: note = Description of Unknown: uncultivated organism
  REGION 1..125: note = MG4-107 RuvC-III domain

SEQ ID NO: 2347 - protein, 125 aa, unidentified; identical to SEQ ID NO: 2343
  REGION 1..125: note = Description of Unknown: uncultivated organism
  REGION 1..125: note = MG4-108 RuvC-III domain

SEQ ID NO: 2348 - protein, 125 aa, unidentified; identical to SEQ ID NO: 2343
  REGION 1..125: note = Description of Unknown: uncultivated organism with predicted taxonomy: Planctomycetes bacterium
  REGION 1..125: note = MG4-109 RuvC-III domain

SEQ ID NO: 2349 - protein, 125 aa, unidentified; identical to SEQ ID NO: 2343
  REGION 1..125: note = Description of Unknown: uncultivated organism
  REGION 1..125: note = MG4-110 RuvC-III domain

SEQ ID NO: 2350 - protein, 125 aa, unidentified
  REGION 1..125: note = Description of Unknown: uncultivated organism with predicted taxonomy: Planctomycetes bacterium
  REGION 1..125: note = MG4-111 RuvC-III domain
NDTRYASKLATEYLALLYGGRNDRNGVQRIQCSAGGCTAVVRRAWGGNYLLGEGEKVRGDHRHHAIDALTIAVTSPAIVKLIAGVKGEDRRRAIEEKRPLVVTDLYTQAKAKLDSAGISHHTVNK

SEQ ID NO: 2351 - protein, 125 aa, unidentified; identical to SEQ ID NO: 2343
  REGION 1..125: note = Description of Unknown: uncultivated organism
  REGION 1..125: note = MG4-112 RuvC-III domain

SEQ ID NO: 2352 - protein, 125 aa, unidentified; identical to SEQ ID NO: 2345
  REGION 1..125: note = Description of Unknown: uncultivated organism
  REGION 1..125: note = MG4-113 RuvC-III domain

SEQ ID NO: 2353 - protein, 125 aa, unidentified; identical to SEQ ID NO: 2343
  REGION 1..125: note = Description of Unknown: uncultivated organism
  REGION 1..125: note = MG4-114 RuvC-III domain

SEQ ID NO: 2354 - protein, 125 aa, unidentified; identical to SEQ ID NO: 2343
  REGION 1..125: note = Description of Unknown: uncultivated organism
  REGION 1..125: note = MG4-115 RuvC-III domain

SEQ ID NO: 2355 - protein, 141 aa, unidentified
  REGION 1..141: note = Description of Unknown: uncultivated organism
  REGION 1..141: note = MG4-116 RuvC-III domain
NDTRYSSRLACDLIAKLYGGRVIETETGTRQVVFASSGMVTATLRKGLGLEAVLCEASGSSNGETRGKSRTDHRHHAIDALTIALTRQSMIQTMSRTASLEPNWAITSRSLRTIPSPWSNFIDSVRPHVQELLVSHRPEHR

SEQ ID NO: 2356 - protein, 140 aa, unidentified
  REGION 1..140: note = Description of Unknown: uncultivated organism with predicted taxonomy: Acidobacteriales bacterium 59-55
  REGION 1..140: note = MG4-117 RuvC-III domain
NDTRYASVLASRFLGALYGGRDLVDAEKVRQVIFASSGAVTATLRSSWGLEAILREIVPTEPGESRGKPRTDHRHHAIDAITIALTRPKVIQSMALAASLEPWQRDSRAWRKIESPWRDFVLSIRPHIEQMLVSHRPEHK

SEQ ID NO: 2357 - protein, 141 aa, unidentified; identical to SEQ ID NO: 2355
  REGION 1..141: note = Description of Unknown: uncultivated organism
  REGION 1..141: note = MG4-118 RuvC-III domain

SEQ ID NO: 2358 - protein, 140 aa, unidentified; identical to SEQ ID NO: 2356
  REGION 1..140: note = Description of Unknown: uncultivated organism
  REGION 1..140: note = MG4-119 RuvC-III domain

SEQ ID NO: 2359 - protein, 141 aa, unidentified; identical to SEQ ID NO: 2355
  REGION 1..141: note = Description of Unknown: uncultivated organism
  REGION 1..141: note = MG4-120 RuvC-III domain

SEQ ID NO: 2360 - protein, 140 aa, unidentified
  REGION 1..140: note = Description of Unknown: uncultivated organism with predicted taxonomy: Acidobacteriales bacterium 59-55
  REGION 1..140: note = MG4-121 RuvC-III domain
NDTRYASVLASRFLGALYGGRDLVDAEKVRQVIFASSGAVTATLRSSWGLEAILREIVPTEPGEPRGKPRTDHRHHAIDAITIALTRPKVIQSMALAASLEPWQRDSRAWRKIESPWRDFVLSIRPHIEQMLVSHRPEHK

SEQ ID NO: 2361 - protein, 140 aa, unidentified
  REGION 1..140: note = Description of Unknown: uncultivated organism with predicted taxonomy: uncultured bacterium
  REGION 1..140: note = MG4-122 RuvC-III domain
NDTRYASVLAARFLGSLYGGRDVVDGDNARQVIFASSGAVTASLRSSWGLEAILHEIVPAESGESRGKPRTDHRHHAIDAITIALTRPKVIQSMARTASLEPWQIDSRAWRKIELPWRDFVPSIRPHIEQMLVSHRPEHK

SEQ ID NO: 2362 - protein, 141 aa, unidentified; identical to SEQ ID NO: 2355
  REGION 1..141: note = Description of Unknown: uncultivated organism
  REGION 1..141: note = MG4-123 RuvC-III domain

SEQ ID NO: 2363 - protein, 141 aa, unidentified; identical to SEQ ID NO: 2355
  REGION 1..141: note = Description of Unknown: uncultivated organism
  REGION 1..141: note = MG4-124 RuvC-III domain

SEQ ID NO: 2364 - protein, 141 aa, unidentified; identical to SEQ ID NO: 2355
  REGION 1..141: note = Description of Unknown: uncultivated organism
  REGION 1..141: note = MG4-125 RuvC-III domain

SEQ ID NO: 2365 - protein, 141 aa, unidentified
  REGION 1..141: note = Description of Unknown: uncultivated organism
  REGION 1..141: note = MG4-126 RuvC-III domain
NDTRYACKLACELVGTLYGGRDEKTDTDSRQVVFASSGMVTATLRKSWGLEAIMRETAPSANGQNHGKPRTDHRHHAIDAITIALSRPKMIATLSRNNAQDSYRPSNGHTAPRIQSPWEDFVDSIRPHFEKMLVSHRPDHR

SEQ ID NO: 2366 - protein, 140 aa, unidentified; identical to SEQ ID NO: 2361
  REGION 1..140: note = Description of Unknown: uncultivated organism
  REGION 1..140: note = MG4-127 RuvC-III domain

SEQ ID NO: 2367 - protein, 140 aa, unidentified; identical to SEQ ID NO: 2356
  REGION 1..140: note = Description of Unknown: uncultivated organism with predicted taxonomy: Acidobacteriales bacterium 59-55
  REGION 1..140: note = MG4-128 RuvC-III domain

SEQ ID NO: 2368 - protein, 142 aa, unidentified
  REGION 1..142: note = Description of Unknown: uncultivated organism
  REGION 1..142: note = MG4-129 RuvC-III domain
NDTRYTSLLAARLLSTLYGGRDVAENGGKRQIIFASTGAVTATLRRNWGFEQILRNIIPPEPSESTGKPRTDHRHHAIDAIVIALTRNDVIQSMARASALEPWQPGTRSWRHVPQPWCTPDFFRSVEEQVREMLTSHRPEHK

SEQ ID NO: 2369 - protein, 132 aa, unidentified
  REGION 1..132: note = Description of Unknown: uncultivated organism with predicted taxonomy: Planctomycetes
  REGION 1..132: note = MG4-130 RuvC-III domain
QDTRYMSRLATEYLGLLYGGTIDADHTRRVQVSAGRVTAYLRDEWGLNAILADGGEEEKNRDDHRHHAVDASVIALTNAGTVELLSHSAEVAAERGRRLFVREEIQQPWPTFLDDVRRAIEAINISYRVNRR

SEQ ID NO: 2370 - protein, 140 aa, unidentified; identical to SEQ ID NO: 2356
  REGION 1..140: note = Description of Unknown: uncultivated organism
  REGION 1..140: note = MG4-131 RuvC-III domain

SEQ ID NO: 2371 - protein, 128 aa, unidentified
  REGION 1..128: note = Description of Unknown: uncultivated organism with predicted taxonomy: Planctomycetes bacterium
  REGION 1..128: note = MG4-132 RuvC-III domain
NDTRYTSLLAARLLSTLYGGRDVTENGKNRQVIFASTGAVTATLRRNWGFEQILRGIIPAEPGESSGKPRTDHRHHAIDAIVIALTRNNVIQAMARASALEAWQSGTRSWRHVPQPWRTPDFFRSVEQ

SEQ ID NO: 2372 - protein, 99 aa, unidentified
  REGION 1..99: note = Description of Unknown: uncultivated organism
  REGION 1..99: note = MG4-133 RuvC-III domain
NDTRYACKLACELVGTLYGGRDEKTDTDSRQVVFASSGMVTATLRKSWGLEAIMRETAPSANGQNHGKPRTDHRHHAIDAITIALSRPKMIATLSRNNA

SEQ ID NO: 2373 - protein, 140 aa, unidentified; identical to SEQ ID NO: 2356
  REGION 1..140: note = Description of Unknown: uncultivated organism with predicted taxonomy: Acidobacteriales bacterium 59-55
  REGION 1..140: note = MG4-134 RuvC-III domain

SEQ ID NO: 2374 - protein, 140 aa, unidentified; identical to SEQ ID NO: 2356
  REGION 1..140: note = Description of Unknown: uncultivated organism with predicted taxonomy: Acidobacteriales bacterium 59-55
  REGION 1..140: note = MG4-135 RuvC-III domain

SEQ ID NO: 2375 - protein, 140 aa, unidentified; identical to SEQ ID NO: 2356
  REGION 1..140: note = Description of Unknown: uncultivated organism with predicted taxonomy: Acidobacteriales bacterium 59-55
  REGION 1..140: note = MG4-136 RuvC-III domain

SEQ ID NO: 2376 - protein, 142 aa, unidentified
  REGION 1..142: note = Description of Unknown: uncultivated organism with predicted taxonomy: Acidobacteriales bacterium 59-55
  REGION 1..142: note = MG4-137 RuvC-III domain
NDTRYTSLLAARLLSTLYGGRDVTENGKNRQVIFASTGAVTATLRRNWGFEQILRGIIPAEPGESSGKPRTDHRHHAIDAIVIALTRNNVIQAMARASALEAWQSGTRSWRHVPQPWRTPDFFRSVEQQVAEVLTSHRPEHK

SEQ ID NO: 2377 - protein, 142 aa, unidentified
  REGION 1..142: note = Description of Unknown: uncultivated organism with predicted taxonomy: uncultured bacterium
  REGION 1..142: note = MG4-138 RuvC-III domain
NDTRYASKLACELVGTLYGGRDVPLKDGKSRQVVFASSGMVTSTLRKGWGLEAILREAAPSANGQNRGKPRTDHRHHAIDAITIALSRPKMIAALSRNNAQDPYWPNNGRTTPKIQSPWKDFVDSIRPHFEQMLVSHRPEHR

SEQ ID NO: 2378 - protein, 135 aa, unidentified
  REGION 1..135: note = Description of Unknown: uncultivated organism
  REGION 1..135: note = MG4-139 RuvC-III domain
NCIRYASQMACKLMGTLYGGRDMETAGRSRQIIFASTGMLTGTLRRAWGLEAILREETPSSIEGKPRNDYRHHAIDAIAVALSHPKLIAALSRSDDSYAWATRALLKIESPWKNFIDSIRPHFDQMLISHRPEHR

SEQ ID NO: 2379 - protein, 172 aa, unidentified
  REGION 1..172: note = Description of Unknown: uncultivated organism with predicted taxonomy: Planctomycetes bacterium
  REGION 1..172: note = MG4-140 RuvC-III domain
NDTRYTSKLAGRLLMSLYGGRDIVPAETLDELDEFKDRTGRRAICVSSGMVTSLLRDAWHLNLSGVIGDDAFKCPKKSEDDEESGKRRKGQSNKKDRCDHRHHALDAVVIALTSEKVIREINMLASRLYRERQTPLKYRDLKSIQNPWHNFMDDHFRDIFRRIVVSRRPEHK

SEQ ID NO: 2380 - protein, 141 aa, unidentified; identical to SEQ ID NO: 2365
  REGION 1..141: note = Description of Unknown: uncultivated organism
  REGION 1..141: note = MG4-141 RuvC-III domain

SEQ ID NO: 2381 - protein, 62 aa, unidentified
  REGION 1..62: note = Description of Unknown: uncultivated organism with predicted taxonomy: Polaribacter sp. ALD11
  REGION 1..62: note = MG4-142 RuvC-III domain
NDTRYTSLLAARLLSTLYGGRDVAENGGKRQIIFASTGAVTATLRRNWGFEQILRNIIPPEP

SEQ ID NO: 2382 - protein, 140 aa, unidentified; identical to SEQ ID NO: 2356
  REGION 1..140: note = Description of Unknown: uncultivated organism
  REGION 1..140: note = MG4-143 RuvC-III domain

SEQ ID NO: 2383 - protein, 140 aa, unidentified; identical to SEQ ID NO: 2361
  REGION 1..140: note = Description of Unknown: uncultivated organism
  REGION 1..140: note = MG4-144 RuvC-III domain

SEQ ID NO: 2384 - protein, 66 aa, unidentified
  REGION 1..66: note = Description of Unknown: uncultivated organism
  REGION 1..66: note = MG4-145 RuvC-III domain
NDTRYACKLACELVGTLYGGRDEKTDTDSRQVVFASSGMVTATLRKSWGLEAIMRETAPSANGQNH

SEQ ID NO: 2385 - protein, 140 aa, unidentified; identical to SEQ ID NO: 2356
  REGION 1..140: note = Description of Unknown: uncultivated organism with predicted taxonomy: Acidobacteriales bacterium 59-55
  REGION 1..140: note = MG4-146 RuvC-III domain

SEQ ID NO: 2386 - protein, 141 aa, unidentified; identical to SEQ ID NO: 2365
  REGION 1..141: note = Description of Unknown: uncultivated organism
  REGION 1..141: note = MG4-147 RuvC-III domain

SEQ ID NO: 2387 - protein, 140 aa, unidentified; identical to SEQ ID NO: 2356
  REGION 1..140: note = Description of Unknown: uncultivated organism
  REGION 1..140: note = MG4-148 RuvC-III domain

SEQ ID NO: 2388 - protein, 140 aa, unidentified; identical to SEQ ID NO: 2356
  REGION 1..140: note = Description of Unknown: uncultivated organism
  REGION 1..140: note = MG4-149 RuvC-III domain

SEQ ID NO: 2389 - protein, 142 aa, unidentified
  REGION 1..142: note = Description of Unknown: uncultivated organism with predicted taxonomy: Polaribacter sp. ALD11
  REGION 1..142: note = MG4-150 RuvC-III domain
NDTRYTSLLAARLLSTLYGGRDLAENGRKRQIIFASSGAVTATLRRNWGFEQILRNIIPPEPNESSGKPRTDHRHHAIDAIVIALTRNDVIQAMARASALEPWQPGTRSWRHVPQPWHTPNFFRSVEEQVREMLTSHRPEHK

SEQ ID NO: 2390 - protein, 142 aa, unidentified; identical to SEQ ID NO: 2376
  REGION 1..142: note = Description of Unknown: uncultivated organism with predicted taxonomy: Acidobacteriales
  REGION 1..142: note = MG4-151 RuvC-III domain

SEQ ID NO: 2391 - protein, 141 aa, unidentified; identical to SEQ ID NO: 2365
  REGION 1..141: note = Description of Unknown: uncultivated organism
  REGION 1..141: note = MG4-152 RuvC-III domain

SEQ ID NO: 2392 - protein, 140 aa, unidentified; identical to SEQ ID NO: 2356
  REGION 1..140: note = Description of Unknown: uncultivated organism
  REGION 1..140: note = MG4-153 RuvC-III domain

SEQ ID NO: 2393 - protein, 140 aa, unidentified
  REGION 1..140: note = Description of Unknown: uncultivated organism with predicted taxonomy: Acidobacteriales bacterium 59-55
  REGION 1..140: note = MG4-154 RuvC-III domain
NDTRYASVLAARFLGSLYGGRDVVDGDNARQVIFASSGAVTATLRSSWGLEAILHEIVPAESGESRGKPRTDHRHHAIDAITIALTRSKVIQSMARTASLEPWQIDSRAWRKIELPWRDFVPSIRPHIEQMLVSHRPEHK

SEQ ID NO: 2394 - protein, 127 aa, unidentified
  REGION 1..127: note = Description of Unknown: uncultivated organism with predicted taxonomy: Deltaproteobacteria
  REGION 1..127: note = MG4-155 RuvC-III domain
NDTRYASKLAARYMACLYGGLSDSCGQRIFVSPGQVTAFLRRLWAIEGLLSGGGGKSRDDHRHHAIDAVVVALTGPAWVKALSDAASRAREEGRRRFASLEAPWPGFAAAVQDRLQGLTVSHRANLK

SEQ ID NO: 2395 - protein, 131 aa, unidentified
  REGION 1..131: note = Description of Unknown: uncultivated organism with predicted taxonomy: Planctomycetes bacterium
  REGION 1..131: note = MG4-156 RuvC-III domain
NDTKYASLLAMEFLGQLYGGVCDERGIRRVNAVSGGVTAQIRKGWRLHSILRDGPSQGEAKPRDDHRHHAIDALVIAMTDAGAVQAVSRASERSRLDHRHGFRVDDPWNGFLEQVQAVIRAIRVSHRPDHH

SEQ ID NO: 2396 - protein, 140 aa, unidentified; identical to SEQ ID NO: 2356
  REGION 1..140: note = Description of Unknown: uncultivated organism
  REGION 1..140: note = MG4-157 RuvC-III domain

SEQ ID NO: 2397 - protein, 140 aa, unidentified; identical to SEQ ID NO: 2356
  REGION 1..140: note = Description of Unknown: uncultivated organism
  REGION 1..140: note = MG4-158 RuvC-III domain

SEQ ID NO: 2398 - protein, 140 aa, unidentified; identical to SEQ ID NO: 2356
  REGION 1..140: note = Description of Unknown: uncultivated organism with predicted taxonomy: Acidobacteriales bacterium 59-55
  REGION 1..140: note = MG4-159 RuvC-III domain

SEQ ID NO: 2399 - protein, 132 aa, unidentified; identical to SEQ ID NO: 2369
  REGION 1..132: note = Description of Unknown: uncultivated organism with predicted taxonomy: Planctomycetes
  REGION 1..132: note = MG4-160 RuvC-III domain

SEQ ID NO: 2400 - protein, 140 aa, unidentified; identical to SEQ ID NO: 2356
  REGION 1..140: note = Description of Unknown: uncultivated organism with predicted taxonomy: Acidobacteriales bacterium 59-55
  REGION 1..140: note = MG4-161 RuvC-III domain

SEQ ID NO: 2401 - protein, 141 aa, unidentified; identical to SEQ ID NO: 2262
  REGION 1..141: note = Description of Unknown: uncultivated organism
  REGION 1..141: note = MG4-162 RuvC-III domain

SEQ ID NO: 2402 - protein, 142 aa, unidentified
  REGION 1..142: note = Description of Unknown: uncultivated organism with predicted taxonomy: Acidobacteriales bacterium 59-55
  REGION 1..142: note = MG4-163 RuvC-III domain
NDTRYTSLLAARLLSTLYGGRDVAENGGKRQIIFASTGAVTATLRRNWGFEQILRNIIPPEPSESTGKPRTDHRHHAIDAIVIALTRNDVIQSMARASALEPWQPGTRSWRHVPQPWRTPDFFRSVEEQVREMLTSHRPEHK

SEQ ID NO: 2403 - protein, 141 aa, unidentified; identical to SEQ ID NO: 2365
  REGION 1..141: note = Description of Unknown: uncultivated organism
  REGION 1..141: note = MG4-164 RuvC-III domain

SEQ ID NO: 2404 - protein, 140 aa, unidentified; identical to SEQ ID NO: 2356
  REGION 1..140: note = Description of Unknown: uncultivated organism
  REGION 1..140: note = MG4-165 RuvC-III domain

SEQ ID NO: 2405 - protein, 140 aa, unidentified; identical to SEQ ID NO: 2393
  REGION 1..140: note = Description of Unknown: uncultivated organism with predicted taxonomy: Candidatus Sulfotelmatomonas gaucii
  REGION 1..140: note = MG4-166 RuvC-III domain

SEQ ID NO: 2406 - protein, 142 aa, unidentified; identical to SEQ ID NO: 2376
  REGION 1..142: note = Description of Unknown: uncultivated organism with predicted taxonomy: Acidobacteriales bacterium 59-55
  REGION 1..142: note = MG4-167 RuvC-III domain

SEQ ID NO: 2407 - protein, 141 aa, unidentified; identical to SEQ ID NO: 2365
  REGION 1..141: note = Description of Unknown: uncultivated organism
  REGION 1..141: note = MG4-168 RuvC-III domain

SEQ ID NO: 2408 - protein, 140 aa, unidentified; identical to SEQ ID NO: 2356
  REGION 1..140: note = Description of Unknown: uncultivated organism
  REGION 1..140: note = MG4-169 RuvC-III domain

SEQ ID NO: 2409 - protein, 141 aa, unidentified; identical to SEQ ID NO: 2365
  REGION 1..141: note = Description of Unknown: uncultivated organism
  REGION 1..141: note = MG4-170 RuvC-III domain

SEQ ID NO: 2410 - protein, 140 aa, unidentified; identical to SEQ ID NO: 2356
  REGION 1..140: note = Description of Unknown: uncultivated organism
  REGION 1..140: note = MG4-171 RuvC-III domain

SEQ ID NO: 2411 - protein, 140 aa, unidentified; identical to SEQ ID NO: 2356
  REGION 1..140: note = Description of Unknown: uncultivated organism
  REGION 1..140: note = MG4-172 RuvC-III domain

SEQ ID NO: 2412 - protein, 128 aa, unidentified
  REGION 1..128: note = Description of Unknown: uncultivated organism with predicted taxonomy: Ignavibacteriales bacterium CG_4_9_14_3_um_filter_30_11
  REGION 1..128: note = MG4-173 RuvC-III domain
QDTRYASKLACRYLGVLYGGTSDASGNQRVFASAGQVTAKLRRAWDLDRILSPDKPEKSRDDHRHHAIDALTVALSSTTLIRALATAAGEADRLFRRKIILPVPWVGFGEQARSAVENIQPSHRPMRK

SEQ ID NO: 2413 - protein, 78 aa, unidentified
  REGION 1..78: note = Description of Unknown: uncultivated organism with predicted taxonomy: uncultured bacterium
  REGION 1..78: note = MG4-174 RuvC-III domain
NDTRYASKLACELVGTLYGGRDVPLKDGKSRQVVFASSGMVTSTLRKGWGLEAILREAAPSANGQNRGKPRTDHRHHA

SEQ ID NO: 2414 - protein, 141 aa, unidentified; identical to SEQ ID NO: 2365
  REGION 1..141: note = Description of Unknown: uncultivated organism
  REGION 1..141: note = MG4-175 RuvC-III domain

SEQ ID NO: 2415 - protein, 140 aa, unidentified; identical to SEQ ID NO: 2356
  REGION 1..140: note = Description of Unknown: uncultivated organism with predicted taxonomy: Acidobacteriales bacterium 59-55
  REGION 1..140: note = MG4-176 RuvC-III domain

SEQ ID NO: 2416 - protein, 172 aa, unidentified
  REGION 1..172: note = Description of Unknown: uncultivated organism
  REGION 1..172: note = MG4-177 RuvC-III domain
NDTRYTSKLAGRLLMSLYGGRDIVPAETLDELDEFKDRTGRRAICVSSGMVTSLLRDAWHLNLSGVIGDDAFKCPKKSEDDEESGKRRKGQSNKKDRCDHRHHALDAVVIALTSEKVIREINMLASRLYRERQTPLKYRDLKSIQNPWHNFMDDHFRDIFRGMLVSHRPEHK

SEQ ID NO: 2417 - protein, 140 aa, unidentified; identical to SEQ ID NO: 2356
  REGION 1..140: note = Description of Unknown: uncultivated organism with predicted taxonomy: Acidobacteriales bacterium 59-55
  REGION 1..140: note = MG4-178 RuvC-III domain

SEQ ID NO: 2418 - protein, 142 aa, unidentified; identical to SEQ ID NO: 2368
  REGION 1..142: note = Description of Unknown: uncultivated organism with predicted taxonomy: Acidobacteria
  REGION 1..142: note = MG4-179 RuvC-III domain

SEQ ID NO: 2419 - protein, 140 aa, unidentified; identical to SEQ ID NO: 2361
  REGION 1..140: note = Description of Unknown: uncultivated organism
  REGION 1..140: note = MG4-180 RuvC-III domain

SEQ ID NO: 2420 - protein, 141 aa, unidentified; identical to SEQ ID NO: 2365
  REGION 1..141: note = Description of Unknown: uncultivated organism
  REGION 1..141: note = MG4-181 RuvC-III domain

SEQ ID NO: 2421 - protein, 140 aa, unidentified; identical to SEQ ID NO: 2356
  REGION 1..140: note = Description of Unknown: uncultivated organism
  REGION 1..140: note = MG4-182 RuvC-III domain

SEQ ID NO: 2422 - protein, 80 aa, unidentified
  REGION 1..80: note = Description of Unknown: uncultivated organism
  REGION 1..80: note = MG4-183 RuvC-III domain
NDTRYASKLACELVGTLYGGRDVPLKDGKSRQVVFASSGMVTSTLRKGWGLEAILREAAPSANGQNRGKPRTDHRHHAID

SEQ ID NO: 2423 - protein, 140 aa, unidentified; identical to SEQ ID NO: 2361
  REGION 1..140: note = Description of Unknown: uncultivated organism
  REGION 1..140: note = MG4-184 RuvC-III domain

SEQ ID NO: 2424 - protein, 140 aa, unidentified; identical to SEQ ID NO: 2356
  REGION 1..140: note = Description of Unknown: uncultivated organism
  REGION 1..140: note = MG4-185 RuvC-III domain

SEQ ID NO: 2425 - protein, 141 aa, unidentified; identical to SEQ ID NO: 2365
  REGION 1..141: note = Description of Unknown: uncultivated organism
  REGION 1..141: note = MG4-186 RuvC-III domain

SEQ ID NO: 2426 - protein, 92 aa, unidentified
  REGION 1..92: note = Description of Unknown: uncultivated organism with predicted taxonomy: Polaribacter sp. ALD11
  REGION 1..92: note = MG4-187 RuvC-III domain
NDTRYTSLLAARLLSTLYGGRDVAENGGKRQIIFASTGAVTATLRRNWGFEQILRNIIPPEPSESTGKPRTDHRHHAIDAIVIALTRNDVIQ

SEQ ID NO: 2427 - protein, 140 aa, unidentified; identical to SEQ ID NO: 2356
  REGION 1..140: note = Description of Unknown: uncultivated organism with predicted taxonomy: Acidobacteriales bacterium 59-55
  REGION 1..140: note = MG4-188 RuvC-III domain

SEQ ID NO: 2428 - protein, 142 aa, unidentified; identical to SEQ ID NO: 2368
  REGION 1..142: note = Description of Unknown: uncultivated organism with predicted taxonomy: Polaribacter sp. ALD11
  REGION 1..142: note = MG4-189 RuvC-III domain

SEQ ID NO: 2429 - protein, 140 aa, unidentified; identical to SEQ ID NO: 2361
  REGION 1..140: note = Description of Unknown: uncultivated organism
  REGION 1..140: note = MG4-190 RuvC-III domain

SEQ ID NO: 2430 - protein, 141 aa, unidentified; identical to SEQ ID NO: 2365
  REGION 1..141: note = Description of Unknown: uncultivated organism
  REGION 1..141: note = MG4-191 RuvC-III domain

SEQ ID NO: 2431 - protein, 140 aa, unidentified; identical to SEQ ID NO: 2356
  REGION 1..140: note = Description of Unknown: uncultivated organism
  REGION 1..140: note = MG4-192 RuvC-III domain

SEQ ID NO: 2432 - protein, 140 aa, unidentified; identical to SEQ ID NO: 2356
  REGION 1..140: note = Description of Unknown: uncultivated organism with predicted taxonomy: Acidobacteriales bacterium 59-55
  REGION 1..140: note = MG4-193 RuvC-III domain

SEQ ID NO: 2433 - protein, 141 aa, unidentified; identical to SEQ ID NO: 2365
  REGION 1..141: note = Description of Unknown: uncultivated organism
  REGION 1..141: note = MG4-194 RuvC-III domain

SEQ ID NO: 2434 - protein, 140 aa, unidentified; identical to SEQ ID NO: 2356
  REGION 1..140: note = Description of Unknown: uncultivated organism
  REGION 1..140: note = MG4-195 RuvC-III domain

SEQ ID NO: 2435 - protein, 142 aa, unidentified; identical to SEQ ID NO: 2368
  REGION 1..142: note = Description of Unknown: uncultivated organism with predicted taxonomy: Acidobacteriales bacterium 59-55
  REGION 1..142: note = MG4-196 RuvC-III domain

SEQ ID NO: 2436 - protein, 140 aa, unidentified; identical to SEQ ID NO: 2356
  REGION 1..140: note = Description of Unknown: uncultivated organism
  REGION 1..140: note = MG4-197 RuvC-III domain

SEQ ID NO: 2437 - protein, 131 aa, unidentified; identical to SEQ ID NO: 2395
  REGION 1..131: note = Description of Unknown: uncultivated organism
  REGION 1..131: note = MG4-198 RuvC-III domain

SEQ ID NO: 2438 - protein, 141 aa, unidentified; identical to SEQ ID NO: 2365
  REGION 1..141: note = Description of Unknown: uncultivated organism
  REGION 1..141: note = MG4-199 RuvC-III domain

SEQ ID NO: 2439 - protein, 141 aa, unidentified; identical to SEQ ID NO: 2365
  REGION 1..141: note = Description of Unknown: uncultivated organism
  REGION 1..141: note = MG4-200 RuvC-III domain

SEQ ID NO: 2440 - protein, 142 aa, unidentified; identical to SEQ ID NO: 2368
  REGION 1..142: note = Description of Unknown: uncultivated organism with predicted taxonomy: Acidobacteriales bacterium 59-55
  REGION 1..142: note = MG4-201 RuvC-III domain

SEQ ID NO: 2441 - protein, 140 aa, unidentified; identical to SEQ ID NO: 2356
  REGION 1..140: note = Description of Unknown: uncultivated organism with predicted taxonomy: Acidobacteriales bacterium 59-55
  REGION 1..140: note = MG4-202 RuvC-III domain

SEQ ID NO: 2442 - protein, 140 aa, unidentified; identical to SEQ ID NO: 2356
  REGION 1..140: note = Description of Unknown: uncultivated organism with predicted taxonomy: Acidobacteriales bacterium 59-55
  REGION 1..140: note = MG4-203 RuvC-III domain

SEQ ID NO: 2443 - protein, 140 aa, unidentified; identical to SEQ ID NO: 2356
  REGION 1..140: note = Description of Unknown: uncultivated organism with predicted taxonomy: Acidobacteriales bacterium 59-55
  REGION 1..140: note = MG4-204 RuvC-III domain

SEQ ID NO: 2444 - protein, 128 aa, unidentified
  REGION 1..128: note = Description of Unknown: uncultivated organism with predicted taxonomy: Acidobacteria
  REGION 1..128: note = MG4-205 RuvC-III domain
QDTRYASKLACRYLGVLYGGTIDASGKRRVFASAGQVTAKLRRAWDLDRILSPDKPEKCRDDHRHHAIDALTVALSSTTLIRELARAAGEADRLFRRKIILPVPWVGFGEQTRSAVERIQPSHRPMRK

SEQ ID NO: 2445 - protein, 140 aa, unidentified; identical to SEQ ID NO: 2356
  REGION 1..140: note = Description of Unknown: uncultivated organism
  REGION 1..140: note = MG4-206 RuvC-III domain

SEQ ID NO: 2446 - protein, 128 aa, unidentified; identical to SEQ ID NO: 2444
  REGION 1..128: note = Description of Unknown: uncultivated organism
  REGION 1..128: note = MG4-207 RuvC-III domain

SEQ ID NO: 2447 - protein, 140 aa, unidentified; identical to SEQ ID NO: 2361
  REGION 1..140: note = Description of Unknown: uncultivated organism
  REGION 1..140: note = MG4-208 RuvC-III domain

SEQ ID NO: 2448 - protein, 141 aa, unidentified; identical to SEQ ID NO: 2365
  REGION 1..141: note = Description of Unknown: uncultivated organism
  REGION 1..141: note = MG4-209 RuvC-III domain

SEQ ID NO: 2449 - protein, 167 aa, unidentified
  REGION 1..167: note = Description of Unknown: uncultivated organism with predicted taxonomy: candidate division Kazan bacterium
  REGION 1..167: note = MG4-210 RuvC-III domain
NDTRYTSKLAGRLLMSLYGGRDIVPAETLDELDEFKDRTGRRAICVSSGMVTSLLRDAWHLNLSGVIGDDAFKCPKKSEDDEESGKRRKGQSNKKDRCDHRHHALDAVVIALTSEKVIREINMLASRLYRERQTPLKYRDLKSIQNPWHNFMDDHFRDIFRGMLVSH

SEQ ID NO: 2450 - protein, 142 aa, unidentified; identical to SEQ ID NO: 2368
  REGION 1..142: note = Description of Unknown: uncultivated organism with predicted taxonomy: Acidobacteriales bacterium 59-55
  REGION 1..142: note = MG4-211 RuvC-III domain

SEQ ID NO: 2451 - protein, 140 aa, unidentified; identical to SEQ ID NO: 2361
  REGION 1..140: note = Description of Unknown: uncultivated organism
  REGION 1..140: note = MG4-212 RuvC-III domain

SEQ ID NO: 2452 - protein, 142 aa, unidentified; identical to SEQ ID NO: 2368
  REGION 1..142: note = Description of Unknown: uncultivated organism with predicted taxonomy: Polaribacter sp. ALD11
  REGION 1..142: note = MG4-213 RuvC-III domain

SEQ ID NO: 2453 - protein, 141 aa, unidentified; identical to SEQ ID NO: 2365
  REGION 1..141: note = Description of Unknown: uncultivated organism
  REGION 1..141: note = MG4-214 RuvC-III domain

SEQ ID NO: 2454 - protein, 172 aa, unidentified; identical to SEQ ID NO: 2416
  REGION 1..172: note = Description of Unknown: uncultivated organism
  REGION 1..172: note = MG4-215 RuvC-III domain

SEQ ID NO: 2455 - protein, 140 aa, unidentified; identical to SEQ ID NO: 2356
  REGION 1..140: note = Description of Unknown: uncultivated organism
  REGION 1..140: note = MG4-216 RuvC-III domain

SEQ ID NO: 2456 - protein, 80 aa, unidentified
  REGION 1..80: note = Description of Unknown: uncultivated organism with predicted taxonomy: candidate division Zixibacteria bacterium CG_4_9_14_3_um_filter_46_8
  REGION 1..80: note = MG4-217 RuvC-III domain
SDTRYASKLAMRYLALLYGGLSDEGGTQRIQAGSGNVTKHVRQAHRLNGILGDGPGKNRNDHRHHAVDALAIALTDQALV

SEQ ID NO: 2457 - protein, 128 aa, unidentified
  REGION 1..128: note = Description of Unknown: uncultivated organism with predicted taxonomy: Planctomicrobium piriforme
  REGION 1..128: note = MG4-218 RuvC-III domain
NDTRYATRQATDYLALLYGGLYEKGGKRFIQAAKGGTTAYLRNEWQLNSILGDGGTKSRDDHRHHAVDAVAIALTDAGTVKMLSDAAGRAAQEGRRRFGRVEDPWPGFLDDVRQAIEGLNVSHRVSRK

SEQ ID NO: 2458 - protein, 140 aa, unidentified; identical to SEQ ID NO: 2393
  REGION 1..140: note = Description of Unknown: uncultivated organism with predicted taxonomy: Candidatus Sulfotelmatomonas gaucii
  REGION 1..140: note = MG4-219 RuvC-III domain

SEQ ID NO: 2459 - protein, 135 aa, unidentified
  REGION 1..135: note = Description of Unknown: uncultivated organism with predicted taxonomy: Proteobacteria
  REGION 1..135: note = MG4-220 RuvC-III domain
NDTRYASTMAGDYLGFLYGGKIDSQRNLRVRATTGQVTAYLRDEWMLNRILRDGPTEQGGKVAKSREDHRHHAVDAIAIALTDESTIQQLSRAAQQAPQLGRRRFAPVQAPWPDFVDSVRAEIGRIVVSHRPNRK

SEQ ID NO: 2460 - protein, 142 aa, unidentified; identical to SEQ ID NO: 2368
  REGION 1..142: note = Description of Unknown: uncultivated organism with predicted taxonomy: Acidobacteriales bacterium 59-55
  REGION 1..142: note = MG4-221 RuvC-III domain

SEQ ID NO: 2461 - protein, 140 aa, unidentified; identical to SEQ ID NO: 2356
  REGION 1..140: note = Description of Unknown: uncultivated organism
  REGION 1..140: note = MG4-222 RuvC-III domain

SEQ ID NO: 2462 - protein, 141 aa, unidentified; identical to SEQ ID NO: 2365
  REGION 1..141: note = Description of Unknown: uncultivated organism
  REGION 1..141: note = MG4-223 RuvC-III domain

SEQ ID NO: 2463 - protein, 140 aa, unidentified; identical to SEQ ID NO: 2361
  REGION 1..140: note = Description of Unknown: uncultivated organism
  REGION 1..140: note = MG4-224 RuvC-III domain

SEQ ID NO: 2464 - protein, 172 aa, unidentified
  REGION 1..172: note = Description of Unknown: uncultivated organism
  REGION 1..172: note = MG4-225 RuvC-III domain
NDTLYTSKLAGRLLMSLYGGRDIVPAETLDELDEFKDRTGRRAICVSSGMVTSLLRDAWHLNLSGVIGDDAFKCPKKSEDDEESGKRRKGQSNKKDRCDHRHHALDAVVIALTSEKVIREINMLASRLYRERQTPLKYRDLKSIQNPWHNFMDDHFRDIFRGMLVSHRPEHK

SEQ ID NO: 2465 - protein, 92 aa, unidentified; identical to SEQ ID NO: 2426
  REGION 1..92: note = Description of Unknown: uncultivated organism with predicted taxonomy: Polaribacter sp. ALD11
  REGION 1..92: note = MG4-226 RuvC-III domain

SEQ ID NO: 2466 - protein, 141 aa, unidentified; identical to SEQ ID NO: 2365
  REGION 1..141: note = Description of Unknown: uncultivated organism
  REGION 1..141: note = MG4-227 RuvC-III domain

SEQ ID NO: 2467 - protein, 130 aa, unidentified
  REGION 1..130: note = Description of Unknown: uncultivated organism
  REGION 1..130: note = MG4-247 RuvC-III domain
PDTAYASRLAVEYLGRLYGGRGGVDADGNRRVQAGRGQVTAYLRNEWGLNKILNDGGEKSRDDHRHHAVDAICVALTDAGTVKMLSDAASRATIERRRRFGKVNPPWPTFLDDVRKSIEGLIVSHRVSRK

SEQ ID NO: 2468 - protein, 130 aa, unidentified; identical to SEQ ID NO: 2467
  REGION 1..130: note = Description of Unknown: uncultivated organism with predicted taxonomy: Planctomycetes
  REGION 1..130: note = MG4-248 RuvC-III domain

SEQ ID NO: 2469 - protein, 135 aa, unidentified
  REGION 1..135: note = Description of Unknown: uncultivated organism with predicted taxonomy: Fuerstia marisgermanicae
  REGION 1..135: note = MG4-249 RuvC-III domain
QDTAYASKLAKRYLGLLYGGEIDNLGKRRVTATSGMVTWDLRGGWDLNGILNDGRTSNGSTVVKTRDDHRHHAVDAVVIALTDDRSIQQLNKAAAMGQMQGKRGIIKLPSTWNNFVDTVRAEIGRIIVSHRVSKK

SEQ ID NO: 2470 - protein, 134 aa, unidentified
  REGION 1..134: note = Description of Unknown: uncultivated organism
  REGION 1..134: note = MG4-250 RuvC-III domain
NDTAYASKLACQYLGVLYGGVEDSTGKKRVKASSGGVTGYLRRLWNLNRILNDGPTKSGGFIPKTRDDHRHHAVDAVVIGLTDESVVHKLSRAAERGFYRGRPFAPLEGLWPNFVPSIKTEIDRVVVSHRVSKK

SEQ ID NO: 2471 - protein, 126 aa, unidentified
  REGION 1..126: note = Description of Unknown: uncultivated organism
  REGION 1..126: note = MG4-251 RuvC-III domain
NDTRYASRLAVKYLGMLYGGVIDAAGKQRVFATTGGATAIVRRAWGANFLLGEGEKVRDDHRHHAIDALTIALTTPDIVKIIAGMPEELRRAKGKTPDDTIIDNAVFKQAKEMLDKAAVSHHIVNK

SEQ ID NO: 2472 - protein, 125 aa, unidentified
  REGION 1..125: note = Description of Unknown: uncultivated organism with predicted taxonomy: Bdellovibrio exovorus
  REGION 1..125: note = MG4-252 RuvC-III domain
NDTRYASRLAMNYLGLLYGGAIDRNGKRRIQACSGGCTALIRRAWGANYLLGDGEKKREDHRHHAIDALTIAIITPEIVKTVANISKDEYKRRHMQNLPMLDDALYLQAEGKIDSATVSHHVVNK

SEQ ID NO: 2473 - protein, 126 aa, unidentified; identical to SEQ ID NO: 2471
  REGION 1..126: note = Description of Unknown: uncultivated organism
  REGION 1..126: note = MG4-253 RuvC-III domain

SEQ ID NO: 2474 - protein, 126 aa, unidentified
  REGION 1..126: note = Description of Unknown: uncultivated organism
  REGION 1..126: note = MG4-254 RuvC-III domain
NDTRYASRLAMQYLALLYGGIIDKTGKQRIFATSGSCTAMIRRAWGGNYLLGEGEKVRDDHRHHAIDALTIALTTPEMIKVIASMTREERSRKQKSCNDTIIDNEIFRQASADLDNIPVSHHVVNK

SEQ ID NO: 2475 - protein, 126 aa, unidentified; identical to SEQ ID NO: 2471
  REGION 1..126: note = Description of Unknown: uncultivated organism
  REGION 1..126: note = MG4-255 RuvC-III domain

SEQ ID NO: 2476 - protein, 126 aa, unidentified; identical to SEQ ID NO: 2471
  REGION 1..126: note = Description of Unknown: uncultivated organism
  REGION 1..126: note = MG4-256 RuvC-III domain

SEQ ID NO: 2477 - protein, 144 aa, unidentified
  REGION 1..144: note = Description of Unknown: uncultivated organism with predicted taxonomy: Planctomycetes
  REGION 1..144: note = MG4-257 RuvC-III domain
NDTKFASREAGDYLGLLYGGRVDADGNTRVQMTKGGITSELRNALQLGSIPSQVEDWICDPEEKRGKDRGDHRHHAIDAIAIALSSPGIIKPLMGAYSSSETAKKEMRRDIWASFAKKAAWPGFSDNVVEAVNSISISRRPKHR

SEQ ID NO: 2478 - protein, 145 aa, unidentified
  REGION 1..145: note = Description of Unknown: uncultivated organism
  REGION 1..145: note = MG4-258 RuvC-III domain
NDTRYVSKLAARYVGMLYGGRDVPQPDGAAKRVVFASTGMLTASLRRTWGLEAILREPEPAETSRKPGKQRTDNRHHAIDAIVIALTSNAVIQKASSVAATGSYGDAARAISRVQPPWGDFVGDFVDSIRPAIERMVVSHRPSHK

SEQ ID NO: 2479 - protein, 142 aa, unidentified
  REGION 1..142: note = Description of Unknown: uncultivated organism with predicted taxonomy: Acidobacteria
  REGION 1..142: note = MG4-259 RuvC-III domain
NDTRYTTRLAADLLGSLYGGRDETLPDGAKRRAIFATTGQVTATLRRVWNLESILREALPSANGESKGKPRTDHRHHAIDAIVVALTSQRTVQLLSMAAAQSVAGESRSRVFTGIQSPWPNFVDSIRPHIEQMIVSHRPEHK

SEQ ID NO: 2480 - protein, 141 aa, unidentified
  REGION 1..141: note = Description of Unknown: uncultivated organism with predicted taxonomy: Planctomycetes bacterium
  REGION 1..141: note = MG4-260 RuvC-III domain
NDTRYASKLACELVGSLFGGRDAQTENGSRQIVFASSGMVTATLRKGWGLEAILREAAPSANGQNRGKPRTDHRHHAIDAITIALSRPKMIATLSRNNAQDPYWPQNGRTAPRIQSPWKDFVGSIRPHFEQMLVSHRPEHR

SEQ ID NO: 2481 - protein, 125 aa, unidentified
  REGION 1..125: note = Description of Unknown: uncultivated organism
  REGION 1..125: note = MG4-261 RuvC-III domain
NDTRYASKLSMRYLAFLYGGIVDKNSIRRIFSVAGGCTALIRRAWGGNYLLGEGEKVRDDHRHHAIDAVTVALTTPELVQKIAKLSQEGRRKLNDSTKNFIDNDFYYQAQGMMDSCAVSHHQTNK

SEQ ID NO: 2482 - protein, 115 aa, unidentified
  REGION 1..115: note = Description of Unknown: uncultivated organism with predicted taxonomy: Planctomycetes
  REGION 1..115: note = MG6-7 RuvC-III domain
NDTRYITREILRYLKQLGCTVTGSRGKVTSELRHQWGLNSILESDLPGPKNREDHRHHAIDAVVTALTNQKHLHELAATKYAVAHDGFPVPWEGFRDAVAQAVNKIQVSHRVTRK

SEQ ID NO: 2483 - protein, 115 aa, unidentified
  REGION 1..115: note = Description of Unknown: uncultivated organism with predicted taxonomy: Planctomycetes bacterium
  REGION 1..115: note = MG6-8 RuvC-III domain
NDTRYISREVVKYLKQLGCIVTGTKGQITSELRHQWGLNNILDYTGAGLKNRDDHRHHAVDAVVTAVTEQKHLGGLAASKYDKSGIEFDPPWEGFREQVAEKINAINVSHRVTRK

SEQ ID NO: 2484 - protein, 115 aa, unidentified
  REGION 1..115: note = Description of Unknown: uncultivated organism
  REGION 1..115: note = MG6-9 RuvC-III domain
NDTRYICKEVVKYLKQLGVNVRGSKGRVTAELRHQWGLNSILDLNNSNMKNRDDHRHHAIDAVVTAVTKNEHLRRLAKSKYSKTDSSFSEPWEDFREELAEKVKHINVSHRVRRK

SEQ ID NO: 2485 - protein, 117 aa, unidentified
  REGION 1..117: note = Description of Unknown: uncultivated organism with predicted taxonomy: Planctomycetes bacterium
  REGION 1..117: note = MG6-10 RuvC-III domain
NDTRYICREAVRYLKQICSNVKGTRGKITSELRHQWGLNSILNLTDPNMKNRDDHRHHAIDAAVVAVTRNKHLRELAESKYAKTGSGVKFEAPWKDFREELAEKIKHINVSHRVTRK

SEQ ID NO: 2486 - protein, 115 aa, unidentified; identical to SEQ ID NO: 2483
  REGION 1..115: note = Description of Unknown: uncultivated organism with predicted taxonomy: Planctomycetes bacterium
  REGION 1..115: note = MG6-11 RuvC-III domain

SEQ ID NO: 2487 - protein, 115 aa, unidentified; identical to SEQ ID NO: 2484
  REGION 1..115: note = Description of Unknown: uncultivated organism
  REGION 1..115: note = MG6-12 RuvC-III domain

SEQ ID NO: 2488 - protein, 117 aa, unidentified; identical to SEQ ID NO: 2485
  REGION 1..117: note = Description of Unknown: uncultivated organism with predicted taxonomy: Planctomycetes bacterium
  REGION 1..117: note = MG6-13 RuvC-III domain

SEQ ID NO: 2489 - protein, 126 aa, unidentified
  REGION 1..126: note = Description of Unknown: uncultivated organism
  REGION 1..126: note = MG6-20 RuvC-III domain
NDTAYIAREVRQYLKCLYSEEELVRDESVVCTRGQVTSDLCWCWELNSILNPDDQRETKNRADLRHHAIDAIVVALTTRQRLFALSQVFAKKHSLAKAKHEPWPHFREDVENAVLAIKVSHRPRKR

SEQ ID NO: 2490 - protein, 159 aa, unidentified
  REGION 1..159: note = Description of Unknown: uncultivated organism with predicted taxonomy: Arcicella aurantiaca
  REGION 1..159: note = MG7-2 RuvC-III domain
NETQYITKQVKAELDKICRTITVTSGGITDYLRHQWGVDDVLKNINLEKYEAAGKVSDEDYRDRQGHWRTRKKIADWSKRDDHRHHAIDALVIACTKPAYIKRLNDLNQEYDSYKEMKKDGGKMESLTKFPQPKMKGGFIQNVTKATENILISFKAGKK

SEQ ID NO: 2491 - protein, 95 aa, unidentified
  REGION 1..95: note = Description of Unknown: uncultivated organism with predicted taxonomy: Flavobacteriales
  REGION 1..95: note = MG7-5 RuvC-III domain
KETQYITKQVKAELDKICRKITVTSGGITDYLRHQWGVDDVLKNINLEKYEAAGKVHDEEYRDRQGHWRTRKKIADWSKREDHRHHAIDALGIAC

SEQ ID NO: 2492 - protein, 88 aa, unidentified
  REGION 1..88: note = Description of Unknown: uncultivated organism with predicted taxonomy: Arcicella aurantiaca
  REGION 1..88: note = MG7-6 RuvC-III domain
NETQYITKQVKAELDKICKKITVTSGGITDYLRHQWGVDDVLKNINLEKYEAAEKVHDEEYRDRQGHWRTRKKIADWSKRDDHRHHAI

SEQ ID NO: 2493 - protein, 156 aa, unidentified
  REGION 1..156: note = Description of Unknown: uncultivated organism
  REGION 1..156: note = MG7-9 RuvC-III domain
RESQYIARKAVEVLREVCRNVYTTTGSITDFLRHRWGWDEVIPYLRLPQFKEAGLTEIIPVQNGQKTKEVIKGWSKRDDHRHHALDALVVACTRQSHIQRINELSPILAGTYGEERRQQLLDIVRDKYIAGKIPFSFRQVCEAMNQVLVSHKQRTR

SEQ ID NO: 2494 - protein, 158 aa, unidentified
  REGION 1..158: note = Description of Unknown: uncultivated organism with predicted taxonomy: Bacteroidetes
  REGION 1..158: note = MG7-10 RuvC-III domain
RETQYIAKKAVEMLRQVCREVRSTTGSITDFLRHQWGWDEVIKELRLPQFRQAGEDLIEYRPAANGGRDRVVIKDWDKRKDHRHHALDALVVAFTRVSHIQRVTKLNQIMSGKFGEERRKELLRTGRDLYIAGKAPFTFAQVSKAIANILISFKQGLR

SEQ ID NO: 2495 - protein, 150 aa, unidentified
  REGION 1..150: note = Description of Unknown: uncultivated organism with predicted taxonomy: Bacteroidetes
  REGION 1..150: note = MG7-11 RuvC-III domain
RETAYISREVKNLLLGICRNVHSTSGTVTNYLRHIWGLDSILQELNIEKYRACGQTVKEIIGSNGSTKENERIVNWSKRDDHRHHAIDAIVIALTKQSHIQKLNNLNQEFQNYRELKQSAYNFPLPWATVHSDVLRTVSNILVSFKSGKK

SEQ ID NO: 2496 - protein, 158 aa, unidentified; identical to SEQ ID NO: 2494
  REGION 1..158: note = Description of Unknown: uncultivated organism with predicted taxonomy: Bacteroidetes
  REGION 1..158: note = MG7-12 RuvC-III domain

SEQ ID NO: 2497 - protein, 148 aa, unidentified
  REGION 1..148: note = Description of Unknown: uncultivated organism with predicted taxonomy: Deltaproteobacteria bacterium
  REGION 1..148: note = MG7-13 RuvC-III domain
KETQYITKVVREKLWEVSHEVRTTTGAITGFLRHEWGLSNLLHDLNFPKYEAQGLVEEWVDEETGEVIKRIEDWSKRMDHRHHALDALVVALTRPAHVHYLNNLNKQFGNLARENGWRTPLRSPVTNLYQKARAAMEPILVKHQKKSR

SEQ ID NO: 2498 - protein, 148 aa, unidentified
  REGION 1..148: note = Description of Unknown: uncultivated organism with predicted taxonomy: Deltaproteobacteria bacterium
  REGION 1..148: note = MG7-14 RuvC-III domain
KETQYITKVVREKLREVSHEVRTTTGAITGFLRHEWGLSNLLHDLNFPKYEAQGLVEEWVDEETGEVIKRIEDWSKRMDHRHHALDALVVALTRPAHVHYLNNLNKQFGNLARENGWRTPLRSPVTNLYQKARAAMEPILVKHQKKSR

SEQ ID NO: 2499 - protein, 137 aa, unidentified
  REGION 1..137: note = Description of Unknown: uncultivated organism with predicted taxonomy: Collinsella
  REGION 1..137: note = MG14-1 RuvC-III domain
TDTAYMSREVCAYLADCLLFPDDGAKAHVVPTTGRATAWLRRRWGLNFGSNGEKDRSDDRHHATDACVIAACSPSLVIKTARINQETHWSITRGMNETQRRDAIMKALESVMPWETFANEVRAAHDFVVPTRFVPRK

SEQ ID NO: 2500 - protein, 126 aa, unidentified
  REGION 1..126: note = Description of Unknown: uncultivated organism
  REGION 1..126: note = MG14-3 RuvC-III domain
NDTRYMSRAVAKWLDGCLPFPDDGHRHVFAVSGGATAMLRRAWDIAILDEEGKKDRDDDRHHAIDAALIAACTPSIVMKVAKANEMWQSDAERESLFLGSMPFPDFKQKVEAWIPCIVPTLYLPRN

SEQ ID NO: 2501 - protein, 137 aa, unidentified
  REGION 1..137: note = Description of Unknown: uncultivated organism with predicted taxonomy: Coriobacteriales
  REGION 1..137: note = MG14-4 RuvC-III domain
TDTAYMSREVCSYLSDCLLFPEDGSKVHVVPTTGRATAWLRRRWGLNFGSTGEKDRTDDRHHATDACVIAACSRSLVIKTAKISQETHWSVTPGLTESQRKDARMKALESVMPWETFANEVRSRHDFVVPTRFVPRK

SEQ ID NO: 2502 - protein, 137 aa, unidentified; identical to SEQ ID NO: 2501
  REGION 1..137: note = Description of Unknown: uncultivated organism with predicted taxonomy: Actinobacteria
  REGION 1..137: note = MG14-5 RuvC-III domain

SEQ ID NO: 2503 - protein, 126 aa, unidentified; identical to SEQ ID NO: 2500
  REGION 1..126: note = Description of Unknown: uncultivated organism with predicted taxonomy: Collinsella
  REGION 1..126: note = MG14-6 RuvC-III domain

SEQ ID NO: 2504 - protein, 137 aa, unidentified
  REGION 1..137: note = Description of Unknown: uncultivated organism with predicted taxonomy: Collinsella
  REGION 1..137: note = MG14-7 RuvC-III domain
TDTAYMSREVCAYLADCLLFPDDGAKAHVVPTTGRTTAWLRRRWGLNFGLTGKKDRSDDRHHATDACVIAACSPSLVIKSAQINQKMHWSMTKGMSKAQRQDAIMKALENVMPWETFANEVRTVHKLIIPTRFVPRK

SEQ ID NO: 2505 - protein, 128 aa, unidentified
  REGION 1..128: note = Description of Unknown: uncultivated organism with predicted taxonomy: Olsenella
  REGION 1..128: note = MG14-8 RuvC-III domain
NDDRYMSVAVKNYLEDCLLFPEDGRKRHVTAVAGGATGNLRWVWGLNFGEGNIKDRADDRHHAIDAAIIAACSESTVKKVAEASAKGREAFKQLRKSRLADTQPWPTFATEVAARREFVVPTRMADHG

SEQ ID NO: 2506 - protein, 128 aa, unidentified
  REGION 1..128: note = Description of Unknown: uncultivated organism with predicted taxonomy: Olsenella sp. KH3B4
  REGION 1..128: note = MG14-9 RuvC-III domain
NDDRYMSVAVKNYLEDCLLFPEDGRKRHVIAVAGGATGNLRWVWGLNFGDGNVKDRTDDRHHAVDAAIIAACSESTVKKIAEASSKGREAFKKQRESRLADTQPWPTFADEVKARRAFVVPTRMADHG

SEQ ID NO: 2507 - protein, 137 aa, unidentified
  REGION 1..137: note = Description of Unknown: uncultivated organism with predicted taxonomy: Collinsella
  REGION 1..137: note = MG14-10 RuvC-III domain
TDTAYMSREVCAYLADCLLFPEDGTKSHVVPTTGRATAWLRRRWGLNFGTNGEKDRSDDRHHATDACVIAACSRSLVIKTAHISEQTHWTVTKNLDKDERNRLRMKALENVMPWETFANEVRASHDFVIPTRFVPRK

SEQ ID NO: 2508 - protein, 103 aa, unidentified
  REGION 1..103: note = Description of Unknown: uncultivated organism with predicted taxonomy: Collinsella sp. AF20-14LB
  REGION 1..103: note = MG14-11 RuvC-III domain
NDTRYMSKDVAKWLADCLPFPKDGRRHVFCVSGAATGLMRRVWRIGILDENGKKDREDDRHHAVDAAVIAACTPSVVKSIALISEEHATHRDADRLLNRSLPY

SEQ ID NO: 2509 - protein, 137 aa, unidentified
  REGION 1..137: note = Description of Unknown: uncultivated organism with predicted taxonomy: Collinsella
  REGION 1..137: note = MG14-12 RuvC-III domain
TDTAYMSREVCAYLADCLLFPDDGAKAHVVPTTGRATAWLRRRWGLNFGSNGEKDRSDDRHHATDACVIAACSRSLVIKTARINQETHWSITRGMNETQRHDAIMKALESVMPWETFANEVRAAHDFVVPTRFVPRK

SEQ ID NO: 2510 - protein, 137 aa, unidentified; identical to SEQ ID NO: 2509
  REGION 1..137: note = Description of Unknown: uncultivated organism with predicted taxonomy: Collinsella
  REGION 1..137: note = MG14-13 RuvC-III domain

SEQ ID NO: 2511 - protein, 128 aa, unidentified
  REGION 1..128: note = Description of Unknown: uncultivated organism with predicted taxonomy: Olsenella
  REGION 1..128: note = MG14-14 RuvC-III domain
NDDRYMSVAVKNYLEDCLLFPEDGRKRHVTAVAGGATGNLRWVWGLNFGEGNVKDRADDRHHAIDAAIIAACSESTVKKVAEASAKGREAFKQLRKSRLADTQPWPTFATEVAARREFVVPTRMADHG

SEQ ID NO: 2512 - protein, 137 aa, unidentified; identical to SEQ ID NO: 2509
  REGION 1..137: note = Description of Unknown: uncultivated organism with predicted taxonomy: Coriobacteriales
  REGION 1..137: note = MG14-15 RuvC-III domain

SEQ ID NO: 2513 - protein, 126 aa, unidentified
  REGION 1..126: note = Description of Unknown: uncultivated organism with predicted taxonomy: Eggerthellales
  REGION 1..126: note = MG14-16 RuvC-III domain
NDTRYMSAALAKWLRECLPFARDGHEHVFCVAGGATALMRSVWDIGITGPDGKKNRDDDRHHAVDAAVIACCTPGIVKNVALVNEGHARADVRQRLFSDSLPYPEFKEQVNAWIPCIVPTLTLPNT

SEQ ID NO: 2514 - protein, 137 aa, unidentified; identical to SEQ ID NO: 2509
  REGION 1..137: note = Description of Unknown: uncultivated organism with predicted taxonomy: Collinsella
  REGION 1..137: note = MG14-17 RuvC-III domain

SEQ ID NO: 2515 - protein, 128 aa, unidentified; identical to SEQ ID NO: 2505
  REGION 1..128: note = Description of Unknown: uncultivated organism with predicted taxonomy: Olsenella
  REGION 1..128: note = MG14-18 RuvC-III domain

SEQ ID NO: 2516 - protein, 137 aa, unidentified; identical to SEQ ID NO: 2509
  REGION 1..137: note = Description of Unknown: uncultivated organism with predicted taxonomy: Coriobacteriales
  REGION 1..137: note = MG14-19 RuvC-III domain

SEQ ID NO: 2517 - protein, 137 aa, unidentified; identical to SEQ ID NO: 2509
  REGION 1..137: note = Description of Unknown: uncultivated organism with predicted taxonomy: Coriobacteriales
  REGION 1..137: note = MG14-20 RuvC-III domain

SEQ ID NO: 2518 - protein, 128 aa, unidentified; identical to SEQ ID NO: 2505
  REGION 1..128: note = Description of Unknown: uncultivated organism with predicted taxonomy: Olsenella sp. KH3B4
  REGION 1..128: note = MG14-21 RuvC-III domain

SEQ ID NO: 2519 - protein, 137 aa, unidentified; identical to SEQ ID NO: 2509
  REGION 1..137: note = Description of Unknown: uncultivated organism with predicted taxonomy: Collinsella
  REGION 1..137: note = MG14-22 RuvC-III domain

SEQ ID NO: 2520 - protein, 137 aa, unidentified; identical to SEQ ID NO: 2509
  REGION 1..137: note = Description of Unknown: uncultivated organism with predicted taxonomy: Collinsella
  REGION 1..137: note = MG14-23 RuvC-III domain

SEQ ID NO: 2521 - protein, 137 aa, unidentified
  REGION 1..137: note = Description of Unknown: uncultivated organism with predicted taxonomy: Collinsella
  REGION 1..137: note = MG14-24 RuvC-III domain
TDTAYMSREVCAYLADCLLFPEDGTKSHVVPTTGRATAWLRRRWGLNFGTNGEKDRSDDRHHATDACVIAACSRSLVIKTAKISEQTHWTVTKNLDKDERDHLRMKALENVMPWETFANEVRASHDFVIPTRFVPRK

SEQ ID NO: 2522 - protein, 128 aa, unidentified
  REGION 1..128: note = Description of Unknown: uncultivated organism with predicted taxonomy: Olsenella
  REGION 1..128: note = MG14-25 RuvC-III domain
NDDRYMSVAVKNYLEDCLLFPEDGRKRHVTAVAGGATGNLRWVWGLNFGEGNVKDRADDRHHAIDAAIIAACSESTVKKIAEASSKGREAFKKQRESRLADTQPWPTFADEVKARRAFVVPTRMADHG

SEQ ID NO: 2523 - protein, 137 aa, unidentified; identical to SEQ ID NO: 2509
  REGION 1..137: note = Description of Unknown: uncultivated organism with predicted taxonomy: Coriobacteriia
  REGION 1..137: note = MG14-26 RuvC-III domain

SEQ ID NO: 2524 - protein, 137 aa, unidentified; identical to SEQ ID NO: 2509
  REGION 1..137: note = Description of Unknown: uncultivated organism with predicted taxonomy: Collinsella
  REGION 1..137: note = MG14-27 RuvC-III domain

SEQ ID NO: 2525 - protein, 126 aa, unidentified
  REGION 1..126: note = Description of Unknown: uncultivated organism with predicted taxonomy: Collinsella
  REGION 1..126: note = MG14-28 RuvC-III domain
NDTRYMSKDVAKWLTDCLPFPEDGRKHVFCVSGVATALMRGIWRIGILDDDGKKNREDDRHHAVDAAVIAACTPSIVRGIALISEEHATHRDADRLLNRSLPYPEYRDQVKAWIPCIVPTYSPNRT

SEQ ID NO: 2526 - protein, 137 aa, unidentified; identical to SEQ ID NO: 2509
  REGION 1..137: note = Description of Unknown: uncultivated organism with predicted taxonomy: Coriobacteriales
  REGION 1..137: note = MG14-29 RuvC-III domain

SEQ ID NO: 2527 - protein, 137 aa, unidentified; identical to SEQ ID NO: 2509
  REGION 1..137: note = Description of Unknown: uncultivated organism with predicted taxonomy: Collinsella
  REGION 1..137: note = MG14-30 RuvC-III domain

SEQ ID NO: 2528 - protein, 123 aa, unidentified
  REGION 1..123: note = Description of Unknown: uncultivated organism with predicted taxonomy: Coriobacteriia bacterium
  REGION 1..123: note = MG14-31 RuvC-III domain
NDTRYASLAAKRYIEEYLTFKDNGKSRHVIAVAGGATAALRNAWGIRKDRSEDNLHHAVDASIIAACDESTVIAIAKASERKALTPKDKRKELFSRTEPWQDFANEVLSRKEHIIPSFMTDHK

SEQ ID NO: 2529 - protein, 128 aa, unidentified
  REGION 1..128: note = Description of Unknown: uncultivated organism with predicted taxonomy: Olsenella sp. KH3B4
  REGION 1..128: note = MG14-32 RuvC-III domain
NDDRYMSVAVKNYLEDCLLFPEDGRKRHVTAVAGGATGNLRWVWGLNFGEGNVKDRADDRHHAIDAAIIAACSESTVKKVAEASTKGREAFKQLRKSRLADTQPWPTFATEVAARREFVVPTRMADHG

SEQ ID NO: 2530 - protein, 137 aa, unidentified; identical to SEQ ID NO: 2509
  REGION 1..137: note = Description of Unknown: uncultivated organism with predicted taxonomy: Collinsella
  REGION 1..137: note = MG14-33 RuvC-III domain

SEQ ID NO: 2531 - protein, 128 aa, unidentified; identical to SEQ ID NO: 2505
  REGION 1..128: note = Description of Unknown: uncultivated organism with predicted taxonomy: Olsenella
  REGION 1..128: note = MG14-34 RuvC-III domain

SEQ ID NO: 2532 - protein, 128 aa, unidentified
  REGION 1..128: note = Description of Unknown: uncultivated organism with predicted taxonomy: Olsenella sp. KH3B4
  REGION 1..128: note = MG14-35 RuvC-III domain
NDDRYMSVAVKNYLEDCLLFPDSDRKRHVTAIAGGATGNLRWVWGLNSGSNNTKDRSDDRHHAVDAAVIAACSEATVQKVARARSLGRETFKHMRKSRLADTQPWPTFADEVIARKEFVIPTRMADHG

SEQ ID NO: 2533 - protein, 137 aa, unidentified
  REGION 1..137: note = Description of Unknown: uncultivated organism with predicted taxonomy: Coriobacteriales
  REGION 1..137: note = MG14-36 RuvC-III domain
TDTAYMSREVCAYLADCLLFPDDGAKAHVVPTTGRATAWLRRRWGLNFGSNGEKDRSDDRHHATDACVIAACSRSLVIKTARINQETHWSITRGMNETQRRDAIMKALESVMPWETFANEVRAAHDFVVPTRFVPRK

SEQ ID NO: 2534 - protein, 126 aa, unidentified
  REGION 1..126: note = Description of Unknown: uncultivated organism with predicted taxonomy: Coprococcus comes
  REGION 1..126: note = MG14-37 RuvC-III domain
NDTRYMSRQLAMWVRECLPFPDDRRQHVFCVAGAATSLMRRIWGIGIVDEKGKKDRSDDRHHAVDAAVIACCSPEIVKGIARVNSGRSNIKERERLRYESMPYPEFKAQVEAWIPCIVPTRTVSRT

SEQ ID NO: 2535 - protein, 137 aa, unidentified
  REGION 1..137: note = Description of Unknown: uncultivated organism with predicted taxonomy: Coriobacteriia bacterium
  REGION 1..137: note = MG14-38 RuvC-III domain
TDTAYMSREVCAYLADCLLFPDDGAKAHVVPTTGRATAWLRRRWGLNFGSNGEKDRSDDRHHATDACVIAACSRRLVIKTARINQEMHWSMTKGMSKAQRQDAIMKALENVMPWETFANEVRVAHDFVVPTRFVPRK

SEQ ID NO: 2536 - protein, 137 aa, unidentified; identical to SEQ ID NO: 2533
  REGION 1..137: note = Description of Unknown: uncultivated organism with predicted taxonomy: Collinsella
  REGION 1..137: note = MG14-39 RuvC-III domain

SEQ ID NO: 2537 - protein, 126 aa, unidentified
  REGION 1..126: note = Description of Unknown: uncultivated organism
  REGION 1..126: note = MG14-40 RuvC-III domain
NDTRYMSRQLAMWVRECLPFPDDKRQHVFCVAGAATSLMRRIWGIGVVDEKGKTDRSDDRHHAVDGAVIACCSPEIVKGIARVNSGRSNIKERERLRYESMPYPEFKDQVEAWIPCIVPTRTVSRT

SEQ ID NO: 2538 - protein, 137 aa, unidentified
  REGION 1..137: note = Description of Unknown: uncultivated organism with predicted taxonomy: Collinsella
  REGION 1..137: note = MG14-41 RuvC-III domain
TDTAYMSREVCAYLADCLQFPDDGAKAHVVPTTGRATAWLRRRWGLNFGSNGEKDRSDDRHHATDACVIAACSRSLVIKTARLNQETHWSITRGMNEIQRHDAIMKALESVMPWETFANEVRAAHDFVVPTRFVPRK

SEQ ID NO: 2539 - protein, 137 aa, unidentified; identical to SEQ ID NO: 2533
  REGION 1..137: note = Description of Unknown: uncultivated organism with predicted taxonomy: Collinsella
  REGION 1..137: note = MG14-42 RuvC-III domain

SEQ ID NO: 2540 - protein, 137 aa, unidentified
  REGION 1..137: note = Description of Unknown: uncultivated organism with predicted taxonomy: Collinsella
  REGION 1..137: note = MG14-43 RuvC-III domain
TDTAYMSREVCAYLADCLLFPDDGAKAHVVPTTGRATAWLRRRWGLNFGSNGEKDRSDDRHHATDACVIAACSRSLVIKTARINQETHWSITRGMDETQRRDAIMKALESVMPWETFANEVRAAHDFVVPTRFVPRK

SEQ ID NO: 2541 - protein, 137 aa, unidentified
  REGION 1..137: note = Description of Unknown: uncultivated organism with predicted taxonomy: Olsenella mediterranea
  REGION 1..137: note = MG14-44 RuvC-III domain
TDTAYMSREVCAYLADCLQFPDDGAKAHVVPTTGRATAWLRRRWGLNFGSNGEKDRSDDRHHATDACVIAACSRSLVIKTARINQETHWSITRGMNETQRHDAIMKALESVMPWETFANEVRAAHDFVVPTRFVPRK

SEQ ID NO: 2542 - protein, 137 aa, unidentified; identical to SEQ ID NO: 2538
  REGION 1..137: note = Description of Unknown: uncultivated organism with predicted taxonomy: Collinsella
  REGION 1..137: note = MG14-45 RuvC-III domain

SEQ ID NO: 2543 - protein, 137 aa, unidentified; identical to SEQ ID NO: 2533
  REGION 1..137: note = Description of Unknown: uncultivated organism with predicted taxonomy: Collinsella
  REGION 1..137: note = MG14-46 RuvC-III domain

SEQ ID NO: 2544 - protein, 126 aa, unidentified
  REGION 1..126: note = Description of Unknown: uncultivated organism with predicted taxonomy: Collinsella sp. AM13-34
  REGION 1..126: note = MG14-47 RuvC-III domain
NDTRYMSVALAKWLRECLPFARDGHEHVFRVAGGATALMRSVWDIGITGPDGKKNRDDDRHHAVDAAVISCCTPGIVKNVALVNEGHARADVRQRLFRDSLPYPEFKEQVNAWIPCIVPTLTLPNT

SEQ ID NO: 2545 - protein, 137 aa, unidentified
  REGION 1..137: note = Description of Unknown: uncultivated organism with predicted taxonomy: Collinsella
  REGION 1..137: note = MG14-48 RuvC-III domain
TDTAYMSREVCAYLADCLLFPDDGAKAHVVPTTGRATAWLRRRWGLNFGSNGEKDRSDDRHHATDACVIAACSRSLVIKTARINQETHRSITRGMNETQRRDAIMKALESVMPWETFANEVRAAHDFVVPTRFVPRK

SEQ ID NO: 2546 - protein, 126 aa, unidentified
  REGION 1..126: note = Description of Unknown: uncultivated organism with predicted taxonomy: Collinsella sp. AF20-14LB
  REGION 1..126: note = MG14-49 RuvC-III domain
NDTRYMSRQLAMWVRECLPFPDDKRQHVFCVAGAATSLMRRIWGIGIVDEKGKKDRSDDRHHAVDAAVIACCSPEIVKGIARVNSGRSNIKERERLRYESMPYPEFKAQVEAWIPCIVPTRTVSRT

SEQ ID NO: 2547 - protein, 128 aa, unidentified
  REGION 1..128: note = Description of Unknown: uncultivated organism with predicted taxonomy: Libanicoccus massiliensis
  REGION 1..128: note = MG14-50 RuvC-III domain
NDTRYMSRAVKSYLEDCLIFPKGKREKHVTAVAGGATGNLRWVWGLNFGAHGEKNRKDDRHHAVDAAVIAACNESAVMKVAKTTSMGREQFRKERKARLSNTQPWPTFADEVAAIRELVIPTRMVSHG

SEQ ID NO: 2548 - protein, 137 aa, unidentified; identical to SEQ ID NO: 2533
  REGION 1..137: note = Description of Unknown: uncultivated organism with predicted taxonomy: Collinsella
  REGION 1..137: note = MG14-51 RuvC-III domain

SEQ ID NO: 2549 - protein, 137 aa, unidentified
  REGION 1..137: note = Description of Unknown: uncultivated organism with predicted taxonomy: Collinsella
  REGION 1..137: note = MG14-52 RuvC-III domain
TDTAYMSREVCAYLADCLLFPDDGAKAHVVPTTGRATAWLRRRWGLNFGLTGEKDRSDDRHHATDACVIAACSPSLVIKTAQINQKMHWSMTKGMSKAQRQDAIMKALENVMPWETFANEVRAVHKLIIPTRLVPRK

SEQ ID NO: 2550 - protein, 128 aa, unidentified
  REGION 1..128: note = Description of Unknown: uncultivated organism with predicted taxonomy: Olsenella sp. KH3B4
  REGION 1..128: note = MG14-53 RuvC-III domain
NDDRYMSVAVKNYLEDCLLFPEDGRKRHVTAVAGGATGNLRWVWGLNFGSGNVKDRDDDRHHAVDAAIIAACSEGTVQKVAKASSKGREAFKHLRESRLADTQPWPTFADEVIARREFVVPTRMVDHG

SEQ ID NO: 2551 - protein, 128 aa, unidentified
  REGION 1..128: note = Description of Unknown: uncultivated organism with predicted taxonomy: Olsenella sp. KH3B4
  REGION 1..128: note = MG14-54 RuvC-III domain
NDDRYMSVAVKNFLEDRLLFPEDGRKRHVTAVAGGATGNLRWVWGLNFGEGNIKDRTDDRHHAVDAAIIAACSESTVKKVAKASAKAREAFKQLRKSRLADTQPWPTFAAEVAARREFVVPTRMADHG

SEQ ID NO: 2552 - protein, 126 aa, unidentified
  REGION 1..126: note = Description of Unknown: uncultivated organism with predicted taxonomy: Collinsella
  REGION 1..126: note = MG14-55 RuvC-III domain
NDTRYMSKDVAKWLADCLPFPEDGRKHVFCVSGAATAFMRGIWRIGILDDVGKKNREDDRHYAVDAAVIAACTSSIVKGIALISEEHATNRDADRLLDGSLPYPEYRDQVKAWIPCIVPTYSPTRT

SEQ ID NO: 2553 - protein, 137 aa, unidentified
  REGION 1..137: note = Description of Unknown: uncultivated organism with predicted taxonomy: Collinsella
  REGION 1..137: note = MG14-56 RuvC-III domain
TDTAYMSREVCAYLADCLLFPNDGAKAHVVPTTGRATAWLRRRWGLNFGLTGEKDRSDDRHHATDACVIAACSPSLVIKTAQINQKMHWSMTKGMSKAQRQDAIMKALENVMPWETFANEVRAVHKLIIPTRFVPRK

SEQ ID NO: 2554 - protein, 128 aa, unidentified
  REGION 1..128: note = Description of Unknown: uncultivated organism with predicted taxonomy: Olsenella
  REGION 1..128: note = MG14-57 RuvC-III domain
NDDRYMSVAVKNFLEDRLLFPEDGRKRHVTAVAGGATGSLRWVWGLNFGEGNIKDRTDDRHHAVDAAIIAACSESTVKKVAEASAKGREAFKQLRKSRLADTQPWPSFAAEAAARREFVVPTRMADHG

SEQ ID NO: 2555 - protein, 137 aa, unidentified; identical to SEQ ID NO: 2533
  REGION 1..137: note = Description of Unknown: uncultivated organism with predicted taxonomy: Collinsella
  REGION 1..137: note = MG14-58 RuvC-III domain

SEQ ID NO: 2556 - protein, 137 aa, unidentified; identical to SEQ ID NO: 2535
  REGION 1..137: note = Description of Unknown: uncultivated organism with predicted taxonomy: Collinsella
  REGION 1..137: note = MG14-59 RuvC-III domain

SEQ ID NO: 2557 - protein, 137 aa, unidentified; identical to SEQ ID NO: 2553
  REGION 1..137: note = Description of Unknown: uncultivated organism with predicted taxonomy: Collinsella
  REGION 1..137: note = MG14-60 RuvC-III domain

SEQ ID NO: 2558 - protein, 137 aa, unidentified; identical to SEQ ID NO: 2533
  REGION 1..137: note = Description of Unknown: uncultivated organism with predicted taxonomy: Collinsella
  REGION 1..137: note = MG14-61 RuvC-III domain

SEQ ID NO: 2559 - protein, 137 aa, unidentified
  REGION 1..137: note = Description of Unknown: uncultivated organism with predicted taxonomy: Collinsella
  REGION 1..137: note = MG14-62 RuvC-III domain
TDTAYMSREVCAYLADCLQFPDDGAKAHVVPTTGRATAWLRRRWGLNFGSNGEKDRSDDRHHATDACVIAACSRSLVIKTARLNQETHWSITRGMNEIQRHDAIMKALENVMPWETFANEVRAAHDFVVPTRFVPRK

SEQ ID NO: 2560 - protein, 126 aa, unidentified
  REGION 1..126: note = Description of Unknown: uncultivated organism with predicted taxonomy: Collinsella
  REGION 1..126: note = MG14-63 RuvC-III domain
NDTRYMSVALAKWLMECLPFAKDGHEHVFCVAGGATALMRSVWNIGITGPDGKKNRDDDRHHAVDAAVIACCTPGIVKNVALVNEGHARADVRQRLFRDSLPYPEFKEQVDAWIPCIVPTLTLPST

SEQ ID NO: 2561 - protein, 137 aa, unidentified
  REGION 1..137: note = Description of Unknown: uncultivated organism with predicted taxonomy: Collinsella
  REGION 1..137: note = MG14-64 RuvC-III domain
TDTAYMSREVCAYLADCLLFPEDGTKSHVVPTTGRATAWLRRRWGLNFGINGEKDRSDDRHHATDACVIAACSRSLVIKTAKISEQTHWAVTKDLDKDERDHLRMKALENVMPWETFANEVRASHDFVIPTRFVPHK

SEQ ID NO: 2562 - protein, 137 aa, unidentified; identical to SEQ ID NO: 2553
  REGION 1..137: note = Description of Unknown: uncultivated organism with predicted taxonomy: Collinsella
  REGION 1..137: note = MG14-65 RuvC-III domain

SEQ ID NO: 2563 - protein, 137 aa, unidentified
  REGION 1..137: note = Description of Unknown: uncultivated organism with predicted taxonomy: Collinsella
  REGION 1..137: note = MG14-66 RuvC-III domain
TDTAYMSREACAYLADCLLFPDDGAKAHVVPTTGRATAWLRRRWGLNFGSNGEKDRSDDRHHATDACVIAACSRSLVIKTARINQETHWSITRGMNETQRRDAIMKALESVMPWETFANEVRAAHDFVVPTRFVPRK

SEQ ID NO: 2564 - protein, 137 aa, unidentified; identical to SEQ ID NO: 2533
  REGION 1..137: note = Description of Unknown: uncultivated organism with predicted taxonomy: Collinsella
  REGION 1..137: note = MG14-67 RuvC-III domain

SEQ ID NO: 2565 - protein, 137 aa, unidentified; identical to SEQ ID NO: 2533
  REGION 1..137: note = Description of Unknown: uncultivated organism with predicted taxonomy: Collinsella
  REGION 1..137: note = MG14-68 RuvC-III domain

SEQ ID NO: 2566 - protein, 128 aa, unidentified
  REGION 1..128: note = Description of Unknown: uncultivated organism with predicted taxonomy: Olsenella
  REGION 1..128: note = MG14-69 RuvC-III domain
NDDRYMSREVKSYLEDTLIFPEDGRVKHVIAVAGGATGSLRHVWGLNFGANNSKDRSDNRHHAIDACVIAACSESTLQAVAKARKLGAETYKRMRKDRLKDTQPWPTFADEVIARREFVIPTHMVSHG

SEQ ID NO: 2567 - protein, 137 aa, unidentified
  REGION 1..137: note = Description of Unknown: uncultivated organism with predicted taxonomy: Collinsella tanakaei
  REGION 1..137: note = MG14-70 RuvC-III domain
TDTAYMSREVCAYLSDCLQFPDDGLKNHIVPIAGRATAWLRRQWGLNFGATGEKDRSDDRHHATDACVIAACSRSLVIKTAKVMKQTHWQVTRDMTREQRRSARMKALEGTMPWSTFANEVRERWKVTVPTRFVPRK

SEQ ID NO: 2568 - protein, 137 aa, unidentified
  REGION 1..137: note = Description of Unknown: uncultivated organism with predicted taxonomy: Collinsella
  REGION 1..137: note = MG14-71 RuvC-III domain
TDTAYMSREVCAYLADCLLFPDDGAKAHVVPTTGRATAWLRRRWGLNFGSNGEKDRSDDRHHATDACVISACSRSLVIKTARINQETHWSITRGMNETQRRDAIMKALESVMPWETFANEVRAAHDFVVPTRFVPRK

SEQ ID NO: 2569 - protein, 123 aa, unidentified
  REGION 1..123: note = Description of Unknown: uncultivated organism with predicted taxonomy: Atopobium sp. ICM42b
  REGION 1..123: note = MG14-72 RuvC-III domain
VDTQYMARAISAWLSDSLNFSTEFNQKQHVYAVNGRMTAKLRRKWGLNFGEDDTKDRSDNRHHAIDAAVIAVCSASMVKEFAISYSRLREVRDSVIAEPWEGFADQVREAREWVIPTMYRPNK

SEQ ID NO: 2570 - protein, 137 aa, unidentified; identical to SEQ ID NO: 2533
  REGION 1..137: note = Description of Unknown: uncultivated organism with predicted taxonomy: Collinsella
  REGION 1..137: note = MG14-73 RuvC-III domain

SEQ ID NO: 2571 - protein, 126 aa, unidentified
  REGION 1..126: note = Description of Unknown: uncultivated organism with predicted taxonomy: Collinsella
  REGION 1..126: note = MG14-74 RuvC-III domain
NDTRYMSKDVAKWLADCLPFPEDGRKHIFCVSGAATAFMRGIWRIGILDDAGKKNREDDRHYAVDAAVIAACTSSIVKDIALISEEHATNRDADRLLDGSLPYPEYRDQVKAWIPCIVPTYSPTRT

SEQ ID NO: 2572 - protein, 126 aa, unidentified
  REGION 1..126: note = Description of Unknown: uncultivated organism with predicted taxonomy: Collinsella sp. AM13-34
  REGION 1..126: note = MG14-75 RuvC-III domain
NDTRYMSVALAKWLRECLPFAKDGHEHVFCVAGGATALMRSVWNIGITGPDGKKNREDDRHHAVDAAVIACCTPGIVRNVALVNEGHARADVRQRLFSDSLPYPEFKEQVDAWIPCIVPTLTLPNA

SEQ ID NO: 2573 - protein, 137 aa, unidentified; identical to SEQ ID NO: 2533
  REGION 1..137: note = Description of Unknown: uncultivated organism with predicted taxonomy: Collinsella
  REGION 1..137: note = MG14-76 RuvC-III domain

SEQ ID NO: 2574 - protein, 137 aa, unidentified; identical to SEQ ID NO: 2499
  REGION 1..137: note = Description of Unknown: uncultivated organism with predicted taxonomy: Collinsella
  REGION 1..137: note = MG14-77 RuvC-III domain

SEQ ID NO: 2575 - protein, 137 aa, unidentified
  REGION 1..137: note = Description of Unknown: uncultivated organism with predicted taxonomy: Collinsella
  REGION 1..137: note = MG14-78 RuvC-III domain
TDTAYMSREVCAYLADCLLFPDDGAKAHVVPTTGRATAWLRRRWELNFGSNREKDRSDDRHHATDACVIAACSRSLVIKTARINQETHWSITRGMNETQRRDAIMKALESVMPWETFANEVRAAHDFVVPTRFVPRK

SEQ ID NO: 2576 - protein, 137 aa, unidentified; identical to SEQ ID NO: 2533
  REGION 1..137: note = Description of Unknown: uncultivated organism with predicted taxonomy: Collinsella
  REGION 1..137: note = MG14-79 RuvC-III domain

SEQ ID NO: 2577 - protein, 137 aa, unidentified; identical to SEQ ID NO: 2499
  REGION 1..137: note = Description of Unknown: uncultivated organism with predicted taxonomy: Coriobacteriales
  REGION 1..137: note = MG14-80 RuvC-III domain

SEQ ID NO: 2578 - protein, 137 aa, unidentified
  REGION 1..137: note = Description of Unknown: uncultivated organism with predicted taxonomy: Collinsella
  REGION 1..137: note = MG14-82 RuvC-III domain
TDTAYMSREVCAYLADCLLFPDDGAKAHVVPTTGRATAWLRRRWGLNFGSNREKDRSDDRHHATDACVIAACSRSLVIKTARINQETHWSITRGMNETQRRNAIMKALESVMPWETFANEVRAAHDFVVPTRFVPRK

SEQ ID NO: 2579 - protein, 137 aa, unidentified; identical to SEQ ID NO: 2507
  REGION 1..137: note = Description of Unknown: uncultivated organism with predicted taxonomy: Collinsella
  REGION 1..137: note = MG14-83 RuvC-III domain

SEQ ID NO: 2580 - protein, 128 aa, unidentified; identical to SEQ ID NO: 2505
  REGION 1..128: note = Description of Unknown: uncultivated organism with predicted taxonomy: Olsenella
  REGION 1..128: note = MG14-84 RuvC-III domain

SEQ ID NO: 2581 - protein, 137 aa, unidentified; identical to SEQ ID NO: 2540
  REGION 1..137: note = Description of Unknown: uncultivated organism with predicted taxonomy: Collinsella
  REGION 1..137: note = MG14-85 RuvC-III domain

SEQ ID NO: 2582 - protein, 137 aa, unidentified; identical to SEQ ID NO: 2538
  REGION 1..137: note = Description of Unknown: uncultivated organism with predicted taxonomy: Collinsella
  REGION 1..137: note = MG14-87 RuvC-III domain

SEQ ID NO: 2583 - protein, 137 aa, unidentified; identical to SEQ ID NO: 2538
  REGION 1..137: note = Description of Unknown: uncultivated organism with predicted taxonomy: Collinsella
  REGION 1..137: note = MG14-88 RuvC-III domain

SEQ ID NO: 2584 - protein, 137 aa, unidentified; identical to SEQ ID NO: 2533
  REGION 1..137: note = Description of Unknown: uncultivated organism with predicted taxonomy: Collinsella
  REGION 1..137: note = MG14-89 RuvC-III domain

SEQ ID NO: 2585 - protein, 137 aa, unidentified
  REGION 1..137: note = Description of Unknown: uncultivated organism with predicted taxonomy: Coriobacteriia
  REGION 1..137: note = MG14-90 RuvC-III domain
TDTAYMSREVCAYLADCLLFPDDGAKAHVVPTTGRATAWLRRRWGLNFGSNGEKDRSDDRHHATDACVIAACSRRLVIKTARINQEMHWSMTKGMSKAQRQDAIMKALENAMPWETFANEVRVAHDFVVPTRFVPRK

SEQ ID NO: 2586 - protein, 137 aa, unidentified; identical to SEQ ID NO: 2567
  REGION 1..137: note = Description of Unknown: uncultivated organism with predicted taxonomy: Collinsella tanakaei
  REGION 1..137: note = MG14-91 RuvC-III domain

SEQ ID NO: 2587 - protein, 137 aa, unidentified; identical to SEQ ID NO: 2541
  REGION 1..137: note = Description of Unknown: uncultivated organism with predicted taxonomy: Collinsella
  REGION 1..137: note = MG14-92 RuvC-III domain

SEQ ID NO: 2588 - protein, 137 aa, unidentified; identical to SEQ ID NO: 2538
  REGION 1..137: note = Description of Unknown: uncultivated organism with predicted taxonomy: Collinsella
  REGION 1..137: note = MG14-93 RuvC-III domain

SEQ ID NO: 2589 - protein, 137 aa, unidentified; identical to SEQ ID NO: 2533
  REGION 1..137: note = Description of Unknown: uncultivated organism with predicted taxonomy: Collinsella
  REGION 1..137: note = MG14-94 RuvC-III domain

SEQ ID NO: 2590 - protein, 126 aa, unidentified
  REGION 1..126: note = Description of Unknown: uncultivated organism with predicted taxonomy: Collinsella
  REGION 1..126: note = MG14-95 RuvC-III domain
NDTRYMSVALAKWLRECLPFTKDGHEHVFCVAGGATALMRSVWDIGITGPDGKKNRDDDRHHAVDAAVIACCTPGIVKNVALVNEGHARADVRQRLFSDSLPYPEFKEQVDAWISCIVPTLTLPNT

SEQ ID NO: 2591 - protein, 137 aa, unidentified
  REGION 1..137: note = Description of Unknown: uncultivated organism with predicted taxonomy: Collinsella
  REGION 1..137: note = MG14-96 RuvC-III domain
TDTAYMSREVCAYLADCLLFPDDGAKAHVVPTTGRATAWLRRRWGLNFGSNGEKDRSDNRHHATDACVIAACSRSLVIKTARINQETHWSITRGMNETQRRDAIMKALESVMPWETFANEVRAAHDFVVPTRFVPRK

SEQ ID NO: 2592 - protein, 137 aa, unidentified; identical to SEQ ID NO: 2533
  REGION 1..137: note = Description of Unknown: uncultivated organism with predicted taxonomy: Collinsella
  REGION 1..137: note = MG14-97 RuvC-III domain

SEQ ID NO: 2593 - protein, 137 aa, unidentified
  REGION 1..137: note = Description of Unknown: uncultivated organism with predicted taxonomy: Collinsella
  REGION 1..137: note = MG14-98 RuvC-III domain
TDTAYMSREVCAYLADCLLFPDDGAKAHVVPTTGRATAWLRRRWGLNFGSNGEKDRSDDRHHATDACVIAACSRSLVIKTARINQETHWSITRGMNEAQRRDAIMKALESVMPWETFANEVRAAHDFVVPTRFVPRK

SEQ ID NO: 2594 - protein, 128 aa, unidentified; identical to SEQ ID NO: 2506
  REGION 1..128: note = Description of Unknown: uncultivated organism with predicted taxonomy: Olsenella
  REGION 1..128: note = MG14-99 RuvC-III domain

SEQ ID NO: 2595 - protein, 137 aa, unidentified; identical to SEQ ID NO: 2533
  REGION 1..137: note = Description of Unknown: uncultivated organism with predicted taxonomy: Collinsella
  REGION 1..137: note = MG14-100 RuvC-III domain

SEQ ID NO: 2596 - protein, 126 aa, unidentified
  REGION 1..126: note = Description of Unknown: uncultivated organism with predicted taxonomy: Eggerthella sp. AM16-19
  REGION 1..126: note = MG14-101 RuvC-III domain
NDTRYMSVALAKWLRECLPFARDGHEHVFCVAGGATALMRSVWNIGITGPDGKKNRDDDRHHAVDAAVIACCTPGIVKNVALVNEGHARADVRQRLFRDSLPYPEFKEQVNAWIPCIVPTLTLPNT

SEQ ID NO: 2597 - protein, 128 aa, unidentified
  REGION 1..128: note = Description of Unknown: uncultivated organism with predicted taxonomy: Olsenella sp. KH3B4
  REGION 1..128: note = MG14-102 RuvC-III domain
NDDRYMSVAVKNFLEDRLLFPEDGRKRHVTAVAGGATGNLRWVWGLNFGEGNIKDRTDDRHHAVDAAIIAACSESTVKKVAKASAKGREAFKQLRKSRLADTQPWPTFAAEVAARREFVVPTRMADHG

SEQ ID NO: 2598 - protein, 137 aa, unidentified; identical to SEQ ID NO: 2538
  REGION 1..137: note = Description of Unknown: uncultivated organism with predicted taxonomy: Collinsella
  REGION 1..137: note = MG14-103 RuvC-III domain

SEQ ID NO: 2599 - protein, 137 aa, unidentified; identical to SEQ ID NO: 2538
  REGION 1..137: note = Description of Unknown: uncultivated organism with predicted taxonomy: Collinsella
  REGION 1..137: note = MG14-104 RuvC-III domain

SEQ ID NO: 2600 - protein, 137 aa, unidentified; identical to SEQ ID NO: 2509
  REGION 1..137: note = Description of Unknown: uncultivated organism with predicted taxonomy: Collinsella
  REGION 1..137: note = MG14-105 RuvC-III domain

SEQ ID NO: 2601 - protein, 137 aa, unidentified; identical to SEQ ID NO: 2549
  REGION 1..137: note = Description of Unknown: uncultivated organism with predicted taxonomy: Collinsella
  REGION 1..137: note = MG14-106 RuvC-III domain

SEQ ID NO: 2602 - protein, 137 aa, unidentified; identical to SEQ ID NO: 2499
  REGION 1..137: note = Description of Unknown: uncultivated organism with predicted taxonomy: Collinsella
  REGION 1..137: note = MG14-107 RuvC-III domain

SEQ ID NO: 2603 - protein, 123 aa, unidentified
  REGION 1..123: note = Description of Unknown: uncultivated organism with predicted taxonomy: Atopobium sp. ICM42b
  REGION 1..123: note = MG14-108 RuvC-III domain
VDTQYMARAISAWLSDSLNFSSEFDQKQHVYAVNGRMTAKLRRKWGLNFGEDDTKDRSDNRHHAIDAAVIAACSASMVKEFAISYSRLREVRDSVIAEPWEGFADQVREAREWIIPTMYRPNK

SEQ ID NO: 2604 - protein, 123 aa, unidentified
  REGION 1..123: note = Description of Unknown: uncultivated organism with predicted taxonomy: Atopobium sp. ICM42b
  REGION 1..123: note = MG14-109 RuvC-III domain
SDTQYMSKAIVAWLSDSLDFPSRYGQKQHVYATNGRMTSKLRKEWGLNFGENGIKDRNDKRHHAVDAAVIAACSASMVKEFATSYSRSHETKNSTIAEPWEGFADQVREAREWVIPTMYRPNK

SEQ ID NO: 2605 - protein, 137 aa, unidentified; identical to SEQ ID NO: 2538
  REGION 1..137: note = Description of Unknown: uncultivated organism with predicted taxonomy: Collinsella
  REGION 1..137: note = MG14-110 RuvC-III domain

SEQ ID NO: 2606 - protein, 126 aa, unidentified
  REGION 1..126: note = Description of Unknown: uncultivated organism
  REGION 1..126: note = MG14-111 RuvC-III domain
NDTRYMSRQLAMWVRECLPFPDDKRQHVFCVAGAATSLMRRIWGIGIVDEKGKKDRSDDRHHAVDAAVIACCDQRIVKGIARVNSGRSNIKERERLRYESMPYPEFKAQVEAWIPCIVPTRTVSRT

SEQ ID NO: 2607 - protein, 137 aa, unidentified
  REGION 1..137: note = Description of Unknown: uncultivated organism with predicted taxonomy: Collinsella
  REGION 1..137: note = MG14-112 RuvC-III domain
TDTAYMSREVCAYLADCLLFPDDGAKAHVVPTTGRATAWLRRRWGLNFGSNGEKDRSDDRHHATDACVIAACSRSLVIKTARINQETHWSITRGMNETQRRGAIMKALESVMPWETFANEVRAAHGFVVPTRFVPRK

SEQ ID NO: 2608 - protein, 137 aa, unidentified; identical to SEQ ID NO: 2533
  REGION 1..137: note = Description of Unknown: uncultivated organism with predicted taxonomy: Collinsella
  REGION 1..137: note = MG14-113 RuvC-III domain

SEQ ID NO: 2609 - protein, 137 aa, unidentified
  REGION 1..137: note = Description of Unknown: uncultivated organism with predicted taxonomy: Collinsella
  REGION 1..137: note = MG14-114 RuvC-III domain
TDTAYMSREVCAYLADCLLFPDDGAKAHVVPTTGRATAWLRRRWGLNFGSNGEKDRSDDRHHATDACVIAACSRSLVIKTARINQEAHWSITRGMNETQRRDAIMKALESVMPWETFANEVRAAHDFVVPTRFVPRK

SEQ ID NO: 2610 - protein, 137 aa, unidentified; identical to SEQ ID NO: 2540
  REGION 1..137: note = Description of Unknown: uncultivated organism with predicted taxonomy: Collinsella
  REGION 1..137: note = MG14-115 RuvC-III domain

SEQ ID NO: 2611 - protein, 137 aa, unidentified
  REGION 1..137: note = Description of Unknown: uncultivated organism with predicted taxonomy: Collinsella
  REGION 1..137: note = MG14-116 RuvC-III domain
TDTAYMSREVCAYLADCLLFPDDGAKAHVVPTTGRATAWLRRRWGLNFGSDGEKDRSDDRHHATDACVIAACSPSLVIKTARINQETHWSITRGMNETQRRDAIMKALESVMPWETFANEVRAAHDFVVPTRFVPRK

SEQ ID NO: 2612 - protein, 137 aa, unidentified; identical to SEQ ID NO: 2545
  REGION 1..137: note = Description of Unknown: uncultivated organism with predicted taxonomy: Collinsella
  REGION 1..137: note = MG14-117 RuvC-III domain

SEQ ID NO: 2613 - protein, 128 aa, unidentified
  REGION 1..128: note = Description of Unknown: uncultivated organism with predicted taxonomy: Olsenella sp. KCTC 15699
  REGION 1..128: note = MG14-118 RuvC-III domain
NDDRYMSVAVKNYLEDCLLFPEDGHKRHVTAVAGGATGNLRWVWGLNFGEGNVKNRADDRHHAVDAAIIAACSESTVKKVAEASAKGREAFKQLRKSRLADTQPWPTFAAEVAARREFVVPTRMADHG

SEQ ID NO: 2614 - protein, 137 aa, unidentified
  REGION 1..137: note = Description of Unknown: uncultivated organism with predicted taxonomy: Collinsella
  REGION 1..137: note = MG14-119 RuvC-III domain
TDTAYMSREVCTYLADCLLFPDDGAKAHVVPTTGRATAWLRRRWGLNFGSNGEKDRSDDRHHATDACVIAACSRSLVIKTARINQETHWSITRGMNETQRRDAIMKALESVMPWETFANEVRAAHDFVVPTRFVPRK

SEQ ID NO: 2615 - protein, 137 aa, unidentified; identical to SEQ ID NO: 2567
  REGION 1..137: note = Description of Unknown: uncultivated organism with predicted taxonomy: Collinsella tanakaei
  REGION 1..137: note = MG14-120 RuvC-III domain

SEQ ID NO: 2616 - protein, 137 aa, unidentified
  REGION 1..137: note = Description of Unknown: uncultivated organism with predicted taxonomy: Collinsella
  REGION 1..137: note = MG14-121 RuvC-III domain
TDTAYMSREVCAYLADCLLFPDDGAKAHVVPTTGRATAWLRRRWGLNFGSNGEKDRLDDRHHATDACVIAACSRSLVIKTARINQETHWSITRGMNEAQRRDAIMKALESVMPWETFANEVRAAHDFVVPTRFVPRK

SEQ ID NO: 2617 - protein, 128 aa, unidentified
  REGION 1..128: note = Description of Unknown: uncultivated organism with predicted taxonomy: Olsenella
  REGION 1..128: note = MG14-122 RuvC-III domain
NDDRYMSVAVKNYLEDCLLFPEDGRKRHVTAVAGGATGNLRWVWGLNFGEGNVKDRADDRHHAVDAAIIAACSESTVKKVAEASAKGREAFKQLRKSRLADTQPWPTFAAEVAARREFVVPTRMADHG

SEQ ID NO: 2618 - protein, 137 aa, unidentified; identical to SEQ ID NO: 2533
  REGION 1..137: note = Description of Unknown: uncultivated organism with predicted taxonomy: Olsenella mediterranea
  REGION 1..137: note = MG14-123 RuvC-III domain

SEQ ID NO: 2619 - protein, 137 aa, unidentified; identical to SEQ ID NO: 2533
  REGION 1..137: note = Description of Unknown: uncultivated organism with predicted taxonomy: Collinsella
  REGION 1..137: note = MG14-124 RuvC-III domain

SEQ ID NO: 2620 - protein, 137 aa, unidentified; identical to SEQ ID NO: 2533
  REGION 1..137: note = Description of Unknown: uncultivated organism with predicted taxonomy: Collinsella
  REGION 1..137: note = MG14-125 RuvC-III domain

SEQ ID NO: 2621 - protein, 128 aa, unidentified; identical to SEQ ID NO: 2547
  REGION 1..128: note = Description of Unknown: uncultivated organism with predicted taxonomy: Libanicoccus massiliensis
  REGION 1..128: note = MG14-126 RuvC-III domain

SEQ ID NO: 2622 - protein, 137 aa, unidentified; identical to SEQ ID NO: 2533
  REGION 1..137: note = Description of Unknown: uncultivated organism with predicted taxonomy: Collinsella
  REGION 1..137: note = MG14-127 RuvC-III domain

SEQ ID NO: 2623 - protein, 137 aa, unidentified; identical to SEQ ID NO: 2538
  REGION 1..137: note = Description of Unknown: uncultivated organism with predicted taxonomy: Collinsella
  REGION 1..137: note = MG14-128 RuvC-III domain

SEQ ID NO: 2624 - protein, 137 aa, unidentified; identical to SEQ ID NO: 2533
  REGION 1..137: note = Description of Unknown: uncultivated organism with predicted taxonomy: Collinsella
  REGION 1..137: note = MG14-129 RuvC-III domain

SEQ ID NO: 2625 - protein, 79 aa, unidentified
  REGION 1..79: note = Description of Unknown: uncultivated organism with predicted taxonomy: Olsenella sp. KH3B4
  REGION 1..79: note = MG14-130 RuvC-III domain
NDDRYMSVAVKNYLEDCLLFPEDGRKRHVTAVAGGATGNLRWVWGLNFGEGNVKDRADDRHHAIDAAIIAACSESTVKK

SEQ ID NO: 2626 - protein, 137 aa, unidentified; identical to SEQ ID NO: 2538
  REGION 1..137: note = Description of Unknown: uncultivated organism with predicted taxonomy: Collinsella
  REGION 1..137: note = MG14-131 RuvC-III domain

SEQ ID NO: 2627 - protein, 137 aa, unidentified; identical to SEQ ID NO: 2533
  REGION 1..137: note = Description of Unknown: uncultivated organism with predicted taxonomy: Collinsella
  REGION 1..137: note = MG14-132 RuvC-III domain

SEQ ID NO: 2628 - protein, 137 aa, unidentified; identical to SEQ ID NO: 2533
  REGION 1..137: note = Description of Unknown: uncultivated organism with predicted taxonomy: Collinsella
  REGION 1..137: note = MG14-133 RuvC-III domain

SEQ ID NO: 2629 - protein, 137 aa, unidentified; identical to SEQ ID NO: 2533
  REGION 1..137: note = Description of Unknown: uncultivated organism with predicted taxonomy: Collinsella
  REGION 1..137: note = MG14-135 RuvC-III domain

SEQ ID NO: 2630 - protein, 137 aa, unidentified
  REGION 1..137: note = Description of Unknown: uncultivated organism with predicted taxonomy: Collinsella
  REGION 1..137: note = MG14-136 RuvC-III domain
TDTAYMSREVCAYLADCLLFPDDGAKAHVVPTTGRATAWLRRRWGLNFGSNREKDCSDDRHHATDACVIAACSRSLVIKTARINQETHWSITRGMNETQRRNAIMKALESVMPWETFANEVRAAHDFVVPTRFVPRK

SEQ ID NO: 2631 - protein, 126 aa, unidentified; identical to SEQ ID NO: 2606
  REGION 1..126: note = Description of Unknown: uncultivated organism with predicted taxonomy: Clostridiales
  REGION 1..126: note = MG14-137 RuvC-III domain

SEQ ID NO: 2632 - protein, 137 aa, unidentified; identical to SEQ ID NO: 2499
  REGION 1..137: note = Description of Unknown: uncultivated organism with predicted taxonomy: Collinsella
  REGION 1..137: note = MG14-138 RuvC-III domain

SEQ ID NO: 2633 - protein, 137 aa, unidentified; identical to SEQ ID NO: 2538
  REGION 1..137: note = Description of Unknown: uncultivated organism with predicted taxonomy: Collinsella
  REGION 1..137: note = MG14-139 RuvC-III domain

SEQ ID NO: 2634 - protein, 137 aa, unidentified; identical to SEQ ID NO: 2533
  REGION 1..137: note = Description of Unknown: uncultivated organism with predicted taxonomy: Collinsella
  REGION 1..137: note = MG14-140 RuvC-III domain

SEQ ID NO: 2635 - protein, 128 aa, unidentified; identical to SEQ ID NO: 2551
  REGION 1..128: note = Description of Unknown: uncultivated organism with predicted taxonomy: Olsenella sp. KH3B4
  REGION 1..128: note = MG14-141 RuvC-III domain

SEQ ID NO: 2636 - protein, 137 aa, unidentified; identical to SEQ ID NO: 2541
  REGION 1..137: note = Description of Unknown: uncultivated organism with predicted taxonomy: Collinsella
  REGION 1..137: note = MG14-142 RuvC-III domain

SEQ ID NO: 2637 - protein, 137 aa, unidentified; identical to SEQ ID NO: 2533
  REGION 1..137: note = Description of Unknown: uncultivated organism with predicted taxonomy: Collinsella
  REGION 1..137: note = MG14-143 RuvC-III domain

SEQ ID NO: 2638 - protein, 126 aa, unidentified
  REGION 1..126: note = Description of Unknown: uncultivated organism with predicted taxonomy: Collinsella
  REGION 1..126: note = MG14-144 RuvC-III domain
NDTRYMSVALAKWLRECLPFARDGHEHVFCVAGGATALMRSVWDIGITGPDGKKNRDDDRHHAVDAAVIACCTPGIVKNVALVNEGHARADVRQRLFRDSLPYPEFKEQVNAWIPCIVPTLTLPNT

SEQ ID NO: 2639 - protein, 128 aa, unidentified; identical to SEQ ID NO: 2505
  REGION 1..128: note = Description of Unknown: uncultivated organism with predicted taxonomy: Olsenella sp. KCTC 15699
  REGION 1..128: note = MG14-145 RuvC-III domain

SEQ ID NO: 2640 - protein, 128 aa, unidentified
  REGION 1..128: note = Description of Unknown: uncultivated organism with predicted taxonomy: Olsenella
  REGION 1..128: note = MG14-146 RuvC-III domain
NDDRYMSVAVKNYLEDCLLFPEDGRKRHVTAVAGGATGNLRWVWGLNFGEGNIKDRTDDRHHAVDAAIIAACSESTVKKVAEASAKGREAFKQLRKSRLADTQPWPTFAAEVAARREFVVPTHMANHG

SEQ ID NO: 2641 - protein, 128 aa, unidentified; identical to SEQ ID NO: 2532
  REGION 1..128: note = Description of Unknown: uncultivated organism with predicted taxonomy: Olsenella sp. KH3B4
  REGION 1..128: note = MG14-147 RuvC-III domain

SEQ ID NO: 2642 - protein, 137 aa, unidentified; identical to SEQ ID NO: 2533
  REGION 1..137: note = Description of Unknown: uncultivated organism with predicted taxonomy: Olsenella mediterranea
  REGION 1..137: note = MG14-148 RuvC-III domain

SEQ ID NO: 2643 - protein, 137 aa, unidentified; identical to SEQ ID NO: 2538
  REGION 1..137: note = Description of Unknown: uncultivated organism with predicted taxonomy: Collinsella
  REGION 1..137: note = MG14-149 RuvC-III domain

SEQ ID NO: 2644 - protein, 137 aa, unidentified
  REGION 1..137: note = Description of Unknown: uncultivated organism with predicted taxonomy: Collinsella
  REGION 1..137: note = MG14-150 RuvC-III domain
TDTAYMSREVCAYLADCLLFPDDGAKAHVVPTTGRATAWLRRRWGLNFGSNGEKDRSDDRHHATDACVIAACNRSLVIKTARINQETHWSITRGMNETQRRDAIMKALESVMPWETFANEVRAAHDFVVPTRFVPRK

SEQ ID NO: 2645 - protein, 137 aa, unidentified; identical to SEQ ID NO: 2538
  REGION 1..137: note = Description of Unknown: uncultivated organism with predicted taxonomy: Collinsella
  REGION 1..137: note = MG14-151 RuvC-III domain

SEQ ID NO: 2646 - protein, 137 aa, unidentified; identical to SEQ ID NO: 2509
  REGION 1..137: note = Description of Unknown: uncultivated organism with predicted taxonomy: Collinsella
  REGION 1..137: note = MG14-152 RuvC-III domain

SEQ ID NO: 2647 - protein, 137 aa, unidentified; identical to SEQ ID NO: 2509
  REGION 1..137: note = Description of Unknown: uncultivated organism with predicted taxonomy: Coriobacteriales
  REGION 1..137: note = MG14-153 RuvC-III domain

SEQ ID NO: 2648 - protein, 128 aa, unidentified; identical to SEQ ID NO: 2554
  REGION 1..128: note = Description of Unknown: uncultivated organism with predicted taxonomy: Olsenella
  REGION 1..128: note = MG14-154 RuvC-III domain

SEQ ID NO: 2649 - protein, 128 aa, unidentified; identical to SEQ ID NO: 2505
  REGION 1..128: note = Description of Unknown: uncultivated organism with predicted taxonomy: Olsenella
  REGION 1..128: note = MG14-155 RuvC-III domain

SEQ ID NO: 2650 - protein, 128 aa, unidentified; identical to SEQ ID NO: 2547
  REGION 1..128: note = Description of Unknown: uncultivated organism with predicted taxonomy: Libanicoccus massiliensis
  REGION 1..128: note = MG14-156 RuvC-III domain

SEQ ID NO: 2651 - protein, 137 aa, unidentified; identical to SEQ ID NO: 2540
  REGION 1..137: note = Description of Unknown: uncultivated organism with predicted taxonomy: Collinsella
  REGION 1..137: note = MG14-157 RuvC-III domain

SEQ ID NO: 2652 - protein, 137 aa, unidentified; identical to SEQ ID NO: 2509
  REGION 1..137: note = Description of Unknown: uncultivated organism with predicted taxonomy: Collinsella
  REGION 1..137: note = MG14-158 RuvC-III domain

SEQ ID NO: 2653 - protein, 137 aa, unidentified; identical to SEQ ID NO: 2533
  REGION 1..137: note = Description of Unknown: uncultivated organism with predicted taxonomy: Collinsella
  REGION 1..137: note = MG14-159 RuvC-III domain

SEQ ID NO: 2654 - protein, 137 aa, unidentified; identical to SEQ ID NO: 2553
  REGION 1..137: note = Description of Unknown: uncultivated organism with predicted taxonomy: Collinsella
  REGION 1..137: note = MG14-160 RuvC-III domain

SEQ ID NO: 2655 - protein, 137 aa, unidentified; identical to SEQ ID NO: 2553
  REGION 1..137: note = Description of Unknown: uncultivated organism with predicted taxonomy: Collinsella
  REGION 1..137: note = MG14-161 RuvC-III domain

SEQ ID NO: 2656 - protein, 128 aa, unidentified; identical to SEQ ID NO: 2522
  REGION 1..128: note = Description of Unknown: uncultivated organism with predicted taxonomy: Olsenella
  REGION 1..128: note = MG14-162 RuvC-III domain

SEQ ID NO: 2657 - protein, 137 aa, unidentified; identical to SEQ ID NO: 2553
  REGION 1..137: note = Description of Unknown: uncultivated organism with predicted taxonomy: Collinsella
  REGION 1..137: note = MG14-163 RuvC-III domain

SEQ ID NO: 2658 - protein, 128 aa, unidentified; identical to SEQ ID NO: 2505
  REGION 1..128: note = Description of Unknown: uncultivated organism with predicted taxonomy: Olsenella
  REGION 1..128: note = MG14-164 RuvC-III domain

SEQ ID NO: 2659 - protein, 137 aa, unidentified; identical to SEQ ID NO: 2509
  REGION 1..137: note = Description of Unknown: uncultivated organism with predicted taxonomy: Collinsella
  REGION 1..137: note = MG14-165 RuvC-III domain

SEQ ID NO: 2660 - protein, 137 aa, unidentified; identical to SEQ ID NO: 2533
  REGION 1..137: note = Description of Unknown: uncultivated organism with predicted taxonomy: Collinsella sp. AM17-1
  REGION 1..137: note = MG14-166 RuvC-III domain

SEQ ID NO: 2661 - protein, 137 aa, unidentified; identical to SEQ ID NO: 2538
  REGION 1..137: note = Description of Unknown: uncultivated organism with predicted taxonomy: Collinsella
  REGION 1..137: note = MG14-167 RuvC-III domain

SEQ ID NO: 2662 - protein, 128 aa, unidentified; identical to SEQ ID NO: 2505
  REGION 1..128: note = Description of Unknown: uncultivated organism with predicted taxonomy: Olsenella sp. KH3B4
  REGION 1..128: note = MG14-168 RuvC-III domain

SEQ ID NO: 2663 - protein, 128 aa, unidentified; identical to SEQ ID NO: 2511
  REGION 1..128: note = Description of Unknown: uncultivated organism with predicted taxonomy: Olsenella
  REGION 1..128: note = MG14-169 RuvC-III domain

SEQ ID NO: 2664 - protein, 128 aa, unidentified; identical to SEQ ID NO: 2529
  REGION 1..128: note = Description of Unknown: uncultivated organism with predicted taxonomy: Olsenella sp. KH3B4
  REGION 1..128: note = MG14-170 RuvC-III domain

SEQ ID NO: 2665 - protein, 123 aa, unidentified; identical to SEQ ID NO: 2528
  REGION 1..123: note = Description of Unknown: uncultivated organism with predicted taxonomy: Coriobacteriia bacterium
  REGION 1..123: note = MG14-171 RuvC-III domain

SEQ ID NO: 2666 - protein, 137 aa, unidentified; identical to SEQ ID NO: 2561
  REGION 1..137: note = Description of Unknown: uncultivated organism with predicted taxonomy: Collinsella
  REGION 1..137: note = MG14-172 RuvC-III domain

SEQ ID NO: 2667 - protein, 137 aa, unidentified; identical to SEQ ID NO: 2533
  REGION 1..137: note = Description of Unknown: uncultivated organism with predicted taxonomy: Collinsella
  REGION 1..137: note = MG14-173 RuvC-III domain

SEQ ID NO: 2668 - protein, 137 aa, unidentified
  REGION 1..137: note = Description of Unknown: uncultivated organism with predicted taxonomy: Collinsella
  REGION 1..137: note = MG14-174 RuvC-III domain
TDTAYMSREVCAYLADCLLFPDDGAKAHVVPTTGRATAWLRRRWGLNFGSNGEKDRSDDRHHATDACVIAACSRSLVIKTARINQETHWSIIRGMNETQRRDAIMKALESVMPWETFANEVRVAHDFVVPTRFVPRK

SEQ ID NO: 2669 - protein, 137 aa, unidentified; identical to SEQ ID NO: 2535
  REGION 1..137: note = Description of Unknown: uncultivated organism with predicted taxonomy: Collinsella
  REGION 1..137: note = MG14-175 RuvC-III domain

SEQ ID NO: 2670 - protein, 137 aa, unidentified; identical to SEQ ID NO: 2535
  REGION 1..137: note = Description of Unknown: uncultivated organism with predicted taxonomy: Collinsella aerofaciens
  REGION 1..137: note = MG14-176 RuvC-III domain

SEQ ID NO: 2671 - protein, 137 aa, unidentified; identical to SEQ ID NO: 2533
  REGION 1..137: note = Description of Unknown: uncultivated organism with predicted taxonomy: Collinsella
  REGION 1..137: note = MG14-177 RuvC-III domain

SEQ ID NO: 2672 - protein, 128 aa, unidentified
  REGION 1..128: note = Description of Unknown: uncultivated organism with predicted taxonomy: Olsenella sp. GAM18
  REGION 1..128: note = MG14-178 RuvC-III domain
NDDRYMSVAVKNYLEDCLLFPEDGRKRHVTAVAGGATGNLRWVWGLNFGEGNIKDRTDDRHHAVDAAIIAACSESTVKKVAEASAKGREAFKQLRKSRLADTQPWPTFATEVAARREFVVPTRMADHG

SEQ ID NO: 2673 - protein, 137 aa, unidentified; identical to SEQ ID NO: 2533
  REGION 1..137: note = Description of Unknown: uncultivated organism with predicted taxonomy: Collinsella
  REGION 1..137: note = MG14-179 RuvC-III domain

SEQ ID NO: 2674 - protein, 137 aa, unidentified; identical to SEQ ID NO: 2545
  REGION 1..137: note = Description of Unknown: uncultivated organism with predicted taxonomy: Collinsella
  REGION 1..137: note = MG14-180 RuvC-III domain

SEQ ID NO: 2675 - protein, 128 aa, unidentified; identical to SEQ ID NO: 2566
  REGION 1..128: note = Description of Unknown: uncultivated organism with predicted taxonomy: Olsenella
  REGION 1..128: note = MG14-181 RuvC-III domain

SEQ ID NO: 2676 - protein, 137 aa, unidentified; identical to SEQ ID NO: 2533
  REGION 1..137: note = Description of Unknown: uncultivated organism with predicted taxonomy: Olsenella mediterranea
  REGION 1..137: note = MG14-182 RuvC-III domain

SEQ ID NO: 2677 - protein, 137 aa, unidentified; identical to SEQ ID NO: 2609
  REGION 1..137: note = Description of Unknown: uncultivated organism with predicted taxonomy: Collinsella
  REGION 1..137: note = MG14-183 RuvC-III domain

SEQ ID NO: 2678 - protein, 128 aa, unidentified; identical to SEQ ID NO: 2617
  REGION 1..128: note = Description of Unknown: uncultivated organism with predicted taxonomy: Olsenella
  REGION 1..128: note = MG14-184 RuvC-III domain

SEQ ID NO: 2679 - protein, 137 aa, unidentified; identical to SEQ ID NO: 2533
  REGION 1..137: note = Description of Unknown: uncultivated organism with predicted taxonomy: Collinsella
  REGION 1..137: note = MG14-185 RuvC-III domain

SEQ ID NO: 2680 - protein, 137 aa, unidentified; identical to SEQ ID NO: 2591
  REGION 1..137: note = Description of Unknown: uncultivated organism with predicted taxonomy: Collinsella
  REGION 1..137: note = MG14-186 RuvC-III domain

SEQ ID NO: 2681 - protein, 137 aa, unidentified; identical to SEQ ID NO: 2585
  REGION 1..137: note = Description of Unknown: uncultivated organism with predicted taxonomy: Coriobacteriales
  REGION 1..137: note = MG14-187 RuvC-III domain

SEQ ID NO: 2682 - protein, 137 aa, unidentified; identical to SEQ ID NO: 2533
  REGION 1..137: note = Description of Unknown: uncultivated organism with predicted taxonomy: Collinsella
  REGION 1..137: note = MG14-188 RuvC-III domain

SEQ ID NO: 2683 - protein, 137 aa, unidentified; identical to SEQ ID NO: 2538
  REGION 1..137: note = Description of Unknown: uncultivated organism with predicted taxonomy: Collinsella
  REGION 1..137: note = MG14-189 RuvC-III domain

SEQ ID NO: 2684 - protein, 137 aa, unidentified; identical to SEQ ID NO: 2533
  REGION 1..137: note = Description of Unknown: uncultivated organism with predicted taxonomy: Collinsella
  REGION 1..137: note = MG14-190 RuvC-III domain

SEQ ID NO: 2685 - protein, 137 aa, unidentified; identical to SEQ ID NO: 2538
  REGION 1..137: note = Description of Unknown: uncultivated organism with predicted taxonomy: Collinsella
  REGION 1..137: note = MG14-191 RuvC-III domain

SEQ ID NO: 2686 - protein, 137 aa, unidentified; identical to SEQ ID NO: 2540
  REGION 1..137: note = Description of Unknown: uncultivated organism with predicted taxonomy: Collinsella
  REGION 1..137: note = MG14-192 RuvC-III domain

SEQ ID NO: 2687 - protein, 137 aa, unidentified; identical to SEQ ID NO: 2538
  REGION 1..137: note = Description of Unknown: uncultivated organism with predicted taxonomy: Collinsella
  REGION 1..137: note = MG14-193 RuvC-III domain

SEQ ID NO: 2688 - protein, 128 aa, unidentified; identical to SEQ ID NO: 2550
  REGION 1..128: note = Description of Unknown: uncultivated organism with predicted taxonomy: Olsenella
  REGION 1..128: note = MG14-194 RuvC-III domain

SEQ ID NO: 2689 - protein, 137 aa, unidentified; identical to SEQ ID NO: 2535
  REGION 1..137: note = Description of Unknown: uncultivated organism with predicted taxonomy: Collinsella
  REGION 1..137: note = MG14-195 RuvC-III domain

SEQ ID NO: 2690 - protein, 126 aa, unidentified; identical to SEQ ID NO: 2560
  REGION 1..126: note = Description of Unknown: uncultivated organism with predicted taxonomy: Collinsella
  REGION 1..126: note = MG14-196 RuvC-III domain

SEQ ID NO: 2691 - protein, 137 aa, unidentified; identical to SEQ ID NO: 2533
  REGION 1..137: note = Description of Unknown: uncultivated organism with predicted taxonomy: Collinsella
  REGION 1..137: note = MG14-197 RuvC-III domain

SEQ ID NO: 2692 - protein, 137 aa, unidentified; identical to SEQ ID NO: 2545
  REGION 1..137: note = Description of Unknown: uncultivated organism with predicted taxonomy: Collinsella
  REGION 1..137: note = MG14-198 RuvC-III domain

SEQ ID NO: 2693 - protein, 137 aa, unidentified; identical to SEQ ID NO: 2568
  REGION 1..137: note = Description of Unknown: uncultivated organism with predicted taxonomy: Collinsella
  REGION 1..137: note = MG14-199 RuvC-III domain

SEQ ID NO: 2694 - protein, 137 aa, unidentified; identical to SEQ ID NO: 2538
  REGION 1..137: note = Description of Unknown: uncultivated organism with predicted taxonomy: Collinsella
  REGION 1..137: note = MG14-200 RuvC-III domain

SEQ ID NO: 2695 - protein, 137 aa, unidentified; identical to SEQ ID NO: 2533
  REGION 1..137: note = Description of Unknown: uncultivated organism with predicted taxonomy: Collinsella
  REGION 1..137: note = MG14-201 RuvC-III domain

SEQ ID NO: 2696 - protein, 137 aa, unidentified; identical to SEQ ID NO: 2533
  REGION 1..137: note = Description of Unknown: uncultivated organism with predicted taxonomy: Collinsella
  REGION 1..137: note = MG14-202 RuvC-III domain

SEQ ID NO: 2697 - protein, 137 aa, unidentified; identical to SEQ ID NO: 2533
  REGION 1..137: note = Description of Unknown: uncultivated organism with predicted taxonomy: Collinsella
  REGION 1..137: note = MG14-203 RuvC-III domain

SEQ ID NO: 2698 - protein, 137 aa, unidentified; identical to SEQ ID NO: 2538
  REGION 1..137: note = Description of Unknown: uncultivated organism with predicted taxonomy: Collinsella
  REGION 1..137: note = MG14-204 RuvC-III domain

SEQ ID NO: 2699 - protein, 137 aa, unidentified; identical to SEQ ID NO: 2533
  REGION 1..137: note = Description of Unknown: uncultivated organism with predicted taxonomy: Olsenella mediterranea
  REGION 1..137: note = MG14-205 RuvC-III domain

SEQ ID NO: 2700 - protein, 73 aa, unidentified
  REGION 1..73: note = Description of Unknown: uncultivated organism with predicted taxonomy: Collinsella
  REGION 1..73: note = MG14-206 RuvC-III domain
TDTAYMSREVCAYLADCLLFPDDGAKAHVVPTTGRATAWLRRRWGLNFGSNGEKDRSDDRHHACHRCLCDCSM

SEQ ID NO: 2701 - protein, 137 aa, unidentified; identical to SEQ ID NO: 2630
  REGION 1..137: note = Description of Unknown: uncultivated organism with predicted taxonomy: Collinsella
  REGION 1..137: note = MG14-207 RuvC-III domain

SEQ ID NO: 2702 - protein, 128 aa, unidentified; identical to SEQ ID NO: 2597
  REGION 1..128: note = Description of Unknown: uncultivated organism with predicted taxonomy: Olsenella
  REGION 1..128: note = MG14-208 RuvC-III domain

SEQ ID NO: 2703 - protein, 137 aa, unidentified; identical to SEQ ID NO: 2559
  REGION 1..137: note = Description of Unknown: uncultivated organism with predicted taxonomy: Collinsella
  REGION 1..137: note = MG14-209 RuvC-III domain

SEQ ID NO: 2704 - protein, 137 aa, unidentified; identical to SEQ ID NO: 2575
  REGION 1..137: note = Description of Unknown: uncultivated organism with predicted taxonomy: Collinsella
  REGION 1..137: note = MG14-210 RuvC-III domain

SEQ ID NO: 2705 - protein, 137 aa, unidentified; identical to SEQ ID NO: 2533
  REGION 1..137: note = Description of Unknown: uncultivated organism with predicted taxonomy: Collinsella
  REGION 1..137: note = MG14-211 RuvC-III domain

SEQ ID NO: 2706 - protein, 126 aa, unidentified; identical to SEQ ID NO: 2590
  REGION 1..126: note = Description of Unknown: uncultivated organism with predicted taxonomy: Collinsella
  REGION 1..126: note = MG14-212 RuvC-III domain

SEQ ID NO: 2707 - protein, 137 aa, unidentified; identical to SEQ ID NO: 2533
  REGION 1..137: note = Description of Unknown: uncultivated organism with predicted taxonomy: Collinsella
  REGION 1..137: note = MG14-213 RuvC-III domain

SEQ ID NO: 2708 - protein, 137 aa, unidentified; identical to SEQ ID NO: 2533
  REGION 1..137: note = Description of Unknown: uncultivated organism with predicted taxonomy: Coriobacteriales
  REGION 1..137: note = MG14-214 RuvC-III domain

SEQ ID NO: 2709 - protein, 115 aa, unidentified
  REGION 1..115: note = Description of Unknown: uncultivated organism with predicted taxonomy: Olsenella
  REGION 1..115: note = MG14-215 RuvC-III domain
NDTRYMSRATMAFLADTLEYPDDGRKRHVIAVAGSATSALRHVWGLNFGEGNVKDRSDDRHHAVDACVIAACSESTLKKVARARSRGYRSFKKTQESRLSDTQPWPTFADDVIAM

SEQ ID NO: 2710 - protein, 137 aa, unidentified; identical to SEQ ID NO: 2533
  REGION 1..137: note = Description of Unknown: uncultivated organism with predicted taxonomy: Collinsella
  REGION 1..137: note = MG14-216 RuvC-III domain

SEQ ID NO: 2711 - protein, 137 aa, unidentified; identical to SEQ ID NO: 2533
  REGION 1..137: note = Description of Unknown: uncultivated organism with predicted taxonomy: Collinsella
  REGION 1..137: note = MG14-217 RuvC-III domain

SEQ ID NO: 2712 - protein, 137 aa, unidentified
  REGION 1..137: note = Description of Unknown: uncultivated organism with predicted taxonomy: Olsenella mediterranea
  REGION 1..137: note = MG14-218 RuvC-III domain
TDTAYMSREVCAYLADCLLFPDDGAKAHVVPTTGRATAWLRRRWGLSFGSNGEKDRSDDRHHATDACVIAACSRSLVIKTARINQETHWSITRGMNETQRRDAIMKALESVMPWETFANEVRAAHDFVVPTRFVPRK

SEQ ID NO: 2713 - protein, 137 aa, unidentified; identical to SEQ ID NO: 2538
  REGION 1..137: note = Description of Unknown: uncultivated organism with predicted taxonomy: Collinsella
  REGION 1..137: note = MG14-219 RuvC-III domain

SEQ ID NO: 2714 - protein, 137 aa, unidentified; identical to SEQ ID NO: 2538
  REGION 1..137: note = Description of Unknown: uncultivated organism with predicted taxonomy: Collinsella
  REGION 1..137: note = MG14-220 RuvC-III domain

SEQ ID NO: 2715 - protein, 137 aa, unidentified; identical to SEQ ID NO: 2540
  REGION 1..137: note = Description of Unknown: uncultivated organism with predicted taxonomy: Collinsella
  REGION 1..137: note = MG14-221 RuvC-III domain

SEQ ID NO: 2716 - protein, 137 aa, unidentified; identical to SEQ ID NO: 2538
  REGION 1..137: note = Description of Unknown: uncultivated organism with predicted taxonomy: Collinsella
  REGION 1..137: note = MG14-222 RuvC-III domain

SEQ ID NO: 2717 - protein, 126 aa, unidentified
  REGION 1..126: note = Description of Unknown: uncultivated organism with predicted taxonomy: Collinsella sp. AM13-34
  REGION 1..126: note = MG14-223 RuvC-III domain
NDTRYMSVALAKWLRECLPFTKDGHEHVFCVAGGATALMRSVWDIGITGPDGKKNRDDDRHHAVDAAVIACCTPGIVRNVALVNEGHARADVRQRLFSDSLPYPEFKEQVDAWIPCIVPTLTLPNT

SEQ ID NO: 2718 - protein, 137 aa, unidentified; identical to SEQ ID NO: 2563
  REGION 1..137: note = Description of Unknown: uncultivated organism with predicted taxonomy: Collinsella
  REGION 1..137: note = MG14-224 RuvC-III domain

SEQ ID NO: 2719 - protein, 137 aa, unidentified; identical to SEQ ID NO: 2499
  REGION 1..137: note = Description of Unknown: uncultivated organism with predicted taxonomy: Collinsella
  REGION 1..137: note = MG14-225 RuvC-III domain

SEQ ID NO: 2720 - protein, 137 aa, unidentified; identical to SEQ ID NO: 2499
  REGION 1..137: note = Description of Unknown: uncultivated organism with predicted taxonomy: Collinsella
  REGION 1..137: note = MG14-226 RuvC-III domain

SEQ ID NO: 2721 - protein, 137 aa, unidentified; identical to SEQ ID NO: 2533
  REGION 1..137: note = Description of Unknown: uncultivated organism with predicted taxonomy: Collinsella
  REGION 1..137: note = MG14-227 RuvC-III domain

SEQ ID NO: 2722 - protein, 137 aa, unidentified; identical to SEQ ID NO: 2567
  REGION 1..137: note = Description of Unknown: uncultivated organism with predicted taxonomy: Olsenella
  REGION 1..137: note = MG14-228 RuvC-III domain

SEQ ID NO: 2723 - protein, 137 aa, unidentified; identical to SEQ ID NO: 2614
  REGION 1..137: note = Description of Unknown: uncultivated organism with predicted taxonomy: Olsenella
  REGION 1..137: note = MG14-229 RuvC-III domain

SEQ ID NO: 2724 - protein, 137 aa, unidentified; identical to SEQ ID NO: 2533
  REGION 1..137: note = Description of Unknown: uncultivated organism with predicted taxonomy: Collinsella
  REGION 1..137: note = MG14-230 RuvC-III domain

SEQ ID NO: 2725 - protein, 137 aa, unidentified; identical to SEQ ID NO: 2607
  REGION 1..137: note = Description of Unknown: uncultivated organism with predicted taxonomy: Collinsella
  REGION 1..137: note = MG14-231 RuvC-III domain

SEQ ID NO: 2726 - protein, 137 aa, unidentified; identical to SEQ ID NO: 2538
  REGION 1..137: note = Description of Unknown: uncultivated organism with predicted taxonomy: Collinsella
  REGION 1..137: note = MG14-232 RuvC-III domain

SEQ ID NO: 2727 - protein, 137 aa, unidentified; identical to SEQ ID NO: 2533
  REGION 1..137: note = Description of Unknown: uncultivated organism with predicted taxonomy: Collinsella
  REGION 1..137: note = MG14-233 RuvC-III domain

SEQ ID NO: 2728 - protein, 137 aa, unidentified; identical to SEQ ID NO: 2541
  REGION 1..137: note = Description of Unknown: uncultivated organism with predicted taxonomy: Collinsella
  REGION 1..137: note = MG14-234 RuvC-III domain

SEQ ID NO: 2729 - protein, 137 aa, unidentified; identical to SEQ ID NO: 2611
  REGION 1..137: note = Description of Unknown: uncultivated organism with predicted taxonomy: Collinsella
  REGION 1..137: note = MG14-235 RuvC-III domain

SEQ ID NO: 2730 - protein, 137 aa, unidentified; identical to SEQ ID NO: 2533
  REGION 1..137: note = Description of Unknown: uncultivated organism with predicted taxonomy: Collinsella
  REGION 1..137: note = MG14-236 RuvC-III domain

SEQ ID NO: 2731 - protein, 137 aa, unidentified; identical to SEQ ID NO: 2533
  REGION 1..137: note = Description of Unknown: uncultivated organism with predicted taxonomy: Collinsella
  REGION 1..137: note = MG14-237 RuvC-III domain

SEQ ID NO: 2732 - protein, 123 aa, unidentified; identical to SEQ ID NO: 2603
  REGION 1..123: note = Description of Unknown: uncultivated organism with predicted taxonomy: Atopobium sp. ICM42b
  REGION 1..123: note = MG14-238 RuvC-III domain

SEQ ID NO: 2733 - protein, 137 aa, unidentified; identical to SEQ ID NO: 2578
  REGION 1..137: note = Description of Unknown: uncultivated organism with predicted taxonomy: Collinsella
  REGION 1..137: note = MG14-239 RuvC-III domain

SEQ ID NO: 2734 - protein, 137 aa, unidentified; identical to SEQ ID NO: 2593
  REGION 1..137: note = Description of Unknown: uncultivated organism with predicted taxonomy: Collinsella
  REGION 1..137: note = MG14-240 RuvC-III domain

SEQ ID NO: 2735 - protein, 137 aa, unidentified; identical to SEQ ID NO: 2616
  REGION 1..137: note = Description of Unknown: uncultivated organism with predicted taxonomy: Collinsella
  REGION 1..137: note = MG14-241 RuvC-III domain

SEQ ID NO: 2736 - protein, 137 aa, unidentified; identical to SEQ ID NO: 2499
  REGION 1..137: note = Description of Unknown: uncultivated organism with predicted taxonomy: Collinsella
  REGION 1..137: note = MG14-242 RuvC-III domain

SEQ ID NO: 2737 - protein, 137 aa, unidentified; identical to SEQ ID NO: 2541
  REGION 1..137: note = Description of Unknown: uncultivated organism with predicted taxonomy: Collinsella
  REGION 1..137: note = MG14-243 RuvC-III domain

SEQ ID NO: 2738 - protein, 129 aa, unidentified
  REGION 1..129: note = Description of Unknown: uncultivated organism
  REGION 1..129: note = MG14-244 RuvC-III domain
NDTRYMSVAVKNYLEDCLLFPEDGRKLHVTAVSGGATASLRRVWGLNSNGSDDEKTNSNTMRNSIDAAVIAACSVKTVQAVAKTRSLGRETFRHMRRSRLADTQPWETFADDVIVKCKTVIPTRMAEHG

SEQ ID NO: 2739 - protein, 128 aa, unidentified
  REGION 1..128: note = Description of Unknown: uncultivated organism with predicted taxonomy: Olsenella
  REGION 1..128: note = MG14-245 RuvC-III domain
NDDRYMSVAVKNYLEDCLLFPNDGRKKHVTAVAGGATGNLRWVWGLNFGQGNTKDRDDDRHHAVDAAIIAACSESTVKKVAEASSKGRETFKHLRKSRLSDTQPWPTFAEEVAARRAFVVPTRMVNHG

SEQ ID NO: 2740 - protein, 128 aa, unidentified
  REGION 1..128: note = Description of Unknown: uncultivated organism with predicted taxonomy: Coriobacteriales
  REGION 1..128: note = MG14-246 RuvC-III domain
NDTRYMSVAVKDYLEKSLLFPDDGRKSHVIAVAGGATSALRHVWGLNFGADNTKDRSDDRHHAVDAAVIAACSQATVKKVADTSKLGHSEFKRKRESRLADTQPWPTFADEVIARREFVIPTRMANHG

SEQ ID NO: 2741 - protein, 128 aa, unidentified; identical to SEQ ID NO: 2740
  REGION 1..128: note = Description of Unknown: uncultivated organism with predicted taxonomy: Coriobacteriales
  REGION 1..128: note = MG14-247 RuvC-III domain

SEQ ID NO: 2742 - protein, 128 aa, unidentified; identical to SEQ ID NO: 2740
  REGION 1..128: note = Description of Unknown: uncultivated organism
  REGION 1..128: note = MG14-248 RuvC-III domain

SEQ ID NO: 2743 - protein, 128 aa, unidentified; identical to SEQ ID NO: 2740
  REGION 1..128: note = Description of Unknown: uncultivated organism with predicted taxonomy: Olsenella
  REGION 1..128: note = MG14-249 RuvC-III domain

SEQ ID NO: 2744 - protein, 128 aa, unidentified
  REGION 1..128: note = Description of Unknown: uncultivated organism with predicted taxonomy: Olsenella
  REGION 1..128: note = MG14-250 RuvC-III domain
NDTRYMSVAVKNYLEDCLQFPDDGRKTHVIAVAGGATASLRHVWGLNFGKNNEKDRTDNRHHAVDAAVIAACSTKTVQAVARASSVGRESFKHIRQSRLADTQPWKTFAEDVITERSFVIPTYMADHG

SEQ ID NO: 2745 - protein, 129 aa, unidentified
  REGION 1..129: note = Description of Unknown: uncultivated organism
  REGION 1..129: note = MG14-251 RuvC-III domain
NDTRYMSVAIKNYLEDCLLFPEDGRKLHVTAVSGGATASLRRVWGLNTKGSDDEKTNSDTMRNAIDAAVIAACSVKTVQAVAKTRSLGRETFRHMRRSRLADTQPWETFADDVLAKCETVIPTRMAEHG

SEQ ID NO: 2746 - protein, 128 aa, unidentified
  REGION 1..128: note = Description of Unknown: uncultivated organism with predicted taxonomy: Olsenella umbonata
  REGION 1..128: note = MG14-252 RuvC-III domain
NDDRYMSRAVKSYLEDTLIFPEDGRKKHVTAVSGGATGSLRHVWGLNFGDGNTKDRSDNRHHAVDACVIAACSEATVQAVAKARKLGAEAYKHIREDRLKDTQPWPTFADEVVARREFVIPTRMVSHG

SEQ ID NO: 2747 - protein, 123 aa, unidentified
  REGION 1..123: note = Description of Unknown: uncultivated organism with predicted taxonomy: Atopobium sp. ICM42b
  REGION 1..123: note = MG14-253 RuvC-III domain
NDNRYLSRAVMNWLAETLAFGDMDRRHVYAVTGAGTAILRKSWALNFGPNGLKDRNYDRHHAIDAAVIAACSVSTIQAIATAHAHERRLSESRMVSTQPWPSFAIELTQRIERVVPTHQVQHK

SEQ ID NO: 2748 - protein, 128 aa, unidentified; identical to SEQ ID NO: 2744
  REGION 1..128: note = Description of Unknown: uncultivated organism with predicted taxonomy: Olsenella sp. KH3B4
  REGION 1..128: note = MG14-254 RuvC-III domain

SEQ ID NO: 2749 - protein, 128 aa, unidentified; identical to SEQ ID NO: 2746
  REGION 1..128: note = Description of Unknown: uncultivated organism with predicted taxonomy: Olsenella
  REGION 1..128: note = MG14-255 RuvC-III domain

SEQ ID NO: 2750 - protein, 93 aa, unidentified
  REGION 1..93: note = Description of Unknown: uncultivated organism with predicted taxonomy: Olsenella
  REGION 1..93: note = MG14-256 RuvC-III domain
NDNRYLSRSVMNWLADTLAFDNLGHRHVYAVTGAGTAILRRHWALNFGSNGLKDRNDDRHHAIDAAVIAACSVSTIQSIATAHARGYRSSESR

SEQ ID NO: 2751 - protein, 153 aa, unidentified
  REGION 1..153: note = Description of Unknown: uncultivated organism with predicted taxonomy: Megasphaera
  REGION 1..153: note = MG15-1 RuvC-III domain
QDTQYISKYLYNYLRHHLVLAKGYTERKRRIIPVNGAVTAYFRKRLGINKIRENGDLHHAVDAVIIACATQGIVNKVSRYSKSRELWDYEVDMETGEVLQKKNKNTKDVFPEPWLNFRYELEQKVRVRPLDIPETADITEMEEPFVSHMPNRK

SEQ ID NO: 2752 - protein, 169 aa, unidentified
  REGION 1..169: note = Description of Unknown: uncultivated organism with predicted taxonomy: Selenomonas sp. AE3005
  REGION 1..169: note = MG15-3 RuvC-III domain
TDTQYISRFVKNLLDEHLEFAPWLSGKKQHVIAVNGAVTDYTRKRLGIRKIREDGDLHHAVDAAVIATVTQGNIQKLTNYSKRIECACIKNSDGSYTNPDTGEILKKDELIVQMSKHFPEPWPKFRHELEARVSDHPKELIESLKLPSYSMEEIDALKPPFVSRMPTRK

SEQ ID NO: 2753 - protein, 169 aa, unidentified; identical to SEQ ID NO: 2752
  REGION 1..169: note = Description of Unknown: uncultivated organism with predicted taxonomy: Selenomonas sp. AE3005
  REGION 1..169: note = MG15-4 RuvC-III domain

SEQ ID NO: 2754 - protein, 158 aa, unidentified
  REGION 1..158: note = Description of Unknown: uncultivated organism with predicted taxonomy: Veillonellales
  REGION 1..158: note = MG15-6 RuvC-III domain
QDTQYISRFLYNYLRNTLKLAPGYTDRKRRIIPVNGAVTGYIRKRLDIRKIRENGDLHHAVDAVVIAVTTQGMIQKVTRYSQIRENPKLIDKKTGEVLTAKEFHNKDNFPEPWPRFRQELEVRVSEDPEEAIRRLRLPAYENVGEIKKPFVSRMPRRK

SEQ ID NO: 2755 - protein, 153 aa, unidentified
  REGION 1..153: note = Description of Unknown: uncultivated organism with predicted taxonomy: Megasphaera stantonii
  REGION 1..153: note = MG15-7 RuvC-III domain
QDTQYISKYLYNYLRHHLVLAKGYTERKRRIIPVNGAVTAYIRKRLGINKIRENGDLHHAVDAVIIACATQGIVNKVSRYSKSRELWDYEVDMETGEVLQKKNENRKDIFPEPWLNFRYELEQKVRVRPLDIPETADITEMEEPFVSHMPNRK

SEQ ID NO: 2756 - protein, 164 aa, unidentified
  REGION 1..164: note = Description of Unknown: uncultivated organism with predicted taxonomy: Dialister
  REGION 1..164: note = MG15-8 RuvC-III domain
QDTQYISRFLYNYLRNTLELAPGYTDRKRRIIPVNGAVTGYIRKRLDIRKIRENGDLHHAVDAVVIAATTQGMIQKVTRYSQIKENETWIDDHTKVDERTGEIFFVKKAHEKDAFPEPWPRFRQELEARVSEDPEEAIRRLGLPSYENAGEIKKPFVSRMPRRK

SEQ ID NO: 2757 - protein, 153 aa, unidentified; identical to SEQ ID NO: 2755
  REGION 1..153: note = Description of Unknown: uncultivated organism with predicted taxonomy: Dialister invisus
  REGION 1..153: note = MG15-9 RuvC-III domain

SEQ ID NO: 2758 - protein, 153 aa, unidentified
  REGION 1..153: note = Description of Unknown: uncultivated organism with predicted taxonomy: Dialister
  REGION 1..153: note = MG15-10 RuvC-III domain
QDTQYISKYLYNYLRHHLVLAKGYTERKRRIIPVNGAVTAYFRKRLGINKIRENGDLHHAVDAVIIACATQGIVNKVSRYSKSRELWDYEVDMETGEVLQKKNKNTKDVFPEPWLNFRYELEQKVRIRPLDIPKTADITEMEEPFVSHMPNRK

SEQ ID NO: 2759 - protein, 153 aa, unidentified; identical to SEQ ID NO: 2758
  REGION 1..153: note = Description of Unknown: uncultivated organism with predicted taxonomy: Dialister
  REGION 1..153: note = MG15-11 RuvC-III domain

SEQ ID NO: 2760 - protein, 167 aa, unidentified
  REGION 1..167: note = Description of Unknown: uncultivated organism with predicted taxonomy: Megasphaera micronuciformis
  REGION 1..167: note = MG15-12 RuvC-III domain
QDTQYISRFMLNYLQNNYELTPGNTDRKRRIIPVNGAVTAYVRKRLGISKIRENGDLHHAVDAAVIAAVTQGVVNSVSKYSKRHELQYHVDEHGNCVDLVTGELMGDAFKENHKIKGFPEPWPQFRAELEARVSENATEAIRILNLPTYSPDEEIKTPFVSRMVRHK

SEQ ID NO: 2761 - protein, 153 aa, unidentified; identical to SEQ ID NO: 2755
  REGION 1..153: note = Description of Unknown: uncultivated organism with predicted taxonomy: Megasphaera sp. AM44-1BH
  REGION 1..153: note = MG15-13 RuvC-III domain

SEQ ID NO: 2762 - protein, 153 aa, unidentified
  REGION 1..153: note = Description of Unknown: uncultivated organism with predicted taxonomy: Dialister
  REGION 1..153: note = MG15-14 RuvC-III domain
QDTQYISKYLYNYLRHHLVLAKGYTERKRRIIPVNGAVTAYFRKRLGINKIRENGDLHHAVDAVIIACATQGIVNKVSRYSKSRELWDYEVDMETGEVLQKKNENRKDIFPEPWLNFRYELEQKVRVRPLDIPETADITEMEEPFVSHMPNRK

SEQ ID NO: 2763 - protein, 167 aa, unidentified
  REGION 1..167: note = Description of Unknown: uncultivated organism with predicted taxonomy: Megasphaera micronuciformis
  REGION 1..167: note = MG15-15 RuvC-III domain
QDTQYISRFMLNYLQNNYELTPGNTDRRRRIIPVNGAVTAYVRKRLGISKIRENGDLHHAVDAAVIAAVTQGVVNSVSRYSKRHELQYHVDEHGNCVDLVTGELMGDAFKENHKIKGFPEPWPQFRAELEARVSENAAEAIRILNLPTYSPDEEIKTPFVSRMVRHK

SEQ ID NO: 2764 - protein, 165 aa, unidentified
  REGION 1..165: note = Description of Unknown: uncultivated organism with predicted taxonomy: Megasphaera stantonii
  REGION 1..165: note = MG15-16 RuvC-III domain
QDTQYISRYLYNYLKRHIELKEGYTDRKRRIIPVNGAVTAYVRKRLGISKIRENGDLHHAVDAVIIACVTQGVVNKISRYSKIKELRQFMTADGTIVDQETGEVLQTANPRKTDPFPEPWPKFRQELEARVSDNPAEAIAALRLPTYEGIVTISAPFVSRMPNRK

SEQ ID NO: 2765 - protein, 153 aa, unidentified; identical to SEQ ID NO: 2755
  REGION 1..153: note = Description of Unknown: uncultivated organism with predicted taxonomy: Dialister
  REGION 1..153: note = MG15-17 RuvC-III domain

SEQ ID NO: 2766 - protein, 167 aa, unidentified
  REGION 1..167: note = Description of Unknown: uncultivated organism with predicted taxonomy: Megasphaera micronuciformis
  REGION 1..167: note = MG15-18 RuvC-III domain
QDTQYISRFMLNYLQNNYELTPGNTDRKRRIIPVNGAVTAYVRKRLGISKIRENGDLHHAVDAAVIAAVTQGVVNSVSKYSKRHELQYHVDEHGNCVDLVTGELMGDAFKENHKIKGFPEPWPQFRAELEARVSENAAEAIRILKLPTYSPDEEIKTPFVSRMVRHK

SEQ ID NO: 2767 - protein, 167 aa, unidentified
  REGION 1..167: note = Description of Unknown: uncultivated organism with predicted taxonomy: Megasphaera micronuciformis
  REGION 1..167: note = MG15-19 RuvC-III domain
QDTQYISRFMLNYLQNNYELTPGNTDRRRRIIPVNGAVTAYVRKRLGISKIRENGDLHHAVDAAVIAAVTQGVVNSVSKYSKRHELQYHVDEHGNCVDLVTGELMGDAFKENHKIKGFPEPWPQFRAELEARVSENAAEAIRILKLPTYSPDEEIKTPFVSRMVRHK

SEQ ID NO: 2768 - protein, 153 aa, unidentified; identical to SEQ ID NO: 2751
  REGION 1..153: note = Description of Unknown: uncultivated organism with predicted taxonomy: Dialister
  REGION 1..153: note = MG15-20 RuvC-III domain

SEQ ID NO: 2769 - protein, 153 aa, unidentified; identical to SEQ ID NO: 2755
  REGION 1..153: note = Description of Unknown: uncultivated organism with predicted taxonomy: Dialister
  REGION 1..153: note = MG15-21 RuvC-III domain

SEQ ID NO: 2770 - protein, 153 aa, unidentified; identical to SEQ ID NO: 2751
  REGION 1..153: note = Description of Unknown: uncultivated organism with predicted taxonomy: Dialister
  REGION 1..153: note = MG15-22 RuvC-III domain

SEQ ID NO: 2771 - protein, 153 aa, unidentified; identical to SEQ ID NO: 2758
  REGION 1..153: note = Description of Unknown: uncultivated organism with predicted taxonomy: Dialister
  REGION 1..153: note = MG15-23 RuvC-III domain

SEQ ID NO: 2772 - protein, 153 aa, unidentified
  REGION 1..153: note = Description of Unknown: uncultivated organism with predicted taxonomy: Dialister invisus
  REGION 1..153: note = MG15-24 RuvC-III domain
QDTQYISKYLYNYLLENLELAKGYTERKRRIIPVNGAVTAYIRKRLGINKIRENGDLHHAVDAVIIACATQGIVNKVSRYSKSRELWDYEVDKETGEILQKKNKNTKDVFPEPWLNFRYELEQKVRIRPLDIPETADITKMEEPFVSHMPNRK

SEQ ID NO: 2773 - protein, 153 aa, unidentified; identical to SEQ ID NO: 2772
  REGION 1..153: note = Description of Unknown: uncultivated organism with predicted taxonomy: Dialister
  REGION 1..153: note = MG15-25 RuvC-III domain

SEQ ID NO: 2774 - protein, 153 aa, unidentified; identical to SEQ ID NO: 2751
  REGION 1..153: note = Description of Unknown: uncultivated organism with predicted taxonomy: Dialister
  REGION 1..153: note = MG15-26 RuvC-III domain

SEQ ID NO: 2775 - protein, 153 aa, unidentified
  REGION 1..153: note = Description of Unknown: uncultivated organism with predicted taxonomy: Dialister
  REGION 1..153: note = MG15-27 RuvC-III domain
QDTQYISKYLYNYLRHHLVLAKGYTERKRRIIPVNGAVTAYFRKRLGINKIRGNGDLHHAVDAVIIACATQGIVNKVSRYSKSRELWDYEVDMETGEVLQKKNKNTKDVFPEPWLNFRYELEQKVRVRPLDIPKTADITEMEEPFVSHMPNRK

SEQ ID NO: 2776 - protein, 153 aa, unidentified; identical to SEQ ID NO: 2751
  REGION 1..153: note = Description of Unknown: uncultivated organism with predicted taxonomy: Dialister
  REGION 1..153: note = MG15-28 RuvC-III domain

SEQ ID NO: 2777 - protein, 119 aa, unidentified
  REGION 1..119: note = Description of Unknown: uncultivated organism with predicted taxonomy: Dialister invisus
  REGION 1..119: note = MG15-29 RuvC-III domain
QDTQYISKYLYNYLRHHLVLAKGYTERKRRIIPVNGAVTAYFRKRLGINKIRENGDLHHAVDAVIIACATQGIVNKVSRYSKSRELWDYEVDMETGEVLQKKNKNTKDVFPEPWLNFRY

SEQ ID NO: 2778 - protein, 153 aa, unidentified; identical to SEQ ID NO: 2755
  REGION 1..153: note = Description of Unknown: uncultivated organism with predicted taxonomy: Megasphaera sp. AM44-1BH
  REGION 1..153: note = MG15-30 RuvC-III domain

SEQ ID NO: 2779 - protein, 153 aa, unidentified
  REGION 1..153: note = Description of Unknown: uncultivated organism with predicted taxonomy: Dialister
  REGION 1..153: note = MG15-31 RuvC-III domain
QDTQYISKYLYNYLRHHLVLAKGYTERKRRIIPVNGAVTAYFRKRLGINKIRENGDLHHAVDAVIIACATQGIINKVSRYSKSRELWDYEVDMETGEVLQKKNKNTKDVFPEPWLNFRYELEQKVRVRPLNIPETADITEMEEPFVSHMPNRK

SEQ ID NO: 2780 - protein, 153 aa, unidentified; identical to SEQ ID NO: 2751
  REGION 1..153: note = Description of Unknown: uncultivated organism with predicted taxonomy: Veillonellales
  REGION 1..153: note = MG15-32 RuvC-III domain

SEQ ID NO: 2781 - protein, 153 aa, unidentified
  REGION 1..153: note = Description of Unknown: uncultivated organism with predicted taxonomy: Dialister
  REGION 1..153: note = MG15-33 RuvC-III domain
QDTQYISKYLYNYLRHHLVLAKGYTERKRRIIPVNGAVTAYFRKRLGINKIRENGDLHHAVDAVIIACATQGIVNKVSRYSKSRELWDYEVDMETGEVLQKKNKNTKDVFPEPWLNFRYELEQKVRVRPLDIPKTADITEMEEPFVSHMPNRK

SEQ ID NO: 2782 - protein, 153 aa, unidentified; identical to SEQ ID NO: 2772
  REGION 1..153: note = Description of Unknown: uncultivated organism with predicted taxonomy: Megasphaera
  REGION 1..153: note = MG15-34 RuvC-III domain

SEQ ID NO: 2783 - protein, 165 aa, unidentified; identical to SEQ ID NO: 2764
  REGION 1..165: note = Description of Unknown: uncultivated organism with predicted taxonomy: Megasphaera
  REGION 1..165: note = MG15-35 RuvC-III domain

SEQ ID NO: 2784 - protein, 153 aa, unidentified; identical to SEQ ID NO: 2772
  REGION 1..153: note = Description of Unknown: uncultivated organism with predicted taxonomy: Dialister
  REGION 1..153: note = MG15-36 RuvC-III domain

SEQ ID NO: 2785 - protein, 153 aa, unidentified; identical to SEQ ID NO: 2772
  REGION 1..153: note = Description of Unknown: uncultivated organism with predicted taxonomy: Dialister
  REGION 1..153: note = MG15-37 RuvC-III domain

SEQ ID NO: 2786 - protein, 170 aa, unidentified
  REGION 1..170: note = Description of Unknown: uncultivated organism with predicted taxonomy: Selenomonas bovis
  REGION 1..170: note = MG15-38 RuvC-III domain
NDTKYISRFIYNLIRQHLQFAPFRTDRKQHIISVNGAVTSYIRKRLGIPKIREDGDLHHAVDAVVIASITQGTIQKVTRYSREKETLYHCDSKGRLIDTSTGEILSPEEHQRRLAEKFPEPWPCFRKEIEARISHHPAENLRLLHLPTYTEEELAELEKPIFVSRMPNHK

SEQ ID NO: 2787 - protein, 153 aa, unidentified; identical to SEQ ID NO: 2751
  REGION 1..153: note = Description of Unknown: uncultivated organism with predicted taxonomy: Dialister
  REGION 1..153: note = MG15-39 RuvC-III domain

SEQ ID NO: 2788 - protein, 153 aa, unidentified; identical to SEQ ID NO: 2751
  REGION 1..153: note = Description of Unknown: uncultivated organism with predicted taxonomy: Dialister
  REGION 1..153: note = MG15-40 RuvC-III domain

SEQ ID NO: 2789 - protein, 165 aa, unidentified
  REGION 1..165: note = Description of Unknown: uncultivated organism with predicted taxonomy: Megasphaera sp. AM44-1BH
  REGION 1..165: note = MG15-41 RuvC-III domain
QDTQYLSTYLYNYLCHVMKLTPGCTERKRRIIAVNGAVTAYVRKRLGINKIRSNGDLHHAVDAVIIACVTQGVINRISRYSKIKELQNFQTNDGQVVDSVTGEILTLKHVHKKDPFPEPWPHFRQELEARVGKQPQEAIAALHLPTYKNVESIYTPFVSRMPNRK

SEQ ID NO: 2790 - protein, 167 aa, unidentified
  REGION 1..167: note = Description of Unknown: uncultivated organism with predicted taxonomy: Veillonellales
  REGION 1..167: note = MG15-42 RuvC-III domain
QDTQYISRFLYNYLRQNLPLKEGFTNRKRRIIPVNGAVTSYVRKRLGIAKIRENGDLHHAVDAVIIACVTQGVIKRVSEYSKSRELWLYQLDDGTVIDGETGEVMTGQRGHKQEPFPEPWPEFRHELEDRVSENPPELLRHLQLPAYEGIDIETIKTPFVSRMPNRK

SEQ ID NO: 2791 - protein, 153 aa, unidentified; identical to SEQ ID NO: 2758
  REGION 1..153: note = Description of Unknown: uncultivated organism with predicted taxonomy: Veillonellales
  REGION 1..153: note = MG15-43 RuvC-III domain

SEQ ID NO: 2792 - protein, 167 aa, unidentified; identical to SEQ ID NO: 2790
  REGION 1..167: note = Description of Unknown: uncultivated organism with predicted taxonomy: Veillonellales
  REGION 1..167: note = MG15-44 RuvC-III domain

SEQ ID NO: 2793 - protein, 170 aa, unidentified; identical to SEQ ID NO: 2786
  REGION 1..170: note = Description of Unknown: uncultivated organism with predicted taxonomy: Selenomonas bovis
  REGION 1..170: note = MG15-45 RuvC-III domain

SEQ ID NO: 2794 - protein, 153 aa, unidentified
  REGION 1..153: note = Description of Unknown: uncultivated organism with predicted taxonomy: Dialister
  REGION 1..153: note = MG15-46 RuvC-III domain
QDTQYISKYLYNYLRHHLVPAKGYTERKRRIIPVNGAVTAYIRKRLGINKIRENGDLHHAVDAVIIACATQGIVNKVSRYSKSRELWDYEVDMETGEVLQKKNENRKDIFPEPWLNFRYELEQKVRVRPLDIPETADITEMEEPFVSHMPNRK

SEQ ID NO: 2795 - protein, 158 aa, unidentified
  REGION 1..158: note = Description of Unknown: uncultivated organism with predicted taxonomy: Dialister
  REGION 1..158: note = MG15-47 RuvC-III domain
QDTQYISRFLYNYLRNTLELTPGYTDRKRRIIPVNGAVTGYIRKRLGIRKIRENGDLHHAVDAVVIAVTTQGMIQKVTRYSQIRENPKLIDKKTGEVLTAKEFHNKDNFPEPWPRFRQELEARVSEDPEEAIRRLRLPAYENVGEIKKPFISRMPRRK

SEQ ID NO: 2796 - protein, 170 aa, unidentified; identical to SEQ ID NO: 2786
  REGION 1..170: note = Description of Unknown: uncultivated organism with predicted taxonomy: Selenomonas bovis
  REGION 1..170: note = MG15-48 RuvC-III domain

SEQ ID NO: 2797 - protein, 153 aa, unidentified
  REGION 1..153: note = Description of Unknown: uncultivated organism with predicted taxonomy: Dialister
  REGION 1..153: note = MG15-49 RuvC-III domain
QDTQYISKYLYNYLLENLELAKGYTERKRRIIPVNGAVTAYFRKRLGINKIRENGDLHHAVDAVIIACATQGIVNKVSRYSKSRELWDYEVDMETGEVLQKKNENRKDIFPEPWLNFRYELEQKVRVRPLDIPETADITEMEEPFVSHMPNRK

SEQ ID NO: 2798 - protein, 153 aa, unidentified; identical to SEQ ID NO: 2751
  REGION 1..153: note = Description of Unknown: uncultivated organism with predicted taxonomy: Dialister
  REGION 1..153: note = MG15-50 RuvC-III domain

SEQ ID NO: 2799 - protein, 153 aa, unidentified; identical to SEQ ID NO: 2758
  REGION 1..153: note = Description of Unknown: uncultivated organism with predicted taxonomy: Dialister
  REGION 1..153: note = MG15-51 RuvC-III domain

SEQ ID NO: 2800 - protein, 153 aa, unidentified; identical to SEQ ID NO: 2797
  REGION 1..153: note = Description of Unknown: uncultivated organism with predicted taxonomy: Veillonellales
  REGION 1..153: note = MG15-52 RuvC-III domain

SEQ ID NO: 2801 - protein, 153 aa, unidentified; identical to SEQ ID NO: 2772
  REGION 1..153: note = Description of Unknown: uncultivated organism with predicted taxonomy: Dialister invisus
  REGION 1..153: note = MG15-53 RuvC-III domain

SEQ ID NO: 2802 - protein, 153 aa, unidentified; identical to SEQ ID NO: 2781
  REGION 1..153: note = Description of Unknown: uncultivated organism with predicted taxonomy: Dialister
  REGION 1..153: note = MG15-54 RuvC-III domain

SEQ ID NO: 2803 - protein, 167 aa, unidentified
  REGION 1..167: note = Description of Unknown: uncultivated organism with predicted taxonomy: Megasphaera stantonii
  REGION 1..167: note = MG15-55 RuvC-III domain
QDTQYISRFMLNYLQNNYELTPGNTNRKRRIIPVNGAVTAYVRKRLGISKIRENGDLHHAVDATVIAAVTQGVVNSVSKYSKRHELQYHVDEHGNCVDLVTGELMGDAFKENHKIKGFPEPWPQFRAELEARVSENAAEAIRILKLPTYSPDEEIKTPFVSRMVRHK

SEQ ID NO: 2804 - protein, 170 aa, unidentified; identical to SEQ ID NO: 2786
  REGION 1..170: note = Description of Unknown: uncultivated organism with predicted taxonomy: Selenomonas bovis
  REGION 1..170: note = MG15-56 RuvC-III domain

SEQ ID NO: 2805 - protein, 153 aa, unidentified; identical to SEQ ID NO: 2781
  REGION 1..153: note = Description of Unknown: uncultivated organism with predicted taxonomy: Dialister
  REGION 1..153: note = MG15-57 RuvC-III domain

SEQ ID NO: 2806 - protein, 153 aa, unidentified; identical to SEQ ID NO: 2794
  REGION 1..153: note = Description of Unknown: uncultivated organism with predicted taxonomy: Dialister
  REGION 1..153: note = MG15-58 RuvC-III domain

SEQ ID NO: 2807 - protein, 153 aa, unidentified; identical to SEQ ID NO: 2794
  REGION 1..153: note = Description of Unknown: uncultivated organism with predicted taxonomy: Dialister
  REGION 1..153: note = MG15-59 RuvC-III domain

SEQ ID NO: 2808 - protein, 153 aa, unidentified; identical to SEQ ID NO: 2772
  REGION 1..153: note = Description of Unknown: uncultivated organism with predicted taxonomy: Megasphaera
  REGION 1..153: note = MG15-60 RuvC-III domain

SEQ ID NO: 2809 - protein, 153 aa, unidentified; identical to SEQ ID NO: 2772
  REGION 1..153: note = Description of Unknown: uncultivated organism with predicted taxonomy: Dialister
  REGION 1..153: note = MG15-61 RuvC-III domain

SEQ ID NO: 2810 - protein, 167 aa, unidentified; identical to SEQ ID NO: 2766
  REGION 1..167: note = Description of Unknown: uncultivated organism with predicted taxonomy: Megasphaera stantonii
  REGION 1..167: note = MG15-62 RuvC-III domain

SEQ ID NO: 2811 - protein, 153 aa, unidentified; identical to SEQ ID NO: 2762
  REGION 1..153: note = Description of Unknown: uncultivated organism with predicted taxonomy: Dialister
  REGION 1..153: note = MG15-63 RuvC-III domain

SEQ ID NO: 2812 - protein, 153 aa, unidentified; identical to SEQ ID NO: 2794
  REGION 1..153: note = Description of Unknown: uncultivated organism with predicted taxonomy: Megasphaera
  REGION 1..153: note = MG15-64 RuvC-III domain

SEQ ID NO: 2813 - protein, 153 aa, unidentified; identical to SEQ ID NO: 2751
  REGION 1..153: note = Description of Unknown: uncultivated organism with predicted taxonomy: Dialister
  REGION 1..153: note = MG15-65 RuvC-III domain

SEQ ID NO: 2814 - protein, 167 aa, unidentified; identical to SEQ ID NO: 2766
  REGION 1..167: note = Description of Unknown: uncultivated organism with predicted taxonomy: Megasphaera micronuciformis
  REGION 1..167: note = MG15-66 RuvC-III domain

SEQ ID NO: 2815 - protein, 167 aa, unidentified; identical to SEQ ID NO: 2766
  REGION 1..167: note = Description of Unknown: uncultivated organism with predicted taxonomy: Megasphaera stantonii
  REGION 1..167: note = MG15-67 RuvC-III domain

SEQ ID NO: 2816 - protein, 153 aa, unidentified
  REGION 1..153: note = Description of Unknown: uncultivated organism with predicted taxonomy: Veillonellaceae bacterium DNF00626
  REGION 1..153: note = MG15-68 RuvC-III domain
QDTQYISSYLYRYLMQNITLAPGYTDRKERIISLNGVVTGYVRKRWRIPKIRANGDLHHAVDAVVIACINDRLIKRVTEYSKAKELEYTPSDSGAVKTSMKDGFPEPWYCFRQELKARLSETPDEAIRNLHLATYCNVGNIKTPFVSRMLKCK

SEQ ID NO: 2817 - protein, 164 aa, unidentified
  REGION 1..164: note = Description of Unknown: uncultivated organism with predicted taxonomy: Dialister
  REGION 1..164: note = MG15-69 RuvC-III domain
QDTQYISRFLYNYLRNTLELTPGYTDRKRRIIPVNGAVTGYIRKRLGIHKIRENGDLHHAVDAVVIAATTQGMIQKVTRYSQIKENETWIDDHTKVDERTGEIFFVKKAHEKDAFPEPWPRFRQELEARVSEDPEETIRRLRLPSYENAGEIKKPFVSRMPRRK

SEQ ID NO: 2818 - protein, 153 aa, unidentified; identical to SEQ ID NO: 2758
  REGION 1..153: note = Description of Unknown: uncultivated organism with predicted taxonomy: Dialister
  REGION 1..153: note = MG15-70 RuvC-III domain

SEQ ID NO: 2819 - protein, 153 aa, unidentified; identical to SEQ ID NO: 2794
  REGION 1..153: note = Description of Unknown: uncultivated organism with predicted taxonomy: Dialister
  REGION 1..153: note = MG15-71 RuvC-III domain

SEQ ID NO: 2820 - protein, 153 aa, unidentified; identical to SEQ ID NO: 2758
  REGION 1..153: note = Description of Unknown: uncultivated organism with predicted taxonomy: Dialister
  REGION 1..153: note = MG15-72 RuvC-III domain

SEQ ID NO: 2821 - protein, 153 aa, unidentified; identical to SEQ ID NO: 2772
  REGION 1..153: note = Description of Unknown: uncultivated organism with predicted taxonomy: Dialister invisus
  REGION 1..153: note = MG15-73 RuvC-III domain

SEQ ID NO: 2822 - protein, 153 aa, unidentified; identical to SEQ ID NO: 2772
  REGION 1..153: note = Description of Unknown: uncultivated organism with predicted taxonomy: Dialister
  REGION 1..153: note = MG15-74 RuvC-III domain

SEQ ID NO: 2823 - protein, 153 aa, unidentified; identical to SEQ ID NO: 2772
  REGION 1..153: note = Description of Unknown: uncultivated organism with predicted taxonomy: Dialister invisus
  REGION 1..153: note = MG15-75 RuvC-III domain

SEQ ID NO: 2824 - protein, 153 aa, unidentified; identical to SEQ ID NO: 2751
  REGION 1..153: note = Description of Unknown: uncultivated organism with predicted taxonomy: Dialister
  REGION 1..153: note = MG15-76 RuvC-III domain

SEQ ID NO: 2825 - protein, 153 aa, unidentified; identical to SEQ ID NO: 2781
  REGION 1..153: note = Description of Unknown: uncultivated organism with predicted taxonomy: Dialister invisus
  REGION 1..153: note = MG15-77 RuvC-III domain

SEQ ID NO: 2826 - protein, 153 aa, unidentified; identical to SEQ ID NO: 2772
  REGION 1..153: note = Description of Unknown: uncultivated organism with predicted taxonomy: Dialister
  REGION 1..153: note = MG15-78 RuvC-III domain

SEQ ID NO: 2827 - protein, 153 aa, unidentified; identical to SEQ ID NO: 2751
  REGION 1..153: note = Description of Unknown: uncultivated organism with predicted taxonomy: Megasphaera stantonii
  REGION 1..153: note = MG15-79 RuvC-III domain

SEQ ID NO: 2828 - protein, 153 aa, unidentified; identical to SEQ ID NO: 2755
  REGION 1..153: note = Description of Unknown: uncultivated organism with predicted taxonomy: Megasphaera sp. AM44-1BH
  REGION 1..153: note = MG15-80 RuvC-III domain

SEQ ID NO: 2829 - protein, 153 aa, unidentified; identical to SEQ ID NO: 2751
  REGION 1..153: note = Description of Unknown: uncultivated organism with predicted taxonomy: Megasphaera
  REGION 1..153: note = MG15-81 RuvC-III domain

SEQ ID NO: 2830 - protein, 153 aa, unidentified; identical to SEQ ID NO: 2755
  REGION 1..153: note = Description of Unknown: uncultivated organism with predicted taxonomy: Megasphaera sp. AM44-1BH
  REGION 1..153: note = MG15-82 RuvC-III domain

SEQ ID NO: 2831 - protein, 153 aa, unidentified; identical to SEQ ID NO: 2816
  REGION 1..153: note = Description of Unknown: uncultivated organism with predicted taxonomy: Veillonellaceae bacterium DNF00626
  REGION 1..153: note = MG15-83 RuvC-III domain

SEQ ID NO: 2832 - protein, 153 aa, unidentified; identical to SEQ ID NO: 2755
  REGION 1..153: note = Description of Unknown: uncultivated organism with predicted taxonomy: Dialister
  REGION 1..153: note = MG15-84 RuvC-III domain

SEQ ID NO: 2833 - protein, 153 aa, unidentified; identical to SEQ ID NO: 2755
  REGION 1..153: note = Description of Unknown: uncultivated organism with predicted taxonomy: Dialister
  REGION 1..153: note = MG15-85 RuvC-III domain

SEQ ID NO: 2834 - protein, 153 aa, unidentified; identical to SEQ ID NO: 2775
  REGION 1..153: note = Description of Unknown: uncultivated organism with predicted taxonomy: Dialister
  REGION 1..153: note = MG15-86 RuvC-III domain

SEQ ID NO: 2835 - protein, 153 aa, unidentified; identical to SEQ ID NO: 2779
  REGION 1..153: note = Description of Unknown: uncultivated organism with predicted taxonomy: Dialister
  REGION 1..153: note = MG15-87 RuvC-III domain

SEQ ID NO: 2836 - protein, 153 aa, unidentified; identical to SEQ ID NO: 2755
  REGION 1..153: note = Description of Unknown: uncultivated organism with predicted taxonomy: Megasphaera sp. AM44-1BH
  REGION 1..153: note = MG15-88 RuvC-III domain

SEQ ID NO: 2837 - protein, 153 aa, unidentified; identical to SEQ ID NO: 2755
  REGION 1..153: note = Description of Unknown: uncultivated organism with predicted taxonomy: Dialister
  REGION 1..153: note = MG15-89 RuvC-III domain

SEQ ID NO: 2838 - protein, 153 aa, unidentified; identical to SEQ ID NO: 2762
  REGION 1..153: note = Description of Unknown: uncultivated organism with predicted taxonomy: Dialister
  REGION 1..153: note = MG15-90 RuvC-III domain

SEQ ID NO: 2839 - protein, 153 aa, unidentified; identical to SEQ ID NO: 2794
  REGION 1..153: note = Description of Unknown: uncultivated organism with predicted taxonomy: Dialister
  REGION 1..153: note = MG15-91 RuvC-III domain

SEQ ID NO: 2840 - protein, 165 aa, unidentified; identical to SEQ ID NO: 2764
  REGION 1..165: note = Description of Unknown: uncultivated organism with predicted taxonomy: Firmicutes
  REGION 1..165: note = MG15-92 RuvC-III domain

SEQ ID NO: 2841 - protein, 167 aa, unidentified; identical to SEQ ID NO: 2763
  REGION 1..167: note = Description of Unknown: uncultivated organism with predicted taxonomy: Megasphaera micronuciformis
  REGION 1..167: note = MG15-93 RuvC-III domain

SEQ ID NO: 2842 - protein, 153 aa, unidentified; identical to SEQ ID NO: 2797
  REGION 1..153: note = Description of Unknown: uncultivated organism with predicted taxonomy: Dialister
  REGION 1..153: note = MG15-94 RuvC-III domain

SEQ ID NO: 2843 - protein, 153 aa, unidentified; identical to SEQ ID NO: 2772
  REGION 1..153: note = Description of Unknown: uncultivated organism with predicted taxonomy: Dialister
  REGION 1..153: note = MG15-95 RuvC-III domain

SEQ ID NO: 2844 - protein, 167 aa, unidentified; identical to SEQ ID NO: 2766
  REGION 1..167: note = Description of Unknown: uncultivated organism with predicted taxonomy: Megasphaera micronuciformis
  REGION 1..167: note = MG15-96 RuvC-III domain

SEQ ID NO: 2845 - protein, 167 aa, unidentified; identical to SEQ ID NO: 2767
  REGION 1..167: note = Description of Unknown: uncultivated organism with predicted taxonomy: Megasphaera micronuciformis
  REGION 1..167: note = MG15-97 RuvC-III domain

SEQ ID NO: 2846 - protein, 153 aa, unidentified; identical to SEQ ID NO: 2751
  REGION 1..153: note = Description of Unknown: uncultivated organism with predicted taxonomy: Dialister
  REGION 1..153: note = MG15-98 RuvC-III domain

SEQ ID NO: 2847 - protein, 167 aa, unidentified; identical to SEQ ID NO: 2766
  REGION 1..167: note = Description of Unknown: uncultivated organism with predicted taxonomy: Megasphaera micronuciformis
  REGION 1..167: note = MG15-99 RuvC-III domain

SEQ ID NO: 2848 - protein, 167 aa, unidentified; identical to SEQ ID NO: 2766
  REGION 1..167: note = Description of Unknown: uncultivated organism with predicted taxonomy: Megasphaera stantonii
  REGION 1..167: note = MG15-100 RuvC-III domain

SEQ ID NO: 2849 - protein, 153 aa, unidentified; identical to SEQ ID NO: 2772
  REGION 1..153: note = Description of Unknown: uncultivated organism with predicted taxonomy: Dialister
  REGION 1..153: note = MG15-101 RuvC-III domain

SEQ ID NO: 2850 - protein, 153 aa, unidentified; identical to SEQ ID NO: 2751
  REGION 1..153: note = Description of Unknown: uncultivated organism with predicted taxonomy: Megasphaera
  REGION 1..153: note = MG15-102 RuvC-III domain

SEQ ID NO: 2851 - protein, 165 aa, unidentified; identical to SEQ ID NO: 2789
  REGION 1..165: note = Description of Unknown: uncultivated organism with predicted taxonomy: Megasphaera sp. AM44-1BH
  REGION 1..165: note = MG15-103 RuvC-III domain

SEQ ID NO: 2852 - protein, 153 aa, unidentified; identical to SEQ ID NO: 2751
  REGION 1..153: note = Description of Unknown: uncultivated organism with predicted taxonomy: Dialister
  REGION 1..153: note = MG15-104 RuvC-III domain

SEQ ID NO: 2853 - protein, 167 aa, unidentified; identical to SEQ ID NO: 2767
  REGION 1..167: note = Description of Unknown: uncultivated organism with predicted taxonomy: Megasphaera micronuciformis
  REGION 1..167: note = MG15-105 RuvC-III domain

SEQ ID NO: 2854 - protein, 153 aa, unidentified; identical to SEQ ID NO: 2751
  REGION 1..153: note = Description of Unknown: uncultivated organism with predicted taxonomy: Dialister
  REGION 1..153: note = MG15-106 RuvC-III domain

SEQ ID NO: 2855 - protein, 153 aa, unidentified; identical to SEQ ID NO: 2751
  REGION 1..153: note = Description of Unknown: uncultivated organism with predicted taxonomy: Dialister
  REGION 1..153: note = MG15-107 RuvC-III domain

SEQ ID NO: 2856 - protein, 153 aa, unidentified; identical to SEQ ID NO: 2751
  REGION 1..153: note = Description of Unknown: uncultivated organism with predicted taxonomy: Dialister
  REGION 1..153: note = MG15-108 RuvC-III domain

SEQ ID NO: 2857 - protein, 167 aa, unidentified; identical to SEQ ID NO: 2766
  REGION 1..167: note = Description of Unknown: uncultivated organism with predicted taxonomy: Megasphaera stantonii
  REGION 1..167: note = MG15-109 RuvC-III domain

SEQ ID NO: 2858 - protein, 153 aa, unidentified; identical to SEQ ID NO: 2762
  REGION 1..153: note = Description of Unknown: uncultivated organism with predicted taxonomy: Dialister
  REGION 1..153: note = MG15-110 RuvC-III domain

SEQ ID NO: 2859 - protein, 153 aa, unidentified; identical to SEQ ID NO: 2751
  REGION 1..153: note = Description of Unknown: uncultivated organism with predicted taxonomy: Veillonellales
  REGION 1..153: note = MG15-111 RuvC-III domain

SEQ ID NO: 2860 - protein, 153 aa, unidentified; identical to SEQ ID NO: 2772
  REGION 1..153: note = Description of Unknown: uncultivated organism with predicted taxonomy: Dialister
  REGION 1..153: note = MG15-112 RuvC-III domain

SEQ ID NO: 2861 - protein, 153 aa, unidentified; identical to SEQ ID NO: 2751
  REGION 1..153: note = Description of Unknown: uncultivated organism with predicted taxonomy: Dialister
  REGION 1..153: note = MG15-113 RuvC-III domain

SEQ ID NO: 2862 - protein, 164 aa, unidentified
  REGION 1..164: note = Description of Unknown: uncultivated organism with predicted taxonomy: Veillonellales
  REGION 1..164: note = MG15-114 RuvC-III domain
QDTQYISRFLYNYLKNTLELTPGYTDRKRRIIPVNGAVTGYIRKRLGIHKIRENGDLHHAVDAVVIAATTQGMIQKVTRYSQIKENETWIDDHTKVDERTGEIFFVKKAHEKDAFPEPWPRFRQELEARVSEDPEEAIRRLGLPSYENVGEIKKPFVSRMPRRK

SEQ ID NO: 2863 - protein, 153 aa, unidentified; identical to SEQ ID NO: 2751
  REGION 1..153: note = Description of Unknown: uncultivated organism with predicted taxonomy: Dialister
  REGION 1..153: note = MG15-115 RuvC-III domain

SEQ ID NO: 2864 - protein, 153 aa, unidentified; identical to SEQ ID NO: 2755
  REGION 1..153: note = Description of Unknown: uncultivated organism with predicted taxonomy: Megasphaera sp. AM44-1BH
  REGION 1..153: note = MG15-116 RuvC-III domain

SEQ ID NO: 2865 - protein, 165 aa, unidentified; identical to SEQ ID NO: 2764
  REGION 1..165: note = Description of Unknown: uncultivated organism with predicted taxonomy: Megasphaera
  REGION 1..165: note = MG15-117 RuvC-III domain

SEQ ID NO: 2866 - protein, 153 aa, unidentified; identical to SEQ ID NO: 2781
  REGION 1..153: note = Description of Unknown: uncultivated organism with predicted taxonomy: Dialister
  REGION 1..153: note = MG15-118 RuvC-III domain

SEQ ID NO: 2867 - protein, 158 aa, unidentified; identical to SEQ ID NO: 2795
  REGION 1..158: note = Description of Unknown: uncultivated organism with predicted taxonomy: Dialister
  REGION 1..158: note = MG15-119 RuvC-III domain

SEQ ID NO: 2868 - protein, 167 aa, unidentified
  REGION 1..167: note = Description of Unknown: uncultivated organism with predicted taxonomy: Megasphaera micronuciformis
  REGION 1..167: note = MG15-120 RuvC-III domain
QDTQYISRFMLNYLQNNYELTPGNTDRKRRIIPVNGAVTAYVRKRLGISKIRENGDLHHAVDAAVIAAVTQGVVNSVSKYSKRHELQYHVDEHGNCVDLVTGELMGDAFKENHKIKGFPEPWPQFRAELEARVSENAAEAIRILNLPTYSPDEEIKTPFVSRMVRHK

SEQ ID NO: 2869 - protein, 167 aa, unidentified; identical to SEQ ID NO: 2763
  REGION 1..167: note = Description of Unknown: uncultivated organism with predicted taxonomy: Megasphaera micronuciformis
  REGION 1..167: note = MG15-121 RuvC-III domain

SEQ ID NO: 2870 - protein, 153 aa, unidentified; identical to SEQ ID NO: 2772
  REGION 1..153: note = Description of Unknown: uncultivated organism with predicted taxonomy: Dialister invisus
  REGION 1..153: note = MG15-122 RuvC-III domain

SEQ ID NO: 2871 - protein, 153 aa, unidentified; identical to SEQ ID NO: 2758
  REGION 1..153: note = Description of Unknown: uncultivated organism with predicted taxonomy: Megasphaera
  REGION 1..153: note = MG15-123 RuvC-III domain

SEQ ID NO: 2872 - protein, 153 aa, unidentified; identical to SEQ ID NO: 2751
  REGION 1..153: note = Description of Unknown: uncultivated organism with predicted taxonomy: Dialister
  REGION 1..153: note = MG15-124 RuvC-III domain

SEQ ID NO: 2873 - protein, 153 aa, unidentified; identical to SEQ ID NO: 2781
  REGION 1..153: note = Description of Unknown: uncultivated organism with predicted taxonomy: Dialister
  REGION 1..153: note = MG15-125 RuvC-III domain

SEQ ID NO: 2874 - protein, 167 aa, unidentified
  REGION 1..167: note = Description of Unknown: uncultivated organism with predicted taxonomy: Megasphaera stantonii
  REGION 1..167: note = MG15-126 RuvC-III domain
QDTQYISRFMLNYLQNNYELTPGNTDRKRRIIPVNGAVTAYVRKRLGISKIRENGDLHHAVDATVIAAVTQGVVNSVSKYSKRHELQYHVDEHGNCVDLVTGKLMGDAFKENHKIKGFPEPWPQFRAELEARVSENAAEAIRTLNLPTYSSDEEIKTPFVSRMVRHK

SEQ ID NO: 2875 - protein, 153 aa, unidentified; identical to SEQ ID NO: 2794
  REGION 1..153: note = Description of Unknown: uncultivated organism with predicted taxonomy: Dialister
  REGION 1..153: note = MG15-127 RuvC-III domain

SEQ ID NO: 2876 - protein, 153 aa, unidentified; identical to SEQ ID NO: 2794
  REGION 1..153: note = Description of Unknown: uncultivated organism with predicted taxonomy: Dialister invisus
  REGION 1..153: note = MG15-128 RuvC-III domain

SEQ ID NO: 2877 - protein, 153 aa, unidentified; identical to SEQ ID NO: 2794
  REGION 1..153: note = Description of Unknown: uncultivated organism with predicted taxonomy: Dialister
  REGION 1..153: note = MG15-129 RuvC-III domain

SEQ ID NO: 2878 - protein, 153 aa, unidentified; identical to SEQ ID NO: 2755
  REGION 1..153: note = Description of Unknown: uncultivated organism with predicted taxonomy: Dialister
  REGION 1..153: note = MG15-130 RuvC-III domain

SEQ ID NO: 2879 - protein, 153 aa, unidentified; identical to SEQ ID NO: 2797
  REGION 1..153: note = Description of Unknown: uncultivated organism with predicted taxonomy: Dialister
  REGION 1..153: note = MG15-131 RuvC-III domain

SEQ ID NO: 2880 - protein, 167 aa, unidentified; identical to SEQ ID NO: 2790
  REGION 1..167: note = Description of Unknown: uncultivated organism with predicted taxonomy: Veillonella magna
  REGION 1..167: note = MG15-132 RuvC-III domain

SEQ ID NO: 2881 - protein, 153 aa, unidentified; identical to SEQ ID NO: 2751
  REGION 1..153: note = Description of Unknown: uncultivated organism with predicted taxonomy: Dialister
  REGION 1..153: note = MG15-133 RuvC-III domain

SEQ ID NO: 2882 - protein, 167 aa, unidentified; identical to SEQ ID NO: 2766
  REGION 1..167: note = Description of Unknown: uncultivated organism with predicted taxonomy: Megasphaera micronuciformis
  REGION 1..167: note = MG15-134 RuvC-III domain

SEQ ID NO: 2883 - protein, 167 aa, unidentified; identical to SEQ ID NO: 2766
  REGION 1..167: note = Description of Unknown: uncultivated organism with predicted taxonomy: Megasphaera micronuciformis
  REGION 1..167: note = MG15-135 RuvC-III domain

SEQ ID NO: 2884 - protein, 146 aa, unidentified
  REGION 1..146: note = Description of Unknown: uncultivated organism with predicted taxonomy: Megasphaera stantonii
  REGION 1..146: note = MG15-136 RuvC-III domain
QDTQYISKYLYNYLLENLELAKGYTERKRRITPVNGAVTAYIRKRLGINKIRENGDLHHAVDAVIIACATQGIVNKVSRYSKSRELWDYEVDKETGEILQKKNKNTKDVFPEPWLNFRYELEQKVRIRPLDIPETADITKMEEPFV

SEQ ID NO: 2885 - protein, 165 aa, unidentified; identical to SEQ ID NO: 2789
  REGION 1..165: note = Description of Unknown: uncultivated organism with predicted taxonomy: Megasphaera sp. AM44-1BH
  REGION 1..165: note = MG15-137 RuvC-III domain

SEQ ID NO: 2886 - protein, 165 aa, unidentified
  REGION 1..165: note = Description of Unknown: uncultivated organism with predicted taxonomy: Megasphaera
  REGION 1..165: note = MG15-138 RuvC-III domain
QDTQYISRYLYNYLRQHIPLKEGYTDRKRRIIPVNGAVTAYVRKRLGISKIRENGDLHHAVDAVIIACVTQGVVNKISCYSKIKELRQFMTADGTIVDKETGEVLQTANPRKTDPFPEPWPKFRQELEARVSDNPAEAIAALGLPTYEGIVSISAPFVSRMPNRK

SEQ ID NO: 2887 - protein, 165 aa, unidentified
  REGION 1..165: note = Description of Unknown: uncultivated organism with predicted taxonomy: Megasphaera
  REGION 1..165: note = MG15-139 RuvC-III domain
QDTQYISRYLYNYLKRHIELKEGYTDRKRRIIPVNGAVTAYVRKRLGISKIRENGDLHHAVDAVIIACVTQGVVNKISRYSKIKELRQFMTADGMIVDKETGEVLQTANPRKTDPFPEPWPKFRQELEARVSDNPAEAIAALGLPTYEGIVNISAPFVSRMPNRK

SEQ ID NO: 2888 - protein, 165 aa, unidentified
  REGION 1..165: note = Description of Unknown: uncultivated organism with predicted taxonomy: Megasphaera sp. AM44-1BH
  REGION 1..165: note = MG15-140 RuvC-III domain
QDTQYLSTYLYNYLCHVMKLTPGCTERKRRIIAVNGAVTAYVRKRLGINKIRSNGDLHHAVDAVIIACVTQGVINRISRYSKIKELQNFQTNDGQVVDSVTGEMLTLKHVHKKDPFPEPWPHFRQELEARVGKQPQEAIAALHLPTYENVESIYTPFVSRMPNRK

SEQ ID NO: 2889 - protein, 153 aa, unidentified
  REGION 1..153: note = Description of Unknown: uncultivated organism with predicted taxonomy: Dialister
  REGION 1..153: note = MG15-141 RuvC-III domain
QDTQYISKYLYNYLRHHLVPAKGYTERKRRIISVNGAVTAYIRKRLGINKIRENGDLHHAVDAVIIACATQGIVNKVSRYSKSRELWDYEVDMETGEVLQKKNENRKDIFPEPWLNFRYELEQKVRVRPLDIPETADITEMEEPFVSHMPNRK

SEQ ID NO: 2890 - protein, 165 aa, unidentified
  REGION 1..165: note = Description of Unknown: uncultivated organism with predicted taxonomy: Megasphaera sp. AM44-1BH
  REGION 1..165: note = MG15-142 RuvC-III domain
QDTQYLSTYLYNYLCHVMKLTPGCTERKRRIIAVNGAVTAYVRKRLGINKIRSNGDLHHAVDAVIIACVTQGVINRISRYSKIKELQNFQTNDGQVVDSVTGEILTLKHVHKKDLFPEPWPHFRQELVARVGKQPQEAIAALHLPTYENVESIYTPFVSRMPNRK

SEQ ID NO: 2891 - protein, 167 aa, unidentified; identical to SEQ ID NO: 2760
  REGION 1..167: note = Description of Unknown: uncultivated organism with predicted taxonomy: Megasphaera micronuciformis
  REGION 1..167: note = MG15-143 RuvC-III domain

SEQ ID NO: 2892 - protein, 167 aa, unidentified; identical to SEQ ID NO: 2763
  REGION 1..167: note = Description of Unknown: uncultivated organism with predicted taxonomy: Megasphaera stantonii
  REGION 1..167: note = MG15-144 RuvC-III domain

SEQ ID NO: 2893 - protein, 167 aa, unidentified
  REGION 1..167: note = Description of Unknown: uncultivated organism with predicted taxonomy: Megasphaera stantonii
  REGION 1..167: note = MG15-145 RuvC-III domain
QDTQYISRFMLNYLQNNYELTPGNTDRRRRIIPVNGAVTAYVRKRLGISKIRENGDLHHAVDAAVIAAVTQGVVNSVSRYSKRHELQYHVDEHGNCVDLVTGELMGDAFKENHKIKGFPEPWAQFRAELEARVSENAAEAIRILNLPTYSPDEEIKTPFVSRMVRHK

SEQ ID NO: 2894 - protein, 171 aa, unidentified
  REGION 1..171: note = Description of Unknown: uncultivated organism with predicted taxonomy: Megasphaera stantonii
  REGION 1..171: note = MG15-146 RuvC-III domain
NDTKYISSFVKNLLDDHLEFAPWLTGKNRHVMAVNGAVTDYTRKRLGIRKIREDGDLHHAVDAAVIAIVTQGNIQKLTNYSKQIERSRAFAKNPDGSYSDRETGEILKKDELIVRMSKHFPEPWPGFRRELEARVSDHPKELLESLRLPTYTPEELDALKPPFVSRMPTRK

SEQ ID NO: 2895 - protein, 158 aa, unidentified
  REGION 1..158: note = Description of Unknown: uncultivated organism with predicted taxonomy: Selenomonas ruminantium
  REGION 1..158: note = MG15-147 RuvC-III domain
NDTRYITKLVKDLIEKYLEMAPFNTNRKRHVVAVNGAVTAYVRKRLGIAKIREDGDLHHAVDAAVIACVTEGMINRISRYSKRREILYNNKLVDEETGEIIKGKEDFPEPWPWFRKELDARTSKNPALLLREMKLPTYTEAELENLREPYVSRMPCHK

SEQ ID NO: 2896 - protein, 146 aa, unidentified
  REGION 1..146: note = Description of Unknown: uncultivated organism with predicted taxonomy: Selenomonas sp. AE3005
  REGION 1..146: note = MG15-148 RuvC-III domain
NDTKYISRFVYNLLRQHLEFSPFIGGRKRHVLAVNGSVTAYVRKRLGINKIRANGDLHHAVDAVIIACVTQGMVNIIEQYSKARELWEISAKEPFPEPWQGFRKELEARTSDNPAEELRRVQVKNYTEEELQAVKPIFVSRMPRRK

SEQ ID NO: 2897 - protein, 158 aa, unidentified
  REGION 1..158: note = Description of Unknown: uncultivated organism with predicted taxonomy: Selenomonas ruminantium
  REGION 1..158: note = MG15-149 RuvC-III domain
NDTRYITKLVKDIIEKYLEMAPFKTSRKRNVVAVNGAVTAYVRKRLGIAKIRENGDLHHAVDAAVIACVTEGMINRISRYSKRREILYNSKLVDEETGEIIKGKEDFPEPWPWFRKELDARTSKNPALLIRGLKLPTYAEEELENLHEPYVSRMPCHK

SEQ ID NO: 2898 - protein, 171 aa, unidentified
  REGION 1..171: note = Description of Unknown: uncultivated organism with predicted taxonomy: Selenomonas ruminantium
  REGION 1..171: note = MG15-150 RuvC-III domain
TDTKYIGSFVANLLRDHLDFAPWLNGRKQHVLVVNGAVTDYTRKRLGIRKIREDGDLHHAVDAAVIATVTQGNIQKLTNYSKQIERSRAFDKTANGSYADRETGEVLKKDELMVRMSKHFPEPWPGFRHELEARVSDHPKELLESLRLPTYTPEELDALKPPFVSRMPTRK

SEQ ID NO: 2899 - protein, 146 aa, unidentified
  REGION 1..146: note = Description of Unknown: uncultivated organism with predicted taxonomy: Selenomonas sp. AE3005
  REGION 1..146: note = MG15-151 RuvC-III domain
NDTKYISRFVYNLLRQHLEFSPFIGGRKRHVLAVNGSVTAYVRKRLGINKIRANGDLHHAVDAVIIACVTQGMVNIIEQYSKARELWEISAKEPFPEPWPGFRKELEARTSDNPAEELRRVQVKNYTEEELQAVKPIFVSRMPRRK

SEQ ID NO: 2900 - protein, 146 aa, unidentified
  REGION 1..146: note = Description of Unknown: uncultivated organism with predicted taxonomy: Selenomonas sp. AE3005
  REGION 1..146: note = MG15-152 RuvC-III domain
NDTKYISRFVYNLLRNHLEFNPFMGGRNRHVLAVSGGVTAYVRKRLGINKIRANGDLHHAVDAVIIACVTQGMVNIIEQYSKAKELWEISAKEPFPEPWIGFRKELEARTSDNPAEALRRMRCKNYSEEELQALKPIFVSRMPRRK

SEQ ID NO: 2901 - protein, 146 aa, unidentified
  REGION 1..146: note = Description of Unknown: uncultivated organism with predicted taxonomy: Selenomonas sp. AE3005
  REGION 1..146: note = MG15-153 RuvC-III domain
NDTKYISRFVYNLLRNHLEFSPFMGGRNRHVLAVSGGVTAYVRKRLGINKIRANGDLHHAVDAVIIACVTQGMVNIIEQYSKAKELWEISAKEPFPEPWIGFRKELEARTSDNPAEALRRMRCKNYSEEELQALNPIFVSRMPRRK

SEQ ID NO: 2902 - protein, 158 aa, unidentified
  REGION 1..158: note = Description of Unknown: uncultivated organism with predicted taxonomy: Selenomonas ruminantium
  REGION 1..158: note = MG15-154 RuvC-III domain
NDTRYITKLVKDIIEKYLEMAPFKTSRKRNVVAVNGAVTAYVRKRLGIAKIRENGDLHHAVDAAVIACVTEGMINRISRYSKRREILYNSKLVDEETGEIIKEKEDFPEPWPWFRKELDARTSKNPALLIRELKLPTYAEEELENLHEPYVSRMPCHK

SEQ ID NO: 2903 - protein, 146 aa, unidentified
  REGION 1..146: note = Description of Unknown: uncultivated organism with predicted taxonomy: Selenomonas sp. AE3005
  REGION 1..146: note = MG15-155 RuvC-III domain
NDTKYISRFVYNLLRNHLEFSPFMGGRNRHVLAVSGGVTAYVRKRLGINKIRANGDLHHAVDAVIIACVTQGMVNIIEQYSKAKELWEISAKEPFPEPWIGFRKELEARTSDNPAEALRRMRCKNYSEEELQALKPIFVSRMPRRK

SEQ ID NO: 2904 - protein, 146 aa, unidentified; identical to SEQ ID NO: 2899
  REGION 1..146: note = Description of Unknown: uncultivated organism with predicted taxonomy: Selenomonas sp. AE3005
  REGION 1..146: note = MG15-156 RuvC-III domain

SEQ ID NO: 2905 - protein, 169 aa, unidentified
  REGION 1..169: note = Description of Unknown: uncultivated organism with predicted taxonomy: Megasphaera stantonii
  REGION 1..169: note = MG15-157 RuvC-III domain
NDTKYISSFVKNLLEDHLEFAPWLTGRKRHVMAVNGAVTDYTRKRLGIRKIREDGDLHHAVDAAVIAIVTQGNIQKLTNYSKRIEHAFIKNRDGSYTHPDTGEILKKDELMAQMSRHFPEPWPGFRRELEARVSDHPKELLESLRLPTYTPEEIDALKPPFVSRMPTRK

SEQ ID NO: 2906 - protein, 158 aa, unidentified
  REGION 1..158: note = Description of Unknown: uncultivated organism with predicted taxonomy: Selenomonas ruminantium
  REGION 1..158: note = MG15-158 RuvC-III domain
NDTRYITKLVKDIIEKYLEMAPFKTTRKRNVVAVNGAVTAYVRKRLGIAKIRENGDLHHAVDAAVIACVTEGMINRISRYSKRREILYNNKLVDEETGEIIKGKEDFPEPWPWFRKELDARTGKNPALLIRDLKLPTYTEAELENLHEPYVSRMPCHK

SEQ ID NO: 2907 - protein, 158 aa, unidentified
  REGION 1..158: note = Description of Unknown: uncultivated organism with predicted taxonomy: Selenomonas ruminantium
  REGION 1..158: note = MG15-159 RuvC-III domain
NDTRYITKLVKDIIEKYLEMAPFKTSRKRNVVAVNGAVTAYVRKRLGIAKIRENGDLHHAVDAAVIACVTEGMINRISRYSKRREILYNSKLVDEETGEIIKEKEDFPEPWPWFRKELDARTSKNPALLTRELKLPTYAEEELENLHEPYVSRMPCHK

SEQ ID NO: 2908 - protein, 169 aa, unidentified
  REGION 1..169: note = Description of Unknown: uncultivated organism with predicted taxonomy: Megasphaera stantonii
  REGION 1..169: note = MG15-160 RuvC-III domain
NDTKYISSFVKNLLEDHLEFAPWLTGKKRHVMAVNGAVTDYTRKRLGIRKIREDGDLHHAVDAAVIAIVTQGNIQKLTNYSKRIEHAFIKNRDGSYTHPDTGEILKKGELMAQMSRHFPEPWPGFRRELEARVSDHPKALLESLRLPTYTPEELDALKPPFVSRMPTRK

SEQ ID NO: 2909 - protein, 170 aa, unidentified; identical to SEQ ID NO: 2786
  REGION 1..170: note = Description of Unknown: uncultivated organism with predicted taxonomy: Selenomonas sp. AE3005
  REGION 1..170: note = MG15-161 RuvC-III domain

SEQ ID NO: 2910 - protein, 153 aa, unidentified; identical to SEQ ID NO: 2751
  REGION 1..153: note = Description of Unknown: uncultivated organism with predicted taxonomy: Megasphaera
  REGION 1..153: note = MG15-162 RuvC-III domain

SEQ ID NO: 2911 - protein, 153 aa, unidentified
  REGION 1..153: note = Description of Unknown: uncultivated organism with predicted taxonomy: Megasphaera stantonii
  REGION 1..153: note = MG15-163 RuvC-III domain
QDTQYISKYLYNYLRHHLVLAKGYTERKRRIIPVNGAVTAYIRKRLGINKIRENGDLHHAVDAVIIACATQGIVNKVSRYSKSRELWDYEVDMETGEVLQKKNKNTKDVFPEPWLNFRYELEQKVRVRPLDIPETADITEMEEPFVSHMPNRK

SEQ ID NO: 2912 - protein, 153 aa, unidentified; identical to SEQ ID NO: 2762
  REGION 1..153: note = Description of Unknown: uncultivated organism with predicted taxonomy: Megasphaera
  REGION 1..153: note = MG15-164 RuvC-III domain

SEQ ID NO: 2913 - protein, 153 aa, unidentified; identical to SEQ ID NO: 2751
  REGION 1..153: note = Description of Unknown: uncultivated organism with predicted taxonomy: Megasphaera stantonii
  REGION 1..153: note = MG15-165 RuvC-III domain

SEQ ID NO: 2914 - protein, 162 aa, unidentified
  REGION 1..162: note = Description of Unknown: uncultivated organism with predicted taxonomy: Bacteroidales
  REGION 1..162: note = MG16-2 RuvC-III domain
RETQYIAKKSVEILKQICRNVWTTSGSVTDFLRHNWGYDEILHTLDFDRYKSGGLTEVIEIEHKGQKHRIERIKDWSKRLDHRHHAVDALVVACTKQSYIQRLNNLNTERDAMYQDIEAQSVEWKEKHSLLEKWIKLQPHPTVSEVTDKVDEILVSFKAGKR

SEQ ID NO: 2915 - protein, 165 aa, unidentified
  REGION 1..165: note = Description of Unknown: uncultivated organism with predicted taxonomy: Bacteroidales
  REGION 1..165: note = MG16-5 RuvC-III domain
LQSQYIAKKAAEILRQGYRNVYATSGSVTDFLRHQWGYDEILHRLNLPRYQQVEGLTEDVTYDHCGQEHQQERIKGWTKRLDHRHHAIDALTIALTQQSVIQRLNTLNNSREQMFDELGKRTDTPEYTEKRSLLEKWVDAQPHFSVQEVTDKVDGILVSFRAGKR

SEQ ID NO: 2916 - protein, 165 aa, unidentified; identical to SEQ ID NO: 2915
  REGION 1..165: note = Description of Unknown: uncultivated organism with predicted taxonomy: Bacteroidetes
  REGION 1..165: note = MG16-6 RuvC-III domain

SEQ ID NO: 2917 - protein, 150 aa, unidentified
  REGION 1..150: note = Description of Unknown: uncultivated organism with predicted taxonomy: Bacteroides
  REGION 1..150: note = MG16-7 RuvC-III domain
VQTQYISRKAMEILMQICHDVYASSGDVTAYLRRIWGYDEILQRLNIPRYREGGLTEMVTYEHNNQQHTEERIKGWSKRLDHRHHAIDALTIACTRQNIIQRLNNLNAQESSGEDKLNLDKWTMAQAHFSVREVSDAASRILISFKSGKK

SEQ ID NO: 2918 - protein, 150 aa, unidentified; identical to SEQ ID NO: 2917
  REGION 1..150: note = Description of Unknown: uncultivated organism with predicted taxonomy: Bacteroides
  REGION 1..150: note = MG16-8 RuvC-III domain

SEQ ID NO: 2919 - protein, 150 aa, unidentified; identical to SEQ ID NO: 2917
  REGION 1..150: note = Description of Unknown: uncultivated organism with predicted taxonomy: Bacteroides sp. CAG:770
  REGION 1..150: note = MG16-9 RuvC-III domain

SEQ ID NO: 2920 - protein, 150 aa, unidentified; identical to SEQ ID NO: 2917
  REGION 1..150: note = Description of Unknown: uncultivated organism with predicted taxonomy: Bacteroides
  REGION 1..150: note = MG16-10 RuvC-III domain

SEQ ID NO: 2921 - protein, 150 aa, unidentified; identical to SEQ ID NO: 2917
  REGION 1..150: note = Description of Unknown: uncultivated organism with predicted taxonomy: Bacteroides
  REGION 1..150: note = MG16-11 RuvC-III domain

SEQ ID NO: 2922 - protein, 165 aa, unidentified; identical to SEQ ID NO: 2915
  REGION 1..165: note = Description of Unknown: uncultivated organism with predicted taxonomy: Bacteroidetes
  REGION 1..165: note = MG16-12 RuvC-III domain

SEQ ID NO: 2923 - protein, 150 aa, unidentified; identical to SEQ ID NO: 2917
  REGION 1..150: note = Description of Unknown: uncultivated organism with predicted taxonomy: Bacteroides
  REGION 1..150: note = MG16-13 RuvC-III domain

SEQ ID NO: 2924 - protein, 150 aa, unidentified; identical to SEQ ID NO: 2917
  REGION 1..150: note = Description of Unknown: uncultivated organism with predicted taxonomy: Bacteroides sp. CAG:770
  REGION 1..150: note = MG16-14 RuvC-III domain

SEQ ID NO: 2925 - protein, 150 aa, unidentified
  REGION 1..150: note = Description of Unknown: uncultivated organism with predicted taxonomy: Bacteroides sp. CAG:770
  REGION 1..150: note = MG16-15 RuvC-III domain
VQTQYISRKAMEILKQVCHNVYGSSGEVTSYLRRIWGYDEILHSLDLPRYREGGMTAEVSYDHRGQTHTEERIKDWSKRLDHRHHAIDALTIACTRQSIIQRLNNLSAMTAVAGESMSLDKWTLAQPHFSVQEVSDNVSRILVSFKAGKK

SEQ ID NO: 2926 - protein, 150 aa, unidentified
  REGION 1..150: note = Description of Unknown: uncultivated organism with predicted taxonomy: Bacteroides sp. CAG:709
  REGION 1..150: note = MG16-16 RuvC-III domain
VQTQYISRKAMEILKQVCHNVYGSSGEVTSYLRRIWGYDEILHSLDLPRYREGGMTAEVSYEHRGQTHTEERIKDWSKRLDHRHHAIDALTIACTRQSVIQRLNNLSSMTAVAGEAMSLDKWTLAQPHFSVQEVSDNVSQILVSFKAGKK

SEQ ID NO: 2927 - protein, 150 aa, unidentified
  REGION 1..150: note = Description of Unknown: uncultivated organism with predicted taxonomy: Bacteroides sp. CAG:770
  REGION 1..150: note = MG16-17 RuvC-III domain
VQTQYISRKAMEILKQVCHNVYGSSGEVTSYLRRIWGYDEILHSLDLPRYREGGMTAEVSYDHRGQTHTEERIKDWSKRLDHRHHAIDALTIACTQQSIIQRLNNLSAMTAVAGESMSLDKWTLAQPHFSVQKVSDNVSRILVSFKAGKK

SEQ ID NO: 2928 - protein, 150 aa, unidentified
  REGION 1..150: note = Description of Unknown: uncultivated organism with predicted taxonomy: Bacteroides sp. CAG:770
  REGION 1..150: note = MG16-18 RuvC-III domain
VQTQYISRKAMEILNQVCRNVYGSSGDVTAYLRRIWGYDEILHSLDLPRYREGNLTGDVTYVHRGQTHTEERIKDWSKRLDHRHHAIDALTIASTRQSIIQRLNTLNAKTAIGEEQISLDKWTLAQAHFSVADVADHVADILVSFKSGKK

SEQ ID NO: 2929 - protein, 150 aa, unidentified
  REGION 1..150: note = Description of Unknown: uncultivated organism with predicted taxonomy: Bacteroides sp. CAG:770
  REGION 1..150: note = MG16-19 RuvC-III domain
VQTQYISRKAMEILNQVCRNVYGSSGDVTAYLRRIWGYDEILHSLDLPRYRDGNLTEDVTYVHRGQTHTEERIKDWSKRLDHRHHAIDALTIACTRQSIIQRLNTLNAKTAIGEEQMSLDKWTLAQAHFSVADVADHVADILVSFKSGKR

SEQ ID NO: 2930 - protein, 150 aa, unidentified
  REGION 1..150: note = Description of Unknown: uncultivated organism with predicted taxonomy: Bacteroides sp. CAG:770
  REGION 1..150: note = MG16-20 RuvC-III domain
VQTQYISRKAMEILKQVCHNVYGSSGEVTSYLRRIWGYDEILHSLDLPRYREGGMTAEVSYDHRGQTHTEERIKDWSKRLDHRHHAIDALTIACTRQSIIQRLNNLSAMSAVAGESMSLDKWTLAQPHFSVQEVSDNVSRILVSFKAGKK

SEQ ID NO: 2931 - protein, 150 aa, unidentified
  REGION 1..150: note = Description of Unknown: uncultivated organism with predicted taxonomy: Bacteroides sp. CAG:770
  REGION 1..150: note = MG16-21 RuvC-III domain
VQTQYVSRKAMEILNQVCRNVYGSSGDVTAYLRRIWGYDEILHSLDLPRYREGNLTGNVTYVHRGQTHTEERIRDWSKRLDHRHHAIDALTIACTRQSIIQRLNTLNAKTAIGEEQMSLDKWTLAQAHFSVADVADHVADILVSFKSGKK

SEQ ID NO: 2932 - protein, 150 aa, unidentified
  REGION 1..150: note = Description of Unknown: uncultivated organism with predicted taxonomy: Bacteroides sp. CAG:770
  REGION 1..150: note = MG16-22 RuvC-III domain
VQTQYISRKAMEILNQVCRNVYGSSGDVTAYLRRIWGYDEILHSLDLPRYRKGNLTGDVTYVHKGQTHTEERIKDWSKRLDHRHHAIDALTIACTRQSIIQRLNTLNAKTAIGEEQMSLDKWTLAQAHFSVADVADHVADILVSFKSGKR

SEQ ID NO: 2933 - protein, 150 aa, unidentified
  REGION 1..150: note = Description of Unknown: uncultivated organism with predicted taxonomy: Bacteroidales
  REGION 1..150: note = MG16-23 RuvC-III domain
VQTQYISRKAMEILKQVCHNVYGSSGEVTSYLRRIWGYDEILHSLDLPRYREGGMTAEVSYDHRGQTHTEERIKDWSKRLDHRHHAIDALTIACTRQSIIQRLNNRSAMTAVAGESMSLDKWTLAQPHFSVQEVSDNVSRILVSFKAGKK

SEQ ID NO: 2934 - protein, 150 aa, unidentified
  REGION 1..150: note = Description of Unknown: uncultivated organism with predicted taxonomy: Bacteroides sp. CAG:770
  REGION 1..150: note = MG16-24 RuvC-III domain
VQTQYISRKAMEILKQVCHNVYGSSGEVTSYLRRIWGYDEILHALDLPRYREGGMTAEVSYDHRGQTHTEERIKDWSKRLDHRHHAIDALTIACTRQSIIQRLNNLSAMTAVAGESMSLDKWTLAQPHFSVQEVSDNVSRILVSFKAGKK

SEQ ID NO: 2935 - protein, 150 aa, unidentified
  REGION 1..150: note = Description of Unknown: uncultivated organism with predicted taxonomy: Bacteroides sp. CAG:770
  REGION 1..150: note = MG16-25 RuvC-III domain
VQTQYISRKAMEILNQVCRNVYGSSGDVTAYLRRIWGYDEILHSLDLPRYREGNLTGDVTYVHRGQTHTEERIKDWSKRLDHRHHAIDALTIACTRQSIIQRLNTLNAKTAIGEEQISLDKWTLAQAHFSVADVADHVADILVSFKSGKK

SEQ ID NO: 2936 - protein, 150 aa, unidentified; identical to SEQ ID NO: 2925
  REGION 1..150: note = Description of Unknown: uncultivated organism with predicted taxonomy: Bacteroides
  REGION 1..150: note = MG16-26 RuvC-III domain

SEQ ID NO: 2937 - protein, 150 aa, unidentified
  REGION 1..150: note = Description of Unknown: uncultivated organism with predicted taxonomy: Bacteroides sp. CAG:770
  REGION 1..150: note = MG16-27 RuvC-III domain
VQTQYISRKAMEILDQVCRNVYGSSGDVTAYLRRIWGYDEILHSLDLPRYREGNLTGDVTYVHRGQTHTEERIKDWSKRLDHRHHAIDALTIACTRQSIIQRLNTLNAKTAIGEEQMSLDKWTLAQAHFSVADVADHVADILVSFKSGKK

SEQ ID NO: 2938 - protein, 150 aa, unidentified
  REGION 1..150: note = Description of Unknown: uncultivated organism with predicted taxonomy: Bacteroides sp. CAG:545
  REGION 1..150: note = MG16-28 RuvC-III domain
VQTQYISRKAMEILKQVCHNVYGSSGEVTSYLRRIWGYDEILHTLDLPRYREGGMTAEVSYDHRGQTHTEERIKDWSKRLDHRHHAIDALTIACTRQSIIQRLNNLSAMTAVAGESMSLDKWTLAQPHFSVQEVSDNVSRILVSFKAGKK

SEQ ID NO: 2939 - protein, 150 aa, unidentified
  REGION 1..150: note = Description of Unknown: uncultivated organism with predicted taxonomy: Bacteroides sp. CAG:709
  REGION 1..150: note = MG16-29 RuvC-III domain
VQTQYISRKAMEILKQVCHNVYGSSGEVTSYLRRIWGYDEILHSLDLPRYREGGMTAEVSYEHRGQTHTEERIKDWSKRLDHRHHAIDALTIACTRQSVIQRLNNLSSMTAVAGEAMSLDKWTLAQPHFSVQEVSDKVGGILVSFKAGKK

SEQ ID NO: 2940 - protein, 150 aa, unidentified; identical to SEQ ID NO: 2939
  REGION 1..150: note = Description of Unknown: uncultivated organism with predicted taxonomy: Bacteroides sp. CAG:709
  REGION 1..150: note = MG16-30 RuvC-III domain

SEQ ID NO: 2941 - protein, 150 aa, unidentified; identical to SEQ ID NO: 2939
  REGION 1..150: note = Description of Unknown: uncultivated organism with predicted taxonomy: Bacteroides sp. CAG:709
  REGION 1..150: note = MG16-31 RuvC-III domain

SEQ ID NO: 2942 - protein, 150 aa, unidentified
  REGION 1..150: note = Description of Unknown: uncultivated organism with predicted taxonomy: Alistipes sp. CAG:514
  REGION 1..150: note = MG16-32 RuvC-III domain
VQTQYISRKAMEILKQVCHNVYGSSGEVTSYLRRIWGYDEILHSLDLPRYREGGMTTEVSYEHRGQTHTEERIKDWSKRLDHRHHAIDALTIACTRQSIIQRLNNLSSMTATAGESMSLDKWTSAQPHFSVQEVSDNVSRILVSFKAGKK

SEQ ID NO: 2943 - protein, 150 aa, unidentified; identical to SEQ ID NO: 2942
  REGION 1..150: note = Description of Unknown: uncultivated organism with predicted taxonomy: Alistipes sp. CAG:514
  REGION 1..150: note = MG16-33 RuvC-III domain

SEQ ID NO: 2944 - protein, 150 aa, unidentified; identical to SEQ ID NO: 2925
  REGION 1..150: note = Description of Unknown: uncultivated organism with predicted taxonomy: Bacteroides sp. CAG:545
  REGION 1..150: note = MG16-34 RuvC-III domain

SEQ ID NO: 2945 - protein, 150 aa, unidentified
  REGION 1..150: note = Description of Unknown: uncultivated organism with predicted taxonomy: Bacteroides sp. CAG:770
  REGION 1..150: note = MG16-35 RuvC-III domain
VQTQYISRKAMEILNQVCRNVYGSSGDVTAYLRRIWGYDEILHSLDLPRYREGNLTGDVTYVHKGQTHTEERIKDWSKRLDHRHHAIDALTIACTRQSIIQKLNTLNAKTAIGEEQISLDKWTLAQAHFSVADVADHVADILVSFKSGKK

SEQ ID NO: 2946 - protein, 150 aa, unidentified
  REGION 1..150: note = Description of Unknown: uncultivated organism with predicted taxonomy: Bacteroides
  REGION 1..150: note = MG16-36 RuvC-III domain
VQTQYISRKAMEILKQVCHNVYGSSGEVTSYLRRIWGYDKILHSLDLPRYREGGMTAEVSYDHRGQTHTEERIKDWSKRLDHRHHAIDALTIACTRQSIIQRLNNLSAMTAVAGESMSLDKWTLAQPHFSVQEVSDNVSRILVSFKAGKK

SEQ ID NO: 2947 - protein, 150 aa, unidentified; identical to SEQ ID NO: 2925
  REGION 1..150: note = Description of Unknown: uncultivated organism with predicted taxonomy: Bacteroides sp. CAG:545
  REGION 1..150: note = MG16-37 RuvC-III domain

SEQ ID NO: 2948 - protein, 150 aa, unidentified; identical to SEQ ID NO: 2946
  REGION 1..150: note = Description of Unknown: uncultivated organism with predicted taxonomy: Bacteroides
  REGION 1..150: note = MG16-38 RuvC-III domain

SEQ ID NO: 2949 - protein, 150 aa, unidentified; identical to SEQ ID NO: 2929
  REGION 1..150: note = Description of Unknown: uncultivated organism with predicted taxonomy: Bacteroides sp. CAG:770
  REGION 1..150: note = MG16-39 RuvC-III domain

SEQ ID NO: 2950 - protein, 150 aa, unidentified
  REGION 1..150: note = Description of Unknown: uncultivated organism with predicted taxonomy: Bacteroides sp. CAG:770
  REGION 1..150: note = MG16-40 RuvC-III domain
VQTQYISRKAMEILKQVCHNVYGSSGEVTSYLRRIWGYDEILHSLDLPRYREGGMTAEVSYEHRGQTHTEERIKDWSKRLDHRHHAIDALTIACTRQSIIQRLNNLSSMTAVAGEAMSLDKWTLAQPHFSVQEVSDKVGGILVSFKAGKK

SEQ ID NO: 2951 - protein, 150 aa, unidentified
  REGION 1..150: note = Description of Unknown: uncultivated organism with predicted taxonomy: Bacteroides sp. CAG:770
  REGION 1..150: note = MG16-42 RuvC-III domain
VQTQYISRKAMEILNQVCRNVYGSSGDVTAYLRRIWGYDEILHSLDLPRYREGNLTGDVTYVHMGQTHTEERIKDWSKRLDHRHHAIDALTIACTRQSIIQRLNTLNAKTAIGEEQMSLDKWTLAQAHFSVADVSDHVADILVSFKSGKK

SEQ ID NO: 2952 - protein, 150 aa, unidentified; identical to SEQ ID NO: 2951
  REGION 1..150: note = Description of Unknown: uncultivated organism with predicted taxonomy: Bacteroides sp. CAG:770
  REGION 1..150: note = MG16-43 RuvC-III domain

SEQ ID NO: 2953 - protein, 150 aa, unidentified
  REGION 1..150: note = Description of Unknown: uncultivated organism with predicted taxonomy: Bacteroides sp. CAG:770
  REGION 1..150: note = MG16-44 RuvC-III domain
VQTQYISRKAMEILNQVCRNVYGSSGDVTAYLRRIWGYDEILHYLDLPRYREGNLTGDVTYVHRGQTHTEERIRDWSKRLDHRHHAIDALTIACTRQSIIQRLNTLNAKTAIGEEQMSLDKWTLAQAHFSVADVADHVADILVSFKSGKK

SEQ ID NO: 2954 - protein, 150 aa, unidentified; identical to SEQ ID NO: 2945
  REGION 1..150: note = Description of Unknown: uncultivated organism with predicted taxonomy: Bacteroides sp. CAG:770
  REGION 1..150: note = MG16-45 RuvC-III domain

SEQ ID NO: 2955 - protein, 150 aa, unidentified; identical to SEQ ID NO: 2925
  REGION 1..150: note = Description of Unknown: uncultivated organism with predicted taxonomy: Bacteroides sp. CAG:770
  REGION 1..150: note = MG16-46 RuvC-III domain

SEQ ID NO: 2956 - protein, 150 aa, unidentified; identical to SEQ ID NO: 2939
  REGION 1..150: note = Description of Unknown: uncultivated organism with predicted taxonomy: Bacteroides sp. CAG:709
  REGION 1..150: note = MG16-47 RuvC-III domain

SEQ ID NO: 2957 - protein, 150 aa, unidentified
  REGION 1..150: note = Description of Unknown: uncultivated organism with predicted taxonomy: Bacteroides sp. CAG:770
  REGION 1..150: note = MG16-48 RuvC-III domain
VQTQYISRKAMEILNQVCRNVYGSSGDVTAYLRRIWGYDEILHSLDLPRYREGNLTGDVTYVHRGQTHTEERIRDWSKRLDHRHHAIDALTIASTRQSIIQRLNTLNAKTAIGEEQISLDKWTLAQAHFSVADVADHVADILVSFKSGKK

SEQ ID NO: 2958 - protein, 150 aa, unidentified; identical to SEQ ID NO: 2957
  REGION 1..150: note = Description of Unknown: uncultivated organism with predicted taxonomy: Bacteroides sp. CAG:770
  REGION 1..150: note = MG16-50 RuvC-III domain

SEQ ID NO: 2959 - protein, 150 aa, unidentified; identical to SEQ ID NO: 2957
  REGION 1..150: note = Description of Unknown: uncultivated organism with predicted taxonomy: Bacteroides sp. CAG:770
  REGION 1..150: note = MG16-51 RuvC-III domain

SEQ ID NO: 2960 - protein, 150 aa, unidentified
  REGION 1..150: note = Description of Unknown: uncultivated organism with predicted taxonomy: Bacteroides sp. CAG:770
  REGION 1..150: note = MG16-52 RuvC-III domain
VQTQYISRKAMEILNQVCRNVYGSSGDVTAYLRRIWGYDEILHSLDLPRYREGNLTGDVTYVHRGQTHTEERIRDWSKRLDHRHHAIDALTIACTRQSIIQRLNTLNAKTAIGEEQMSLDKWTLAQAHFSVADVADHVADILVSFKSGKK

SEQ ID NO: 2961 - protein, 150 aa, unidentified; identical to SEQ ID NO: 2939
  REGION 1..150: note = Description of Unknown: uncultivated organism with predicted taxonomy: Bacteroides sp. CAG:709
  REGION 1..150: note = MG16-53 RuvC-III domain

SEQ ID NO: 2962 - protein, 150 aa, unidentified; identical to SEQ ID NO: 2939
  REGION 1..150: note = Description of Unknown: uncultivated organism with predicted taxonomy: Bacteroides sp. CAG:709
  REGION 1..150: note = MG16-54 RuvC-III domain

SEQ ID NO: 2963 - protein, 150 aa, unidentified
  REGION 1..150: note = Description of Unknown: uncultivated organism with predicted taxonomy: Bacteroides sp. CAG:770
  REGION 1..150: note = MG16-55 RuvC-III domain
VQTQYISRKAMDILNQVCRNVYGSSGDVTAYLRRIWGYDEILHSLDLPRYREGNLTGDVTYVHRGQTHTEERIKDWSKRLDHRHHAIDALTIASTRQSIIQRLNTLNAKAAIGEEQMSLDKWTLAQAHFSVADVADHVADILVSFKSGKK

SEQ ID NO: 2964 - protein, 150 aa, unidentified; identical to SEQ ID NO: 2925
  REGION 1..150: note = Description of Unknown: uncultivated organism with predicted taxonomy: Bacteroides sp. CAG:545
  REGION 1..150: note = MG16-56 RuvC-III domain

SEQ ID NO: 2965 - protein, 150 aa, unidentified; identical to SEQ ID NO: 2929
  REGION 1..150: note = Description of Unknown: uncultivated organism with predicted taxonomy: Bacteroides sp. CAG:770
  REGION 1..150: note = MG16-57 RuvC-III domain

SEQ ID NO: 2966 - protein, 150 aa, unidentified
  REGION 1..150: note = Description of Unknown: uncultivated organism with predicted taxonomy: Bacteroides sp. CAG:770
  REGION 1..150: note = MG16-58 RuvC-III domain
VQTQYISRKAMEILNQVCRNVYGSSGDVTAYLRRIWGYDEILHSLDLPRYREGNLTGDVTYVHRGQTHTEERIRDWSKRLDHRHHAIDALTIACTRQSIIQRLNTLNAKTAIGEEQMSLDKWTLAQAHFSVADVADHVAGILVSFKSGKR

SEQ ID NO: 2967 - protein, 150 aa, unidentified
  REGION 1..150: note = Description of Unknown: uncultivated organism with predicted taxonomy: Bacteroides sp. CAG:770
  REGION 1..150: note = MG16-59 RuvC-III domain
VQTQYISRKAMEILKQVCHNVYGSSGEVTSYLRRIWGYDEILHSLDLPRYREGGMTAEVSYDHRGQTHTEERIKDWSKRLEHRHHAIDALTIACTRQSIIQRLNNLSAMTAVAGESMSLDKWTLAQPHFSVQEVSDNVSRILVSFKAGKK

SEQ ID NO: 2968 - protein, 150 aa, unidentified; identical to SEQ ID NO: 2925
  REGION 1..150: note = Description of Unknown: uncultivated organism with predicted taxonomy: Bacteroides sp. CAG:770
  REGION 1..150: note = MG16-60 RuvC-III domain

SEQ ID NO: 2969 - protein, 150 aa, unidentified; identical to SEQ ID NO: 2939
  REGION 1..150: note = Description of Unknown: uncultivated organism with predicted taxonomy: Bacteroides sp. CAG:709
  REGION 1..150: note = MG16-61 RuvC-III domain

SEQ ID NO: 2970 - protein, 150 aa, unidentified; identical to SEQ ID NO: 2925
  REGION 1..150: note = Description of Unknown: uncultivated organism with predicted taxonomy: Bacteroides sp. CAG:770
  REGION 1..150: note = MG16-62 RuvC-III domain

SEQ ID NO: 2971 - protein, 150 aa, unidentified; identical to SEQ ID NO: 2925
  REGION 1..150: note = Description of Unknown: uncultivated organism with predicted taxonomy: Bacteroides sp. CAG:770
  REGION 1..150: note = MG16-63 RuvC-III domain

SEQ ID NO: 2972 - protein, 150 aa, unidentified; identical to SEQ ID NO: 2942
  REGION 1..150: note = Description of Unknown: uncultivated organism with predicted taxonomy: Alistipes sp. CAG:514
  REGION 1..150: note = MG16-64 RuvC-III domain

SEQ ID NO: 2973 - protein, 150 aa, unidentified
  REGION 1..150: note = Description of Unknown: uncultivated organism with predicted taxonomy: Bacteroides sp. CAG:770
  REGION 1..150: note = MG16-65 RuvC-III domain
VQTQYISRKAMEILNQVCRNVYGSSGDVTAYLRRIWGYDEILHSLDLPRYREGNLTGDVTYVHKGQTHTEERIKDWSKRLDHRHHAIDALTIASTRQSIIQRLNTLNAKTAIGEEQISLDKWTLAQAHFSVADVADHVADILVSFKSGKK

SEQ ID NO: 2974 - protein, 150 aa, unidentified
  REGION 1..150: note = Description of Unknown: uncultivated organism with predicted taxonomy: Bacteroides sp. CAG:770
  REGION 1..150: note = MG16-66 RuvC-III domain
VQTQYISRKAMEILKQVCHNVYGSSGEVTSYLRRIWGYDEILHSLDLPRYREGGMTAEVSYDHRGQTHTEERIKDWSKRLDHRHHAIDALTIACTRQSIIQRLNNLSAMTAVAGEYMSLDKWTLAQPHFSVQEVSDNVSRILVSFKAGKK

SEQ ID NO: 2975 - protein, 150 aa, unidentified; identical to SEQ ID NO: 2925
  REGION 1..150: note = Description of Unknown: uncultivated organism with predicted taxonomy: Bacteroides sp. CAG:545
  REGION 1..150: note = MG16-67 RuvC-III domain

SEQ ID NO: 2976 - protein, 150 aa, unidentified; identical to SEQ ID NO: 2930
  REGION 1..150: note = Description of Unknown: uncultivated organism with predicted taxonomy: Bacteroides sp. CAG:770
  REGION 1..150: note = MG16-68 RuvC-III domain

SEQ ID NO: 2977 - protein, 150 aa, unidentified; identical to SEQ ID NO: 2939
  REGION 1..150: note = Description of Unknown: uncultivated organism with predicted taxonomy: Bacteroides sp. CAG:709
  REGION 1..150: note = MG16-69 RuvC-III domain

SEQ ID NO: 2978 - protein, 150 aa, unidentified; identical to SEQ ID NO: 2925
  REGION 1..150: note = Description of Unknown: uncultivated organism with predicted taxonomy: Bacteroides sp. CAG:770
  REGION 1..150: note = MG16-70 RuvC-III domain

SEQ ID NO: 2979 - protein, 150 aa, unidentified; identical to SEQ ID NO: 2938
  REGION 1..150: note = Description of Unknown: uncultivated organism with predicted taxonomy: Bacteroides sp. CAG:545
  REGION 1..150: note = MG16-72 RuvC-III domain

SEQ ID NO: 2980 - protein, 150 aa, unidentified; identical to SEQ ID NO: 2925
  REGION 1..150: note = Description of Unknown: uncultivated organism with predicted taxonomy: Bacteroides sp. CAG:545
  REGION 1..150: note = MG16-73 RuvC-III domain

SEQ ID NO: 2981 - protein, 150 aa, unidentified
  REGION 1..150: note = Description of Unknown: uncultivated organism with predicted taxonomy: Bacteroides sp. CAG:770
  REGION 1..150: note = MG16-74 RuvC-III domain
VQTQYISRKAMEILNQVCRNVYGSSGDVTAYLRRIWGYDEILHSLDLPRYREGNLTGDVTYVHRGQTHTEERIRDWSKRLDHRHHAIDALTIASTRQSIIQRLNTLNANTAIGEEQISLDKWTLAQAHFSVADVADHVADILVSFKSGKK

SEQ ID NO: 2982 - protein, 150 aa, unidentified; identical to SEQ ID NO: 2939
  REGION 1..150: note = Description of Unknown: uncultivated organism with predicted taxonomy: Bacteroides sp. CAG:709
  REGION 1..150: note = MG16-75 RuvC-III domain

SEQ ID NO: 2983 - protein, 150 aa, unidentified; identical to SEQ ID NO: 2939
  REGION 1..150: note = Description of Unknown: uncultivated organism with predicted taxonomy: Bacteroides
  REGION 1..150: note = MG16-76 RuvC-III domain

SEQ ID NO: 2984 - protein, 150 aa, unidentified
  REGION 1..150: note = Description of Unknown: uncultivated organism with predicted taxonomy: Bacteroides sp. CAG:770
  REGION 1..150: note = MG16-77 RuvC-III domain
VQTQYISRKAMEILNQVCRNVYGSSGDVTAYLRRIWGYDEILHSLDLPRYREGNLTGDVTYVHRGQTHTEERIRDWSKRLDHRHHAIDALTIACTRQSIIQRLNTLNAKTAIGEEQMSLDKWTLAQAHFSVADVADHVADILVSFKSGKR

SEQ ID NO: 2985 - protein, 150 aa, unidentified; identical to SEQ ID NO: 2925
  REGION 1..150: note = Description of Unknown: uncultivated organism with predicted taxonomy: Bacteroides
  REGION 1..150: note = MG16-78 RuvC-III domain

SEQ ID NO: 2986 - protein, 150 aa, unidentified
  REGION 1..150: note = Description of Unknown: uncultivated organism with predicted taxonomy: Bacteroides sp. CAG:770
  REGION 1..150: note = MG16-79 RuvC-III domain
IQTQYISRKAMEILKQVCHNVYGSSGEVTSYLRRIWGYDEILHSLDLPRYREGGMTAEVSYDHRGQTHTEERIKDWSKRLDHRHHAIDALTIACTRQSIIQRLNNLSAMTAVAGESMSLDKWTLAQPHFSVQEVSDNVSRILVSFKAGKK

SEQ ID NO: 2987 - protein, 150 aa, unidentified; identical to SEQ ID NO: 2925
  REGION 1..150: note = Description of Unknown: uncultivated organism with predicted taxonomy: Bacteroides sp. CAG:545
  REGION 1..150: note = MG16-80 RuvC-III domain

SEQ ID NO: 2988 - protein, 150 aa, unidentified
  REGION 1..150: note = Description of Unknown: uncultivated organism with predicted taxonomy: Bacteroides
  REGION 1..150: note = MG16-81 RuvC-III domain
VQTQYISRKAMEILKQVCHNVYGSSGEVTSYLRRIWGYDVILHSLDLPRYREGGMTAEVSYEHRGQTHTEERIKDWSKRLDHRHHAIDALTIACTRQSVIQRLNNLSSMTAVAGEAMSLDKWTLAQPHFSVQEVSDKVGGILVSFKAGKK

SEQ ID NO: 2989 - protein, 150 aa, unidentified; identical to SEQ ID NO: 2930
  REGION 1..150: note = Description of Unknown: uncultivated organism with predicted taxonomy: Bacteroides sp. CAG:770
  REGION 1..150: note = MG16-82 RuvC-III domain

SEQ ID NO: 2990 - protein, 150 aa, unidentified; identical to SEQ ID NO: 2925
  REGION 1..150: note = Description of Unknown: uncultivated organism with predicted taxonomy: Bacteroides sp. CAG:545
  REGION 1..150: note = MG16-83 RuvC-III domain

SEQ ID NO: 2991 - protein, 165 aa, unidentified
  REGION 1..165: note = Description of Unknown: uncultivated organism with predicted taxonomy: Bacteroidetes
  REGION 1..165: note = MG16-84 RuvC-III domain
RQSQYIAKKAAEILRQGVRNVYATSGSVTDFLRHQWGYDNILHYLNLPRYQQVDGLTESVTYDHCGQKHQEERIKDWTKRLDHRHHAIDALTIALTQQSVIQRLNTLNASREEMKNDLGQRIDTPEYTEKRSLLEKWVDIQPHFSVQEVTDKVDGILISFRAGKR

SEQ ID NO: 2992 - protein, 150 aa, unidentified; identical to SEQ ID NO: 2925
  REGION 1..150: note = Description of Unknown: uncultivated organism with predicted taxonomy: Bacteroides
  REGION 1..150: note = MG16-85 RuvC-III domain

SEQ ID NO: 2993 - protein, 150 aa, unidentified
  REGION 1..150: note = Description of Unknown: uncultivated organism with predicted taxonomy: Bacteroides sp. CAG:545
  REGION 1..150: note = MG16-86 RuvC-III domain
VQTQYISRKAMEILKQVCHNVYGSSGEVTSYLRRIWGYDEILHSLDLPRYREGGMTAEVSYDHLGQTHTEERIKDWSKRLDHRHHAIDALTIACTRQSIIQRLNNLSAMSAVAGESMSLDKWTLAQPHFSVQEVSDNVSRILVSFKAGKK

SEQ ID NO: 2994 - protein, 150 aa, unidentified; identical to SEQ ID NO: 2993
  REGION 1..150: note = Description of Unknown: uncultivated organism with predicted taxonomy: Bacteroides
  REGION 1..150: note = MG16-87 RuvC-III domain

SEQ ID NO: 2995 - protein, 150 aa, unidentified; identical to SEQ ID NO: 2926
  REGION 1..150: note = Description of Unknown: uncultivated organism with predicted taxonomy: Bacteroides
  REGION 1..150: note = MG16-88 RuvC-III domain

SEQ ID NO: 2996 - protein, 150 aa, unidentified; identical to SEQ ID NO: 2939
  REGION 1..150: note = Description of Unknown: uncultivated organism with predicted taxonomy: Bacteroides sp. CAG:709
  REGION 1..150: note = MG16-89 RuvC-III domain

SEQ ID NO: 2997 - protein, 150 aa, unidentified; identical to SEQ ID NO: 2966
  REGION 1..150: note = Description of Unknown: uncultivated organism with predicted taxonomy: Bacteroides sp. CAG:770
  REGION 1..150: note = MG16-90 RuvC-III domain

SEQ ID NO: 2998 - protein, 150 aa, unidentified; identical to SEQ ID NO: 2966
  REGION 1..150: note = Description of Unknown: uncultivated organism with predicted taxonomy: Bacteroides sp. CAG:770
  REGION 1..150: note = MG16-91 RuvC-III domain

SEQ ID NO: 2999 - protein, 150 aa, unidentified; identical to SEQ ID NO: 2942
  REGION 1..150: note = Description of Unknown: uncultivated organism with predicted taxonomy: Alistipes sp. CAG:514
  REGION 1..150: note = MG16-92 RuvC-III domain

SEQ ID NO: 3000 - protein, 150 aa, unidentified; identical to SEQ ID NO: 2942
  REGION 1..150: note = Description of Unknown: uncultivated organism with predicted taxonomy: Alistipes sp. CAG:514
  REGION 1..150: note = MG16-93 RuvC-III domain

SEQ ID NO: 3001 - protein, 150 aa, unidentified
  REGION 1..150: note = Description of Unknown: uncultivated organism with predicted taxonomy: Bacteroides sp. CAG:545
  REGION 1..150: note = MG16-94 RuvC-III domain
VQTQYISRKAMEILKQVCHNVYGSSGEVTSYLRRIWGYDEILHSLDLPRYREGGMTAEVSYDHRGQTHTEERIKDWSKRLDHRHHAIDALTIACTRQSIIQRLNNLSAMTAVAGESMSLDKWTLAQPHFSVQEVSYNVSRILVSFKAGKK

SEQ ID NO: 3002 - protein, 150 aa, unidentified
  REGION 1..150: note = Description of Unknown: uncultivated organism with predicted taxonomy: Bacteroides sp. CAG:709
  REGION 1..150: note = MG16-95 RuvC-III domain
VQTQYISRKAMEILKQVCHNVYGSSGEVTSYLRRIWGYDEILHSLDLPRYREGGMTAEVSYEHRGQIHTEERIKDWSKRLDHRHHAIDALTIACTRQSVIQRLNNLSSMTAVAGEAMSLDKWTLAQPHFSVQEVSDKVGGILVSFKAGKK

SEQ ID NO: 3003 - protein, 150 aa, unidentified; identical to SEQ ID NO: 2925
  REGION 1..150: note = Description of Unknown: uncultivated organism with predicted taxonomy: Bacteroides
  REGION 1..150: note = MG16-96 RuvC-III domain

SEQ ID NO: 3004 - protein, 150 aa, unidentified; identical to SEQ ID NO: 2925
  REGION 1..150: note = Description of Unknown: uncultivated organism with predicted taxonomy: Bacteroides
  REGION 1..150: note = MG16-97 RuvC-III domain

SEQ ID NO: 3005 - protein, 150 aa, unidentified
  REGION 1..150: note = Description of Unknown: uncultivated organism with predicted taxonomy: Bacteroides sp. CAG:770
  REGION 1..150: note = MG16-98 RuvC-III domain
VQTQYISRKAMEILNQVCRNVYGSSGDVTAYLRRIWGYDEILHSLDLPRYREGNLTGDVTYVHRGQTHTEERIKDWSKRLDHRHHAIDALTIACTRQSIIQRLNTLNAKTAIGEEQMSLDKWTLAQAHFSVADVADHVADILVSFKSGKK

SEQ ID NO: 3006 - protein, 150 aa, unidentified; identical to SEQ ID NO: 2939
  REGION 1..150: note = Description of Unknown: uncultivated organism with predicted taxonomy: Bacteroides sp. CAG:709
  REGION 1..150: note = MG16-99 RuvC-III domain

SEQ ID NO: 3007 - protein, 150 aa, unidentified; identical to SEQ ID NO: 2939
  REGION 1..150: note = Description of Unknown: uncultivated organism with predicted taxonomy: Bacteroides sp. CAG:709
  REGION 1..150: note = MG16-100 RuvC-III domain

SEQ ID NO: 3008 - protein, 150 aa, unidentified
  REGION 1..150: note = Description of Unknown: uncultivated organism with predicted taxonomy: Bacteroides sp. CAG:545
  REGION 1..150: note = MG16-101 RuvC-III domain
VQTQYISRKAMEILKQVCHNVYGSSGEVTSYLRRIWGYDEILHSLDLPRYREGGMTSEVSYDHRGQTHTEERIKDWSKRLDHRHHAIDALTIACTRQSIIQRLNNLSAMTAVAGESMSLDKWTLAQPHFSVQEVSDNVSRILVSFKAGKK

SEQ ID NO: 3009 - protein, 150 aa, unidentified
  REGION 1..150: note = Description of Unknown: uncultivated organism with predicted taxonomy: Bacteroides sp. CAG:770
  REGION 1..150: note = MG16-102 RuvC-III domain
VQTQYISRKAMEILNQVCRNVYCSSGDVTAYLRRIWGYDEILHSLDLPRYREGNLTGDVTYVHMGQTHTEERIKDWSKRMDHRHHAIDALTIACTRQSIIQRLNTLNAKTAIGEEQMSLDKWTLAQAHFSVADVADHVADILVSFKSGKR

SEQ ID NO: 3010 - protein, 150 aa, unidentified; identical to SEQ ID NO: 2953
  REGION 1..150: note = Description of Unknown: uncultivated organism with predicted taxonomy: Bacteroides sp. CAG:770
  REGION 1..150: note = MG16-103 RuvC-III domain

SEQ ID NO: 3011 - protein, 150 aa, unidentified; identical to SEQ ID NO: 2939
  REGION 1..150: note = Description of Unknown: uncultivated organism with predicted taxonomy: Bacteroides
  REGION 1..150: note = MG16-104 RuvC-III domain

SEQ ID NO: 3012 - protein, 150 aa, unidentified
  REGION 1..150: note = Description of Unknown: uncultivated organism with predicted taxonomy: Bacteroides sp. CAG:770
  REGION 1..150: note = MG16-105 RuvC-III domain
VQTQYISRKAMEILNQVCRNVYGSSGDVTAYLRRIWGYDEILHSLDLPRYREGNLTENVTYVHRGQTHTEERIKDWSKRLDHRHHAIDALTIACTRQSIIQRLNTLNAKTAIGEEQMSLDKWTLAQTHFSVADVADHVADILVSFKSGKR

SEQ ID NO: 3013 - protein, 150 aa, unidentified; identical to SEQ ID NO: 2925
  REGION 1..150: note = Description of Unknown: uncultivated organism with predicted taxonomy: Bacteroides sp. CAG:545
  REGION 1..150: note = MG16-106 RuvC-III domain

SEQ ID NO: 3014 - protein, 150 aa, unidentified; identical to SEQ ID NO: 2925
  REGION 1..150: note = Description of Unknown: uncultivated organism with predicted taxonomy: Bacteroides sp. CAG:545
  REGION 1..150: note = MG16-107 RuvC-III domain

SEQ ID NO: 3015 - protein, 150 aa, unidentified; identical to SEQ ID NO: 2932
  REGION 1..150: note = Description of Unknown: uncultivated organism with predicted taxonomy: Bacteroides sp. CAG:770
  REGION 1..150: note = MG16-108 RuvC-III domain

SEQ ID NO: 3016 - protein, 150 aa, unidentified; identical to SEQ ID NO: 2939
  REGION 1..150: note = Description of Unknown: uncultivated organism with predicted taxonomy: Bacteroides sp. CAG:709
  REGION 1..150: note = MG16-109 RuvC-III domain

SEQ ID NO: 3017 - protein, 150 aa, unidentified; identical to SEQ ID NO: 2939
  REGION 1..150: note = Description of Unknown: uncultivated organism with predicted taxonomy: Bacteroides sp. CAG:709
  REGION 1..150: note = MG16-110 RuvC-III domain

SEQ ID NO: 3018 - protein, 150 aa, unidentified; identical to SEQ ID NO: 2925
  REGION 1..150: note = Description of Unknown: uncultivated organism with predicted taxonomy: Bacteroides sp. CAG:770
  REGION 1..150: note = MG16-113 RuvC-III domain

SEQ ID NO: 3019 - protein, 150 aa, unidentified; identical to SEQ ID NO: 2925
  REGION 1..150: note = Description of Unknown: uncultivated organism with predicted taxonomy: Bacteroides sp. CAG:545
  REGION 1..150: note = MG16-114 RuvC-III domain

SEQ ID NO: 3020 - protein, 150 aa, unidentified; identical to SEQ ID NO: 2925
  REGION 1..150: note = Description of Unknown: uncultivated organism with predicted taxonomy: Bacteroides sp. CAG:770
  REGION 1..150: note = MG16-115 RuvC-III domain

SEQ ID NO: 3021 - protein, 150 aa, unidentified; identical to SEQ ID NO: 2925
  REGION 1..150: note = Description of Unknown: uncultivated organism with predicted taxonomy: Bacteroides
  REGION 1..150: note = MG16-116 RuvC-III domain

SEQ ID NO: 3022 - protein, 150 aa, unidentified; identical to SEQ ID NO: 2973
  REGION 1..150: note = Description of Unknown: uncultivated organism with predicted taxonomy: Bacteroides sp. CAG:770
  REGION 1..150: note = MG16-118 RuvC-III domain

SEQ ID NO: 3023 - protein, 150 aa, unidentified; identical to SEQ ID NO: 2939
  REGION 1..150: note = Description of Unknown: uncultivated organism with predicted taxonomy: Bacteroides sp. CAG:709
  REGION 1..150: note = MG16-119 RuvC-III domain

SEQ ID NO: 3024 - protein, 150 aa, unidentified; identical to SEQ ID NO: 2939
  REGION 1..150: note = Description of Unknown: uncultivated organism with predicted taxonomy: Bacteroides sp. CAG:709
  REGION 1..150: note = MG16-120 RuvC-III domain

SEQ ID NO: 3025 - protein, 150 aa, unidentified
  REGION 1..150: note = Description of Unknown: uncultivated organism with predicted taxonomy: Bacteroides sp. CAG:770
  REGION 1..150: note = MG16-121 RuvC-III domain
VQTQYISRKAMEILNQVCRNVYGSSGDVTAYLRRIWGYDEILHSLDLPRYREGNLTGDVTYLHKGQTHTEERIKDWSKRLDHRHHAIDALTIASTRQSIIQRLNTLNAKTAIGEEQISLDKWTLAQAHFSVADVADHVADILVSFKSGKK

SEQ ID NO: 3026 - protein, 150 aa, unidentified
  REGION 1..150: note = Description of Unknown: uncultivated organism with predicted taxonomy: Bacteroides sp. CAG:770
  REGION 1..150: note = MG16-122 RuvC-III domain
VQTQYISRKAMEILNQVCRNVYGSSGDVTAYLRRIWGYDEILHSLDLPRYREGNLTGDVTYVHKGQTHTEERIKDWSKRLDHRHHAIDALTIASTRQSIIQRLNTLNAKTAIGEEQISLDKWTLAQAHFSVADVADHVADILVSFKSGKR

SEQ ID NO: 3027 - protein, 150 aa, unidentified; identical to SEQ ID NO: 2925
  REGION 1..150: note = Description of Unknown: uncultivated organism with predicted taxonomy: Bacteroides sp. CAG:545
  REGION 1..150: note = MG16-123 RuvC-III domain

SEQ ID NO: 3028 - protein, 150 aa, unidentified
  REGION 1..150: note = Description of Unknown: uncultivated organism with predicted taxonomy: Bacteroides sp. CAG:770
  REGION 1..150: note = MG16-126 RuvC-III domain
VQTQYISRKAMEILKQVCHNVYGSSGEVTSYLRRIWGYDEILHSLDLPRYREGGMTAEVSYDHRGQTHTEERIKDWSKRLDHRHHAIDALTIACTRQSIIQRLNNLSAMAAVAGESMSLDKWTLAQPHFSVQEVSDNVSRILVSFKAGKK

SEQ ID NO: 3029 - protein, 150 aa, unidentified; identical to SEQ ID NO: 2939
  REGION 1..150: note = Description of Unknown: uncultivated organism with predicted taxonomy: Bacteroides sp. CAG:709
  REGION 1..150: note = MG16-127 RuvC-III domain

SEQ ID NO: 3030 - protein, 150 aa, unidentified; identical to SEQ ID NO: 2925
  REGION 1..150: note = Description of Unknown: uncultivated organism with predicted taxonomy: Bacteroides sp. CAG:770
  REGION 1..150: note = MG16-128 RuvC-III domain

SEQ ID NO: 3031 - protein, 150 aa, unidentified; identical to SEQ ID NO: 2939
  REGION 1..150: note = Description of Unknown: uncultivated organism with predicted taxonomy: Bacteroides sp. CAG:709
  REGION 1..150: note = MG16-129 RuvC-III domain

SEQ ID NO: 3032 - protein, 150 aa, unidentified
  REGION 1..150: note = Description of Unknown: uncultivated organism with predicted taxonomy: Bacteroides sp. CAG:770
  REGION 1..150: note = MG16-130 RuvC-III domain
VQTQYISRKAMEILNQVCRNVYGSSGDVTAYLRRIWGYDEILHSLDLPRYRDGNLTEDVTYVHRGQTHTEERIKDWSKRLDHRHHAIDALTIACTRQSIIQRLNTLNAKTAIGEEQMSLDKWTLAQAHFSVADVADHVADILVSFKSGKK

SEQ ID NO: 3033 - protein, 150 aa, unidentified
  REGION 1..150: note = Description of Unknown: uncultivated organism with predicted taxonomy: Bacteroides sp. CAG:709
  REGION 1..150: note = MG16-131 RuvC-III domain
VQTQYISRKAMEILKQVCHNVYGSSGEVTSYLRRIWGYDEILHSLDLPRYREGGMTAEVSYEHRGQTHTEERIKDWSKRLDHRHHAIDALTIACTRQSVIQRLNNLSSMTAVAGEAMSLDKWTLAQPHFSMQEVSDKVGGILVSFKAGKK

SEQ ID NO: 3034 - protein, 150 aa, unidentified; identical to SEQ ID NO: 2925
  REGION 1..150: note = Description of Unknown: uncultivated organism with predicted taxonomy: Bacteroides
  REGION 1..150: note = MG16-132 RuvC-III domain

SEQ ID NO: 3035 - protein, 159 aa, unidentified
  REGION 1..159: note = Description of Unknown: uncultivated organism with predicted taxonomy: Bacteroidales
  REGION 1..159: note = MG16-133 RuvC-III domain
RLSQYISKKAQELLKKSCREVIATSGSVTDLIRHTWGYDTILHELNLPCYKEAGLTTFIKEENTGQQKEVIKDWTKRLDHRHHAVDALTVACTSRSIIQHINTLHASREVMRGDVKTPRKEWENNDLLQQWIKEKMPFDRQYVLQKVASILVSMKSGKK

SEQ ID NO: 3036 - protein, 166 aa, unidentified
  REGION 1..166: note = Description of Unknown: uncultivated organism
  REGION 1..166: note = MG16-134 RuvC-III domain
GETQYISREAIKILKQCCKNVNATSGAVTAILRHLWGYDEILHQLDFERYKKAGLTKIVTWESDHGKNKHTKEQIVNWTKRIDHRHHAIDALVIACTQQGFVQRINTLNADETKDLMKKQIESSGVKFEEKKDLLNKYLASLTPFSTQTVADNVDKILVSFKAGKK

SEQ ID NO: 3037 - protein, 166 aa, unidentified
  REGION 1..166: note = Description of Unknown: uncultivated organism with predicted taxonomy: Porphyromonas sp. oral taxon 278
  REGION 1..166: note = MG16-135 RuvC-III domain
GETQYISREAIRILKQCCRYVNATSGSITATLRHLWGYDEILHQLNFERYKQAGLTKIVTWESNHGKNKHSKEQIVDWSKRIDHRHHAIDALVVACTQQGFIQRINTLNADETKDLMKKQIESAGIKYEEKKVLLDKYLISLIPFKTQIVADAVNKILVSFKAGKK

SEQ ID NO: 3038 - protein, 162 aa, unidentified
  REGION 1..162: note = Description of Unknown: uncultivated organism with predicted taxonomy: Bacteroidales
  REGION 1..162: note = MG16-136 RuvC-III domain
RQSQYISKKAVEMLKLVCRNVWTTSGSITDFLRHNWGYDQILHDLNLPRYSLGGMTESVHYEHNGQKHEEERIIGWTKRLDHRHHAIDALTIASTQQSYIQRLNTLSASRDVMHAEVEKQGVQWQEKHSLLEEWTAQRPHLPYSTVRDYVDGILVSFKPGKM

SEQ ID NO: 3039 - protein, 159 aa, unidentified
  REGION 1..159: note = Description of Unknown: uncultivated organism with predicted taxonomy: Prevotella
  REGION 1..159: note = MG16-137 RuvC-III domain
RLSQYISRKAQELLRMTCRDVTVTTGEITALIRHTWGYDTILHDLNFSSYKEAGLTEIVKGEDSGRTREIIKDWSKRLDHRHHAIDALAVACTSRSIVQRINTLNASREEIRGEIKAPRKEWKDSNLLQQWIKEKMPFDRQYVLHKVASILISMKAGKK

SEQ ID NO: 3040 - protein, 162 aa, unidentified
  REGION 1..162: note = Description of Unknown: uncultivated organism
  REGION 1..162: note = MG16-138 RuvC-III domain
RQSQYISKKAVEMLKQVCRNVWTTSGSVTDFIRHQWGYDNILHDLNFKRYKDAGQTEIIISDHLGQVHQEERIKNWTKRLDHRHHAIDALTIASTKQSYIQRLNHLNSSRDKMFQELEAQSKEVKEKYSLLESWMRCRPHIPVSVVSQAIDGILVSFKTGKR

SEQ ID NO: 3041 - protein, 163 aa, unidentified
  REGION 1..163: note = Description of Unknown: uncultivated organism with predicted taxonomy: Bacteroidales
  REGION 1..163: note = MG16-139 RuvC-III domain
RQSQYIAVKAVEILQQGIRRVWTSGGSVTDFLRHQWGYDEILHTLNLPRYKQVDEMTEWVHYEHAGQEHEVERIKNWTKRLDHRHHAIDALTVALTQQSMIQRLNTLEASHDEMEKQVKEANTPYKEKKSILEKWVTEQPHFEVSEVTDKVDSILVSFRAGKR

SEQ ID NO: 3042 - protein, 126 aa, unidentified
  REGION 1..126: note = Description of Unknown: uncultivated organism with predicted taxonomy: Fibrobacter
  REGION 1..126: note = MG16-140 RuvC-III domain
RQTQYIAKKALEMLKEICYNVYATSGSVTDFIRRTWGYDEILHQLNFDRYKKGGLTELREYEHKGETHTEERIQDWSKRLDHRHHAIDALVIAMTRQSIIQRLNHLNTERDAMFQEVEKQRKDWKN

SEQ ID NO: 3043 - protein, 100 aa, unidentified
  REGION 1..100: note = Description of Unknown: uncultivated organism with predicted taxonomy: Bacteroidales
  REGION 1..100: note = MG16-141 RuvC-III domain
RQSQYIAVKAVEILQQGIRQVWTSGGSVTDFLRHQWGYDEILHTLNLPRYRKVEDLTEIVHYEHAGQEHDEERIKNWSKRIDHRHHAIDALTVALTRQAY

SEQ ID NO: 3044 - protein, 163 aa, unidentified
  REGION 1..163: note = Description of Unknown: uncultivated organism with predicted taxonomy: Bacteroidales
  REGION 1..163: note = MG16-142 RuvC-III domain
RQSQYIAVKAVEILQKGIRTVWTSGGSVTDFLRHQWGYDEILHTLNLPRYRQVDELTEMVHYEHAGQEHDEERIKNWTKRIDHRHHAIDALTVALTRQSYIQRLNTLEASHDIMEKQVKEAGTQYNEKKSILEKWVAEQPHFPVADVTENVDGILVSFRAGKR

SEQ ID NO: 3045 - protein, 162 aa, unidentified
  REGION 1..162: note = Description of Unknown: uncultivated organism with predicted taxonomy: Deminuibacter soli
  REGION 1..162: note = MG16-143 RuvC-III domain
RQSQYIAKKAVDMLKQVCRNVWTTSGSVTDFLRHNWGYDQILHDLNLPRYKEGGMTEMVHYEHNGQEHDEERIIGWTKRLDHRHHAIDALTIASTRQSYIQRLNTLYASRDAMHAEIKKQSAHWQEKHSLLEEWTKQRPHLPVSVVRDSVDGILVSFKPGKR

SEQ ID NO: 3046 - protein, 166 aa, unidentified
  REGION 1..166: note = Description of Unknown: uncultivated organism with predicted taxonomy: Bacteroidales
  REGION 1..166: note = MG16-144 RuvC-III domain
GETQYISRESIRILKQCCRNVNATSGSITATLRHLWGYDEVLHQLNFERFKNAGLTETVTWESNHGKNKHSKEQIIDWSKRVDHRHHAIDALVVACTQQGFIQRINTLNADETKDLMKRQIETVGVKYDEKKILLDKYLTSLAPFKTQTVANAASNILVSFKPGKK

SEQ ID NO: 3047 - protein, 166 aa, unidentified
  REGION 1..166: note = Description of Unknown: uncultivated organism with predicted taxonomy: Bacteroides
  REGION 1..166: note = MG16-145 RuvC-III domain
RETQYISRESIRILKQCCRNVNATSGAVTAILRHLWGYDEILHQLNFERYKNAGLTETVIWESNHGKNKHSREQIVDWSKRVDHRHHAIDALVVACTQQGFIQRINTLNADETKGLMKKQIETAGLKYVEKMALRDKYLISLTPFKTQAVANAVNNILVSFKPGKR

SEQ ID NO: 3048 - protein, 162 aa, unidentified
  REGION 1..162: note = Description of Unknown: uncultivated organism with predicted taxonomy: Bacteroidetes
  REGION 1..162: note = MG16-146 RuvC-III domain
RQSQYISKKAVEMLKQVCRNVWTTSGSVTDFVRHHWGYDNIIHDLNFQRNKNAGQTAIITYEHRGQTHQEERIKEWSKRLDHRHHAIDALTIASTKQSYIQRLNHLNTSRDAMFQELEAQSEEFKEKYSLLERWIKERPHIPVSEVTEAVDGILVSFKAGKR

SEQ ID NO: 3049 - protein, 163 aa, unidentified
  REGION 1..163: note = Description of Unknown: uncultivated organism with predicted taxonomy: Bacteroidales
  REGION 1..163: note = MG16-147 RuvC-III domain
RQSQYIAVKAVEVLQDGIRHVWTSGGSVTDFLRHQWGYDEILHTLNLPRYRQVEGLTEYVEFEHAGQKHTEERIKNWSKRIDHRHHAIDALTVALTQQGYIQRLNTLEASHDLMEKQVKEAGTHYNEKKSILEKWINEQPHFSVEDVTNVVKGILVSFRAGKR

SEQ ID NO: 3050 - protein, 163 aa, unidentified
  REGION 1..163: note = Description of Unknown: uncultivated organism with predicted taxonomy: Bacteroidales
  REGION 1..163: note = MG16-148 RuvC-III domain
RQSQYIAVKAVEVLQDGIRQVWTSGGSVTDFLRHQWGYDEILHTLNLPRYRQVEGLTEFVDFEHAGQKHTEERIKNWSKRIDHRHHAIDALTVALTQQGYIQRLNTLEASHDFMEKQVKEAGTKYNEKKSILEKWINEQPHFSVEDVTNAVDGILVSFRAGKR

SEQ ID NO: 3051 - protein, 166 aa, unidentified
  REGION 1..166: note = Description of Unknown: uncultivated organism with predicted taxonomy: Bacteroidetes
  REGION 1..166: note = MG16-149 RuvC-III domain
GETQYISREAIRILKQCCRYVNATSGSITATLRHLWGYDEILHQLNFERYKQAGLTEIVTWESNHGKNKHSKEQIVDWSKRIDHRHHAIDALVVACTQQGFIQRINTLNADETKDLMKKQIESAGIKYEEKKVLLDKYLISLIPFKTQIVADAVNKILVSFKAGKK

SEQ ID NO: 3052 - protein, 159 aa, unidentified
  REGION 1..159: note = Description of Unknown: uncultivated organism with predicted taxonomy: Bacteroidales
  REGION 1..159: note = MG16-150 RuvC-III domain
RLSQYISRKAMEILRMGCREVVATSGSITELIRHTWGYDTILHELNCPDYKEAGLTEIIIDEKTKRQREVISDWTKRLDHRHHAIDALAVACTTHSIVQHINTLHASRKIMRDEIKTSRKEWKDNYLLQQWIKEKMPFDRHYVLHKIASILVSMKAGKK

SEQ ID NO: 3053 - protein, 166 aa, unidentified; identical to SEQ ID NO: 3047
  REGION 1..166: note = Description of Unknown: uncultivated organism with predicted taxonomy: Prevotella
  REGION 1..166: note = MG16-151 RuvC-III domain

SEQ ID NO: 3054 - protein, 162 aa, unidentified
  REGION 1..162: note = Description of Unknown: uncultivated organism with predicted taxonomy: Fibrobacter
  REGION 1..162: note = MG16-152 RuvC-III domain
RQTQYISKKALEMLKEVCRNVYATSGSVTDFIRHTWGYDEILHQLNFDRYKQGGLTEAREFDNKGIIHKEERIQNWSKRLDHRHHAIDALVIAMTKQSIIQRLNHLNTERDAMFQEVDKQSAEWKNDFSLLQEWLRERKHFSTKDVADRVAEILISFKAGKR

SEQ ID NO: 3055 - protein, 163 aa, unidentified
  REGION 1..163: note = Description of Unknown: uncultivated organism with predicted taxonomy: Bacteroidales
  REGION 1..163: note = MG16-153 RuvC-III domain
RQSQYIAVKAVEILQQGIRQVWTSGGSVTDFLRHQWGYDEILHTLNLPRYRQVEDLTEMVHYEHAGQEHDEERIKNWSKRIDHRHHAIDALTVALTRQAYIQRLNTLEASHDFMEKQVKEAGTQYNEKKSILEKWILEQPHFSVDDVTQSVDSILVSFRAGKR

SEQ ID NO: 3056 - protein, 163 aa, unidentified
  REGION 1..163: note = Description of Unknown: uncultivated organism with predicted taxonomy: Bacteroidales
  REGION 1..163: note = MG16-154 RuvC-III domain
RQSQYIAVKAVEVLQDGIRQVWTSGGSVTDFLRHQWGYDEILHTLNLPRYRQVEGLTEFVDFEHAGQKHTEERIKNWSKRIDHRHHAIDALTVALTQQGYIQRLNTLEASHDFMEKQVKEAGTKYNEKKSILEKWINEQPHFSVEEVTNAVDGILVSFRAGKR

SEQ ID NO: 3057 - protein, 162 aa, unidentified
  REGION 1..162: note = Description of Unknown: uncultivated organism with predicted taxonomy: Bacteroidales
  REGION 1..162: note = MG16-155 RuvC-III domain
RQSQYISKKAVEMLKQVCRNVWTTSGSVTDFVRHQWGYDNILHDLNFKRYKDAGQTEIIVCDQMGQVRQVERIKDWTKRLDHRHHAIDALTIASTKQSYIQRLNHLNASRDQMFQELETQSNKVREEYSLLENWMKERPHIPVSVVSQIVDGILVSFKTGKR

SEQ ID NO: 3058 - protein, 163 aa, unidentified; identical to SEQ ID NO: 3044
  REGION 1..163: note = Description of Unknown: uncultivated organism with predicted taxonomy: Bacteroidales
  REGION 1..163: note = MG16-156 RuvC-III domain

SEQ ID NO: 3059 - protein, 162 aa, unidentified
  REGION 1..162: note = Description of Unknown: uncultivated organism with predicted taxonomy: Fibrobacter
  REGION 1..162: note = MG16-157 RuvC-III domain
RQTQYIAKKALEMLKEVCYNVYATSGSVTDFIRHTWGYDEILHQLNFDRYKKGGLTELREFDHKGATHTEERIQNWSKRLDHRHHAIDALVIAMTRQSIIQRLNHLNTERDAMFQEVEKQSKEWKNDYSLLQEWLRERKHFSTDEVAQKVSDILASFKAGKR

SEQ ID NO: 3060 - protein, 162 aa, unidentified
  REGION 1..162: note = Description of Unknown: uncultivated organism with predicted taxonomy: Bacteroidetes
  REGION 1..162: note = MG16-158 RuvC-III domain
RQSQYISRKAVDMLKLVCRNVWTTSGSVTDFLRHNWGYDQILHDLNLPRYKEGGMTEVVHYEHNGQEHDEERIIGWTKRMDHRHHAIDALTIACTRQSYIQRLNTLNASRDAMHAEIEKQNAYWQEKHSLLEEWTRQRPHLPVSVVRDYVDGILVSFKPGKK

SEQ ID NO: 3061 - protein, 163 aa, unidentified
  REGION 1..163: note = Description of Unknown: uncultivated organism with predicted taxonomy: Bacteroidetes
  REGION 1..163: note = MG16-159 RuvC-III domain
RQSQYIARKSVEMLQQVCKNVYSTSGSVTDFVRHQWGYDEILHDLNFERYMKAGLTSMVKQLHSGKEVEVERITNWTKRLDNRHHAVDALAIACTTQGMIQRLNTLNASREGILDELNSKEERVVDPERSMLEKWIYTQPHISYAQAKEAIDNIIISQRPNTR

SEQ ID NO: 3062 - protein, 162 aa, unidentified
  REGION 1..162: note = Description of Unknown: uncultivated organism with predicted taxonomy: Fibrobacter
  REGION 1..162: note = MG16-160 RuvC-III domain
RQTQYIAKKALEMLKNVCYNVYATSGSITDFIRHIWGYDEILHQLNFERYKKGGLTEFREYDHKGETHTEERIQNWSKRLDHRHHAIDALVIAMTRQSIIQRLNHLNTERDAMFQEVEKQSKEWKNDYSMLQEWLRERKHFSTEDVAKKVSNILVSFKAGKR

SEQ ID NO: 3063 - protein, 163 aa, unidentified
  REGION 1..163: note = Description of Unknown: uncultivated organism with predicted taxonomy: Bacteroidales
  REGION 1..163: note = MG16-161 RuvC-III domain
RQSQYIAVKAVEILQQGIRKVWTSGGSVTDFLRHQWGYDEVLHTLNLPRYHKVEGMTEFVQYEHAGQTHEEERIKNWTKRVDHRHHAIDALTVALTRQAYIQRLNTLEASHDLMEKQVKDAGTLYNEKKSILEKWINEQPHFSVDEVTRQVDGILISFRAGKR

SEQ ID NO: 3064 - protein, 163 aa, unidentified
  REGION 1..163: note = Description of Unknown: uncultivated organism with predicted taxonomy: Prevotella
  REGION 1..163: note = MG16-162 RuvC-III domain
RQSQYIARKAIEMLQQICKNVYSTSGRVTDFVRHQWGYDEILHDLNFDRYKKAGLTTMVTQLQSGDEVEVERIKDWTKRLDNRHHAVDALAIACTTQGMIQRLNTLNASRDEMQAELNDKNGSIMDPNRSMLEKWVSIQPHITYAEAKNEVDKIIISQRPNTR

SEQ ID NO: 3065 - protein, 166 aa, unidentified; identical to SEQ ID NO: 3047
  REGION 1..166: note = Description of Unknown: uncultivated organism with predicted taxonomy: Bacteroides
  REGION 1..166: note = MG16-163 RuvC-III domain

SEQ ID NO: 3066 - protein, 163 aa, unidentified
  REGION 1..163: note = Description of Unknown: uncultivated organism with predicted taxonomy: Prevotella
  REGION 1..163: note = MG16-164 RuvC-III domain
RQSQYIAKKSVEILQQVCKNVYTTSGSVTDFVRHQWGYDEILHDLNFERFKKANLTTMVKQLHSGKEVEVERIKDWTKRLDNRHHAVDALAIACTTQGMIQRLNTLNASRDAMLDELNNKEQRMIDSERSMLEKWIISQPHVSCVEAKKEIDKILISLRPNTR

SEQ ID NO: 3067 - protein, 165 aa, unidentified
  REGION 1..165: note = Description of Unknown: uncultivated organism
  REGION 1..165: note = MG16-165 RuvC-III domain
RQSQYIAVKAVEILQQGIRQVWTSGGSVTDFLRHQWGYDEILHTLNLPRYRQVEDLTEIVHYEHAGQEHDEERIKNWSKRIDHRHHAIDALTVALTRQAYIKRLNSLNAEFTREEMLKEVEEANTVYNEKKSLLEKWILEQPHFSVDDVTNSVDSILVSFRAGKR

SEQ ID NO: 3068 - protein, 162 aa, unidentified
  REGION 1..162: note = Description of Unknown: uncultivated organism with predicted taxonomy: Bacteroidales
  REGION 1..162: note = MG16-166 RuvC-III domain
RLSQYIAKKSVEMLQQICRNVYVTSGSVTDFVRHQWGYDELLHDLNFERYKKAGLTAMVKQLHSGKEVEVERIKDWTKRLDNRHHAVDALAIACTTQGMIQRLNTLNASRDDMLEELNSKKRVADPNRSMLEKWLYAQPHVSYALAKEELDKIIVSQRPNTR

SEQ ID NO: 3069 - protein, 165 aa, unidentified
  REGION 1..165: note = Description of Unknown: uncultivated organism with predicted taxonomy: Bacteroidales
  REGION 1..165: note = MG16-167 RuvC-III domain
RLSQYIAVKAVDLLQQGIRQVWASSGTVTFFMRHQWGYDEILHTLNLPRYRRVEGMTEFVDFEHAGQKHTEERIKNWSKRIDHRHHAIDALTIALTRQAYIQSLNTLSSEITREEMIEIIKETGKVYKEKTSLLDKWARELPHFSVEDVTNAVDGILVSFRAGKR

SEQ ID NO: 3070 - protein, 159 aa, unidentified
  REGION 1..159: note = Description of Unknown: uncultivated organism with predicted taxonomy: Barnesiella viscericola
  REGION 1..159: note = MG16-168 RuvC-III domain
RLSQYISRKAQELLRTACRDVIATSGSITDLIRHTWGYDTILHELNFDCYKKAGLTEFIKDEKTGKNREVIQDWTKRLDHRHHAIDALAVACTSRSIIQRINTLHASREDIRKEIKSTRKEWQENDLLQQWIKEKMPFDRKYVLHKVASILVSMKAGKK

SEQ ID NO: 3071 - protein, 163 aa, unidentified; identical to SEQ ID NO: 3044
  REGION 1..163: note = Description of Unknown: uncultivated organism with predicted taxonomy: Bacteroidales
  REGION 1..163: note = MG16-169 RuvC-III domain

SEQ ID NO: 3072 - protein, 162 aa, unidentified; identical to SEQ ID NO: 3040
  REGION 1..162: note = Description of Unknown: uncultivated organism
  REGION 1..162: note = MG16-170 RuvC-III domain

SEQ ID NO: 3073 - protein, 163 aa, unidentified; identical to SEQ ID NO: 3063
  REGION 1..163: note = Description of Unknown: uncultivated organism with predicted taxonomy: Bacteroidales
  REGION 1..163: note = MG16-171 RuvC-III domain

SEQ ID NO: 3074 - protein, 118 aa, unidentified
  REGION 1..118: note = Description of Unknown: uncultivated organism with predicted taxonomy: Prevotella brevis
  REGION 1..118: note = MG16-172 RuvC-III domain
RQSQYIAVKAVEILQQAIRQVWTSGGSVTDFLRHQWGYDEILHTLNLPRYRQVEDLTEIVHYEHAGQEHEEERIKNWSKRIDHRHHAIDALTVALTRQAYIQRLNSLNAEFTREEMLK

SEQ ID NO: 3075 - protein, 166 aa, unidentified; identical to SEQ ID NO: 3047
  REGION 1..166: note = Description of Unknown: uncultivated organism with predicted taxonomy: Bacteroides
  REGION 1..166: note = MG16-173 RuvC-III domain

SEQ ID NO: 3076 - protein, 163 aa, unidentified
  REGION 1..163: note = Description of Unknown: uncultivated organism with predicted taxonomy: Bacteroidetes
  REGION 1..163: note = MG16-174 RuvC-III domain
RQSQYIAVKAVEVLQDGIRQVWTSGGSVTDFLRHQWGYDEILHTLNLPRYRQVEGLTEFVDYEHAGQKHTEERIKNWTKRIDHRHHAIDALTVALTQQGYIQRLNTLEASHDFMEKQVKETGTHYNEKKSILEKWINEQPHFSVEDVTSAVDGILVSFRAGKR

SEQ ID NO: 3077 - protein, 159 aa, unidentified
  REGION 1..159: note = Description of Unknown: uncultivated organism with predicted taxonomy: Prevotella
  REGION 1..159: note = MG16-175 RuvC-III domain
RLSQYISRKAQELLRTACRDVIATSGSITDLIRHTWGYDTILHELNFDCYKKAGLTEFIKDEKTGKIREVIQDWTKRLDHRHHAIDALAVACTSRSIIQRINTLHASREDIRKEIKSTRKEWQENDLLQQWIKEKMPFDRKYVLHKVASILVSMKAGKK

SEQ ID NO: 3078 - protein, 163 aa, unidentified; identical to SEQ ID NO: 3056
  REGION 1..163: note = Description of Unknown: uncultivated organism with predicted taxonomy: Bacteroidales
  REGION 1..163: note = MG16-176 RuvC-III domain

SEQ ID NO: 3079 - protein, 163 aa, unidentified; identical to SEQ ID NO: 3055
  REGION 1..163: note = Description of Unknown: uncultivated organism with predicted taxonomy: Bacteroidia
  REGION 1..163: note = MG16-177 RuvC-III domain

SEQ ID NO: 3080 - protein, 163 aa, unidentified; identical to SEQ ID NO: 3044
  REGION 1..163: note = Description of Unknown: uncultivated organism with predicted taxonomy: Porphyromonas sp. oral taxon 278
  REGION 1..163: note = MG16-178 RuvC-III domain

SEQ ID NO: 3081 - protein, 162 aa, unidentified; identical to SEQ ID NO: 3040
  REGION 1..162: note = Description of Unknown: uncultivated organism
  REGION 1..162: note = MG16-179 RuvC-III domain

SEQ ID NO: 3082 - protein, 165 aa, unidentified
  REGION 1..165: note = Description of Unknown: uncultivated organism with predicted taxonomy: Bacteroidales
  REGION 1..165: note = MG16-180 RuvC-III domain
RQSQYIAVKAVEILQQGIRQVWTSGGSVTDCLRHQWGYDEILHTLNLPRYRQVEDLTEIVHYEHAGQEHDEERIKNWSKRIDHRHHAIDALTVALTRQAYITRLNSLNAEFTREEMLKEVEEANTVYNEKKSLLEKWVNEQPHFSVEDVTQSVDGILVSFRAGKR

SEQ ID NO: 3083 - protein, 163 aa, unidentified; identical to SEQ ID NO: 3044
  REGION 1..163: note = Description of Unknown: uncultivated organism with predicted taxonomy: Bacteroidales
  REGION 1..163: note = MG16-181 RuvC-III domain

SEQ ID NO: 3084 - protein, 163 aa, unidentified
  REGION 1..163: note = Description of Unknown: uncultivated organism with predicted taxonomy: Prevotella
  REGION 1..163: note = MG16-182 RuvC-III domain
RQSQYIARKSVEMLQQICKNVYFTSGSVTDFVRHQWGYDEILHDLNFERYMKAGLTSMVKQLHSGKEVEVERITNWTKRLDNRHHAVDALAIACTTQGMIQRLNTLNASREGILDELNSKEERVVDPERSMLEKWIYTQPHISYAQAKEAIDNIIISQRPNTR

SEQ ID NO: 3085 - protein, 43 aa, unidentified
  REGION 1..43: note = Description of Unknown: uncultivated organism with predicted taxonomy: Prevotella
  REGION 1..43: note = MG16-183 RuvC-III domain
RLSPYIARKSVEMLQQICKNVYSTSGSVTDFVRHQWGYDEILH

SEQ ID NO: 3086 - protein, 163 aa, unidentified
  REGION 1..163: note = Description of Unknown: uncultivated organism with predicted taxonomy: Bacteroidales
  REGION 1..163: note = MG16-184 RuvC-III domain
RQSQYIAVKAVEILQKGIRTVWTSGGSVTDFLRHQWGYDEILHTLNLPRYRQVDELTEMVHYEHAGQEHDEERIKNWTKRIDHRHHAIDALTVALTRQSYIQRLNTLEASHDIMEKQVKETGTQYNEKKSILEKWVAEQPHFPVADVTENVDGILVSFRAGKR

SEQ ID NO: 3087 - protein, 162 aa, unidentified; identical to SEQ ID NO: 3062
  REGION 1..162: note = Description of Unknown: uncultivated organism with predicted taxonomy: Fibrobacter
  REGION 1..162: note = MG16-185 RuvC-III domain

SEQ ID NO: 3088 - protein, 163 aa, unidentified; identical to SEQ ID NO: 3066
  REGION 1..163: note = Description of Unknown: uncultivated organism with predicted taxonomy: Prevotella
  REGION 1..163: note = MG16-186 RuvC-III domain

SEQ ID NO: 3089 - protein, 163 aa, unidentified
  REGION 1..163: note = Description of Unknown: uncultivated organism with predicted taxonomy: Bacteroidales
  REGION 1..163: note = MG16-187 RuvC-III domain
RQSQYIAVKAVEVLQDGIRQVWTSGGSVTDFLRHQWGYDEILHTLNLPRYHQVEGLTEFVDFEHAGQKHTEERIKNWSKRIDNRHHAIDALTVALTQQGYIQRLNTLEASHDFMEKQVKEAGTKYNEKKSILEKWINEQPHFSVEDVTNAVDGILVSFRAGKR

SEQ ID NO: 3090 - protein, 163 aa, unidentified
  REGION 1..163: note = Description of Unknown: uncultivated organism
  REGION 1..163: note = MG16-188 RuvC-III domain
RQSQYIAKKSVEMLQLVCKNVYVTSGSVTDFVRHQWGYDELLHDLNFERFKKAGLTTMVKQLHSGEEVEVERIANWTKRLDNRHHAVDALAIACTTQSMIQRLNTLNASRDDMLEELNSKDQRLVDPERSMLEKWVFIQPHITYADAKKEIDKIVISQRPNTR

SEQ ID NO: 3091 - protein, 163 aa, unidentified; identical to SEQ ID NO: 3090
  REGION 1..163: note = Description of Unknown: uncultivated organism
  REGION 1..163: note = MG16-189 RuvC-III domain

SEQ ID NO: 3092 - protein, 163 aa, unidentified
  REGION 1..163: note = Description of Unknown: uncultivated organism with predicted taxonomy: Prevotella ruminicola
  REGION 1..163: note = MG16-190 RuvC-III domain
RQSQYIAKKSVEMLQQVCKNVYTTSGSVTDFVRHQWGYDELLHELNFERFKKAGLTAMVKQLQSGKEVEVERIKDWTKRLDNRHHAVDALAIACTTQGMIQRLNTLNASRADMLEELSSNDRRLVDPDRSMLEKWIYVQPHISYAEAKNEIDKIVISQRPNTR

SEQ ID NO: 3093 - protein, 163 aa, unidentified; identical to SEQ ID NO: 3089
  REGION 1..163: note = Description of Unknown: uncultivated organism with predicted taxonomy: Labilibaculum filiforme
  REGION 1..163: note = MG16-191 RuvC-III domain

SEQ ID NO: 3094 - protein, 163 aa, unidentified
  REGION 1..163: note = Description of Unknown: uncultivated organism with predicted taxonomy: Bacteroidales
  REGION 1..163: note = MG16-192 RuvC-III domain
RQSQYIAKKSVEILLQVCKNVYTTSGSVTDFVRHQWGYDELLHELNFERFKKAGLTAMVKQLHSGKEVEVERIKDWTKRLDNRHHAVDALAIACTTQGMIQRLNTLNASRDVILEELNSNDQRLVDPDRSMLEKWIYVQPHISYAEAKNEVDKIVISQRPNTR

SEQ ID NO: 3095 - protein, 162 aa, unidentified
  REGION 1..162: note = Description of Unknown: uncultivated organism
  REGION 1..162: note = MG16-193 RuvC-III domain
RQTQYIAKKAIEMLKDICYNVYATSGSVTDFIRHTWGYDEILHQLNFDRYKKGGLTELREYDHKGETHTEERIQNWSKRLDHRHHAIDALVIAMTRQSIIQRLNHLNTERDAMFQEVEKQSKEWKNDYSMLQEWLRERKHFPTEDVAKKVSDILVSFKAGKR

SEQ ID NO: 3096 - protein, 47 aa, unidentified
  REGION 1..47: note = Description of Unknown: uncultivated organism with predicted taxonomy: Sediminibacterium sp. C3
  REGION 1..47: note = MG16-194 RuvC-III domain
RLSQYIAKKSVEMLQQVCRNVYSTSGSVTDFVRHQWGYDELLHDLNF

SEQ ID NO: 3097 - protein, 161 aa, unidentified
  REGION 1..161: note = Description of Unknown: uncultivated organism with predicted taxonomy: Bacteroides
  REGION 1..161: note = MG16-195 RuvC-III domain
RLSQYISKKAMEILSFGCRDVVATSGSITAIIRHAWGWDTILEELNIQTYRNANLTEVIEVKSKGQNKKMETIKNWTKRLDNRHHAIDALVVACTSSSIIQRINTLNASKQKMRDEITSARKKWDENNILTQWIREKNPLNRKEVLEHVSSIFISMKAGKK

SEQ ID NO: 3098 - protein, 163 aa, unidentified; identical to SEQ ID NO: 3094
  REGION 1..163: note = Description of Unknown: uncultivated organism with predicted taxonomy: Gammaproteobacteria bacterium
  REGION 1..163: note = MG16-196 RuvC-III domain

SEQ ID NO: 3099 - protein, 159 aa, unidentified
  REGION 1..159: note = Description of Unknown: uncultivated organism with predicted taxonomy: Bacteroides
  REGION 1..159: note = MG16-197 RuvC-III domain
RLSQYISKKAQEILKTACREVVATSGTITDLIRHTWGYDTILHELNFPNYKEAGLTSFVTDEKTNQQREVIKDWSKRLDHRHHAVDALAVACTSRSIVQHINTLHASRDEMRKEVNSARKDWKDNNLLQQWIMEKKPFDRQYVLHKVASILVSMKAGKR

SEQ ID NO: 3100 - protein, 105 aa, unidentified
  REGION 1..105: note = Description of Unknown: uncultivated organism with predicted taxonomy: Bacteroidales
  REGION 1..105: note = MG16-198 RuvC-III domain
RQSQYIAKKSVDMLQQVCKNVYTTSGSVTDFVRHQWGYDELLHELNFERFKKAGLTAMVKQLHSGKEIEVERIKDWTKRLDNRHHAVDALAIACTTQGMIQRLNT

SEQ ID NO: 3101 - protein, 163 aa, unidentified
  REGION 1..163: note = Description of Unknown: uncultivated organism with predicted taxonomy: Gammaproteobacteria bacterium
  REGION 1..163: note = MG16-199 RuvC-III domain
RQSQYIAKKSVDMLQQVCKNVYTTSGSVTDFVRHQWGYDELLHELNFERFKKAGLTAMVKQLHSGKEVEVERIKDWTKRLDNRHHAVDALAIACTTQGMIQRLNTLNASRDVILEELNSNDQRLVDPDRSMLEKWIYVQPHISYAEAKNEVDKIVISQRPNTR

SEQ ID NO: 3102 - protein, 162 aa, unidentified
  REGION 1..162: note = Description of Unknown: uncultivated organism with predicted taxonomy: Fibrobacter
  REGION 1..162: note = MG16-200 RuvC-III domain
RQTQYIAKKALEMLKDVCYNVYATSGSVTDFIRHTWGYDEILHQLNFDRYKKGGLTELREYDHKGETHTEERIQDWSKRLDHRHHAIDALVIAMTRQSIIQRLNHLNTERDAMFQEVEKQSKEWKNDYSMLQEWLRERKHFSTEDVAKKVSDILVSFKAGKR

SEQ ID NO: 3103 - protein, 166 aa, unidentified
  REGION 1..166: note = Description of Unknown: uncultivated organism with predicted taxonomy: Prevotella
  REGION 1..166: note = MG16-201 RuvC-III domain
GETQYISREAIRILKQCCRYVNATSGSITATLRHLWGYDEILHQLNFERYKQAGLTEIVTWESNHGKNKHSKEQIVDWSKRIDHRHHAIDALVVACTQQGFIQRINTLNADETKDLMKKQIEASGIKYEEKKVLLDKYLTSLIPFKTQIVADAVNKILVSFKAGKK

SEQ ID NO: 3104 - protein, 163 aa, unidentified
  REGION 1..163: note = Description of Unknown: uncultivated organism
  REGION 1..163: note = MG16-202 RuvC-III domain
RQSQYIAKKAVEILKDGIREVWTSGGSVTDFLRHQWGYDEILHTLNLPRYQQVEGLTETIQYEHAGQTHEEERIKNWTKRIDHRHHAIDALTVALTQQAYIQRLNTLEASHDHMQKVVNEAGTQYNEKKSLLEKWVAEQPHFSVADVTDKVDGILVSFRAGKR

SEQ ID NO: 3105 - protein, 159 aa, unidentified
  REGION 1..159: note = Description of Unknown: uncultivated organism with predicted taxonomy: Bacteroides sp. CAG:144
  REGION 1..159: note = MG16-203 RuvC-III domain
RLSQYITKKAHELLRTACRDVLATSGSITDLTRHVWGYDTILHELNLPRYKSAGITEVITDERTGREQEVIRDWNKRLDHRHHAIDALAVACTSRSMIQRINTLHASREEMREEVSSPRKDWKENDLLRQWIKEQRPFERQYVLHKVESILVSMKAGKK

SEQ ID NO: 3106 - protein, 163 aa, unidentified
  REGION 1..163: note = Description of Unknown: uncultivated organism with predicted taxonomy: Bacteroidales
  REGION 1..163: note = MG16-204 RuvC-III domain
RQSQYIAKKSVEMLQLVCKNVYTTSGSVTDFVRHQWGYDELLHELNFERFKKAGLTAMVKQMHSGKEIEVERIKDWTKRLDNRHHAVDALAIACTTQGMIQRLNTLNASREEMLEELSINDQRLIDPERSMLEKWLFVQPHISYAEAKNEINKIVISQRPNTR

SEQ ID NO: 3107 - protein, 162 aa, unidentified; identical to SEQ ID NO: 3102
  REGION 1..162: note = Description of Unknown: uncultivated organism with predicted taxonomy: Fibrobacter
  REGION 1..162: note = MG16-205 RuvC-III domain

SEQ ID NO: 3108 - protein, 163 aa, unidentified
  REGION 1..163: note = Description of Unknown: uncultivated organism with predicted taxonomy: Gammaproteobacteria bacterium
  REGION 1..163: note = MG16-206 RuvC-III domain
RQSQYIAKKSVEILQQVCKDVYTTSGSVTDFVRHQWGYDELLHELNFERFKKAGLTAMVKQLHSGKEVEVERIKDWTKRLDNRHHAVDALAIACTTQGMIQRLNTLNASRDVILEELNSNDQRLVDPDRSMLEKWIYVQPHISYAEAKNEVDKIVISQRPNTR

SEQ ID NO: 3109 - protein, 159 aa, unidentified
  REGION 1..159: note = Description of Unknown: uncultivated organism
  REGION 1..159: note = MG16-207 RuvC-III domain
RLSQYITKKAHELLRTACRDVLATSGSITDLTRHVWGYDTILHELNLPRYKSAGITEVITDERTGREQEVIKDWNKRLDHRHHAIDALAVACTSRSMIQRINTLHASREEMREEVSSPRRDWKENDLLRQWIKEQLPFERQYVLHKVESILVSMKAGKK

SEQ ID NO: 3110 - protein, 163 aa, unidentified
  REGION 1..163: note = Description of Unknown: uncultivated organism
  REGION 1..163: note = MG16-208 RuvC-III domain
RQSQMIARKSFEVLRQICHNVYATSGSVTDFLRHQWGYDNILHDLNFERFSKSDNIEEITIVGRDGIETKVKRIKGWNKRIDNRHHAVDALTIALTTQSMIQRLNTLYASRDAMHGDIEASKQKFNEKKSILEKWTAIQPHFTYSQASEAISRILISQRGGKR

SEQ ID NO: 3111 - protein, 166 aa, unidentified; identical to SEQ ID NO: 3103
  REGION 1..166: note = Description of Unknown: uncultivated organism with predicted taxonomy: Chryseobacterium vrystaatense
  REGION 1..166: note = MG16-209 RuvC-III domain

SEQ ID NO: 3112 - protein, 162 aa, unidentified
  REGION 1..162: note = Description of Unknown: uncultivated organism
  REGION 1..162: note = MG16-210 RuvC-III domain
RQSQYISKKAIEMLKQICRYVWATSGSVTDFIRHNWGYDKILHDLNFERYKSGGLTEMVHYDHQGQEHDEERIKEWTKRLDHRHHALDALTIASTQQGYIQRLNHLNTERDQMFAELEMQREEYKGRYSLLEEWIKERPHISVEDAKVAVDQIAVSFKAGKK

SEQ ID NO: 3113 - protein, 166 aa, unidentified
  REGION 1..166: note = Description of Unknown: uncultivated organism with predicted taxonomy: Prevotella
  REGION 1..166: note = MG16-211 RuvC-III domain
GETQYISRESIRILKQCCRTVNATSGKITAILRHLWGYDEILHQLNFERYKKAGLTETKTWESNHGKNKHSKEQIVDWSKRIDHRHHAIDALVVACTQQGVIQRINTLNADETKDLMKKQIESANIKYEEKKVLLDKYLTSLVPFNTKTVAEAVNKILVSFKAGKK

SEQ ID NO: 3114 - protein, 163 aa, unidentified; identical to SEQ ID NO: 3064
  REGION 1..163: note = Description of Unknown: uncultivated organism with predicted taxonomy: Prevotella ihumii
  REGION 1..163: note = MG16-212 RuvC-III domain

SEQ ID NO: 3115 - protein, 162 aa, unidentified
  REGION 1..162: note = Description of Unknown: uncultivated organism with predicted taxonomy: Treponema pedis
  REGION 1..162: note = MG16-213 RuvC-III domain
RQSQYISKKAVEMLKQVCRYVWTTSGSVTDFLRQTWGYNNILHDLNFERYKSGGLTEIRQYDHKGQEQSKECIIGWTKRLDHRHHALDALTIASTQQGYIQRLNHLNTERDEMFAELKKQSEEHKEKHSLLEDWMKERPHLSVEAVKEAVDQIAVSFKAGKK

SEQ ID NO: 3116 - protein, 163 aa, unidentified
  REGION 1..163: note = Description of Unknown: uncultivated organism with predicted taxonomy: Sediminibacterium sp. C3
  REGION 1..163: note = MG16-214 RuvC-III domain
RQSQYIAKKSVEMLLQVCKNVYTTSGSVTDFVRHQWGYDELLHDLNFDRFKKAGLTAMVKQLHSGKEVEVERIKDWTKRLDNRHHAVDALTIACTTQGMIQRLNTLNASREDILEELNSKDQRLVDPERSMLEKWIVVQPHISYSEAKNEIDKIVISQRPNTR

(The sequence listing continues in the following parts.)

1-104. (canceled)

105. A method of editing a TRACT locus in a cell, comprising contacting to said cell:
(a) a ribonucleic acid- (RNA-) guided endonuclease or a nucleic acid encoding said RNA-guided endonuclease; and
(b) an engineered guide RNA or a nucleic acid encoding said engineered guide RNA, wherein said engineered guide RNA is configured to form a complex with said RNA-guided endonuclease and said engineered guide RNA comprises a spacer sequence configured to hybridize to a region of said TRAC locus,
wherein said spacer sequence comprises a sequence having at least 85% sequence identity to at least 18 consecutive nucleotides of any one of SEQ ID NOs: 5950-5965.

106. The method of claim 105, wherein said RNA-guided endonuclease is a class II, type II Cas endonuclease.

107. The method of claim 105, wherein said RNA-guided endonuclease comprises a sequence having at least 75% sequence identity to any one of SEQ ID NOs: 1-1826, 5718-5846, or 6257.

108. The method of claim 105, wherein said RNA-guided endonuclease comprises a RuvCIII domain comprising a sequence having at least 75% sequence identity to any one of SEQ ID NOs: 2242, 2244, 1827-2241, 2243, or 2245-3637.

109. The method of claim 105, wherein said RNA-guided endonuclease further comprises an HNH domain.

110. The method of claim 109, wherein said HNH domain comprises a sequence with at least 80% sequence identity to any one of SEQ ID NOs: 3638-5460.

111. The method of claim 105, wherein said engineered guide RNA comprises a sequence configured to bind said RNA-guided endonuclease.

112. The method of claim 111, wherein said sequence configured to bind said RNA-guided endonuclease comprises a sequence having at least 80% sequence identity to any one of SEQ ID NOs: 5461-5511, 5862-5886, 5888-5890, 5892-5893, 5895-5896, or 6279-6301.

113. The method of claim 105, wherein said cell is a human cell.

114. The method of claim 105, wherein said cell is a peripheral blood mononuclear cell (PBMC), a T-cell, a natural killer (NK) cell, a hematopoietic stem cell (HSCT), a B-cell, or any combination thereof.

115. The method of claim 105, wherein said contacting further comprises transfecting said cell with said nucleic acid encoding said RNA-guided endonuclease and said nucleic acid encoding said engineered guide RNA.

116. The method of claim 105, wherein said spacer sequence comprises a sequence having at least 85% sequence identity to 18-22 consecutive nucleotides of any one of SEQ ID NOs: 5950-5965.

117. The method of claim 105, wherein said spacer sequence comprises a sequence having at least 90% sequence identity to at least 18 consecutive nucleotides of any one of SEQ ID NOs: 5950-5965.

118. The method of claim 105, further comprising contacting to said cell with a deoxyribonucleic acid (DNA) repair template comprising from 5′ to 3′: a first homology arm comprising a sequence of at least 20 nucleotides 5′ to said region of said TRACT locus, a synthetic DNA sequence of at least 10 nucleotides, and a second homology arm comprising a sequence of at least 20 nucleotides 3′ to said region of said TRAC locus.

119. The method of claim 118, wherein said cell is a PBMC or a T-cell.

120. The method of claim 118, wherein said contacting to said cell further comprises transfecting said cell with said nucleic acid encoding said RNA-guided endonuclease and said nucleic acid encoding said engineered guide RNA.

121. The method of claim 118, wherein said DNA repair template is encoded by a vector.

122. The method of claim 121, wherein said vector is a plasmid, a minicircle, a CELiD, or a viral vector.

123. The method of claim 122, wherein said vector is a viral vector, wherein said viral vector is an adeno-associated virus (AAV) derived virion or a lentivirus.

124. The method of claim 108, wherein said RuvCIII domain comprises a sequence having at least 75% sequence identity to SEQ ID NO: 2242 or SEQ ID NO: 2244.

125. The method of claim 124, wherein said RuvCIII domain comprises a sequence having at least 90% sequence identity to SEQ ID NO: 2242 or SEQ ID NO: 2244.

126. The method of claim 125, wherein said RuvCIII domain comprises a sequence of SEQ ID NO: 2242 or SEQ ID NO: 2244.

127. The method of claim 110, wherein said HNH domain comprises a sequence having at least 80% sequence identity to SEQ ID NO: 4061 or SEQ ID NO: 4063.

128. The method of claim 107, wherein said RNA-guided endonuclease comprises a sequence having at least 75% sequence identity to SEQ ID NO: 421 or SEQ ID NO: 423.

129. The method of claim 128, wherein said RNA-guided endonuclease comprises a sequence having at least 90% sequence identity to SEQ ID NO: 421 or SEQ ID NO: 423.

130. The method of claim 129, wherein said RNA-guided endonuclease comprises a sequence of SEQ ID NO: 421 or SEQ ID NO: 423.

131. The method of claim 130, wherein said spacer sequence comprises a sequence having at least 18 consecutive nucleotides of any one of SEQ ID NOs: 5950-5965.

132. The method of claim 131, wherein said spacer sequence comprises a sequence having at least 18 consecutive nucleotides of any one of SEQ ID NOs: 5955 or 5963.
